United States Patent Application Publication US 2022/0213167 A1 - sequence listing, part 5

SEQ ID NO: 87161 - protein, 12 aa, Homo sapiens
  CDR3 for alpha chain variable domain of TCR clone 43581 (TRAV12-3, TRAJ20)
CAMVRGDYKLSF

SEQ ID NO: 87162 - protein, 15 aa, Homo sapiens
  CDR3 for beta chain variable domain of TCR clone 43581 (TRBV7-3, TRBJ2-1)
CASSPTGGGEVEQFF

SEQ ID NO: 87163 - protein, 17 aa, Homo sapiens
  CDR3 for alpha chain variable domain of TCR clone 43582 (TRAV13-1, TRAJ31)
RAPRDRLMFGDGTQLVV

SEQ ID NO: 87164 - protein, 12 aa, Homo sapiens
  CDR3 for beta chain variable domain of TCR clone 43582 (TRBV7-9, TRBJ2-7)
CASSLEGYEQYF

SEQ ID NO: 87165 - protein, 16 aa, Homo sapiens
  CDR3 for alpha chain variable domain of TCR clone 43583 (TRAV12-2, TRAJ10)
CAVNRVLTGGGNKLTF

SEQ ID NO: 87166 - protein, 16 aa, Homo sapiens
  CDR3 for beta chain variable domain of TCR clone 43583 (TRBV12-5, TRBJ2-5)
CASGPRTSGNQGTQYF

SEQ ID NO: 87167 - protein, 16 aa, Homo sapiens
  CDR3 for alpha chain variable domain of TCR clone 43584 (TRAV17, TRAJ21)
CATDAETTSTNFTLDL

SEQ ID NO: 87168 - protein, 15 aa, Homo sapiens
  CDR3 for beta chain variable domain of TCR clone 43584 (TRBV4-1, TRBJ1-4)
CASSDTGGTNEKLFF

SEQ ID NO: 87169 - protein, 13 aa, Homo sapiens
  CDR3 for alpha chain variable domain of TCR clone 43585 (TRAV21, TRAJ20)
CAVGLRVDYKLSF

SEQ ID NO: 87170 - protein, 13 aa, Homo sapiens
  CDR3 for beta chain variable domain of TCR clone 43585 (TRBV12-5, TRBJ2-3)
CASGDRQSDTQYF

SEQ ID NO: 87171 - protein, 14 aa, Homo sapiens
  CDR3 for alpha chain variable domain of TCR clone 43586 (TRAV9-2, TRAJ39)
CALYIYSAGNMLTF

SEQ ID NO: 87172 - protein, 15 aa, Homo sapiens
  CDR3 for beta chain variable domain of TCR clone 43586 (TRBV9, TRBJ1-6)
CASSVAGTRDSPLHF

SEQ ID NO: 87173 - protein, 12 aa, Homo sapiens
  CDR3 for alpha chain variable domain of TCR clone 43587 (TRAV1-1, TRAJ9)
CAVDTGGFKTTF

SEQ ID NO: 87174 - protein, 14 aa, Homo sapiens
  CDR3 for beta chain variable domain of TCR clone 43587 (TRBV7-8, TRBJ2-5)
CASSATGGQETQYF

SEQ ID NO: 87175 - protein, 16 aa, Homo sapiens
  CDR3 for alpha chain variable domain of TCR clone 43588 (TRAV23/DV6, TRAJ9)
CAASIGGNTGGFKTIF

SEQ ID NO: 87176 - protein, 13 aa, Homo sapiens
  CDR3 for beta chain variable domain of TCR clone 43588 (TRBV20-1, TRBJ1-1)
CSAGTVGNTEAFF

SEQ ID NO: 87177 - protein, 14 aa, Homo sapiens
  CDR3 for alpha chain variable domain of TCR clone 43589 (TRAV1-2, TRAJ8)
CAVGEDTGFQKLVF

SEQ ID NO: 87178 - protein, 15 aa, Homo sapiens
  CDR3 for beta chain variable domain of TCR clone 43589 (TRBV19, TRBJ1-2)
CASSVGQVLNYGYTF

SEQ ID NO: 87179 - protein, 12 aa, Homo sapiens
  CDR3 for alpha chain variable domain of TCR clone 43590 (TRAV35, TRAJ49)
CAGWNTGNQFYF

SEQ ID NO: 87180 - protein, 16 aa, Homo sapiens
  CDR3 for beta chain variable domain of TCR clone 43590 (TRBV5-1, TRBJ2-2)
SASSLWDTTNTGELFF

SEQ ID NO: 87181 - protein, 15 aa, Homo sapiens
  CDR3 for alpha chain variable domain of TCR clone 43591 (TRAV38-1, TRAJ37)
CAFIFGCGNTGKLIF

SEQ ID NO: 87182 - protein, 12 aa, Homo sapiens
  CDR3 for beta chain variable domain of TCR clone 43591 (TRBV7-9, TRBJ2-7)
CASSLEGYEQYF

SEQ ID NO: 87183 - protein, 14 aa, Homo sapiens
  CDR3 for alpha chain variable domain of TCR clone 43592 (TRAV8-4, TRAJ13)
CAVTLSGGYQKVTF

SEQ ID NO: 87184 - protein, 14 aa, Homo sapiens
  CDR3 for beta chain variable domain of TCR clone 43592 (TRBV7-2, TRBJ1-2)
RASSQTGSTYGYTF

SEQ ID NO: 87185 - protein, 14 aa, Homo sapiens
  CDR3 for alpha chain variable domain of TCR clone 43593 (TRAV2, TRAJ9)
CAVEDRRGGFKTIF

SEQ ID NO: 87186 - protein, 16 aa, Homo sapiens
  CDR3 for beta chain variable domain of TCR clone 43593 (TRBV7-3, TRBJ2-2)
CASSLKRGTLSGELFF

SEQ ID NO: 87187 - protein, 14 aa, Homo sapiens
  CDR3 for alpha chain variable domain of TCR clone 43594 (TRAV3, TRAJ34)
CAVRAPGNTDKLIS

SEQ ID NO: 87188 - protein, 17 aa, Homo sapiens
  CDR3 for beta chain variable domain of TCR clone 43594 (TRBV20-1, TRBJ2-7)
CSAAPGLARGISYEQYF

SEQ ID NO: 87189 - protein, 13 aa, Homo sapiens
  CDR3 for alpha chain variable domain of TCR clone 43595 (TRAV30, TRAJ34)
CGAVGYNTDKLIF

SEQ ID NO: 87190 - protein, 16 aa, Homo sapiens
  CDR3 for beta chain variable domain of TCR clone 43595 (TRBV7-9, TRBJ1-2)
CASSLGFSSGEDGYTF

SEQ ID NO: 87191 - protein, 12 aa, Homo sapiens
  CDR3 for alpha chain variable domain of TCR clone 43596 (TRAV13-1, TRAJ53)
AASGGSNYKLTF

SEQ ID NO: 87192 - protein, 15 aa, Homo sapiens
  CDR3 for beta chain variable domain of TCR clone 43596 (TRBV5-1, TRBJ2-1)
CASSPPRAPYNDQFF

SEQ ID NO: 87193 - protein, 16 aa, Homo sapiens
  CDR3 for alpha chain variable domain of TCR clone 43597 (TRAV30, TRAJ24)
CGTEIVDADSWGKFQF

SEQ ID NO: 87194 - protein, 16 aa, Homo sapiens
  CDR3 for beta chain variable domain of TCR clone 43597 (TRBV2, TRBJ1-3)
CAGSGGAGRSGNTIYF

SEQ ID NO: 87195 - protein, 13 aa, Homo sapiens
  CDR3 for alpha chain variable domain of TCR clone 43598 (TRAV26-1, )
CIDIQNPDPAVYQ

SEQ ID NO: 87196 - protein, 19 aa, Homo sapiens
  CDR3 for beta chain variable domain of TCR clone 43598 (TRBV19, TRBJ2-5)
CASSIGQVTDFFLGETQYF

SEQ ID NO: 87197 - protein, 13 aa, Homo sapiens
  CDR3 for alpha chain variable domain of TCR clone 43599 (TRAV27, TRAJ56)
CAGKPGANSKLTF

SEQ ID NO: 87198 - protein, 14 aa, Homo sapiens
  CDR3 for beta chain variable domain of TCR clone 43599 (TRBV7-2, TRBJ2-7)
CASRSQGAAYEQYF

SEQ ID NO: 87199 - protein, 11 aa, Homo sapiens
  CDR3 for alpha chain variable domain of TCR clone 43600 (TRAV12-1, TRAJ30)
CVVNGQDKIIF

SEQ ID NO: 87200 - protein, 14 aa, Homo sapiens
  CDR3 for beta chain variable domain of TCR clone 43600 (TRBV19, TRBJ2-7)
CASSIQEWSYEQYF

SEQ ID NO: 87201 - protein, 16 aa, Homo sapiens
  CDR3 for alpha chain variable domain of TCR clone 43601 (TRAV13-1, TRAJ37)
CAASSLGSSNTGKLIF

SEQ ID NO: 87202 - protein, 12 aa, Homo sapiens
  CDR3 for beta chain variable domain of TCR clone 43601 (TRBV6-1, TRBJ2-5)
CASSEWRETQYF

SEQ ID NO: 87203 - protein, 15 aa, Homo sapiens
  CDR3 for alpha chain variable domain of TCR clone 43602 (TRAV26-1, TRAJ40)
CIVRVTTSGTYKYIF

SEQ ID NO: 87204 - protein, 13 aa, Homo sapiens
  CDR3 for beta chain variable domain of TCR clone 43602 (TRBV7-2, TRBJ1-6)
CASSLGSNSPLHF

SEQ ID NO: 87205 - protein, 15 aa, Homo sapiens
  CDR3 for alpha chain variable domain of TCR clone 43603 (TRAV8-3, TRAJ45)
CASSYSGGGADGLTF

SEQ ID NO: 87206 - protein, 13 aa, Homo sapiens
  CDR3 for beta chain variable domain of TCR clone 43603 (TRBV7-9, TRBJ2-7)
WASSFAGAYEQYF

SEQ ID NO: 87207 - protein, 13 aa, Homo sapiens
  CDR3 for alpha chain variable domain of TCR clone 43604 (TRAV12-2, TRAJ47)
CAVFMEYGSKLVF

SEQ ID NO: 87208 - protein, 13 aa, Homo sapiens
  CDR3 for beta chain variable domain of TCR clone 43604 (TRBV6-5, TRBJ2-5)
CASSPQGGETQYF

SEQ ID NO: 87209 - protein, 11 aa, Homo sapiens
  CDR3 for alpha chain variable domain of TCR clone 43605 (TRAV2, TRAJ13)
CASGGYQKVTF

SEQ ID NO: 87210 - protein, 13 aa, Homo sapiens
  CDR3 for beta chain variable domain of TCR clone 43605 (TRBV18, TRBJ2-7)
CASQSGGGYEQYF

SEQ ID NO: 87211 - protein, 16 aa, Homo sapiens
  CDR3 for alpha chain variable domain of TCR clone 43606 (TRAV3, TRAJ18)
CAVRDGRGSTLGRLYF

SEQ ID NO: 87212 - protein, 15 aa, Homo sapiens
  CDR3 for beta chain variable domain of TCR clone 43606 (TRBV7-9, TRBJ1-6)
CAGSSPGRGNSPLHF

SEQ ID NO: 87213 - protein, 16 aa, Homo sapiens
  CDR3 for alpha chain variable domain of TCR clone 43607 (TRAV36/DV7, TRAJ30)
CAVETYGLDRDDKIIF

SEQ ID NO: 87214 - protein, 16 aa, Homo sapiens
  CDR3 for beta chain variable domain of TCR clone 43607 (TRBV5-4, TRBJ2-3)
CASQQPGAGGADTQYF

SEQ ID NO: 87215 - protein, 11 aa, Homo sapiens
  CDR3 for alpha chain variable domain of TCR clone 43608 (TRAV21, TRAJ11)
CAVKGYSTLTF

SEQ ID NO: 87216 - protein, 11 aa, Homo sapiens
  CDR3 for beta chain variable domain of TCR clone 43608 (TRBV19, TRBJ1-1)
CASSIGSEAFF

SEQ ID NO: 87217 - protein, 17 aa, Homo sapiens
  CDR3 for alpha chain variable domain of TCR clone 43609 (TRAV3, TRAJ42)
CAVRDRDYGGSQGNLIF

SEQ ID NO: 87218 - protein, 13 aa, Homo sapiens
  CDR3 for beta chain variable domain of TCR clone 43609 (TRBV7-3, TRBJ1-2)
CASSLKRGYGYTF

SEQ ID NO: 87219 - protein, 12 aa, Homo sapiens
  CDR3 for alpha chain variable domain of TCR clone 43610 (TRAV2, TRAJ10)
CASTGGGNKLTF

SEQ ID NO: 87220 - protein, 12 aa, Homo sapiens
  CDR3 for beta chain variable domain of TCR clone 43610 (TRBV7-9, TRBJ2-7)
CASSFGSYEQYF

SEQ ID NO: 87221 - protein, 14 aa, Homo sapiens
  CDR3 for alpha chain variable domain of TCR clone 43611 (TRAV17, TRAJ56)
CATVPAGANSKLTF

SEQ ID NO: 87222 - protein, 15 aa, Homo sapiens
  CDR3 for beta chain variable domain of TCR clone 43611 (TRBV20-1, TRBJ2-7)
CSARDRVSGMDEQYF

SEQ ID NO: 87223 - protein, 13 aa, Homo sapiens
  CDR3 for alpha chain variable domain of TCR clone 43612 (TRAV29/DV5, TRAJ31)
CAASRNNNTRLMF

SEQ ID NO: 87224 - protein, 16 aa, Homo sapiens
  CDR3 for beta chain variable domain of TCR clone 43612 (TRBV20-1, TRBJ1-4)
CSAPGQGLLTNEKLFF

SEQ ID NO: 87225 - protein, 14 aa, Homo sapiens
  CDR3 for alpha chain variable domain of TCR clone 43613 (TRAV1-2, TRAJ8)
CAVREDTGFKKLVF

SEQ ID NO: 87226 - protein, 16 aa, Homo sapiens
  CDR3 for beta chain variable domain of TCR clone 43613 (TRBV7-9, TRBJ2-1)
CASSDVAGGSYNEQFF

SEQ ID NO: 87227 - protein, 14 aa, Homo sapiens
  CDR3 for alpha chain variable domain of TCR clone 43614 (TRAV17, TRAJ31)
CATVPLSGNARLMF

SEQ ID NO: 87228 - protein, 15 aa, Homo sapiens
  CDR3 for beta chain variable domain of TCR clone 43614 (TRBV15, TRBJ2-2)
CATSGTGGRVGELFI

SEQ ID NO: 87229 - protein, 12 aa, Homo sapiens
  CDR3 for alpha chain variable domain of TCR clone 43615 (TRAV12-3, TRAJ5)
CAMYTGRRALTF

SEQ ID NO: 87230 - protein, 14 aa, Homo sapiens
  CDR3 for beta chain variable domain of TCR clone 43615 (TRBV20-1, TRBJ2-1)
CSAQIGGSANEQFF

SEQ ID NO: 87231 - protein, 14 aa, Homo sapiens
  CDR3 for alpha chain variable domain of TCR clone 43616 (TRAV9-2, TRAJ39)
CALYIYNAGNMLTF

SEQ ID NO: 87232 - protein, 16 aa, Homo sapiens
  CDR3 for beta chain variable domain of TCR clone 43616 (TRBV7-2, TRBJ1-2)
CASSSNQDRRGHGYTF

SEQ ID NO: 87233 - protein, 17 aa, Homo sapiens
  CDR3 for alpha chain variable domain of TCR clone 43617 (TRAV23/DV6, TRAJ57)
CAASSTLSQGGSEKLVF

SEQ ID NO: 87234 - protein, 14 aa, Homo sapiens
  CDR3 for beta chain variable domain of TCR clone 43617 (TRBV25-1, TRBJ1-1)
CASTHLGGNTEAFF

SEQ ID NO: 87235 - protein, 15 aa, Homo sapiens
  CDR3 for alpha chain variable domain of TCR clone 43618 (TRAV20, TRAJ53)
CAVQASGGSNYKLTF

SEQ ID NO: 87236 - protein, 12 aa, Homo sapiens
  CDR3 for beta chain variable domain of TCR clone 43618 (TRBV7-2, TRBJ2-1)
CASSPQDIEQFL

SEQ ID NO: 87237 - protein, 14 aa, Homo sapiens
  CDR3 for alpha chain variable domain of TCR clone 43619 (TRAV26-1, TRAJ21)
CIVRPPYNLNKFYF

SEQ ID NO: 87238 - protein, 14 aa, Homo sapiens
  CDR3 for beta chain variable domain of TCR clone 43619 (TRBV11-3, TRBJ2-1)
CASSATTSGSIQFF

SEQ ID NO: 87239 - protein, 15 aa, Homo sapiens
  CDR3 for alpha chain variable domain of TCR clone 43620 (TRAV12-2, TRAJ57)
CAVRRGQGGSEKLVF

SEQ ID NO: 87240 - protein, 14 aa, Homo sapiens
  CDR3 for beta chain variable domain of TCR clone 43620 (TRBV20-1, TRBJ2-1)
CSAHPGLPYNEQFF

SEQ ID NO: 87241 - protein, 13 aa, Homo sapiens
  CDR3 for alpha chain variable domain of TCR clone 43621 (TRAV16, TRAJ10)
CALLTGGGNKLTF

SEQ ID NO: 87242 - protein, 12 aa, Homo sapiens
  CDR3 for beta chain variable domain of TCR clone 43621 (TRBV28, TRBJ2-7)
CASTGNHYGQYF

SEQ ID NO: 87243 - protein, 14 aa, Homo sapiens
  CDR3 for alpha chain variable domain of TCR clone 43622 (TRAV12-3, TRAJ10)
SHLPLTGGGNRLTF

SEQ ID NO: 87244 - protein, 14 aa, Homo sapiens
  CDR3 for beta chain variable domain of TCR clone 43622 (TRBV6-1, TRBJ1-3)
CASVQGGGGNTIYF

SEQ ID NO: 87245 - protein, 14 aa, Homo sapiens
  CDR3 for alpha chain variable domain of TCR clone 43623 (TRAV29/DV5, TRAJ36)
CAARRQTGANNLFF

SEQ ID NO: 87246 - protein, 14 aa, Homo sapiens
  CDR3 for beta chain variable domain of TCR clone 43623 (TRBV12-5, TRBJ2-5)
CASGSRTHQETQYF

SEQ ID NO: 87247 - protein, 11 aa, Homo sapiens
  CDR3 for alpha chain variable domain of TCR clone 43624 (TRAV3, TRAJ17)
PRGAAGNKLTF

SEQ ID NO: 87248 - protein, 16 aa, Homo sapiens
  CDR3 for beta chain variable domain of TCR clone 43624 (TRBV7-6, TRBJ2-1)
CASSATGPSSYNEQFF

SEQ ID NO: 87249 - protein, 17 aa, Homo sapiens
  CDR3 for alpha chain variable domain of TCR clone 43625 (TRAV3, TRAJ6)
CAVRDGPRAGGSYIPTF

SEQ ID NO: 87250 - protein, 15 aa, Homo sapiens
  CDR3 for beta chain variable domain of TCR clone 43625 (TRBV18, TRBJ2-1)
CASSPPSASYNEQFF

SEQ ID NO: 87251 - protein, 16 aa, Homo sapiens
  CDR3 for alpha chain variable domain of TCR clone 43626 (TRAV26-1, TRAJ53)
CIVRGAMGGSNYKLTF

SEQ ID NO: 87252 - protein, 12 aa, Homo sapiens
  CDR3 for beta chain variable domain of TCR clone 43626 (TRBV7-9, TRBJ1-5)
CASSPQGQPQHF

SEQ ID NO: 87253 - protein, 16 aa, Homo sapiens
  CDR3 for alpha chain variable domain of TCR clone 43627 (TRAV3, TRAJ37)
CAVRPHSSGNTGKLIF

SEQ ID NO: 87254 - protein, 16 aa, Homo sapiens
  CDR3 for beta chain variable domain of TCR clone 43627 (TRBV9, TRBJ1-2)
CASSVEEKVSPYGYTF

SEQ ID NO: 87255 - protein, 14 aa, Homo sapiens
  CDR3 for alpha chain variable domain of TCR clone 43628 (TRAV26-1, TRAJ45)
CIEVTGGGADGLTF

SEQ ID NO: 87256 - protein, 14 aa, Homo sapiens
  CDR3 for beta chain variable domain of TCR clone 43628 (TRBV12-5, TRBJ2-5)
CASGSRTHQETQYF

SEQ ID NO: 87257 - protein, 15 aa, Homo sapiens
  CDR3 for alpha chain variable domain of TCR clone 43629 (TRAV12-1, TRAJ44)
CVADLPTGTASKLTF

SEQ ID NO: 87258 - protein, 14 aa, Homo sapiens
  CDR3 for beta chain variable domain of TCR clone 43629 (TRBV7-2, TRBJ1-6)
CASSLTGVNSPLHF

SEQ ID NO: 87259 - protein, 12 aa, Homo sapiens
  CDR3 for alpha chain variable domain of TCR clone 43630 (TRAV12-2, TRAJ45)
CASGGGTDGLTF

SEQ ID NO: 87260 - protein, 16 aa, Homo sapiens
  CDR3 for beta chain variable domain of TCR clone 43630 (TRBV19, TRBJ2-3)
CASSPGLLASTDTQYF

SEQ ID NO: 87261 - protein, 14 aa, Homo sapiens
  CDR3 for alpha chain variable domain of TCR clone 43631 (TRAV12-2, TRAJ13)
CAVKKTGGYQKVTF

SEQ ID NO: 87262 - protein, 19 aa, Homo sapiens
  CDR3 for beta chain variable domain of TCR clone 43631 (TRBV25-1, TRBJ2-2)
CAILVYRVDRGSKTGELFF

SEQ ID NO: 87263 - protein, 13 aa, Homo sapiens
  CDR3 for alpha chain variable domain of TCR clone 43632 (TRAV25, TRAJ10)
CAGRTGGGNKLTL

SEQ ID NO: 87264 - protein, 15 aa, Homo sapiens
  CDR3 for beta chain variable domain of TCR clone 43632 (TRBV19, TRBJ2-1)
CASSSPGVPLDEQFF

SEQ ID NO: 87265 - protein, 14 aa, Homo sapiens
  CDR3 for alpha chain variable domain of TCR clone 43633 (TRAV13-1, TRAJ10)
CAAREPGGGNKLTF

SEQ ID NO: 87266 - protein, 14 aa, Homo sapiens
  CDR3 for beta chain variable domain of TCR clone 43633 (TRBV6-6, TRBJ2-7)
CASSDSGAGYEQYF

SEQ ID NO: 87267 - protein, 13 aa, Homo sapiens
  CDR3 for alpha chain variable domain of TCR clone 43634 (TRAV1-2, TRAJ9)
CAVLNTGGFKAIF

SEQ ID NO: 87268 - protein, 14 aa, Homo sapiens
  CDR3 for beta chain variable domain of TCR clone 43634 (TRBV20-1, TRBJ2-3)
CSARGGTSTDTQYF

SEQ ID NO: 87269 - protein, 12 aa, Homo sapiens
  CDR3 for alpha chain variable domain of TCR clone 43635 (TRAV2, TRAJ9)
CAVGAGGFKTIF

SEQ ID NO: 87270 - protein, 16 aa, Homo sapiens
  CDR3 for beta chain variable domain of TCR clone 43635 (TRBV13, TRBJ2-2)
CASSPRTGEYTGELFF

SEQ ID NO: 87271 - protein, 15 aa, Homo sapiens
  CDR3 for alpha chain variable domain of TCR clone 43636 (TRAV12-3, TRAJ6)
CTMSATTGGSYIPTF

SEQ ID NO: 87272 - protein, 17 aa, Homo sapiens
  CDR3 for beta chain variable domain of TCR clone 43636 (TRBV13, TRBJ2-3)
CASSLSRVAGGRNTQYF

SEQ ID NO: 87273 - protein, 16 aa, Homo sapiens
  CDR3 for alpha chain variable domain of TCR clone 43637 (TRAV27, TRAJ13)
CAGAKSDSGGYQKVTF

SEQ ID NO: 87274 - protein, 15 aa, Homo sapiens
  CDR3 for beta chain variable domain of TCR clone 43637 (TRBV29-1, TRBJ2-1)
CNVGRHALFYNEQFF

SEQ ID NO: 87275 - protein, 15 aa, Homo sapiens
  CDR3 for alpha chain variable domain of TCR clone 43638 (TRAV9-2, TRAJ56)
CALSDVDGANSKLTF

SEQ ID NO: 87276 - protein, 15 aa, Homo sapiens
  CDR3 for beta chain variable domain of TCR clone 43638 (TRBV2, TRBJ2-7)
CASSEGLARSYEQYF

SEQ ID NO: 87277 - protein, 15 aa, Homo sapiens
  CDR3 for alpha chain variable domain of TCR clone 43639 (TRAV2, TRAJ9)
CAVEDRGTGGFKTTF

SEQ ID NO: 87278 - protein, 19 aa, Homo sapiens
  CDR3 for beta chain variable domain of TCR clone 43639 (TRBV28, TRBJ2-7)
CASSYSGTSRLGWVYEQYF

SEQ ID NO: 87279 - protein, 13 aa, Homo sapiens
  CDR3 for alpha chain variable domain of TCR clone 43640 (TRAV23/DV6, TRAJ22)
CAPYSGSARQLPF

SEQ ID NO: 87280 - protein, 13 aa, Homo sapiens
  CDR3 for beta chain variable domain of TCR clone 43640 (TRBV6-1, TRBJ1-1)
CASSRQGNTEAFF

SEQ ID NO: 87281 - protein, 11 aa, Homo sapiens
  CDR3 for alpha chain variable domain of TCR clone 43641 (TRAV21, TRAJ34)
CAHYNTDKLIF

SEQ ID NO: 87282 - protein, 15 aa, Homo sapiens
  CDR3 for beta chain variable domain of TCR clone 43641 (TRBV7-9, TRBJ1-5)
CASSQGHQPNQPQHF

SEQ ID NO: 87283 - protein, 16 aa, Homo sapiens
  CDR3 for alpha chain variable domain of TCR clone 43642 (TRAV17, TRAJ28)
CATASVSGAGSYQLTF

SEQ ID NO: 87284 - protein, 11 aa, Homo sapiens
  CDR3 for beta chain variable domain of TCR clone 43642 (TRBV7-9, TRBJ2-5)
CASSLGETQHF

SEQ ID NO: 87285 - protein, 18 aa, Homo sapiens
  CDR3 for alpha chain variable domain of TCR clone 43643 (TRAV29/DV5, TRAJ52)
CAAGFRGAGGTSYGKLTF

SEQ ID NO: 87286 - protein, 16 aa, Homo sapiens
  CDR3 for beta chain variable domain of TCR clone 43643 (TRBV12-5, TRBJ2-5)
CASGPRTSGNQETQYF

SEQ ID NO: 87287 - protein, 16 aa, Homo sapiens
  CDR3 for alpha chain variable domain of TCR clone 43644 (TRAV30, TRAJ24)
CGTEIVDADSWGKFQF

SEQ ID NO: 87288 - protein, 10 aa, Homo sapiens
  CDR3 for beta chain variable domain of TCR clone 43644 (TRBV2, TRBJ2-5)
CASSAATQYF

SEQ ID NO: 87289 - protein, 14 aa, Homo sapiens
  CDR3 for alpha chain variable domain of TCR clone 43645 (TRAV3, TRAJ9)
CAVRLNTGGFKTIF

SEQ ID NO: 87290 - protein, 13 aa, Homo sapiens
  CDR3 for beta chain variable domain of TCR clone 43645 (TRBV12-4, TRBJ2-3)
CASSSPLGGTQYF

SEQ ID NO: 87291 - protein, 19 aa, Homo sapiens
  CDR3 for alpha chain variable domain of TCR clone 43646 (TRAV38-1, TRAJ53)
CAFMKNGLESGGSNYKLTF

SEQ ID NO: 87292 - protein, 13 aa, Homo sapiens
  CDR3 for beta chain variable domain of TCR clone 43646 (TRBV19, TRBJ2-7)
CASSPRQSYEQYF

SEQ ID NO: 87293 - protein, 11 aa, Homo sapiens
  CDR3 for alpha chain variable domain of TCR clone 43647 (TRAV1-2, TRAJ31)
CAVNNNARLMF

SEQ ID NO: 87294 - protein, 15 aa, Homo sapiens
  CDR3 for beta chain variable domain of TCR clone 43647 (TRBV28, TRBJ2-1)
CASSIIAGGRSEHFF

SEQ ID NO: 87295 - protein, 14 aa, Homo sapiens
  CDR3 for alpha chain variable domain of TCR clone 43648 (TRAV12-3, TRAJ10)
SHLPLTGGGNKLTF

SEQ ID NO: 87296 - protein, 13 aa, Homo sapiens
  CDR3 for beta chain variable domain of TCR clone 43648 (TRBV7-8, TRBJ2-7)
CASSLTGGREQYF

SEQ ID NO: 87297 - protein, 14 aa, Homo sapiens
  CDR3 for alpha chain variable domain of TCR clone 43649 (TRAV1-2, TRAJ8)
CAVREDTGFQKLVF

SEQ ID NO: 87298 - protein, 15 aa, Homo sapiens
  CDR3 for beta chain variable domain of TCR clone 43649 (TRBV6-3, TRBJ2-7)
CATSSPGTVFYEQYF

SEQ ID NO: 87299 - protein, 13 aa, Homo sapiens
  CDR3 for alpha chain variable domain of TCR clone 43650 (TRAV8-6, TRAJ49)
CAVITNTGNQFYF

SEQ ID NO: 87300 - protein, 15 aa, Homo sapiens
  CDR3 for beta chain variable domain of TCR clone 43650 (TRBV11-3, TRBJ2-3)
CASLKDGREGDTQYF

SEQ ID NO: 87301 - protein, 16 aa, Homo sapiens
  CDR3 for alpha chain variable domain of TCR clone 43651 (TRAV3, TRAJ21)
CAVRDIERGNFNKFYF

SEQ ID NO: 87302 - protein, 17 aa, Homo sapiens
  CDR3 for beta chain variable domain of TCR clone 43651 (TRBV20-1, TRBJ2-1)
CSASSSGLAGSYNEQFF

SEQ ID NO: 87303 - protein, 13 aa, Homo sapiens
  CDR3 for alpha chain variable domain of TCR clone 43652 (TRAV20, TRAJ48)
CAVQGVGNEKLTF

SEQ ID NO: 87304 - protein, 14 aa, Homo sapiens
  CDR3 for beta chain variable domain of TCR clone 43652 (TRBV27, TRBJ2-7)
CASSFRDGPYEQCF

SEQ ID NO: 87305 - protein, 13 aa, Homo sapiens
  CDR3 for alpha chain variable domain of TCR clone 43653 (TRAV2, TRAJ39)
CAVLNNAGNMLTF

SEQ ID NO: 87306 - protein, 16 aa, Homo sapiens
  CDR3 for beta chain variable domain of TCR clone 43653 (TRBV19, TRBJ2-1)
CASRTSSGSIVNEQFL

SEQ ID NO: 87307 - protein, 16 aa, Homo sapiens
  CDR3 for alpha chain variable domain of TCR clone 43654 (TRAV26-1, TRAJ38)
CIVRVGLGGNNRKLIW

SEQ ID NO: 87308 - protein, 14 aa, Homo sapiens
  CDR3 for beta chain variable domain of TCR clone 43654 (TRBV5-1, TRBJ2-3)
CASSPGLAADTQYF

SEQ ID NO: 87309 - protein, 12 aa, Homo sapiens
  CDR3 for alpha chain variable domain of TCR clone 43655 (TRAV21, TRAJ31)
CAVSPARGRLMF

SEQ ID NO: 87310 - protein, 14 aa, Homo sapiens
  CDR3 for beta chain variable domain of TCR clone 43655 (TRBV28, TRBJ2-7)
CASSLLGISYEQYF

SEQ ID NO: 87311 - protein, 15 aa, Homo sapiens
  CDR3 for alpha chain variable domain of TCR clone 43656 (TRAV26-1, TRAJ44)
CIVRANTGTASKLTF

SEQ ID NO: 87312 - protein, 16 aa, Homo sapiens
  CDR3 for beta chain variable domain of TCR clone 43656 (TRBV7-7, TRBJ2-1)
CASNLASGTSYNEQFF

SEQ ID NO: 87313 - protein, 12 aa, Homo sapiens
  CDR3 for alpha chain variable domain of TCR clone 43657 (TRAV8-3, TRAJ26)
CAGDNYGQNFVF

SEQ ID NO: 87314 - protein, 12 aa, Homo sapiens
  CDR3 for beta chain variable domain of TCR clone 43657 (TRBV11-2, TRBJ2-1)
RASSPGNNEQFF

SEQ ID NO: 87315 - protein, 13 aa, Homo sapiens
  CDR3 for alpha chain variable domain of TCR clone 43658 (TRAV20, TRAJ37)
CAGCSSNTGKLIF

SEQ ID NO: 87316 - protein, 15 aa, Homo sapiens
  CDR3 for beta chain variable domain of TCR clone 43658 (TRBV7-2, TRBJ2-1)
CASSFQADEYNEQSF

SEQ ID NO: 87317 - protein, 14 aa, Homo sapiens
  CDR3 for alpha chain variable domain of TCR clone 43659 (TRAV3, TRAJ22)
CAVRDYGSARRLTF

SEQ ID NO: 87318 - protein, 13 aa, Homo sapiens
  CDR3 for beta chain variable domain of TCR clone 43659 (TRBV11-2, TRBJ2-5)
CASGHGAKETQYF

SEQ ID NO: 87319 - protein, 14 aa, Homo sapiens
  CDR3 for alpha chain variable domain of TCR clone 43660 (TRAV2, TRAJ3)
CAVRPYSSASKIIF

SEQ ID NO: 87320 - protein, 17 aa, Homo sapiens
  CDR3 for beta chain variable domain of TCR clone 43660 (TRBV7-6, TRBJ2-5)
CASSSPQAGDPPETQYF

SEQ ID NO: 87321 - protein, 17 aa, Homo sapiens
  CDR3 for alpha chain variable domain of TCR clone 43661 (TRAV13-1, TRAJ31)
CAPRDRLMFGDGTQLEV

SEQ ID NO: 87322 - protein, 12 aa, Homo sapiens
  CDR3 for beta chain variable domain of TCR clone 43661 (TRBV7-9, TRBJ2-7)
CASSLEGYEQYF

SEQ ID NO: 87323 - protein, 15 aa, Homo sapiens
  CDR3 for alpha chain variable domain of TCR clone 43662 (TRAV13-1, TRAJ17)
CAASIERAAGNKLTF

SEQ ID NO: 87324 - protein, 12 aa, Homo sapiens
  CDR3 for beta chain variable domain of TCR clone 43662 (TRBV5-7, TRBJ1-1)
CASSLGRGKTFF

SEQ ID NO: 87325 - protein, 13 aa, Homo sapiens
  CDR3 for alpha chain variable domain of TCR clone 43663 (TRAV16, TRAJ39)
CALKDNAGNMLTF

SEQ ID NO: 87326 - protein, 17 aa, Homo sapiens
  CDR3 for beta chain variable domain of TCR clone 43663 (TRBV2, TRBJ2-7)
CASSQALTGWDSYEQYF

SEQ ID NO: 87327 - protein, 15 aa, Homo sapiens
  CDR3 for alpha chain variable domain of TCR clone 43664 (TRAV26-1, TRAJ29)
CIVRVEGSGNTPLVF

SEQ ID NO: 87328 - protein, 15 aa, Homo sapiens
  CDR3 for beta chain variable domain of TCR clone 43664 (TRBV7-9, TRBJ1-5)
CASSQGQQPNQPQHF

SEQ ID NO: 87329 - protein, 13 aa, Homo sapiens
  CDR3 for alpha chain variable domain of TCR clone 43665 (TRAV8-6, TRAJ49)
CAVITNTGNQFYF

SEQ ID NO: 87330 - protein, 14 aa, Homo sapiens
  CDR3 for beta chain variable domain of TCR clone 43665 (TRBV25-1, TRBJ1-1)
CASTHLGGNTEAFF

SEQ ID NO: 87331 - protein, 12 aa, Homo sapiens
  CDR3 for alpha chain variable domain of TCR clone 43666 (TRAV12-3, TRAJ17)
CAMTLTGNKLTF

SEQ ID NO: 87332 - protein, 15 aa, Homo sapiens
  CDR3 for beta chain variable domain of TCR clone 43666 (TRBV20-1, TRBJ2-7)
CSARDRLSGMDEQYF

SEQ ID NO: 87333 - protein, 11 aa, Homo sapiens
  CDR3 for alpha chain variable domain of TCR clone 43667 (TRAV35, TRAJ30)
CAPGGDDKIIF

SEQ ID NO: 87334 - protein, 13 aa, Homo sapiens
  CDR3 for beta chain variable domain of TCR clone 43667 (TRBV7-9, TRBJ1-2)
CASSLKQNYGYTF

SEQ ID NO: 87335 - protein, 13 aa, Homo sapiens
  CDR3 for alpha chain variable domain of TCR clone 43668 (TRAV26-1, TRAJ48)
CIVRVVGDEKLTF

SEQ ID NO: 87336 - protein, 10 aa, Homo sapiens
  CDR3 for beta chain variable domain of TCR clone 43668 (TRBV7-3, TRBJ2-2)
CASSLSGTSG

SEQ ID NO: 87337 - protein, 15 aa, Homo sapiens
  CDR3 for alpha chain variable domain of TCR clone 43669 (TRAV16, TRAJ12)
CSKWPLRDSSYKLIF

SEQ ID NO: 87338 - protein, 16 aa, Homo sapiens
  CDR3 for beta chain variable domain of TCR clone 43669 (TRBV12-5, TRBJ2-5)
CASGPRTSGNQETQYF

SEQ ID NO: 87339 - protein, 14 aa, Homo sapiens
  CDR3 for alpha chain variable domain of TCR clone 43670 (TRAV3, TRAJ9)
CAMRLNTGGFKTIF

SEQ ID NO: 87340 - protein, 15 aa, Homo sapiens
  CDR3 for beta chain variable domain of TCR clone 43670 (TRBV7-2, TRBJ2-1)
CASSLASGRVNEQFF

SEQ ID NO: 87341 - protein, 15 aa, Homo sapiens
  CDR3 for alpha chain variable domain of TCR clone 43671 (TRAV23/DV6, TRAJ13)
CAAWPGGGGYQKVTF

SEQ ID NO: 87342 - protein, 16 aa, Homo sapiens
  CDR3 for beta chain variable domain of TCR clone 43671 (TRBV4-1, TRBJ1-2)
CASSQDAGQVLYGYTF

SEQ ID NO: 87343 - protein, 14 aa, Homo sapiens
  CDR3 for alpha chain variable domain of TCR clone 43672 (TRAV12-2, TRAJ44)
CAVNPAGTASKLTF

SEQ ID NO: 87344 - protein, 16 aa, Homo sapiens
  CDR3 for beta chain variable domain of TCR clone 43672 (TRBV2, TRBJ2-6)
CASSEVGGAGANDLTF

SEQ ID NO: 87345 - protein, 14 aa, Homo sapiens
  CDR3 for alpha chain variable domain of TCR clone 43673 (TRAV1-2, TRAJ6)
CAVSLSGGSYLPTF

SEQ ID NO: 87346 - protein, 15 aa, Homo sapiens
  CDR3 for beta chain variable domain of TCR clone 43673 (TRBV28, TRBJ2-7)
CASSPGGRGFYEQYF

SEQ ID NO: 87347 - protein, 14 aa, Homo sapiens
  CDR3 for alpha chain variable domain of TCR clone 43674 (TRAV8-3, TRAJ4)
CAVGASGGYNKLIF

SEQ ID NO: 87348 - protein, 14 aa, Homo sapiens
  CDR3 for beta chain variable domain of TCR clone 43674 (TRBV20-1, TRBJ2-1)
CSAQIGGSANEQFF

SEQ ID NO: 87349 - protein, 14 aa, Homo sapiens
  CDR3 for alpha chain variable domain of TCR clone 43675 (TRAV21, TRAJ35)
CAVMPIGFGNVLHC

SEQ ID NO: 87350 - protein, 12 aa, Homo sapiens
  CDR3 for beta chain variable domain of TCR clone 43675 (TRBV7-9, TRBJ2-7)
CASSSKREEQYF

SEQ ID NO: 87351 - protein, 14 aa, Homo sapiens
  CDR3 for alpha chain variable domain of TCR clone 43676 (TRAV1-2, TRAJ8)
CAVREDTGFQKLVF

SEQ ID NO: 87352 - protein, 15 aa, Homo sapiens
  CDR3 for beta chain variable domain of TCR clone 43676 (TRBV5-1, TRBJ2-2)
CASSSQGGNTGELFF

SEQ ID NO: 87353 - protein, 14 aa, Homo sapiens
  CDR3 for alpha chain variable domain of TCR clone 43677 (TRAV26-1, TRAJ38)
CIAVNAGNNRKLIW

SEQ ID NO: 87354 - protein, 13 aa, Homo sapiens
  CDR3 for beta chain variable domain of TCR clone 43677 (TRBV20-1, TRBJ1-1)
CSARGGGNTEAFF

SEQ ID NO: 87355 - protein, 16 aa, Homo sapiens
  CDR3 for alpha chain variable domain of TCR clone 43678 (TRAV26-1, TRAJ53)
CIVRVAMGGSNYKLTF

SEQ ID NO: 87356 - protein, 13 aa, Homo sapiens
  CDR3 for beta chain variable domain of TCR clone 43678 (TRBV7-9, TRBJ1-2)
CASSLKQNYGYTF

SEQ ID NO: 87357 - protein, 17 aa, Homo sapiens
  CDR3 for alpha chain variable domain of TCR clone 43679 (TRAV3, TRAJ6)
CAVSRRTDTGGSYIPTF

SEQ ID NO: 87358 - protein, 18 aa, Homo sapiens
  CDR3 for beta chain variable domain of TCR clone 43679 (TRBV7-2, TRBJ2-3)
CASSLETSRGRKADTQYF

SEQ ID NO: 87359 - protein, 18 aa, Homo sapiens
  CDR3 for alpha chain variable domain of TCR clone 43680 (TRAV21, TRAJ52)
CAVRPSPAGGTSYGKLTF

SEQ ID NO: 87360 - protein, 14 aa, Homo sapiens
  CDR3 for beta chain variable domain of TCR clone 43680 (TRBV4-1, TRBJ2-2)
CASRQAVNTGELFF

SEQ ID NO: 87361 - protein, 16 aa, Homo sapiens
  CDR3 for alpha chain variable domain of TCR clone 43681 (TRAV3, TRAJ37)
CAVRGKGSGNTGKLIF

SEQ ID NO: 87362 - protein, 17 aa, Homo sapiens
  CDR3 for beta chain variable domain of TCR clone 43681 (TRBV20-1, TRBJ2-1)
CSASSSGLAGSYNEQFF

SEQ ID NO: 87363 - protein, 13 aa, Homo sapiens
  CDR3 for alpha chain variable domain of TCR clone 43682 (TRAV12-2, TRAJ20)
CSVYPSNDYKLSF

SEQ ID NO: 87364 - protein, 15 aa, Homo sapiens
  CDR3 for beta chain variable domain of TCR clone 43682 (TRBV27, TRBJ2-5)
CASSLYPRGGETQYF

SEQ ID NO: 87365 - protein, 13 aa, Homo sapiens
  CDR3 for alpha chain variable domain of TCR clone 43683 (TRAV12-3, TRAJ40)
CAMSDSGTYKYIF

SEQ ID NO: 87366 - protein, 14 aa, Homo sapiens
  CDR3 for beta chain variable domain of TCR clone 43683 (TRBV7-2, TRBJ1-5)
CASSTQGAGQHQHF

SEQ ID NO: 87367 - protein, 11 aa, Homo sapiens
  CDR3 for alpha chain variable domain of TCR clone 43684 (TRAV1-2, TRAJ20)
CAMANDYKLSF

SEQ ID NO: 87368 - protein, 15 aa, Homo sapiens
  CDR3 for beta chain variable domain of TCR clone 43684 (TRBV2, TRBJ2-1)
CASSELAGSYNEQFF

SEQ ID NO: 87369 - protein, 14 aa, Homo sapiens
  CDR3 for alpha chain variable domain of TCR clone 43685 (TRAV9-2, TRAJ39)
CALYIYNAGNMLTF

SEQ ID NO: 87370 - protein, 13 aa, Homo sapiens
  CDR3 for beta chain variable domain of TCR clone 43685 (TRBV12-4, TRBJ1-3)
CASSLASGNTIYF

SEQ ID NO: 87371 - protein, 12 aa, Homo sapiens
  CDR3 for alpha chain variable domain of TCR clone 43686 (TRAV13-1, TRAJ48)
CAANFGNEKLTF

SEQ ID NO: 87372 - protein, 11 aa, Homo sapiens
  CDR3 for beta chain variable domain of TCR clone 43686 (TRBV7-8, TRBJ2-7)
CASSLSLEQYF

SEQ ID NO: 87373 - protein, 14 aa, Homo sapiens
  CDR3 for alpha chain variable domain of TCR clone 43687 (TRAV13-1, TRAJ35)
CAASKGGFGNVLHC

SEQ ID NO: 87374 - protein, 21 aa, Homo sapiens
  CDR3 for beta chain variable domain of TCR clone 43687 (TRBV7-3, TRBJ1-1)
GGTQPCISAPAARIGGAEAFF

SEQ ID NO: 87375 - protein, 14 aa, Homo sapiens
  CDR3 for alpha chain variable domain of TCR clone 43688 (TRAV17, TRAJ6)
CATDASGGSYIPTF

SEQ ID NO: 87376 - protein, 19 aa, Homo sapiens
  CDR3 for beta chain variable domain of TCR clone 43688 (TRBV4-3, TRBJ2-7)
CDSSQEFIGWQVTPYEQYF

SEQ ID NO: 87377 - protein, 14 aa, Homo sapiens
  CDR3 for alpha chain variable domain of TCR clone 43689 (TRAV2, TRAJ23)
CAVGLRNQGGKLIF

SEQ ID NO: 87378 - protein, 15 aa, Homo sapiens
  CDR3 for beta chain variable domain of TCR clone 43689 (TRBV11-2, TRBJ2-1)
CASSSPSTRYNEQFF

SEQ ID NO: 87379 - protein, 11 aa, Homo sapiens
  CDR3 for alpha chain variable domain of TCR clone 43690 (TRAV1-2, TRAJ20)
CTVANDYKLSF

SEQ ID NO: 87380 - protein, 18 aa, Homo sapiens
  CDR3 for beta chain variable domain of TCR clone 43690 (TRBV20-1, TRBJ2-6)
CSAETTPTHGSGANVLTF

SEQ ID NO: 87381 - protein, 12 aa, Homo sapiens
  CDR3 for alpha chain variable domain of TCR clone 43691 (TRAV13-2, TRAJ23)
CAERHRGGKLIS

SEQ ID NO: 87382 - protein, 15 aa, Homo sapiens
  CDR3 for beta chain variable domain of TCR clone 43691 (TRBV7-9, TRBJ1-6)
CASSSPGRGNSPLHF

SEQ ID NO: 87383 - protein, 16 aa, Homo sapiens
  CDR3 for alpha chain variable domain of TCR clone 43692 (TRAV12-1, TRAJ45)
CVVIRYSGGGADGLTF

SEQ ID NO: 87384 - protein, 12 aa, Homo sapiens
  CDR3 for beta chain variable domain of TCR clone 43692 (TRBV6-5, TRBJ2-2)
CASRQITGELFL

SEQ ID NO: 87385 - protein, 15 aa, Homo sapiens
  CDR3 for alpha chain variable domain of TCR clone 43693 (TRAV23/DV6, TRAJ18)
CAASFRGSTLGRPYF

SEQ ID NO: 87386 - protein, 13 aa, Homo sapiens
  CDR3 for beta chain variable domain of TCR clone 43693 (TRBV28, TRBJ2-7)
CAILDRAGGEQYF

SEQ ID NO: 87387 - protein, 16 aa, Homo sapiens
  CDR3 for alpha chain variable domain of TCR clone 43694 (TRAV16, TRAJ4)
CALSRMFSDGYNKLIF

SEQ ID NO: 87388 - protein, 16 aa, Homo sapiens
  CDR3 for beta chain variable domain of TCR clone 43694 (TRBV24-1, TRBJ2-3)
CATSDPGTGATDTQYF

SEQ ID NO: 87389 - protein, 14 aa, Homo sapiens
  CDR3 for alpha chain variable domain of TCR clone 43695 (TRAV8-2, TRAJ4)
CVVSPSGGYNKLIF

SEQ ID NO: 87390 - protein, 15 aa, Homo sapiens
  CDR3 for beta chain variable domain of TCR clone 43695 (TRBV4-1, TRBJ1-4)
CVSSDTGGTNEKLFF

SEQ ID NO: 87391 - protein, 15 aa, Homo sapiens
  CDR3 for alpha chain variable domain of TCR clone 43696 (TRAV8-3, TRAJ6)
CAVGGEEATYLHLEE

SEQ ID NO: 87392 - protein, 14 aa, Homo sapiens
  CDR3 for beta chain variable domain of TCR clone 43696 (TRBV5-1, TRBJ2-7)
CASSRGESLYEQYF

SEQ ID NO: 87393 - protein, 14 aa, Homo sapiens
  CDR3 for alpha chain variable domain of TCR clone 43697 (TRAV1-2, TRAJ16)
CAVNRFSDGQRLLF

SEQ ID NO: 87394 - protein, 12 aa, Homo sapiens
  CDR3 for beta chain variable domain of TCR clone 43697 (TRBV11-2, TRBJ2-2)
CASSLGGGELFF

SEQ ID NO: 87395 - protein, 12 aa, Homo sapiens
  CDR3 for alpha chain variable domain of TCR clone 43698 (TRAV21, TRAJ11)
CAATSGYSTLTF

SEQ ID NO: 87396 - protein, 14 aa, Homo sapiens
  CDR3 for beta chain variable domain of TCR clone 43698 (TRBV20-1, TRBJ2-7)
SSAPELAGVGEQYF

SEQ ID NO: 87397 - protein, 15 aa, Homo sapiens
  CDR3 for alpha chain variable domain of TCR clone 43699 (TRAV39, TRAJ32)
CAVDMEGGATNKLIF

SEQ ID NO: 87398 - protein, 17 aa, Homo sapiens
  CDR3 for beta chain variable domain of TCR clone 43699 (TRBV7-2, TRBJ1-4)
CASSFEAGPTTNEKLFF

SEQ ID NO: 87399 - protein, 11 aa, Homo sapiens
  CDR3 for alpha chain variable domain of TCR clone 43700 (TRAV2, TRAJ33)
CAVDSNYQLIW

SEQ ID NO: 87400 - protein, 14 aa, Homo sapiens
  CDR3 for beta chain variable domain of TCR clone 43700 (TRBV7-2, TRBJ1-1)
CASSFLTGTTEAFF

SEQ ID NO: 87401 - protein, 12 aa, Homo sapiens
  CDR3 for alpha chain variable domain of TCR clone 43701 (TRAV8-1, TRAJ26)
CAVNNYGQNFVL

SEQ ID NO: 87402 - protein, 15 aa, Homo sapiens
  CDR3 for beta chain variable domain of TCR clone 43701 (TRBV20-1, TRBJ1-1)
CSASWDRFLNTEAFF

SEQ ID NO: 87403 - protein, 13 aa, Homo sapiens
  CDR3 for alpha chain variable domain of TCR clone 43702 (TRAV1-2, TRAJ9)
CAVLNTGGFKTIF

SEQ ID NO: 87404 - protein, 14 aa, Homo sapiens
  CDR3 for beta chain variable domain of TCR clone 43702 (TRBV20-1, TRBJ2-3)
RSARGGTSTDTQYF

SEQ ID NO: 87405 - protein, 15 aa, Homo sapiens
  CDR3 for alpha chain variable domain of TCR clone 43703 (TRAV2, TRAJ37)
CAVVDGSSNTGKLIF

SEQ ID NO: 87406 - protein, 13 aa, Homo sapiens
  CDR3 for beta chain variable domain of TCR clone 43703 (TRBV20-1, TRBJ2-7)
CSAQTGLSYEQYF

SEQ ID NO: 87407 - protein, 14 aa, Homo sapiens
  CDR3 for alpha chain variable domain of TCR clone 43704 (TRAV38-1, TRAJ40)
WALRPTSGTYKYIF

SEQ ID NO: 87408 - protein, 14 aa, Homo sapiens
  CDR3 for beta chain variable domain of TCR clone 43704 (TRBV25-1, TRBJ1-1)
CASTHLGGNTEAFF

SEQ ID NO: 87409 - protein, 17 aa, Homo sapiens
  CDR3 for alpha chain variable domain of TCR clone 43705 (TRAV3, TRAJ42)
CAVRDRDYGGSQGNLIF

SEQ ID NO: 87410 - protein, 14 aa, Homo sapiens
  CDR3 for beta chain variable domain of TCR clone 43705 (TRBV7-2, TRBJ2-7)
CASSPETSFYEQYF

SEQ ID NO: 87411 - protein, 14 aa, Homo sapiens
  CDR3 for alpha chain variable domain of TCR clone 43706 (TRAV26-1, TRAJ48)
CIIRTNFGNEKLTF

SEQ ID NO: 87412 - protein, 12 aa, Homo sapiens
  CDR3 for beta chain variable domain of TCR clone 43706 (TRBV20-1, TRBJ2-7)
RSASSGANEQYF

SEQ ID NO: 87413 - protein, 13 aa, Homo sapiens
  CDR3 for alpha chain variable domain of TCR clone 43707 (TRAV20, TRAJ37)
CAGCSSNTGKLIF

SEQ ID NO: 87414 - protein, 14 aa, Homo sapiens
  CDR3 for beta chain variable domain of TCR clone 43707 (TRBV25-1, TRBJ1-1)
CASTHLGGNTEAFF

SEQ ID NO: 87415 - protein, 18 aa, Homo sapiens
  CDR3 for alpha chain variable domain of TCR clone 43708 (TRAV8-3, )
CAVGAGDIQNPDPAVYQL

SEQ ID NO: 87416 - protein, 13 aa, Homo sapiens
  CDR3 for beta chain variable domain of TCR clone 43708 (TRBV7-2, TRBJ2-2)
CASSLAVTGELFF

SEQ ID NO: 87417 - protein, 15 aa, Homo sapiens
  CDR3 for alpha chain variable domain of TCR clone 43709 (TRAV3, TRAJ20)
CAVRDIKLSDYKLSF

SEQ ID NO: 87418 - protein, 15 aa, Homo sapiens
  CDR3 for beta chain variable domain of TCR clone 43709 (TRBV7-9, TRBJ1-6)
FASSSPGRGNSPLHF

SEQ ID NO: 87419 - protein, 13 aa, Homo sapiens
  CDR3 for alpha chain variable domain of TCR clone 43710 (TRAV3, TRAJ15)
CAVRDQAGTALIF

SEQ ID NO: 87420 - protein, 15 aa, Homo sapiens
  CDR3 for beta chain variable domain of TCR clone 43710 (TRBV11-1, TRBJ2-7)
CASSLNYGASYEQYV

SEQ ID NO: 87421 - protein, 15 aa, Homo sapiens
  CDR3 for alpha chain variable domain of TCR clone 43711 (TRAV23/DV6, TRAJ13)
CAAWPGGGGNQKVTF

SEQ ID NO: 87422 - protein, 17 aa, Homo sapiens
  CDR3 for beta chain variable domain of TCR clone 43711 (TRBV19, TRBJ2-7)
CASSISFYDSYPYEQYF

SEQ ID NO: 87423 - protein, 14 aa, Homo sapiens
  CDR3 for alpha chain variable domain of TCR clone 43712 (TRAV13-1, TRAJ40)
CAASMTSGTYKYIF

SEQ ID NO: 87424 - protein, 15 aa, Homo sapiens
  CDR3 for beta chain variable domain of TCR clone 43712 (TRBV7-3, TRBJ2-1)
CASSPTGGGEDEQFF

SEQ ID NO: 87425 - protein, 12 aa, Homo sapiens
  CDR3 for alpha chain variable domain of TCR clone 43713 (TRAV3, TRAJ20)
CAVRDPDYKLSF

SEQ ID NO: 87426 - protein, 16 aa, Homo sapiens
  CDR3 for beta chain variable domain of TCR clone 43713 (TRBV19, TRBJ2-1)
CASSKAGPSSYNEQFF

SEQ ID NO: 87427 - protein, 16 aa, Homo sapiens
  CDR3 for alpha chain variable domain of TCR clone 43714 (TRAV30, TRAJ49)
SAAQRVGPNTGSQFYF

SEQ ID NO: 87428 - protein, 15 aa, Homo sapiens
  CDR3 for beta chain variable domain of TCR clone 43714 (TRBV7-2, TRBJ2-1)
CASSSGLAGGNEQFF

SEQ ID NO: 87429 - protein, 13 aa, Homo sapiens
  CDR3 for alpha chain variable domain of TCR clone 43715 (TRAV13-1, TRAJ39)
CAAGIWAGNMLTF

SEQ ID NO: 87430 - protein, 15 aa, Homo sapiens
  CDR3 for beta chain variable domain of TCR clone 43715 (TRBV7-9, TRBJ1-1)
CASSLLEQGGTEAFF

SEQ ID NO: 87431 - protein, 15 aa, Homo sapiens
  CDR3 for alpha chain variable domain of TCR clone 43716 (TRAV12-1, TRAJ15)
CVVTRANQAGTALIF

SEQ ID NO: 87432 - protein, 14 aa, Homo sapiens
  CDR3 for beta chain variable domain of TCR clone 43716 (TRBV5-1, TRBJ1-1)
CASSLVSINTEAVF

SEQ ID NO: 87433 - protein, 12 aa, Homo sapiens
  CDR3 for alpha chain variable domain of TCR clone 43717 (TRAV12-3, TRAJ17)
CAMTHTGNKLTF

SEQ ID NO: 87434 - protein, 15 aa, Homo sapiens
  CDR3 for beta chain variable domain of TCR clone 43717 (TRBV20-1, TRBJ2-7)
CSTRDRVSGMDEQYF

SEQ ID NO: 87435 - protein, 11 aa, Homo sapiens
  CDR3 for alpha chain variable domain of TCR clone 43718 (TRAV2, TRAJ33)
CAVESNYPLIW

SEQ ID NO: 87436 - protein, 15 aa, Homo sapiens
  CDR3 for beta chain variable domain of TCR clone 43718 (TRBV19, TRBJ1-1)
CASTSGQIQNTEAFF

SEQ ID NO: 87437 - protein, 13 aa, Homo sapiens
  CDR3 for alpha chain variable domain of TCR clone 43719 (TRAV13-2, TRAJ40)
CAEFTSGTYKYIF

SEQ ID NO: 87438 - protein, 14 aa, Homo sapiens
  CDR3 for beta chain variable domain of TCR clone 43719 (TRBV10-2, TRBJ1-5)
CASSSTGRSQPQHF

SEQ ID NO: 87439 - protein, 14 aa, Homo sapiens
  CDR3 for alpha chain variable domain of TCR clone 43720 (TRAV14/DV4, TRAJ49)
CAFNRYLTGNQFYF

SEQ ID NO: 87440 - protein, 17 aa, Homo sapiens
  CDR3 for beta chain variable domain of TCR clone 43720 (TRBV20-1, TRBJ2-1)
CSASSSGLAGSYNEQFF

SEQ ID NO: 87441 - protein, 13 aa, Homo sapiens
  CDR3 for alpha chain variable domain of TCR clone 43721 (TRAV21, TRAJ27)
CAARPGNAGKSTF

SEQ ID NO: 87442 - protein, 13 aa, Homo sapiens
  CDR3 for beta chain variable domain of TCR clone 43721 (TRBV12-5, TRBJ2-3)
CASGDRQSDTQYF

SEQ ID NO: 87443 - protein, 13 aa, Homo sapiens
  CDR3 for alpha chain variable domain of TCR clone 43722 (TRAV23/DV6, TRAJ47)
CTASSQYGNKLVF

SEQ ID NO: 87444 - protein, 15 aa, Homo sapiens
  CDR3 for beta chain variable domain of TCR clone 43722 (TRBV7-3, TRBJ2-1)
CASSLDGNSYNEQFF

SEQ ID NO: 87445 - protein, 15 aa, Homo sapiens
  CDR3 for alpha chain variable domain of TCR clone 43723 (TRAV8-4, TRAJ47)
CAVSDPEDYGNKLVF

SEQ ID NO: 87446 - protein, 15 aa, Homo sapiens
  CDR3 for beta chain variable domain of TCR clone 43723 (TRBV11-2, TRBJ2-1)
CASSLGPDSYNEQFF

SEQ ID NO: 87447 - protein, 15 aa, Homo sapiens
  CDR3 for alpha chain variable domain of TCR clone 43724 (TRAV13-1, TRAJ10)
CAATILTGGGNKLTF

SEQ ID NO: 87448 - protein, 13 aa, Homo sapiens
  CDR3 for beta chain variable domain of TCR clone 43724 (TRBV12-4, TRBJ1-2)
CASSLRQGKGYTF

SEQ ID NO: 87449 - protein, 12 aa, Homo sapiens
  CDR3 for alpha chain variable domain of TCR clone 43725 (TRAV12-3, TRAJ17)
CAMTLTGNKLTF

SEQ ID NO: 87450 - protein, 16 aa, Homo sapiens
  CDR3 for beta chain variable domain of TCR clone 43725 (TRBV7-6, TRBJ2-1)
CASSAPGPSSYNEQFF

SEQ ID NO: 87451 - protein, 15 aa, Homo sapiens
  CDR3 for alpha chain variable domain of TCR clone 43726 (TRAV3, TRAJ20)
CAVRDIKSSDYKLSF

SEQ ID NO: 87452 - protein, 15 aa, Homo sapiens
  CDR3 for beta chain variable domain of TCR clone 43726 (TRBV7-9, TRBJ1-6)
CASSSPGRGNSPLHF

SEQ ID NO: 87453 - protein, 16 aa, Homo sapiens
  CDR3 for alpha chain variable domain of TCR clone 43727 (TRAV12-3, TRAJ53)
CAMSPGSGGSNYKLTF

SEQ ID NO: 87454 - protein, 12 aa, Homo sapiens
  CDR3 for beta chain variable domain of TCR clone 43727 (TRBV11-2, TRBJ2-2)
CASSLGGGELFS

SEQ ID NO: 87455 - protein, 12 aa, Homo sapiens
  CDR3 for alpha chain variable domain of TCR clone 43728 (TRAV23/DV6, TRAJ16)
CAATGTGQKLLF

SEQ ID NO: 87456 - protein, 15 aa, Homo sapiens
  CDR3 for beta chain variable domain of TCR clone 43728 (TRBV5-1, TRBJ2-3)
CASSLETARTDTQYF

SEQ ID NO: 87457 - protein, 17 aa, Homo sapiens
  CDR3 for alpha chain variable domain of TCR clone 43729 (TRAV38-2/DV8, TRAJ57)
CAYRSVLTQGGSEKLVF

SEQ ID NO: 87458 - protein, 16 aa, Homo sapiens
  CDR3 for beta chain variable domain of TCR clone 43729 (TRBV7-3, TRBJ2-2)
CASSLKRGTLSGKLFF

SEQ ID NO: 87459 - protein, 11 aa, Homo sapiens
  CDR3 for alpha chain variable domain of TCR clone 43730 (TRAV2, TRAJ33)
CAVESNYQLIW

SEQ ID NO: 87460 - protein, 13 aa, Homo sapiens
  CDR3 for beta chain variable domain of TCR clone 43730 (TRBV12-4, TRBJ1-2)
CASSLRQGKGYTF

SEQ ID NO: 87461 - protein, 15 aa, Homo sapiens
  CDR3 for alpha chain variable domain of TCR clone 43731 (TRAV3, TRAJ22)
CAVRDRGGSARQLTF

SEQ ID NO: 87462 - protein, 14 aa, Homo sapiens
  CDR3 for beta chain variable domain of TCR clone 43731 (TRBV20-1, TRBJ2-5)
CSALVPGYQETRYF

SEQ ID NO: 87463 - protein, 13 aa, Homo sapiens
  CDR3 for alpha chain variable domain of TCR clone 43732 (TRAV8-6, TRAJ8)
CAFMNTGFQKLVF

SEQ ID NO: 87464 - protein, 15 aa, Homo sapiens
  CDR3 for beta chain variable domain of TCR clone 43732 (TRBV28, TRBJ2-5)
CASSSGRVIQEAQYF

SEQ ID NO: 87465 - protein, 15 aa, Homo sapiens
  CDR3 for alpha chain variable domain of TCR clone 43733 (TRAV8-4, TRAJ10)
CAVSDGPGGGNKLTF

SEQ ID NO: 87466 - protein, 13 aa, Homo sapiens
  CDR3 for beta chain variable domain of TCR clone 43733 (TRBV28, TRBJ1-3)
RASSFLGSGTIYF

SEQ ID NO: 87467 - protein, 12 aa, Homo sapiens
  CDR3 for alpha chain variable domain of TCR clone 43734 (TRAV12-3, TRAJ17)
CAMTLTGNKLTF

SEQ ID NO: 87468 - protein, 14 aa, Homo sapiens
  CDR3 for beta chain variable domain of TCR clone 43734 (TRBV9, TRBJ2-7)
CASSVGVGSYEQYF

SEQ ID NO: 87469 - protein, 16 aa, Homo sapiens
  CDR3 for alpha chain variable domain of TCR clone 43735 (TRAV30, TRAJ44)
CGTGDKRTGTASKLTF

SEQ ID NO: 87470 - protein, 16 aa, Homo sapiens
  CDR3 for beta chain variable domain of TCR clone 43735 (TRBV10-2, TRBJ2-7)
CASSESPGSSGFEQYF

SEQ ID NO: 87471 - protein, 15 aa, Homo sapiens
  CDR3 for alpha chain variable domain of TCR clone 43736 (TRAV17, TRAJ57)
CATGPSQGGSEKLVF

SEQ ID NO: 87472 - protein, 14 aa, Homo sapiens
  CDR3 for beta chain variable domain of TCR clone 43736 (TRBV12-5, TRBJ2-5)
CASGSQTHQETQYF

SEQ ID NO: 87473 - protein, 15 aa, Homo sapiens
  CDR3 for alpha chain variable domain of TCR clone 43737 (TRAV25, TRAJ52)
CAGRPGGTSYGKLTF

SEQ ID NO: 87474 - protein, 17 aa, Homo sapiens
  CDR3 for beta chain variable domain of TCR clone 43737 (TRBV7-8, TRBJ2-6)
CASSAGTGGDGANVLTF

SEQ ID NO: 87475 - protein, 13 aa, Homo sapiens
  CDR3 for alpha chain variable domain of TCR clone 43738 (TRAV8-3, TRAJ48)
CAVVPFGSEKLTF

SEQ ID NO: 87476 - protein, 15 aa, Homo sapiens
  CDR3 for beta chain variable domain of TCR clone 43738 (TRBV11-2, TRBJ2-1)
CASSSPSTRYNEQFF

SEQ ID NO: 87477 - protein, 16 aa, Homo sapiens
  CDR3 for alpha chain variable domain of TCR clone 43739 (TRAV12-3, TRAJ53)
CAMSPGSGGSNYKMTF

SEQ ID NO: 87478 - protein, 17 aa, Homo sapiens
  CDR3 for beta chain variable domain of TCR clone 43739 (TRBV28, TRBJ2-5)
CASSTPEGDALQETQYF

SEQ ID NO: 87479 - protein, 18 aa, Homo sapiens
  CDR3 for alpha chain variable domain of TCR clone 43740 (TRAV26-2, TRAJ45)
CILSLWGYSGGGADGLTF

SEQ ID NO: 87480 - protein, 17 aa, Homo sapiens
  CDR3 for beta chain variable domain of TCR clone 43740 (TRBV28, TRBJ2-3)
CASSPTPAGGRVDTQYF

SEQ ID NO: 87481 - protein, 14 aa, Homo sapiens
  CDR3 for alpha chain variable domain of TCR clone 43741 (TRAV36/DV7, TRAJ44)
CCGANTGTAGKLTF

SEQ ID NO: 87482 - protein, 16 aa, Homo sapiens
  CDR3 for beta chain variable domain of TCR clone 43741 (TRBV7-9, TRBJ1-2)
CASSLGFSSGEDGYTF

SEQ ID NO: 87483 - protein, 16 aa, Homo sapiens
  CDR3 for alpha chain variable domain of TCR clone 43742 (TRAV21, TRAJ37)
CAVLTAGSSNTGKLIF

SEQ ID NO: 87484 - protein, 13 aa, Homo sapiens
  CDR3 for beta chain variable domain of TCR clone 43742 (TRBV7-9, TRBJ2-5)
CASLPSGRETQYF

SEQ ID NO: 87485 - protein, 13 aa, Homo sapiens
  CDR3 for alpha chain variable domain of TCR clone 43743 (TRAV21, TRAJ27)
CAARPGNAGKSTF

SEQ ID NO: 87486 - protein, 12 aa, Homo sapiens
  CDR3 for beta chain variable domain of TCR clone 43743 (TRBV29-1, TRBJ2-3)
CSVTGGADTQYF

SEQ ID NO: 87487 - protein, 16 aa, Homo sapiens
  CDR3 for alpha chain variable domain of TCR clone 43744 (TRAV12-2, TRAJ45)
CAVKRNPGGGADGPTF

SEQ ID NO: 87488 - protein, 12 aa, Homo sapiens
  CDR3 for beta chain variable domain of TCR clone 43744 (TRBV6-1, TRBJ2-5)
CASSEGRETQYF

SEQ ID NO: 87489 - protein, 12 aa, Homo sapiens
  CDR3 for alpha chain variable domain of TCR clone 43745 (TRAV25, TRAJ35)
CAGIGFGNVLHC

SEQ ID NO: 87490 - protein, 15 aa, Homo sapiens
  CDR3 for beta chain variable domain of TCR clone 43745 (TRBV20-1, TRBJ2-5)
CSAPPRTGFGETQYF

SEQ ID NO: 87491 - protein, 15 aa, Homo sapiens
  CDR3 for alpha chain variable domain of TCR clone 43746 (TRAV12-2, TRAJ53)
CAVNTGGGSNYKLTF

SEQ ID NO: 87492 - protein, 15 aa, Homo sapiens
  CDR3 for beta chain variable domain of TCR clone 43746 (TRBV5-1, TRBJ2-5)
CASSLGLGEIKTQYL

SEQ ID NO: 87493 - protein, 14 aa, Homo sapiens
  CDR3 for alpha chain variable domain of TCR clone 43747 (TRAV1-2, TRAJ8)
CAVREDTGFQKLVF

SEQ ID NO: 87494 - protein, 13 aa, Homo sapiens
  CDR3 for beta chain variable domain of TCR clone 43747 (TRBV4-2, TRBJ2-2)
CASGDRGTGELFF

SEQ ID NO: 87495 - protein, 14 aa, Homo sapiens
  CDR3 for alpha chain variable domain of TCR clone 43748 (TRAV27, TRAJ22)
CAGLPSGSARQLTF

SEQ ID NO: 87496 - protein, 13 aa, Homo sapiens
  CDR3 for beta chain variable domain of TCR clone 43748 (TRBV7-9, TRBJ1-2)
CASSLKQNYGYTF

SEQ ID NO: 87497 - protein, 11 aa, Homo sapiens
  CDR3 for alpha chain variable domain of TCR clone 43749 (TRAV2, TRAJ13)
CASGGYQKVTF

SEQ ID NO: 87498 - protein, 13 aa, Homo sapiens
  CDR3 for beta chain variable domain of TCR clone 43749 (TRBV20-1, TRBJ1-1)
CSARGGGNTEAFF

SEQ ID NO: 87499 - protein, 13 aa, Homo sapiens
  CDR3 for alpha chain variable domain of TCR clone 43750 (TRAV13-2, TRAJ53)
CAEKMGSNYKLTF

SEQ ID NO: 87500 - protein, 13 aa, Homo sapiens
  CDR3 for beta chain variable domain of TCR clone 43750 (TRBV4-1, TRBJ2-2)
CASSQENTGELFF

SEQ ID NO: 87501 - protein, 11 aa, Homo sapiens
  CDR3 for alpha chain variable domain of TCR clone 43751 (TRAV2, TRAJ33)
CAVDSNYQLIW

SEQ ID NO: 87502 - protein, 20 aa, Homo sapiens
  CDR3 for beta chain variable domain of TCR clone 43751 (TRBV28, TRBJ2-1)
CASTPIGRSPGLAGGNEQFF

SEQ ID NO: 87503 - protein, 16 aa, Homo sapiens
  CDR3 for alpha chain variable domain of TCR clone 43752 (TRAV30, TRAJ24)
CGTEIVDADSWGKFQF

SEQ ID NO: 87504 - protein, 17 aa, Homo sapiens
  CDR3 for beta chain variable domain of TCR clone 43752 (TRBV7-9, TRBJ2-1)
CASSLVASYPSYNEQFF

SEQ ID NO: 87505 - protein, 15 aa, Homo sapiens
  CDR3 for alpha chain variable domain of TCR clone 43753 (TRAV21, TRAJ53)
CATLNSGGSNYKLTF

SEQ ID NO: 87506 - protein, 15 aa, Homo sapiens
  CDR3 for beta chain variable domain of TCR clone 43753 (TRBV6-1, TRBJ2-4)
CASSEAAWTINIQYF

SEQ ID NO: 87507 - protein, 13 aa, Homo sapiens
  CDR3 for alpha chain variable domain of TCR clone 43754 (TRAV13-1, TRAJ21)
CAASIYNFNKFYF

SEQ ID NO: 87508 - protein, 13 aa, Homo sapiens
  CDR3 for beta chain variable domain of TCR clone 43754 (TRBV27, TRBJ1-4)
CASSLMGDEKLSF

SEQ ID NO: 87509 - protein, 13 aa, Homo sapiens
  CDR3 for alpha chain variable domain of TCR clone 43755 (TRAV25, TRAJ10)
CAGRTGGGNKLTF

SEQ ID NO: 87510 - protein, 16 aa, Homo sapiens
  CDR3 for beta chain variable domain of TCR clone 43755 (TRBV6-1, TRBJ1-2)
CASSGAWQGRSHGYTF

SEQ ID NO: 87511 - protein, 14 aa, Homo sapiens
  CDR3 for alpha chain variable domain of TCR clone 43756 (TRAV12-2, TRAJ17)
CAVLFKAAGNKLTF

SEQ ID NO: 87512 - protein, 15 aa, Homo sapiens
  CDR3 for beta chain variable domain of TCR clone 43756 (TRBV5-1, TRBJ1-1)
CASSSTTGTNTEAFF

SEQ ID NO: 87513 - protein, 14 aa, Homo sapiens
  CDR3 for alpha chain variable domain of TCR clone 43757 (TRAV1-2, TRAJ8)
CAVREDTGFQKLVF

SEQ ID NO: 87514 - protein, 13 aa, Homo sapiens
  CDR3 for beta chain variable domain of TCR clone 43757 (TRBV7-9, TRBJ2-1)
CASSLGRGSEQFF

SEQ ID NO: 87515 - protein, 13 aa, Homo sapiens
  CDR3 for alpha chain variable domain of TCR clone 43758 (TRAV26-1, TRAJ34)
CIVRPWITDKPIF

SEQ ID NO: 87516 - protein, 13 aa, Homo sapiens
  CDR3 for beta chain variable domain of TCR clone 43758 (TRBV5-1, TRBJ2-1)
CASSLGSYNEQFF

SEQ ID NO: 87517 - protein, 21 aa, Homo sapiens
  CDR3 for alpha chain variable domain of TCR clone 43759 (TRAV1-1, TRAJ6)
CLLLLRCERLERTGGIYIPTF

SEQ ID NO: 87518 - protein, 13 aa, Homo sapiens
  CDR3 for beta chain variable domain of TCR clone 43759 (TRBV10-2, TRBJ2-7)
CASGASGGYEQYF

SEQ ID NO: 87519 - protein, 12 aa, Homo sapiens
  CDR3 for alpha chain variable domain of TCR clone 43760 (TRAV26-1, TRAJ35)
RIGLSFGNVLHC

SEQ ID NO: 87520 - protein, 17 aa, Homo sapiens
  CDR3 for beta chain variable domain of TCR clone 43760 (TRBV11-3, TRBJ2-5)
CASSLPGVRGGKETQYF

SEQ ID NO: 87521 - protein, 17 aa, Homo sapiens
  CDR3 for alpha chain variable domain of TCR clone 43761 (TRAV3, TRAJ6)
CAVRDGPRAGGSYIPTF

SEQ ID NO: 87522 - protein, 13 aa, Homo sapiens
  CDR3 for beta chain variable domain of TCR clone 43761 (TRBV6-1, TRBJ1-1)
CASSRQGNTEAFF

SEQ ID NO: 87523 - protein, 16 aa, Homo sapiens
  CDR3 for alpha chain variable domain of TCR clone 43762 (TRAV2, TRAJ13)
CCGDFMNSGGYQKVTF

SEQ ID NO: 87524 - protein, 12 aa, Homo sapiens
  CDR3 for beta chain variable domain of TCR clone 43762 (TRBV11-2, TRBJ2-2)
CASSLGGGELFF

SEQ ID NO: 87525 - protein, 15 aa, Homo sapiens
  CDR3 for alpha chain variable domain of TCR clone 43763 (TRAV29/DV5, TRAJ24)
CAASGATDSWGNSSL

SEQ ID NO: 87526 - protein, 12 aa, Homo sapiens
  CDR3 for beta chain variable domain of TCR clone 43763 (TRBV11-2, TRBJ2-2)
CASSLPTGELFF

SEQ ID NO: 87527 - protein, 17 aa, Homo sapiens
  CDR3 for alpha chain variable domain of TCR clone 43764 (TRAV13-1, TRAJ52)
CAASSGAGGTSSGKLTF

SEQ ID NO: 87528 - protein, 15 aa, Homo sapiens
  CDR3 for beta chain variable domain of TCR clone 43764 (TRBV2, TRBJ2-1)
CASSELAGSYNEQFF

SEQ ID NO: 87529 - protein, 12 aa, Homo sapiens
  CDR3 for alpha chain variable domain of TCR clone 43765 (TRAV12-3, TRAJ17)
CAMTLTGNKLAF

SEQ ID NO: 87530 - protein, 14 aa, Homo sapiens
  CDR3 for beta chain variable domain of TCR clone 43765 (TRBV20-1, TRBJ2-1)
CSAQIGGSANEQFF

SEQ ID NO: 87531 - protein, 14 aa, Homo sapiens
  CDR3 for alpha chain variable domain of TCR clone 43766 (TRAV8-1, TRAJ24)
CAVNAADSWGKLQF

SEQ ID NO: 87532 - protein, 20 aa, Homo sapiens
  CDR3 for beta chain variable domain of TCR clone 43766 (TRBV4-3, TRBJ2-1)
GPVSLRQQPALDRGVNEQFF

SEQ ID NO: 87533 - protein, 11 aa, Homo sapiens
  CDR3 for alpha chain variable domain of TCR clone 43767 (TRAV12-3, TRAJ27)
CAMANAGKSTF

SEQ ID NO: 87534 - protein, 15 aa, Homo sapiens
  CDR3 for beta chain variable domain of TCR clone 43767 (TRBV7-9, TRBJ2-2)
CASGPLDTFPGELFF

SEQ ID NO: 87535 - protein, 15 aa, Homo sapiens
  CDR3 for alpha chain variable domain of TCR clone 43768 (TRAV17, TRAJ57)
CATGPSQGGSEKLVF

SEQ ID NO: 87536 - protein, 16 aa, Homo sapiens
  CDR3 for beta chain variable domain of TCR clone 43768 (TRBV12-4, TRBJ1-5)
CASSRPVGGSNQRQHF

SEQ ID NO: 87537 - protein, 18 aa, Homo sapiens
  CDR3 for alpha chain variable domain of TCR clone 43769 (TRAV26-1, TRAJ22)
CIVRVALISSGSARQLTF

SEQ ID NO: 87538 - protein, 13 aa, Homo sapiens
  CDR3 for beta chain variable domain of TCR clone 43769 (TRBV13, TRBJ2-5)
CASRPEVGETQYF

SEQ ID NO: 87539 - protein, 14 aa, Homo sapiens
  CDR3 for alpha chain variable domain of TCR clone 43770 (TRAV1-2, TRAJ6)
CAVSLSGGSYIHTF

SEQ ID NO: 87540 - protein, 15 aa, Homo sapiens
  CDR3 for beta chain variable domain of TCR clone 43770 (TRBV28, TRBJ2-7)
CASSPGGRGFYEQYF

SEQ ID NO: 87541 - protein, 11 aa, Homo sapiens
  CDR3 for alpha chain variable domain of TCR clone 43771 (TRAV3, TRAJ17)
PRGAAGNKLTF

SEQ ID NO: 87542 - protein, 14 aa, Homo sapiens
  CDR3 for beta chain variable domain of TCR clone 43771 (TRBV5-4, TRBJ1-1)
CASSLDSRRDEAFF

SEQ ID NO: 87543 - protein, 13 aa, Homo sapiens
  CDR3 for alpha chain variable domain of TCR clone 43772 (TRAV13-2, TRAJ48)
CAEMDFGNEILTF

SEQ ID NO: 87544 - protein, 15 aa, Homo sapiens
  CDR3 for beta chain variable domain of TCR clone 43772 (TRBV7-9, TRBJ1-6)
CASSSPGRGNSPLHF

SEQ ID NO: 87545 - protein, 12 aa, Homo sapiens
  CDR3 for alpha chain variable domain of TCR clone 43773 (TRAV3, TRAJ39)
CAVIEWSNMLTF

SEQ ID NO: 87546 - protein, 14 aa, Homo sapiens
  CDR3 for beta chain variable domain of TCR clone 43773 (TRBV7-8, TRBJ2-3)
CDSSFPDGQDTQYF

SEQ ID NO: 87547 - protein, 16 aa, Homo sapiens
  CDR3 for alpha chain variable domain of TCR clone 43774 (TRAV30, TRAJ24)
CGTEIVDADSWGKFQF

SEQ ID NO: 87548 - protein, 13 aa, Homo sapiens
  CDR3 for beta chain variable domain of TCR clone 43774 (TRBV7-2, TRBJ2-2)
CASSSVRAGELFF

SEQ ID NO: 87549 - protein, 14 aa, Homo sapiens
  CDR3 for alpha chain variable domain of TCR clone 43775 (TRAV12-2, TRAJ17)
CAALFKAAGNKLTF

SEQ ID NO: 87550 - protein, 16 aa, Homo sapiens
  CDR3 for beta chain variable domain of TCR clone 43775 (TRBV20-1, TRBJ2-2)
CSASASGIAGAGELFF

SEQ ID NO: 87551 - protein, 15 aa, Homo sapiens
  CDR3 for alpha chain variable domain of TCR clone 43776 (TRAV27, TRAJ38)
CAASRNAGNNRKLIW

SEQ ID NO: 87552 - protein, 13 aa, Homo sapiens
  CDR3 for beta chain variable domain of TCR clone 43776 (TRBV12-5, TRBJ2-3)
CASGDRQSDTQYF

SEQ ID NO: 87553 - protein, 16 aa, Homo sapiens
  CDR3 for alpha chain variable domain of TCR clone 43777 (TRAV20, TRAJ22)
CAVQASSSGSSRQLTF

SEQ ID NO: 87554 - protein, 13 aa, Homo sapiens
  CDR3 for beta chain variable domain of TCR clone 43777 (TRBV7-2, TRBJ2-5)
CASSQTSVETQYF

SEQ ID NO: 87555 - protein, 13 aa, Homo sapiens
  CDR3 for alpha chain variable domain of TCR clone 43778 (TRAV13-2, TRAJ8)
CAFMSTGFQKLVF

SEQ ID NO: 87556 - protein, 17 aa, Homo sapiens
  CDR3 for beta chain variable domain of TCR clone 43778 (TRBV28, TRBJ2-1)
CASSSARQALTYNEQFF

SEQ ID NO: 87557 - protein, 12 aa, Homo sapiens
  CDR3 for alpha chain variable domain of TCR clone 43779 (TRAV36/DV7, TRAJ54)
CAVVRGAQKLVF

SEQ ID NO: 87558 - protein, 14 aa, Homo sapiens
  CDR3 for beta chain variable domain of TCR clone 43779 (TRBV7-3, TRBJ1-1)
CASNLKGGNTEAFF

SEQ ID NO: 87559 - protein, 14 aa, Homo sapiens
  CDR3 for alpha chain variable domain of TCR clone 43780 (TRAV26-1, TRAJ38)
CIADNAGNNRKLIW

SEQ ID NO: 87560 - protein, 16 aa, Homo sapiens
  CDR3 for beta chain variable domain of TCR clone 43780 (TRBV24-1, TRBJ2-3)
CATSDPGTGATDTQYF

SEQ ID NO: 87561 - protein, 17 aa, Homo sapiens
  CDR3 for alpha chain variable domain of TCR clone 43781 (TRAV4, TRAJ18)
CLVVAAGRGSTLGRLYF

SEQ ID NO: 87562 - protein, 17 aa, Homo sapiens
  CDR3 for beta chain variable domain of TCR clone 43781 (TRBV28, TRBJ2-2)
CASSLATGVGDAGELFF

SEQ ID NO: 87563 - protein, 14 aa, Homo sapiens
  CDR3 for alpha chain variable domain of TCR clone 43782 (TRAV13-1, TRAJ15)
CAASKTQAGTALIF

SEQ ID NO: 87564 - protein, 17 aa, Homo sapiens
  CDR3 for beta chain variable domain of TCR clone 43782 (TRBV28, TRBJ2-7)
CASSPLPAGGKSYEQYF

SEQ ID NO: 87565 - protein, 12 aa, Homo sapiens
  CDR3 for alpha chain variable domain of TCR clone 43783 (TRAV8-3, TRAJ27)
CAVGAEAGKSTL

SEQ ID NO: 87566 - protein, 14 aa, Homo sapiens
  CDR3 for beta chain variable domain of TCR clone 43783 (TRBV2, TRBJ2-1)
CASRLIVGHDEQFF

SEQ ID NO: 87567 - protein, 14 aa, Homo sapiens
  CDR3 for alpha chain variable domain of TCR clone 43784 (TRAV1-2, TRAJ8)
CAVREDTGFQKLVF

SEQ ID NO: 87568 - protein, 16 aa, Homo sapiens
  CDR3 for beta chain variable domain of TCR clone 43784 (TRBV27, TRBJ1-6)
CASSFSRSSYNSPLHF

SEQ ID NO: 87569 - protein, 16 aa, Homo sapiens
  CDR3 for alpha chain variable domain of TCR clone 43785 (TRAV12-3, TRAJ53)
CAMSPGSGGSNYKLTF

SEQ ID NO: 87570 - protein, 16 aa, Homo sapiens
  CDR3 for beta chain variable domain of TCR clone 43785 (TRBV4-2, TRBJ1-1)
CASNQAGFGMNTEAFF

SEQ ID NO: 87571 - protein, 11 aa, Homo sapiens
  CDR3 for alpha chain variable domain of TCR clone 43786 (TRAV12-2, TRAJ23)
RAYNQGGKLIF

SEQ ID NO: 87572 - protein, 15 aa, Homo sapiens
  CDR3 for beta chain variable domain of TCR clone 43786 (TRBV20-1, TRBJ2-7)
CSARKGLAESYEQYF

SEQ ID NO: 87573 - protein, 14 aa, Homo sapiens
  CDR3 for alpha chain variable domain of TCR clone 43787 (TRAV29/DV5, TRAJ45)
CAASFRGGADGLTF

SEQ ID NO: 87574 - protein, 11 aa, Homo sapiens
  CDR3 for beta chain variable domain of TCR clone 43787 (TRBV11-2, TRBJ2-2)
CASSLPGELLF

SEQ ID NO: 87575 - protein, 16 aa, Homo sapiens
  CDR3 for alpha chain variable domain of TCR clone 43788 (TRAV30, TRAJ24)
CGTEIVDADSWGKFQF

SEQ ID NO: 87576 - protein, 14 aa, Homo sapiens
  CDR3 for beta chain variable domain of TCR clone 43788 (TRBV19, TRBJ2-1)
CASPTFVLSSEQFF

SEQ ID NO: 87577 - protein, 14 aa, Homo sapiens
  CDR3 for alpha chain variable domain of TCR clone 43789 (TRAV13-1, TRAJ44)
CAAKATGTASTLTF

SEQ ID NO: 87578 - protein, 13 aa, Homo sapiens
  CDR3 for beta chain variable domain of TCR clone 43789 (TRBV5-5, TRBJ1-2)
CASSFWRGEDYTF

SEQ ID NO: 87579 - protein, 15 aa, Homo sapiens
  CDR3 for alpha chain variable domain of TCR clone 43790 (TRAV12-1, TRAJ44)
CVVFVNTGTASKLTF

SEQ ID NO: 87580 - protein, 16 aa, Homo sapiens
  CDR3 for beta chain variable domain of TCR clone 43790 (TRBV11-2, TRBJ2-7)
CASSPTTGGVSYEQYF

SEQ ID NO: 87581 - protein, 19 aa, Homo sapiens
  CDR3 for alpha chain variable domain of TCR clone 43791 (TRAV2, TRAJ20)
ILQVREADAAVYRDCKLSF

SEQ ID NO: 87582 - protein, 14 aa, Homo sapiens
  CDR3 for beta chain variable domain of TCR clone 43791 (TRBV7-6, TRBJ2-3)
CASSLGTVTDTQYF

SEQ ID NO: 87583 - protein, 16 aa, Homo sapiens
  CDR3 for alpha chain variable domain of TCR clone 43792 (TRAV30, TRAJ24)
CGTEIVDADSWGKFQF

SEQ ID NO: 87584 - protein, 13 aa, Homo sapiens
  CDR3 for beta chain variable domain of TCR clone 43792 (TRBV29-1, TRBJ2-1)
CSVEGGRVNEQFF

SEQ ID NO: 87585 - protein, 10 aa, Homo sapiens
  CDR3 for alpha chain variable domain of TCR clone 43793 (TRAV17, TRAJ36)
CATVAGNLFF

SEQ ID NO: 87586 - protein, 12 aa, Homo sapiens
  CDR3 for beta chain variable domain of TCR clone 43793 (TRBV11-2, TRBJ2-4)
CASISASGSEYF

SEQ ID NO: 87587 - protein, 11 aa, Homo sapiens
  CDR3 for alpha chain variable domain of TCR clone 43794 (TRAV12-3, TRAJ43)
CAMSVSNDMRF

SEQ ID NO: 87588 - protein, 13 aa, Homo sapiens
  CDR3 for beta chain variable domain of TCR clone 43794 (TRBV20-1, TRBJ1-1)
CSAPLGGGTAAFF

SEQ ID NO: 87589 - protein, 15 aa, Homo sapiens
  CDR3 for alpha chain variable domain of TCR clone 43795 (TRAV2, TRAJ9)
CAVEDRGTGGFKTIF

SEQ ID NO: 87590 - protein, 14 aa, Homo sapiens
  CDR3 for beta chain variable domain of TCR clone 43795 (TRBV4-1, TRBJ2-2)
CASSQAANTGELFF

SEQ ID NO: 87591 - protein, 14 aa, Homo sapiens
  CDR3 for alpha chain variable domain of TCR clone 43796 (TRAV26-1, TRAJ38)
CIADNAGNNRKLIW

SEQ ID NO: 87592 - protein, 18 aa, Homo sapiens
  CDR3 for beta chain variable domain of TCR clone 43796 (TRBV11-2, TRBJ2-3)
CASSLGGASRGAPNTQYF

SEQ ID NO: 87593 - protein, 13 aa, Homo sapiens
  CDR3 for alpha chain variable domain of TCR clone 43797 (TRAV12-1, TRAJ42)
CVVNDPRQGNLIF

SEQ ID NO: 87594 - protein, 15 aa, Homo sapiens
  CDR3 for beta chain variable domain of TCR clone 43797 (TRBV20-1, TRBJ2-3)
CGARESRGQGYTQYF

SEQ ID NO: 87595 - protein, 15 aa, Homo sapiens
  CDR3 for alpha chain variable domain of TCR clone 43798 (TRAV12-2, TRAJ53)
CAVNGGGGSNYKLTF

SEQ ID NO: 87596 - protein, 14 aa, Homo sapiens
  CDR3 for beta chain variable domain of TCR clone 43798 (TRBV9, TRBJ2-7)
CASSVGVGSYEQYF

SEQ ID NO: 87597 - protein, 13 aa, Homo sapiens
  CDR3 for alpha chain variable domain of TCR clone 43799 (TRAV2, TRAJ40)
CAVVTSGTYKYIF

SEQ ID NO: 87598 - protein, 16 aa, Homo sapiens
  CDR3 for beta chain variable domain of TCR clone 43799 (TRBV2, TRBJ2-4)
CASSEAPGGEQNIQYF

SEQ ID NO: 87599 - protein, 14 aa, Homo sapiens
  CDR3 for alpha chain variable domain of TCR clone 43800 (TRAV8-4, TRAJ40)
CAVIPTSGTYKYIF

SEQ ID NO: 87600 - protein, 17 aa, Homo sapiens
  CDR3 for beta chain variable domain of TCR clone 43800 (TRBV11-2, TRBJ2-1)
CASSLYPPGVEYNEQFF

SEQ ID NO: 87601 - protein, 16 aa, Homo sapiens
  CDR3 for alpha chain variable domain of TCR clone 43801 (TRAV30, TRAJ24)
CGTEIVDADSWGKFQV

SEQ ID NO: 87602 - protein, 19 aa, Homo sapiens
  CDR3 for beta chain variable domain of TCR clone 43801 (TRBV25-1, TRBJ2-2)
CAILVYRVDRGRKTGELFF

SEQ ID NO: 87603 - protein, 18 aa, Homo sapiens
  CDR3 for alpha chain variable domain of TCR clone 43802 (TRAV21, TRAJ52)
CAVRPSPAGGTSYGKLTF

SEQ ID NO: 87604 - protein, 17 aa, Homo sapiens
  CDR3 for beta chain variable domain of TCR clone 43802 (TRBV13, TRBJ2-3)
CASSLSRVAGGRNTQYI

SEQ ID NO: 87605 - protein, 13 aa, Homo sapiens
  CDR3 for alpha chain variable domain of TCR clone 43803 (TRAV8-6, TRAJ8)
CAVSNTGFQNLVF

SEQ ID NO: 87606 - protein, 15 aa, Homo sapiens
  CDR3 for beta chain variable domain of TCR clone 43803 (TRBV28, TRBJ2-5)
CASSSGRTIQETQYF

SEQ ID NO: 87607 - protein, 14 aa, Homo sapiens
  CDR3 for alpha chain variable domain of TCR clone 43804 (TRAV29/DV5, TRAJ36)
CAARRKTGANNLFF

SEQ ID NO: 87608 - protein, 14 aa, Homo sapiens
  CDR3 for beta chain variable domain of TCR clone 43804 (TRBV4-1, TRBJ2-7)
CASSPVAGGDEQYF

SEQ ID NO: 87609 - protein, 15 aa, Homo sapiens
  CDR3 for alpha chain variable domain of TCR clone 43805 (TRAV12-2, TRAJ53)
CAVNGGGGSNYKLTF

SEQ ID NO: 87610 - protein, 17 aa, Homo sapiens
  CDR3 for beta chain variable domain of TCR clone 43805 (TRBV7-3, TRBJ2-3)
CASSLMKRRRGADTQYF

SEQ ID NO: 87611 - protein, 11 aa, Homo sapiens
  CDR3 for alpha chain variable domain of TCR clone 43806 (TRAV16, TRAJ33)
RALHSNYQLIW

SEQ ID NO: 87612 - protein, 15 aa, Homo sapiens
  CDR3 for beta chain variable domain of TCR clone 43806 (TRBV4-1, TRBJ2-7)
CASSQQGQGFDEQYF

SEQ ID NO: 87613 - protein, 16 aa, Homo sapiens
  CDR3 for alpha chain variable domain of TCR clone 43807 (TRAV16, TRAJ57)
CAPYLITQDGSEKLVF

SEQ ID NO: 87614 - protein, 17 aa, Homo sapiens
  CDR3 for beta chain variable domain of TCR clone 43807 (TRBV24-1, TRBJ2-4)
CATSDAEARGVRNIQYF

SEQ ID NO: 87615 - protein, 14 aa, Homo sapiens
  CDR3 for alpha chain variable domain of TCR clone 43808 (TRAV35, TRAJ22)
CAGLRPGSARQLTF

SEQ ID NO: 87616 - protein, 14 aa, Homo sapiens
  CDR3 for beta chain variable domain of TCR clone 43808 (TRBV11-3, TRBJ2-3)
CASSPGQGPDTQYF

SEQ ID NO: 87617 - protein, 19 aa, Homo sapiens
  CDR3 for alpha chain variable domain of TCR clone 43809 (TRAV38-1, TRAJ53)
CAFMKHGLESGGSNYKLTL

SEQ ID NO: 87618 - protein, 13 aa, Homo sapiens
  CDR3 for beta chain variable domain of TCR clone 43809 (TRBV19, TRBJ2-7)
CASSPRQSYEQYF

SEQ ID NO: 87619 - protein, 11 aa, Homo sapiens
  CDR3 for alpha chain variable domain of TCR clone 43810 (TRAV2, TRAJ33)
CAVDSTYQLIW

SEQ ID NO: 87620 - protein, 12 aa, Homo sapiens
  CDR3 for beta chain variable domain of TCR clone 43810 (TRBV11-2, TRBJ2-2)
CASSLGGGELFF

SEQ ID NO: 87621 - protein, 10 aa, Homo sapiens
  CDR3 for alpha chain variable domain of TCR clone 43811 (TRAV26-1, TRAJ22)
CIAGSRQLTF

SEQ ID NO: 87622 - protein, 17 aa, Homo sapiens
  CDR3 for beta chain variable domain of TCR clone 43811 (TRBV5-4, TRBJ1-1)
CASFPPKGRLQNAEAFF

SEQ ID NO: 87623 - protein, 15 aa, Homo sapiens
  CDR3 for alpha chain variable domain of TCR clone 43812 (TRAV8-4, TRAJ3)
CAVTGENLVQQCFQD

SEQ ID NO: 87624 - protein, 12 aa, Homo sapiens
  CDR3 for beta chain variable domain of TCR clone 43812 (TRBV11-2, TRBJ2-2)
CASSLGGGELFF

SEQ ID NO: 87625 - protein, 16 aa, Homo sapiens
  CDR3 for alpha chain variable domain of TCR clone 43813 (TRAV30, TRAJ24)
CGTEIVDADSWGKSQF

SEQ ID NO: 87626 - protein, 12 aa, Homo sapiens
  CDR3 for beta chain variable domain of TCR clone 43813 (TRBV11-2, TRBJ2-2)
CASSLGGGELFF

SEQ ID NO: 87627 - protein, 15 aa, Homo sapiens
  CDR3 for alpha chain variable domain of TCR clone 43814 (TRAV26-1, TRAJ56)
CIVRVATGANSKLTF

SEQ ID NO: 87628 - protein, 15 aa, Homo sapiens
  CDR3 for beta chain variable domain of TCR clone 43814 (TRBV27, TRBJ2-7)
CASSPQREGQRERYF

SEQ ID NO: 87629 - protein, 12 aa, Homo sapiens
  CDR3 for alpha chain variable domain of TCR clone 43815 (TRAV12-3, TRAJ17)
CAMTLTGNKLTF

SEQ ID NO: 87630 - protein, 13 aa, Homo sapiens
  CDR3 for beta chain variable domain of TCR clone 43815 (TRBV7-9, TRBJ1-2)
CASSLKQNYGYSF

SEQ ID NO: 87631 - protein, 21 aa, Homo sapiens
  CDR3 for alpha chain variable domain of TCR clone 43816 (TRAV25, TRAJ47)
TATQTTDVGTYFWEYGNKLVF

SEQ ID NO: 87632 - protein, 13 aa, Homo sapiens
  CDR3 for beta chain variable domain of TCR clone 43816 (TRBV20-1, TRBJ2-5)
CSAREAFRETQYF

SEQ ID NO: 87633 - protein, 14 aa, Homo sapiens
  CDR3 for alpha chain variable domain of TCR clone 43817 (TRAV3, TRAJ9)
CAVRLNTGGFKTIF

SEQ ID NO: 87634 - protein, 16 aa, Homo sapiens
  CDR3 for beta chain variable domain of TCR clone 43817 (TRBV12-5, TRBJ2-5)
CASGPRTSGNQEAQYF

SEQ ID NO: 87635 - protein, 16 aa, Homo sapiens
  CDR3 for alpha chain variable domain of TCR clone 43818 (TRAV3, TRAJ10)
CAVRDMRAGGGKKLTF

SEQ ID NO: 87636 - protein, 13 aa, Homo sapiens
  CDR3 for beta chain variable domain of TCR clone 43818 (TRBV6-1, TRBJ1-1)
CASSRQGNTEAFF

SEQ ID NO: 87637 - protein, 13 aa, Homo sapiens
  CDR3 for alpha chain variable domain of TCR clone 43819 (TRAV8-4, TRAJ48)
CAVSLFGNEQLTF

SEQ ID NO: 87638 - protein, 15 aa, Homo sapiens
  CDR3 for beta chain variable domain of TCR clone 43819 (TRBV20-1, TRBJ2-7)
CSARKGLAESYEQYF

SEQ ID NO: 87639 - protein, 14 aa, Homo sapiens
  CDR3 for alpha chain variable domain of TCR clone 43820 (TRAV1-2, TRAJ8)
CAVREDTGFQKLVF

SEQ ID NO: 87640 - protein, 15 aa, Homo sapiens
  CDR3 for beta chain variable domain of TCR clone 43820 (TRBV19, TRBJ2-1)
SASSTGTSSYNEQFF

SEQ ID NO: 87641 - protein, 14 aa, Homo sapiens
  CDR3 for alpha chain variable domain of TCR clone 43821 (TRAV26-1, TRAJ45)
CIVRVVGGADGLPF

SEQ ID NO: 87642 - protein, 16 aa, Homo sapiens
  CDR3 for beta chain variable domain of TCR clone 43821 (TRBV7-9, TRBJ1-1)
CASSLTQVRSNTEAFF

SEQ ID NO: 87643 - protein, 18 aa, Homo sapiens
  CDR3 for alpha chain variable domain of TCR clone 43822 (TRAV29/DV5, TRAJ52)
CAAGVRGAGGTSYGKLTF

SEQ ID NO: 87644 - protein, 16 aa, Homo sapiens
  CDR3 for beta chain variable domain of TCR clone 43822 (TRBV7-3, TRBJ2-2)
CASSLKRGTLSGELFF

SEQ ID NO: 87645 - protein, 13 aa, Homo sapiens
  CDR3 for alpha chain variable domain of TCR clone 43823 (TRAV27, TRAJ6)
CAGGTRGSYIPTF

SEQ ID NO: 87646 - protein, 14 aa, Homo sapiens
  CDR3 for beta chain variable domain of TCR clone 43823 (TRBV13, TRBJ2-3)
CASSSASWTDTQYF

SEQ ID NO: 87647 - protein, 14 aa, Homo sapiens
  CDR3 for alpha chain variable domain of TCR clone 43824 (TRAV12-2, TRAJ13)
RAVKKTGGYQKVTF

SEQ ID NO: 87648 - protein, 15 aa, Homo sapiens
  CDR3 for beta chain variable domain of TCR clone 43824 (TRBV20-1, TRBJ2-7)
CSARDRVSGMDEQYF

SEQ ID NO: 87649 - protein, 11 aa, Homo sapiens
  CDR3 for alpha chain variable domain of TCR clone 43825 (TRAV35, TRAJ30)
CAGPGDDKIIF

SEQ ID NO: 87650 - protein, 18 aa, Homo sapiens
  CDR3 for beta chain variable domain of TCR clone 43825 (TRBV7-6, TRBJ2-1)
CASSPRTSGMGSYNEQFF

SEQ ID NO: 87651 - protein, 15 aa, Homo sapiens
  CDR3 for alpha chain variable domain of TCR clone 43826 (TRAV21, TRAJ53)
CATLNSGGSNYKLTF

SEQ ID NO: 87652 - protein, 15 aa, Homo sapiens
  CDR3 for beta chain variable domain of TCR clone 43826 (TRBV18, TRBJ2-7)
CASSPSSTGNYEQYF

SEQ ID NO: 87653 - protein, 13 aa, Homo sapiens
  CDR3 for alpha chain variable domain of TCR clone 43827 (TRAV2, TRAJ39)
TTVHTNAGNMLTF

SEQ ID NO: 87654 - protein, 16 aa, Homo sapiens
  CDR3 for beta chain variable domain of TCR clone 43827 (TRBV24-1, TRBJ2-3)
CATSGYRDRDTDTQYF

SEQ ID NO: 87655 - protein, 13 aa, Homo sapiens
  CDR3 for alpha chain variable domain of TCR clone 43828 (TRAV13-1, TRAJ21)
CAASIYNFNKFYF

SEQ ID NO: 87656 - protein, 15 aa, Homo sapiens
  CDR3 for beta chain variable domain of TCR clone 43828 (TRBV20-1, TRBJ2-7)
CSARDRVSGMDEQYF

SEQ ID NO: 87657 - protein, 11 aa, Homo sapiens
  CDR3 for alpha chain variable domain of TCR clone 43829 (TRAV12-3, TRAJ27)
CAMANAGKSTF

SEQ ID NO: 87658 - protein, 14 aa, Homo sapiens
  CDR3 for beta chain variable domain of TCR clone 43829 (TRBV5-1, TRBJ1-1)
CASSRTTGDTEAFF

SEQ ID NO: 87659 - protein, 11 aa, Homo sapiens
  CDR3 for alpha chain variable domain of TCR clone 43830 (TRAV12-3, TRAJ43)
CAMSVSNDMRF

SEQ ID NO: 87660 - protein, 14 aa, Homo sapiens
  CDR3 for beta chain variable domain of TCR clone 43830 (TRBV4-2, TRBJ2-1)
CASGLDRAYNEQFF

SEQ ID NO: 87661 - protein, 16 aa, Homo sapiens
  CDR3 for alpha chain variable domain of TCR clone 43831 (TRAV3, TRAJ37)
CAVRGKGSGNTGKLIF

SEQ ID NO: 87662 - protein, 15 aa, Homo sapiens
  CDR3 for beta chain variable domain of TCR clone 43831 (TRBV3-1, TRBJ2-3)
CASSRTLDSLDTQYF

SEQ ID NO: 87663 - protein, 12 aa, Homo sapiens
  CDR3 for alpha chain variable domain of TCR clone 43832 (TRAV12-2, TRAJ3)
CAVWSSASKIIF

SEQ ID NO: 87664 - protein, 12 aa, Homo sapiens
  CDR3 for beta chain variable domain of TCR clone 43832 (TRBV11-2, TRBJ2-1)
CASSPGSNEQFF

SEQ ID NO: 87665 - protein, 14 aa, Homo sapiens
  CDR3 for alpha chain variable domain of TCR clone 43833 (TRAV1-2, TRAJ8)
CAVREDTGFQELVF

SEQ ID NO: 87666 - protein, 13 aa, Homo sapiens
  CDR3 for beta chain variable domain of TCR clone 43833 (TRBV19, TRBJ1-2)
CASSVPGQDGYTF

SEQ ID NO: 87667 - protein, 12 aa, Homo sapiens
  CDR3 for alpha chain variable domain of TCR clone 43834 (TRAV3, TRAJ20)
CAVRDGDSKLSF

SEQ ID NO: 87668 - protein, 13 aa, Homo sapiens
  CDR3 for beta chain variable domain of TCR clone 43834 (TRBV9, TRBJ2-1)
CASSVGQGGEQFF

SEQ ID NO: 87669 - protein, 13 aa, Homo sapiens
  CDR3 for alpha chain variable domain of TCR clone 43835 (TRAV36/DV7, TRAJ7)
CAGTRYGNNRLAF

SEQ ID NO: 87670 - protein, 15 aa, Homo sapiens
  CDR3 for beta chain variable domain of TCR clone 43835 (TRBV11-3, TRBJ2-7)
CAGSPGPASSYEQYF

SEQ ID NO: 87671 - protein, 13 aa, Homo sapiens
  CDR3 for alpha chain variable domain of TCR clone 43836 (TRAV12-1, TRAJ22)
CVVYSGPARQLTF

SEQ ID NO: 87672 - protein, 10 aa, Homo sapiens
  CDR3 for beta chain variable domain of TCR clone 43836 (TRBV6-3, TRBJ2-2)
CASRDGELFF

SEQ ID NO: 87673 - protein, 14 aa, Homo sapiens
  CDR3 for alpha chain variable domain of TCR clone 43837 (TRAV12-1, TRAJ17)
CVVNYKAAGNKLTF

SEQ ID NO: 87674 - protein, 14 aa, Homo sapiens
  CDR3 for beta chain variable domain of TCR clone 43837 (TRBV20-1, TRBJ1-1)
CSAQTRIGGTEAFS

SEQ ID NO: 87675 - protein, 13 aa, Homo sapiens
  CDR3 for alpha chain variable domain of TCR clone 43838 (TRAV3, TRAJ41)
CAVSSNSRYALNF

SEQ ID NO: 87676 - protein, 13 aa, Homo sapiens
  CDR3 for beta chain variable domain of TCR clone 43838 (TRBV20-1, TRBJ2-2)
CSALSGGAGELFF

SEQ ID NO: 87677 - protein, 16 aa, Homo sapiens
  CDR3 for alpha chain variable domain of TCR clone 43839 (TRAV30, TRAJ24)
CGTEIVDADSWGKFQF

SEQ ID NO: 87678 - protein, 16 aa, Homo sapiens
  CDR3 for beta chain variable domain of TCR clone 43839 (TRBV7-2, TRBJ2-5)
CASSSKWLSGQETQYF

SEQ ID NO: 87679 - protein, 16 aa, Homo sapiens
  CDR3 for alpha chain variable domain of TCR clone 43840 (TRAV30, TRAJ24)
CGTEIVDADSWGKFKF

SEQ ID NO: 87680 - protein, 18 aa, Homo sapiens
  CDR3 for beta chain variable domain of TCR clone 43840 (TRBV7-9, TRBJ2-7)
CASSLTTSGSRTWYEQYF

SEQ ID NO: 87681 - protein, 14 aa, Homo sapiens
  CDR3 for alpha chain variable domain of TCR clone 43841 (TRAV21, TRAJ15)
CAVSLNQAGTALIF

SEQ ID NO: 87682 - protein, 11 aa, Homo sapiens
  CDR3 for beta chain variable domain of TCR clone 43841 (TRBV20-1, TRBJ2-7)
CSARTSHEQYF

SEQ ID NO: 87683 - protein, 14 aa, Homo sapiens
  CDR3 for alpha chain variable domain of TCR clone 43842 (TRAV8-3, TRAJ9)
CALVYNTGGFKTIF

SEQ ID NO: 87684 - protein, 14 aa, Homo sapiens
  CDR3 for beta chain variable domain of TCR clone 43842 (TRBV7-3, TRBJ2-2)
CASSSGGYTGELFF

SEQ ID NO: 87685 - protein, 14 aa, Homo sapiens
  CDR3 for alpha chain variable domain of TCR clone 43843 (TRAV8-3, TRAJ20)
CDVGPRGNDYKLSF

SEQ ID NO: 87686 - protein, 11 aa, Homo sapiens
  CDR3 for beta chain variable domain of TCR clone 43843 (TRBV10-3, TRBJ2-2)
CATKGTGELFF

SEQ ID NO: 87687 - protein, 11 aa, Homo sapiens
  CDR3 for alpha chain variable domain of TCR clone 43844 (TRAV17, TRAJ31)
CATSDNARLMF

SEQ ID NO: 87688 - protein, 16 aa, Homo sapiens
  CDR3 for beta chain variable domain of TCR clone 43844 (TRBV7-8, TRBJ2-4)
CASSAERTLAKNIQYF

SEQ ID NO: 87689 - protein, 14 aa, Homo sapiens
  CDR3 for alpha chain variable domain of TCR clone 43845 (TRAV13-1, TRAJ9)
CAASSLTGGFKTIF

SEQ ID NO: 87690 - protein, 13 aa, Homo sapiens
  CDR3 for beta chain variable domain of TCR clone 43845 (TRBV20-1, TRBJ1-1)
CSAGTVGNTEAFF

SEQ ID NO: 87691 - protein, 13 aa, Homo sapiens
  CDR3 for alpha chain variable domain of TCR clone 43846 (TRAV12-3, TRAJ40)
CAMSGSGTYKYIF

SEQ ID NO: 87692 - protein, 14 aa, Homo sapiens
  CDR3 for beta chain variable domain of TCR clone 43846 (TRBV7-2, TRBJ1-5)
CASSTQGAGQPQHF

SEQ ID NO: 87693 - protein, 16 aa, Homo sapiens
  CDR3 for alpha chain variable domain of TCR clone 43847 (TRAV30, TRAJ57)
CGTGWAPQGGSEKLVF

SEQ ID NO: 87694 - protein, 14 aa, Homo sapiens
  CDR3 for beta chain variable domain of TCR clone 43847 (TRBV18, TRBJ1-1)
CASPPGFQGVEAFF

SEQ ID NO: 87695 - protein, 13 aa, Homo sapiens
  CDR3 for alpha chain variable domain of TCR clone 43848 (TRAV12-3, TRAJ7)
CAMTPYGDNRLAF

SEQ ID NO: 87696 - protein, 16 aa, Homo sapiens
  CDR3 for beta chain variable domain of TCR clone 43848 (TRBV20-1, TRBJ1-4)
CSARPYGGELNEKLFF

SEQ ID NO: 87697 - protein, 17 aa, Homo sapiens
  CDR3 for alpha chain variable domain of TCR clone 43849 (TRAV13-1, TRAJ31)
CAPRDRLMFGDGTQLVV

SEQ ID NO: 87698 - protein, 12 aa, Homo sapiens
  CDR3 for beta chain variable domain of TCR clone 43849 (TRBV7-9, TRBJ2-7)
CASSLEGYEQYV

SEQ ID NO: 87699 - protein, 10 aa, Homo sapiens
  CDR3 for alpha chain variable domain of TCR clone 43850 (TRAV25, TRAJ20)
CAVNDYKLSF

SEQ ID NO: 87700 - protein, 17 aa, Homo sapiens
  CDR3 for beta chain variable domain of TCR clone 43850 (TRBV5-4, TRBJ2-1)
CASSSAGGREPYNEQFF

SEQ ID NO: 87701 - protein, 14 aa, Homo sapiens
  CDR3 for alpha chain variable domain of TCR clone 43851 (TRAV38-1, TRAJ40)
CALRPISGTYKYIF

SEQ ID NO: 87702 - protein, 14 aa, Homo sapiens
  CDR3 for beta chain variable domain of TCR clone 43851 (TRBV25-1, TRBJ1-1)
CASTHLGGNTEAFF

SEQ ID NO: 87703 - protein, 13 aa, Homo sapiens
  CDR3 for alpha chain variable domain of TCR clone 43852 (TRAV3, TRAJ27)
CAVRPLGAGKSTF

SEQ ID NO: 87704 - protein, 15 aa, Homo sapiens
  CDR3 for beta chain variable domain of TCR clone 43852 (TRBV2, TRBJ2-1)
CASSELAGSYNEQFF

SEQ ID NO: 87705 - protein, 11 aa, Homo sapiens
  CDR3 for alpha chain variable domain of TCR clone 43853 (TRAV1-2, TRAJ20)
CAVSNDYKLSF

SEQ ID NO: 87706 - protein, 17 aa, Homo sapiens
  CDR3 for beta chain variable domain of TCR clone 43853 (TRBV7-8, TRBJ2-6)
CASSAGTGGAGANVLTL

SEQ ID NO: 87707 - protein, 12 aa, Homo sapiens
  CDR3 for alpha chain variable domain of TCR clone 43854 (TRAV2, TRAJ9)
CAVGAGGFKTIF

SEQ ID NO: 87708 - protein, 16 aa, Homo sapiens
  CDR3 for beta chain variable domain of TCR clone 43854 (TRBV13, TRBJ2-2)
CAISPRTGEHTGELFF

SEQ ID NO: 87709 - protein, 14 aa, Homo sapiens
  CDR3 for alpha chain variable domain of TCR clone 43855 (TRAV12-3, TRAJ10)
SHLPLTGGGNKLTF

SEQ ID NO: 87710 - protein, 16 aa, Homo sapiens
  CDR3 for beta chain variable domain of TCR clone 43855 (TRBV12-4, TRBJ2-5)
CASSFFVRGRQETQYF

SEQ ID NO: 87711 - protein, 12 aa, Homo sapiens
  CDR3 for alpha chain variable domain of TCR clone 43856 (TRAV1-1, TRAJ9)
CAVDTGGFKTIF

SEQ ID NO: 87712 - protein, 12 aa, Homo sapiens
  CDR3 for beta chain variable domain of TCR clone 43856 (TRBV7-8, TRBJ2-7)
CASSLGDREQYF

SEQ ID NO: 87713 - protein, 15 aa, Homo sapiens
  CDR3 for alpha chain variable domain of TCR clone 43857 (TRAV12-3, TRAJ49)
CAMAVTPNTGNQFYF

SEQ ID NO: 87714 - protein, 18 aa, Homo sapiens
  CDR3 for beta chain variable domain of TCR clone 43857 (TRBV4-1, TRBJ1-5)
CASSQDPRGQGLNQHQHF

SEQ ID NO: 87715 - protein, 15 aa, Homo sapiens
  CDR3 for alpha chain variable domain of TCR clone 43858 (TRAV3, TRAJ17)
CAVSPKEAAGNRLTF

SEQ ID NO: 87716 - protein, 12 aa, Homo sapiens
  CDR3 for beta chain variable domain of TCR clone 43858 (TRBV7-9, TRBJ1-6)
CASSLMTSPLHF

SEQ ID NO: 87717 - protein, 12 aa, Homo sapiens
  CDR3 for alpha chain variable domain of TCR clone 43859 (TRAV12-1, TRAJ40)
CVVYSGTYKYIF

SEQ ID NO: 87718 - protein, 18 aa, Homo sapiens
  CDR3 for beta chain variable domain of TCR clone 43859 (TRBV11-2, TRBJ2-3)
CASSLGGASQGAPNTQYF

SEQ ID NO: 87719 - protein, 12 aa, Homo sapiens
  CDR3 for alpha chain variable domain of TCR clone 43860 (TRAV12-3, TRAJ17)
CAMTFTGNKLTF

SEQ ID NO: 87720 - protein, 13 aa, Homo sapiens
  CDR3 for beta chain variable domain of TCR clone 43860 (TRBV5-1, TRBJ1-2)
CASSSTGVYGYTF

SEQ ID NO: 87721 - protein, 17 aa, Homo sapiens
  CDR3 for alpha chain variable domain of TCR clone 43861 (TRAV13-1, TRAJ53)
CAASWKSSGGSNYKLTF

SEQ ID NO: 87722 - protein, 19 aa, Homo sapiens
  CDR3 for beta chain variable domain of TCR clone 43861 (TRBV7-9, TRBJ2-1)
RASSHNRGALLRSYNEQFF

SEQ ID NO: 87723 - protein, 13 aa, Homo sapiens
  CDR3 for alpha chain variable domain of TCR clone 43862 (TRAV21, TRAJ56)
CAVRLGANSKLTF

SEQ ID NO: 87724 - protein, 16 aa, Homo sapiens
  CDR3 for beta chain variable domain of TCR clone 43862 (TRBV12-5, TRBJ2-5)
CASGPRTSGNQETQYF

SEQ ID NO: 87725 - protein, 13 aa, Homo sapiens
  CDR3 for alpha chain variable domain of TCR clone 43863 (TRAV29/DV5, TRAJ40)
CAASEAGTYKYIF

SEQ ID NO: 87726 - protein, 17 aa, Homo sapiens
  CDR3 for beta chain variable domain of TCR clone 43863 (TRBV14, TRBJ2-1)
CQQPRVWGAYLRGEQFF

SEQ ID NO: 87727 - protein, 13 aa, Homo sapiens
  CDR3 for alpha chain variable domain of TCR clone 43864 (TRAV8-3, TRAJ43)
CAVGPDNNNDMRF

SEQ ID NO: 87728 - protein, 16 aa, Homo sapiens
  CDR3 for beta chain variable domain of TCR clone 43864 (TRBV7-9, TRBJ1-2)
CASSLGFSSGEDGYTS

SEQ ID NO: 87729 - protein, 12 aa, Homo sapiens
  CDR3 for alpha chain variable domain of TCR clone 43865 (TRAV21, TRAJ33)
CAKMDSNYQLIW

SEQ ID NO: 87730 - protein, 14 aa, Homo sapiens
  CDR3 for beta chain variable domain of TCR clone 43865 (TRBV2, TRBJ2-7)
CASSLTSGGYKQYF

SEQ ID NO: 87731 - protein, 12 aa, Homo sapiens
  CDR3 for alpha chain variable domain of TCR clone 43866 (TRAV17, TRAJ20)
CATDSNDYKLSF

SEQ ID NO: 87732 - protein, 14 aa, Homo sapiens
  CDR3 for beta chain variable domain of TCR clone 43866 (TRBV7-2, TRBJ2-7)
CASSPKTSFYEQYF

SEQ ID NO: 87733 - protein, 13 aa, Homo sapiens
  CDR3 for alpha chain variable domain of TCR clone 43867 (TRAV2, TRAJ10)
CAVETGGGNKLTL

SEQ ID NO: 87734 - protein, 14 aa, Homo sapiens
  CDR3 for beta chain variable domain of TCR clone 43867 (TRBV20-1, TRBJ2-3)
CSAGGRRGTDTQYF

SEQ ID NO: 87735 - protein, 14 aa, Homo sapiens
  CDR3 for alpha chain variable domain of TCR clone 43868 (TRAV12-2, TRAJ13)
CDVKKTGGYQKVTF

SEQ ID NO: 87736 - protein, 12 aa, Homo sapiens
  CDR3 for beta chain variable domain of TCR clone 43868 (TRBV12-4, TRBJ1-2)
CASSFIWLHLRF

SEQ ID NO: 87737 - protein, 14 aa, Homo sapiens
  CDR3 for alpha chain variable domain of TCR clone 43869 (TRAV1-2, TRAJ8)
CAVREDTGFQKLVF

SEQ ID NO: 87738 - protein, 16 aa, Homo sapiens
  CDR3 for beta chain variable domain of TCR clone 43869 (TRBV7-6, TRBJ2-6)
CASSLPGLSGANDLTF

SEQ ID NO: 87739 - protein, 11 aa, Homo sapiens
  CDR3 for alpha chain variable domain of TCR clone 43870 (TRAV3, TRAJ21)
CAVGNFNKFYF

SEQ ID NO: 87740 - protein, 13 aa, Homo sapiens
  CDR3 for beta chain variable domain of TCR clone 43870 (TRBV5-5, TRBJ1-2)
CASSFWRGEDYTF

SEQ ID NO: 87741 - protein, 12 aa, Homo sapiens
  CDR3 for alpha chain variable domain of TCR clone 43871 (TRAV13-1, TRAJ20)
SVQQVNDYKLSF

SEQ ID NO: 87742 - protein, 14 aa, Homo sapiens
  CDR3 for beta chain variable domain of TCR clone 43871 (TRBV7-6, TRBJ2-3)
RASSLTGGTDTQYF

SEQ ID NO: 87743 - protein, 13 aa, Homo sapiens
  CDR3 for alpha chain variable domain of TCR clone 43872 (TRAV13-2, TRAJ48)
CAEMDFGNEKLTF

SEQ ID NO: 87744 - protein, 15 aa, Homo sapiens
  CDR3 for beta chain variable domain of TCR clone 43872 (TRBV7-9, TRBJ1-6)
CARSSPGRGNSPLHF

SEQ ID NO: 87745 - protein, 11 aa, Homo sapiens
  CDR3 for alpha chain variable domain of TCR clone 43873 (TRAV16, TRAJ31)
CALFNNARLMF

SEQ ID NO: 87746 - protein, 15 aa, Homo sapiens
  CDR3 for beta chain variable domain of TCR clone 43873 (TRBV18, TRBJ1-1)
CASSPRQGENTKAFF

SEQ ID NO: 87747 - protein, 14 aa, Homo sapiens
  CDR3 for alpha chain variable domain of TCR clone 43874 (TRAV16, TRAJ39)
CALSKNNAGNMLTL

SEQ ID NO: 87748 - protein, 16 aa, Homo sapiens
  CDR3 for beta chain variable domain of TCR clone 43874 (TRBV6-6, TRBJ2-1)
CASSYSFSGSYNEQFF

SEQ ID NO: 87749 - protein, 14 aa, Homo sapiens
  CDR3 for alpha chain variable domain of TCR clone 43875 (TRAV12-3, TRAJ58)
CAMSTETSGSSLTF

SEQ ID NO: 87750 - protein, 13 aa, Homo sapiens
  CDR3 for beta chain variable domain of TCR clone 43875 (TRBV27, TRBJ2-3)
CASSWGRTDTQYF

SEQ ID NO: 87751 - protein, 14 aa, Homo sapiens
  CDR3 for alpha chain variable domain of TCR clone 43876 (TRAV8-3, TRAJ4)
CAVGAAGGYNKLIF

SEQ ID NO: 87752 - protein, 16 aa, Homo sapiens
  CDR3 for beta chain variable domain of TCR clone 43876 (TRBV13, TRBJ2-2)
CASSPRTGEHTEELFF

SEQ ID NO: 87753 - protein, 14 aa, Homo sapiens
  CDR3 for alpha chain variable domain of TCR clone 43877 (TRAV10, TRAJ34)
CVVSGKHRQAHLCD

SEQ ID NO: 87754 - protein, 14 aa, Homo sapiens
  CDR3 for beta chain variable domain of TCR clone 43877 (TRBV19, TRBJ2-1)
CASPTFVLSGEQFF

SEQ ID NO: 87755 - protein, 14 aa, Homo sapiens
  CDR3 for alpha chain variable domain of TCR clone 43878 (TRAV26-1, TRAJ48)
CIVRVPFGNEKLTF

SEQ ID NO: 87756 - protein, 16 aa, Homo sapiens
  CDR3 for beta chain variable domain of TCR clone 43878 (TRBV18, TRBJ2-1)
CASSPYLSIRGDEQFL

SEQ ID NO: 87757 - protein, 14 aa, Homo sapiens
  CDR3 for alpha chain variable domain of TCR clone 43879 (TRAV17, TRAJ57)
CATDPQGGSEKLVF

SEQ ID NO: 87758 - protein, 11 aa, Homo sapiens
  CDR3 for beta chain variable domain of TCR clone 43879 (TRBV29-1, TRBJ2-5)
CSEDRTGTQYF

SEQ ID NO: 87759 - protein, 13 aa, Homo sapiens
  CDR3 for alpha chain variable domain of TCR clone 43880 (TRAV13-2, TRAJ48)
CAEMDFGNEKLTF

SEQ ID NO: 87760 - protein, 15 aa, Homo sapiens
  CDR3 for beta chain variable domain of TCR clone 43880 (TRBV7-9, TRBJ1-6)
CASSSPERGNSPLHF

SEQ ID NO: 87761 - protein, 11 aa, Homo sapiens
  CDR3 for alpha chain variable domain of TCR clone 43881 (TRAV21, TRAJ34)
CAVTNTDKLIF

SEQ ID NO: 87762 - protein, 17 aa, Homo sapiens
  CDR3 for beta chain variable domain of TCR clone 43881 (TRBV20-1, TRBJ2-1)
CSARSHSGGPPTMSSSS

SEQ ID NO: 87763 - protein, 20 aa, Homo sapiens
  CDR3 for alpha chain variable domain of TCR clone 43882 (TRAV26-1, TRAJ42)
CCVLLHRQTYYGGSQGNLIF

SEQ ID NO: 87764 - protein, 14 aa, Homo sapiens
  CDR3 for beta chain variable domain of TCR clone 43882 (TRBV7-2, TRBJ1-1)
CASSFLTGTTEAFF

SEQ ID NO: 87765 - protein, 13 aa, Homo sapiens
  CDR3 for alpha chain variable domain of TCR clone 43883 (TRAV13-1, TRAJ52)
CAASKRSAGGTSY

SEQ ID NO: 87766 - protein, 13 aa, Homo sapiens
  CDR3 for beta chain variable domain of TCR clone 43883 (TRBV12-4, TRBJ1-2)
CASSLRQGKGYTF

SEQ ID NO: 87767 - protein, 13 aa, Homo sapiens
  CDR3 for alpha chain variable domain of TCR clone 43884 (TRAV20, TRAJ34)
CAVSSYNTDKLIL

SEQ ID NO: 87768 - protein, 13 aa, Homo sapiens
  CDR3 for beta chain variable domain of TCR clone 43884 (TRBV7-9, TRBJ1-2)
CASSLKQNYGYTF

SEQ ID NO: 87769 - protein, 16 aa, Homo sapiens
  CDR3 for alpha chain variable domain of TCR clone 43885 (TRAV1-2, TRAJ10)
CAVRGVLTGGGNKLTF

SEQ ID NO: 87770 - protein, 13 aa, Homo sapiens
  CDR3 for beta chain variable domain of TCR clone 43885 (TRBV4-1, TRBJ2-1)
CASSQAGGDEQFF

SEQ ID NO: 87771 - protein, 12 aa, Homo sapiens
  CDR3 for alpha chain variable domain of TCR clone 43886 (TRAV13-2, TRAJ8)
CAPWLGFQKLVF

SEQ ID NO: 87772 - protein, 16 aa, Homo sapiens
  CDR3 for beta chain variable domain of TCR clone 43886 (TRBV5-1, TRBJ2-7)
CAGSLEGLAGLYEQYF

SEQ ID NO: 87773 - protein, 10 aa, Homo sapiens
  CDR3 for alpha chain variable domain of TCR clone 43887 (TRAV13-1, TRAJ7)
LIGGNNRLAF

SEQ ID NO: 87774 - protein, 15 aa, Homo sapiens
  CDR3 for beta chain variable domain of TCR clone 43887 (TRBV7-9, TRBJ1-1)
CASGLLEQGGTEAFF

SEQ ID NO: 87775 - protein, 10 aa, Homo sapiens
  CDR3 for alpha chain variable domain of TCR clone 43888 (TRAV12-1, TRAJ43)
CVVHNNDMRF

SEQ ID NO: 87776 - protein, 13 aa, Homo sapiens
  CDR3 for beta chain variable domain of TCR clone 43888 (TRBV15, TRBJ2-5)
CATSQIGEETQYF

SEQ ID NO: 87777 - protein, 12 aa, Homo sapiens
  CDR3 for alpha chain variable domain of TCR clone 43889 (TRAV8-3, TRAJ20)
CAVGANDYKLSF

SEQ ID NO: 87778 - protein, 15 aa, Homo sapiens
  CDR3 for beta chain variable domain of TCR clone 43889 (TRBV9, TRBJ2-1)
CASSLAGSSYNEQFF

SEQ ID NO: 87779 - protein, 13 aa, Homo sapiens
  CDR3 for alpha chain variable domain of TCR clone 43890 (TRAV21, TRAJ27)
CAALNTNVGKSTF

SEQ ID NO: 87780 - protein, 14 aa, Homo sapiens
  CDR3 for beta chain variable domain of TCR clone 43890 (TRBV27, TRBJ1-1)
CASSLLSGLSEAFF

SEQ ID NO: 87781 - protein, 13 aa, Homo sapiens
  CDR3 for alpha chain variable domain of TCR clone 43891 (TRAV8-3, TRAJ21)
CAVGAYNFNKFYF

SEQ ID NO: 87782 - protein, 16 aa, Homo sapiens
  CDR3 for beta chain variable domain of TCR clone 43891 (TRBV19, TRBJ2-1)
CASSIGGGSSYNEQFF

SEQ ID NO: 87783 - protein, 11 aa, Homo sapiens
  CDR3 for alpha chain variable domain of TCR clone 43892 (TRAV21, TRAJ34)
CAVTNTDKLIF

SEQ ID NO: 87784 - protein, 15 aa, Homo sapiens
  CDR3 for beta chain variable domain of TCR clone 43892 (TRBV7-2, TRBJ2-1)
CASSSGLAGGNEQFF

SEQ ID NO: 87785 - protein, 12 aa, Homo sapiens
  CDR3 for alpha chain variable domain of TCR clone 43893 (TRAV25, TRAJ5)
CAGGGGQESTYF

SEQ ID NO: 87786 - protein, 15 aa, Homo sapiens
  CDR3 for beta chain variable domain of TCR clone 43893 (TRBV9, TRBJ1-2)
CASSVVGQANYGYTF

SEQ ID NO: 87787 - protein, 11 aa, Homo sapiens
  CDR3 for alpha chain variable domain of TCR clone 43894 (TRAV16, TRAJ49)
CAPRSGNQFYF

SEQ ID NO: 87788 - protein, 16 aa, Homo sapiens
  CDR3 for beta chain variable domain of TCR clone 43894 (TRBV20-1, TRBJ1-5)
CSARDVGGGWIQPQHF

SEQ ID NO: 87789 - protein, 15 aa, Homo sapiens
  CDR3 for alpha chain variable domain of TCR clone 43895 (TRAV12-3, TRAJ6)
CAMSATTGGSYIPTF

SEQ ID NO: 87790 - protein, 16 aa, Homo sapiens
  CDR3 for beta chain variable domain of TCR clone 43895 (TRBV20-1, TRBJ1-2)
CSVSMGQGVANYGYTF

SEQ ID NO: 87791 - protein, 13 aa, Homo sapiens
  CDR3 for alpha chain variable domain of TCR clone 43896 (TRAV21, TRAJ57)
CAVTQGGSEKLVF

SEQ ID NO: 87792 - protein, 16 aa, Homo sapiens
  CDR3 for beta chain variable domain of TCR clone 43896 (TRBV29-1, TRBJ2-7)
CSVEDAEDGTSYEQYF

SEQ ID NO: 87793 - protein, 10 aa, Homo sapiens
  CDR3 for alpha chain variable domain of TCR clone 43897 (TRAV12-3, TRAJ49)
CAMNEDQFYF

SEQ ID NO: 87794 - protein, 13 aa, Homo sapiens
  CDR3 for beta chain variable domain of TCR clone 43897 (TRBV12-4, TRBJ1-1)
CASSPGTGFEAFF

SEQ ID NO: 87795 - protein, 14 aa, Homo sapiens
  CDR3 for alpha chain variable domain of TCR clone 43898 (TRAV38-1, TRAJ57)
YAFMNTGGSEKLVF

SEQ ID NO: 87796 - protein, 12 aa, Homo sapiens
  CDR3 for beta chain variable domain of TCR clone 43898 (TRBV20-1, TRBJ1-5)
CSTSQGNQPQHF

SEQ ID NO: 87797 - protein, 14 aa, Homo sapiens
  CDR3 for alpha chain variable domain of TCR clone 43899 (TRAV16, TRAJ26)
CITVLPAYGQNFVF

SEQ ID NO: 87798 - protein, 14 aa, Homo sapiens
  CDR3 for beta chain variable domain of TCR clone 43899 (TRBV7-2, TRBJ2-7)
CASRSQGAAYEQYF

SEQ ID NO: 87799 - protein, 17 aa, Homo sapiens
  CDR3 for alpha chain variable domain of TCR clone 43900 (TRAV3, TRAJ6)
CAVRDGPRAGGSYIPTF

SEQ ID NO: 87800 - protein, 13 aa, Homo sapiens
  CDR3 for beta chain variable domain of TCR clone 43900 (TRBV27, TRBJ2-1)
CASRTLGIGEQFF

SEQ ID NO: 87801 - protein, 13 aa, Homo sapiens
  CDR3 for alpha chain variable domain of TCR clone 43901 (TRAV27, TRAJ3)
ASLRGSSASQIIF

SEQ ID NO: 87802 - protein, 15 aa, Homo sapiens
  CDR3 for beta chain variable domain of TCR clone 43901 (TRBV28, TRBJ1-3)
CASSMGWASGNTIYF

SEQ ID NO: 87803 - protein, 12 aa, Homo sapiens
  CDR3 for alpha chain variable domain of TCR clone 43902 (TRAV1-1, TRAJ39)
CAVPVVGNMLTF

SEQ ID NO: 87804 - protein, 15 aa, Homo sapiens
  CDR3 for beta chain variable domain of TCR clone 43902 (TRBV28, TRBJ1-5)
CASSLPQQGEQPQHF

SEQ ID NO: 87805 - protein, 13 aa, Homo sapiens
  CDR3 for alpha chain variable domain of TCR clone 43903 (TRAV30, TRAJ24)
CGTVTDSWGKLQF

SEQ ID NO: 87806 - protein, 15 aa, Homo sapiens
  CDR3 for beta chain variable domain of TCR clone 43903 (TRBV25-1, TRBJ1-4)
CASSPGDSTNGKLFF

SEQ ID NO: 87807 - protein, 12 aa, Homo sapiens
  CDR3 for alpha chain variable domain of TCR clone 43904 (TRAV12-3, TRAJ17)
CAMTLTGNKLTF

SEQ ID NO: 87808 - protein, 11 aa, Homo sapiens
  CDR3 for beta chain variable domain of TCR clone 43904 (TRBV11-2, TRBJ1-1)
CASSINTGAFL

SEQ ID NO: 87809 - protein, 14 aa, Homo sapiens
  CDR3 for alpha chain variable domain of TCR clone 43905 (TRAV3, TRAJ9)
CALRLNTGGFKTIF

SEQ ID NO: 87810 - protein, 15 aa, Homo sapiens
  CDR3 for beta chain variable domain of TCR clone 43905 (TRBV7-2, TRBJ2-1)
CASSLASGRVNEQFF

SEQ ID NO: 87811 - protein, 15 aa, Homo sapiens
  CDR3 for alpha chain variable domain of TCR clone 43906 (TRAV4, TRAJ39)
CLVGPSNNAGNMLTF

SEQ ID NO: 87812 - protein, 12 aa, Homo sapiens
  CDR3 for beta chain variable domain of TCR clone 43906 (TRBV12-4, TRBJ2-7)
CASNPGGGEQYF

SEQ ID NO: 87813 - protein, 17 aa, Homo sapiens
  CDR3 for alpha chain variable domain of TCR clone 43907 (TRAV26-1, TRAJ37)
CIVRVITVSSNTGKLIF

SEQ ID NO: 87814 - protein, 16 aa, Homo sapiens
  CDR3 for beta chain variable domain of TCR clone 43907 (TRBV10-1, TRBJ2-3)
SAPAVRLAGGFDTQYF

SEQ ID NO: 87815 - protein, 14 aa, Homo sapiens
  CDR3 for alpha chain variable domain of TCR clone 43908 (TRAV13-1, TRAJ9)
CAASALTVGFKTIF

SEQ ID NO: 87816 - protein, 13 aa, Homo sapiens
  CDR3 for beta chain variable domain of TCR clone 43908 (TRBV20-1, TRBJ1-1)
CSAGTVGNTEAFF

SEQ ID NO: 87817 - protein, 13 aa, Homo sapiens
  CDR3 for alpha chain variable domain of TCR clone 43909 (TRAV20, TRAJ48)
CAVQGVGNEKLTF

SEQ ID NO: 87818 - protein, 19 aa, Homo sapiens
  CDR3 for beta chain variable domain of TCR clone 43909 (TRBV2, TRBJ2-2)
CASSQPGIAGGGNTGELFF

SEQ ID NO: 87819 - protein, 14 aa, Homo sapiens
  CDR3 for alpha chain variable domain of TCR clone 43910 (TRAV23/DV6, TRAJ13)
CAAMYSGGYQKVTF

SEQ ID NO: 87820 - protein, 13 aa, Homo sapiens
  CDR3 for beta chain variable domain of TCR clone 43910 (TRBV4-1, TRBJ2-2)
CASSQENTGELFF

SEQ ID NO: 87821 - protein, 15 aa, Homo sapiens
  CDR3 for alpha chain variable domain of TCR clone 43911 (TRAV17, TRAJ35)
CATAFVIGFGNVLHC

SEQ ID NO: 87822 - protein, 15 aa, Homo sapiens
  CDR3 for beta chain variable domain of TCR clone 43911 (TRBV7-9, TRBJ2-7)
CASRLALAEAYEQYF

SEQ ID NO: 87823 - protein, 16 aa, Homo sapiens
  CDR3 for alpha chain variable domain of TCR clone 43912 (TRAV21, TRAJ17)
CAVRPGEEAAGNKLTF

SEQ ID NO: 87824 - protein, 16 aa, Homo sapiens
  CDR3 for beta chain variable domain of TCR clone 43912 (TRBV2, TRBJ2-7)
CASSGPWTGPSYEQYF

SEQ ID NO: 87825 - protein, 10 aa, Homo sapiens
  CDR3 for alpha chain variable domain of TCR clone 43913 (TRAV16, TRAJ22)
SAMYLRQLTF

SEQ ID NO: 87826 - protein, 15 aa, Homo sapiens
  CDR3 for beta chain variable domain of TCR clone 43913 (TRBV7-9, TRBJ1-6)
CVSSSPGRGNSPLHF

SEQ ID NO: 87827 - protein, 15 aa, Homo sapiens
  CDR3 for alpha chain variable domain of TCR clone 43914 (TRAV38-1, TRAJ37)
CAFIHGSGNTGRLIF

SEQ ID NO: 87828 - protein, 12 aa, Homo sapiens
  CDR3 for beta chain variable domain of TCR clone 43914 (TRBV7-9, TRBJ2-7)
CASSFGSYEQYF

SEQ ID NO: 87829 - protein, 13 aa, Homo sapiens
  CDR3 for alpha chain variable domain of TCR clone 43915 (TRAV3, TRAJ27)
CAVRPLGAGKTTF

SEQ ID NO: 87830 - protein, 13 aa, Homo sapiens
  CDR3 for beta chain variable domain of TCR clone 43915 (TRBV7-9, TRBJ2-3)
CASSPGSTDTQYF

SEQ ID NO: 87831 - protein, 16 aa, Homo sapiens
  CDR3 for alpha chain variable domain of TCR clone 43916 (TRAV16, TRAJ4)
CALSRMFSGGYNKLIF

SEQ ID NO: 87832 - protein, 14 aa, Homo sapiens
  CDR3 for beta chain variable domain of TCR clone 43916 (TRBV7-2, TRBJ2-7)
CASSPKTSFYEQYF

SEQ ID NO: 87833 - protein, 14 aa, Homo sapiens
  CDR3 for alpha chain variable domain of TCR clone 43917 (TRAV23/DV6, TRAJ57)
CAASNKGGSEKLVF

SEQ ID NO: 87834 - protein, 13 aa, Homo sapiens
  CDR3 for beta chain variable domain of TCR clone 43917 (TRBV11-2, TRBJ2-7)
CASSSYPSYEQYF

SEQ ID NO: 87835 - protein, 13 aa, Homo sapiens
  CDR3 for alpha chain variable domain of TCR clone 43918 (TRAV1-1, TRAJ31)
CASYLNNNARLMF

SEQ ID NO: 87836 - protein, 14 aa, Homo sapiens
  CDR3 for beta chain variable domain of TCR clone 43918 (TRBV4-1, TRBJ2-5)
CASSRSGSGETHYF

SEQ ID NO: 87837 - protein, 13 aa, Homo sapiens
  CDR3 for alpha chain variable domain of TCR clone 43919 (TRAV29/DV5, TRAJ31)
CAASRNNNARPMF

SEQ ID NO: 87838 - protein, 13 aa, Homo sapiens
  CDR3 for beta chain variable domain of TCR clone 43919 (TRBV7-2, TRBJ2-4)
CASSREHANIQYF

SEQ ID NO: 87839 - protein, 13 aa, Homo sapiens
  CDR3 for alpha chain variable domain of TCR clone 43920 (TRAV21, TRAJ27)
CAARPGNAGKSTF

SEQ ID NO: 87840 - protein, 19 aa, Homo sapiens
  CDR3 for beta chain variable domain of TCR clone 43920 (TRBV25-1, TRBJ2-2)
CAILVYRVDRGRKTGELFF

SEQ ID NO: 87841 - protein, 13 aa, Homo sapiens
  CDR3 for alpha chain variable domain of TCR clone 43921 (TRAV8-3, TRAJ48)
CAGVPFGNEKLTF

SEQ ID NO: 87842 - protein, 15 aa, Homo sapiens
  CDR3 for beta chain variable domain of TCR clone 43921 (TRBV11-2, TRBJ2-1)
CASSSPSTRYNEQFF

SEQ ID NO: 87843 - protein, 15 aa, Homo sapiens
  CDR3 for alpha chain variable domain of TCR clone 43922 (TRAV38-2/DV8, TRAJ28)
CAYRSRGAGSYQLAF

SEQ ID NO: 87844 - protein, 14 aa, Homo sapiens
  CDR3 for beta chain variable domain of TCR clone 43922 (TRBV7-9, TRBJ2-7)
CASSLSQGSYEQYV

SEQ ID NO: 87845 - protein, 14 aa, Homo sapiens
  CDR3 for alpha chain variable domain of TCR clone 43923 (TRAV12-3, TRAJ29)
CAMSPYSGNTPLVF

SEQ ID NO: 87846 - protein, 17 aa, Homo sapiens
  CDR3 for beta chain variable domain of TCR clone 43923 (TRBV7-8, TRBJ2-6)
CASSAGTGGAGANVLTF

SEQ ID NO: 87847 - protein, 16 aa, Homo sapiens
  CDR3 for alpha chain variable domain of TCR clone 43924 (TRAV30, TRAJ24)
CVTEIVDADSWGKFQF

SEQ ID NO: 87848 - protein, 13 aa, Homo sapiens
  CDR3 for beta chain variable domain of TCR clone 43924 (TRBV18, TRBJ1-2)
CASSASATEGYTF

SEQ ID NO: 87849 - protein, 13 aa, Homo sapiens
  CDR3 for alpha chain variable domain of TCR clone 43925 (TRAV13-1, TRAJ33)
CAASRAGNYQLIW

SEQ ID NO: 87850 - protein, 13 aa, Homo sapiens
  CDR3 for beta chain variable domain of TCR clone 43925 (TRBV2, TRBJ2-7)
SAMYFCASSEQYF

SEQ ID NO: 87851 - protein, 14 aa, Homo sapiens
  CDR3 for alpha chain variable domain of TCR clone 43926 (TRAV29/DV5, TRAJ44)
CAAFLFGTASKLTF

SEQ ID NO: 87852 - protein, 15 aa, Homo sapiens
  CDR3 for beta chain variable domain of TCR clone 43926 (TRBV7-3, TRBJ2-2)
CASSETGQGTGELFF

SEQ ID NO: 87853 - protein, 15 aa, Homo sapiens
  CDR3 for alpha chain variable domain of TCR clone 43927 (TRAV3, TRAJ20)
CAVRDIKLSDYKLSF

SEQ ID NO: 87854 - protein, 15 aa, Homo sapiens
  CDR3 for beta chain variable domain of TCR clone 43927 (TRBV7-9, TRBJ1-6)
CASSSPGRGNSPFHF

SEQ ID NO: 87855 - protein, 14 aa, Homo sapiens
  CDR3 for alpha chain variable domain of TCR clone 43928 (TRAV8-1, TRAJ5)
CAVRTDTGRGALTF

SEQ ID NO: 87856 - protein, 14 aa, Homo sapiens
  CDR3 for beta chain variable domain of TCR clone 43928 (TRBV7-8, TRBJ2-3)
CASSFPDGQDTQYF

SEQ ID NO: 87857 - protein, 11 aa, Homo sapiens
  CDR3 for alpha chain variable domain of TCR clone 43929 (TRAV3, TRAJ21)
CAVGNFNKFYF

SEQ ID NO: 87858 - protein, 15 aa, Homo sapiens
  CDR3 for beta chain variable domain of TCR clone 43929 (TRBV7-2, TRBJ2-1)
CASTHGTGIYNEQFF

SEQ ID NO: 87859 - protein, 13 aa, Homo sapiens
  CDR3 for alpha chain variable domain of TCR clone 43930 (TRAV23/DV6, TRAJ16)
CAASISDGQKLLF

SEQ ID NO: 87860 - protein, 12 aa, Homo sapiens
  CDR3 for beta chain variable domain of TCR clone 43930 (TRBV28, TRBJ2-3)
CASSLYRDTQYF

SEQ ID NO: 87861 - protein, 13 aa, Homo sapiens
  CDR3 for alpha chain variable domain of TCR clone 43931 (TRAV1-2, TRAJ9)
CAALNTGGFKTIF

SEQ ID NO: 87862 - protein, 12 aa, Homo sapiens
  CDR3 for beta chain variable domain of TCR clone 43931 (TRBV19, TRBJ2-3)
CASSLLTDTQYF

SEQ ID NO: 87863 - protein, 17 aa, Homo sapiens
  CDR3 for alpha chain variable domain of TCR clone 43932 (TRAV8-3, TRAJ34)
CAIPGKLIFGTGTRLQA

SEQ ID NO: 87864 - protein, 15 aa, Homo sapiens
  CDR3 for beta chain variable domain of TCR clone 43932 (TRBV5-7, TRBJ2-1)
CASSRRLAGDNEQFF

SEQ ID NO: 87865 - protein, 14 aa, Homo sapiens
  CDR3 for alpha chain variable domain of TCR clone 43933 (TRAV9-2, TRAJ39)
CALYIYNAGNMLTF

SEQ ID NO: 87866 - protein, 15 aa, Homo sapiens
  CDR3 for beta chain variable domain of TCR clone 43933 (TRBV11-3, TRBJ2-3)
CAGLKDGREGDTQYF

SEQ ID NO: 87867 - protein, 14 aa, Homo sapiens
  CDR3 for alpha chain variable domain of TCR clone 43934 (TRAV13-2, TRAJ17)
CAENSKASGNKLTF

SEQ ID NO: 87868 - protein, 11 aa, Homo sapiens
  CDR3 for beta chain variable domain of TCR clone 43934 (TRBV6-3, TRBJ2-3)
CATGQADTQYF

SEQ ID NO: 87869 - protein, 13 aa, Homo sapiens
  CDR3 for alpha chain variable domain of TCR clone 43935 (TRAV6, TRAJ16)
CALDDSDGQKLLF

SEQ ID NO: 87870 - protein, 14 aa, Homo sapiens
  CDR3 for beta chain variable domain of TCR clone 43935 (TRBV12-4, TRBJ1-6)
CASNLRGKGSPLHF

SEQ ID NO: 87871 - protein, 13 aa, Homo sapiens
  CDR3 for alpha chain variable domain of TCR clone 43936 (TRAV9-2, TRAJ53)
CALSGGSNYKLTF

SEQ ID NO: 87872 - protein, 17 aa, Homo sapiens
  CDR3 for beta chain variable domain of TCR clone 43936 (TRBV11-2, TRBJ2-1)
CASSLYPPGVEYNEQSF

SEQ ID NO: 87873 - protein, 16 aa, Homo sapiens
  CDR3 for alpha chain variable domain of TCR clone 43937 (TRAV12-3, TRAJ53)
CAMSVGSGGSNYKLTF

SEQ ID NO: 87874 - protein, 11 aa, Homo sapiens
  CDR3 for beta chain variable domain of TCR clone 43937 (TRBV29-1, TRBJ2-5)
CSVASGETQYL

SEQ ID NO: 87875 - protein, 13 aa, Homo sapiens
  CDR3 for alpha chain variable domain of TCR clone 43938 (TRAV1-2, TRAJ9)
CAALNTGGFKTIF

SEQ ID NO: 87876 - protein, 13 aa, Homo sapiens
  CDR3 for beta chain variable domain of TCR clone 43938 (TRBV19, TRBJ1-2)
CACSVPGQDGYTF

SEQ ID NO: 87877 - protein, 15 aa, Homo sapiens
  CDR3 for alpha chain variable domain of TCR clone 43939 (TRAV20, TRAJ23)
CAVQAVRKQGGKLIF

SEQ ID NO: 87878 - protein, 16 aa, Homo sapiens
  CDR3 for beta chain variable domain of TCR clone 43939 (TRBV27, TRBJ2-7)
CASSKQGRGWAYEQYF

SEQ ID NO: 87879 - protein, 13 aa, Homo sapiens
  CDR3 for alpha chain variable domain of TCR clone 43940 (TRAV2, TRAJ40)
CAVVTSGTYKYIF

SEQ ID NO: 87880 - protein, 12 aa, Homo sapiens
  CDR3 for beta chain variable domain of TCR clone 43940 (TRBV14, TRBJ2-7)
CASSRLKGVQYF

SEQ ID NO: 87881 - protein, 14 aa, Homo sapiens
  CDR3 for alpha chain variable domain of TCR clone 43941 (TRAV8-1, TRAJ34)
CAVNPSYNTDKLIF

SEQ ID NO: 87882 - protein, 16 aa, Homo sapiens
  CDR3 for beta chain variable domain of TCR clone 43941 (TRBV7-2, TRBJ2-6)
CASSLAGRSGANVLAF

SEQ ID NO: 87883 - protein, 15 aa, Homo sapiens
  CDR3 for alpha chain variable domain of TCR clone 43942 (TRAV8-3, TRAJ27)
CAVGPSKTNAGKSTF

SEQ ID NO: 87884 - protein, 15 aa, Homo sapiens
  CDR3 for beta chain variable domain of TCR clone 43942 (TRBV7-2, TRBJ2-1)
CASSSGLAGGNEQYF

SEQ ID NO: 87885 - protein, 14 aa, Homo sapiens
  CDR3 for alpha chain variable domain of TCR clone 43943 (TRAV3, TRAJ37)
CAVKESGSTGKLIF

SEQ ID NO: 87886 - protein, 14 aa, Homo sapiens
  CDR3 for beta chain variable domain of TCR clone 43943 (TRBV2, TRBJ1-5)
CASSENRGGQPQHF

SEQ ID NO: 87887 - protein, 14 aa, Homo sapiens
  CDR3 for alpha chain variable domain of TCR clone 43944 (TRAV29/DV5, TRAJ36)
CAARRKTGANNLCF

SEQ ID NO: 87888 - protein, 14 aa, Homo sapiens
  CDR3 for beta chain variable domain of TCR clone 43944 (TRBV12-5, TRBJ2-5)
CASGSRTHQETQYF

SEQ ID NO: 87889 - protein, 13 aa, Homo sapiens
  CDR3 for alpha chain variable domain of TCR clone 43945 (TRAV13-1, TRAJ5)
CAARVTGRRALTF

SEQ ID NO: 87890 - protein, 15 aa, Homo sapiens
  CDR3 for beta chain variable domain of TCR clone 43945 (TRBV7-9, TRBJ2-7)
CASSPGGGLIYEQYF

SEQ ID NO: 87891 - protein, 14 aa, Homo sapiens
  CDR3 for alpha chain variable domain of TCR clone 43946 (TRAV12-1, TRAJ12)
CVVNGRDSSYKLIF

SEQ ID NO: 87892 - protein, 13 aa, Homo sapiens
  CDR3 for beta chain variable domain of TCR clone 43946 (TRBV28, TRBJ2-2)
CASIRESTGVLFF

SEQ ID NO: 87893 - protein, 18 aa, Homo sapiens
  CDR3 for alpha chain variable domain of TCR clone 43947 (TRAV26-2, TRAJ54)
CILRDVEVGIQGAQKLVF

SEQ ID NO: 87894 - protein, 14 aa, Homo sapiens
  CDR3 for beta chain variable domain of TCR clone 43947 (TRBV12-5, TRBJ2-5)
CASGSRTHQETQYF

SEQ ID NO: 87895 - protein, 19 aa, Homo sapiens
  CDR3 for alpha chain variable domain of TCR clone 43948 (TRAV1-2, TRAJ26)
CLLPLCCERPDNYGQNFVF

SEQ ID NO: 87896 - protein, 16 aa, Homo sapiens
  CDR3 for beta chain variable domain of TCR clone 43948 (TRBV19, TRBJ2-1)
CASSKAGPSSYNEQFF

SEQ ID NO: 87897 - protein, 13 aa, Homo sapiens
  CDR3 for alpha chain variable domain of TCR clone 43949 (TRAV2, TRAJ29)
CSAQNSGNTPLVF

SEQ ID NO: 87898 - protein, 14 aa, Homo sapiens
  CDR3 for beta chain variable domain of TCR clone 43949 (TRBV7-9, TRBJ2-4)
CASSLAMGGNIQYF

SEQ ID NO: 87899 - protein, 14 aa, Homo sapiens
  CDR3 for alpha chain variable domain of TCR clone 43950 (TRAV12-3, TRAJ10)
SHLPLTGGGNKLIF

SEQ ID NO: 87900 - protein, 14 aa, Homo sapiens
  CDR3 for beta chain variable domain of TCR clone 43950 (TRBV19, TRBJ2-1)
CASPTFVSSGEQFF

SEQ ID NO: 87901 - protein, 13 aa, Homo sapiens
  CDR3 for alpha chain variable domain of TCR clone 43951 (TRAV21, TRAJ57)
CAVTQGGSEKLVF

SEQ ID NO: 87902 - protein, 18 aa, Homo sapiens
  CDR3 for beta chain variable domain of TCR clone 43951 (TRBV11-2, TRBJ2-3)
CASSLGGASRGAPNTQYF

SEQ ID NO: 87903 - protein, 23 aa, Homo sapiens
  CDR3 for alpha chain variable domain of TCR clone 43952 (TRAV30, TRAJ43)
CTLRPPSSVTQGPTSAALSDMRF

SEQ ID NO: 87904 - protein, 14 aa, Homo sapiens
  CDR3 for beta chain variable domain of TCR clone 43952 (TRBV19, TRBJ2-1)
CASPTFVLSGEQFF

SEQ ID NO: 87905 - protein, 12 aa, Homo sapiens
  CDR3 for alpha chain variable domain of TCR clone 43953 (TRAV27, TRAJ34)
CAGAKNTDKLIF

SEQ ID NO: 87906 - protein, 13 aa, Homo sapiens
  CDR3 for beta chain variable domain of TCR clone 43953 (TRBV4-1, TRBJ2-1)
CASSQEVQYERFF

SEQ ID NO: 87907 - protein, 12 aa, Homo sapiens
  CDR3 for alpha chain variable domain of TCR clone 43954 (TRAV30, TRAJ20)
CGTESNDYKLSF

SEQ ID NO: 87908 - protein, 15 aa, Homo sapiens
  CDR3 for beta chain variable domain of TCR clone 43954 (TRBV20-1, TRBJ2-7)
CSARGRVSGMDEQYF

SEQ ID NO: 87909 - protein, 14 aa, Homo sapiens
  CDR3 for alpha chain variable domain of TCR clone 43955 (TRAV12-2, TRAJ45)
CAVNIGGGADGLTF

SEQ ID NO: 87910 - protein, 14 aa, Homo sapiens
  CDR3 for beta chain variable domain of TCR clone 43955 (TRBV19, TRBJ2-1)
CASPTFVLSGEQFF

SEQ ID NO: 87911 - protein, 17 aa, Homo sapiens
  CDR3 for alpha chain variable domain of TCR clone 43956 (TRAV21, TRAJ52)
CCRPSPAGGTSYGKLTF

SEQ ID NO: 87912 - protein, 17 aa, Homo sapiens
  CDR3 for beta chain variable domain of TCR clone 43956 (TRBV13, TRBJ2-3)
CASSLSRVAGGRNTQYF

SEQ ID NO: 87913 - protein, 15 aa, Homo sapiens
  CDR3 for alpha chain variable domain of TCR clone 43957 (TRAV13-1, TRAJ44)
CAASRGGGTASKLTF

SEQ ID NO: 87914 - protein, 13 aa, Homo sapiens
  CDR3 for beta chain variable domain of TCR clone 43957 (TRBV7-9, TRBJ1-2)
CASSLKQNYGYTF

SEQ ID NO: 87915 - protein, 14 aa, Homo sapiens
  CDR3 for alpha chain variable domain of TCR clone 43958 (TRAV1-2, TRAJ8)
CAVREDTGFQKLVF

SEQ ID NO: 87916 - protein, 14 aa, Homo sapiens
  CDR3 for beta chain variable domain of TCR clone 43958 (TRBV29-1, TRBJ1-4)
CSVTGTGGNENLFF

SEQ ID NO: 87917 - protein, 12 aa, Homo sapiens
  CDR3 for alpha chain variable domain of TCR clone 43959 (TRAV16, TRAJ10)
CSRTGGGNKLTF

SEQ ID NO: 87918 - protein, 12 aa, Homo sapiens
  CDR3 for beta chain variable domain of TCR clone 43959 (TRBV19, TRBJ1-5)
CASSIAQQPQHF

SEQ ID NO: 87919 - protein, 12 aa, Homo sapiens
  CDR3 for alpha chain variable domain of TCR clone 43960 (TRAV21, TRAJ13)
PGPPGGYQKVTF

SEQ ID NO: 87920 - protein, 15 aa, Homo sapiens
  CDR3 for beta chain variable domain of TCR clone 43960 (TRBV7-9, TRBJ1-6)
CASSSPGRGNSPLHF

SEQ ID NO: 87921 - protein, 13 aa, Homo sapiens
  CDR3 for alpha chain variable domain of TCR clone 43961 (TRAV2, TRAJ40)
CAVVTSGTYKYIF

SEQ ID NO: 87922 - protein, 15 aa, Homo sapiens
  CDR3 for beta chain variable domain of TCR clone 43961 (TRBV28, TRBJ1-1)
CASTSTRGLNTEAFF

SEQ ID NO: 87923 - protein, 17 aa, Homo sapiens
  CDR3 for alpha chain variable domain of TCR clone 43962 (TRAV23/DV6, TRAJ57)
CAASSTLSQGGSEKLVF

SEQ ID NO: 87924 - protein, 14 aa, Homo sapiens
  CDR3 for beta chain variable domain of TCR clone 43962 (TRBV11-2, TRBJ2-1)
CASSLSGPYNEQFF

SEQ ID NO: 87925 - protein, 11 aa, Homo sapiens
  CDR3 for alpha chain variable domain of TCR clone 43963 (TRAV1-2, TRAJ40)
CAVPGTYKYNF

SEQ ID NO: 87926 - protein, 16 aa, Homo sapiens
  CDR3 for beta chain variable domain of TCR clone 43963 (TRBV29-1, TRBJ2-7)
CSVEVVGTSGSYEQYF

SEQ ID NO: 87927 - protein, 16 aa, Homo sapiens
  CDR3 for alpha chain variable domain of TCR clone 43964 (TRAV3, TRAJ37)
CAVRPHGSGNTGKLIF

SEQ ID NO: 87928 - protein, 12 aa, Homo sapiens
  CDR3 for beta chain variable domain of TCR clone 43964 (TRBV11-2, TRBJ2-2)
CASSLGGGELFF

SEQ ID NO: 87929 - protein, 13 aa, Homo sapiens
  CDR3 for alpha chain variable domain of TCR clone 43965 (TRAV3, TRAJ21)
CAVRGPDFNKFYF

SEQ ID NO: 87930 - protein, 15 aa, Homo sapiens
  CDR3 for beta chain variable domain of TCR clone 43965 (TRBV2, TRBJ2-1)
CASSELAGGYNEQFF

SEQ ID NO: 87931 - protein, 14 aa, Homo sapiens
  CDR3 for alpha chain variable domain of TCR clone 43966 (TRAV26-1, TRAJ6)
CIVSPVGGSYIPTF

SEQ ID NO: 87932 - protein, 16 aa, Homo sapiens
  CDR3 for beta chain variable domain of TCR clone 43966 (TRBV4-1, TRBJ2-5)
CASSSGLAGVLGAQYF

SEQ ID NO: 87933 - protein, 14 aa, Homo sapiens
  CDR3 for alpha chain variable domain of TCR clone 43967 (TRAV12-2, TRAJ53)
CAVRGGGSNYKLTF

SEQ ID NO: 87934 - protein, 14 aa, Homo sapiens
  CDR3 for beta chain variable domain of TCR clone 43967 (TRBV7-7, TRBJ2-2)
CATRQDSDTGELFF

SEQ ID NO: 87935 - protein, 14 aa, Homo sapiens
  CDR3 for alpha chain variable domain of TCR clone 43968 (TRAV16, TRAJ17)
CALSGRVAGNKLTF

SEQ ID NO: 87936 - protein, 15 aa, Homo sapiens
  CDR3 for beta chain variable domain of TCR clone 43968 (TRBV3-1, TRBJ1-2)
CASSPTRLPEGGYTF

SEQ ID NO: 87937 - protein, 11 aa, Homo sapiens
  CDR3 for alpha chain variable domain of TCR clone 43969 (TRAV8-6, TRAJ42)
WGGGSQGNLIF

SEQ ID NO: 87938 - protein, 13 aa, Homo sapiens
  CDR3 for beta chain variable domain of TCR clone 43969 (TRBV7-3, TRBJ1-1)
CASSQDWGAEAFF

SEQ ID NO: 87939 - protein, 14 aa, Homo sapiens
  CDR3 for alpha chain variable domain of TCR clone 43970 (TRAV1-2, TRAJ8)
CAVRGDTGFQKLVF

SEQ ID NO: 87940 - protein, 16 aa, Homo sapiens
  CDR3 for beta chain variable domain of TCR clone 43970 (TRBV13, TRBJ2-2)
CASSPRTGEHTGELFF

SEQ ID NO: 87941 - protein, 15 aa, Homo sapiens
  CDR3 for alpha chain variable domain of TCR clone 43971 (TRAV26-1, TRAJ22)
CIVRVSFWFCKATDL

SEQ ID NO: 87942 - protein, 13 aa, Homo sapiens
  CDR3 for beta chain variable domain of TCR clone 43971 (TRBV7-9, TRBJ1-2)
CTSSLKQNYGYTF

SEQ ID NO: 87943 - protein, 11 aa, Homo sapiens
  CDR3 for alpha chain variable domain of TCR clone 43972 (TRAV8-3, TRAJ3)
CAATLKQCFQD

SEQ ID NO: 87944 - protein, 12 aa, Homo sapiens
  CDR3 for beta chain variable domain of TCR clone 43972 (TRBV11-2, TRBJ2-2)
CASSLGGGELFF

SEQ ID NO: 87945 - protein, 14 aa, Homo sapiens
  CDR3 for alpha chain variable domain of TCR clone 43973 (TRAV17, TRAJ53)
CATDAGGSNYKLAF

SEQ ID NO: 87946 - protein, 16 aa, Homo sapiens
  CDR3 for beta chain variable domain of TCR clone 43973 (TRBV4-1, TRBJ1-1)
CASSQDAGMGNTEAFF

SEQ ID NO: 87947 - protein, 11 aa, Homo sapiens
  CDR3 for alpha chain variable domain of TCR clone 43974 (TRAV12-3, TRAJ43)
CAMSVSNDMRF

SEQ ID NO: 87948 - protein, 16 aa, Homo sapiens
  CDR3 for beta chain variable domain of TCR clone 43974 (TRBV18, TRBJ2-2)
CASSPPRTANTGELFF

SEQ ID NO: 87949 - protein, 14 aa, Homo sapiens
  CDR3 for alpha chain variable domain of TCR clone 43975 (TRAV1-2, TRAJ8)
CAVREDTGFQKLVF

SEQ ID NO: 87950 - protein, 14 aa, Homo sapiens
  CDR3 for beta chain variable domain of TCR clone 43975 (TRBV7-9, TRBJ1-1)
CASNLGGANTEAFF

SEQ ID NO: 87951 - protein, 17 aa, Homo sapiens
  CDR3 for alpha chain variable domain of TCR clone 43976 (TRAV3, TRAJ42)
CAVRDRDYGGSQGNLIF

SEQ ID NO: 87952 - protein, 16 aa, Homo sapiens
  CDR3 for beta chain variable domain of TCR clone 43976 (TRBV5-4, TRBJ2-3)
CASQQPGAGGADTQYF

SEQ ID NO: 87953 - protein, 15 aa, Homo sapiens
  CDR3 for alpha chain variable domain of TCR clone 43977 (TRAV20, TRAJ6)
CAVRLQSGGSYIPTF

SEQ ID NO: 87954 - protein, 14 aa, Homo sapiens
  CDR3 for beta chain variable domain of TCR clone 43977 (TRBV12-4, TRBJ2-7)
CASGASGGWYEQYF

SEQ ID NO: 87955 - protein, 17 aa, Homo sapiens
  CDR3 for alpha chain variable domain of TCR clone 43978 (TRAV3, TRAJ6)
CAVRDGPRAGGSYIPTF

SEQ ID NO: 87956 - protein, 13 aa, Homo sapiens
  CDR3 for beta chain variable domain of TCR clone 43978 (TRBV11-2, TRBJ2-5)
CASSSTGEETQYF

SEQ ID NO: 87957 - protein, 17 aa, Homo sapiens
  CDR3 for alpha chain variable domain of TCR clone 43979 (TRAV26-1, TRAJ37)
CIVRVITVSSNTGKLIF

SEQ ID NO: 87958 - protein, 13 aa, Homo sapiens
  CDR3 for beta chain variable domain of TCR clone 43979 (TRBV7-3, TRBJ1-1)
CASSQDWGAEAFF

SEQ ID NO: 87959 - protein, 15 aa, Homo sapiens
  CDR3 for alpha chain variable domain of TCR clone 43980 (TRAV12-2, TRAJ53)
CAGNGGGGSNYKLTF

SEQ ID NO: 87960 - protein, 14 aa, Homo sapiens
  CDR3 for beta chain variable domain of TCR clone 43980 (TRBV19, TRBJ2-2)
CASSTLHRSGELFF

SEQ ID NO: 87961 - protein, 11 aa, Homo sapiens
  CDR3 for alpha chain variable domain of TCR clone 43981 (TRAV2, TRAJ13)
CASGGYQKVTF

SEQ ID NO: 87962 - protein, 14 aa, Homo sapiens
  CDR3 for beta chain variable domain of TCR clone 43981 (TRBV19, TRBJ2-1)
CASSKDRGQDKQFF

SEQ ID NO: 87963 - protein, 14 aa, Homo sapiens
  CDR3 for alpha chain variable domain of TCR clone 43982 (TRAV26-1, TRAJ45)
CIEVTGGGAYGLTF

SEQ ID NO: 87964 - protein, 13 aa, Homo sapiens
  CDR3 for beta chain variable domain of TCR clone 43982 (TRBV7-6, TRBJ1-2)
CASSLVADYGYTF

SEQ ID NO: 87965 - protein, 14 aa, Homo sapiens
  CDR3 for alpha chain variable domain of TCR clone 43983 (TRAV3, TRAJ9)
CAVRLNTGGFKTIF

SEQ ID NO: 87966 - protein, 16 aa, Homo sapiens
  CDR3 for beta chain variable domain of TCR clone 43983 (TRBV12-5, TRBJ2-5)
CASGPRTSGNQGTQYF

SEQ ID NO: 87967 - protein, 14 aa, Homo sapiens
  CDR3 for alpha chain variable domain of TCR clone 43984 (TRAV1-1, TRAJ27)
CAVIYNTNAGKSTF

SEQ ID NO: 87968 - protein, 13 aa, Homo sapiens
  CDR3 for beta chain variable domain of TCR clone 43984 (TRBV6-3, TRBJ2-7)
CASSFSGGYEQYF

SEQ ID NO: 87969 - protein, 13 aa, Homo sapiens
  CDR3 for alpha chain variable domain of TCR clone 43985 (TRAV13-2, TRAJ11)
CAERNSGYSTLTF

SEQ ID NO: 87970 - protein, 15 aa, Homo sapiens
  CDR3 for beta chain variable domain of TCR clone 43985 (TRBV7-3, TRBJ2-2)
CASSLGQGRAGELFF

SEQ ID NO: 87971 - protein, 14 aa, Homo sapiens
  CDR3 for alpha chain variable domain of TCR clone 43986 (TRAV12-2, TRAJ13)
CAVKKTGGYQKVTL

SEQ ID NO: 87972 - protein, 13 aa, Homo sapiens
  CDR3 for beta chain variable domain of TCR clone 43986 (TRBV15, TRBJ1-6)
CATSGGLNSPLHF

SEQ ID NO: 87973 - protein, 12 aa, Homo sapiens
  CDR3 for alpha chain variable domain of TCR clone 43987 (TRAV29/DV5, TRAJ49)
CAATDTGNQFYF

SEQ ID NO: 87974 - protein, 13 aa, Homo sapiens
  CDR3 for beta chain variable domain of TCR clone 43987 (TRBV15, TRBJ1-1)
CATSRGIQARAFF

SEQ ID NO: 87975 - protein, 15 aa, Homo sapiens
  CDR3 for alpha chain variable domain of TCR clone 43988 (TRAV2, TRAJ9)
CAVEDRGTGGFKTIF

SEQ ID NO: 87976 - protein, 11 aa, Homo sapiens
  CDR3 for beta chain variable domain of TCR clone 43988 (TRBV12-4, TRBJ2-3)
CASTATDTQYF

SEQ ID NO: 87977 - protein, 12 aa, Homo sapiens
  CDR3 for alpha chain variable domain of TCR clone 43989 (TRAV12-3, TRAJ20)
CAMVRGDYKLSF

SEQ ID NO: 87978 - protein, 14 aa, Homo sapiens
  CDR3 for beta chain variable domain of TCR clone 43989 (TRBV5-8, TRBJ2-3)
CASSLGQGTDTQYF

SEQ ID NO: 87979 - protein, 21 aa, Homo sapiens
  CDR3 for alpha chain variable domain of TCR clone 43990 (TRAV1-1, TRAJ22)
CLLLLRCERSGSSGSARQLTF

SEQ ID NO: 87980 - protein, 14 aa, Homo sapiens
  CDR3 for beta chain variable domain of TCR clone 43990 (TRBV7-2, TRBJ2-7)
CASSPKTSFYEQYF

SEQ ID NO: 87981 - protein, 12 aa, Homo sapiens
  CDR3 for alpha chain variable domain of TCR clone 43991 (TRAV8-4, TRAJ43)
CAVSVNNNDMRL

SEQ ID NO: 87982 - protein, 16 aa, Homo sapiens
  CDR3 for beta chain variable domain of TCR clone 43991 (TRBV7-2, TRBJ2-6)
CASSLAGRSGANVLTF

SEQ ID NO: 87983 - protein, 16 aa, Homo sapiens
  CDR3 for alpha chain variable domain of TCR clone 43992 (TRAV3, TRAJ21)
CAVRDTERGNFNKFYF

SEQ ID NO: 87984 - protein, 13 aa, Homo sapiens
  CDR3 for beta chain variable domain of TCR clone 43992 (TRBV4-2, TRBJ1-1)
CASSQAGNTEAFF

SEQ ID NO: 87985 - protein, 11 aa, Homo sapiens
  CDR3 for alpha chain variable domain of TCR clone 43993 (TRAV2, TRAJ33)
CAVESNYQLIW

SEQ ID NO: 87986 - protein, 14 aa, Homo sapiens
  CDR3 for beta chain variable domain of TCR clone 43993 (TRBV7-2, TRBJ2-7)
CASSPKTSFYEQYF

SEQ ID NO: 87987 - protein, 12 aa, Homo sapiens
  CDR3 for alpha chain variable domain of TCR clone 43994 (TRAV8-3, TRAJ26)
CAGDNYGQNFVF

SEQ ID NO: 87988 - protein, 14 aa, Homo sapiens
  CDR3 for beta chain variable domain of TCR clone 43994 (TRBV12-5, TRBJ2-5)
CASGSRTHQETQYF

SEQ ID NO: 87989 - protein, 14 aa, Homo sapiens
  CDR3 for alpha chain variable domain of TCR clone 43995 (TRAV12-2, TRAJ13)
RAVKKTGGYQKVTF

SEQ ID NO: 87990 - protein, 12 aa, Homo sapiens
  CDR3 for beta chain variable domain of TCR clone 43995 (TRBV11-2, TRBJ2-2)
CASSLGGGELFF

SEQ ID NO: 87991 - protein, 12 aa, Homo sapiens
  CDR3 for alpha chain variable domain of TCR clone 43996 (TRAV3, TRAJ34)
CAVLGNADKLIF

SEQ ID NO: 87992 - protein, 13 aa, Homo sapiens
  CDR3 for beta chain variable domain of TCR clone 43996 (TRBV19, TRBJ2-1)
CASSIGTGNEQFF

SEQ ID NO: 87993 - protein, 14 aa, Homo sapiens
  CDR3 for alpha chain variable domain of TCR clone 43997 (TRAV8-6, TRAJ49)
CAVSVRYAGNQFYF

SEQ ID NO: 87994 - protein, 19 aa, Homo sapiens
  CDR3 for beta chain variable domain of TCR clone 43997 (TRBV28, TRBJ2-1)
CASSFSIRGSGRTRYEQFF

SEQ ID NO: 87995 - protein, 15 aa, Homo sapiens
  CDR3 for alpha chain variable domain of TCR clone 43998 (TRAV8-4, TRAJ45)
CAVIWTGGGTDGLTF

SEQ ID NO: 87996 - protein, 12 aa, Homo sapiens
  CDR3 for beta chain variable domain of TCR clone 43998 (TRBV29-1, TRBJ2-7)
CSVGPSGDEQYF

SEQ ID NO: 87997 - protein, 14 aa, Homo sapiens
  CDR3 for alpha chain variable domain of TCR clone 43999 (TRAV14/DV4, TRAJ54)
CAMREALGAQKLVF

SEQ ID NO: 87998 - protein, 15 aa, Homo sapiens
  CDR3 for beta chain variable domain of TCR clone 43999 (TRBV5-1, TRBJ2-7)
CASSLNGGPAREQYF

SEQ ID NO: 87999 - protein, 14 aa, Homo sapiens
  CDR3 for alpha chain variable domain of TCR clone 44000 (TRAV1-2, TRAJ16)
CAVNRFSDGQKLLF

SEQ ID NO: 88000 - protein, 18 aa, Homo sapiens
  CDR3 for beta chain variable domain of TCR clone 44000 (TRBV11-2, TRBJ2-6)
CASSLNPFLGTGANVLTF

SEQ ID NO: 88001 - protein, 12 aa, Homo sapiens
  CDR3 for alpha chain variable domain of TCR clone 44001 (TRAV35, TRAJ54)
CADLQGAQRLVF

SEQ ID NO: 88002 - protein, 12 aa, Homo sapiens
  CDR3 for beta chain variable domain of TCR clone 44001 (TRBV5-4, TRBJ2-5)
CASSSTRETQYF

SEQ ID NO: 88003 - protein, 18 aa, Homo sapiens
  CDR3 for alpha chain variable domain of TCR clone 44002 (TRAV21, TRAJ52)
CAVRPSPAGGTSYGKLTF

SEQ ID NO: 88004 - protein, 13 aa, Homo sapiens
  CDR3 for beta chain variable domain of TCR clone 44002 (TRBV24-1, TRBJ2-1)
CATSAGPYNEQFF

SEQ ID NO: 88005 - protein, 13 aa, Homo sapiens
  CDR3 for alpha chain variable domain of TCR clone 44003 (TRAV1-2, TRAJ9)
CAALNTGGFKTIF

SEQ ID NO: 88006 - protein, 15 aa, Homo sapiens
  CDR3 for beta chain variable domain of TCR clone 44003 (TRBV12-4, TRBJ2-5)
CASTLNSGRGETQYF

SEQ ID NO: 88007 - protein, 15 aa, Homo sapiens
  CDR3 for alpha chain variable domain of TCR clone 44004 (TRAV12-3, TRAJ10)
CASYILTGGGNKLTF

SEQ ID NO: 88008 - protein, 15 aa, Homo sapiens
  CDR3 for beta chain variable domain of TCR clone 44004 (TRBV7-2, TRBJ1-6)
CAGSLGPDRGMPLHF

SEQ ID NO: 88009 - protein, 16 aa, Homo sapiens
  CDR3 for alpha chain variable domain of TCR clone 44005 (TRAV30, TRAJ24)
CGTEIVDADSWGKFQF

SEQ ID NO: 88010 - protein, 16 aa, Homo sapiens
  CDR3 for beta chain variable domain of TCR clone 44005 (TRBV7-8, TRBJ2-4)
CASSAERTLAKNIQYF

SEQ ID NO: 88011 - protein, 16 aa, Homo sapiens
  CDR3 for alpha chain variable domain of TCR clone 44006 (TRAV12-2, TRAJ40)
CAVIGGGTSGTYKYIF

SEQ ID NO: 88012 - protein, 14 aa, Homo sapiens
  CDR3 for beta chain variable domain of TCR clone 44006 (TRBV20-1, TRBJ2-5)
CSARDGRAGETQYF

SEQ ID NO: 88013 - protein, 13 aa, Homo sapiens
  CDR3 for alpha chain variable domain of TCR clone 44007 (TRAV17, TRAJ5)
CALRGTGRRALTF

SEQ ID NO: 88014 - protein, 16 aa, Homo sapiens
  CDR3 for beta chain variable domain of TCR clone 44007 (TRBV4-2, TRBJ2-1)
CASSQGEGRTVNEQFF

SEQ ID NO: 88015 - protein, 14 aa, Homo sapiens
  CDR3 for alpha chain variable domain of TCR clone 44008 (TRAV26-1, TRAJ39)
CIVRGSRAGNMLTF

SEQ ID NO: 88016 - protein, 15 aa, Homo sapiens
  CDR3 for beta chain variable domain of TCR clone 44008 (TRBV7-9, TRBJ1-5)
CASSQGHQPDQPQHF

SEQ ID NO: 88017 - protein, 12 aa, Homo sapiens
  CDR3 for alpha chain variable domain of TCR clone 44009 (TRAV41, TRAJ58)
CAVETSGSRLTF

SEQ ID NO: 88018 - protein, 15 aa, Homo sapiens
  CDR3 for beta chain variable domain of TCR clone 44009 (TRBV29-1, TRBJ2-6)
CRVGDRGSGANVLTF

SEQ ID NO: 88019 - protein, 13 aa, Homo sapiens
  CDR3 for alpha chain variable domain of TCR clone 44010 (TRAV8-3, TRAJ28)
CAVGAVGSYQLTF

SEQ ID NO: 88020 - protein, 15 aa, Homo sapiens
  CDR3 for beta chain variable domain of TCR clone 44010 (TRBV7-9, TRBJ1-5)
CASSQGHQLNQPQHF

SEQ ID NO: 88021 - protein, 14 aa, Homo sapiens
  CDR3 for alpha chain variable domain of TCR clone 44011 (TRAV17, TRAJ16)
CATADFSDGQKLRF

SEQ ID NO: 88022 - protein, 15 aa, Homo sapiens
  CDR3 for beta chain variable domain of TCR clone 44011 (TRBV18, TRBJ2-1)
CASSPPSASYNEQFF

SEQ ID NO: 88023 - protein, 16 aa, Homo sapiens
  CDR3 for alpha chain variable domain of TCR clone 44012 (TRAV21, TRAJ37)
CAIRTAGSSNTGKLIF

SEQ ID NO: 88024 - protein, 13 aa, Homo sapiens
  CDR3 for beta chain variable domain of TCR clone 44012 (TRBV7-9, TRBJ2-5)
CASLPSGRETQYF

SEQ ID NO: 88025 - protein, 13 aa, Homo sapiens
  CDR3 for alpha chain variable domain of TCR clone 44013 (TRAV20, TRAJ54)
CAVQAGGAQKLVF

SEQ ID NO: 88026 - protein, 14 aa, Homo sapiens
  CDR3 for beta chain variable domain of TCR clone 44013 (TRBV20-1, TRBJ2-7)
CSAKTGTGGYEQCF

SEQ ID NO: 88027 - protein, 13 aa, Homo sapiens
  CDR3 for alpha chain variable domain of TCR clone 44014 (TRAV38-1, TRAJ42)
CARWGGSQGNLIF

SEQ ID NO: 88028 - protein, 17 aa, Homo sapiens
  CDR3 for beta chain variable domain of TCR clone 44014 (TRBV20-1, TRBJ2-1)
CGARDPLAGVWDNEQFF

SEQ ID NO: 88029 - protein, 17 aa, Homo sapiens
  CDR3 for alpha chain variable domain of TCR clone 44015 (TRAV3, TRAJ6)
CAVRDGPRAGGSYIPTF

SEQ ID NO: 88030 - protein, 16 aa, Homo sapiens
  CDR3 for beta chain variable domain of TCR clone 44015 (TRBV15, TRBJ2-5)
CATSRYLEAAQETQYF

SEQ ID NO: 88031 - protein, 15 aa, Homo sapiens
  CDR3 for alpha chain variable domain of TCR clone 44016 (TRAV8-3, TRAJ15)
CAVGAPNQAGTALIF

SEQ ID NO: 88032 - protein, 14 aa, Homo sapiens
  CDR3 for beta chain variable domain of TCR clone 44016 (TRBV20-1, TRBJ2-1)
CSLNDEASYNEQFF

SEQ ID NO: 88033 - protein, 15 aa, Homo sapiens
  CDR3 for alpha chain variable domain of TCR clone 44017 (TRAV21, TRAJ32)
CAVNSYGGATNKLIF

SEQ ID NO: 88034 - protein, 18 aa, Homo sapiens
  CDR3 for beta chain variable domain of TCR clone 44017 (TRBV7-9, TRBJ2-1)
CASSTGLAEGSAYNEQFF

SEQ ID NO: 88035 - protein, 13 aa, Homo sapiens
  CDR3 for alpha chain variable domain of TCR clone 44018 (TRAV21, TRAJ20)
CAVGLRVDYKLSF

SEQ ID NO: 88036 - protein, 14 aa, Homo sapiens
  CDR3 for beta chain variable domain of TCR clone 44018 (TRBV2, TRBJ2-1)
CASSEALIYNEQFF

SEQ ID NO: 88037 - protein, 14 aa, Homo sapiens
  CDR3 for alpha chain variable domain of TCR clone 44019 (TRAV1-2, TRAJ8)
CAVREDTGFQKLVF

SEQ ID NO: 88038 - protein, 17 aa, Homo sapiens
  CDR3 for beta chain variable domain of TCR clone 44019 (TRBV11-2, TRBJ2-1)
CASSLYPPGVEYDEQFF

SEQ ID NO: 88039 - protein, 18 aa, Homo sapiens
  CDR3 for alpha chain variable domain of TCR clone 44020 (TRAV21, TRAJ52)
CAVRPSPTGGTSYGKLTF

SEQ ID NO: 88040 - protein, 13 aa, Homo sapiens
  CDR3 for beta chain variable domain of TCR clone 44020 (TRBV7-3, TRBJ1-1)
CASSQDWGAEAFF

SEQ ID NO: 88041 - protein, 13 aa, Homo sapiens
  CDR3 for alpha chain variable domain of TCR clone 44021 (TRAV30, TRAJ24)
CGTVTDSWGKLQF

SEQ ID NO: 88042 - protein, 15 aa, Homo sapiens
  CDR3 for beta chain variable domain of TCR clone 44021 (TRBV25-1, TRBJ1-4)
CASSPGDSTNDKLFF

SEQ ID NO: 88043 - protein, 13 aa, Homo sapiens
  CDR3 for alpha chain variable domain of TCR clone 44022 (TRAV2, TRAJ40)
CAVVTSGTYKYIF

SEQ ID NO: 88044 - protein, 13 aa, Homo sapiens
  CDR3 for beta chain variable domain of TCR clone 44022 (TRBV19, TRBJ1-2)
CASSQGQVYGYTF

SEQ ID NO: 88045 - protein, 11 aa, Homo sapiens
  CDR3 for alpha chain variable domain of TCR clone 44023 (TRAV12-3, TRAJ49)
CAANTGNQFYF

SEQ ID NO: 88046 - protein, 12 aa, Homo sapiens
  CDR3 for beta chain variable domain of TCR clone 44023 (TRBV6-3, TRBJ2-7)
CASSEPGFEQYL

SEQ ID NO: 88047 - protein, 16 aa, Homo sapiens
  CDR3 for alpha chain variable domain of TCR clone 44024 (TRAV1-2, TRAJ6)
CAVRDQGTGGSYIPTF

SEQ ID NO: 88048 - protein, 13 aa, Homo sapiens
  CDR3 for beta chain variable domain of TCR clone 44024 (TRBV12-4, TRBJ1-2)
CASGLRQGKGYTF

SEQ ID NO: 88049 - protein, 15 aa, Homo sapiens
  CDR3 for alpha chain variable domain of TCR clone 44025 (TRAV8-3, TRAJ45)
CASSYSGGGADGLTF

SEQ ID NO: 88050 - protein, 20 aa, Homo sapiens
  CDR3 for beta chain variable domain of TCR clone 44025 (TRBV28, TRBJ2-1)
CASTPIGRSPGLAGGNEQFS

SEQ ID NO: 88051 - protein, 20 aa, Homo sapiens
  CDR3 for alpha chain variable domain of TCR clone 44026 (TRAV21, TRAJ22)
SLVTQPPTLKSSGSARQLTF

SEQ ID NO: 88052 - protein, 14 aa, Homo sapiens
  CDR3 for beta chain variable domain of TCR clone 44026 (TRBV7-9, TRBJ2-1)
CASSPRDSLYEQFF

SEQ ID NO: 88053 - protein, 13 aa, Homo sapiens
  CDR3 for alpha chain variable domain of TCR clone 44027 (TRAV3, TRAJ15)
CAVRDQAGTALIF

SEQ ID NO: 88054 - protein, 15 aa, Homo sapiens
  CDR3 for beta chain variable domain of TCR clone 44027 (TRBV11-1, TRBJ2-7)
CAGSLNYGASYEQYF

SEQ ID NO: 88055 - protein, 14 aa, Homo sapiens
  CDR3 for alpha chain variable domain of TCR clone 44028 (TRAV38-1, TRAJ45)
CAYYSGGGADGLTF

SEQ ID NO: 88056 - protein, 20 aa, Homo sapiens
  CDR3 for beta chain variable domain of TCR clone 44028 (TRBV28, TRBJ2-1)
CASTPIGRSPGLAGENEQFF

SEQ ID NO: 88057 - protein, 13 aa, Homo sapiens
  CDR3 for alpha chain variable domain of TCR clone 44029 (TRAV17, TRAJ26)
CATVDNCGQNFVF

SEQ ID NO: 88058 - protein, 16 aa, Homo sapiens
  CDR3 for beta chain variable domain of TCR clone 44029 (TRBV2, TRBJ2-1)
CASSVGGSLSYNEQFF

SEQ ID NO: 88059 - protein, 15 aa, Homo sapiens
  CDR3 for alpha chain variable domain of TCR clone 44030 (TRAV26-1, TRAJ44)
CIARVPFGTASKLTF

SEQ ID NO: 88060 - protein, 17 aa, Homo sapiens
  CDR3 for beta chain variable domain of TCR clone 44030 (TRBV24-1, TRBJ2-4)
CATSDAEAQGVRNIQYF

SEQ ID NO: 88061 - protein, 15 aa, Homo sapiens
  CDR3 for alpha chain variable domain of TCR clone 44031 (TRAV29/DV5, TRAJ24)
CAASEATDSWGKFQF

SEQ ID NO: 88062 - protein, 12 aa, Homo sapiens
  CDR3 for beta chain variable domain of TCR clone 44031 (TRBV11-2, TRBJ2-2)
CASSLPTGELFF

SEQ ID NO: 88063 - protein, 13 aa, Homo sapiens
  CDR3 for alpha chain variable domain of TCR clone 44032 (TRAV12-3, TRAJ10)
CAVGTGGGNKLTF

SEQ ID NO: 88064 - protein, 13 aa, Homo sapiens
  CDR3 for beta chain variable domain of TCR clone 44032 (TRBV29-1, TRBJ1-1)
CSVGDSRNTEAFF

SEQ ID NO: 88065 - protein, 17 aa, Homo sapiens
  CDR3 for alpha chain variable domain of TCR clone 44033 (TRAV8-6, TRAJ58)
CAVSSWVGETSGSRLTF

SEQ ID NO: 88066 - protein, 14 aa, Homo sapiens
  CDR3 for beta chain variable domain of TCR clone 44033 (TRBV4-2, TRBJ2-1)
CASGLDKAYNEQFF

SEQ ID NO: 88067 - protein, 14 aa, Homo sapiens
  CDR3 for alpha chain variable domain of TCR clone 44034 (TRAV12-3, TRAJ9)
CAMSPNPGGFKTIF

SEQ ID NO: 88068 - protein, 12 aa, Homo sapiens
  CDR3 for beta chain variable domain of TCR clone 44034 (TRBV19, TRBJ1-5)
CASSIAQQPQHF

SEQ ID NO: 88069 - protein, 14 aa, Homo sapiens
  CDR3 for alpha chain variable domain of TCR clone 44035 (TRAV13-1, TRAJ21)
CAAKEGFNKFTLDL

SEQ ID NO: 88070 - protein, 16 aa, Homo sapiens
  CDR3 for beta chain variable domain of TCR clone 44035 (TRBV5-4, TRBJ2-3)
CASQQPGAGGADTQYF

SEQ ID NO: 88071 - protein, 18 aa, Homo sapiens
  CDR3 for alpha chain variable domain of TCR clone 44036 (TRAV9-2, TRAJ52)
CALSRHNAGGTSYGKLTF

SEQ ID NO: 88072 - protein, 13 aa, Homo sapiens
  CDR3 for beta chain variable domain of TCR clone 44036 (TRBV7-9, TRBJ1-2)
CASSLKQNYGYTL

SEQ ID NO: 88073 - protein, 13 aa, Homo sapiens
  CDR3 for alpha chain variable domain of TCR clone 44037 (TRAV21, TRAJ20)
CAVGLRVDYKLSF

SEQ ID NO: 88074 - protein, 16 aa, Homo sapiens
  CDR3 for beta chain variable domain of TCR clone 44037 (TRBV6-1, TRBJ2-5)
CACSETLDRGAETQYF

SEQ ID NO: 88075 - protein, 16 aa, Homo sapiens
  CDR3 for alpha chain variable domain of TCR clone 44038 (TRAV26-1, TRAJ37)
CIVRGDGSGNTGKLIF

SEQ ID NO: 88076 - protein, 17 aa, Homo sapiens
  CDR3 for beta chain variable domain of TCR clone 44038 (TRBV4-1, TRBJ2-7)
CASSRDQLGVRGGEQYF

SEQ ID NO: 88077 - protein, 14 aa, Homo sapiens
  CDR3 for alpha chain variable domain of TCR clone 44039 (TRAV8-4, TRAJ11)
CAVSLNSGYSTLTF

SEQ ID NO: 88078 - protein, 11 aa, Homo sapiens
  CDR3 for beta chain variable domain of TCR clone 44039 (TRBV11-2, TRBJ2-2)
CASSLPGELFF

SEQ ID NO: 88079 - protein, 12 aa, Homo sapiens
  CDR3 for alpha chain variable domain of TCR clone 44040 (TRAV12-3, TRAJ21)
CAMFNNFNKFYF

SEQ ID NO: 88080 - protein, 16 aa, Homo sapiens
  CDR3 for beta chain variable domain of TCR clone 44040 (TRBV7-9, TRBJ1-2)
CASSLAPLRAAYGYTF

SEQ ID NO: 88081 - protein, 15 aa, Homo sapiens
  CDR3 for alpha chain variable domain of TCR clone 44041 (TRAV29/DV5, TRAJ47)
CAARPTMEYGNKLVL

SEQ ID NO: 88082 - protein, 13 aa, Homo sapiens
  CDR3 for beta chain variable domain of TCR clone 44041 (TRBV20-1, TRBJ1-1)
CSARAGGNTEAFF

SEQ ID NO: 88083 - protein, 14 aa, Homo sapiens
  CDR3 for alpha chain variable domain of TCR clone 44042 (TRAV12-3, TRAJ42)
CAMNYGGSQGNLIF

SEQ ID NO: 88084 - protein, 15 aa, Homo sapiens
  CDR3 for beta chain variable domain of TCR clone 44042 (TRBV28, TRBJ2-5)
CASSADRGRGETQYF

SEQ ID NO: 88085 - protein, 14 aa, Homo sapiens
  CDR3 for alpha chain variable domain of TCR clone 44043 (TRAV8-2, TRAJ11)
CVVSEKSGYSTLPF

SEQ ID NO: 88086 - protein, 16 aa, Homo sapiens
  CDR3 for beta chain variable domain of TCR clone 44043 (TRBV28, TRBJ2-1)
CASSSPEYPRDNEQFF

SEQ ID NO: 88087 - protein, 12 aa, Homo sapiens
  CDR3 for alpha chain variable domain of TCR clone 44044 (TRAV12-3, TRAJ13)
CNELWGYQKVTF

SEQ ID NO: 88088 - protein, 13 aa, Homo sapiens
  CDR3 for beta chain variable domain of TCR clone 44044 (TRBV20-1, TRBJ1-1)
CSAPPGGHTEAFF

SEQ ID NO: 88089 - protein, 12 aa, Homo sapiens
  CDR3 for alpha chain variable domain of TCR clone 44045 (TRAV1-2, TRAJ33)
CAALDSNYQLIW

SEQ ID NO: 88090 - protein, 16 aa, Homo sapiens
  CDR3 for beta chain variable domain of TCR clone 44045 (TRBV6-4, TRBJ1-2)
CASSEAVGDPNYGDTF

SEQ ID NO: 88091 - protein, 13 aa, Homo sapiens
  CDR3 for alpha chain variable domain of TCR clone 44046 (TRAV4, TRAJ7)
CLVGVYGSNRLAF

SEQ ID NO: 88092 - protein, 15 aa, Homo sapiens
  CDR3 for beta chain variable domain of TCR clone 44046 (TRBV20-1, TRBJ2-7)
CSARDRVSGMDEQYF

SEQ ID NO: 88093 - protein, 14 aa, Homo sapiens
  CDR3 for alpha chain variable domain of TCR clone 44047 (TRAV9-2, TRAJ39)
CALYIYNAGNMLTF

SEQ ID NO: 88094 - protein, 12 aa, Homo sapiens
  CDR3 for beta chain variable domain of TCR clone 44047 (TRBV12-5, TRBJ2-5)
CASGQGVETQYF

SEQ ID NO: 88095 - protein, 18 aa, Homo sapiens
  CDR3 for alpha chain variable domain of TCR clone 44048 (TRAV26-2, TRAJ54)
CILRDVEVGIQGAQKLAF

SEQ ID NO: 88096 - protein, 16 aa, Homo sapiens
  CDR3 for beta chain variable domain of TCR clone 44048 (TRBV6-1, TRBJ2-5)
CASSETLDRGAETQYF

SEQ ID NO: 88097 - protein, 11 aa, Homo sapiens
  CDR3 for alpha chain variable domain of TCR clone 44049 (TRAV17, TRAJ31)
CATSNNARPMF

SEQ ID NO: 88098 - protein, 14 aa, Homo sapiens
  CDR3 for beta chain variable domain of TCR clone 44049 (TRBV18, TRBJ2-7)
CASSPRGGAYEQYF

SEQ ID NO: 88099 - protein, 15 aa, Homo sapiens
  CDR3 for alpha chain variable domain of TCR clone 44050 (TRAV12-2, TRAJ53)
CAVNWGGGSNYKLTF

SEQ ID NO: 88100 - protein, 13 aa, Homo sapiens
  CDR3 for beta chain variable domain of TCR clone 44050 (TRBV3-1, TRBJ1-1)
CASSPGVITEAFF

SEQ ID NO: 88101 - protein, 14 aa, Homo sapiens
  CDR3 for alpha chain variable domain of TCR clone 44051 (TRAV1-2, TRAJ16)
CAVNRFPDGQKLLF

SEQ ID NO: 88102 - protein, 16 aa, Homo sapiens
  CDR3 for beta chain variable domain of TCR clone 44051 (TRBV6-6, TRBJ1-5)
CASSYSTLVGNQPQHF

SEQ ID NO: 88103 - protein, 15 aa, Homo sapiens
  CDR3 for alpha chain variable domain of TCR clone 44052 (TRAV17, TRAJ4)
CATGTWPGGYNKLIF

SEQ ID NO: 88104 - protein, 13 aa, Homo sapiens
  CDR3 for beta chain variable domain of TCR clone 44052 (TRBV6-6, TRBJ2-7)
CASSPKHLAEQYF

SEQ ID NO: 88105 - protein, 18 aa, Homo sapiens
  CDR3 for alpha chain variable domain of TCR clone 44053 (TRAV9-2, TRAJ52)
CALSRHNAGGTSDGKLTF

SEQ ID NO: 88106 - protein, 13 aa, Homo sapiens
  CDR3 for beta chain variable domain of TCR clone 44053 (TRBV7-9, TRBJ1-2)
CASSLKQNYGYTF

SEQ ID NO: 88107 - protein, 15 aa, Homo sapiens
  CDR3 for alpha chain variable domain of TCR clone 44054 (TRAV3, TRAJ20)
CAVRDIKLSDYKLSF

SEQ ID NO: 88108 - protein, 15 aa, Homo sapiens
  CDR3 for beta chain variable domain of TCR clone 44054 (TRBV20-1, TRBJ2-7)
CSARDRVSGMDEQYF

SEQ ID NO: 88109 - protein, 14 aa, Homo sapiens
  CDR3 for alpha chain variable domain of TCR clone 44055 (TRAV1-2, TRAJ8)
CAVREDTGFQKLVF

SEQ ID NO: 88110 - protein, 14 aa, Homo sapiens
  CDR3 for beta chain variable domain of TCR clone 44055 (TRBV13, TRBJ2-5)
CASSLERVGETQYF

SEQ ID NO: 88111 - protein, 18 aa, Homo sapiens
  CDR3 for alpha chain variable domain of TCR clone 44056 (TRAV21, TRAJ52)
CAVRPPPAGGTSYGKLTF

SEQ ID NO: 88112 - protein, 13 aa, Homo sapiens
  CDR3 for beta chain variable domain of TCR clone 44056 (TRBV7-3, TRBJ1-1)
CASSQDWGAEAFF

SEQ ID NO: 88113 - protein, 13 aa, Homo sapiens
  CDR3 for alpha chain variable domain of TCR clone 44057 (TRAV29/DV5, TRAJ48)
CAASSSGNEKLTF

SEQ ID NO: 88114 - protein, 14 aa, Homo sapiens
  CDR3 for beta chain variable domain of TCR clone 44057 (TRBV3-1, TRBJ2-2)
CASSQDWVQGELFF

SEQ ID NO: 88115 - protein, 13 aa, Homo sapiens
  CDR3 for alpha chain variable domain of TCR clone 44058 (TRAV5, TRAJ30)
CAEIANRDDKIIF

SEQ ID NO: 88116 - protein, 14 aa, Homo sapiens
  CDR3 for beta chain variable domain of TCR clone 44058 (TRBV6-1, TRBJ2-1)
CASSLGLAGLWEFF

SEQ ID NO: 88117 - protein, 11 aa, Homo sapiens
  CDR3 for alpha chain variable domain of TCR clone 44059 (TRAV5, TRAJ31)
CAESNNARLMF

SEQ ID NO: 88118 - protein, 19 aa, Homo sapiens
  CDR3 for beta chain variable domain of TCR clone 44059 (TRBV28, TRBJ2-1)
CASSFSIRGSGRTRYEQFF

SEQ ID NO: 88119 - protein, 11 aa, Homo sapiens
  CDR3 for alpha chain variable domain of TCR clone 44060 (TRAV2, TRAJ33)
CAVDSNYQLIW

SEQ ID NO: 88120 - protein, 13 aa, Homo sapiens
  CDR3 for beta chain variable domain of TCR clone 44060 (TRBV10-2, TRBJ2-7)
CASGASGGYEQYF

SEQ ID NO: 88121 - protein, 11 aa, Homo sapiens
  CDR3 for alpha chain variable domain of TCR clone 44061 (TRAV2, TRAJ13)
CASGGYQKVTF

SEQ ID NO: 88122 - protein, 15 aa, Homo sapiens
  CDR3 for beta chain variable domain of TCR clone 44061 (TRBV20-1, TRBJ2-1)
CSASSAGSSYNEQFF

SEQ ID NO: 88123 - protein, 13 aa, Homo sapiens
  CDR3 for alpha chain variable domain of TCR clone 44062 (TRAV17, TRAJ22)
CAHHSGSARQLTF

SEQ ID NO: 88124 - protein, 13 aa, Homo sapiens
  CDR3 for beta chain variable domain of TCR clone 44062 (TRBV27, TRBJ1-4)
CASSLMGNEKLFF

SEQ ID NO: 88125 - protein, 13 aa, Homo sapiens
  CDR3 for alpha chain variable domain of TCR clone 44063 (TRAV8-6, TRAJ49)
CAVITNTGNQFYF

SEQ ID NO: 88126 - protein, 15 aa, Homo sapiens
  CDR3 for beta chain variable domain of TCR clone 44063 (TRBV18, TRBJ2-1)
YASSPPSASYNEQFF

SEQ ID NO: 88127 - protein, 12 aa, Homo sapiens
  CDR3 for alpha chain variable domain of TCR clone 44064 (TRAV12-3, TRAJ17)
CAMTLTGNKLTF

SEQ ID NO: 88128 - protein, 13 aa, Homo sapiens
  CDR3 for beta chain variable domain of TCR clone 44064 (TRBV2, TRBJ1-1)
CARNPTGGFHAFF

SEQ ID NO: 88129 - protein, 12 aa, Homo sapiens
  CDR3 for alpha chain variable domain of TCR clone 44065 (TRAV8-6, TRAJ43)
CAVSHNNNDMRF

SEQ ID NO: 88130 - protein, 13 aa, Homo sapiens
  CDR3 for beta chain variable domain of TCR clone 44065 (TRBV7-3, TRBJ1-1)
CASSQDWGAEALF

SEQ ID NO: 88131 - protein, 17 aa, Homo sapiens
  CDR3 for alpha chain variable domain of TCR clone 44066 (TRAV3, TRAJ42)
CAVRDRDYRGSQGNLIF

SEQ ID NO: 88132 - protein, 14 aa, Homo sapiens
  CDR3 for beta chain variable domain of TCR clone 44066 (TRBV7-2, TRBJ2-5)
CASSPRGSSETQYF

SEQ ID NO: 88133 - protein, 11 aa, Homo sapiens
  CDR3 for alpha chain variable domain of TCR clone 44067 (TRAV1-2, TRAJ31)
CAVYNNARLMF

SEQ ID NO: 88134 - protein, 15 aa, Homo sapiens
  CDR3 for beta chain variable domain of TCR clone 44067 (TRBV28, TRBJ2-1)
CASSIIAGGRSEQFF

SEQ ID NO: 88135 - protein, 14 aa, Homo sapiens
  CDR3 for alpha chain variable domain of TCR clone 44068 (TRAV1-2, TRAJ16)
CAVNRFSDGQKLLF

SEQ ID NO: 88136 - protein, 14 aa, Homo sapiens
  CDR3 for beta chain variable domain of TCR clone 44068 (TRBV19, TRBJ2-1)
CASPTLVLSGEQFF

SEQ ID NO: 88137 - protein, 15 aa, Homo sapiens
  CDR3 for alpha chain variable domain of TCR clone 44069 (TRAV26-2, TRAJ45)
CILRDRVDQEEVLTD

SEQ ID NO: 88138 - protein, 15 aa, Homo sapiens
  CDR3 for beta chain variable domain of TCR clone 44069 (TRBV7-6, TRBJ2-5)
CASSEPTGPQETQYF

SEQ ID NO: 88139 - protein, 17 aa, Homo sapiens
  CDR3 for alpha chain variable domain of TCR clone 44070 (TRAV26-1, TRAJ34)
CCVLCIVRPWITDKLIF

SEQ ID NO: 88140 - protein, 14 aa, Homo sapiens
  CDR3 for beta chain variable domain of TCR clone 44070 (TRBV12-4, TRBJ1-4)
CASSRQGANEKLFF

SEQ ID NO: 88141 - protein, 14 aa, Homo sapiens
  CDR3 for alpha chain variable domain of TCR clone 44071 (TRAV1-2, TRAJ16)
CAVNRFLDGQKLLF

SEQ ID NO: 88142 - protein, 13 aa, Homo sapiens
  CDR3 for beta chain variable domain of TCR clone 44071 (TRBV7-9, TRBJ1-2)
CASSLKQNYGYTF

SEQ ID NO: 88143 - protein, 14 aa, Homo sapiens
  CDR3 for alpha chain variable domain of TCR clone 44072 (TRAV16, TRAJ42)
CALLAGGSQGNLIF

SEQ ID NO: 88144 - protein, 13 aa, Homo sapiens
  CDR3 for beta chain variable domain of TCR clone 44072 (TRBV24-1, TRBJ2-2)
CATSDWSTGELFF

SEQ ID NO: 88145 - protein, 14 aa, Homo sapiens
  CDR3 for alpha chain variable domain of TCR clone 44073 (TRAV12-2, TRAJ5)
CAVNRSTGRRALTF

SEQ ID NO: 88146 - protein, 12 aa, Homo sapiens
  CDR3 for beta chain variable domain of TCR clone 44073 (TRBV19, TRBJ1-5)
CASSIAQQPQHC

SEQ ID NO: 88147 - protein, 16 aa, Homo sapiens
  CDR3 for alpha chain variable domain of TCR clone 44074 (TRAV12-2, TRAJ36)
CGTNNLFFGTGTRLTV

SEQ ID NO: 88148 - protein, 14 aa, Homo sapiens
  CDR3 for beta chain variable domain of TCR clone 44074 (TRBV7-2, TRBJ2-1)
CASSLSRVENEQFF

SEQ ID NO: 88149 - protein, 15 aa, Homo sapiens
  CDR3 for alpha chain variable domain of TCR clone 44075 (TRAV3, TRAJ4)
CAVRDGTGGYSKLIF

SEQ ID NO: 88150 - protein, 16 aa, Homo sapiens
  CDR3 for beta chain variable domain of TCR clone 44075 (TRBV27, TRBJ2-2)
CASSSSGVSNTGELFF

SEQ ID NO: 88151 - protein, 15 aa, Homo sapiens
  CDR3 for alpha chain variable domain of TCR clone 44076 (TRAV3, TRAJ5)
CAVRDLDTGRSALTF

SEQ ID NO: 88152 - protein, 14 aa, Homo sapiens
  CDR3 for beta chain variable domain of TCR clone 44076 (TRBV25-1, TRBJ1-1)
CASTHLGGNTEAFF

SEQ ID NO: 88153 - protein, 14 aa, Homo sapiens
  CDR3 for alpha chain variable domain of TCR clone 44077 (TRAV17, TRAJ34)
CATDSLEGTDKLIF

SEQ ID NO: 88154 - protein, 13 aa, Homo sapiens
  CDR3 for beta chain variable domain of TCR clone 44077 (TRBV11-2, TRBJ2-7)
CASSGTRPYEQHF

SEQ ID NO: 88155 - protein, 13 aa, Homo sapiens
  CDR3 for alpha chain variable domain of TCR clone 44078 (TRAV13-1, TRAJ6)
CAASSGGSYIPTF

SEQ ID NO: 88156 - protein, 14 aa, Homo sapiens
  CDR3 for beta chain variable domain of TCR clone 44078 (TRBV20-1, TRBJ2-4)
CSAVAGGPGNIQYL

SEQ ID NO: 88157 - protein, 17 aa, Homo sapiens
  CDR3 for alpha chain variable domain of TCR clone 44079 (TRAV3, TRAJ42)
CAVIDRDYGGSQGNLIF

SEQ ID NO: 88158 - protein, 15 aa, Homo sapiens
  CDR3 for beta chain variable domain of TCR clone 44079 (TRBV6-6, TRBJ2-7)
CASSYSYGGSYEQYF

SEQ ID NO: 88159 - protein, 14 aa, Homo sapiens
  CDR3 for alpha chain variable domain of TCR clone 44080 (TRAV13-2, TRAJ17)
CAENGKAAGNKLTF

SEQ ID NO: 88160 - protein, 15 aa, Homo sapiens
  CDR3 for beta chain variable domain of TCR clone 44080 (TRBV11-2, TRBJ2-1)
CASSLGTSGLNEQFF

SEQ ID NO: 88161 - protein, 10 aa, Homo sapiens
  CDR3 for alpha chain variable domain of TCR clone 44081 (TRAV17, TRAJ52)
SATSCGKLTF

SEQ ID NO: 88162 - protein, 13 aa, Homo sapiens
  CDR3 for beta chain variable domain of TCR clone 44081 (TRBV29-1, TRBJ2-5)
CSVGGTSAETQYF

SEQ ID NO: 88163 - protein, 17 aa, Homo sapiens
  CDR3 for alpha chain variable domain of TCR clone 44082 (TRAV12-2, TRAJ48)
CASNEKLTFGTGTRLTI

SEQ ID NO: 88164 - protein, 13 aa, Homo sapiens
  CDR3 for beta chain variable domain of TCR clone 44082 (TRBV27, TRBJ1-1)
CASSLSIGAEAFF

SEQ ID NO: 88165 - protein, 13 aa, Homo sapiens
  CDR3 for alpha chain variable domain of TCR clone 44083 (TRAV8-1, TRAJ9)
CAVNSVGGFKTIF

SEQ ID NO: 88166 - protein, 15 aa, Homo sapiens
  CDR3 for beta chain variable domain of TCR clone 44083 (TRBV11-2, TRBJ2-3)
CASSGRDGLTDAQYF

SEQ ID NO: 88167 - protein, 23 aa, Homo sapiens
  CDR3 for alpha chain variable domain of TCR clone 44084 (TRAV26-1, TRAJ38)
CIADNAGNNHIQNPDPAVYQLSD

SEQ ID NO: 88168 - protein, 15 aa, Homo sapiens
  CDR3 for beta chain variable domain of TCR clone 44084 (TRBV27, TRBJ2-1)
CASSNGGGSSNEQFF

SEQ ID NO: 88169 - protein, 13 aa, Homo sapiens
  CDR3 for alpha chain variable domain of TCR clone 44085 (TRAV2, TRAJ40)
CAVVTSGTYKYIY

SEQ ID NO: 88170 - protein, 16 aa, Homo sapiens
  CDR3 for beta chain variable domain of TCR clone 44085 (TRBV19, TRBJ2-1)
CASSKAGPSSYNEQFF

SEQ ID NO: 88171 - protein, 14 aa, Homo sapiens
  CDR3 for alpha chain variable domain of TCR clone 44086 (TRAV35, TRAJ22)
CAGLRPGSARQLTF

SEQ ID NO: 88172 - protein, 15 aa, Homo sapiens
  CDR3 for beta chain variable domain of TCR clone 44086 (TRBV12-4, TRBJ2-5)
CSSSPPTGLQETQYF

SEQ ID NO: 88173 - protein, 13 aa, Homo sapiens
  CDR3 for alpha chain variable domain of TCR clone 44087 (TRAV21, TRAJ10)
CAARPGGGNKLTF

SEQ ID NO: 88174 - protein, 14 aa, Homo sapiens
  CDR3 for beta chain variable domain of TCR clone 44087 (TRBV5-4, TRBJ2-7)
CASSADAGSYEQYF

SEQ ID NO: 88175 - protein, 14 aa, Homo sapiens
  CDR3 for alpha chain variable domain of TCR clone 44088 (TRAV12-2, TRAJ13)
CAAKKTGGYQKVTF

SEQ ID NO: 88176 - protein, 14 aa, Homo sapiens
  CDR3 for beta chain variable domain of TCR clone 44088 (TRBV7-6, TRBJ2-3)
CASSLGTVTDTQYF

SEQ ID NO: 88177 - protein, 14 aa, Homo sapiens
  CDR3 for alpha chain variable domain of TCR clone 44089 (TRAV13-1, TRAJ10)
CAAKEPGGGNKLTF

SEQ ID NO: 88178 - protein, 16 aa, Homo sapiens
  CDR3 for beta chain variable domain of TCR clone 44089 (TRBV11-1, TRBJ2-2)
CASSAEGLKNTGELFF

SEQ ID NO: 88179 - protein, 13 aa, Homo sapiens
  CDR3 for alpha chain variable domain of TCR clone 44090 (TRAV3, TRAJ33)
CAVRDRSNYQLIL

SEQ ID NO: 88180 - protein, 16 aa, Homo sapiens
  CDR3 for beta chain variable domain of TCR clone 44090 (TRBV4-2, TRBJ2-7)
CASSQDRGTSSYEQYF

SEQ ID NO: 88181 - protein, 10 aa, Homo sapiens
  CDR3 for alpha chain variable domain of TCR clone 44091 (TRAV8-2, TRAJ29)
CTGGNTPLVF

SEQ ID NO: 88182 - protein, 17 aa, Homo sapiens
  CDR3 for beta chain variable domain of TCR clone 44091 (TRBV2, TRBJ2-7)
CASSQALTGWDSYDQYF

SEQ ID NO: 88183 - protein, 13 aa, Homo sapiens
  CDR3 for alpha chain variable domain of TCR clone 44092 (TRAV30, TRAJ49)
CGTEPNTGNQFYF

SEQ ID NO: 88184 - protein, 14 aa, Homo sapiens
  CDR3 for beta chain variable domain of TCR clone 44092 (TRBV29-1, TRBJ2-1)
RSVEFRGIPFEQFF

SEQ ID NO: 88185 - protein, 13 aa, Homo sapiens
  CDR3 for alpha chain variable domain of TCR clone 44093 (TRAV23/DV6, TRAJ34)
CAASIEGTDKLIF

SEQ ID NO: 88186 - protein, 15 aa, Homo sapiens
  CDR3 for beta chain variable domain of TCR clone 44093 (TRBV20-1, TRBJ2-7)
CSAESGTSGEYEQYF

SEQ ID NO: 88187 - protein, 17 aa, Homo sapiens
  CDR3 for alpha chain variable domain of TCR clone 44094 (TRAV38-1, TRAJ28)
CAFMKPTSGAGSYQLTF

SEQ ID NO: 88188 - protein, 15 aa, Homo sapiens
  CDR3 for beta chain variable domain of TCR clone 44094 (TRBV5-1, TRBJ2-4)
CANSLGGGGSYIQYF

SEQ ID NO: 88189 - protein, 13 aa, Homo sapiens
  CDR3 for alpha chain variable domain of TCR clone 44095 (TRAV8-6, TRAJ49)
CAVITNTGNQFYF

SEQ ID NO: 88190 - protein, 14 aa, Homo sapiens
  CDR3 for beta chain variable domain of TCR clone 44095 (TRBV19, TRBJ2-2)
CASSTLHRSGELFF

SEQ ID NO: 88191 - protein, 11 aa, Homo sapiens
  CDR3 for alpha chain variable domain of TCR clone 44096 (TRAV1-2, TRAJ31)
CAVKNNARLMF

SEQ ID NO: 88192 - protein, 12 aa, Homo sapiens
  CDR3 for beta chain variable domain of TCR clone 44096 (TRBV20-1, TRBJ2-5)
RSAPRSQETQYF

SEQ ID NO: 88193 - protein, 16 aa, Homo sapiens
  CDR3 for alpha chain variable domain of TCR clone 44097 (TRAV2, TRAJ4)
CAVEDRFSGGYNKLIF

SEQ ID NO: 88194 - protein, 13 aa, Homo sapiens
  CDR3 for beta chain variable domain of TCR clone 44097 (TRBV7-7, TRBJ2-5)
CASRRSGQETQYF

SEQ ID NO: 88195 - protein, 14 aa, Homo sapiens
  CDR3 for alpha chain variable domain of TCR clone 44098 (TRAV26-1, TRAJ5)
CIVRARFNRRALTF

SEQ ID NO: 88196 - protein, 17 aa, Homo sapiens
  CDR3 for beta chain variable domain of TCR clone 44098 (TRBV29-1, TRBJ2-3)
CSVEVLAGETSTDTQYF

SEQ ID NO: 88197 - protein, 16 aa, Homo sapiens
  CDR3 for alpha chain variable domain of TCR clone 44099 (TRAV3, TRAJ37)
CAVRPHGSGNTGKLIF

SEQ ID NO: 88198 - protein, 15 aa, Homo sapiens
  CDR3 for beta chain variable domain of TCR clone 44099 (TRBV5-5, TRBJ2-7)
CASSLAAPPSYEQYF

SEQ ID NO: 88199 - protein, 15 aa, Homo sapiens
  CDR3 for alpha chain variable domain of TCR clone 44100 (TRAV3, TRAJ47)
CAVRDIGAYGNKLVF

SEQ ID NO: 88200 - protein, 14 aa, Homo sapiens
  CDR3 for beta chain variable domain of TCR clone 44100 (TRBV13, TRBJ2-5)
CASSLERVGETQYF

SEQ ID NO: 88201 - protein, 14 aa, Homo sapiens
  CDR3 for alpha chain variable domain of TCR clone 44101 (TRAV1-2, TRAJ16)
CAVNRFSDGQKLLF

SEQ ID NO: 88202 - protein, 12 aa, Homo sapiens
  CDR3 for beta chain variable domain of TCR clone 44101 (TRBV7-2, TRBJ1-5)
CASSLWSQPQHF

SEQ ID NO: 88203 - protein, 14 aa, Homo sapiens
  CDR3 for alpha chain variable domain of TCR clone 44102 (TRAV13-1, TRAJ35)
CAASKGGFGNVLHC

SEQ ID NO: 88204 - protein, 16 aa, Homo sapiens
  CDR3 for beta chain variable domain of TCR clone 44102 (TRBV6-4, TRBJ1-2)
CASSEAVGDPNYGYTF

SEQ ID NO: 88205 - protein, 14 aa, Homo sapiens
  CDR3 for alpha chain variable domain of TCR clone 44103 (TRAV12-1, TRAJ3)
CVVILYSSASKTIF

SEQ ID NO: 88206 - protein, 18 aa, Homo sapiens
  CDR3 for beta chain variable domain of TCR clone 44103 (TRBV12-4, TRBJ2-2)
CASSRSGGAIPNTGELFF

SEQ ID NO: 88207 - protein, 15 aa, Homo sapiens
  CDR3 for alpha chain variable domain of TCR clone 44104 (TRAV12-2, TRAJ53)
CAVNGGGGSNYKLTF

SEQ ID NO: 88208 - protein, 15 aa, Homo sapiens
  CDR3 for beta chain variable domain of TCR clone 44104 (TRBV7-9, TRBJ1-5)
CASSQGHQPNQPQHF

SEQ ID NO: 88209 - protein, 13 aa, Homo sapiens
  CDR3 for alpha chain variable domain of TCR clone 44105 (TRAV2, TRAJ36)
CAVDQTGANNLFF

SEQ ID NO: 88210 - protein, 12 aa, Homo sapiens
  CDR3 for beta chain variable domain of TCR clone 44105 (TRBV19, TRBJ1-1)
CASMKRYTEAFF

SEQ ID NO: 88211 - protein, 14 aa, Homo sapiens
  CDR3 for alpha chain variable domain of TCR clone 44106 (TRAV12-2, TRAJ24)
CAVTQADSWGKLQF

SEQ ID NO: 88212 - protein, 12 aa, Homo sapiens
  CDR3 for beta chain variable domain of TCR clone 44106 (TRBV3-1, TRBJ2-1)
CASSQGSSGQFF

SEQ ID NO: 88213 - protein, 21 aa, Homo sapiens
  CDR3 for alpha chain variable domain of TCR clone 44107 (TRAV8-3, TRAJ6)
CAVGGEEATYLHLEEEPALLF

SEQ ID NO: 88214 - protein, 14 aa, Homo sapiens
  CDR3 for beta chain variable domain of TCR clone 44107 (TRBV5-1, TRBJ2-7)
CASSRGESLYEHYF

SEQ ID NO: 88215 - protein, 14 aa, Homo sapiens
  CDR3 for alpha chain variable domain of TCR clone 44108 (TRAV17, TRAJ12)
CATDEKDSSYKLIF

SEQ ID NO: 88216 - protein, 16 aa, Homo sapiens
  CDR3 for beta chain variable domain of TCR clone 44108 (TRBV11-2, TRBJ2-1)
CASSPRLAGVYNEQLF

SEQ ID NO: 88217 - protein, 14 aa, Homo sapiens
  CDR3 for alpha chain variable domain of TCR clone 44109 (TRAV2, TRAJ22)
CAVEVKRAVRQLTF

SEQ ID NO: 88218 - protein, 14 aa, Homo sapiens
  CDR3 for beta chain variable domain of TCR clone 44109 (TRBV19, TRBJ2-2)
CASTPGYSGGELFF

SEQ ID NO: 88219 - protein, 12 aa, Homo sapiens
  CDR3 for alpha chain variable domain of TCR clone 44110 (TRAV13-1, TRAJ49)
CAAPNTGNQFYF

SEQ ID NO: 88220 - protein, 17 aa, Homo sapiens
  CDR3 for beta chain variable domain of TCR clone 44110 (TRBV25-1, TRBJ2-7)
RASSDARVVFSSYEQYF

SEQ ID NO: 88221 - protein, 12 aa, Homo sapiens
  CDR3 for alpha chain variable domain of TCR clone 44111 (TRAV12-3, TRAJ5)
CAMDTGRRALTF

SEQ ID NO: 88222 - protein, 13 aa, Homo sapiens
  CDR3 for beta chain variable domain of TCR clone 44111 (TRBV7-7, TRBJ2-2)
CASSLTGAGELFF

SEQ ID NO: 88223 - protein, 16 aa, Homo sapiens
  CDR3 for alpha chain variable domain of TCR clone 44112 (TRAV2, TRAJ4)
CAVEDRFSGGYNKLIF

SEQ ID NO: 88224 - protein, 13 aa, Homo sapiens
  CDR3 for beta chain variable domain of TCR clone 44112 (TRBV7-7, TRBJ2-5)
CASSRSGQETQYV

SEQ ID NO: 88225 - protein, 13 aa, Homo sapiens
  CDR3 for alpha chain variable domain of TCR clone 44113 (TRAV8-6, TRAJ49)
CAVITNTGNQFYF

SEQ ID NO: 88226 - protein, 16 aa, Homo sapiens
  CDR3 for beta chain variable domain of TCR clone 44113 (TRBV5-1, TRBJ2-7)
CASSRGNHCTSSTSGR

SEQ ID NO: 88227 - protein, 14 aa, Homo sapiens
  CDR3 for alpha chain variable domain of TCR clone 44114 (TRAV1-2, TRAJ33)
CAVRAPDSNYQLIW

SEQ ID NO: 88228 - protein, 13 aa, Homo sapiens
  CDR3 for beta chain variable domain of TCR clone 44114 (TRBV12-4, TRBJ2-5)
CASSLGGSRTQYF

SEQ ID NO: 88229 - protein, 12 aa, Homo sapiens
  CDR3 for alpha chain variable domain of TCR clone 44115 (TRAV3, TRAJ20)
CAVRDPDYKLSF

SEQ ID NO: 88230 - protein, 13 aa, Homo sapiens
  CDR3 for beta chain variable domain of TCR clone 44115 (TRBV7-3, TRBJ1-1)
CASSQDWGAEAFF

SEQ ID NO: 88231 - protein, 20 aa, Homo sapiens
  CDR3 for alpha chain variable domain of TCR clone 44116 (TRAV25, TRAJ21)
TATQTTDVGTYPLSFNKFYF

SEQ ID NO: 88232 - protein, 16 aa, Homo sapiens
  CDR3 for beta chain variable domain of TCR clone 44116 (TRBV19, TRBJ2-3)
CASSPGAASRTDTQYF

SEQ ID NO: 88233 - protein, 16 aa, Homo sapiens
  CDR3 for alpha chain variable domain of TCR clone 44117 (TRAV8-3, TRAJ18)
CAVALDRGSTLGRLYF

SEQ ID NO: 88234 - protein, 11 aa, Homo sapiens
  CDR3 for beta chain variable domain of TCR clone 44117 (TRBV29-1, TRBJ1-1)
CSVEMLTEAFF

SEQ ID NO: 88235 - protein, 12 aa, Homo sapiens
  CDR3 for alpha chain variable domain of TCR clone 44118 (TRAV1-2, TRAJ24)
YAVGGSWGKFQF

SEQ ID NO: 88236 - protein, 13 aa, Homo sapiens
  CDR3 for beta chain variable domain of TCR clone 44118 (TRBV12-4, TRBJ1-2)
CASSLRQGKGYTF

SEQ ID NO: 88237 - protein, 13 aa, Homo sapiens
  CDR3 for alpha chain variable domain of TCR clone 44119 (TRAV1-2, TRAJ36)
CAVDQTGANNLFF

SEQ ID NO: 88238 - protein, 14 aa, Homo sapiens
  CDR3 for beta chain variable domain of TCR clone 44119 (TRBV20-1, TRBJ2-5)
CSAREMTKQETRYF

SEQ ID NO: 88239 - protein, 13 aa, Homo sapiens
  CDR3 for alpha chain variable domain of TCR clone 44120 (TRAV39, TRAJ58)
CAGEETSGSRLTF

SEQ ID NO: 88240 - protein, 13 aa, Homo sapiens
  CDR3 for beta chain variable domain of TCR clone 44120 (TRBV15, TRBJ2-7)
CATSTTGHYEQYL

SEQ ID NO: 88241 - protein, 14 aa, Homo sapiens
  CDR3 for alpha chain variable domain of TCR clone 44121 (TRAV23/DV6, TRAJ22)
CAASVSGSARQLTF

SEQ ID NO: 88242 - protein, 14 aa, Homo sapiens
  CDR3 for beta chain variable domain of TCR clone 44121 (TRBV2, TRBJ2-2)
CASRRDTVAGELFF

SEQ ID NO: 88243 - protein, 13 aa, Homo sapiens
  CDR3 for alpha chain variable domain of TCR clone 44122 (TRAV20, TRAJ21)
CAVEGYNFDKFYF

SEQ ID NO: 88244 - protein, 14 aa, Homo sapiens
  CDR3 for beta chain variable domain of TCR clone 44122 (TRBV3-1, TRBJ2-5)
CASSQGPDQETQYF

SEQ ID NO: 88245 - protein, 15 aa, Homo sapiens
  CDR3 for alpha chain variable domain of TCR clone 44123 (TRAV8-3, TRAJ11)
CAVGLLNSGYSTLTF

SEQ ID NO: 88246 - protein, 16 aa, Homo sapiens
  CDR3 for beta chain variable domain of TCR clone 44123 (TRBV7-9, TRBJ1-2)
CDSSLGFSSGEDGYTF

SEQ ID NO: 88247 - protein, 18 aa, Homo sapiens
  CDR3 for alpha chain variable domain of TCR clone 44124 (TRAV13-1, TRAJ52)
CAAKNPKAGGTSYGKLTF

SEQ ID NO: 88248 - protein, 15 aa, Homo sapiens
  CDR3 for beta chain variable domain of TCR clone 44124 (TRBV6-1, TRBJ2-3)
CASSERGGITDTQYL

SEQ ID NO: 88249 - protein, 12 aa, Homo sapiens
  CDR3 for alpha chain variable domain of TCR clone 44125 (TRAV9-2, TRAJ36)
CALKKGANNLFF

SEQ ID NO: 88250 - protein, 16 aa, Homo sapiens
  CDR3 for beta chain variable domain of TCR clone 44125 (TRBV7-3, TRBJ2-1)
CASSLEGYRSYNEQFF

SEQ ID NO: 88251 - protein, 11 aa, Homo sapiens
  CDR3 for alpha chain variable domain of TCR clone 44126 (TRAV17, TRAJ9)
CATTGGFKTIF

SEQ ID NO: 88252 - protein, 14 aa, Homo sapiens
  CDR3 for beta chain variable domain of TCR clone 44126 (TRBV7-9, TRBJ2-2)
CARSGLADTGELFF

SEQ ID NO: 88253 - protein, 16 aa, Homo sapiens
  CDR3 for alpha chain variable domain of TCR clone 44127 (TRAV12-1, TRAJ12)
CVVNTLLMDSSYKLIL

SEQ ID NO: 88254 - protein, 13 aa, Homo sapiens
  CDR3 for beta chain variable domain of TCR clone 44127 (TRBV11-2, TRBJ2-1)
CASSSEAYNEQFF

SEQ ID NO: 88255 - protein, 14 aa, Homo sapiens
  CDR3 for alpha chain variable domain of TCR clone 44128 (TRAV12-3, TRAJ53)
CGATSGGSNYKLTF

SEQ ID NO: 88256 - protein, 13 aa, Homo sapiens
  CDR3 for beta chain variable domain of TCR clone 44128 (TRBV19, TRBJ1-5)
YASSTQDGQPQHF

SEQ ID NO: 88257 - protein, 17 aa, Homo sapiens
  CDR3 for alpha chain variable domain of TCR clone 44129 (TRAV36/DV7, TRAJ52)
CAVAQRAGGTSYGKLTF

SEQ ID NO: 88258 - protein, 14 aa, Homo sapiens
  CDR3 for beta chain variable domain of TCR clone 44129 (TRBV20-1, TRBJ2-3)
CSARGGTSTDTQCF

SEQ ID NO: 88259 - protein, 14 aa, Homo sapiens
  CDR3 for alpha chain variable domain of TCR clone 44130 (TRAV1-2, TRAJ29)
CAVRELTSATPLVF

SEQ ID NO: 88260 - protein, 12 aa, Homo sapiens
  CDR3 for beta chain variable domain of TCR clone 44130 (TRBV7-8, TRBJ2-7)
CASSLGDREQYF

SEQ ID NO: 88261 - protein, 11 aa, Homo sapiens
  CDR3 for alpha chain variable domain of TCR clone 44131 (TRAV3, TRAJ49)
CAPITGNQFYF

SEQ ID NO: 88262 - protein, 16 aa, Homo sapiens
  CDR3 for beta chain variable domain of TCR clone 44131 (TRBV20-1, TRBJ1-4)
CSAPGQGLLTNEKLFF

SEQ ID NO: 88263 - protein, 15 aa, Homo sapiens
  CDR3 for alpha chain variable domain of TCR clone 44132 (TRAV12-1, TRAJ44)
CVVFVNTGTASKLTF

SEQ ID NO: 88264 - protein, 17 aa, Homo sapiens
  CDR3 for beta chain variable domain of TCR clone 44132 (TRBV7-8, TRBJ2-6)
CASSSGTGGAGANVLTF

SEQ ID NO: 88265 - protein, 13 aa, Homo sapiens
  CDR3 for alpha chain variable domain of TCR clone 44133 (TRAV1-1, TRAJ9)
CAAKNTGGFKTIF

SEQ ID NO: 88266 - protein, 14 aa, Homo sapiens
  CDR3 for beta chain variable domain of TCR clone 44133 (TRBV12-4, TRBJ1-1)
CASSLDGLNTEAFF

SEQ ID NO: 88267 - protein, 14 aa, Homo sapiens
  CDR3 for alpha chain variable domain of TCR clone 44134 (TRAV35, TRAJ13)
CAGSPSGGYQKVTL

SEQ ID NO: 88268 - protein, 13 aa, Homo sapiens
  CDR3 for beta chain variable domain of TCR clone 44134 (TRBV29-1, TRBJ1-1)
CSVGDSRNTEAFF

SEQ ID NO: 88269 - protein, 13 aa, Homo sapiens
  CDR3 for alpha chain variable domain of TCR clone 44135 (TRAV13-2, TRAJ13)
CADLSGGYQKVTF

SEQ ID NO: 88270 - protein, 15 aa, Homo sapiens
  CDR3 for beta chain variable domain of TCR clone 44135 (TRBV19, TRBJ1-1)
CASSIGGGRNTEAVF

SEQ ID NO: 88271 - protein, 12 aa, Homo sapiens
  CDR3 for alpha chain variable domain of TCR clone 44136 (TRAV12-3, TRAJ17)
CAMTLTGNKPTF

SEQ ID NO: 88272 - protein, 13 aa, Homo sapiens
  CDR3 for beta chain variable domain of TCR clone 44136 (TRBV10-3, TRBJ2-7)
CASKLAVNYEQYF

SEQ ID NO: 88273 - protein, 12 aa, Homo sapiens
  CDR3 for alpha chain variable domain of TCR clone 44137 (TRAV1-2, TRAJ9)
CAGYTGGFKTIF

SEQ ID NO: 88274 - protein, 15 aa, Homo sapiens
  CDR3 for beta chain variable domain of TCR clone 44137 (TRBV11-2, TRBJ2-1)
CASSPAGQSLNEQLF

SEQ ID NO: 88275 - protein, 16 aa, Homo sapiens
  CDR3 for alpha chain variable domain of TCR clone 44138 (TRAV16, TRAJ52)
CALSAAGGTSYGKLTF

SEQ ID NO: 88276 - protein, 12 aa, Homo sapiens
  CDR3 for beta chain variable domain of TCR clone 44138 (TRBV12-4, TRBJ1-3)
CASSFSGNTIYC

SEQ ID NO: 88277 - protein, 13 aa, Homo sapiens
  CDR3 for alpha chain variable domain of TCR clone 44139 (TRAV8-3, TRAJ28)
CAVGAVGSSQLTF

SEQ ID NO: 88278 - protein, 14 aa, Homo sapiens
  CDR3 for beta chain variable domain of TCR clone 44139 (TRBV7-2, TRBJ2-7)
CASRSQGAAYEQYF

SEQ ID NO: 88279 - protein, 11 aa, Homo sapiens
  CDR3 for alpha chain variable domain of TCR clone 44140 (TRAV3, TRAJ21)
CAVGNLNKFYF

SEQ ID NO: 88280 - protein, 16 aa, Homo sapiens
  CDR3 for beta chain variable domain of TCR clone 44140 (TRBV19, TRBJ2-1)
CAGSKAGPSSYNEQFF

SEQ ID NO: 88281 - protein, 14 aa, Homo sapiens
  CDR3 for alpha chain variable domain of TCR clone 44141 (TRAV35, TRAJ24)
CAGPRRDSRGKLQF

SEQ ID NO: 88282 - protein, 12 aa, Homo sapiens
  CDR3 for beta chain variable domain of TCR clone 44141 (TRBV12-4, TRBJ2-3)
CASSLGQDTQYF

SEQ ID NO: 88283 - protein, 14 aa, Homo sapiens
  CDR3 for alpha chain variable domain of TCR clone 44142 (TRAV1-1, TRAJ27)
CAVIYNTNAGKSTF

SEQ ID NO: 88284 - protein, 15 aa, Homo sapiens
  CDR3 for beta chain variable domain of TCR clone 44142 (TRBV7-2, TRBJ2-1)
CANSSGLAGGNEQFF

SEQ ID NO: 88285 - protein, 19 aa, Homo sapiens
  CDR3 for alpha chain variable domain of TCR clone 44143 (TRAV23/DV6, )
CAATALIPDIQNPDPAVYQ

SEQ ID NO: 88286 - protein, 16 aa, Homo sapiens
  CDR3 for beta chain variable domain of TCR clone 44143 (TRBV10-3, TRBJ2-7)
CAISPRGQEQTYEQYF

SEQ ID NO: 88287 - protein, 12 aa, Homo sapiens
  CDR3 for alpha chain variable domain of TCR clone 44144 (TRAV35, TRAJ39)
LASNNAGNMLTF

SEQ ID NO: 88288 - protein, 16 aa, Homo sapiens
  CDR3 for beta chain variable domain of TCR clone 44144 (TRBV2, TRBJ2-3)
CASSTSVEGVTDTQYF

SEQ ID NO: 88289 - protein, 14 aa, Homo sapiens
  CDR3 for alpha chain variable domain of TCR clone 44145 (TRAV12-2, TRAJ13)
RAVKKTGGYQKVTF

SEQ ID NO: 88290 - protein, 16 aa, Homo sapiens
  CDR3 for beta chain variable domain of TCR clone 44145 (TRBV20-1, TRBJ1-2)
CSASMGQGVANYGYTF

SEQ ID NO: 88291 - protein, 14 aa, Homo sapiens
  CDR3 for alpha chain variable domain of TCR clone 44146 (TRAV20, TRAJ42)
CAVQAGGSQGNLIF

SEQ ID NO: 88292 - protein, 13 aa, Homo sapiens
  CDR3 for beta chain variable domain of TCR clone 44146 (TRBV5-7, TRBJ2-6)
CASTSSGANVLTF

SEQ ID NO: 88293 - protein, 20 aa, Homo sapiens
  CDR3 for alpha chain variable domain of TCR clone 44147 (TRAV27, TRAJ10)
ASTSVPSRGILTGGGNKLTF

SEQ ID NO: 88294 - protein, 15 aa, Homo sapiens
  CDR3 for beta chain variable domain of TCR clone 44147 (TRBV9, TRBJ2-3)
CASSLEGGLTDTQYL

SEQ ID NO: 88295 - protein, 15 aa, Homo sapiens
  CDR3 for alpha chain variable domain of TCR clone 44148 (TRAV35, TRAJ40)
CAGQLGTSGTSKYIF

SEQ ID NO: 88296 - protein, 14 aa, Homo sapiens
  CDR3 for beta chain variable domain of TCR clone 44148 (TRBV7-3, TRBJ2-1)
CASSLAGGTNEQFF

SEQ ID NO: 88297 - protein, 14 aa, Homo sapiens
  CDR3 for alpha chain variable domain of TCR clone 44149 (TRAV17, TRAJ22)
CATSPSGSPRQLTF

SEQ ID NO: 88298 - protein, 15 aa, Homo sapiens
  CDR3 for beta chain variable domain of TCR clone 44149 (TRBV4-1, TRBJ2-5)
CASSQWDLYQETQYF

SEQ ID NO: 88299 - protein, 16 aa, Homo sapiens
  CDR3 for alpha chain variable domain of TCR clone 44150 (TRAV8-6, TRAJ37)
CAVSGLGPSNTGKLIF

SEQ ID NO: 88300 - protein, 15 aa, Homo sapiens
  CDR3 for beta chain variable domain of TCR clone 44150 (TRBV20-1, TRBJ1-5)
CSARSGPSMNQPQHF

SEQ ID NO: 88301 - protein, 15 aa, Homo sapiens
  CDR3 for alpha chain variable domain of TCR clone 44151 (TRAV3, TRAJ22)
CAVRDRGGSARQLTF

SEQ ID NO: 88302 - protein, 15 aa, Homo sapiens
  CDR3 for beta chain variable domain of TCR clone 44151 (TRBV20-1, TRBJ2-7)
CSAESGTSGAYEQYF

SEQ ID NO: 88303 - protein, 14 aa, Homo sapiens
  CDR3 for alpha chain variable domain of TCR clone 44152 (TRAV26-1, TRAJ39)
CVVRANNAGSMLTF

SEQ ID NO: 88304 - protein, 15 aa, Homo sapiens
  CDR3 for beta chain variable domain of TCR clone 44152 (TRBV28, TRBJ1-2)
CASSLMGGRRDGYTF

SEQ ID NO: 88305 - protein, 12 aa, Homo sapiens
  CDR3 for alpha chain variable domain of TCR clone 44153 (TRAV20, TRAJ54)
CAVQEGAQKLGF

SEQ ID NO: 88306 - protein, 17 aa, Homo sapiens
  CDR3 for beta chain variable domain of TCR clone 44153 (TRBV13, TRBJ2-3)
CASSLSRVAGGRNTQYF

SEQ ID NO: 88307 - protein, 14 aa, Homo sapiens
  CDR3 for alpha chain variable domain of TCR clone 44154 (TRAV12-3, TRAJ10)
SHLLLTGGGNKLTF

SEQ ID NO: 88308 - protein, 14 aa, Homo sapiens
  CDR3 for beta chain variable domain of TCR clone 44154 (TRBV6-1, TRBJ1-3)
CASVQGGGGNTIYF

SEQ ID NO: 88309 - protein, 12 aa, Homo sapiens
  CDR3 for alpha chain variable domain of TCR clone 44155 (TRAV13-2, TRAJ8)
CAPWLGFQKLVF

SEQ ID NO: 88310 - protein, 14 aa, Homo sapiens
  CDR3 for beta chain variable domain of TCR clone 44155 (TRBV7-6, TRBJ2-3)
CASSLGTVTDTQYF

SEQ ID NO: 88311 - protein, 15 aa, Homo sapiens
  CDR3 for alpha chain variable domain of TCR clone 44156 (TRAV3, TRAJ5)
CVVRDRKTGRRALTF

SEQ ID NO: 88312 - protein, 15 aa, Homo sapiens
  CDR3 for beta chain variable domain of TCR clone 44156 (TRBV7-8, TRBJ2-1)
CASSLADSLYNEQFF

SEQ ID NO: 88313 - protein, 14 aa, Homo sapiens
  CDR3 for alpha chain variable domain of TCR clone 44157 (TRAV26-1, TRAJ26)
CIVRATFLGQTFVF

SEQ ID NO: 88314 - protein, 16 aa, Homo sapiens
  CDR3 for beta chain variable domain of TCR clone 44157 (TRBV12-4, TRBJ2-7)
CASRSTGTGPSYEQYF

SEQ ID NO: 88315 - protein, 13 aa, Homo sapiens
  CDR3 for alpha chain variable domain of TCR clone 44158 (TRAV1-2, TRAJ9)
CAVLNTGGFKTIF

SEQ ID NO: 88316 - protein, 15 aa, Homo sapiens
  CDR3 for beta chain variable domain of TCR clone 44158 (TRBV5-1, TRBJ2-1)
CASSPPRAPYNEQFF

SEQ ID NO: 88317 - protein, 14 aa, Homo sapiens
  CDR3 for alpha chain variable domain of TCR clone 44159 (TRAV17, TRAJ34)
CATDSLEGTDKLIF

SEQ ID NO: 88318 - protein, 16 aa, Homo sapiens
  CDR3 for beta chain variable domain of TCR clone 44159 (TRBV24-1, TRBJ2-3)
CATSDPGTGATDTQYF

SEQ ID NO: 88319 - protein, 14 aa, Homo sapiens
  CDR3 for alpha chain variable domain of TCR clone 44160 (TRAV35, TRAJ13)
CAGSPSGGYQKVTF

SEQ ID NO: 88320 - protein, 13 aa, Homo sapiens
  CDR3 for beta chain variable domain of TCR clone 44160 (TRBV10-3, TRBJ2-7)
CASKLAVNYEQYF

SEQ ID NO: 88321 - protein, 16 aa, Homo sapiens
  CDR3 for alpha chain variable domain of TCR clone 44161 (TRAV3, TRAJ37)
CVVRPHGSGNTGKLIF

SEQ ID NO: 88322 - protein, 14 aa, Homo sapiens
  CDR3 for beta chain variable domain of TCR clone 44161 (TRBV25-1, TRBJ1-1)
CASTHLGGNTEAFF

SEQ ID NO: 88323 - protein, 13 aa, Homo sapiens
  CDR3 for alpha chain variable domain of TCR clone 44162 (TRAV2, TRAJ40)
CAVVTSGTYKYIF

SEQ ID NO: 88324 - protein, 15 aa, Homo sapiens
  CDR3 for beta chain variable domain of TCR clone 44162 (TRBV10-3, TRBJ2-1)
CAISDVQDRAYEQFF

SEQ ID NO: 88325 - protein, 14 aa, Homo sapiens
  CDR3 for alpha chain variable domain of TCR clone 44163 (TRAV12-2, TRAJ45)
CALPERGGADGLTF

SEQ ID NO: 88326 - protein, 14 aa, Homo sapiens
  CDR3 for beta chain variable domain of TCR clone 44163 (TRBV18, TRBJ1-5)
YASSPGNSNQPQHF

SEQ ID NO: 88327 - protein, 18 aa, Homo sapiens
  CDR3 for alpha chain variable domain of TCR clone 44164 (TRAV8-4, TRAJ52)
CAVTRANAGGTSYGKLTF

SEQ ID NO: 88328 - protein, 20 aa, Homo sapiens
  CDR3 for beta chain variable domain of TCR clone 44164 (TRBV28, TRBJ2-1)
CASTPIGRSPGLAGGNEQFF

SEQ ID NO: 88329 - protein, 14 aa, Homo sapiens
  CDR3 for alpha chain variable domain of TCR clone 44165 (TRAV38-1, TRAJ29)
CAFITPSGNTPLVF

SEQ ID NO: 88330 - protein, 13 aa, Homo sapiens
  CDR3 for beta chain variable domain of TCR clone 44165 (TRBV7-9, TRBJ1-2)
CASSLKQNYGYTF

SEQ ID NO: 88331 - protein, 13 aa, Homo sapiens
  CDR3 for alpha chain variable domain of TCR clone 44166 (TRAV36/DV7, TRAJ7)
CAVERYGNNRLAF

SEQ ID NO: 88332 - protein, 16 aa, Homo sapiens
  CDR3 for beta chain variable domain of TCR clone 44166 (TRBV19, TRBJ2-3)
CASSPEWDRGTDTQYF

SEQ ID NO: 88333 - protein, 16 aa, Homo sapiens
  CDR3 for alpha chain variable domain of TCR clone 44167 (TRAV4, TRAJ22)
CLVGDLYSGSARQLTF

SEQ ID NO: 88334 - protein, 16 aa, Homo sapiens
  CDR3 for beta chain variable domain of TCR clone 44167 (TRBV20-1, TRBJ1-4)
CSAPGQGLLTNEKLFF

SEQ ID NO: 88335 - protein, 15 aa, Homo sapiens
  CDR3 for alpha chain variable domain of TCR clone 44168 (TRAV9-2, TRAJ5)
CAVRDLDTGRRALTF

SEQ ID NO: 88336 - protein, 13 aa, Homo sapiens
  CDR3 for beta chain variable domain of TCR clone 44168 (TRBV12-4, TRBJ2-7)
CASSPTETYEQYF

SEQ ID NO: 88337 - protein, 13 aa, Homo sapiens
  CDR3 for alpha chain variable domain of TCR clone 44169 (TRAV12-3, TRAJ43)
CAMRPYNNNDMRF

SEQ ID NO: 88338 - protein, 16 aa, Homo sapiens
  CDR3 for beta chain variable domain of TCR clone 44169 (TRBV11-2, TRBJ2-1)
CDSSLLLLSSYNEQFF

SEQ ID NO: 88339 - protein, 15 aa, Homo sapiens
  CDR3 for alpha chain variable domain of TCR clone 44170 (TRAV35, TRAJ40)
CAGQLGTSGNYKYIF

SEQ ID NO: 88340 - protein, 14 aa, Homo sapiens
  CDR3 for beta chain variable domain of TCR clone 44170 (TRBV7-3, TRBJ2-1)
CASSLAGGTNEQFF

SEQ ID NO: 88341 - protein, 14 aa, Homo sapiens
  CDR3 for alpha chain variable domain of TCR clone 44171 (TRAV13-2, TRAJ39)
CADHPPGAGNMPTF

SEQ ID NO: 88342 - protein, 18 aa, Homo sapiens
  CDR3 for beta chain variable domain of TCR clone 44171 (TRBV27, TRBJ2-3)
CASSLSGTSGRGTDTQYF

SEQ ID NO: 88343 - protein, 15 aa, Homo sapiens
  CDR3 for alpha chain variable domain of TCR clone 44172 (TRAV2, TRAJ15)
CAVEDRGQAGTALIF

SEQ ID NO: 88344 - protein, 13 aa, Homo sapiens
  CDR3 for beta chain variable domain of TCR clone 44172 (TRBV10-2, TRBJ2-7)
CSSGASGGYEQYF

SEQ ID NO: 88345 - protein, 13 aa, Homo sapiens
  CDR3 for alpha chain variable domain of TCR clone 44173 (TRAV12-1, TRAJ40)
CVVPTSGTYKYIF

SEQ ID NO: 88346 - protein, 22 aa, Homo sapiens
  CDR3 for beta chain variable domain of TCR clone 44173 (TRBV6-1, TRBJ1-3)
CASVQGGGWKHHIFWRGKLAHC

SEQ ID NO: 88347 - protein, 18 aa, Homo sapiens
  CDR3 for alpha chain variable domain of TCR clone 44174 (TRAV26-2, TRAJ45)
CILRVDKYSGGGADGLTF

SEQ ID NO: 88348 - protein, 16 aa, Homo sapiens
  CDR3 for beta chain variable domain of TCR clone 44174 (TRBV2, TRBJ1-4)
CASNLLQGATNEKLFL

SEQ ID NO: 88349 - protein, 11 aa, Homo sapiens
  CDR3 for alpha chain variable domain of TCR clone 44175 (TRAV13-1, TRAJ6)
CATLGRYIPTF

SEQ ID NO: 88350 - protein, 12 aa, Homo sapiens
  CDR3 for beta chain variable domain of TCR clone 44175 (TRBV11-2, TRBJ2-1)
CASSPGNNEQFF

SEQ ID NO: 88351 - protein, 11 aa, Homo sapiens
  CDR3 for alpha chain variable domain of TCR clone 44176 (TRAV21, TRAJ7)
CAAYGNDRLAF

SEQ ID NO: 88352 - protein, 14 aa, Homo sapiens
  CDR3 for beta chain variable domain of TCR clone 44176 (TRBV4-1, TRBJ2-7)
CASSRTGVAFEQYF

SEQ ID NO: 88353 - protein, 16 aa, Homo sapiens
  CDR3 for alpha chain variable domain of TCR clone 44177 (TRAV26-1, TRAJ53)
CIVRVAMGGSNYKLTF

SEQ ID NO: 88354 - protein, 12 aa, Homo sapiens
  CDR3 for beta chain variable domain of TCR clone 44177 (TRBV7-9, TRBJ1-5)
CTSSPQGQPQHF

SEQ ID NO: 88355 - protein, 18 aa, Homo sapiens
  CDR3 for alpha chain variable domain of TCR clone 44178 (TRAV26-2, TRAJ54)
CILRDVEVGIQGAQKLVF

SEQ ID NO: 88356 - protein, 13 aa, Homo sapiens
  CDR3 for beta chain variable domain of TCR clone 44178 (TRBV14, TRBJ1-1)
CASSQEAGTEAFF

SEQ ID NO: 88357 - protein, 14 aa, Homo sapiens
  CDR3 for alpha chain variable domain of TCR clone 44179 (TRAV13-1, TRAJ31)
CAASSRPNNARPMF

SEQ ID NO: 88358 - protein, 15 aa, Homo sapiens
  CDR3 for beta chain variable domain of TCR clone 44179 (TRBV4-2, TRBJ2-4)
CASSPLGAAKNIQYF

SEQ ID NO: 88359 - protein, 14 aa, Homo sapiens
  CDR3 for alpha chain variable domain of TCR clone 44180 (TRAV12-2, TRAJ13)
CAVKKTGGYQKVTF

SEQ ID NO: 88360 - protein, 15 aa, Homo sapiens
  CDR3 for beta chain variable domain of TCR clone 44180 (TRBV10-1, TRBJ2-3)
CASSATSGGFDTQYF

SEQ ID NO: 88361 - protein, 12 aa, Homo sapiens
  CDR3 for alpha chain variable domain of TCR clone 44181 (TRAV26-2, TRAJ21)
CILKGNFNKFYF

SEQ ID NO: 88362 - protein, 14 aa, Homo sapiens
  CDR3 for beta chain variable domain of TCR clone 44181 (TRBV7-9, TRBJ1-1)
CASTPLQSYTEAFL

SEQ ID NO: 88363 - protein, 21 aa, Homo sapiens
  CDR3 for alpha chain variable domain of TCR clone 44182 (TRAV12-2, TRAJ52)
CSSETPSPVIQPPTSFRSTSY

SEQ ID NO: 88364 - protein, 11 aa, Homo sapiens
  CDR3 for beta chain variable domain of TCR clone 44182 (TRBV11-2, TRBJ2-2)
CASSLPGELFF

SEQ ID NO: 88365 - protein, 17 aa, Homo sapiens
  CDR3 for alpha chain variable domain of TCR clone 44183 (TRAV8-1, TRAJ43)
CAVTNDIRFGAGTRLTV

SEQ ID NO: 88366 - protein, 17 aa, Homo sapiens
  CDR3 for beta chain variable domain of TCR clone 44183 (TRBV5-4, TRBJ2-1)
CASSSAGGRGPYNEQFF

SEQ ID NO: 88367 - protein, 17 aa, Homo sapiens
  CDR3 for alpha chain variable domain of TCR clone 44184 (TRAV3, TRAJ12)
CAVRDGGRMDSSYKLIF

SEQ ID NO: 88368 - protein, 15 aa, Homo sapiens
  CDR3 for beta chain variable domain of TCR clone 44184 (TRBV15, TRBJ1-6)
CATSGALIHPSTLGT

SEQ ID NO: 88369 - protein, 11 aa, Homo sapiens
  CDR3 for alpha chain variable domain of TCR clone 44185 (TRAV21, TRAJ11)
CAVNGYSTLTF

SEQ ID NO: 88370 - protein, 13 aa, Homo sapiens
  CDR3 for beta chain variable domain of TCR clone 44185 (TRBV7-2, TRBJ1-1)
CASNLKGAKVAFF

SEQ ID NO: 88371 - protein, 15 aa, Homo sapiens
  CDR3 for alpha chain variable domain of TCR clone 44186 (TRAV3, TRAJ10)
CAVRDGTGGGNKLTF

SEQ ID NO: 88372 - protein, 15 aa, Homo sapiens
  CDR3 for beta chain variable domain of TCR clone 44186 (TRBV4-3, TRBJ1-4)
WASSLVQREVEKLFF

SEQ ID NO: 88373 - protein, 13 aa, Homo sapiens
  CDR3 for alpha chain variable domain of TCR clone 44187 (TRAV27, TRAJ45)
CRSSGGGADGLSF

SEQ ID NO: 88374 - protein, 17 aa, Homo sapiens
  CDR3 for beta chain variable domain of TCR clone 44187 (TRBV11-2, TRBJ2-1)
CASSLYPPGVEYNEQFF

SEQ ID NO: 88375 - protein, 18 aa, Homo sapiens
  CDR3 for alpha chain variable domain of TCR clone 44188 (TRAV21, TRAJ52)
CAVRPSPAGRTSYGKLTF

SEQ ID NO: 88376 - protein, 17 aa, Homo sapiens
  CDR3 for beta chain variable domain of TCR clone 44188 (TRBV13, TRBJ2-3)
CASSLSRVAGGRNTQYF

SEQ ID NO: 88377 - protein, 11 aa, Homo sapiens
  CDR3 for alpha chain variable domain of TCR clone 44189 (TRAV26-1, TRAJ37)
CIVRVGRKLIF

SEQ ID NO: 88378 - protein, 14 aa, Homo sapiens
  CDR3 for beta chain variable domain of TCR clone 44189 (TRBV7-2, TRBJ2-7)
CASSLPPGQGPHYF

SEQ ID NO: 88379 - protein, 17 aa, Homo sapiens
  CDR3 for alpha chain variable domain of TCR clone 44190 (TRAV27, TRAJ42)
CAERVIYYGGSQGNLIF

SEQ ID NO: 88380 - protein, 15 aa, Homo sapiens
  CDR3 for beta chain variable domain of TCR clone 44190 (TRBV7-2, TRBJ2-3)
CASSLGGGGRDTQYF

SEQ ID NO: 88381 - protein, 11 aa, Homo sapiens
  CDR3 for alpha chain variable domain of TCR clone 44191 (TRAV21, TRAJ34)
CAVNSTDNLIF

SEQ ID NO: 88382 - protein, 17 aa, Homo sapiens
  CDR3 for beta chain variable domain of TCR clone 44191 (TRBV20-1, TRBJ2-1)
CSARSPSGGPPTMSSSS

SEQ ID NO: 88383 - protein, 16 aa, Homo sapiens
  CDR3 for alpha chain variable domain of TCR clone 44192 (TRAV3, TRAJ37)
CAVRGKGSGSTGKLIF

SEQ ID NO: 88384 - protein, 15 aa, Homo sapiens
  CDR3 for beta chain variable domain of TCR clone 44192 (TRBV5-1, TRBJ2-7)
CASSLNGGPAREQYF

SEQ ID NO: 88385 - protein, 15 aa, Homo sapiens
  CDR3 for alpha chain variable domain of TCR clone 44193 (TRAV4, TRAJ42)
CLVGVYGGSQGNLIF

SEQ ID NO: 88386 - protein, 16 aa, Homo sapiens
  CDR3 for beta chain variable domain of TCR clone 44193 (TRBV27, TRBJ1-1)
CASSTRTGGVGTEAFF

SEQ ID NO: 88387 - protein, 14 aa, Homo sapiens
  CDR3 for alpha chain variable domain of TCR clone 44194 (TRAV26-1, TRAJ38)
CIADNAGNNRKLIW

SEQ ID NO: 88388 - protein, 14 aa, Homo sapiens
  CDR3 for beta chain variable domain of TCR clone 44194 (TRBV20-1, TRBJ1-1)
CSAQTRIGGTEAFF

SEQ ID NO: 88389 - protein, 16 aa, Homo sapiens
  CDR3 for alpha chain variable domain of TCR clone 44195 (TRAV12-3, TRAJ53)
CAMSPGSGGSNYKLTF

SEQ ID NO: 88390 - protein, 16 aa, Homo sapiens
  CDR3 for beta chain variable domain of TCR clone 44195 (TRBV20-1, TRBJ1-2)
CSASMGQGVANYGYTF

SEQ ID NO: 88391 - protein, 12 aa, Homo sapiens
  CDR3 for alpha chain variable domain of TCR clone 44196 (TRAV12-3, TRAJ20)
CAMVRGDYKLSF

SEQ ID NO: 88392 - protein, 15 aa, Homo sapiens
  CDR3 for beta chain variable domain of TCR clone 44196 (TRBV6-3, TRBJ2-7)
CASSSPGTVFYEQYF

SEQ ID NO: 88393 - protein, 15 aa, Homo sapiens
  CDR3 for alpha chain variable domain of TCR clone 44197 (TRAV38-1, TRAJ57)
CAFMDSQGGSEKLVF

SEQ ID NO: 88394 - protein, 16 aa, Homo sapiens
  CDR3 for beta chain variable domain of TCR clone 44197 (TRBV10-3, TRBJ2-1)
CAIRGGGRGDCNEQFF

SEQ ID NO: 88395 - protein, 12 aa, Homo sapiens
  CDR3 for alpha chain variable domain of TCR clone 44198 (TRAV8-3, TRAJ20)
CAVGANDYKLSF

SEQ ID NO: 88396 - protein, 12 aa, Homo sapiens
  CDR3 for beta chain variable domain of TCR clone 44198 (TRBV19, TRBJ2-2)
CASRSSRDRGHR

SEQ ID NO: 88397 - protein, 11 aa, Homo sapiens
  CDR3 for alpha chain variable domain of TCR clone 44199 (TRAV29/DV5, TRAJ47)
CAATYGNKLVF

SEQ ID NO: 88398 - protein, 17 aa, Homo sapiens
  CDR3 for beta chain variable domain of TCR clone 44199 (TRBV7-9, TRBJ2-1)
CASSIVASYPSYNEQFF

SEQ ID NO: 88399 - protein, 14 aa, Homo sapiens
  CDR3 for alpha chain variable domain of TCR clone 44200 (TRAV38-1, TRAJ29)
CAFITPSGNTPLVF

SEQ ID NO: 88400 - protein, 14 aa, Homo sapiens
  CDR3 for beta chain variable domain of TCR clone 44200 (TRBV7-2, TRBJ2-7)
CASSPKTSFYEQYF

SEQ ID NO: 88401 - protein, 16 aa, Homo sapiens
  CDR3 for alpha chain variable domain of TCR clone 44201 (TRAV3, TRAJ3)
CAVRDRAKSSASKIIF

SEQ ID NO: 88402 - protein, 16 aa, Homo sapiens
  CDR3 for beta chain variable domain of TCR clone 44201 (TRBV20-1, TRBJ2-4)
CSATSLAELAKNIRYF

SEQ ID NO: 88403 - protein, 15 aa, Homo sapiens
  CDR3 for alpha chain variable domain of TCR clone 44202 (TRAV21, TRAJ52)
CAVRGGGTSYGKLTF

SEQ ID NO: 88404 - protein, 13 aa, Homo sapiens
  CDR3 for beta chain variable domain of TCR clone 44202 (TRBV6-5, TRBJ2-5)
CATAPSPQEAQYF

SEQ ID NO: 88405 - protein, 15 aa, Homo sapiens
  CDR3 for alpha chain variable domain of TCR clone 44203 (TRAV17, TRAJ37)
CATDHGSSNTVKLIF

SEQ ID NO: 88406 - protein, 14 aa, Homo sapiens
  CDR3 for beta chain variable domain of TCR clone 44203 (TRBV7-2, TRBJ2-3)
CASSRTSGADTQYF

SEQ ID NO: 88407 - protein, 14 aa, Homo sapiens
  CDR3 for alpha chain variable domain of TCR clone 44204 (TRAV26-1, TRAJ38)
CIADNAGNNRKLIW

SEQ ID NO: 88408 - protein, 17 aa, Homo sapiens
  CDR3 for beta chain variable domain of TCR clone 44204 (TRBV15, TRBJ1-1)
CATSRVGGAGGDTEAFF

SEQ ID NO: 88409 - protein, 13 aa, Homo sapiens
  CDR3 for alpha chain variable domain of TCR clone 44205 (TRAV2, TRAJ36)
CRIGETGANNLFF

SEQ ID NO: 88410 - protein, 14 aa, Homo sapiens
  CDR3 for beta chain variable domain of TCR clone 44205 (TRBV7-9, TRBJ2-5)
CASSLDTAQETQYF

SEQ ID NO: 88411 - protein, 12 aa, Homo sapiens
  CDR3 for alpha chain variable domain of TCR clone 44206 (TRAV3, TRAJ43)
CAVRDPNNDMCF

SEQ ID NO: 88412 - protein, 15 aa, Homo sapiens
  CDR3 for beta chain variable domain of TCR clone 44206 (TRBV11-1, TRBJ1-5)
CASSLGTGFDQPQHF

SEQ ID NO: 88413 - protein, 15 aa, Homo sapiens
  CDR3 for alpha chain variable domain of TCR clone 44207 (TRAV17, TRAJ35)
RATAFVIGFGNVLHC

SEQ ID NO: 88414 - protein, 16 aa, Homo sapiens
  CDR3 for beta chain variable domain of TCR clone 44207 (TRBV11-2, TRBJ2-7)
CASSPLAGGPRYEQYF

SEQ ID NO: 88415 - protein, 16 aa, Homo sapiens
  CDR3 for alpha chain variable domain of TCR clone 44208 (TRAV30, TRAJ24)
CGTEIVDTDSWGKFQF

SEQ ID NO: 88416 - protein, 15 aa, Homo sapiens
  CDR3 for beta chain variable domain of TCR clone 44208 (TRBV6-3, TRBJ2-7)
CASSSPGTVFYEQYF

SEQ ID NO: 88417 - protein, 15 aa, Homo sapiens
  CDR3 for alpha chain variable domain of TCR clone 44209 (TRAV21, TRAJ53)
CTTLNSGGSNYKLTF

SEQ ID NO: 88418 - protein, 12 aa, Homo sapiens
  CDR3 for beta chain variable domain of TCR clone 44209 (TRBV5-4, TRBJ2-7)
CASSLEAYEQYF

SEQ ID NO: 88419 - protein, 13 aa, Homo sapiens
  CDR3 for alpha chain variable domain of TCR clone 44210 (TRAV21, TRAJ27)
CAARPGNAGKSTF

SEQ ID NO: 88420 - protein, 15 aa, Homo sapiens
  CDR3 for beta chain variable domain of TCR clone 44210 (TRBV5-1, TRBJ2-7)
CASSLNGGPAREQYF

SEQ ID NO: 88421 - protein, 12 aa, Homo sapiens
  CDR3 for alpha chain variable domain of TCR clone 44211 (TRAV13-1, TRAJ49)
CAASPMGNQFSF

SEQ ID NO: 88422 - protein, 13 aa, Homo sapiens
  CDR3 for beta chain variable domain of TCR clone 44211 (TRBV20-1, TRBJ2-2)
CSASAAGTGELFF

SEQ ID NO: 88423 - protein, 14 aa, Homo sapiens
  CDR3 for alpha chain variable domain of TCR clone 44212 (TRAV16, TRAJ29)
FALTRNSGNTPLVF

SEQ ID NO: 88424 - protein, 12 aa, Homo sapiens
  CDR3 for beta chain variable domain of TCR clone 44212 (TRBV2, TRBJ2-1)
CAKREGYNEQFF

SEQ ID NO: 88425 - protein, 13 aa, Homo sapiens
  CDR3 for alpha chain variable domain of TCR clone 44213 (TRAV25, TRAJ30)
CAGRVDRDDKIIF

SEQ ID NO: 88426 - protein, 17 aa, Homo sapiens
  CDR3 for beta chain variable domain of TCR clone 44213 (TRBV7-9, TRBJ2-6)
CASSFGAGYFGANALTF

SEQ ID NO: 88427 - protein, 15 aa, Homo sapiens
  CDR3 for alpha chain variable domain of TCR clone 44214 (TRAV34, TRAJ38)
CGADFAPGNNRKLIW

SEQ ID NO: 88428 - protein, 16 aa, Homo sapiens
  CDR3 for beta chain variable domain of TCR clone 44214 (TRBV12-5, TRBJ2-5)
CASGPRTSGNQETQYF

SEQ ID NO: 88429 - protein, 13 aa, Homo sapiens
  CDR3 for alpha chain variable domain of TCR clone 44215 (TRAV10, TRAJ40)
CVVSALGTYKYIF

SEQ ID NO: 88430 - protein, 13 aa, Homo sapiens
  CDR3 for beta chain variable domain of TCR clone 44215 (TRBV20-1, TRBJ2-3)
CSARLAGTDTQYL

SEQ ID NO: 88431 - protein, 15 aa, Homo sapiens
  CDR3 for alpha chain variable domain of TCR clone 44216 (TRAV1-2, TRAJ28)
RAVQYSGAGSYQLTF

SEQ ID NO: 88432 - protein, 13 aa, Homo sapiens
  CDR3 for beta chain variable domain of TCR clone 44216 (TRBV20-1, TRBJ2-7)
CSATHTSGYEQYF

SEQ ID NO: 88433 - protein, 16 aa, Homo sapiens
  CDR3 for alpha chain variable domain of TCR clone 44217 (TRAV21, TRAJ37)
CAVRTAGSSNTGKLIF

SEQ ID NO: 88434 - protein, 13 aa, Homo sapiens
  CDR3 for beta chain variable domain of TCR clone 44217 (TRBV7-9, TRBJ2-5)
CSSLPSGRETQYF

SEQ ID NO: 88435 - protein, 15 aa, Homo sapiens
  CDR3 for alpha chain variable domain of TCR clone 44218 (TRAV26-1, TRAJ45)
CIVRVRGGGADGLTF

SEQ ID NO: 88436 - protein, 15 aa, Homo sapiens
  CDR3 for beta chain variable domain of TCR clone 44218 (TRBV9, TRBJ1-6)
CASSVAGTGDSPLHF

SEQ ID NO: 88437 - protein, 14 aa, Homo sapiens
  CDR3 for alpha chain variable domain of TCR clone 44219 (TRAV13-1, TRAJ35)
CAASKGGFGNVLHC

SEQ ID NO: 88438 - protein, 13 aa, Homo sapiens
  CDR3 for beta chain variable domain of TCR clone 44219 (TRBV4-2, TRBJ1-1)
CASSQAGNTEAFF

SEQ ID NO: 88439 - protein, 15 aa, Homo sapiens
  CDR3 for alpha chain variable domain of TCR clone 44220 (TRAV8-3, TRAJ45)
CASSYSGGGADGLTF

SEQ ID NO: 88440 - protein, 13 aa, Homo sapiens
  CDR3 for beta chain variable domain of TCR clone 44220 (TRBV10-3, TRBJ2-7)
LASKLAVNYEQYF

SEQ ID NO: 88441 - protein, 11 aa, Homo sapiens
  CDR3 for alpha chain variable domain of TCR clone 44221 (TRAV21, TRAJ34)
CAHYNTDKLIF

SEQ ID NO: 88442 - protein, 13 aa, Homo sapiens
  CDR3 for beta chain variable domain of TCR clone 44221 (TRBV7-6, TRBJ1-2)
CASSLVADYGYTV

SEQ ID NO: 88443 - protein, 15 aa, Homo sapiens
  CDR3 for alpha chain variable domain of TCR clone 44222 (TRAV21, TRAJ52)
CAVRGGGTSYGKLTF

SEQ ID NO: 88444 - protein, 15 aa, Homo sapiens
  CDR3 for beta chain variable domain of TCR clone 44222 (TRBV7-3, TRBJ1-6)
CASSLIRDGNSPLHF

SEQ ID NO: 88445 - protein, 16 aa, Homo sapiens
  CDR3 for alpha chain variable domain of TCR clone 44223 (TRAV8-3, TRAJ52)
CAVQPAGGTSYGKLAF

SEQ ID NO: 88446 - protein, 15 aa, Homo sapiens
  CDR3 for beta chain variable domain of TCR clone 44223 (TRBV11-2, TRBJ2-7)
CASSLAGGVATEQYF

SEQ ID NO: 88447 - protein, 12 aa, Homo sapiens
  CDR3 for alpha chain variable domain of TCR clone 44224 (TRAV1-2, TRAJ29)
CAVPSGNTPLVF

SEQ ID NO: 88448 - protein, 14 aa, Homo sapiens
  CDR3 for beta chain variable domain of TCR clone 44224 (TRBV18, TRBJ2-5)
CAGSPGVSQETQYF

SEQ ID NO: 88449 - protein, 15 aa, Homo sapiens
  CDR3 for alpha chain variable domain of TCR clone 44225 (TRAV27, TRAJ38)
CAARRNAGNNRKLIW

SEQ ID NO: 88450 - protein, 13 aa, Homo sapiens
  CDR3 for beta chain variable domain of TCR clone 44225 (TRBV12-4, TRBJ1-5)
CASSPDRAQPQHF

SEQ ID NO: 88451 - protein, 15 aa, Homo sapiens
  CDR3 for alpha chain variable domain of TCR clone 44226 (TRAV35, TRAJ40)
CAGQLGTSGTYKYIF

SEQ ID NO: 88452 - protein, 13 aa, Homo sapiens
  CDR3 for beta chain variable domain of TCR clone 44226 (TRBV7-9, TRBJ2-1)
CASSWESYNEQFF

SEQ ID NO: 88453 - protein, 13 aa, Homo sapiens
  CDR3 for alpha chain variable domain of TCR clone 44227 (TRAV27, TRAJ41)
CAGEGNSGYALNF

SEQ ID NO: 88454 - protein, 14 aa, Homo sapiens
  CDR3 for beta chain variable domain of TCR clone 44227 (TRBV7-2, TRBJ1-1)
CASSFLTGTTKAFF

SEQ ID NO: 88455 - protein, 12 aa, Homo sapiens
  CDR3 for alpha chain variable domain of TCR clone 44228 (TRAV21, TRAJ33)
CAKMDSNYQLIW

SEQ ID NO: 88456 - protein, 14 aa, Homo sapiens
  CDR3 for beta chain variable domain of TCR clone 44228 (TRBV2, TRBJ2-7)
CASSLISGGYEQYF

SEQ ID NO: 88457 - protein, 14 aa, Homo sapiens
  CDR3 for alpha chain variable domain of TCR clone 44229 (TRAV12-3, TRAJ9)
CAMSPNTGGFKTIF

SEQ ID NO: 88458 - protein, 12 aa, Homo sapiens
  CDR3 for beta chain variable domain of TCR clone 44229 (TRBV11-3, TRBJ2-2)
CASSLGGGELFF

SEQ ID NO: 88459 - protein, 14 aa, Homo sapiens
  CDR3 for alpha chain variable domain of TCR clone 44230 (TRAV9-2, TRAJ39)
CALYIYNADNMLTF

SEQ ID NO: 88460 - protein, 13 aa, Homo sapiens
  CDR3 for beta chain variable domain of TCR clone 44230 (TRBV2, TRBJ2-3)
CASILAGGQGQYF

SEQ ID NO: 88461 - protein, 11 aa, Homo sapiens
  CDR3 for alpha chain variable domain of TCR clone 44231 (TRAV21, TRAJ34)
CAVTNNDKLIF

SEQ ID NO: 88462 - protein, 17 aa, Homo sapiens
  CDR3 for beta chain variable domain of TCR clone 44231 (TRBV20-1, TRBJ2-1)
CSARSPSGGPPTMSSSS

SEQ ID NO: 88463 - protein, 18 aa, Homo sapiens
  CDR3 for alpha chain variable domain of TCR clone 44232 (TRAV21, TRAJ52)
CAVRPSPAGGTSYGKLTF

SEQ ID NO: 88464 - protein, 16 aa, Homo sapiens
  CDR3 for beta chain variable domain of TCR clone 44232 (TRBV10-3, TRBJ2-1)
CAISGVGDGGGGEQFF

SEQ ID NO: 88465 - protein, 14 aa, Homo sapiens
  CDR3 for alpha chain variable domain of TCR clone 44233 (TRAV1-2, TRAJ8)
CAAREDTGFQKLVF

SEQ ID NO: 88466 - protein, 16 aa, Homo sapiens
  CDR3 for beta chain variable domain of TCR clone 44233 (TRBV20-1, TRBJ2-4)
CSARAILAGQGDIQYF

SEQ ID NO: 88467 - protein, 15 aa, Homo sapiens
  CDR3 for alpha chain variable domain of TCR clone 44234 (TRAV29/DV5, TRAJ29)
CAASERSSGNTPLAF

SEQ ID NO: 88468 - protein, 17 aa, Homo sapiens
  CDR3 for beta chain variable domain of TCR clone 44234 (TRBV4-1, TRBJ1-4)
CASSQEGPRGVEEKLFF

SEQ ID NO: 88469 - protein, 13 aa, Homo sapiens
  CDR3 for alpha chain variable domain of TCR clone 44235 (TRAV8-6, TRAJ49)
CAVVTNTGNQFYF

SEQ ID NO: 88470 - protein, 15 aa, Homo sapiens
  CDR3 for beta chain variable domain of TCR clone 44235 (TRBV9, TRBJ1-6)
CASSVAGTGDSPLHF

SEQ ID NO: 88471 - protein, 15 aa, Homo sapiens
  CDR3 for alpha chain variable domain of TCR clone 44236 (TRAV12-1, TRAJ9)
CVVSFGDTGGFKTIF

SEQ ID NO: 88472 - protein, 13 aa, Homo sapiens
  CDR3 for beta chain variable domain of TCR clone 44236 (TRBV2, TRBJ1-4)
CARSERAGEKLFF

SEQ ID NO: 88473 - protein, 14 aa, Homo sapiens
  CDR3 for alpha chain variable domain of TCR clone 44237 (TRAV12-2, TRAJ13)
CAMKKTGGYQKVTF

SEQ ID NO: 88474 - protein, 17 aa, Homo sapiens
  CDR3 for beta chain variable domain of TCR clone 44237 (TRBV20-1, TRBJ2-2)
CSASGSGQGGLTGELFF

SEQ ID NO: 88475 - protein, 14 aa, Homo sapiens
  CDR3 for alpha chain variable domain of TCR clone 44238 (TRAV12-3, TRAJ56)
CAMSVTGANSKLTF

SEQ ID NO: 88476 - protein, 17 aa, Homo sapiens
  CDR3 for beta chain variable domain of TCR clone 44238 (TRBV20-1, TRBJ2-3)
GSASLLGRGGSADTQYF

SEQ ID NO: 88477 - protein, 12 aa, Homo sapiens
  CDR3 for alpha chain variable domain of TCR clone 44239 (TRAV25, TRAJ11)
CAGASGYSTPTF

SEQ ID NO: 88478 - protein, 14 aa, Homo sapiens
  CDR3 for beta chain variable domain of TCR clone 44239 (TRBV5-8, TRBJ2-3)
CASSLGQGTDTQYF

SEQ ID NO: 88479 - protein, 14 aa, Homo sapiens
  CDR3 for alpha chain variable domain of TCR clone 44240 (TRAV29/DV5, TRAJ36)
CAARRKTGANNLFF

SEQ ID NO: 88480 - protein, 16 aa, Homo sapiens
  CDR3 for beta chain variable domain of TCR clone 44240 (TRBV12-4, TRBJ1-5)
CASSRPVGGSNQPQHF

SEQ ID NO: 88481 - protein, 12 aa, Homo sapiens
  CDR3 for alpha chain variable domain of TCR clone 44241 (TRAV12-3, TRAJ17)
CAMTLTGNKLTF

SEQ ID NO: 88482 - protein, 15 aa, Homo sapiens
  CDR3 for beta chain variable domain of TCR clone 44241 (TRBV7-9, TRBJ1-6)
CASSPPGRGNSPLHF

SEQ ID NO: 88483 - protein, 16 aa, Homo sapiens
  CDR3 for alpha chain variable domain of TCR clone 44242 (TRAV30, TRAJ24)
CGTEIVDADSWGKFQF

SEQ ID NO: 88484 - protein, 16 aa, Homo sapiens
  CDR3 for beta chain variable domain of TCR clone 44242 (TRBV19, TRBJ1-1)
CASSPTRFWPGTEAFF

SEQ ID NO: 88485 - protein, 16 aa, Homo sapiens
  CDR3 for alpha chain variable domain of TCR clone 44243 (TRAV12-1, TRAJ43)
CVVNPHRFGAGTRLTV

SEQ ID NO: 88486 - protein, 12 aa, Homo sapiens
  CDR3 for beta chain variable domain of TCR clone 44243 (TRBV11-2, TRBJ2-2)
CASSLGGGELFF

SEQ ID NO: 88487 - protein, 13 aa, Homo sapiens
  CDR3 for alpha chain variable domain of TCR clone 44244 (TRAV29/DV5, TRAJ31)
CAASGNNNARLMF

SEQ ID NO: 88488 - protein, 15 aa, Homo sapiens
  CDR3 for beta chain variable domain of TCR clone 44244 (TRBV2, TRBJ2-1)
CASSELAGSYNEQFF

SEQ ID NO: 88489 - protein, 14 aa, Homo sapiens
  CDR3 for alpha chain variable domain of TCR clone 44245 (TRAV9-2, TRAJ39)
CALYIYNAGNMLTF

SEQ ID NO: 88490 - protein, 14 aa, Homo sapiens
  CDR3 for beta chain variable domain of TCR clone 44245 (TRBV9, TRBJ2-7)
CASSPLRAAGEQYF

SEQ ID NO: 88491 - protein, 13 aa, Homo sapiens
  CDR3 for alpha chain variable domain of TCR clone 44246 (TRAV22, TRAJ29)
CAVGGSGNTPLVF

SEQ ID NO: 88492 - protein, 13 aa, Homo sapiens
  CDR3 for beta chain variable domain of TCR clone 44246 (TRBV10-3, TRBJ2-7)
CASKLAVNYEQYF

SEQ ID NO: 88493 - protein, 17 aa, Homo sapiens
  CDR3 for alpha chain variable domain of TCR clone 44247 (TRAV17, TRAJ28)
CATDPRRGGAGSYQLTF

SEQ ID NO: 88494 - protein, 16 aa, Homo sapiens
  CDR3 for beta chain variable domain of TCR clone 44247 (TRBV25-1, TRBJ1-1)
CASSGGRDRGRIEAFF

SEQ ID NO: 88495 - protein, 14 aa, Homo sapiens
  CDR3 for alpha chain variable domain of TCR clone 44248 (TRAV23/DV6, TRAJ37)
CAASTSSNTGKLIF

SEQ ID NO: 88496 - protein, 13 aa, Homo sapiens
  CDR3 for beta chain variable domain of TCR clone 44248 (TRBV7-9, TRBJ1-2)
CASSLKQNYGYTF

SEQ ID NO: 88497 - protein, 12 aa, Homo sapiens
  CDR3 for alpha chain variable domain of TCR clone 44249 (TRAV12-2, TRAJ4)
GWPEGGYNKLIF

SEQ ID NO: 88498 - protein, 16 aa, Homo sapiens
  CDR3 for beta chain variable domain of TCR clone 44249 (TRBV6-1, TRBJ2-5)
CASSETLDRGAENQYF

SEQ ID NO: 88499 - protein, 15 aa, Homo sapiens
  CDR3 for alpha chain variable domain of TCR clone 44250 (TRAV20, TRAJ43)
CAVQAGKSSNNDMRF

SEQ ID NO: 88500 - protein, 16 aa, Homo sapiens
  CDR3 for beta chain variable domain of TCR clone 44250 (TRBV7-3, TRBJ2-2)
CASSLKRGTLSGELFF

SEQ ID NO: 88501 - protein, 12 aa, Homo sapiens
  CDR3 for alpha chain variable domain of TCR clone 44251 (TRAV21, TRAJ31)
RAVSPARGRLMF

SEQ ID NO: 88502 - protein, 14 aa, Homo sapiens
  CDR3 for beta chain variable domain of TCR clone 44251 (TRBV28, TRBJ2-7)
CASSLLRISYEQYF

SEQ ID NO: 88503 - protein, 10 aa, Homo sapiens
  CDR3 for alpha chain variable domain of TCR clone 44252 (TRAV30, TRAJ48)
CGIGNEKLTF

SEQ ID NO: 88504 - protein, 14 aa, Homo sapiens
  CDR3 for beta chain variable domain of TCR clone 44252 (TRBV7-6, TRBJ2-3)
CASSVAGGTDAQYF

SEQ ID NO: 88505 - protein, 13 aa, Homo sapiens
  CDR3 for alpha chain variable domain of TCR clone 44253 (TRAV17, TRAJ9)
CATFLTGGFKTIF

SEQ ID NO: 88506 - protein, 16 aa, Homo sapiens
  CDR3 for beta chain variable domain of TCR clone 44253 (TRBV5-6, TRBJ1-4)
CASSPSGGLKTEKLFF

SEQ ID NO: 88507 - protein, 14 aa, Homo sapiens
  CDR3 for alpha chain variable domain of TCR clone 44254 (TRAV8-4, TRAJ13)
CAVTLSGGYQKVTF

SEQ ID NO: 88508 - protein, 14 aa, Homo sapiens
  CDR3 for beta chain variable domain of TCR clone 44254 (TRBV7-2, TRBJ1-2)
CASSQSGSTYGYTF

SEQ ID NO: 88509 - protein, 12 aa, Homo sapiens
  CDR3 for alpha chain variable domain of TCR clone 44255 (TRAV17, TRAJ39)
CATGAAANMLTF

SEQ ID NO: 88510 - protein, 14 aa, Homo sapiens
  CDR3 for beta chain variable domain of TCR clone 44255 (TRBV7-9, TRBJ1-2)
CASSRQGANYGYTF

SEQ ID NO: 88511 - protein, 16 aa, Homo sapiens
  CDR3 for alpha chain variable domain of TCR clone 44256 (TRAV8-3, TRAJ52)
CAVQPAGGTSHGKLTF

SEQ ID NO: 88512 - protein, 15 aa, Homo sapiens
  CDR3 for beta chain variable domain of TCR clone 44256 (TRBV11-2, TRBJ2-7)
CASSLAGGVATEQYF

SEQ ID NO: 88513 - protein, 15 aa, Homo sapiens
  CDR3 for alpha chain variable domain of TCR clone 44257 (TRAV8-3, TRAJ45)
CASSYSGGGADGLTF

SEQ ID NO: 88514 - protein, 13 aa, Homo sapiens
  CDR3 for beta chain variable domain of TCR clone 44257 (TRBV10-3, TRBJ2-7)
CASKLAVNYEQDF

SEQ ID NO: 88515 - protein, 13 aa, Homo sapiens
  CDR3 for alpha chain variable domain of TCR clone 44258 (TRAV1-2, TRAJ9)
CVALNTGGFKTIF

SEQ ID NO: 88516 - protein, 14 aa, Homo sapiens
  CDR3 for beta chain variable domain of TCR clone 44258 (TRBV13, TRBJ2-3)
CASSSGSPTDTQYF

SEQ ID NO: 88517 - protein, 13 aa, Homo sapiens
  CDR3 for alpha chain variable domain of TCR clone 44259 (TRAV21, TRAJ57)
GAVTQGGSEKLVF

SEQ ID NO: 88518 - protein, 16 aa, Homo sapiens
  CDR3 for beta chain variable domain of TCR clone 44259 (TRBV29-1, TRBJ2-7)
CSVEDAEDGTAYEQYF

SEQ ID NO: 88519 - protein, 10 aa, Homo sapiens
  CDR3 for alpha chain variable domain of TCR clone 44260 (TRAV13-2, TRAJ49)
CADTGNQFYF

SEQ ID NO: 88520 - protein, 14 aa, Homo sapiens
  CDR3 for beta chain variable domain of TCR clone 44260 (TRBV19, TRBJ2-7)
CASSMGQGAIEQYF

SEQ ID NO: 88521 - protein, 12 aa, Homo sapiens
  CDR3 for alpha chain variable domain of TCR clone 44261 (TRAV12-2, TRAJ43)
RAVNVNNNDMRF

SEQ ID NO: 88522 - protein, 14 aa, Homo sapiens
  CDR3 for beta chain variable domain of TCR clone 44261 (TRBV25-1, TRBJ2-2)
CASSELGLPGELFF

SEQ ID NO: 88523 - protein, 17 aa, Homo sapiens
  CDR3 for alpha chain variable domain of TCR clone 44262 (TRAV38-2/DV8, TRAJ28)
CAFLALYSGAGSYQLTF

SEQ ID NO: 88524 - protein, 14 aa, Homo sapiens
  CDR3 for beta chain variable domain of TCR clone 44262 (TRBV7-2, TRBJ2-5)
CASSLSGGGETQYF

SEQ ID NO: 88525 - protein, 13 aa, Homo sapiens
  CDR3 for alpha chain variable domain of TCR clone 44263 (TRAV3, TRAJ20)
CAVRDTPRYKLSF

SEQ ID NO: 88526 - protein, 17 aa, Homo sapiens
  CDR3 for beta chain variable domain of TCR clone 44263 (TRBV13, TRBJ2-3)
CASSLSRVAGGRNTQYF

SEQ ID NO: 88527 - protein, 15 aa, Homo sapiens
  CDR3 for alpha chain variable domain of TCR clone 44264 (TRAV12-3, TRAJ27)
CAMRAYNTNAGKSTF

SEQ ID NO: 88528 - protein, 13 aa, Homo sapiens
  CDR3 for beta chain variable domain of TCR clone 44264 (TRBV11-2, TRBJ2-5)
CASSRGPYETQYF

SEQ ID NO: 88529 - protein, 14 aa, Homo sapiens
  CDR3 for alpha chain variable domain of TCR clone 44265 (TRAV29/DV5, TRAJ36)
CAARRKTGANNLFF

SEQ ID NO: 88530 - protein, 13 aa, Homo sapiens
  CDR3 for beta chain variable domain of TCR clone 44265 (TRBV12-4, TRBJ1-1)
CASSPGTGFEAFF

SEQ ID NO: 88531 - protein, 14 aa, Homo sapiens
  CDR3 for alpha chain variable domain of TCR clone 44266 (TRAV12-2, TRAJ13)
CAVKKTGGYQKVTF

SEQ ID NO: 88532 - protein, 15 aa, Homo sapiens
  CDR3 for beta chain variable domain of TCR clone 44266 (TRBV7-6, TRBJ2-7)
CASSGRRDTFGEQYF

SEQ ID NO: 88533 - protein, 15 aa, Homo sapiens
  CDR3 for alpha chain variable domain of TCR clone 44267 (TRAV12-3, TRAJ53)
CNEPGEWGSNYKLTF

SEQ ID NO: 88534 - protein, 11 aa, Homo sapiens
  CDR3 for beta chain variable domain of TCR clone 44267 (TRBV29-1, TRBJ2-5)
CSEDRTGTQYF

SEQ ID NO: 88535 - protein, 16 aa, Homo sapiens
  CDR3 for alpha chain variable domain of TCR clone 44268 (TRAV16, TRAJ4)
CITVLPFSGGYNKLIF

SEQ ID NO: 88536 - protein, 14 aa, Homo sapiens
  CDR3 for beta chain variable domain of TCR clone 44268 (TRBV19, TRBJ2-7)
CASSMGQGAIEHYF

SEQ ID NO: 88537 - protein, 15 aa, Homo sapiens
  CDR3 for alpha chain variable domain of TCR clone 44269 (TRAV8-3, TRAJ15)
CAVCAPNQAGTALIF

SEQ ID NO: 88538 - protein, 14 aa, Homo sapiens
  CDR3 for beta chain variable domain of TCR clone 44269 (TRBV20-1, TRBJ2-1)
CSPNDEASYNEQFF

SEQ ID NO: 88539 - protein, 15 aa, Homo sapiens
  CDR3 for alpha chain variable domain of TCR clone 44270 (TRAV8-4, TRAJ47)
CAVSDPEECGNKLVF

SEQ ID NO: 88540 - protein, 15 aa, Homo sapiens
  CDR3 for beta chain variable domain of TCR clone 44270 (TRBV11-2, TRBJ2-1)
CASSLGPDSYNEQFF

SEQ ID NO: 88541 - protein, 12 aa, Homo sapiens
  CDR3 for alpha chain variable domain of TCR clone 44271 (TRAV13-1, TRAJ21)
CAAKEGFNKFYF

SEQ ID NO: 88542 - protein, 17 aa, Homo sapiens
  CDR3 for beta chain variable domain of TCR clone 44271 (TRBV7-9, TRBJ2-6)
CASSFGAGYSGANVLTF

SEQ ID NO: 88543 - protein, 14 aa, Homo sapiens
  CDR3 for alpha chain variable domain of TCR clone 44272 (TRAV38-1, TRAJ40)
CALRPTSGTYKYIF

SEQ ID NO: 88544 - protein, 14 aa, Homo sapiens
  CDR3 for beta chain variable domain of TCR clone 44272 (TRBV25-1, TRBJ1-1)
CTSTHLGGNTEAFF

SEQ ID NO: 88545 - protein, 16 aa, Homo sapiens
  CDR3 for alpha chain variable domain of TCR clone 44273 (TRAV16, TRAJ4)
CALSRMFSGGYNKLIF

SEQ ID NO: 88546 - protein, 16 aa, Homo sapiens
  CDR3 for beta chain variable domain of TCR clone 44273 (TRBV24-1, TRBJ2-3)
CATSDPGTRATDTQYF

SEQ ID NO: 88547 - protein, 17 aa, Homo sapiens
  CDR3 for alpha chain variable domain of TCR clone 44274 (TRAV13-1, TRAJ53)
CAASWKSSGGSNYKLKF

SEQ ID NO: 88548 - protein, 19 aa, Homo sapiens
  CDR3 for beta chain variable domain of TCR clone 44274 (TRBV7-9, TRBJ2-1)
CASSHNRGALLRSYNEQFF

SEQ ID NO: 88549 - protein, 15 aa, Homo sapiens
  CDR3 for alpha chain variable domain of TCR clone 44275 (TRAV17, TRAJ52)
FATEAGGTSYGKLTF

SEQ ID NO: 88550 - protein, 14 aa, Homo sapiens
  CDR3 for beta chain variable domain of TCR clone 44275 (TRBV28, TRBJ1-5)
CASSLGVLVKPQHF

SEQ ID NO: 88551 - protein, 13 aa, Homo sapiens
  CDR3 for alpha chain variable domain of TCR clone 44276 (TRAV2, TRAJ40)
CAVVTSGTYKYIF

SEQ ID NO: 88552 - protein, 16 aa, Homo sapiens
  CDR3 for beta chain variable domain of TCR clone 44276 (TRBV29-1, TRBJ1-2)
CSVEANRDIANYGYTL

SEQ ID NO: 88553 - protein, 11 aa, Homo sapiens
  CDR3 for alpha chain variable domain of TCR clone 44277 (TRAV21, TRAJ41)
CAARSGYALNF

SEQ ID NO: 88554 - protein, 13 aa, Homo sapiens
  CDR3 for beta chain variable domain of TCR clone 44277 (TRBV7-9, TRBJ1-2)
CASSLKQNYGYTF

SEQ ID NO: 88555 - protein, 14 aa, Homo sapiens
  CDR3 for alpha chain variable domain of TCR clone 44278 (TRAV20, TRAJ56)
CAVQFGGANSKLTF

SEQ ID NO: 88556 - protein, 15 aa, Homo sapiens
  CDR3 for beta chain variable domain of TCR clone 44278 (TRBV6-1, TRBJ2-3)
CASSERGGITDTQYF

SEQ ID NO: 88557 - protein, 16 aa, Homo sapiens
  CDR3 for alpha chain variable domain of TCR clone 44279 (TRAV26-1, TRAJ38)
CIVGPLNAGNNRKLIW

SEQ ID NO: 88558 - protein, 13 aa, Homo sapiens
  CDR3 for beta chain variable domain of TCR clone 44279 (TRBV18, TRBJ1-1)
CASSPNGDTEAFF

SEQ ID NO: 88559 - protein, 13 aa, Homo sapiens
  CDR3 for alpha chain variable domain of TCR clone 44280 (TRAV16, TRAJ26)
CITVLCLGQNFVF

SEQ ID NO: 88560 - protein, 12 aa, Homo sapiens
  CDR3 for beta chain variable domain of TCR clone 44280 (TRBV11-2, TRBJ2-1)
CASGPGNNEQFF

SEQ ID NO: 88561 - protein, 15 aa, Homo sapiens
  CDR3 for alpha chain variable domain of TCR clone 44281 (TRAV8-3, TRAJ15)
CAVGAPNQAGTALIF

SEQ ID NO: 88562 - protein, 14 aa, Homo sapiens
  CDR3 for beta chain variable domain of TCR clone 44281 (TRBV20-1, TRBJ2-1)
CSPNDEASYNEQLF

SEQ ID NO: 88563 - protein, 13 aa, Homo sapiens
  CDR3 for alpha chain variable domain of TCR clone 44282 (TRAV2, TRAJ15)
CAVASQAGTALIF

SEQ ID NO: 88564 - protein, 13 aa, Homo sapiens
  CDR3 for beta chain variable domain of TCR clone 44282 (TRBV19, TRBJ1-2)
CASSVPGQDGYTF

SEQ ID NO: 88565 - protein, 12 aa, Homo sapiens
  CDR3 for alpha chain variable domain of TCR clone 44283 (TRAV3, TRAJ26)
CAVRDYGQNFVF

SEQ ID NO: 88566 - protein, 16 aa, Homo sapiens
  CDR3 for beta chain variable domain of TCR clone 44283 (TRBV11-2, TRBJ1-2)
CASSPSGREANYGHTF

SEQ ID NO: 88567 - protein, 14 aa, Homo sapiens
  CDR3 for alpha chain variable domain of TCR clone 44284 (TRAV1-2, TRAJ8)
CAVREDTGFQKLVF

SEQ ID NO: 88568 - protein, 15 aa, Homo sapiens
  CDR3 for beta chain variable domain of TCR clone 44284 (TRBV5-1, TRBJ2-1)
CASSLVANSYNEQFF

SEQ ID NO: 88569 - protein, 17 aa, Homo sapiens
  CDR3 for alpha chain variable domain of TCR clone 44285 (TRAV3, TRAJ12)
CAVRDGGRMDSSDKLIF

SEQ ID NO: 88570 - protein, 16 aa, Homo sapiens
  CDR3 for beta chain variable domain of TCR clone 44285 (TRBV9, TRBJ2-2)
CASSAMGKGNTGELFF

SEQ ID NO: 88571 - protein, 14 aa, Homo sapiens
  CDR3 for alpha chain variable domain of TCR clone 44286 (TRAV12-2, TRAJ13)
CAVKKTGGYQKVTF

SEQ ID NO: 88572 - protein, 15 aa, Homo sapiens
  CDR3 for beta chain variable domain of TCR clone 44286 (TRBV7-2, TRBJ1-2)
CASSPRAGWNYGYTF

SEQ ID NO: 88573 - protein, 16 aa, Homo sapiens
  CDR3 for alpha chain variable domain of TCR clone 44287 (TRAV3, TRAJ37)
CVVRGKGSGNTGKLIF

SEQ ID NO: 88574 - protein, 12 aa, Homo sapiens
  CDR3 for beta chain variable domain of TCR clone 44287 (TRBV11-2, TRBJ2-2)
CASSLGGGELFF

SEQ ID NO: 88575 - protein, 14 aa, Homo sapiens
  CDR3 for alpha chain variable domain of TCR clone 44288 (TRAV29/DV5, TRAJ36)
CAARSKTGANNLFF

SEQ ID NO: 88576 - protein, 14 aa, Homo sapiens
  CDR3 for beta chain variable domain of TCR clone 44288 (TRBV12-5, TRBJ2-5)
CASGSRTHQETQYF

SEQ ID NO: 88577 - protein, 15 aa, Homo sapiens
  CDR3 for alpha chain variable domain of TCR clone 44289 (TRAV8-6, TRAJ12)
CAVSTWMDSSYKLIF

SEQ ID NO: 88578 - protein, 15 aa, Homo sapiens
  CDR3 for beta chain variable domain of TCR clone 44289 (TRBV7-9, TRBJ1-6)
CASSSPGRGNSPLHF

SEQ ID NO: 88579 - protein, 16 aa, Homo sapiens
  CDR3 for alpha chain variable domain of TCR clone 44290 (TRAV3, TRAJ10)
CAVRDMRAGGGNKLTF

SEQ ID NO: 88580 - protein, 15 aa, Homo sapiens
  CDR3 for beta chain variable domain of TCR clone 44290 (TRBV29-1, TRBJ2-1)
CSVPTGLALYNEQFF

SEQ ID NO: 88581 - protein, 11 aa, Homo sapiens
  CDR3 for alpha chain variable domain of TCR clone 44291 (TRAV12-2, TRAJ39)
CAVNNMLTFGG

SEQ ID NO: 88582 - protein, 16 aa, Homo sapiens
  CDR3 for beta chain variable domain of TCR clone 44291 (TRBV28, TRBJ2-3)
CASSSFGTGGTDTQYF

SEQ ID NO: 88583 - protein, 12 aa, Homo sapiens
  CDR3 for alpha chain variable domain of TCR clone 44292 (TRAV21, TRAJ31)
CAVWGNNAILMF

SEQ ID NO: 88584 - protein, 16 aa, Homo sapiens
  CDR3 for beta chain variable domain of TCR clone 44292 (TRBV27, TRBJ2-5)
CASSYGPGGQKETQYF

SEQ ID NO: 88585 - protein, 14 aa, Homo sapiens
  CDR3 for alpha chain variable domain of TCR clone 44293 (TRAV23/DV6, TRAJ58)
CAGMRETSGSRLTL

SEQ ID NO: 88586 - protein, 13 aa, Homo sapiens
  CDR3 for beta chain variable domain of TCR clone 44293 (TRBV28, TRBJ2-7)
CASRSSGVYEQYF

SEQ ID NO: 88587 - protein, 15 aa, Homo sapiens
  CDR3 for alpha chain variable domain of TCR clone 44294 (TRAV3, TRAJ22)
CAVRDRGGSARQLPF

SEQ ID NO: 88588 - protein, 14 aa, Homo sapiens
  CDR3 for beta chain variable domain of TCR clone 44294 (TRBV19, TRBJ2-1)
CASSRLASINEQFF

SEQ ID NO: 88589 - protein, 14 aa, Homo sapiens
  CDR3 for alpha chain variable domain of TCR clone 44295 (TRAV1-2, TRAJ16)
CAINRFSDGQKLLF

SEQ ID NO: 88590 - protein, 11 aa, Homo sapiens
  CDR3 for beta chain variable domain of TCR clone 44295 (TRBV29-1, TRBJ2-5)
CSEDRTGTQYF

SEQ ID NO: 88591 - protein, 13 aa, Homo sapiens
  CDR3 for alpha chain variable domain of TCR clone 44296 (TRAV1-2, TRAJ9)
CAALNTGGFKTIF

SEQ ID NO: 88592 - protein, 11 aa, Homo sapiens
  CDR3 for beta chain variable domain of TCR clone 44296 (TRBV6-3, TRBJ2-3)
CATGQADTQYF

SEQ ID NO: 88593 - protein, 11 aa, Homo sapiens
  CDR3 for alpha chain variable domain of TCR clone 44297 (TRAV12-3, TRAJ27)
CAMANAGKSTF

SEQ ID NO: 88594 - protein, 13 aa, Homo sapiens
  CDR3 for beta chain variable domain of TCR clone 44297 (TRBV27, TRBJ1-1)
CASSLSIGAEAFF

SEQ ID NO: 88595 - protein, 14 aa, Homo sapiens
  CDR3 for alpha chain variable domain of TCR clone 44298 (TRAV1-2, TRAJ16)
CAVNRFSDGQKLLF

SEQ ID NO: 88596 - protein, 13 aa, Homo sapiens
  CDR3 for beta chain variable domain of TCR clone 44298 (TRBV25-1, TRBJ1-1)
CQHPPGGNTEAFF

SEQ ID NO: 88597 - protein, 11 aa, Homo sapiens
  CDR3 for alpha chain variable domain of TCR clone 44299 (TRAV3, TRAJ17)
PRGAAGNKLTF

SEQ ID NO: 88598 - protein, 16 aa, Homo sapiens
  CDR3 for beta chain variable domain of TCR clone 44299 (TRBV7-6, TRBJ2-1)
CASSAPGPSSYSEQFF

SEQ ID NO: 88599 - protein, 19 aa, Homo sapiens
  CDR3 for alpha chain variable domain of TCR clone 44300 (TRAV2, TRAJ20)
ILQVREADAAVYRDCKLSF

SEQ ID NO: 88600 - protein, 13 aa, Homo sapiens
  CDR3 for beta chain variable domain of TCR clone 44300 (TRBV15, TRBJ1-6)
CATSGGLNSHLHF

SEQ ID NO: 88601 - protein, 14 aa, Homo sapiens
  CDR3 for alpha chain variable domain of TCR clone 44301 (TRAV21, TRAJ23)
CAIMIYNQGGKLIF

SEQ ID NO: 88602 - protein, 18 aa, Homo sapiens
  CDR3 for beta chain variable domain of TCR clone 44301 (TRBV20-1, TRBJ2-6)
CSAETTTTHGSGANVLTF

SEQ ID NO: 88603 - protein, 20 aa, Homo sapiens
  CDR3 for alpha chain variable domain of TCR clone 44302 (TRAV27, TRAJ34)
ASTSVQGGGLGDYNTDKLIF

SEQ ID NO: 88604 - protein, 15 aa, Homo sapiens
  CDR3 for beta chain variable domain of TCR clone 44302 (TRBV9, TRBJ1-4)
CASSVGGSTNEKLFF

SEQ ID NO: 88605 - protein, 16 aa, Homo sapiens
  CDR3 for alpha chain variable domain of TCR clone 44303 (TRAV3, TRAJ10)
CAVRDMRAGGGNKLTF

SEQ ID NO: 88606 - protein, 15 aa, Homo sapiens
  CDR3 for beta chain variable domain of TCR clone 44303 (TRBV10-2, TRBJ2-6)
CASSEQGTGANVLTF

SEQ ID NO: 88607 - protein, 18 aa, Homo sapiens
  CDR3 for alpha chain variable domain of TCR clone 44304 (TRAV21, TRAJ52)
CAVRPSPAGGTSYGKLTF

SEQ ID NO: 88608 - protein, 14 aa, Homo sapiens
  CDR3 for beta chain variable domain of TCR clone 44304 (TRBV13, TRBJ2-7)
CASSGLAGLYEQYF

SEQ ID NO: 88609 - protein, 11 aa, Homo sapiens
  CDR3 for alpha chain variable domain of TCR clone 44305 (TRAV4, TRAJ23)
CLVAPGGKLIF

SEQ ID NO: 88610 - protein, 15 aa, Homo sapiens
  CDR3 for beta chain variable domain of TCR clone 44305 (TRBV7-2, TRBJ2-1)
CASSFQADEYNDQFF

SEQ ID NO: 88611 - protein, 11 aa, Homo sapiens
  CDR3 for alpha chain variable domain of TCR clone 44306 (TRAV12-2, TRAJ54)
CAVEGAQKLVF

SEQ ID NO: 88612 - protein, 17 aa, Homo sapiens
  CDR3 for beta chain variable domain of TCR clone 44306 (TRBV18, TRBJ1-3)
CASSTYPTGPSGNTIYF

SEQ ID NO: 88613 - protein, 11 aa, Homo sapiens
  CDR3 for alpha chain variable domain of TCR clone 44307 (TRAV2, TRAJ33)
CAVDSNYQLIW

SEQ ID NO: 88614 - protein, 15 aa, Homo sapiens
  CDR3 for beta chain variable domain of TCR clone 44307 (TRBV19, TRBJ1-2)
CASSVGQVLNYSYTF

SEQ ID NO: 88615 - protein, 14 aa, Homo sapiens
  CDR3 for alpha chain variable domain of TCR clone 44308 (TRAV12-2, TRAJ17)
CAVLFKAAGHKLTF

SEQ ID NO: 88616 - protein, 17 aa, Homo sapiens
  CDR3 for beta chain variable domain of TCR clone 44308 (TRBV20-1, TRBJ2-2)
CSASGSGQGGLTGELFF

SEQ ID NO: 88617 - protein, 17 aa, Homo sapiens
  CDR3 for alpha chain variable domain of TCR clone 44309 (TRAV36/DV7, TRAJ52)
CAVAQRAGGTSYGKLTF

SEQ ID NO: 88618 - protein, 18 aa, Homo sapiens
  CDR3 for beta chain variable domain of TCR clone 44309 (TRBV7-9, TRBJ2-1)
CASSLAVSGTSGRNEQFF

SEQ ID NO: 88619 - protein, 12 aa, Homo sapiens
  CDR3 for alpha chain variable domain of TCR clone 44310 (TRAV12-3, TRAJ17)
CAMTLTGNKLTF

SEQ ID NO: 88620 - protein, 15 aa, Homo sapiens
  CDR3 for beta chain variable domain of TCR clone 44310 (TRBV20-1, TRBJ2-7)
SSARDRVSGMDEQYF

SEQ ID NO: 88621 - protein, 14 aa, Homo sapiens
  CDR3 for alpha chain variable domain of TCR clone 44311 (TRAV12-1, TRAJ17)
GVVNYKAAGNKLTF

SEQ ID NO: 88622 - protein, 17 aa, Homo sapiens
  CDR3 for beta chain variable domain of TCR clone 44311 (TRBV20-1, TRBJ2-1)
CSASSSGLAGSYNEQFF

SEQ ID NO: 88623 - protein, 14 aa, Homo sapiens
  CDR3 for alpha chain variable domain of TCR clone 44312 (TRAV17, TRAJ56)
CATEDTGANSKLTF

SEQ ID NO: 88624 - protein, 16 aa, Homo sapiens
  CDR3 for beta chain variable domain of TCR clone 44312 (TRBV19, TRBJ2-1)
RASSIKLAGSYNEQFF

SEQ ID NO: 88625 - protein, 15 aa, Homo sapiens
  CDR3 for alpha chain variable domain of TCR clone 44313 (TRAV26-1, TRAJ29)
CIVRVEGSGNTPLVS

SEQ ID NO: 88626 - protein, 15 aa, Homo sapiens
  CDR3 for beta chain variable domain of TCR clone 44313 (TRBV28, TRBJ2-5)
CASSPGQGSIETQYF

SEQ ID NO: 88627 - protein, 12 aa, Homo sapiens
  CDR3 for alpha chain variable domain of TCR clone 44314 (TRAV3, TRAJ27)
CAVRDGAGKSTF

SEQ ID NO: 88628 - protein, 13 aa, Homo sapiens
  CDR3 for beta chain variable domain of TCR clone 44314 (TRBV10-3, TRBJ1-2)
CAINADLNYGCTF

SEQ ID NO: 88629 - protein, 16 aa, Homo sapiens
  CDR3 for alpha chain variable domain of TCR clone 44315 (TRAV12-3, TRAJ53)
CAMSPGSGGSNYKLTF

SEQ ID NO: 88630 - protein, 15 aa, Homo sapiens
  CDR3 for beta chain variable domain of TCR clone 44315 (TRBV18, TRBJ1-1)
CASSPRQGENTEAFF

SEQ ID NO: 88631 - protein, 14 aa, Homo sapiens
  CDR3 for alpha chain variable domain of TCR clone 44316 (TRAV16, TRAJ33)
CALSAMDSNYQLIW

SEQ ID NO: 88632 - protein, 16 aa, Homo sapiens
  CDR3 for beta chain variable domain of TCR clone 44316 (TRBV12-4, TRBJ2-3)
CASSFPSNTNIDTQYF

SEQ ID NO: 88633 - protein, 12 aa, Homo sapiens
  CDR3 for alpha chain variable domain of TCR clone 44317 (TRAV13-1, TRAJ3)
CAPRGDASKITF

SEQ ID NO: 88634 - protein, 13 aa, Homo sapiens
  CDR3 for beta chain variable domain of TCR clone 44317 (TRBV12-4, TRBJ1-2)
CASSLRQGKGYTF

SEQ ID NO: 88635 - protein, 14 aa, Homo sapiens
  CDR3 for alpha chain variable domain of TCR clone 44318 (TRAV13-2, TRAJ15)
CAENPNQAGTALIL

SEQ ID NO: 88636 - protein, 16 aa, Homo sapiens
  CDR3 for beta chain variable domain of TCR clone 44318 (TRBV12-4, TRBJ1-2)
CASSPTATGKTRGYTF

SEQ ID NO: 88637 - protein, 15 aa, Homo sapiens
  CDR3 for alpha chain variable domain of TCR clone 44319 (TRAV8-3, TRAJ32)
CTVGPYGGATNKLIF

SEQ ID NO: 88638 - protein, 14 aa, Homo sapiens
  CDR3 for beta chain variable domain of TCR clone 44319 (TRBV29-1, TRBJ2-2)
CSVLAETNTGELFF

SEQ ID NO: 88639 - protein, 16 aa, Homo sapiens
  CDR3 for alpha chain variable domain of TCR clone 44320 (TRAV3, TRAJ37)
CAVRGKGSGNTGKLIF

SEQ ID NO: 88640 - protein, 15 aa, Homo sapiens
  CDR3 for beta chain variable domain of TCR clone 44320 (TRBV18, TRBJ2-1)
CASSPPSASYNEQLF

SEQ ID NO: 88641 - protein, 14 aa, Homo sapiens
  CDR3 for alpha chain variable domain of TCR clone 44321 (TRAV35, TRAJ33)
CAGSSQDSNYQLIW

SEQ ID NO: 88642 - protein, 15 aa, Homo sapiens
  CDR3 for beta chain variable domain of TCR clone 44321 (TRBV4-1, TRBJ1-4)
CASSDKGGTNEKLFF

SEQ ID NO: 88643 - protein, 15 aa, Homo sapiens
  CDR3 for alpha chain variable domain of TCR clone 44322 (TRAV8-4, TRAJ52)
CAVSDGGTSYGKLTF

SEQ ID NO: 88644 - protein, 14 aa, Homo sapiens
  CDR3 for beta chain variable domain of TCR clone 44322 (TRBV18, TRBJ2-5)
CASSPGVSQETQYF

SEQ ID NO: 88645 - protein, 13 aa, Homo sapiens
  CDR3 for alpha chain variable domain of TCR clone 44323 (TRAV29/DV5, TRAJ31)
CAASRNNNARLMF

SEQ ID NO: 88646 - protein, 12 aa, Homo sapiens
  CDR3 for beta chain variable domain of TCR clone 44323 (TRBV14, TRBJ2-5)
CAGSHLKETQYF

SEQ ID NO: 88647 - protein, 13 aa, Homo sapiens
  CDR3 for alpha chain variable domain of TCR clone 44324 (TRAV3, TRAJ21)
CAVREPDFNKSYF

SEQ ID NO: 88648 - protein, 17 aa, Homo sapiens
  CDR3 for beta chain variable domain of TCR clone 44324 (TRBV11-2, TRBJ2-3)
CQQLRGASRGAPNTQYF

SEQ ID NO: 88649 - protein, 15 aa, Homo sapiens
  CDR3 for alpha chain variable domain of TCR clone 44325 (TRAV27, TRAJ38)
CAARRNAGNNRKLIW

SEQ ID NO: 88650 - protein, 13 aa, Homo sapiens
  CDR3 for beta chain variable domain of TCR clone 44325 (TRBV12-5, TRBJ2-3)
CDSGDRQSDTQYF

SEQ ID NO: 88651 - protein, 17 aa, Homo sapiens
  CDR3 for alpha chain variable domain of TCR clone 44326 (TRAV35, TRAJ28)
CAGLQVYSGAGRYQLTF

SEQ ID NO: 88652 - protein, 15 aa, Homo sapiens
  CDR3 for beta chain variable domain of TCR clone 44326 (TRBV2, TRBJ1-2)
CASSEIGGANYGYTF

SEQ ID NO: 88653 - protein, 13 aa, Homo sapiens
  CDR3 for alpha chain variable domain of TCR clone 44327 (TRAV38-1, TRAJ42)
CARWGGSQGNLIV

SEQ ID NO: 88654 - protein, 17 aa, Homo sapiens
  CDR3 for beta chain variable domain of TCR clone 44327 (TRBV20-1, TRBJ2-1)
CSARDPLAGVWDNEQFF

SEQ ID NO: 88655 - protein, 16 aa, Homo sapiens
  CDR3 for alpha chain variable domain of TCR clone 44328 (TRAV17, TRAJ9)
CATGEWGGTGGFKTIF

SEQ ID NO: 88656 - protein, 14 aa, Homo sapiens
  CDR3 for beta chain variable domain of TCR clone 44328 (TRBV12-4, TRBJ1-1)
CASSLGTGGTEAFF

SEQ ID NO: 88657 - protein, 16 aa, Homo sapiens
  CDR3 for alpha chain variable domain of TCR clone 44329 (TRAV23/DV6, TRAJ9)
CAASIGGNTGGFKTIF

SEQ ID NO: 88658 - protein, 13 aa, Homo sapiens
  CDR3 for beta chain variable domain of TCR clone 44329 (TRBV10-2, TRBJ2-7)
CASGASGGYEQYF

SEQ ID NO: 88659 - protein, 14 aa, Homo sapiens
  CDR3 for alpha chain variable domain of TCR clone 44330 (TRAV12-2, TRAJ13)
CAVKKTGGYQKVTF

SEQ ID NO: 88660 - protein, 16 aa, Homo sapiens
  CDR3 for beta chain variable domain of TCR clone 44330 (TRBV5-1, TRBJ2-1)
CASSPESGGGSNEQFF

SEQ ID NO: 88661 - protein, 11 aa, Homo sapiens
  CDR3 for alpha chain variable domain of TCR clone 44331 (TRAV2, TRAJ13)
CASGGYQKVTF

SEQ ID NO: 88662 - protein, 16 aa, Homo sapiens
  CDR3 for beta chain variable domain of TCR clone 44331 (TRBV19, TRBJ2-1)
YASSMGGGSSYNEQFF

SEQ ID NO: 88663 - protein, 14 aa, Homo sapiens
  CDR3 for alpha chain variable domain of TCR clone 44332 (TRAV9-2, TRAJ39)
CALYIYNAGNMLTF

SEQ ID NO: 88664 - protein, 15 aa, Homo sapiens
  CDR3 for beta chain variable domain of TCR clone 44332 (TRBV27, TRBJ1-5)
CASSLGTGFNQPQHF

SEQ ID NO: 88665 - protein, 13 aa, Homo sapiens
  CDR3 for alpha chain variable domain of TCR clone 44333 (TRAV27, TRAJ40)
CAGPPSGTYKYIF

SEQ ID NO: 88666 - protein, 14 aa, Homo sapiens
  CDR3 for beta chain variable domain of TCR clone 44333 (TRBV23-1, TRBJ2-5)
CASSFLQSQETQYF

SEQ ID NO: 88667 - protein, 12 aa, Homo sapiens
  CDR3 for alpha chain variable domain of TCR clone 44334 (TRAV12-1, TRAJ40)
CVVYSGTYKYIF

SEQ ID NO: 88668 - protein, 15 aa, Homo sapiens
  CDR3 for beta chain variable domain of TCR clone 44334 (TRBV10-2, TRBJ2-5)
CASRGSGGPQETQYF

SEQ ID NO: 88669 - protein, 15 aa, Homo sapiens
  CDR3 for alpha chain variable domain of TCR clone 44335 (TRAV4, TRAJ39)
CLVGPNNNAGNMLTF

SEQ ID NO: 88670 - protein, 13 aa, Homo sapiens
  CDR3 for beta chain variable domain of TCR clone 44335 (TRBV11-2, TRBJ2-5)
CASSSTGGETQYF

SEQ ID NO: 88671 - protein, 16 aa, Homo sapiens
  CDR3 for alpha chain variable domain of TCR clone 44336 (TRAV3, TRAJ37)
CAVRGKGSGNTGKLIF

SEQ ID NO: 88672 - protein, 14 aa, Homo sapiens
  CDR3 for beta chain variable domain of TCR clone 44336 (TRBV7-2, TRBJ1-1)
CASSFLTGTTEAFF

SEQ ID NO: 88673 - protein, 13 aa, Homo sapiens
  CDR3 for alpha chain variable domain of TCR clone 44337 (TRAV20, TRAJ37)
CAGCSSNTGKLIF

SEQ ID NO: 88674 - protein, 11 aa, Homo sapiens
  CDR3 for beta chain variable domain of TCR clone 44337 (TRBV12-4, TRBJ2-3)
CASTATDTQYC

SEQ ID NO: 88675 - protein, 14 aa, Homo sapiens
  CDR3 for alpha chain variable domain of TCR clone 44338 (TRAV1-2, TRAJ8)
CAVRGDTGFQKLVF

SEQ ID NO: 88676 - protein, 16 aa, Homo sapiens
  CDR3 for beta chain variable domain of TCR clone 44338 (TRBV7-3, TRBJ2-2)
CASSLKRGTLSGELFF

SEQ ID NO: 88677 - protein, 11 aa, Homo sapiens
  CDR3 for alpha chain variable domain of TCR clone 44339 (TRAV4, TRAJ20)
CLVGDKVTTTS

SEQ ID NO: 88678 - protein, 15 aa, Homo sapiens
  CDR3 for beta chain variable domain of TCR clone 44339 (TRBV18, TRBJ2-7)
CASPPSSTGNYEQYF

SEQ ID NO: 88679 - protein, 12 aa, Homo sapiens
  CDR3 for alpha chain variable domain of TCR clone 44340 (TRAV1-1, TRAJ39)
CAAPVVGNMLTF

SEQ ID NO: 88680 - protein, 18 aa, Homo sapiens
  CDR3 for beta chain variable domain of TCR clone 44340 (TRBV7-9, TRBJ2-7)
CASSLTTSGSRTWYEQYF

SEQ ID NO: 88681 - protein, 15 aa, Homo sapiens
  CDR3 for alpha chain variable domain of TCR clone 44341 (TRAV12-1, TRAJ50)
CVVNILKTSYDKVIF

SEQ ID NO: 88682 - protein, 14 aa, Homo sapiens
  CDR3 for beta chain variable domain of TCR clone 44341 (TRBV7-2, TRBJ2-7)
CASSLYPGRYEQYF

SEQ ID NO: 88683 - protein, 10 aa, Homo sapiens
  CDR3 for alpha chain variable domain of TCR clone 44342 (TRAV12-2, TRAJ52)
RSTSYGKLTF

SEQ ID NO: 88684 - protein, 14 aa, Homo sapiens
  CDR3 for beta chain variable domain of TCR clone 44342 (TRBV25-1, TRBJ1-1)
CASTHLGGNTEAFF

SEQ ID NO: 88685 - protein, 13 aa, Homo sapiens
  CDR3 for alpha chain variable domain of TCR clone 44343 (TRAV29/DV5, TRAJ31)
CAASRNNNARLMF

SEQ ID NO: 88686 - protein, 14 aa, Homo sapiens
  CDR3 for beta chain variable domain of TCR clone 44343 (TRBV5-4, TRBJ1-2)
CASTRQTDNYGYTF

SEQ ID NO: 88687 - protein, 15 aa, Homo sapiens
  CDR3 for alpha chain variable domain of TCR clone 44344 (TRAV13-1, TRAJ17)
CAASIERAAGNKLTF

SEQ ID NO: 88688 - protein, 16 aa, Homo sapiens
  CDR3 for beta chain variable domain of TCR clone 44344 (TRBV19, TRBJ2-1)
CASSKAGPSSYNEQFF

SEQ ID NO: 88689 - protein, 17 aa, Homo sapiens
  CDR3 for alpha chain variable domain of TCR clone 44345 (TRAV26-2, TRAJ42)
CILRDVGYGGSQGNLIF

SEQ ID NO: 88690 - protein, 15 aa, Homo sapiens
  CDR3 for beta chain variable domain of TCR clone 44345 (TRBV7-2, TRBJ2-3)
CASSLAGAFIDTQYF

SEQ ID NO: 88691 - protein, 12 aa, Homo sapiens
  CDR3 for alpha chain variable domain of TCR clone 44346 (TRAV2, TRAJ5)
CALDTGRRALTF

SEQ ID NO: 88692 - protein, 15 aa, Homo sapiens
  CDR3 for beta chain variable domain of TCR clone 44346 (TRBV10-3, TRBJ2-1)
CAISDVRDRAYEQFF

SEQ ID NO: 88693 - protein, 10 aa, Homo sapiens
  CDR3 for alpha chain variable domain of TCR clone 44347 (TRAV1-2, TRAJ20)
CACNDYKLSF

SEQ ID NO: 88694 - protein, 13 aa, Homo sapiens
  CDR3 for beta chain variable domain of TCR clone 44347 (TRBV18, TRBJ1-1)
CASSPETKPEAFF

SEQ ID NO: 88695 - protein, 18 aa, Homo sapiens
  CDR3 for alpha chain variable domain of TCR clone 44348 (TRAV21, TRAJ52)
CAVRPSPAGGTSYGKLTF

SEQ ID NO: 88696 - protein, 15 aa, Homo sapiens
  CDR3 for beta chain variable domain of TCR clone 44348 (TRBV5-1, TRBJ1-4)
FAPAAWKDGNEKLFF

SEQ ID NO: 88697 - protein, 13 aa, Homo sapiens
  CDR3 for alpha chain variable domain of TCR clone 44349 (TRAV2, TRAJ24)
CAVTTDSWGKLQF

SEQ ID NO: 88698 - protein, 14 aa, Homo sapiens
  CDR3 for beta chain variable domain of TCR clone 44349 (TRBV13, TRBJ2-5)
CASSLGRGQEAQYF

SEQ ID NO: 88699 - protein, 15 aa, Homo sapiens
  CDR3 for alpha chain variable domain of TCR clone 44350 (TRAV26-1, TRAJ29)
CIVRVEGSGNTPLVF

SEQ ID NO: 88700 - protein, 15 aa, Homo sapiens
  CDR3 for beta chain variable domain of TCR clone 44350 (TRBV7-9, TRBJ1-5)
CASSQAHQPNQPQHF

SEQ ID NO: 88701 - protein, 15 aa, Homo sapiens
  CDR3 for alpha chain variable domain of TCR clone 44351 (TRAV8-3, TRAJ34)
DAAEYSCAIPGKLIF

SEQ ID NO: 88702 - protein, 15 aa, Homo sapiens
  CDR3 for beta chain variable domain of TCR clone 44351 (TRBV5-7, TRBJ2-1)
CASSRRLAGDNEQFF

SEQ ID NO: 88703 - protein, 11 aa, Homo sapiens
  CDR3 for alpha chain variable domain of TCR clone 44352 (TRAV14/DV4, TRAJ31)
CAVRENARLMF

SEQ ID NO: 88704 - protein, 15 aa, Homo sapiens
  CDR3 for beta chain variable domain of TCR clone 44352 (TRBV19, TRBJ2-1)
CASSLETSGYNEQFF

SEQ ID NO: 88705 - protein, 16 aa, Homo sapiens
  CDR3 for alpha chain variable domain of TCR clone 44353 (TRAV30, TRAJ24)
CGTEIVDADSGGKFQF

SEQ ID NO: 88706 - protein, 14 aa, Homo sapiens
  CDR3 for beta chain variable domain of TCR clone 44353 (TRBV7-2, TRBJ2-7)
CASSPKTSFYEQYF

SEQ ID NO: 88707 - protein, 13 aa, Homo sapiens
  CDR3 for alpha chain variable domain of TCR clone 44354 (TRAV13-2, TRAJ48)
CAEMDFGNEELTF

SEQ ID NO: 88708 - protein, 15 aa, Homo sapiens
  CDR3 for beta chain variable domain of TCR clone 44354 (TRBV2, TRBJ2-1)
CASSELAGSYNEQFF

SEQ ID NO: 88709 - protein, 14 aa, Homo sapiens
  CDR3 for alpha chain variable domain of TCR clone 44355 (TRAV12-2, TRAJ23)
CAVNTYNQGGKLIF

SEQ ID NO: 88710 - protein, 12 aa, Homo sapiens
  CDR3 for beta chain variable domain of TCR clone 44355 (TRBV12-4, TRBJ1-3)
CASSFSGNTIYF

SEQ ID NO: 88711 - protein, 18 aa, Homo sapiens
  CDR3 for alpha chain variable domain of TCR clone 44356 (TRAV9-2, TRAJ52)
CALSRHNSGGTSYGKLTF

SEQ ID NO: 88712 - protein, 13 aa, Homo sapiens
  CDR3 for beta chain variable domain of TCR clone 44356 (TRBV7-9, TRBJ1-2)
CASSLKQNYGYTF

SEQ ID NO: 88713 - protein, 15 aa, Homo sapiens
  CDR3 for alpha chain variable domain of TCR clone 44357 (TRAV2, TRAJ24)
CAVEVLTDSWGKFQF

SEQ ID NO: 88714 - protein, 14 aa, Homo sapiens
  CDR3 for beta chain variable domain of TCR clone 44357 (TRBV19, TRBJ2-1)
CASSMGSGRRSSSP

SEQ ID NO: 88715 - protein, 11 aa, Homo sapiens
  CDR3 for alpha chain variable domain of TCR clone 44358 (TRAV2, TRAJ33)
CAVESNNQLIW

SEQ ID NO: 88716 - protein, 15 aa, Homo sapiens
  CDR3 for beta chain variable domain of TCR clone 44358 (TRBV19, TRBJ1-1)
CASTSGQIQNTEAFF

SEQ ID NO: 88717 - protein, 14 aa, Homo sapiens
  CDR3 for alpha chain variable domain of TCR clone 44359 (TRAV1-2, TRAJ29)
CAVRTDSGNTPLVF

SEQ ID NO: 88718 - protein, 14 aa, Homo sapiens
  CDR3 for beta chain variable domain of TCR clone 44359 (TRBV7-2, TRBJ2-7)
CARSPKTSFYEQYF

SEQ ID NO: 88719 - protein, 16 aa, Homo sapiens
  CDR3 for alpha chain variable domain of TCR clone 44360 (TRAV21, TRAJ17)
CAVRPGEEAAGKKLTF

SEQ ID NO: 88720 - protein, 16 aa, Homo sapiens
  CDR3 for beta chain variable domain of TCR clone 44360 (TRBV2, TRBJ2-7)
CASSEPWTGPSYEQYF

SEQ ID NO: 88721 - protein, 14 aa, Homo sapiens
  CDR3 for alpha chain variable domain of TCR clone 44361 (TRAV12-3, TRAJ6)
CAVIASGGSYIPTF

SEQ ID NO: 88722 - protein, 15 aa, Homo sapiens
  CDR3 for beta chain variable domain of TCR clone 44361 (TRBV20-1, TRBJ2-7)
CSARDRVSGMDEQYF

SEQ ID NO: 88723 - protein, 11 aa, Homo sapiens
  CDR3 for alpha chain variable domain of TCR clone 44362 (TRAV2, TRAJ13)
CASGGYQKVTF

SEQ ID NO: 88724 - protein, 12 aa, Homo sapiens
  CDR3 for beta chain variable domain of TCR clone 44362 (TRBV7-9, TRBJ2-7)
CASSFGSYEQYF

SEQ ID NO: 88725 - protein, 12 aa, Homo sapiens
  CDR3 for alpha chain variable domain of TCR clone 44363 (TRAV38-1, TRAJ20)
CAFIWNDYKLSL

SEQ ID NO: 88726 - protein, 14 aa, Homo sapiens
  CDR3 for beta chain variable domain of TCR clone 44363 (TRBV19, TRBJ2-1)
CASSMGSGATEQFF

SEQ ID NO: 88727 - protein, 23 aa, Homo sapiens
  CDR3 for alpha chain variable domain of TCR clone 44364 (TRAV4, TRAJ26)
IPAGRKSSTLSLPRVYYGQNFVF

SEQ ID NO: 88728 - protein, 16 aa, Homo sapiens
  CDR3 for beta chain variable domain of TCR clone 44364 (TRBV7-2, TRBJ1-2)
CASSSNQDRRGHGYTF

SEQ ID NO: 88729 - protein, 13 aa, Homo sapiens
  CDR3 for alpha chain variable domain of TCR clone 44365 (TRAV27, TRAJ57)
CRSAQGGSEKLVF

SEQ ID NO: 88730 - protein, 11 aa, Homo sapiens
  CDR3 for beta chain variable domain of TCR clone 44365 (TRBV11-2, TRBJ1-1)
CASSINTEALF

SEQ ID NO: 88731 - protein, 14 aa, Homo sapiens
  CDR3 for alpha chain variable domain of TCR clone 44366 (TRAV3, TRAJ21)
CAVRDAYNFNKFYF

SEQ ID NO: 88732 - protein, 17 aa, Homo sapiens
  CDR3 for beta chain variable domain of TCR clone 44366 (TRBV20-1, TRBJ1-6)
CGARGGYTFSYNSPLHF

SEQ ID NO: 88733 - protein, 12 aa, Homo sapiens
  CDR3 for alpha chain variable domain of TCR clone 44367 (TRAV35, TRAJ39)
LAPNNAGNMLTF

SEQ ID NO: 88734 - protein, 14 aa, Homo sapiens
  CDR3 for beta chain variable domain of TCR clone 44367 (TRBV11-2, TRBJ2-3)
CASSRLARTDTQYF

SEQ ID NO: 88735 - protein, 14 aa, Homo sapiens
  CDR3 for alpha chain variable domain of TCR clone 44368 (TRAV12-2, TRAJ13)
CAVKKTGGYQKVTF

SEQ ID NO: 88736 - protein, 15 aa, Homo sapiens
  CDR3 for beta chain variable domain of TCR clone 44368 (TRBV6-3, TRBJ2-2)
CASSFLATLAGELFF

SEQ ID NO: 88737 - protein, 18 aa, Homo sapiens
  CDR3 for alpha chain variable domain of TCR clone 44369 (TRAV21, TRAJ52)
CAVRPSPAGGTSYGKLTF

SEQ ID NO: 88738 - protein, 15 aa, Homo sapiens
  CDR3 for beta chain variable domain of TCR clone 44369 (TRBV5-5, TRBJ1-5)
CASSSTPGSNQPQHF

SEQ ID NO: 88739 - protein, 14 aa, Homo sapiens
  CDR3 for alpha chain variable domain of TCR clone 44370 (TRAV26-1, TRAJ45)
CIEVTGGGADGLTF

SEQ ID NO: 88740 - protein, 15 aa, Homo sapiens
  CDR3 for beta chain variable domain of TCR clone 44370 (TRBV5-1, TRBJ1-1)
CASSSTTGTSTEAFF

SEQ ID NO: 88741 - protein, 18 aa, Homo sapiens
  CDR3 for alpha chain variable domain of TCR clone 44371 (TRAV13-1, TRAJ52)
CAAKNPNAGGTSYGKLTF

SEQ ID NO: 88742 - protein, 18 aa, Homo sapiens
  CDR3 for beta chain variable domain of TCR clone 44371 (TRBV12-4, TRBJ2-4)
CASSRTGAVDVAKNMQYF

SEQ ID NO: 88743 - protein, 13 aa, Homo sapiens
  CDR3 for alpha chain variable domain of TCR clone 44372 (TRAV26-1, TRAJ33)
CIVRVEGNYQLIW

SEQ ID NO: 88744 - protein, 16 aa, Homo sapiens
  CDR3 for beta chain variable domain of TCR clone 44372 (TRBV15, TRBJ2-7)
CATSGDRGRRRGEQYF

SEQ ID NO: 88745 - protein, 12 aa, Homo sapiens
  CDR3 for alpha chain variable domain of TCR clone 44373 (TRAV21, TRAJ31)
CAVSPARGRLMF

SEQ ID NO: 88746 - protein, 14 aa, Homo sapiens
  CDR3 for beta chain variable domain of TCR clone 44373 (TRBV28, TRBJ2-7)
CASSLLRIPYEQYF

SEQ ID NO: 88747 - protein, 11 aa, Homo sapiens
  CDR3 for alpha chain variable domain of TCR clone 44374 (TRAV12-1, TRAJ43)
CVEYDNNDIRF

SEQ ID NO: 88748 - protein, 15 aa, Homo sapiens
  CDR3 for beta chain variable domain of TCR clone 44374 (TRBV18, TRBJ2-5)
CASSPRASEAETQYF

SEQ ID NO: 88749 - protein, 12 aa, Homo sapiens
  CDR3 for alpha chain variable domain of TCR clone 44375 (TRAV3, TRAJ20)
CAVRYGDYKLSF

SEQ ID NO: 88750 - protein, 13 aa, Homo sapiens
  CDR3 for beta chain variable domain of TCR clone 44375 (TRBV9, TRBJ2-1)
CASSVGQGGEQFF

SEQ ID NO: 88751 - protein, 15 aa, Homo sapiens
  CDR3 for alpha chain variable domain of TCR clone 44376 (TRAV27, TRAJ38)
CAGRFNAGNNRKLIL

SEQ ID NO: 88752 - protein, 13 aa, Homo sapiens
  CDR3 for beta chain variable domain of TCR clone 44376 (TRBV12-5, TRBJ2-3)
CASQNRGTDTQYF

SEQ ID NO: 88753 - protein, 16 aa, Homo sapiens
  CDR3 for alpha chain variable domain of TCR clone 44377 (TRAV12-3, TRAJ53)
CAMSPGSGVSNYKLTF

SEQ ID NO: 88754 - protein, 16 aa, Homo sapiens
  CDR3 for beta chain variable domain of TCR clone 44377 (TRBV4-2, TRBJ1-1)
CASSQAGFGMNTEAFF

SEQ ID NO: 88755 - protein, 16 aa, Homo sapiens
  CDR3 for alpha chain variable domain of TCR clone 44378 (TRAV30, TRAJ24)
CCTEIVDADSWGKFQF

SEQ ID NO: 88756 - protein, 13 aa, Homo sapiens
  CDR3 for beta chain variable domain of TCR clone 44378 (TRBV11-2, TRBJ2-5)
CASSSTGEETQYF

SEQ ID NO: 88757 - protein, 15 aa, Homo sapiens
  CDR3 for alpha chain variable domain of TCR clone 44379 (TRAV8-3, TRAJ11)
CAVGLLNSGYSTLNF

SEQ ID NO: 88758 - protein, 16 aa, Homo sapiens
  CDR3 for beta chain variable domain of TCR clone 44379 (TRBV7-9, TRBJ1-2)
CASSLGFSSGEDGYTF

SEQ ID NO: 88759 - protein, 12 aa, Homo sapiens
  CDR3 for alpha chain variable domain of TCR clone 44380 (TRAV12-3, TRAJ17)
CAMTLTGNKLTF

SEQ ID NO: 88760 - protein, 15 aa, Homo sapiens
  CDR3 for beta chain variable domain of TCR clone 44380 (TRBV20-1, TRBJ2-7)
CSARDWVSGMDEQHF

SEQ ID NO: 88761 - protein, 15 aa, Homo sapiens
  CDR3 for alpha chain variable domain of TCR clone 44381 (TRAV8-3, TRAJ37)
CAVSARASNTGKLIF

SEQ ID NO: 88762 - protein, 15 aa, Homo sapiens
  CDR3 for beta chain variable domain of TCR clone 44381 (TRBV5-4, TRBJ2-3)
CASSLAGRVTDTQYF

SEQ ID NO: 88763 - protein, 15 aa, Homo sapiens
  CDR3 for alpha chain variable domain of TCR clone 44382 (TRAV38-2/DV8, TRAJ31)
CAYRSPRNNNAILMF

SEQ ID NO: 88764 - protein, 13 aa, Homo sapiens
  CDR3 for beta chain variable domain of TCR clone 44382 (TRBV27, TRBJ2-7)
CASSPSRDYEQYF

SEQ ID NO: 88765 - protein, 13 aa, Homo sapiens
  CDR3 for alpha chain variable domain of TCR clone 44383 (TRAV2, TRAJ36)
CAVDQTGANNLFS

SEQ ID NO: 88766 - protein, 12 aa, Homo sapiens
  CDR3 for beta chain variable domain of TCR clone 44383 (TRBV19, TRBJ1-1)
CASMNRYTEAFF

SEQ ID NO: 88767 - protein, 17 aa, Homo sapiens
  CDR3 for alpha chain variable domain of TCR clone 44384 (TRAV3, TRAJ6)
CAVRDGPRAGGSYIPTF

SEQ ID NO: 88768 - protein, 14 aa, Homo sapiens
  CDR3 for beta chain variable domain of TCR clone 44384 (TRBV20-1, TRBJ2-7)
CSAKRGRSSYEKYF

SEQ ID NO: 88769 - protein, 13 aa, Homo sapiens
  CDR3 for alpha chain variable domain of TCR clone 44385 (TRAV26-2, TRAJ43)
CILRAVNNNDMLF

SEQ ID NO: 88770 - protein, 15 aa, Homo sapiens
  CDR3 for beta chain variable domain of TCR clone 44385 (TRBV7-2, TRBJ2-1)
CASTHGTGIYNEQFF

SEQ ID NO: 88771 - protein, 15 aa, Homo sapiens
  CDR3 for alpha chain variable domain of TCR clone 44386 (TRAV1-2, TRAJ36)
CAASADQTGANNLFL

SEQ ID NO: 88772 - protein, 15 aa, Homo sapiens
  CDR3 for beta chain variable domain of TCR clone 44386 (TRBV5-1, TRBJ2-7)
CASSFSTDSVYEQYF

SEQ ID NO: 88773 - protein, 13 aa, Homo sapiens
  CDR3 for alpha chain variable domain of TCR clone 44387 (TRAV12-2, TRAJ20)
FAVYPSNDYKLSF

SEQ ID NO: 88774 - protein, 15 aa, Homo sapiens
  CDR3 for beta chain variable domain of TCR clone 44387 (TRBV27, TRBJ2-5)
CASSLYPRGGETQYF

SEQ ID NO: 88775 - protein, 16 aa, Homo sapiens
  CDR3 for alpha chain variable domain of TCR clone 44388 (TRAV26-1, )
CIDIQNPDPAVYPLRD

SEQ ID NO: 88776 - protein, 19 aa, Homo sapiens
  CDR3 for beta chain variable domain of TCR clone 44388 (TRBV19, TRBJ2-5)
CASSIGQVTDFFLGETQYF

SEQ ID NO: 88777 - protein, 14 aa, Homo sapiens
  CDR3 for alpha chain variable domain of TCR clone 44389 (TRAV1-2, TRAJ16)
CAVNRFSDGQKLLF

SEQ ID NO: 88778 - protein, 14 aa, Homo sapiens
  CDR3 for beta chain variable domain of TCR clone 44389 (TRBV7-9, TRBJ2-3)
CASSLGDGTDTQYF

SEQ ID NO: 88779 - protein, 16 aa, Homo sapiens
  CDR3 for alpha chain variable domain of TCR clone 44390 (TRAV4, TRAJ9)
CLVGDPNRPGGFKTIF

SEQ ID NO: 88780 - protein, 16 aa, Homo sapiens
  CDR3 for beta chain variable domain of TCR clone 44390 (TRBV28, TRBJ1-4)
CASSPPYRGRSEKLLF

SEQ ID NO: 88781 - protein, 10 aa, Homo sapiens
  CDR3 for alpha chain variable domain of TCR clone 44391 (TRAV21, TRAJ43)
CAVSANDMRF

SEQ ID NO: 88782 - protein, 13 aa, Homo sapiens
  CDR3 for beta chain variable domain of TCR clone 44391 (TRBV7-2, TRBJ1-2)
CASSLDGIYGYSF

SEQ ID NO: 88783 - protein, 14 aa, Homo sapiens
  CDR3 for alpha chain variable domain of TCR clone 44392 (TRAV26-1, TRAJ21)
CIVRPPYNFNKFYF

SEQ ID NO: 88784 - protein, 14 aa, Homo sapiens
  CDR3 for beta chain variable domain of TCR clone 44392 (TRBV19, TRBJ2-1)
CASPTFVLSGEQFF

SEQ ID NO: 88785 - protein, 14 aa, Homo sapiens
  CDR3 for alpha chain variable domain of TCR clone 44393 (TRAV29/DV5, TRAJ36)
CAARRKTGANNLFF

SEQ ID NO: 88786 - protein, 15 aa, Homo sapiens
  CDR3 for beta chain variable domain of TCR clone 44393 (TRBV5-1, TRBJ2-2)
CASSLFGQNTGELFF

SEQ ID NO: 88787 - protein, 12 aa, Homo sapiens
  CDR3 for alpha chain variable domain of TCR clone 44394 (TRAV13-1, TRAJ20)
CAASMGDYKLSF

SEQ ID NO: 88788 - protein, 13 aa, Homo sapiens
  CDR3 for beta chain variable domain of TCR clone 44394 (TRBV27, TRBJ2-1)
CASRTLGVGEQFF

SEQ ID NO: 88789 - protein, 13 aa, Homo sapiens
  CDR3 for alpha chain variable domain of TCR clone 44395 (TRAV17, TRAJ26)
CATVDSYGQNFVF

SEQ ID NO: 88790 - protein, 16 aa, Homo sapiens
  CDR3 for beta chain variable domain of TCR clone 44395 (TRBV2, TRBJ2-1)
CASSVGGSLSYNEQFF

SEQ ID NO: 88791 - protein, 14 aa, Homo sapiens
  CDR3 for alpha chain variable domain of TCR clone 44396 (TRAV1-2, TRAJ16)
CAVNRFSDGQKLLF

SEQ ID NO: 88792 - protein, 15 aa, Homo sapiens
  CDR3 for beta chain variable domain of TCR clone 44396 (TRBV28, TRBJ2-3)
CAPTFRDWSTDTQYF

SEQ ID NO: 88793 - protein, 11 aa, Homo sapiens
  CDR3 for alpha chain variable domain of TCR clone 44397 (TRAV12-1, TRAJ15)
CVVNAGTALVF

SEQ ID NO: 88794 - protein, 16 aa, Homo sapiens
  CDR3 for beta chain variable domain of TCR clone 44397 (TRBV28, TRBJ2-1)
CASSSRVRDSYNEQFF

SEQ ID NO: 88795 - protein, 14 aa, Homo sapiens
  CDR3 for alpha chain variable domain of TCR clone 44398 (TRAV12-2, TRAJ45)
CAVNKGGGADGLTL

SEQ ID NO: 88796 - protein, 14 aa, Homo sapiens
  CDR3 for beta chain variable domain of TCR clone 44398 (TRBV20-1, TRBJ1-1)
CSAMGGTANTEAFF

SEQ ID NO: 88797 - protein, 15 aa, Homo sapiens
  CDR3 for alpha chain variable domain of TCR clone 44399 (TRAV21, TRAJ45)
CAMSYSGGGADGLTF

SEQ ID NO: 88798 - protein, 13 aa, Homo sapiens
  CDR3 for beta chain variable domain of TCR clone 44399 (TRBV20-1, TRBJ2-5)
CSAATELQETQYF

SEQ ID NO: 88799 - protein, 14 aa, Homo sapiens
  CDR3 for alpha chain variable domain of TCR clone 44400 (TRAV13-2, TRAJ43)
CAEIPTYNNNDMRF

SEQ ID NO: 88800 - protein, 15 aa, Homo sapiens
  CDR3 for beta chain variable domain of TCR clone 44400 (TRBV7-9, TRBJ2-2)
CASGPLDTFPGELVF

SEQ ID NO: 88801 - protein, 12 aa, Homo sapiens
  CDR3 for alpha chain variable domain of TCR clone 44401 (TRAV13-1, TRAJ21)
CAAKEGFNKFYF

SEQ ID NO: 88802 - protein, 15 aa, Homo sapiens
  CDR3 for beta chain variable domain of TCR clone 44401 (TRBV25-1, TRBJ1-4)
CASSLGDSTNEKLFF

SEQ ID NO: 88803 - protein, 16 aa, Homo sapiens
  CDR3 for alpha chain variable domain of TCR clone 44402 (TRAV27, TRAJ53)
CAAPEGSGGRNYKLTF

SEQ ID NO: 88804 - protein, 15 aa, Homo sapiens
  CDR3 for beta chain variable domain of TCR clone 44402 (TRBV20-1, TRBJ1-1)
CSASRGVTGNTEAFF

SEQ ID NO: 88805 - protein, 14 aa, Homo sapiens
  CDR3 for alpha chain variable domain of TCR clone 44403 (TRAV8-3, TRAJ36)
CAVGPITGANNPFF

SEQ ID NO: 88806 - protein, 15 aa, Homo sapiens
  CDR3 for beta chain variable domain of TCR clone 44403 (TRBV4-1, TRBJ2-1)
CASSQDPGNYNEQFF

SEQ ID NO: 88807 - protein, 19 aa, Homo sapiens
  CDR3 for alpha chain variable domain of TCR clone 44404 (TRAV29/DV5, TRAJ49)
CSVLLCSKLTVDTGNQLYF

SEQ ID NO: 88808 - protein, 15 aa, Homo sapiens
  CDR3 for beta chain variable domain of TCR clone 44404 (TRBV4-3, TRBJ2-2)
CASSQGGTPTGELFF

SEQ ID NO: 88809 - protein, 13 aa, Homo sapiens
  CDR3 for alpha chain variable domain of TCR clone 44405 (TRAV13-2, TRAJ5)
YAESDTGRRALTF

SEQ ID NO: 88810 - protein, 14 aa, Homo sapiens
  CDR3 for beta chain variable domain of TCR clone 44405 (TRBV2, TRBJ1-1)
CASTQVGENTEAFF

SEQ ID NO: 88811 - protein, 11 aa, Homo sapiens
  CDR3 for alpha chain variable domain of TCR clone 44406 (TRAV1-2, TRAJ20)
CAVSNDYKLSF

SEQ ID NO: 88812 - protein, 15 aa, Homo sapiens
  CDR3 for beta chain variable domain of TCR clone 44406 (TRBV11-3, TRBJ2-3)
CASLKDGREGDTQYF

SEQ ID NO: 88813 - protein, 13 aa, Homo sapiens
  CDR3 for alpha chain variable domain of TCR clone 44407 (TRAV8-3, TRAJ28)
CAVGAVESYQLTF

SEQ ID NO: 88814 - protein, 14 aa, Homo sapiens
  CDR3 for beta chain variable domain of TCR clone 44407 (TRBV7-2, TRBJ2-7)
CASRSQGAAYEQYF

SEQ ID NO: 88815 - protein, 13 aa, Homo sapiens
  CDR3 for alpha chain variable domain of TCR clone 44408 (TRAV29/DV5, TRAJ33)
CAASVESNYQLIW

SEQ ID NO: 88816 - protein, 14 aa, Homo sapiens
  CDR3 for beta chain variable domain of TCR clone 44408 (TRBV19, TRBJ1-5)
CASSQGYSNQPQHF

SEQ ID NO: 88817 - protein, 13 aa, Homo sapiens
  CDR3 for alpha chain variable domain of TCR clone 44409 (TRAV13-2, TRAJ16)
CADARTDGQKLPF

SEQ ID NO: 88818 - protein, 19 aa, Homo sapiens
  CDR3 for beta chain variable domain of TCR clone 44409 (TRBV5-5, TRBJ2-5)
CASSIGGGWGDPVLRARHA

SEQ ID NO: 88819 - protein, 13 aa, Homo sapiens
  CDR3 for alpha chain variable domain of TCR clone 44410 (TRAV12-1, TRAJ40)
CVVPTSGTYKYIF

SEQ ID NO: 88820 - protein, 18 aa, Homo sapiens
  CDR3 for beta chain variable domain of TCR clone 44410 (TRBV7-6, TRBJ2-1)
CASSPRTSGMSSYNEQFL

SEQ ID NO: 88821 - protein, 14 aa, Homo sapiens
  CDR3 for alpha chain variable domain of TCR clone 44411 (TRAV8-6, TRAJ49)
CAVGDPGTGNQFYF

SEQ ID NO: 88822 - protein, 16 aa, Homo sapiens
  CDR3 for beta chain variable domain of TCR clone 44411 (TRBV24-1, TRBJ2-1)
CATSGVAGANYNEQFF

SEQ ID NO: 88823 - protein, 14 aa, Homo sapiens
  CDR3 for alpha chain variable domain of TCR clone 44412 (TRAV3, TRAJ22)
CAVRDYGSARQLTF

SEQ ID NO: 88824 - protein, 13 aa, Homo sapiens
  CDR3 for beta chain variable domain of TCR clone 44412 (TRBV11-2, TRBJ2-5)
CASGHGAKETQHF

SEQ ID NO: 88825 - protein, 12 aa, Homo sapiens
  CDR3 for alpha chain variable domain of TCR clone 44413 (TRAV3, TRAJ43)
CAVRDPNNDMRF

SEQ ID NO: 88826 - protein, 14 aa, Homo sapiens
  CDR3 for beta chain variable domain of TCR clone 44413 (TRBV7-2, TRBJ2-7)
CASRSQGAAYEQYF

SEQ ID NO: 88827 - protein, 11 aa, Homo sapiens
  CDR3 for alpha chain variable domain of TCR clone 44414 (TRAV2, TRAJ33)
CAVDSNYQLIW

SEQ ID NO: 88828 - protein, 15 aa, Homo sapiens
  CDR3 for beta chain variable domain of TCR clone 44414 (TRBV19, TRBJ1-2)
CASSAGQVLNYGYTF

SEQ ID NO: 88829 - protein, 15 aa, Homo sapiens
  CDR3 for alpha chain variable domain of TCR clone 44415 (TRAV1-1, TRAJ20)
CAVRDNVANDYKLSF

SEQ ID NO: 88830 - protein, 13 aa, Homo sapiens
  CDR3 for beta chain variable domain of TCR clone 44415 (TRBV4-1, TRBJ2-2)
CTSSQENTGELFF

SEQ ID NO: 88831 - protein, 14 aa, Homo sapiens
  CDR3 for alpha chain variable domain of TCR clone 44416 (TRAV17, TRAJ16)
CATADFSDVQKLLF

SEQ ID NO: 88832 - protein, 15 aa, Homo sapiens
  CDR3 for beta chain variable domain of TCR clone 44416 (TRBV18, TRBJ2-1)
CASSPPSASYNEQFF

SEQ ID NO: 88833 - protein, 13 aa, Homo sapiens
  CDR3 for alpha chain variable domain of TCR clone 44417 (TRAV2, TRAJ40)
CNVVTSGTYKYIF

SEQ ID NO: 88834 - protein, 14 aa, Homo sapiens
  CDR3 for beta chain variable domain of TCR clone 44417 (TRBV19, TRBJ2-1)
CASPTFVLSGEQFF

SEQ ID NO: 88835 - protein, 13 aa, Homo sapiens
  CDR3 for alpha chain variable domain of TCR clone 44418 (TRAV29/DV5, TRAJ31)
CAASRNNNARLMF

SEQ ID NO: 88836 - protein, 12 aa, Homo sapiens
  CDR3 for beta chain variable domain of TCR clone 44418 (TRBV14, TRBJ2-7)
FASSLYKDEQYF

SEQ ID NO: 88837 - protein, 16 aa, Homo sapiens
  CDR3 for alpha chain variable domain of TCR clone 44419 (TRAV8-3, TRAJ8)
CAVPRDGNTGFQKLVF

SEQ ID NO: 88838 - protein, 14 aa, Homo sapiens
  CDR3 for beta chain variable domain of TCR clone 44419 (TRBV28, TRBJ1-1)
CANSESGRGTEAFF

SEQ ID NO: 88839 - protein, 13 aa, Homo sapiens
  CDR3 for alpha chain variable domain of TCR clone 44420 (TRAV8-3, TRAJ44)
CAVVPGTASKLTF

SEQ ID NO: 88840 - protein, 15 aa, Homo sapiens
  CDR3 for beta chain variable domain of TCR clone 44420 (TRBV11-3, TRBJ2-3)
CASLKDGREGDTQYF

SEQ ID NO: 88841 - protein, 11 aa, Homo sapiens
  CDR3 for alpha chain variable domain of TCR clone 44421 (TRAV2, TRAJ33)
CAVDSNYQLIW

SEQ ID NO: 88842 - protein, 14 aa, Homo sapiens
  CDR3 for beta chain variable domain of TCR clone 44421 (TRBV11-2, TRBJ2-3)
CASSRLARTDTQYF

SEQ ID NO: 88843 - protein, 14 aa, Homo sapiens
  CDR3 for alpha chain variable domain of TCR clone 44422 (TRAV1-2, TRAJ16)
CAVNRFSDGQKLLF

SEQ ID NO: 88844 - protein, 18 aa, Homo sapiens
  CDR3 for beta chain variable domain of TCR clone 44422 (TRBV4-1, TRBJ1-5)
CASSQDPRGQGLNQPQHF

SEQ ID NO: 88845 - protein, 14 aa, Homo sapiens
  CDR3 for alpha chain variable domain of TCR clone 44423 (TRAV10, TRAJ34)
CVVSRGGDTDKPIF

SEQ ID NO: 88846 - protein, 17 aa, Homo sapiens
  CDR3 for beta chain variable domain of TCR clone 44423 (TRBV6-3, TRBJ2-3)
CASRRPLGGGSTDTQYF

SEQ ID NO: 88847 - protein, 18 aa, Homo sapiens
  CDR3 for alpha chain variable domain of TCR clone 44424 (TRAV29/DV5, TRAJ52)
CAAGSRGAGGTSYGKLTF

SEQ ID NO: 88848 - protein, 16 aa, Homo sapiens
  CDR3 for beta chain variable domain of TCR clone 44424 (TRBV7-3, TRBJ2-2)
CASSLKRGTLSGELFF

SEQ ID NO: 88849 - protein, 14 aa, Homo sapiens
  CDR3 for alpha chain variable domain of TCR clone 44425 (TRAV12-2, TRAJ5)
CAVNRSTCRRALTF

SEQ ID NO: 88850 - protein, 12 aa, Homo sapiens
  CDR3 for beta chain variable domain of TCR clone 44425 (TRBV19, TRBJ1-5)
CASSIAQQPQHF

SEQ ID NO: 88851 - protein, 13 aa, Homo sapiens
  CDR3 for alpha chain variable domain of TCR clone 44426 (TRAV21, TRAJ15)
CAVANQAGTALIF

SEQ ID NO: 88852 - protein, 14 aa, Homo sapiens
  CDR3 for beta chain variable domain of TCR clone 44426 (TRBV7-2, TRBJ2-7)
CASSPKTSFYEQYF

SEQ ID NO: 88853 - protein, 15 aa, Homo sapiens
  CDR3 for alpha chain variable domain of TCR clone 44427 (TRAV17, TRAJ16)
CATALRFSDGQKLLF

SEQ ID NO: 88854 - protein, 14 aa, Homo sapiens
  CDR3 for beta chain variable domain of TCR clone 44427 (TRBV7-6, TRBJ2-3)
CASSLGTVTDTQYF

SEQ ID NO: 88855 - protein, 13 aa, Homo sapiens
  CDR3 for alpha chain variable domain of TCR clone 44428 (TRAV3, TRAJ21)
CAVREPDFNKFYF

SEQ ID NO: 88856 - protein, 18 aa, Homo sapiens
  CDR3 for beta chain variable domain of TCR clone 44428 (TRBV11-2, TRBJ2-3)
CVSSLGGASRGAPNTQYF

SEQ ID NO: 88857 - protein, 14 aa, Homo sapiens
  CDR3 for alpha chain variable domain of TCR clone 44429 (TRAV23/DV6, TRAJ8)
CAASKATGFQKLEF

SEQ ID NO: 88858 - protein, 15 aa, Homo sapiens
  CDR3 for beta chain variable domain of TCR clone 44429 (TRBV28, TRBJ2-3)
CASSPDRQGANTQYF

SEQ ID NO: 88859 - protein, 13 aa, Homo sapiens
  CDR3 for alpha chain variable domain of TCR clone 44430 (TRAV3, TRAJ4)
CAVRDGGYNKLIF

SEQ ID NO: 88860 - protein, 14 aa, Homo sapiens
  CDR3 for beta chain variable domain of TCR clone 44430 (TRBV12-4, TRBJ1-2)
CASSSSAAGSGYTF

SEQ ID NO: 88861 - protein, 10 aa, Homo sapiens
  CDR3 for alpha chain variable domain of TCR clone 44431 (TRAV23/DV6, TRAJ57)
CAASSTLSQG

SEQ ID NO: 88862 - protein, 14 aa, Homo sapiens
  CDR3 for beta chain variable domain of TCR clone 44431 (TRBV25-1, TRBJ1-1)
CASTHLGGNTEACF

SEQ ID NO: 88863 - protein, 12 aa, Homo sapiens
  CDR3 for alpha chain variable domain of TCR clone 44432 (TRAV8-3, TRAJ20)
CAVGANDYKLSF

SEQ ID NO: 88864 - protein, 16 aa, Homo sapiens
  CDR3 for beta chain variable domain of TCR clone 44432 (TRBV19, TRBJ2-2)
CASRSPWTGATGELFF

SEQ ID NO: 88865 - protein, 12 aa, Homo sapiens
  CDR3 for alpha chain variable domain of TCR clone 44433 (TRAV26-2, TRAJ21)
CILKGNFNKFYF

SEQ ID NO: 88866 - protein, 14 aa, Homo sapiens
  CDR3 for beta chain variable domain of TCR clone 44433 (TRBV7-9, TRBJ1-1)
CASTPLQSYTEAVF

SEQ ID NO: 88867 - protein, 12 aa, Homo sapiens
  CDR3 for alpha chain variable domain of TCR clone 44434 (TRAV2, TRAJ9)
CAVGAGSFKTIF

SEQ ID NO: 88868 - protein, 16 aa, Homo sapiens
  CDR3 for beta chain variable domain of TCR clone 44434 (TRBV13, TRBJ2-2)
CASSPRTGEHTGELFF

SEQ ID NO: 88869 - protein, 13 aa, Homo sapiens
  CDR3 for alpha chain variable domain of TCR clone 44435 (TRAV17, TRAJ9)
CATDYTGGFKTIF

SEQ ID NO: 88870 - protein, 14 aa, Homo sapiens
  CDR3 for beta chain variable domain of TCR clone 44435 (TRBV19, TRBJ2-5)
CASSMTGQQETQYV

SEQ ID NO: 88871 - protein, 14 aa, Homo sapiens
  CDR3 for alpha chain variable domain of TCR clone 44436 (TRAV26-1, TRAJ45)
CIEVTGGGTDGLTF

SEQ ID NO: 88872 - protein, 13 aa, Homo sapiens
  CDR3 for beta chain variable domain of TCR clone 44436 (TRBV7-6, TRBJ1-2)
CASSLVADYGYTF

SEQ ID NO: 88873 - protein, 12 aa, Homo sapiens
  CDR3 for alpha chain variable domain of TCR clone 44437 (TRAV27, TRAJ34)
CAGAKNTDKPIF

SEQ ID NO: 88874 - protein, 13 aa, Homo sapiens
  CDR3 for beta chain variable domain of TCR clone 44437 (TRBV4-1, TRBJ2-1)
CASSQEVQYEQFF

SEQ ID NO: 88875 - protein, 15 aa, Homo sapiens
  CDR3 for alpha chain variable domain of TCR clone 44438 (TRAV17, TRAJ23)
CATDAEDDQGGKLIF

SEQ ID NO: 88876 - protein, 12 aa, Homo sapiens
  CDR3 for beta chain variable domain of TCR clone 44438 (TRBV2, TRBJ2-1)
CAKREGYNEQFF

SEQ ID NO: 88877 - protein, 15 aa, Homo sapiens
  CDR3 for alpha chain variable domain of TCR clone 44439 (TRAV23/DV6, TRAJ38)
CAARSNAGNNRKLIW

SEQ ID NO: 88878 - protein, 16 aa, Homo sapiens
  CDR3 for beta chain variable domain of TCR clone 44439 (TRBV10-2, TRBJ1-5)
CASSRDRDYSNQTQHF

SEQ ID NO: 88879 - protein, 17 aa, Homo sapiens
  CDR3 for alpha chain variable domain of TCR clone 44440 (TRAV17, TRAJ28)
CATDPRRGGAGSYQLAF

SEQ ID NO: 88880 - protein, 16 aa, Homo sapiens
  CDR3 for beta chain variable domain of TCR clone 44440 (TRBV25-1, TRBJ1-1)
CASSGDRDRGRIEAFF

SEQ ID NO: 88881 - protein, 13 aa, Homo sapiens
  CDR3 for alpha chain variable domain of TCR clone 44441 (TRAV1-1, TRAJ23)
RAVVANQGGKLIF

SEQ ID NO: 88882 - protein, 12 aa, Homo sapiens
  CDR3 for beta chain variable domain of TCR clone 44441 (TRBV5-7, TRBJ1-1)
CASSLGRGKAFF

SEQ ID NO: 88883 - protein, 12 aa, Homo sapiens
  CDR3 for alpha chain variable domain of TCR clone 44442 (TRAV1-1, TRAJ8)
CAGGTGFQKLVF

SEQ ID NO: 88884 - protein, 15 aa, Homo sapiens
  CDR3 for beta chain variable domain of TCR clone 44442 (TRBV7-9, TRBJ1-4)
CVSSRTGGFNEKLFF

SEQ ID NO: 88885 - protein, 14 aa, Homo sapiens
  CDR3 for alpha chain variable domain of TCR clone 44443 (TRAV12-3, TRAJ53)
CGATSGGSNYKLTL

SEQ ID NO: 88886 - protein, 13 aa, Homo sapiens
  CDR3 for beta chain variable domain of TCR clone 44443 (TRBV19, TRBJ1-5)
CASSTQDGQPQHF

SEQ ID NO: 88887 - protein, 12 aa, Homo sapiens
  CDR3 for alpha chain variable domain of TCR clone 44444 (TRAV13-1, TRAJ21)
CAAKEGFNKLYF

SEQ ID NO: 88888 - protein, 19 aa, Homo sapiens
  CDR3 for beta chain variable domain of TCR clone 44444 (TRBV2, TRBJ2-7)
CASSDDETSGRANDYEQYF

SEQ ID NO: 88889 - protein, 14 aa, Homo sapiens
  CDR3 for alpha chain variable domain of TCR clone 44445 (TRAV17, TRAJ6)
CATVFQGGSYIPTF

SEQ ID NO: 88890 - protein, 12 aa, Homo sapiens
  CDR3 for beta chain variable domain of TCR clone 44445 (TRBV11-2, TRBJ2-2)
CASSLGGGELFF

SEQ ID NO: 88891 - protein, 13 aa, Homo sapiens
  CDR3 for alpha chain variable domain of TCR clone 44446 (TRAV8-4, TRAJ52)
CAVSAYGYGKLTF

SEQ ID NO: 88892 - protein, 14 aa, Homo sapiens
  CDR3 for beta chain variable domain of TCR clone 44446 (TRBV25-1, TRBJ1-1)
CASTHLGGNTEAFF

SEQ ID NO: 88893 - protein, 12 aa, Homo sapiens
  CDR3 for alpha chain variable domain of TCR clone 44447 (TRAV13-1, TRAJ21)
CAAKEGFNKFYF

SEQ ID NO: 88894 - protein, 15 aa, Homo sapiens
  CDR3 for beta chain variable domain of TCR clone 44447 (TRBV15, TRBJ1-5)
CATRRDPVSNQPQHF

SEQ ID NO: 88895 - protein, 20 aa, Homo sapiens
  CDR3 for alpha chain variable domain of TCR clone 44448 (TRAV25, TRAJ21)
TATQTTDVGTYPLSFNKFYF

SEQ ID NO: 88896 - protein, 14 aa, Homo sapiens
  CDR3 for beta chain variable domain of TCR clone 44448 (TRBV6-1, TRBJ2-1)
CASAKDGLYNEQFF

SEQ ID NO: 88897 - protein, 13 aa, Homo sapiens
  CDR3 for alpha chain variable domain of TCR clone 44449 (TRAV12-3, TRAJ13)
CAMSSGGYQKVTF

SEQ ID NO: 88898 - protein, 13 aa, Homo sapiens
  CDR3 for beta chain variable domain of TCR clone 44449 (TRBV20-1, TRBJ1-1)
CSAPPGGHTEAVF

SEQ ID NO: 88899 - protein, 14 aa, Homo sapiens
  CDR3 for alpha chain variable domain of TCR clone 44450 (TRAV1-1, TRAJ27)
CAVIYNTNAGKSTL

SEQ ID NO: 88900 - protein, 18 aa, Homo sapiens
  CDR3 for beta chain variable domain of TCR clone 44450 (TRBV7-3, TRBJ2-1)
CASSLTLASGRAMVSSSS

SEQ ID NO: 88901 - protein, 14 aa, Homo sapiens
  CDR3 for alpha chain variable domain of TCR clone 44451 (TRAV13-2, TRAJ45)
CRAPFRRRCYGLTF

SEQ ID NO: 88902 - protein, 15 aa, Homo sapiens
  CDR3 for beta chain variable domain of TCR clone 44451 (TRBV7-2, TRBJ2-7)
CASSLALGSAYEQYF

SEQ ID NO: 88903 - protein, 10 aa, Homo sapiens
  CDR3 for alpha chain variable domain of TCR clone 44452 (TRAV13-1, TRAJ21)
CAASLNKFYF

SEQ ID NO: 88904 - protein, 13 aa, Homo sapiens
  CDR3 for beta chain variable domain of TCR clone 44452 (TRBV7-9, TRBJ2-7)
CASSSYGSYEQYF

SEQ ID NO: 88905 - protein, 16 aa, Homo sapiens
  CDR3 for alpha chain variable domain of TCR clone 44453 (TRAV8-3, TRAJ13)
CAVGAYPSGGYQKVTF

SEQ ID NO: 88906 - protein, 15 aa, Homo sapiens
  CDR3 for beta chain variable domain of TCR clone 44453 (TRBV19, TRBJ1-5)
CASSIVWAYNQPQHF

SEQ ID NO: 88907 - protein, 13 aa, Homo sapiens
  CDR3 for alpha chain variable domain of TCR clone 44454 (TRAV12-1, TRAJ27)
CVLNMTNAGKSTF

SEQ ID NO: 88908 - protein, 13 aa, Homo sapiens
  CDR3 for beta chain variable domain of TCR clone 44454 (TRBV20-1, TRBJ2-2)
CSASAAGTGELFF

SEQ ID NO: 88909 - protein, 13 aa, Homo sapiens
  CDR3 for alpha chain variable domain of TCR clone 44455 (TRAV3, TRAJ29)
CAVRDWGNTPLVF

SEQ ID NO: 88910 - protein, 15 aa, Homo sapiens
  CDR3 for beta chain variable domain of TCR clone 44455 (TRBV12-4, TRBJ2-5)
CASIGRTGEGGTQYF

SEQ ID NO: 88911 - protein, 13 aa, Homo sapiens
  CDR3 for alpha chain variable domain of TCR clone 44456 (TRAV1-2, TRAJ9)
CAALNTGGFKTIF

SEQ ID NO: 88912 - protein, 14 aa, Homo sapiens
  CDR3 for beta chain variable domain of TCR clone 44456 (TRBV2, TRBJ2-7)
CASSLTSGGYEQYF

SEQ ID NO: 88913 - protein, 17 aa, Homo sapiens
  CDR3 for alpha chain variable domain of TCR clone 44457 (TRAV12-2, TRAJ39)
CAVNNMLTFGGGTRLIV

SEQ ID NO: 88914 - protein, 16 aa, Homo sapiens
  CDR3 for beta chain variable domain of TCR clone 44457 (TRBV5-3, TRBJ2-2)
CARSFGTGTNTGELFF

SEQ ID NO: 88915 - protein, 14 aa, Homo sapiens
  CDR3 for alpha chain variable domain of TCR clone 44458 (TRAV12-3, TRAJ10)
SHLPLTGGGNKLTF

SEQ ID NO: 88916 - protein, 12 aa, Homo sapiens
  CDR3 for beta chain variable domain of TCR clone 44458 (TRBV7-9, TRBJ2-7)
CASSIRREEQYF

SEQ ID NO: 88917 - protein, 12 aa, Homo sapiens
  CDR3 for alpha chain variable domain of TCR clone 44459 (TRAV21, TRAJ39)
CAADNAGNMLTF

SEQ ID NO: 88918 - protein, 12 aa, Homo sapiens
  CDR3 for beta chain variable domain of TCR clone 44459 (TRBV5-4, TRBJ2-7)
CASSWAGQGDNF

SEQ ID NO: 88919 - protein, 14 aa, Homo sapiens
  CDR3 for alpha chain variable domain of TCR clone 44460 (TRAV16, TRAJ17)
CALSGRAAGNKLTF

SEQ ID NO: 88920 - protein, 14 aa, Homo sapiens
  CDR3 for beta chain variable domain of TCR clone 44460 (TRBV6-1, TRBJ1-3)
CASVQGGGGNTIYF

SEQ ID NO: 88921 - protein, 14 aa, Homo sapiens
  CDR3 for alpha chain variable domain of TCR clone 44461 (TRAV27, TRAJ23)
CVGLSYNQGGKLIF

SEQ ID NO: 88922 - protein, 15 aa, Homo sapiens
  CDR3 for beta chain variable domain of TCR clone 44461 (TRBV20-1, TRBJ2-7)
CSARDRVSGMDEQYF

SEQ ID NO: 88923 - protein, 12 aa, Homo sapiens
  CDR3 for alpha chain variable domain of TCR clone 44462 (TRAV12-3, TRAJ17)
CATTLTGNKLTF

SEQ ID NO: 88924 - protein, 13 aa, Homo sapiens
  CDR3 for beta chain variable domain of TCR clone 44462 (TRBV7-9, TRBJ1-2)
CASSLKQNYGYTF

SEQ ID NO: 88925 - protein, 12 aa, Homo sapiens
  CDR3 for alpha chain variable domain of TCR clone 44463 (TRAV35, TRAJ30)
CAGQLVDDKIIF

SEQ ID NO: 88926 - protein, 17 aa, Homo sapiens
  CDR3 for beta chain variable domain of TCR clone 44463 (TRBV4-2, TRBJ2-5)
CASSPGRWRNFQETQYF

SEQ ID NO: 88927 - protein, 13 aa, Homo sapiens
  CDR3 for alpha chain variable domain of TCR clone 44464 (TRAV2, TRAJ21)
CAVEDLNFNKSYF

SEQ ID NO: 88928 - protein, 15 aa, Homo sapiens
  CDR3 for beta chain variable domain of TCR clone 44464 (TRBV28, TRBJ2-5)
CASSPGQGSIETQYF

SEQ ID NO: 88929 - protein, 14 aa, Homo sapiens
  CDR3 for alpha chain variable domain of TCR clone 44465 (TRAV2, TRAJ37)
CAVDFTSNTGKLIF

SEQ ID NO: 88930 - protein, 14 aa, Homo sapiens
  CDR3 for beta chain variable domain of TCR clone 44465 (TRBV20-1, TRBJ1-1)
RSAQTRIGGTEAFF

SEQ ID NO: 88931 - protein, 12 aa, Homo sapiens
  CDR3 for alpha chain variable domain of TCR clone 44466 (TRAV3, TRAJ27)
CAVREKAGKSTF

SEQ ID NO: 88932 - protein, 14 aa, Homo sapiens
  CDR3 for beta chain variable domain of TCR clone 44466 (TRBV5-1, TRBJ1-2)
CASSVDSTNYGYTF

SEQ ID NO: 88933 - protein, 15 aa, Homo sapiens
  CDR3 for alpha chain variable domain of TCR clone 44467 (TRAV17, TRAJ37)
CDTDGGSSNTGKLIF

SEQ ID NO: 88934 - protein, 15 aa, Homo sapiens
  CDR3 for beta chain variable domain of TCR clone 44467 (TRBV28, TRBJ2-5)
CASSSGRTIQETQYF

SEQ ID NO: 88935 - protein, 15 aa, Homo sapiens
  CDR3 for alpha chain variable domain of TCR clone 44468 (TRAV12-3, TRAJ5)
CAMSGLGTGRRALTF

SEQ ID NO: 88936 - protein, 16 aa, Homo sapiens
  CDR3 for beta chain variable domain of TCR clone 44468 (TRBV20-1, TRBJ2-3)
CSARLHSAGAIDTQHF

SEQ ID NO: 88937 - protein, 16 aa, Homo sapiens
  CDR3 for alpha chain variable domain of TCR clone 44469 (TRAV30, TRAJ24)
RGTEIVDADSWGKFQF

SEQ ID NO: 88938 - protein, 15 aa, Homo sapiens
  CDR3 for beta chain variable domain of TCR clone 44469 (TRBV7-9, TRBJ1-4)
CASSARTGGNEKLFF

SEQ ID NO: 88939 - protein, 15 aa, Homo sapiens
  CDR3 for alpha chain variable domain of TCR clone 44470 (TRAV3, TRAJ22)
CAVRDRGGSARQLTF

SEQ ID NO: 88940 - protein, 15 aa, Homo sapiens
  CDR3 for beta chain variable domain of TCR clone 44470 (TRBV3-1, TRBJ2-5)
CASSANLGGPETQYF

SEQ ID NO: 88941 - protein, 14 aa, Homo sapiens
  CDR3 for alpha chain variable domain of TCR clone 44471 (TRAV12-2, TRAJ13)
CAVKKTGGYQKVTF

SEQ ID NO: 88942 - protein, 16 aa, Homo sapiens
  CDR3 for beta chain variable domain of TCR clone 44471 (TRBV2, TRBJ2-1)
CASRSLAGGKYNEQFF

SEQ ID NO: 88943 - protein, 12 aa, Homo sapiens
  CDR3 for alpha chain variable domain of TCR clone 44472 (TRAV12-3, TRAJ17)
CAMTLTGNKLTF

SEQ ID NO: 88944 - protein, 14 aa, Homo sapiens
  CDR3 for beta chain variable domain of TCR clone 44472 (TRBV7-9, TRBJ2-5)
CASSLDTAQETQYF

SEQ ID NO: 88945 - protein, 14 aa, Homo sapiens
  CDR3 for alpha chain variable domain of TCR clone 44473 (TRAV2, TRAJ9)
CAVEDRRGGFKTIF

SEQ ID NO: 88946 - protein, 14 aa, Homo sapiens
  CDR3 for beta chain variable domain of TCR clone 44473 (TRBV18, TRBJ1-5)
CASSRQQRNQPQHF

SEQ ID NO: 88947 - protein, 14 aa, Homo sapiens
  CDR3 for alpha chain variable domain of TCR clone 44474 (TRAV12-3, TRAJ10)
SHLPLTGGGNKLTF

SEQ ID NO: 88948 - protein, 14 aa, Homo sapiens
  CDR3 for beta chain variable domain of TCR clone 44474 (TRBV6-1, TRBJ1-3)
CASVQGGGGNTLYF

SEQ ID NO: 88949 - protein, 11 aa, Homo sapiens
  CDR3 for alpha chain variable domain of TCR clone 44475 (TRAV21, TRAJ48)
CAVDGNEKLTF

SEQ ID NO: 88950 - protein, 17 aa, Homo sapiens
  CDR3 for beta chain variable domain of TCR clone 44475 (TRBV13, TRBJ2-3)
CASSLSRVAGGRNTQYF

SEQ ID NO: 88951 - protein, 17 aa, Homo sapiens
  CDR3 for alpha chain variable domain of TCR clone 44476 (TRAV35, TRAJ28)
CAGLQVYSGAGSYQLTF

SEQ ID NO: 88952 - protein, 15 aa, Homo sapiens
  CDR3 for beta chain variable domain of TCR clone 44476 (TRBV2, TRBJ1-2)
CASSEIGGANYGYSF

SEQ ID NO: 88953 - protein, 15 aa, Homo sapiens
  CDR3 for alpha chain variable domain of TCR clone 44477 (TRAV29/DV5, TRAJ29)
CAASERSSGNTPLVF

SEQ ID NO: 88954 - protein, 17 aa, Homo sapiens
  CDR3 for beta chain variable domain of TCR clone 44477 (TRBV4-1, TRBJ1-4)
CASSQEGPRGAEEKLFF

SEQ ID NO: 88955 - protein, 16 aa, Homo sapiens
  CDR3 for alpha chain variable domain of TCR clone 44478 (TRAV8-3, TRAJ44)
CAVGASNTGTASRPTF

SEQ ID NO: 88956 - protein, 15 aa, Homo sapiens
  CDR3 for beta chain variable domain of TCR clone 44478 (TRBV27, TRBJ1-5)
CASTFNRGSNQPQHF

SEQ ID NO: 88957 - protein, 14 aa, Homo sapiens
  CDR3 for alpha chain variable domain of TCR clone 44479 (TRAV17, TRAJ56)
CATVPAGANSKLTF

SEQ ID NO: 88958 - protein, 13 aa, Homo sapiens
  CDR3 for beta chain variable domain of TCR clone 44479 (TRBV12-4, TRBJ2-2)
CASSMTGSGELFF

SEQ ID NO: 88959 - protein, 14 aa, Homo sapiens
  CDR3 for alpha chain variable domain of TCR clone 44480 (TRAV13-1, TRAJ35)
CAASKGGFGNVLHC

SEQ ID NO: 88960 - protein, 15 aa, Homo sapiens
  CDR3 for beta chain variable domain of TCR clone 44480 (TRBV7-9, TRBJ2-2)
CASGPLDTFPGELFF

SEQ ID NO: 88961 - protein, 16 aa, Homo sapiens
  CDR3 for alpha chain variable domain of TCR clone 44481 (TRAV35, TRAJ47)
LLDCRTHTEYGNKLVF

SEQ ID NO: 88962 - protein, 11 aa, Homo sapiens
  CDR3 for beta chain variable domain of TCR clone 44481 (TRBV29-1, TRBJ1-1)
CSVEVGTRTFF

SEQ ID NO: 88963 - protein, 13 aa, Homo sapiens
  CDR3 for alpha chain variable domain of TCR clone 44482 (TRAV36/DV7, TRAJ53)
CALSGGSNYKLTF

SEQ ID NO: 88964 - protein, 13 aa, Homo sapiens
  CDR3 for beta chain variable domain of TCR clone 44482 (TRBV28, TRBJ2-7)
CASSLPARYEQYF

SEQ ID NO: 88965 - protein, 13 aa, Homo sapiens
  CDR3 for alpha chain variable domain of TCR clone 44483 (TRAV12-3, TRAJ5)
CAMRPTGRRALTF

SEQ ID NO: 88966 - protein, 13 aa, Homo sapiens
  CDR3 for beta chain variable domain of TCR clone 44483 (TRBV2, TRBJ2-7)
CASSIVEAYEQYF

SEQ ID NO: 88967 - protein, 14 aa, Homo sapiens
  CDR3 for alpha chain variable domain of TCR clone 44484 (TRAV16, TRAJ39)
CALSKNNAGNMFTF

SEQ ID NO: 88968 - protein, 15 aa, Homo sapiens
  CDR3 for beta chain variable domain of TCR clone 44484 (TRBV6-3, TRBJ2-7)
CASSSPGTVFYEQYF

SEQ ID NO: 88969 - protein, 14 aa, Homo sapiens
  CDR3 for alpha chain variable domain of TCR clone 44485 (TRAV29/DV5, TRAJ36)
CAARRKTGANNLFF

SEQ ID NO: 88970 - protein, 13 aa, Homo sapiens
  CDR3 for beta chain variable domain of TCR clone 44485 (TRBV7-9, TRBJ1-2)
RASSLKQNYGYTF

SEQ ID NO: 88971 - protein, 13 aa, Homo sapiens
  CDR3 for alpha chain variable domain of TCR clone 44486 (TRAV16, TRAJ28)
CALTGAGSYQLTF

SEQ ID NO: 88972 - protein, 16 aa, Homo sapiens
  CDR3 for beta chain variable domain of TCR clone 44486 (TRBV28, TRBJ1-5)
CASSLTGQGWSQPQHF

SEQ ID NO: 88973 - protein, 15 aa, Homo sapiens
  CDR3 for alpha chain variable domain of TCR clone 44487 (TRAV2, TRAJ15)
CAAEDRGQAGTALIF

SEQ ID NO: 88974 - protein, 13 aa, Homo sapiens
  CDR3 for beta chain variable domain of TCR clone 44487 (TRBV10-2, TRBJ2-7)
CASGASGGYEQYF

SEQ ID NO: 88975 - protein, 15 aa, Homo sapiens
  CDR3 for alpha chain variable domain of TCR clone 44488 (TRAV17, TRAJ16)
CATALRFSDGQKLLF

SEQ ID NO: 88976 - protein, 13 aa, Homo sapiens
  CDR3 for beta chain variable domain of TCR clone 44488 (TRBV10-3, TRBJ2-7)
CASKLAVNYEQYF

SEQ ID NO: 88977 - protein, 13 aa, Homo sapiens
  CDR3 for alpha chain variable domain of TCR clone 44489 (TRAV30, TRAJ34)
CGTVGYNTDKLIF

SEQ ID NO: 88978 - protein, 16 aa, Homo sapiens
  CDR3 for beta chain variable domain of TCR clone 44489 (TRBV7-9, TRBJ1-2)
CASSVGFSSGEDGYTF

SEQ ID NO: 88979 - protein, 14 aa, Homo sapiens
  CDR3 for alpha chain variable domain of TCR clone 44490 (TRAV12-2, TRAJ40)
CAVKIPSGTYKYIF

SEQ ID NO: 88980 - protein, 12 aa, Homo sapiens
  CDR3 for beta chain variable domain of TCR clone 44490 (TRBV7-9, TRBJ2-7)
CASSLEGYEQYF

SEQ ID NO: 88981 - protein, 16 aa, Homo sapiens
  CDR3 for alpha chain variable domain of TCR clone 44491 (TRAV23/DV6, TRAJ9)
CAASIGGNNGGFKTIF

SEQ ID NO: 88982 - protein, 12 aa, Homo sapiens
  CDR3 for beta chain variable domain of TCR clone 44491 (TRBV6-3, TRBJ2-7)
CASSEPGFEQYF

SEQ ID NO: 88983 - protein, 12 aa, Homo sapiens
  CDR3 for alpha chain variable domain of TCR clone 44492 (TRAV12-3, TRAJ17)
CAMTLTGNKLTF

SEQ ID NO: 88984 - protein, 15 aa, Homo sapiens
  CDR3 for beta chain variable domain of TCR clone 44492 (TRBV19, TRBJ2-1)
CASSSLGEGRNEQFF

SEQ ID NO: 88985 - protein, 16 aa, Homo sapiens
  CDR3 for alpha chain variable domain of TCR clone 44493 (TRAV21, TRAJ45)
YAVSWGSGGGADGLTF

SEQ ID NO: 88986 - protein, 16 aa, Homo sapiens
  CDR3 for beta chain variable domain of TCR clone 44493 (TRBV11-2, TRBJ1-2)
CASSLDTGGADYGYTF

SEQ ID NO: 88987 - protein, 15 aa, Homo sapiens
  CDR3 for alpha chain variable domain of TCR clone 44494 (TRAV2, TRAJ22)
CAVPSRGGSARQPTF

SEQ ID NO: 88988 - protein, 14 aa, Homo sapiens
  CDR3 for beta chain variable domain of TCR clone 44494 (TRBV7-6, TRBJ2-3)
CASSLGTVTDTQYF

SEQ ID NO: 88989 - protein, 11 aa, Homo sapiens
  CDR3 for alpha chain variable domain of TCR clone 44495 (TRAV12-1, TRAJ21)
CVVYNFNKFYF

SEQ ID NO: 88990 - protein, 13 aa, Homo sapiens
  CDR3 for beta chain variable domain of TCR clone 44495 (TRBV7-9, TRBJ1-2)
CASSLKQNYGYTF

SEQ ID NO: 88991 - protein, 14 aa, Homo sapiens
  CDR3 for alpha chain variable domain of TCR clone 44496 (TRAV13-2, TRAJ57)
CAENFQGGSEKLVF

SEQ ID NO: 88992 - protein, 14 aa, Homo sapiens
  CDR3 for beta chain variable domain of TCR clone 44496 (TRBV7-2, TRBJ2-7)
CASSPKTSFYEQYF

SEQ ID NO: 88993 - protein, 14 aa, Homo sapiens
  CDR3 for alpha chain variable domain of TCR clone 44497 (TRAV1-2, TRAJ8)
CAVREGTGFQKLVF

SEQ ID NO: 88994 - protein, 16 aa, Homo sapiens
  CDR3 for beta chain variable domain of TCR clone 44497 (TRBV7-6, TRBJ2-6)
CASSLPGLSGANVLTF

SEQ ID NO: 88995 - protein, 11 aa, Homo sapiens
  CDR3 for alpha chain variable domain of TCR clone 44498 (TRAV4, TRAJ31)
CLVGLNARLVF

SEQ ID NO: 88996 - protein, 16 aa, Homo sapiens
  CDR3 for beta chain variable domain of TCR clone 44498 (TRBV15, TRBJ2-6)
CATSVNGGFLANVLTF

SEQ ID NO: 88997 - protein, 15 aa, Homo sapiens
  CDR3 for alpha chain variable domain of TCR clone 44499 (TRAV20, TRAJ6)
CTVRLQSGGSYIPTF

SEQ ID NO: 88998 - protein, 14 aa, Homo sapiens
  CDR3 for beta chain variable domain of TCR clone 44499 (TRBV12-4, TRBJ2-7)
CASSASGGWYEQYF

SEQ ID NO: 88999 - protein, 14 aa, Homo sapiens
  CDR3 for alpha chain variable domain of TCR clone 44500 (TRAV26-1, TRAJ54)
CIVRRTQGAQKLVF

SEQ ID NO: 89000 - protein, 14 aa, Homo sapiens
  CDR3 for beta chain variable domain of TCR clone 44500 (TRBV19, TRBJ2-1)
CASPTFVLSGEQFF

SEQ ID NO: 89001 - protein, 14 aa, Homo sapiens
  CDR3 for alpha chain variable domain of TCR clone 44501 (TRAV1-2, TRAJ16)
CAVNRFSDGQKLLF

SEQ ID NO: 89002 - protein, 17 aa, Homo sapiens
  CDR3 for beta chain variable domain of TCR clone 44501 (TRBV18, TRBJ2-1)
CASSKGLSGGADNEQFF

SEQ ID NO: 89003 - protein, 15 aa, Homo sapiens
  CDR3 for alpha chain variable domain of TCR clone 44502 (TRAV3, TRAJ12)
CAVRDIRDSSYKLIF

SEQ ID NO: 89004 - protein, 15 aa, Homo sapiens
  CDR3 for beta chain variable domain of TCR clone 44502 (TRBV27, TRBJ2-7)
CVSSLRNEQGYEQYF

SEQ ID NO: 89005 - protein, 12 aa, Homo sapiens
  CDR3 for alpha chain variable domain of TCR clone 44503 (TRAV3, TRAJ43)
CAVRDPNNDMRF

SEQ ID NO: 89006 - protein, 17 aa, Homo sapiens
  CDR3 for beta chain variable domain of TCR clone 44503 (TRBV7-8, TRBJ2-6)
CASSAGTGGAGANDLTF

SEQ ID NO: 89007 - protein, 21 aa, Homo sapiens
  CDR3 for alpha chain variable domain of TCR clone 44504 (TRAV16, TRAJ31)
CALSGGVETMPDSCLEMELSW

SEQ ID NO: 89008 - protein, 16 aa, Homo sapiens
  CDR3 for beta chain variable domain of TCR clone 44504 (TRBV28, TRBJ2-7)
CASSLFFETGGPEQYF

SEQ ID NO: 89009 - protein, 14 aa, Homo sapiens
  CDR3 for alpha chain variable domain of TCR clone 44505 (TRAV12-1, TRAJ13)
CVVIDSGGYQKVTF

SEQ ID NO: 89010 - protein, 13 aa, Homo sapiens
  CDR3 for beta chain variable domain of TCR clone 44505 (TRBV20-1, TRBJ1-1)
CSAPPGGHNEAFF

SEQ ID NO: 89011 - protein, 13 aa, Homo sapiens
  CDR3 for alpha chain variable domain of TCR clone 44506 (TRAV12-3, TRAJ7)
CAMTPYGNDRLAF

SEQ ID NO: 89012 - protein, 16 aa, Homo sapiens
  CDR3 for beta chain variable domain of TCR clone 44506 (TRBV20-1, TRBJ1-4)
CSARPYGGELNEKLFF

SEQ ID NO: 89013 - protein, 11 aa, Homo sapiens
  CDR3 for alpha chain variable domain of TCR clone 44507 (TRAV12-1, TRAJ21)
CVVYNFNKFYF

SEQ ID NO: 89014 - protein, 16 aa, Homo sapiens
  CDR3 for beta chain variable domain of TCR clone 44507 (TRBV11-1, TRBJ2-2)
CASSAEGLKNTGELFF

SEQ ID NO: 89015 - protein, 13 aa, Homo sapiens
  CDR3 for alpha chain variable domain of TCR clone 44508 (TRAV3, TRAJ21)
FAVREPDFNKFYF

SEQ ID NO: 89016 - protein, 14 aa, Homo sapiens
  CDR3 for beta chain variable domain of TCR clone 44508 (TRBV4-1, TRBJ2-2)
CASSQAVNTGELFF

SEQ ID NO: 89017 - protein, 19 aa, Homo sapiens
  CDR3 for alpha chain variable domain of TCR clone 44509 (TRAV2, TRAJ20)
ILQVREADAAVYRDCKLSF

SEQ ID NO: 89018 - protein, 13 aa, Homo sapiens
  CDR3 for beta chain variable domain of TCR clone 44509 (TRBV15, TRBJ1-6)
CAASGGLNSPLHF

SEQ ID NO: 89019 - protein, 14 aa, Homo sapiens
  CDR3 for alpha chain variable domain of TCR clone 44510 (TRAV8-3, TRAJ26)
CAVAPGNYGQNFVF

SEQ ID NO: 89020 - protein, 14 aa, Homo sapiens
  CDR3 for beta chain variable domain of TCR clone 44510 (TRBV4-1, TRBJ2-2)
CASSQAVNTGELFF

SEQ ID NO: 89021 - protein, 11 aa, Homo sapiens
  CDR3 for alpha chain variable domain of TCR clone 44511 (TRAV3, TRAJ21)
CAVGNFNKLYF

SEQ ID NO: 89022 - protein, 16 aa, Homo sapiens
  CDR3 for beta chain variable domain of TCR clone 44511 (TRBV19, TRBJ2-1)
CASSKAEPSSYNEQFF

SEQ ID NO: 89023 - protein, 10 aa, Homo sapiens
  CDR3 for alpha chain variable domain of TCR clone 44512 (TRAV12-2, TRAJ41)
CVVTGYALNF

SEQ ID NO: 89024 - protein, 15 aa, Homo sapiens
  CDR3 for beta chain variable domain of TCR clone 44512 (TRBV4-2, TRBJ2-1)
CASSQDVGLAGEQFF

SEQ ID NO: 89025 - protein, 14 aa, Homo sapiens
  CDR3 for alpha chain variable domain of TCR clone 44513 (TRAV16, TRAJ17)
CALSGRAAGTKLTF

SEQ ID NO: 89026 - protein, 17 aa, Homo sapiens
  CDR3 for beta chain variable domain of TCR clone 44513 (TRBV18, TRBJ2-6)
CASSPRQGAVGANVLTF

SEQ ID NO: 89027 - protein, 15 aa, Homo sapiens
  CDR3 for alpha chain variable domain of TCR clone 44514 (TRAV8-2, TRAJ40)
CVVLGTTSGTYQYIF

SEQ ID NO: 89028 - protein, 16 aa, Homo sapiens
  CDR3 for beta chain variable domain of TCR clone 44514 (TRBV7-3, TRBJ2-1)
CASSLEGYRSYNEQFF

SEQ ID NO: 89029 - protein, 18 aa, Homo sapiens
  CDR3 for alpha chain variable domain of TCR clone 44515 (TRAV21, TRAJ52)
CAVRPSPAGGTSYGKLTL

SEQ ID NO: 89030 - protein, 13 aa, Homo sapiens
  CDR3 for beta chain variable domain of TCR clone 44515 (TRBV7-3, TRBJ1-1)
CASSQDWGAEAFF

SEQ ID NO: 89031 - protein, 13 aa, Homo sapiens
  CDR3 for alpha chain variable domain of TCR clone 44516 (TRAV20, TRAJ37)
CAGCSSNTGKLIF

SEQ ID NO: 89032 - protein, 15 aa, Homo sapiens
  CDR3 for beta chain variable domain of TCR clone 44516 (TRBV10-2, TRBJ2-6)
CASSEQGTGANVLTF

SEQ ID NO: 89033 - protein, 13 aa, Homo sapiens
  CDR3 for alpha chain variable domain of TCR clone 44517 (TRAV36/DV7, TRAJ53)
CALSGGSNYKLTF

SEQ ID NO: 89034 - protein, 13 aa, Homo sapiens
  CDR3 for beta chain variable domain of TCR clone 44517 (TRBV28, TRBJ2-7)
CARSLPSRYEQYF

SEQ ID NO: 89035 - protein, 16 aa, Homo sapiens
  CDR3 for alpha chain variable domain of TCR clone 44518 (TRAV16, TRAJ42)
CALSGYYGGSQGNLIF

SEQ ID NO: 89036 - protein, 14 aa, Homo sapiens
  CDR3 for beta chain variable domain of TCR clone 44518 (TRBV3-1, TRBJ2-5)
CASSQAVRQETRYF

SEQ ID NO: 89037 - protein, 12 aa, Homo sapiens
  CDR3 for alpha chain variable domain of TCR clone 44519 (TRAV4, TRAJ21)
CLVGDNSNKFYF

SEQ ID NO: 89038 - protein, 17 aa, Homo sapiens
  CDR3 for beta chain variable domain of TCR clone 44519 (TRBV3-1, TRBJ2-7)
CASSQDLTGLSSYEQYF

SEQ ID NO: 89039 - protein, 15 aa, Homo sapiens
  CDR3 for alpha chain variable domain of TCR clone 44520 (TRAV14/DV4, TRAJ9)
CAMREGNTGGFKTIF

SEQ ID NO: 89040 - protein, 16 aa, Homo sapiens
  CDR3 for beta chain variable domain of TCR clone 44520 (TRBV12-5, TRBJ2-5)
CASGPRTSGNQETQYF

SEQ ID NO: 89041 - protein, 16 aa, Homo sapiens
  CDR3 for alpha chain variable domain of TCR clone 44521 (TRAV23/DV6, TRAJ9)
CAASIGGNTGGFKTIF

SEQ ID NO: 89042 - protein, 13 aa, Homo sapiens
  CDR3 for beta chain variable domain of TCR clone 44521 (TRBV7-9, TRBJ1-2)
CASSLKQNYGYTL

SEQ ID NO: 89043 - protein, 11 aa, Homo sapiens
  CDR3 for alpha chain variable domain of TCR clone 44522 (TRAV13-2, TRAJ20)
CADSNDYKLSF

SEQ ID NO: 89044 - protein, 19 aa, Homo sapiens
  CDR3 for beta chain variable domain of TCR clone 44522 (TRBV7-2, TRBJ2-3)
CASSFLSRNWGGGTDTQYF

SEQ ID NO: 89045 - protein, 14 aa, Homo sapiens
  CDR3 for alpha chain variable domain of TCR clone 44523 (TRAV26-1, TRAJ39)
CIVFTNNAGNMLTF

SEQ ID NO: 89046 - protein, 14 aa, Homo sapiens
  CDR3 for beta chain variable domain of TCR clone 44523 (TRBV7-2, TRBJ2-7)
CASRSQGAAYEQYF

SEQ ID NO: 89047 - protein, 14 aa, Homo sapiens
  CDR3 for alpha chain variable domain of TCR clone 44524 (TRAV12-2, TRAJ24)
CAVTPADSWGKLQF

SEQ ID NO: 89048 - protein, 13 aa, Homo sapiens
  CDR3 for beta chain variable domain of TCR clone 44524 (TRBV6-4, TRBJ1-5)
CASNADLNQPQHF

SEQ ID NO: 89049 - protein, 15 aa, Homo sapiens
  CDR3 for alpha chain variable domain of TCR clone 44525 (TRAV29/DV5, TRAJ29)
CAASERSSGNTPLVF

SEQ ID NO: 89050 - protein, 12 aa, Homo sapiens
  CDR3 for beta chain variable domain of TCR clone 44525 (TRBV11-2, TRBJ2-2)
CASSLGGGELFF

SEQ ID NO: 89051 - protein, 16 aa, Homo sapiens
  CDR3 for alpha chain variable domain of TCR clone 44526 (TRAV8-3, TRAJ8)
CAVPRDGNTGFQNLVF

SEQ ID NO: 89052 - protein, 14 aa, Homo sapiens
  CDR3 for beta chain variable domain of TCR clone 44526 (TRBV28, TRBJ1-1)
CASSESGRGTEAFF

SEQ ID NO: 89053 - protein, 14 aa, Homo sapiens
  CDR3 for alpha chain variable domain of TCR clone 44527 (TRAV3, TRAJ21)
CAVRDKYNFNKFYF

SEQ ID NO: 89054 - protein, 14 aa, Homo sapiens
  CDR3 for beta chain variable domain of TCR clone 44527 (TRBV27, TRBJ2-3)
CASRDSPITDTQYF

SEQ ID NO: 89055 - protein, 14 aa, Homo sapiens
  CDR3 for alpha chain variable domain of TCR clone 44528 (TRAV29/DV5, TRAJ48)
CAAMALFGNEKSTF

SEQ ID NO: 89056 - protein, 15 aa, Homo sapiens
  CDR3 for beta chain variable domain of TCR clone 44528 (TRBV7-2, TRBJ2-1)
CASTHGTGIYNEQFF

SEQ ID NO: 89057 - protein, 15 aa, Homo sapiens
  CDR3 for alpha chain variable domain of TCR clone 44529 (TRAV3, TRAJ5)
CAVRDRKTGRRALTF

SEQ ID NO: 89058 - protein, 15 aa, Homo sapiens
  CDR3 for beta chain variable domain of TCR clone 44529 (TRBV7-8, TRBJ2-1)
CASSLADSLYNGQFF

SEQ ID NO: 89059 - protein, 20 aa, Homo sapiens
  CDR3 for alpha chain variable domain of TCR clone 44530 (TRAV12-1, TRAJ42)
SSVIQPPTSVKGGSQGNLIF

SEQ ID NO: 89060 - protein, 18 aa, Homo sapiens
  CDR3 for beta chain variable domain of TCR clone 44530 (TRBV11-2, TRBJ2-3)
CASSLGGASRGATNTQYF

SEQ ID NO: 89061 - protein, 12 aa, Homo sapiens
  CDR3 for alpha chain variable domain of TCR clone 44531 (TRAV12-3, TRAJ3)
CAIDSSASKIIF

SEQ ID NO: 89062 - protein, 14 aa, Homo sapiens
  CDR3 for beta chain variable domain of TCR clone 44531 (TRBV7-9, TRBJ2-1)
CASSLVVGADEQFF

SEQ ID NO: 89063 - protein, 12 aa, Homo sapiens
  CDR3 for alpha chain variable domain of TCR clone 44532 (TRAV36/DV7, TRAJ54)
CAVVRGAQKLVF

SEQ ID NO: 89064 - protein, 15 aa, Homo sapiens
  CDR3 for beta chain variable domain of TCR clone 44532 (TRBV29-1, TRBJ2-1)
CSGRDRKSSYNEQFF

SEQ ID NO: 89065 - protein, 13 aa, Homo sapiens
  CDR3 for alpha chain variable domain of TCR clone 44533 (TRAV21, TRAJ20)
CAVGLRVDYKLSF

SEQ ID NO: 89066 - protein, 14 aa, Homo sapiens
  CDR3 for beta chain variable domain of TCR clone 44533 (TRBV9, TRBJ1-2)
CASSVSTRSYGYTF

SEQ ID NO: 89067 - protein, 13 aa, Homo sapiens
  CDR3 for alpha chain variable domain of TCR clone 44534 (TRAV8-3, TRAJ36)
CAVGATGSNNLFF

SEQ ID NO: 89068 - protein, 15 aa, Homo sapiens
  CDR3 for beta chain variable domain of TCR clone 44534 (TRBV7-2, TRBJ1-2)
CASSPRAGWNYGYTF

SEQ ID NO: 89069 - protein, 14 aa, Homo sapiens
  CDR3 for alpha chain variable domain of TCR clone 44535 (TRAV8-3, TRAJ4)
CAVGAAGGYNKLIF

SEQ ID NO: 89070 - protein, 14 aa, Homo sapiens
  CDR3 for beta chain variable domain of TCR clone 44535 (TRBV18, TRBJ2-7)
CASSPRGGAYEQYF

SEQ ID NO: 89071 - protein, 11 aa, Homo sapiens
  CDR3 for alpha chain variable domain of TCR clone 44536 (TRAV2, TRAJ33)
CAVESNYQLIW

SEQ ID NO: 89072 - protein, 15 aa, Homo sapiens
  CDR3 for beta chain variable domain of TCR clone 44536 (TRBV28, TRBJ1-2)
CASSRWGASNYGYTF

SEQ ID NO: 89073 - protein, 13 aa, Homo sapiens
  CDR3 for alpha chain variable domain of TCR clone 44537 (TRAV17, TRAJ9)
CATDYTGGFKTIF

SEQ ID NO: 89074 - protein, 14 aa, Homo sapiens
  CDR3 for beta chain variable domain of TCR clone 44537 (TRBV7-6, TRBJ2-3)
CASSLGTVTDTQYF

SEQ ID NO: 89075 - protein, 14 aa, Homo sapiens
  CDR3 for alpha chain variable domain of TCR clone 44538 (TRAV8-2, TRAJ4)
CVVSPSGDYNKLIF

SEQ ID NO: 89076 - protein, 15 aa, Homo sapiens
  CDR3 for beta chain variable domain of TCR clone 44538 (TRBV4-1, TRBJ1-4)
CASSDTGGTNEKLFF

SEQ ID NO: 89077 - protein, 14 aa, Homo sapiens
  CDR3 for alpha chain variable domain of TCR clone 44539 (TRAV9-2, TRAJ39)
CALYIYNAGNMLTF

SEQ ID NO: 89078 - protein, 16 aa, Homo sapiens
  CDR3 for beta chain variable domain of TCR clone 44539 (TRBV20-1, TRBJ1-4)
CSAPGQSLLTNEKLFF

SEQ ID NO: 89079 - protein, 11 aa, Homo sapiens
  CDR3 for alpha chain variable domain of TCR clone 44540 (TRAV12-2, TRAJ33)
CAVTSNYQLIW

SEQ ID NO: 89080 - protein, 14 aa, Homo sapiens
  CDR3 for beta chain variable domain of TCR clone 44540 (TRBV25-1, TRBJ1-1)
CASTHLGGNTEAFF

SEQ ID NO: 89081 - protein, 12 aa, Homo sapiens
  CDR3 for alpha chain variable domain of TCR clone 44541 (TRAV35, TRAJ39)
LAPNNAGNMLTF

SEQ ID NO: 89082 - protein, 13 aa, Homo sapiens
  CDR3 for beta chain variable domain of TCR clone 44541 (TRBV7-2, TRBJ2-7)
CASSFGQEKEQYF

SEQ ID NO: 89083 - protein, 14 aa, Homo sapiens
  CDR3 for alpha chain variable domain of TCR clone 44542 (TRAV23/DV6, TRAJ8)
CAASKNTGFQKLVF

SEQ ID NO: 89084 - protein, 16 aa, Homo sapiens
  CDR3 for beta chain variable domain of TCR clone 44542 (TRBV4-1, TRBJ2-6)
CAGSQVGDPGANVLTF

SEQ ID NO: 89085 - protein, 14 aa, Homo sapiens
  CDR3 for alpha chain variable domain of TCR clone 44543 (TRAV13-1, TRAJ35)
CAASKGGLGNVLHC

SEQ ID NO: 89086 - protein, 12 aa, Homo sapiens
  CDR3 for beta chain variable domain of TCR clone 44543 (TRBV7-8, TRBJ2-7)
CASSLGDREQYF

SEQ ID NO: 89087 - protein, 15 aa, Homo sapiens
  CDR3 for alpha chain variable domain of TCR clone 44544 (TRAV38-2/DV8, TRAJ45)
CAYWDSGGGADGLTF

SEQ ID NO: 89088 - protein, 16 aa, Homo sapiens
  CDR3 for beta chain variable domain of TCR clone 44544 (TRBV19, TRBJ1-1)
CASSPTRFRPGTEAFF

SEQ ID NO: 89089 - protein, 11 aa, Homo sapiens
  CDR3 for alpha chain variable domain of TCR clone 44545 (TRAV16, TRAJ33)
CALHSNYQLIW

SEQ ID NO: 89090 - protein, 15 aa, Homo sapiens
  CDR3 for beta chain variable domain of TCR clone 44545 (TRBV4-1, TRBJ2-7)
CASSQQGQGFDEQYV

SEQ ID NO: 89091 - protein, 12 aa, Homo sapiens
  CDR3 for alpha chain variable domain of TCR clone 44546 (TRAV12-1, TRAJ40)
CVVSSGTYKYIF

SEQ ID NO: 89092 - protein, 14 aa, Homo sapiens
  CDR3 for beta chain variable domain of TCR clone 44546 (TRBV20-1, TRBJ2-2)
CSTPDTANTGELFF

SEQ ID NO: 89093 - protein, 12 aa, Homo sapiens
  CDR3 for alpha chain variable domain of TCR clone 44547 (TRAV23/DV6, TRAJ17)
CARGSCRQQANF

SEQ ID NO: 89094 - protein, 14 aa, Homo sapiens
  CDR3 for beta chain variable domain of TCR clone 44547 (TRBV7-2, TRBJ1-2)
CASGQTGSTYGYTF

SEQ ID NO: 89095 - protein, 18 aa, Homo sapiens
  CDR3 for alpha chain variable domain of TCR clone 44548 (TRAV13-1, TRAJ52)
CAASKRSAGGTSYGKLTF

SEQ ID NO: 89096 - protein, 15 aa, Homo sapiens
  CDR3 for beta chain variable domain of TCR clone 44548 (TRBV20-1, TRBJ2-7)
RSARTPGTITYEQYF

SEQ ID NO: 89097 - protein, 11 aa, Homo sapiens
  CDR3 for alpha chain variable domain of TCR clone 44549 (TRAV2, TRAJ33)
CAVESNYQLIW

SEQ ID NO: 89098 - protein, 15 aa, Homo sapiens
  CDR3 for beta chain variable domain of TCR clone 44549 (TRBV20-1, TRBJ1-4)
QCSGTGLLTNEKLFF

SEQ ID NO: 89099 - protein, 16 aa, Homo sapiens
  CDR3 for alpha chain variable domain of TCR clone 44550 (TRAV3, TRAJ37)
SAVRGKGSGNTGKLIF

SEQ ID NO: 89100 - protein, 15 aa, Homo sapiens
  CDR3 for beta chain variable domain of TCR clone 44550 (TRBV7-9, TRBJ1-6)
CASSSPGRGNSPLHF

SEQ ID NO: 89101 - protein, 15 aa, Homo sapiens
  CDR3 for alpha chain variable domain of TCR clone 44551 (TRAV12-2, TRAJ53)
CAVNGGGGSNYKLTF

SEQ ID NO: 89102 - protein, 13 aa, Homo sapiens
  CDR3 for beta chain variable domain of TCR clone 44551 (TRBV3-1, TRBJ1-1)
CASSPGVITGAFF

SEQ ID NO: 89103 - protein, 15 aa, Homo sapiens
  CDR3 for alpha chain variable domain of TCR clone 44552 (TRAV12-1, TRAJ45)
CVVLSGGGGAAGLTF

SEQ ID NO: 89104 - protein, 14 aa, Homo sapiens
  CDR3 for beta chain variable domain of TCR clone 44552 (TRBV11-2, TRBJ2-5)
CASSRTGGIETQYF

SEQ ID NO: 89105 - protein, 15 aa, Homo sapiens
  CDR3 for alpha chain variable domain of TCR clone 44553 (TRAV8-3, TRAJ11)
CAVGLLNSGYSTLTF

SEQ ID NO: 89106 - protein, 16 aa, Homo sapiens
  CDR3 for beta chain variable domain of TCR clone 44553 (TRBV7-9, TRBJ1-2)
CASSLGFSSGEDGYNF

SEQ ID NO: 89107 - protein, 14 aa, Homo sapiens
  CDR3 for alpha chain variable domain of TCR clone 44554 (TRAV1-2, TRAJ16)
CAVNRFSDGQKLLL

SEQ ID NO: 89108 - protein, 15 aa, Homo sapiens
  CDR3 for beta chain variable domain of TCR clone 44554 (TRBV20-1, TRBJ2-7)
CSARDRVSGMDEQYF

SEQ ID NO: 89109 - protein, 12 aa, Homo sapiens
  CDR3 for alpha chain variable domain of TCR clone 44555 (TRAV20, TRAJ54)
CAVQEGAQKLVF

SEQ ID NO: 89110 - protein, 17 aa, Homo sapiens
  CDR3 for beta chain variable domain of TCR clone 44555 (TRBV13, TRBJ2-3)
CASSLARVAGGRNTQYF

SEQ ID NO: 89111 - protein, 13 aa, Homo sapiens
  CDR3 for alpha chain variable domain of TCR clone 44556 (TRAV12-2, TRAJ40)
CAVKRTGTYKYIF

SEQ ID NO: 89112 - protein, 15 aa, Homo sapiens
  CDR3 for beta chain variable domain of TCR clone 44556 (TRBV12-4, TRBJ1-2)
CASSPITGGGYGYTL

SEQ ID NO: 89113 - protein, 15 aa, Homo sapiens
  CDR3 for alpha chain variable domain of TCR clone 44557 (TRAV13-2, TRAJ24)
CAENSATDSWGKLQF

SEQ ID NO: 89114 - protein, 15 aa, Homo sapiens
  CDR3 for beta chain variable domain of TCR clone 44557 (TRBV2, TRBJ1-5)
CASSVNRPSNQPQHF

SEQ ID NO: 89115 - protein, 18 aa, Homo sapiens
  CDR3 for alpha chain variable domain of TCR clone 44558 (TRAV26-1, TRAJ52)
CIVRVEGAGSTSYGKLTF

SEQ ID NO: 89116 - protein, 13 aa, Homo sapiens
  CDR3 for beta chain variable domain of TCR clone 44558 (TRBV7-3, TRBJ1-2)
CASSLKRGYGYTF

SEQ ID NO: 89117 - protein, 14 aa, Homo sapiens
  CDR3 for alpha chain variable domain of TCR clone 44559 (TRAV13-1, TRAJ44)
CAAKATGTASKLTL

SEQ ID NO: 89118 - protein, 17 aa, Homo sapiens
  CDR3 for beta chain variable domain of TCR clone 44559 (TRBV7-3, TRBJ2-3)
RASSLMKRMRGADTQYF

SEQ ID NO: 89119 - protein, 13 aa, Homo sapiens
  CDR3 for alpha chain variable domain of TCR clone 44560 (TRAV12-3, TRAJ33)
CAMSVNSNYQLIW

SEQ ID NO: 89120 - protein, 13 aa, Homo sapiens
  CDR3 for beta chain variable domain of TCR clone 44560 (TRBV19, TRBJ1-2)
CASSVPGQDGYTF

SEQ ID NO: 89121 - protein, 14 aa, Homo sapiens
  CDR3 for alpha chain variable domain of TCR clone 44561 (TRAV38-1, TRAJ45)
CASHSGGGTDGLTF

SEQ ID NO: 89122 - protein, 13 aa, Homo sapiens
  CDR3 for beta chain variable domain of TCR clone 44561 (TRBV10-3, TRBJ1-2)
CAISERDSYGYTF

SEQ ID NO: 89123 - protein, 12 aa, Homo sapiens
  CDR3 for alpha chain variable domain of TCR clone 44562 (TRAV13-2, TRAJ23)
CAERHRGGKLIF

SEQ ID NO: 89124 - protein, 17 aa, Homo sapiens
  CDR3 for beta chain variable domain of TCR clone 44562 (TRBV20-1, TRBJ2-1)
CSASSSGLAGSYNEQFF

SEQ ID NO: 89125 - protein, 15 aa, Homo sapiens
  CDR3 for alpha chain variable domain of TCR clone 44563 (TRAV2, TRAJ9)
CAVAALNTGGFNTIF

SEQ ID NO: 89126 - protein, 14 aa, Homo sapiens
  CDR3 for beta chain variable domain of TCR clone 44563 (TRBV7-8, TRBJ2-5)
CASSATGGQETQYF

SEQ ID NO: 89127 - protein, 13 aa, Homo sapiens
  CDR3 for alpha chain variable domain of TCR clone 44564 (TRAV13-2, TRAJ49)
CAETLHGGNQFYF

SEQ ID NO: 89128 - protein, 16 aa, Homo sapiens
  CDR3 for beta chain variable domain of TCR clone 44564 (TRBV6-5, TRBJ2-5)
CASSQREGPDRKTQYF

SEQ ID NO: 89129 - protein, 14 aa, Homo sapiens
  CDR3 for alpha chain variable domain of TCR clone 44565 (TRAV1-2, TRAJ29)
CAVRELTSATPLVF

SEQ ID NO: 89130 - protein, 15 aa, Homo sapiens
  CDR3 for beta chain variable domain of TCR clone 44565 (TRBV7-3, TRBJ2-2)
CASSETGQGTGELFF

SEQ ID NO: 89131 - protein, 14 aa, Homo sapiens
  CDR3 for alpha chain variable domain of TCR clone 44566 (TRAV12-3, TRAJ10)
SHLPLTGGGNKLTF

SEQ ID NO: 89132 - protein, 13 aa, Homo sapiens
  CDR3 for beta chain variable domain of TCR clone 44566 (TRBV12-4, TRBJ1-1)
CASSQGTGFEAFF

SEQ ID NO: 89133 - protein, 12 aa, Homo sapiens
  CDR3 for alpha chain variable domain of TCR clone 44567 (TRAV13-1, TRAJ49)
CAASQMGNQFYF

SEQ ID NO: 89134 - protein, 13 aa, Homo sapiens
  CDR3 for beta chain variable domain of TCR clone 44567 (TRBV20-1, TRBJ2-2)
CSASAAGTGELFF

SEQ ID NO: 89135 - protein, 13 aa, Homo sapiens
  CDR3 for alpha chain variable domain of TCR clone 44568 (TRAV2, TRAJ40)
CAVVTSGTYKYIF

SEQ ID NO: 89136 - protein, 16 aa, Homo sapiens
  CDR3 for beta chain variable domain of TCR clone 44568 (TRBV27, TRBJ2-2)
CASSFRGLVRTGELFF

SEQ ID NO: 89137 - protein, 13 aa, Homo sapiens
  CDR3 for alpha chain variable domain of TCR clone 44569 (TRAV12-1, TRAJ34)
CVVTGYNTAKLIF

SEQ ID NO: 89138 - protein, 13 aa, Homo sapiens
  CDR3 for beta chain variable domain of TCR clone 44569 (TRBV28, TRBJ2-7)
CASKAGGVYEQYF

SEQ ID NO: 89139 - protein, 14 aa, Homo sapiens
  CDR3 for alpha chain variable domain of TCR clone 44570 (TRAV13-1, TRAJ24)
CAASRTDSWGKLQF

SEQ ID NO: 89140 - protein, 15 aa, Homo sapiens
  CDR3 for beta chain variable domain of TCR clone 44570 (TRBV7-9, TRBJ1-5)
CASSQGRQPNQPQHF

SEQ ID NO: 89141 - protein, 13 aa, Homo sapiens
  CDR3 for alpha chain variable domain of TCR clone 44571 (TRAV30, TRAJ24)
CGTVTDSWGELQF

SEQ ID NO: 89142 - protein, 14 aa, Homo sapiens
  CDR3 for beta chain variable domain of TCR clone 44571 (TRBV6-3, TRBJ2-2)
CASTYTPDTGELFF

SEQ ID NO: 89143 - protein, 14 aa, Homo sapiens
  CDR3 for alpha chain variable domain of TCR clone 44572 (TRAV8-4, TRAJ37)
CAVSESSNTGKLIF

SEQ ID NO: 89144 - protein, 14 aa, Homo sapiens
  CDR3 for beta chain variable domain of TCR clone 44572 (TRBV28, TRBJ1-2)
CASRIQGANYGYTF

SEQ ID NO: 89145 - protein, 14 aa, Homo sapiens
  CDR3 for alpha chain variable domain of TCR clone 44573 (TRAV1-2, TRAJ16)
CAVNRFSDGQKLLF

SEQ ID NO: 89146 - protein, 15 aa, Homo sapiens
  CDR3 for beta chain variable domain of TCR clone 44573 (TRBV9, TRBJ1-6)
CASSVAGRGDSPLHF

SEQ ID NO: 89147 - protein, 16 aa, Homo sapiens
  CDR3 for alpha chain variable domain of TCR clone 44574 (TRAV26-1, TRAJ37)
CIVRGDGSGNTGKLIF

SEQ ID NO: 89148 - protein, 17 aa, Homo sapiens
  CDR3 for beta chain variable domain of TCR clone 44574 (TRBV4-1, TRBJ2-7)
CASSRDPLGVRGEEQYF

SEQ ID NO: 89149 - protein, 14 aa, Homo sapiens
  CDR3 for alpha chain variable domain of TCR clone 44575 (TRAV12-2, TRAJ3)
CAVSLYSSASKLIF

SEQ ID NO: 89150 - protein, 14 aa, Homo sapiens
  CDR3 for beta chain variable domain of TCR clone 44575 (TRBV27, TRBJ2-1)
CAGSIAETYNEQFF

SEQ ID NO: 89151 - protein, 16 aa, Homo sapiens
  CDR3 for alpha chain variable domain of TCR clone 44576 (TRAV12-3, TRAJ53)
CAMSPGSGGSNYKLTF

SEQ ID NO: 89152 - protein, 15 aa, Homo sapiens
  CDR3 for beta chain variable domain of TCR clone 44576 (TRBV28, TRBJ1-3)
CASSMGWASGNTIYF

SEQ ID NO: 89153 - protein, 13 aa, Homo sapiens
  CDR3 for alpha chain variable domain of TCR clone 44577 (TRAV30, TRAJ24)
CDTVTDSWGKLQF

SEQ ID NO: 89154 - protein, 15 aa, Homo sapiens
  CDR3 for beta chain variable domain of TCR clone 44577 (TRBV25-1, TRBJ1-4)
CASSPGDSTNEKLFF

SEQ ID NO: 89155 - protein, 11 aa, Homo sapiens
  CDR3 for alpha chain variable domain of TCR clone 44578 (TRAV12-1, TRAJ8)
CVVTGFQKLVF

SEQ ID NO: 89156 - protein, 16 aa, Homo sapiens
  CDR3 for beta chain variable domain of TCR clone 44578 (TRBV24-1, TRBJ2-3)
CATSDPGTGATDTQYS

SEQ ID NO: 89157 - protein, 14 aa, Homo sapiens
  CDR3 for alpha chain variable domain of TCR clone 44579 (TRAV8-4, TRAJ17)
CAVSDQAAGNRLTF

SEQ ID NO: 89158 - protein, 15 aa, Homo sapiens
  CDR3 for beta chain variable domain of TCR clone 44579 (TRBV7-2, TRBJ1-2)
CASSLAPDRGLGYTF

SEQ ID NO: 89159 - protein, 14 aa, Homo sapiens
  CDR3 for alpha chain variable domain of TCR clone 44580 (TRAV1-2, TRAJ16)
CAVNRFSDGQKLLF

SEQ ID NO: 89160 - protein, 14 aa, Homo sapiens
  CDR3 for beta chain variable domain of TCR clone 44580 (TRBV19, TRBJ2-1)
CASPTVVLSGEQFF

SEQ ID NO: 89161 - protein, 15 aa, Homo sapiens
  CDR3 for alpha chain variable domain of TCR clone 44581 (TRAV3, TRAJ9)
CAVRARNTGGFKTIF

SEQ ID NO: 89162 - protein, 14 aa, Homo sapiens
  CDR3 for beta chain variable domain of TCR clone 44581 (TRBV7-9, TRBJ2-1)
CASSPRDSLYEQFF

SEQ ID NO: 89163 - protein, 11 aa, Homo sapiens
  CDR3 for alpha chain variable domain of TCR clone 44582 (TRAV2, TRAJ21)
CAVFNFNKFYF

SEQ ID NO: 89164 - protein, 13 aa, Homo sapiens
  CDR3 for beta chain variable domain of TCR clone 44582 (TRBV7-3, TRBJ1-1)
CASSQDWGAEAFF

SEQ ID NO: 89165 - protein, 15 aa, Homo sapiens
  CDR3 for alpha chain variable domain of TCR clone 44583 (TRAV27, TRAJ38)
CAGQFNAGNNRKLIW

SEQ ID NO: 89166 - protein, 13 aa, Homo sapiens
  CDR3 for beta chain variable domain of TCR clone 44583 (TRBV12-5, TRBJ2-3)
CASQNRGTDTQYF

SEQ ID NO: 89167 - protein, 14 aa, Homo sapiens
  CDR3 for alpha chain variable domain of TCR clone 44584 (TRAV2, TRAJ37)
CAVDFTSNTGKLIF

SEQ ID NO: 89168 - protein, 15 aa, Homo sapiens
  CDR3 for beta chain variable domain of TCR clone 44584 (TRBV20-1, TRBJ1-1)
CSASRGVTGNTEAFI

SEQ ID NO: 89169 - protein, 14 aa, Homo sapiens
  CDR3 for alpha chain variable domain of TCR clone 44585 (TRAV35, TRAJ22)
CAGVRPGSARQLTF

SEQ ID NO: 89170 - protein, 15 aa, Homo sapiens
  CDR3 for beta chain variable domain of TCR clone 44585 (TRBV12-4, TRBJ2-5)
CASSPPTGLQETQYF

SEQ ID NO: 89171 - protein, 17 aa, Homo sapiens
  CDR3 for alpha chain variable domain of TCR clone 44586 (TRAV36/DV7, TRAJ52)
CAVAQRAGGTSYGKLTF

SEQ ID NO: 89172 - protein, 14 aa, Homo sapiens
  CDR3 for beta chain variable domain of TCR clone 44586 (TRBV20-1, TRBJ1-1)
CSAQTRVGGTEAFF

SEQ ID NO: 89173 - protein, 14 aa, Homo sapiens
  CDR3 for alpha chain variable domain of TCR clone 44587 (TRAV8-4, TRAJ9)
CAVRINTGGFKTIF

SEQ ID NO: 89174 - protein, 15 aa, Homo sapiens
  CDR3 for beta chain variable domain of TCR clone 44587 (TRBV10-2, TRBJ2-6)
CASSEQGTGANVPTF

SEQ ID NO: 89175 - protein, 13 aa, Homo sapiens
  CDR3 for alpha chain variable domain of TCR clone 44588 (TRAV8-3, TRAJ6)
CAARRGGSYIPTF

SEQ ID NO: 89176 - protein, 15 aa, Homo sapiens
  CDR3 for beta chain variable domain of TCR clone 44588 (TRBV4-1, TRBJ1-4)
CASSDTGGTNEKLFF

SEQ ID NO: 89177 - protein, 14 aa, Homo sapiens
  CDR3 for alpha chain variable domain of TCR clone 44589 (TRAV26-1, TRAJ39)
CIVRGSRAGNMLTF

SEQ ID NO: 89178 - protein, 15 aa, Homo sapiens
  CDR3 for beta chain variable domain of TCR clone 44589 (TRBV7-9, TRBJ1-5)
CASSQSHQPNQPQHF

SEQ ID NO: 89179 - protein, 13 aa, Homo sapiens
  CDR3 for alpha chain variable domain of TCR clone 44590 (TRAV17, TRAJ26)
CATVNNYGQNFVF

SEQ ID NO: 89180 - protein, 13 aa, Homo sapiens
  CDR3 for beta chain variable domain of TCR clone 44590 (TRBV14, TRBJ1-1)
CASSREFGTEAFF

SEQ ID NO: 89181 - protein, 12 aa, Homo sapiens
  CDR3 for alpha chain variable domain of TCR clone 44591 (TRAV12-2, TRAJ52)
IGGGTSYGKLTF

SEQ ID NO: 89182 - protein, 12 aa, Homo sapiens
  CDR3 for beta chain variable domain of TCR clone 44591 (TRBV12-4, TRBJ1-1)
CQQSGTGFEAFF

SEQ ID NO: 89183 - protein, 13 aa, Homo sapiens
  CDR3 for alpha chain variable domain of TCR clone 44592 (TRAV8-3, TRAJ43)
CAVGPDNNSDMRF

SEQ ID NO: 89184 - protein, 13 aa, Homo sapiens
  CDR3 for beta chain variable domain of TCR clone 44592 (TRBV29-1, TRBJ2-1)
CSVEGGRVNEQFF

SEQ ID NO: 89185 - protein, 13 aa, Homo sapiens
  CDR3 for alpha chain variable domain of TCR clone 44593 (TRAV1-2, TRAJ9)
CAALNTGGFKTIF

SEQ ID NO: 89186 - protein, 15 aa, Homo sapiens
  CDR3 for beta chain variable domain of TCR clone 44593 (TRBV24-1, TRBJ2-1)
CATSGSGGFYNEQSF

SEQ ID NO: 89187 - protein, 18 aa, Homo sapiens
  CDR3 for alpha chain variable domain of TCR clone 44594 (TRAV12-3, TRAJ52)
CAMSVGGADGTSYGKLTF

SEQ ID NO: 89188 - protein, 14 aa, Homo sapiens
  CDR3 for beta chain variable domain of TCR clone 44594 (TRBV7-2, TRBJ2-7)
CASRSQGAAYEQHF

SEQ ID NO: 89189 - protein, 13 aa, Homo sapiens
  CDR3 for alpha chain variable domain of TCR clone 44595 (TRAV27, TRAJ41)
CAGEGNSGYALNF

SEQ ID NO: 89190 - protein, 14 aa, Homo sapiens
  CDR3 for beta chain variable domain of TCR clone 44595 (TRBV7-2, TRBJ1-1)
CASSFLTGTTGAFF

SEQ ID NO: 89191 - protein, 13 aa, Homo sapiens
  CDR3 for alpha chain variable domain of TCR clone 44596 (TRAV2, TRAJ40)
CAVVTSGTYKYIF

SEQ ID NO: 89192 - protein, 15 aa, Homo sapiens
  CDR3 for beta chain variable domain of TCR clone 44596 (TRBV6-3, TRBJ2-7)
CASSSPGTVFYEQYS

SEQ ID NO: 89193 - protein, 12 aa, Homo sapiens
  CDR3 for alpha chain variable domain of TCR clone 44597 (TRAV23/DV6, TRAJ30)
CAASKGDDKNIF

SEQ ID NO: 89194 - protein, 18 aa, Homo sapiens
  CDR3 for beta chain variable domain of TCR clone 44597 (TRBV10-3, TRBJ2-3)
CAISESRVGPMRGDTQYF

SEQ ID NO: 89195 - protein, 15 aa, Homo sapiens
  CDR3 for alpha chain variable domain of TCR clone 44598 (TRAV23/DV6, TRAJ13)
CAAWPGGGGYPKVTF

SEQ ID NO: 89196 - protein, 17 aa, Homo sapiens
  CDR3 for beta chain variable domain of TCR clone 44598 (TRBV19, TRBJ2-7)
CASSISFYDSYPYEQYF

SEQ ID NO: 89197 - protein, 11 aa, Homo sapiens
  CDR3 for alpha chain variable domain of TCR clone 44599 (TRAV17, TRAJ9)
CGFTGGFKTIF

SEQ ID NO: 89198 - protein, 18 aa, Homo sapiens
  CDR3 for beta chain variable domain of TCR clone 44599 (TRBV12-4, TRBJ2-2)
CASSLVADTRGRTGELFF

SEQ ID NO: 89199 - protein, 14 aa, Homo sapiens
  CDR3 for alpha chain variable domain of TCR clone 44600 (TRAV26-1, TRAJ45)
CIEVTGGGADGLTF

SEQ ID NO: 89200 - protein, 12 aa, Homo sapiens
  CDR3 for beta chain variable domain of TCR clone 44600 (TRBV12-4, TRBJ2-7)
CASSVGGYEQYF

SEQ ID NO: 89201 - protein, 11 aa, Homo sapiens
  CDR3 for alpha chain variable domain of TCR clone 44601 (TRAV39, TRAJ49)
CAMDISTQFYF

SEQ ID NO: 89202 - protein, 11 aa, Homo sapiens
  CDR3 for beta chain variable domain of TCR clone 44601 (TRBV7-8, TRBJ2-7)
CASSLSLEQYF

SEQ ID NO: 89203 - protein, 11 aa, Homo sapiens
  CDR3 for alpha chain variable domain of TCR clone 44602 (TRAV35, TRAJ34)
CWARNTDKLIF

SEQ ID NO: 89204 - protein, 14 aa, Homo sapiens
  CDR3 for beta chain variable domain of TCR clone 44602 (TRBV7-2, TRBJ2-7)
CASSPKTSFYEQYF

SEQ ID NO: 89205 - protein, 14 aa, Homo sapiens
  CDR3 for alpha chain variable domain of TCR clone 44603 (TRAV12-2, TRAJ45)
CAVNIGGGADGLTF

SEQ ID NO: 89206 - protein, 13 aa, Homo sapiens
  CDR3 for beta chain variable domain of TCR clone 44603 (TRBV19, TRBJ2-2)
CTSSIWSTGELFF

SEQ ID NO: 89207 - protein, 15 aa, Homo sapiens
  CDR3 for alpha chain variable domain of TCR clone 44604 (TRAV3, TRAJ20)
CAVRDIKLSDYKLSF

SEQ ID NO: 89208 - protein, 13 aa, Homo sapiens
  CDR3 for beta chain variable domain of TCR clone 44604 (TRBV20-1, TRBJ1-1)
CSARAGGNTEAFF

SEQ ID NO: 89209 - protein, 15 aa, Homo sapiens
  CDR3 for alpha chain variable domain of TCR clone 44605 (TRAV16, TRAJ16)
FALQGGGSDGQKLLF

SEQ ID NO: 89210 - protein, 15 aa, Homo sapiens
  CDR3 for beta chain variable domain of TCR clone 44605 (TRBV20-1, TRBJ2-7)
CSARDRVSGMDEQYF

SEQ ID NO: 89211 - protein, 16 aa, Homo sapiens
  CDR3 for alpha chain variable domain of TCR clone 44606 (TRAV30, TRAJ24)
CGTEIVDADSWGKFQF

SEQ ID NO: 89212 - protein, 15 aa, Homo sapiens
  CDR3 for beta chain variable domain of TCR clone 44606 (TRBV29-1, TRBJ2-7)
CSVEFFDRGSYEQYF

SEQ ID NO: 89213 - protein, 14 aa, Homo sapiens
  CDR3 for alpha chain variable domain of TCR clone 44607 (TRAV12-2, TRAJ13)
CAVKKTGGYQKVTL

SEQ ID NO: 89214 - protein, 15 aa, Homo sapiens
  CDR3 for beta chain variable domain of TCR clone 44607 (TRBV28, TRBJ2-5)
CASSPPWSYQETQYF

SEQ ID NO: 89215 - protein, 13 aa, Homo sapiens
  CDR3 for alpha chain variable domain of TCR clone 44608 (TRAV21, TRAJ27)
CAARPGNAGKSTF

SEQ ID NO: 89216 - protein, 13 aa, Homo sapiens
  CDR3 for beta chain variable domain of TCR clone 44608 (TRBV12-4, TRBJ1-1)
CASSPGTGFEAFF

SEQ ID NO: 89217 - protein, 16 aa, Homo sapiens
  CDR3 for alpha chain variable domain of TCR clone 44609 (TRAV30, TRAJ24)
CGTEIVDADSWGKFPF

SEQ ID NO: 89218 - protein, 14 aa, Homo sapiens
  CDR3 for beta chain variable domain of TCR clone 44609 (TRBV13, TRBJ2-1)
CASSPRPRYNEQFF

SEQ ID NO: 89219 - protein, 12 aa, Homo sapiens
  CDR3 for alpha chain variable domain of TCR clone 44610 (TRAV2, TRAJ3)
CAVRSSASKIIL

SEQ ID NO: 89220 - protein, 15 aa, Homo sapiens
  CDR3 for beta chain variable domain of TCR clone 44610 (TRBV15, TRBJ2-5)
CATSRDGGPQGTQYF

SEQ ID NO: 89221 - protein, 19 aa, Homo sapiens
  CDR3 for alpha chain variable domain of TCR clone 44611 (TRAV8-4, )
CAGGGDIQNPDPAVYQLRD

SEQ ID NO: 89222 - protein, 15 aa, Homo sapiens
  CDR3 for beta chain variable domain of TCR clone 44611 (TRBV7-2, TRBJ2-1)
CASRKTGSSYNEQFF

SEQ ID NO: 89223 - protein, 14 aa, Homo sapiens
  CDR3 for alpha chain variable domain of TCR clone 44612 (TRAV6, TRAJ40)
CALDTTSGTYKYIF

SEQ ID NO: 89224 - protein, 16 aa, Homo sapiens
  CDR3 for beta chain variable domain of TCR clone 44612 (TRBV7-8, TRBJ2-5)
CASSPAGGRNQETQYF

SEQ ID NO: 89225 - protein, 12 aa, Homo sapiens
  CDR3 for alpha chain variable domain of TCR clone 44613 (TRAV2, TRAJ9)
CAVGAGGFKTIF

SEQ ID NO: 89226 - protein, 14 aa, Homo sapiens
  CDR3 for beta chain variable domain of TCR clone 44613 (TRBV19, TRBJ2-2)
CASSTLHRSGELFF

SEQ ID NO: 89227 - protein, 14 aa, Homo sapiens
  CDR3 for alpha chain variable domain of TCR clone 44614 (TRAV12-1, TRAJ9)
CVVNGRTGGFKTIF

SEQ ID NO: 89228 - protein, 16 aa, Homo sapiens
  CDR3 for beta chain variable domain of TCR clone 44614 (TRBV4-1, TRBJ2-3)
CASSQSTSGAEDTQYF

SEQ ID NO: 89229 - protein, 13 aa, Homo sapiens
  CDR3 for alpha chain variable domain of TCR clone 44615 (TRAV12-2, TRAJ18)
CAVRGSTLGRLYF

SEQ ID NO: 89230 - protein, 20 aa, Homo sapiens
  CDR3 for beta chain variable domain of TCR clone 44615 (TRBV7-8, TRBJ2-2)
CASSHLFPGPTIHITGELSF

SEQ ID NO: 89231 - protein, 17 aa, Homo sapiens
  CDR3 for alpha chain variable domain of TCR clone 44616 (TRAV8-6, TRAJ8)
CAVKEGIENTCFQKLVF

SEQ ID NO: 89232 - protein, 12 aa, Homo sapiens
  CDR3 for beta chain variable domain of TCR clone 44616 (TRBV19, TRBJ1-4)
CASKDWPGGLFF

SEQ ID NO: 89233 - protein, 13 aa, Homo sapiens
  CDR3 for alpha chain variable domain of TCR clone 44617 (TRAV27, TRAJ29)
CAGAHSGNTPLVF

SEQ ID NO: 89234 - protein, 19 aa, Homo sapiens
  CDR3 for beta chain variable domain of TCR clone 44617 (TRBV4-1, TRBJ2-7)
CASSPVAGGGRAVLRAGHQ

SEQ ID NO: 89235 - protein, 15 aa, Homo sapiens
  CDR3 for alpha chain variable domain of TCR clone 44618 (TRAV4, TRAJ39)
CLVGPNNNAGNMLTF

SEQ ID NO: 89236 - protein, 13 aa, Homo sapiens
  CDR3 for beta chain variable domain of TCR clone 44618 (TRBV11-2, TRBJ2-5)
CARSSTGEETQYF

SEQ ID NO: 89237 - protein, 14 aa, Homo sapiens
  CDR3 for alpha chain variable domain of TCR clone 44619 (TRAV25, TRAJ9)
CAGPGNTGGFKTIF

SEQ ID NO: 89238 - protein, 15 aa, Homo sapiens
  CDR3 for beta chain variable domain of TCR clone 44619 (TRBV11-2, TRBJ1-2)
CASSLEGVQRNGYTF

SEQ ID NO: 89239 - protein, 12 aa, Homo sapiens
  CDR3 for alpha chain variable domain of TCR clone 44620 (TRAV12-3, TRAJ40)
CAMSSGTYKYIF

SEQ ID NO: 89240 - protein, 15 aa, Homo sapiens
  CDR3 for beta chain variable domain of TCR clone 44620 (TRBV7-3, TRBJ2-2)
CASSETGQGTGELFS

SEQ ID NO: 89241 - protein, 11 aa, Homo sapiens
  CDR3 for alpha chain variable domain of TCR clone 44621 (TRAV3, TRAJ21)
CAVGNFNKFYF

SEQ ID NO: 89242 - protein, 16 aa, Homo sapiens
  CDR3 for beta chain variable domain of TCR clone 44621 (TRBV19, TRBJ2-1)
CASSKAGPSSYNVQFF

SEQ ID NO: 89243 - protein, 14 aa, Homo sapiens
  CDR3 for alpha chain variable domain of TCR clone 44622 (TRAV21, TRAJ12)
CAVRNGDSSYKLIF

SEQ ID NO: 89244 - protein, 14 aa, Homo sapiens
  CDR3 for beta chain variable domain of TCR clone 44622 (TRBV7-7, TRBJ2-7)
CASSLTGTGNEQYF

SEQ ID NO: 89245 - protein, 14 aa, Homo sapiens
  CDR3 for alpha chain variable domain of TCR clone 44623 (TRAV20, TRAJ42)
CAVQAGGSQVNLIF

SEQ ID NO: 89246 - protein, 14 aa, Homo sapiens
  CDR3 for beta chain variable domain of TCR clone 44623 (TRBV28, TRBJ1-2)
CASRIQGANYGYTF

SEQ ID NO: 89247 - protein, 13 aa, Homo sapiens
  CDR3 for alpha chain variable domain of TCR clone 44624 (TRAV12-3, TRAJ7)
CAMSASGNNRLAF

SEQ ID NO: 89248 - protein, 14 aa, Homo sapiens
  CDR3 for beta chain variable domain of TCR clone 44624 (TRBV13, TRBJ2-5)
CASSLGPRGETQFF

SEQ ID NO: 89249 - protein, 12 aa, Homo sapiens
  CDR3 for alpha chain variable domain of TCR clone 44625 (TRAV13-1, TRAJ21)
CAAKEGSNRFYF

SEQ ID NO: 89250 - protein, 15 aa, Homo sapiens
  CDR3 for beta chain variable domain of TCR clone 44625 (TRBV25-1, TRBJ1-4)
CASSPGDSTNEKLFF

SEQ ID NO: 89251 - protein, 10 aa, Homo sapiens
  CDR3 for alpha chain variable domain of TCR clone 44626 (TRAV1-2, TRAJ20)
CALNDYKLSF

SEQ ID NO: 89252 - protein, 16 aa, Homo sapiens
  CDR3 for beta chain variable domain of TCR clone 44626 (TRBV20-1, TRBJ1-1)
CGARALTQGMNTEAFF

SEQ ID NO: 89253 - protein, 13 aa, Homo sapiens
  CDR3 for alpha chain variable domain of TCR clone 44627 (TRAV27, TRAJ29)
CAGAHSGNTPLVF

SEQ ID NO: 89254 - protein, 14 aa, Homo sapiens
  CDR3 for beta chain variable domain of TCR clone 44627 (TRBV7-9, TRBJ2-7)
CASSIGQGAGEKYF

SEQ ID NO: 89255 - protein, 14 aa, Homo sapiens
  CDR3 for alpha chain variable domain of TCR clone 44628 (TRAV12-2, TRAJ13)
CAVKKTGGYQKVTL

SEQ ID NO: 89256 - protein, 15 aa, Homo sapiens
  CDR3 for beta chain variable domain of TCR clone 44628 (TRBV2, TRBJ2-1)
CQPEPSGGKYNEQFF

SEQ ID NO: 89257 - protein, 12 aa, Homo sapiens
  CDR3 for alpha chain variable domain of TCR clone 44629 (TRAV3, TRAJ31)
CAVRDGNARLIF

SEQ ID NO: 89258 - protein, 18 aa, Homo sapiens
  CDR3 for beta chain variable domain of TCR clone 44629 (TRBV7-2, TRBJ2-3)
CASSLKREGSGITDTQYF

SEQ ID NO: 89259 - protein, 14 aa, Homo sapiens
  CDR3 for alpha chain variable domain of TCR clone 44630 (TRAV13-2, TRAJ43)
CAEIPTYNNNDMRF

SEQ ID NO: 89260 - protein, 15 aa, Homo sapiens
  CDR3 for beta chain variable domain of TCR clone 44630 (TRBV7-9, TRBJ2-2)
RASGPLDTFPGELFF

SEQ ID NO: 89261 - protein, 12 aa, Homo sapiens
  CDR3 for alpha chain variable domain of TCR clone 44631 (TRAV12-3, TRAJ20)
CAMVRGDYKLSF

SEQ ID NO: 89262 - protein, 14 aa, Homo sapiens
  CDR3 for beta chain variable domain of TCR clone 44631 (TRBV7-6, TRBJ2-3)
CASSLGTVTDTQYF

SEQ ID NO: 89263 - protein, 11 aa, Homo sapiens
  CDR3 for alpha chain variable domain of TCR clone 44632 (TRAV3, TRAJ21)
CAVGNFNKFYF

SEQ ID NO: 89264 - protein, 16 aa, Homo sapiens
  CDR3 for beta chain variable domain of TCR clone 44632 (TRBV9, TRBJ2-2)
CASSAMGKGNTGELFL

SEQ ID NO: 89265 - protein, 13 aa, Homo sapiens
  CDR3 for alpha chain variable domain of TCR clone 44633 (TRAV13-1, TRAJ5)
CAASETGRRALTF

SEQ ID NO: 89266 - protein, 12 aa, Homo sapiens
  CDR3 for beta chain variable domain of TCR clone 44633 (TRBV28, TRBJ2-3)
CASSLYRDTQYF

SEQ ID NO: 89267 - protein, 13 aa, Homo sapiens
  CDR3 for alpha chain variable domain of TCR clone 44634 (TRAV12-1, TRAJ22)
CVVPSGSARQLTF

SEQ ID NO: 89268 - protein, 15 aa, Homo sapiens
  CDR3 for beta chain variable domain of TCR clone 44634 (TRBV11-3, TRBJ2-7)
CANSPGPASSYEQYF

SEQ ID NO: 89269 - protein, 18 aa, Homo sapiens
  CDR3 for alpha chain variable domain of TCR clone 44635 (TRAV21, TRAJ52)
CAVTPSPAGGTSYGKLTF

SEQ ID NO: 89270 - protein, 17 aa, Homo sapiens
  CDR3 for beta chain variable domain of TCR clone 44635 (TRBV13, TRBJ2-3)
CASSLSRVAGGRNTQYF

SEQ ID NO: 89271 - protein, 14 aa, Homo sapiens
  CDR3 for alpha chain variable domain of TCR clone 44636 (TRAV26-1, TRAJ38)
CIADNAGNNRKLIW

SEQ ID NO: 89272 - protein, 15 aa, Homo sapiens
  CDR3 for beta chain variable domain of TCR clone 44636 (TRBV7-3, TRBJ2-1)
CASSPTGGGEVEQFF

SEQ ID NO: 89273 - protein, 21 aa, Homo sapiens
  CDR3 for alpha chain variable domain of TCR clone 44637 (TRAV16, TRAJ22)
HLKKPFAQEEDSGMYLRQLTF

SEQ ID NO: 89274 - protein, 15 aa, Homo sapiens
  CDR3 for beta chain variable domain of TCR clone 44637 (TRBV7-9, TRBJ1-6)
CASSSPGRGNSPLHF

SEQ ID NO: 89275 - protein, 15 aa, Homo sapiens
  CDR3 for alpha chain variable domain of TCR clone 44638 (TRAV2, TRAJ9)
CAVAALNTGGLKTIF

SEQ ID NO: 89276 - protein, 14 aa, Homo sapiens
  CDR3 for beta chain variable domain of TCR clone 44638 (TRBV7-8, TRBJ2-5)
CASSATGGQETQYF

SEQ ID NO: 89277 - protein, 13 aa, Homo sapiens
  CDR3 for alpha chain variable domain of TCR clone 44639 (TRAV29/DV5, TRAJ33)
CAAGVESNYRLIW

SEQ ID NO: 89278 - protein, 14 aa, Homo sapiens
  CDR3 for beta chain variable domain of TCR clone 44639 (TRBV11-2, TRBJ2-5)
CASSRTGGIETQYF

SEQ ID NO: 89279 - protein, 12 aa, Homo sapiens
  CDR3 for alpha chain variable domain of TCR clone 44640 (TRAV8-3, TRAJ26)
CAGDNYGQNFVF

SEQ ID NO: 89280 - protein, 14 aa, Homo sapiens
  CDR3 for beta chain variable domain of TCR clone 44640 (TRBV4-1, TRBJ2-2)
CASSQAVNTGELFF

SEQ ID NO: 89281 - protein, 14 aa, Homo sapiens
  CDR3 for alpha chain variable domain of TCR clone 44641 (TRAV22, TRAJ6)
CAGVGPGGSYIPTF

SEQ ID NO: 89282 - protein, 14 aa, Homo sapiens
  CDR3 for beta chain variable domain of TCR clone 44641 (TRBV7-2, TRBJ2-7)
CASRSQGAAYEQYF

SEQ ID NO: 89283 - protein, 15 aa, Homo sapiens
  CDR3 for alpha chain variable domain of TCR clone 44642 (TRAV35, TRAJ58)
CAGRRQETSGSRLTF

SEQ ID NO: 89284 - protein, 11 aa, Homo sapiens
  CDR3 for beta chain variable domain of TCR clone 44642 (TRBV11-2, TRBJ1-1)
RASSINTEAFF

SEQ ID NO: 89285 - protein, 15 aa, Homo sapiens
  CDR3 for alpha chain variable domain of TCR clone 44643 (TRAV3, TRAJ20)
CAVRDIKLSDYELSF

SEQ ID NO: 89286 - protein, 15 aa, Homo sapiens
  CDR3 for beta chain variable domain of TCR clone 44643 (TRBV7-9, TRBJ1-6)
CASSSPGRGNSPLHF

SEQ ID NO: 89287 - protein, 15 aa, Homo sapiens
  CDR3 for alpha chain variable domain of TCR clone 44644 (TRAV17, TRAJ52)
CATEAGGTSYGKLTF

SEQ ID NO: 89288 - protein, 14 aa, Homo sapiens
  CDR3 for beta chain variable domain of TCR clone 44644 (TRBV28, TRBJ1-5)
CASSSGVLVKPQHF

SEQ ID NO: 89289 - protein, 15 aa, Homo sapiens
  CDR3 for alpha chain variable domain of TCR clone 44645 (TRAV25, TRAJ52)
CAGRPGGTSYGKLTF

SEQ ID NO: 89290 - protein, 15 aa, Homo sapiens
  CDR3 for beta chain variable domain of TCR clone 44645 (TRBV7-2, TRBJ2-1)
CASSLVAGRYNEQFF

SEQ ID NO: 89291 - protein, 13 aa, Homo sapiens
  CDR3 for alpha chain variable domain of TCR clone 44646 (TRAV3, TRAJ29)
CAVRDWGDTPLVF

SEQ ID NO: 89292 - protein, 15 aa, Homo sapiens
  CDR3 for beta chain variable domain of TCR clone 44646 (TRBV12-4, TRBJ2-5)
CASIGRTGEGETQYF

SEQ ID NO: 89293 - protein, 13 aa, Homo sapiens
  CDR3 for alpha chain variable domain of TCR clone 44647 (TRAV2, TRAJ40)
CAVVTLGTYKYIF

SEQ ID NO: 89294 - protein, 14 aa, Homo sapiens
  CDR3 for beta chain variable domain of TCR clone 44647 (TRBV19, TRBJ2-1)
CASPAFVLSGEQFF

SEQ ID NO: 89295 - protein, 15 aa, Homo sapiens
  CDR3 for alpha chain variable domain of TCR clone 44648 (TRAV26-1, TRAJ29)
CIVRVEGSGNTPLVF

SEQ ID NO: 89296 - protein, 18 aa, Homo sapiens
  CDR3 for beta chain variable domain of TCR clone 44648 (TRBV11-2, TRBJ2-3)
CASSLGGASRGAPNTQYF

SEQ ID NO: 89297 - protein, 15 aa, Homo sapiens
  CDR3 for alpha chain variable domain of TCR clone 44649 (TRAV1-2, TRAJ30)
CSVRPHGNRDDKIIF

SEQ ID NO: 89298 - protein, 13 aa, Homo sapiens
  CDR3 for beta chain variable domain of TCR clone 44649 (TRBV4-1, TRBJ2-7)
CASSQGQAYEQYF

SEQ ID NO: 89299 - protein, 15 aa, Homo sapiens
  CDR3 for alpha chain variable domain of TCR clone 44650 (TRAV26-1, TRAJ15)
CIVRAANQEGTALIF

SEQ ID NO: 89300 - protein, 15 aa, Homo sapiens
  CDR3 for beta chain variable domain of TCR clone 44650 (TRBV20-1, TRBJ1-1)
CSARSAATSNTEAFF

SEQ ID NO: 89301 - protein, 16 aa, Homo sapiens
  CDR3 for alpha chain variable domain of TCR clone 44651 (TRAV4, TRAJ22)
CLVGDLYSGSARQLTF

SEQ ID NO: 89302 - protein, 16 aa, Homo sapiens
  CDR3 for beta chain variable domain of TCR clone 44651 (TRBV7-9, TRBJ2-3)
CASSPWREVGTNTQYF

SEQ ID NO: 89303 - protein, 13 aa, Homo sapiens
  CDR3 for alpha chain variable domain of TCR clone 44652 (TRAV12-1, TRAJ7)
CVVNMRGNNRLAF

SEQ ID NO: 89304 - protein, 15 aa, Homo sapiens
  CDR3 for beta chain variable domain of TCR clone 44652 (TRBV27, TRBJ2-3)
CASSLGLVATDTQYF

SEQ ID NO: 89305 - protein, 21 aa, Homo sapiens
  CDR3 for alpha chain variable domain of TCR clone 44653 (TRAV1-1, TRAJ6)
CLLLLRCERLERTGGSYIPTF

SEQ ID NO: 89306 - protein, 13 aa, Homo sapiens
  CDR3 for beta chain variable domain of TCR clone 44653 (TRBV10-2, TRBJ2-7)
CDSGASGGYEQYF

SEQ ID NO: 89307 - protein, 15 aa, Homo sapiens
  CDR3 for alpha chain variable domain of TCR clone 44654 (TRAV3, TRAJ22)
CAVRDRGDSARQLTF

SEQ ID NO: 89308 - protein, 13 aa, Homo sapiens
  CDR3 for beta chain variable domain of TCR clone 44654 (TRBV12-4, TRBJ1-2)
CASSLRQGKGYTF

SEQ ID NO: 89309 - protein, 13 aa, Homo sapiens
  CDR3 for alpha chain variable domain of TCR clone 44655 (TRAV30, TRAJ6)
CGTEAGGSYIPTF

SEQ ID NO: 89310 - protein, 12 aa, Homo sapiens
  CDR3 for beta chain variable domain of TCR clone 44655 (TRBV11-2, TRBJ2-1)
CASSPGNNEQFF

SEQ ID NO: 89311 - protein, 14 aa, Homo sapiens
  CDR3 for alpha chain variable domain of TCR clone 44656 (TRAV27, TRAJ36)
CAGPPKRGANNLFF

SEQ ID NO: 89312 - protein, 15 aa, Homo sapiens
  CDR3 for beta chain variable domain of TCR clone 44656 (TRBV18, TRBJ2-7)
CASSPSSTPNYEQYF

SEQ ID NO: 89313 - protein, 14 aa, Homo sapiens
  CDR3 for alpha chain variable domain of TCR clone 44657 (TRAV12-3, TRAJ10)
SHLPLTGGGNKLTF

SEQ ID NO: 89314 - protein, 13 aa, Homo sapiens
  CDR3 for beta chain variable domain of TCR clone 44657 (TRBV9, TRBJ2-1)
RASSPSGGNEQFF

SEQ ID NO: 89315 - protein, 14 aa, Homo sapiens
  CDR3 for alpha chain variable domain of TCR clone 44658 (TRAV17, TRAJ39)
CATDPVRAGHMLTF

SEQ ID NO: 89316 - protein, 15 aa, Homo sapiens
  CDR3 for beta chain variable domain of TCR clone 44658 (TRBV13, TRBJ1-5)
CASSFGQGGVQPQHF

SEQ ID NO: 89317 - protein, 13 aa, Homo sapiens
  CDR3 for alpha chain variable domain of TCR clone 44659 (TRAV2, TRAJ36)
CAVDQTGASNLFF

SEQ ID NO: 89318 - protein, 12 aa, Homo sapiens
  CDR3 for beta chain variable domain of TCR clone 44659 (TRBV19, TRBJ1-1)
CASMNRYTEAFF

SEQ ID NO: 89319 - protein, 15 aa, Homo sapiens
  CDR3 for alpha chain variable domain of TCR clone 44660 (TRAV14/DV4, TRAJ12)
CAMREERDSSYKLIF

SEQ ID NO: 89320 - protein, 16 aa, Homo sapiens
  CDR3 for beta chain variable domain of TCR clone 44660 (TRBV9, TRBJ1-2)
CASSVELGGTGYGYTF

SEQ ID NO: 89321 - protein, 12 aa, Homo sapiens
  CDR3 for alpha chain variable domain of TCR clone 44661 (TRAV16, TRAJ10)
CSRTGGGNKLTF

SEQ ID NO: 89322 - protein, 15 aa, Homo sapiens
  CDR3 for beta chain variable domain of TCR clone 44661 (TRBV6-3, TRBJ2-7)
FASSSPGTVFYEQYF

SEQ ID NO: 89323 - protein, 14 aa, Homo sapiens
  CDR3 for alpha chain variable domain of TCR clone 44662 (TRAV35, TRAJ44)
CAGRPSRTASKLTF

SEQ ID NO: 89324 - protein, 15 aa, Homo sapiens
  CDR3 for beta chain variable domain of TCR clone 44662 (TRBV29-1, TRBJ2-1)
CSVGRHALFYNEQFF

SEQ ID NO: 89325 - protein, 14 aa, Homo sapiens
  CDR3 for alpha chain variable domain of TCR clone 44663 (TRAV27, TRAJ36)
CAGPPKRGANNLFL

SEQ ID NO: 89326 - protein, 15 aa, Homo sapiens
  CDR3 for beta chain variable domain of TCR clone 44663 (TRBV18, TRBJ2-7)
CASSPASTPNYEQYF

SEQ ID NO: 89327 - protein, 16 aa, Homo sapiens
  CDR3 for alpha chain variable domain of TCR clone 44664 (TRAV3, TRAJ10)
CAVRDMRAGGGNKLTF

SEQ ID NO: 89328 - protein, 13 aa, Homo sapiens
  CDR3 for beta chain variable domain of TCR clone 44664 (TRBV2, TRBJ1-1)
CASSEGGNTEAFF

SEQ ID NO: 89329 - protein, 12 aa, Homo sapiens
  CDR3 for alpha chain variable domain of TCR clone 44665 (TRAV16, TRAJ10)
CSRTGGGNKLTF

SEQ ID NO: 89330 - protein, 14 aa, Homo sapiens
  CDR3 for beta chain variable domain of TCR clone 44665 (TRBV7-3, TRBJ2-1)
CASSLAGGTNEQFF

SEQ ID NO: 89331 - protein, 15 aa, Homo sapiens
  CDR3 for alpha chain variable domain of TCR clone 44666 (TRAV26-1, TRAJ29)
CIVRVGGSGNTPLVF

SEQ ID NO: 89332 - protein, 14 aa, Homo sapiens
  CDR3 for beta chain variable domain of TCR clone 44666 (TRBV25-1, TRBJ1-1)
CASTHLGGNTEAFF

SEQ ID NO: 89333 - protein, 12 aa, Homo sapiens
  CDR3 for alpha chain variable domain of TCR clone 44667 (TRAV12-3, TRAJ17)
CAMTLTGNKLTF

SEQ ID NO: 89334 - protein, 15 aa, Homo sapiens
  CDR3 for beta chain variable domain of TCR clone 44667 (TRBV20-1, TRBJ2-7)
CSVRDRVSGVDEQYF

SEQ ID NO: 89335 - protein, 13 aa, Homo sapiens
  CDR3 for alpha chain variable domain of TCR clone 44668 (TRAV3, TRAJ36)
CAVRDTGANNPFF

SEQ ID NO: 89336 - protein, 15 aa, Homo sapiens
  CDR3 for beta chain variable domain of TCR clone 44668 (TRBV24-1, TRBJ2-1)
CATSGSGGFYNEQFF

SEQ ID NO: 89337 - protein, 21 aa, Homo sapiens
  CDR3 for alpha chain variable domain of TCR clone 44669 (TRAV27, TRAJ38)
CAARRNAGNNHIQNPDPAVYQ

SEQ ID NO: 89338 - protein, 13 aa, Homo sapiens
  CDR3 for beta chain variable domain of TCR clone 44669 (TRBV7-9, TRBJ1-2)
CASSLKQNYGYTF

SEQ ID NO: 89339 - protein, 15 aa, Homo sapiens
  CDR3 for alpha chain variable domain of TCR clone 44670 (TRAV21, TRAJ53)
CATLNSGGSNYKLTF

SEQ ID NO: 89340 - protein, 15 aa, Homo sapiens
  CDR3 for beta chain variable domain of TCR clone 44670 (TRBV19, TRBJ1-6)
CASSTQGAVGSPLHF

SEQ ID NO: 89341 - protein, 13 aa, Homo sapiens
  CDR3 for alpha chain variable domain of TCR clone 44671 (TRAV2, TRAJ21)
CAVEDLKFNKFYF

SEQ ID NO: 89342 - protein, 15 aa, Homo sapiens
  CDR3 for beta chain variable domain of TCR clone 44671 (TRBV28, TRBJ2-5)
CASSPGQGSIETQYF

SEQ ID NO: 89343 - protein, 16 aa, Homo sapiens
  CDR3 for alpha chain variable domain of TCR clone 44672 (TRAV26-1, TRAJ36)
CIVRAIGRAGANNLFF

SEQ ID NO: 89344 - protein, 14 aa, Homo sapiens
  CDR3 for beta chain variable domain of TCR clone 44672 (TRBV25-1, TRBJ2-1)
CASSKTGGYNEQFF

SEQ ID NO: 89345 - protein, 13 aa, Homo sapiens
  CDR3 for alpha chain variable domain of TCR clone 44673 (TRAV3, TRAJ29)
CAVRDIIDTPLVF

SEQ ID NO: 89346 - protein, 14 aa, Homo sapiens
  CDR3 for beta chain variable domain of TCR clone 44673 (TRBV4-1, TRBJ2-2)
CASSQAVNTGELFF

SEQ ID NO: 89347 - protein, 13 aa, Homo sapiens
  CDR3 for alpha chain variable domain of TCR clone 44674 (TRAV13-1, TRAJ21)
CAASIYNFNKFYF

SEQ ID NO: 89348 - protein, 16 aa, Homo sapiens
  CDR3 for beta chain variable domain of TCR clone 44674 (TRBV11-3, TRBJ2-2)
CASSLRTGNLIGELFF

SEQ ID NO: 89349 - protein, 13 aa, Homo sapiens
  CDR3 for alpha chain variable domain of TCR clone 44675 (TRAV2, TRAJ40)
CAVVTSGTYKYIF

SEQ ID NO: 89350 - protein, 15 aa, Homo sapiens
  CDR3 for beta chain variable domain of TCR clone 44675 (TRBV11-3, TRBJ2-3)
CSSLKDGREGDTQYF

SEQ ID NO: 89351 - protein, 15 aa, Homo sapiens
  CDR3 for alpha chain variable domain of TCR clone 44676 (TRAV21, TRAJ53)
CDTLNSGGSNYKLTF

SEQ ID NO: 89352 - protein, 15 aa, Homo sapiens
  CDR3 for beta chain variable domain of TCR clone 44676 (TRBV20-1, TRBJ2-7)
CSARDRVSGMDEQYF

SEQ ID NO: 89353 - protein, 14 aa, Homo sapiens
  CDR3 for alpha chain variable domain of TCR clone 44677 (TRAV13-1, TRAJ40)
CAASMTSVTYKYIF

SEQ ID NO: 89354 - protein, 15 aa, Homo sapiens
  CDR3 for beta chain variable domain of TCR clone 44677 (TRBV7-3, TRBJ2-1)
CASSPTGGGEVEQFF

SEQ ID NO: 89355 - protein, 14 aa, Homo sapiens
  CDR3 for alpha chain variable domain of TCR clone 44678 (TRAV20, TRAJ56)
CAVQFGGANSKLTF

SEQ ID NO: 89356 - protein, 12 aa, Homo sapiens
  CDR3 for beta chain variable domain of TCR clone 44678 (TRBV7-8, TRBJ2-7)
CASSLGDREQYF

SEQ ID NO: 89357 - protein, 14 aa, Homo sapiens
  CDR3 for alpha chain variable domain of TCR clone 44679 (TRAV1-2, TRAJ8)
CAVREDTGFQKLVF

SEQ ID NO: 89358 - protein, 13 aa, Homo sapiens
  CDR3 for beta chain variable domain of TCR clone 44679 (TRBV6-4, TRBJ1-5)
CASSADLNQPQHF

SEQ ID NO: 89359 - protein, 12 aa, Homo sapiens
  CDR3 for alpha chain variable domain of TCR clone 44680 (TRAV13-1, TRAJ49)
CAAPNTGNQFYF

SEQ ID NO: 89360 - protein, 17 aa, Homo sapiens
  CDR3 for beta chain variable domain of TCR clone 44680 (TRBV25-1, TRBJ2-7)
CASSAARVVFSSYEQYF

SEQ ID NO: 89361 - protein, 14 aa, Homo sapiens
  CDR3 for alpha chain variable domain of TCR clone 44681 (TRAV12-1, TRAJ30)
CVGNIGGRDDKIIF

SEQ ID NO: 89362 - protein, 13 aa, Homo sapiens
  CDR3 for beta chain variable domain of TCR clone 44681 (TRBV12-5, TRBJ2-1)
CASGLGRGNEQFF

SEQ ID NO: 89363 - protein, 13 aa, Homo sapiens
  CDR3 for alpha chain variable domain of TCR clone 44682 (TRAV12-3, TRAJ9)
CAMRNTGGFKTIF

SEQ ID NO: 89364 - protein, 14 aa, Homo sapiens
  CDR3 for beta chain variable domain of TCR clone 44682 (TRBV11-2, TRBJ2-7)
CASSSIGEGYEQYF

SEQ ID NO: 89365 - protein, 12 aa, Homo sapiens
  CDR3 for alpha chain variable domain of TCR clone 44683 (TRAV20, TRAJ39)
CAVGNAGNMLTF

SEQ ID NO: 89366 - protein, 16 aa, Homo sapiens
  CDR3 for beta chain variable domain of TCR clone 44683 (TRBV15, TRBJ1-2)
CATSRGPRTGGGDYTF

SEQ ID NO: 89367 - protein, 11 aa, Homo sapiens
  CDR3 for alpha chain variable domain of TCR clone 44684 (TRAV21, TRAJ34)
CAHYNTDKLIF

SEQ ID NO: 89368 - protein, 13 aa, Homo sapiens
  CDR3 for beta chain variable domain of TCR clone 44684 (TRBV12-4, TRBJ1-1)
CASSPGTGFEAFF

SEQ ID NO: 89369 - protein, 18 aa, Homo sapiens
  CDR3 for alpha chain variable domain of TCR clone 44685 (TRAV29/DV5, TRAJ52)
CAAGFRGAGGTSFGKLTF

SEQ ID NO: 89370 - protein, 16 aa, Homo sapiens
  CDR3 for beta chain variable domain of TCR clone 44685 (TRBV7-3, TRBJ2-2)
CASSLKRGTLSGELFF

SEQ ID NO: 89371 - protein, 14 aa, Homo sapiens
  CDR3 for alpha chain variable domain of TCR clone 44686 (TRAV16, TRAJ26)
CSLSSANYGQNFVF

SEQ ID NO: 89372 - protein, 16 aa, Homo sapiens
  CDR3 for beta chain variable domain of TCR clone 44686 (TRBV20-1, TRBJ1-4)
CSAPGQGLLTNEKLFF

SEQ ID NO: 89373 - protein, 13 aa, Homo sapiens
  CDR3 for alpha chain variable domain of TCR clone 44687 (TRAV3, TRAJ15)
CAVSDQAGTALIF

SEQ ID NO: 89374 - protein, 15 aa, Homo sapiens
  CDR3 for beta chain variable domain of TCR clone 44687 (TRBV11-1, TRBJ2-7)
CASSLNYGASYEQYF

SEQ ID NO: 89375 - protein, 15 aa, Homo sapiens
  CDR3 for alpha chain variable domain of TCR clone 44688 (TRAV34, TRAJ38)
CGADFTPGNNRKLIW

SEQ ID NO: 89376 - protein, 14 aa, Homo sapiens
  CDR3 for beta chain variable domain of TCR clone 44688 (TRBV4-1, TRBJ2-2)
CASSQAVNTGELFF

SEQ ID NO: 89377 - protein, 15 aa, Homo sapiens
  CDR3 for alpha chain variable domain of TCR clone 44689 (TRAV34, TRAJ38)
CGADFTPGNNRKLIW

SEQ ID NO: 89378 - protein, 11 aa, Homo sapiens
  CDR3 for beta chain variable domain of TCR clone 44689 (TRBV12-4, TRBJ2-3)
CASTATDTQYF

SEQ ID NO: 89379 - protein, 17 aa, Homo sapiens
  CDR3 for alpha chain variable domain of TCR clone 44690 (TRAV3, TRAJ42)
CAVRDRDYGGSQGNLIF

SEQ ID NO: 89380 - protein, 13 aa, Homo sapiens
  CDR3 for beta chain variable domain of TCR clone 44690 (TRBV19, TRBJ1-2)
CASSQGQVYGYTF

SEQ ID NO: 89381 - protein, 14 aa, Homo sapiens
  CDR3 for alpha chain variable domain of TCR clone 44691 (TRAV12-1, TRAJ30)
CVVKIGGRDDKIIF

SEQ ID NO: 89382 - protein, 15 aa, Homo sapiens
  CDR3 for beta chain variable domain of TCR clone 44691 (TRBV18, TRBJ1-2)
CASSPSNTPNYGYTF

SEQ ID NO: 89383 - protein, 11 aa, Homo sapiens
  CDR3 for alpha chain variable domain of TCR clone 44692 (TRAV2, TRAJ33)
CAVESNYQLIW

SEQ ID NO: 89384 - protein, 12 aa, Homo sapiens
  CDR3 for beta chain variable domain of TCR clone 44692 (TRBV7-8, TRBJ2-7)
CASSLGDREQYF

SEQ ID NO: 89385 - protein, 11 aa, Homo sapiens
  CDR3 for alpha chain variable domain of TCR clone 44693 (TRAV12-1, TRAJ34)
CVVNKGRELIF

SEQ ID NO: 89386 - protein, 17 aa, Homo sapiens
  CDR3 for beta chain variable domain of TCR clone 44693 (TRBV13, TRBJ2-3)
CASSLSRVAGGRNTQYF

SEQ ID NO: 89387 - protein, 14 aa, Homo sapiens
  CDR3 for alpha chain variable domain of TCR clone 44694 (TRAV3, TRAJ9)
CAVRLNTGGFKTIF

SEQ ID NO: 89388 - protein, 13 aa, Homo sapiens
  CDR3 for beta chain variable domain of TCR clone 44694 (TRBV10-3, TRBJ2-7)
CASKLAVNYEQYF

SEQ ID NO: 89389 - protein, 13 aa, Homo sapiens
  CDR3 for alpha chain variable domain of TCR clone 44695 (TRAV21, TRAJ3)
CCEPYSSASKIIF

SEQ ID NO: 89390 - protein, 12 aa, Homo sapiens
  CDR3 for beta chain variable domain of TCR clone 44695 (TRBV11-2, TRBJ2-2)
CASSLGGGELFF

SEQ ID NO: 89391 - protein, 13 aa, Homo sapiens
  CDR3 for alpha chain variable domain of TCR clone 44696 (TRAV27, TRAJ41)
CAGEGNSGYALNF

SEQ ID NO: 89392 - protein, 14 aa, Homo sapiens
  CDR3 for beta chain variable domain of TCR clone 44696 (TRBV7-2, TRBJ1-1)
CASSFFTGTTEAFF

SEQ ID NO: 89393 - protein, 16 aa, Homo sapiens
  CDR3 for alpha chain variable domain of TCR clone 44697 (TRAV12-3, TRAJ53)
CAMSPGSGGSNYKLTF

SEQ ID NO: 89394 - protein, 15 aa, Homo sapiens
  CDR3 for beta chain variable domain of TCR clone 44697 (TRBV18, TRBJ2-7)
CASSPSATGNYEQYF

SEQ ID NO: 89395 - protein, 13 aa, Homo sapiens
  CDR3 for alpha chain variable domain of TCR clone 44698 (TRAV13-1, TRAJ10)
CAAAEGGGNKLTF

SEQ ID NO: 89396 - protein, 16 aa, Homo sapiens
  CDR3 for beta chain variable domain of TCR clone 44698 (TRBV12-4, TRBJ1-2)
CASSLGQYRPNYGYTF

SEQ ID NO: 89397 - protein, 15 aa, Homo sapiens
  CDR3 for alpha chain variable domain of TCR clone 44699 (TRAV35, TRAJ58)
CAGRRQETSGSRLTF

SEQ ID NO: 89398 - protein, 11 aa, Homo sapiens
  CDR3 for beta chain variable domain of TCR clone 44699 (TRBV11-2, TRBJ1-1)
CASSINTEAFL

SEQ ID NO: 89399 - protein, 12 aa, Homo sapiens
  CDR3 for alpha chain variable domain of TCR clone 44700 (TRAV21, TRAJ33)
CAKMDSNYQFIW

SEQ ID NO: 89400 - protein, 14 aa, Homo sapiens
  CDR3 for beta chain variable domain of TCR clone 44700 (TRBV2, TRBJ2-7)
CASSLTSGGYEQYF

SEQ ID NO: 89401 - protein, 13 aa, Homo sapiens
  CDR3 for alpha chain variable domain of TCR clone 44701 (TRAV12-2, TRAJ20)
CAVYPSNDYKLSF

SEQ ID NO: 89402 - protein, 15 aa, Homo sapiens
  CDR3 for beta chain variable domain of TCR clone 44701 (TRBV27, TRBJ2-5)
CASSVYPRGGETQYF

SEQ ID NO: 89403 - protein, 20 aa, Homo sapiens
  CDR3 for alpha chain variable domain of TCR clone 44702 (TRAV26-1, TRAJ42)
CCVLLHRQTYCGGSQGNLIF

SEQ ID NO: 89404 - protein, 16 aa, Homo sapiens
  CDR3 for beta chain variable domain of TCR clone 44702 (TRBV7-3, TRBJ2-2)
CASSLKRGTLSGELFF

SEQ ID NO: 89405 - protein, 12 aa, Homo sapiens
  CDR3 for alpha chain variable domain of TCR clone 44703 (TRAV13-1, TRAJ21)
CAAKEGFNKFYF

SEQ ID NO: 89406 - protein, 16 aa, Homo sapiens
  CDR3 for beta chain variable domain of TCR clone 44703 (TRBV7-9, TRBJ1-2)
CASSLGFSSGEDGYTF

SEQ ID NO: 89407 - protein, 12 aa, Homo sapiens
  CDR3 for alpha chain variable domain of TCR clone 44704 (TRAV35, TRAJ31)
CAAASNNARLMF

SEQ ID NO: 89408 - protein, 14 aa, Homo sapiens
  CDR3 for beta chain variable domain of TCR clone 44704 (TRBV2, TRBJ2-2)
CASSLFGGNGELLF

SEQ ID NO: 89409 - protein, 13 aa, Homo sapiens
  CDR3 for alpha chain variable domain of TCR clone 44705 (TRAV17, TRAJ34)
CATDPYNTDKLIF

SEQ ID NO: 89410 - protein, 12 aa, Homo sapiens
  CDR3 for beta chain variable domain of TCR clone 44705 (TRBV11-2, TRBJ2-2)
CASSLGGGELFF

SEQ ID NO: 89411 - protein, 14 aa, Homo sapiens
  CDR3 for alpha chain variable domain of TCR clone 44706 (TRAV13-1, TRAJ44)
CAAKATGTASKLTF

SEQ ID NO: 89412 - protein, 16 aa, Homo sapiens
  CDR3 for beta chain variable domain of TCR clone 44706 (TRBV2, TRBJ2-1)
CASSVGGSLSYNEQFF

SEQ ID NO: 89413 - protein, 14 aa, Homo sapiens
  CDR3 for alpha chain variable domain of TCR clone 44707 (TRAV17, TRAJ12)
CATDEKYSSYKLIF

SEQ ID NO: 89414 - protein, 18 aa, Homo sapiens
  CDR3 for beta chain variable domain of TCR clone 44707 (TRBV25-1, TRBJ1-2)
CASSGLQNGQGLIFGYTF

SEQ ID NO: 89415 - protein, 12 aa, Homo sapiens
  CDR3 for alpha chain variable domain of TCR clone 44708 (TRAV12-2, TRAJ10)
WGVTGGGNKLTF

SEQ ID NO: 89416 - protein, 17 aa, Homo sapiens
  CDR3 for beta chain variable domain of TCR clone 44708 (TRBV11-2, TRBJ2-1)
CASSLYPPGVEYNEQFF

SEQ ID NO: 89417 - protein, 15 aa, Homo sapiens
  CDR3 for alpha chain variable domain of TCR clone 44709 (TRAV12-3, TRAJ11)
CAMSEENSGYSTLTF

SEQ ID NO: 89418 - protein, 16 aa, Homo sapiens
  CDR3 for beta chain variable domain of TCR clone 44709 (TRBV5-1, TRBJ2-7)
CVSSLEGLAGLYEQYF

SEQ ID NO: 89419 - protein, 14 aa, Homo sapiens
  CDR3 for alpha chain variable domain of TCR clone 44710 (TRAV12-2, TRAJ13)
CAVRKTGGYQKVTF

SEQ ID NO: 89420 - protein, 12 aa, Homo sapiens
  CDR3 for beta chain variable domain of TCR clone 44710 (TRBV12-4, TRBJ1-2)
CASSFIWLHLRF

SEQ ID NO: 89421 - protein, 13 aa, Homo sapiens
  CDR3 for alpha chain variable domain of TCR clone 44711 (TRAV2, TRAJ40)
CAVVTSGTYKYIF

SEQ ID NO: 89422 - protein, 15 aa, Homo sapiens
  CDR3 for beta chain variable domain of TCR clone 44711 (TRBV11-3, TRBJ2-3)
CASLKDGREGETQYF

SEQ ID NO: 89423 - protein, 13 aa, Homo sapiens
  CDR3 for alpha chain variable domain of TCR clone 44712 (TRAV8-3, TRAJ43)
CAVGPDNNNDMRL

SEQ ID NO: 89424 - protein, 14 aa, Homo sapiens
  CDR3 for beta chain variable domain of TCR clone 44712 (TRBV19, TRBJ2-1)
CASPTFVLSGEQFF

SEQ ID NO: 89425 - protein, 12 aa, Homo sapiens
  CDR3 for alpha chain variable domain of TCR clone 44713 (TRAV17, TRAJ12)
CATLRSSYQLIF

SEQ ID NO: 89426 - protein, 16 aa, Homo sapiens
  CDR3 for beta chain variable domain of TCR clone 44713 (TRBV28, TRBJ2-7)
CASSLFFETGGPEQYF

SEQ ID NO: 89427 - protein, 13 aa, Homo sapiens
  CDR3 for alpha chain variable domain of TCR clone 44714 (TRAV13-1, TRAJ6)
CAASSGGSYIPTS

SEQ ID NO: 89428 - protein, 14 aa, Homo sapiens
  CDR3 for beta chain variable domain of TCR clone 44714 (TRBV12-4, TRBJ2-5)
CQQSPTGLQETQYF

SEQ ID NO: 89429 - protein, 17 aa, Homo sapiens
  CDR3 for alpha chain variable domain of TCR clone 44715 (TRAV26-1, TRAJ37)
CIVRVVTVSSNTGKLIF

SEQ ID NO: 89430 - protein, 14 aa, Homo sapiens
  CDR3 for beta chain variable domain of TCR clone 44715 (TRBV19, TRBJ2-1)
CASPTFVLSGEQFF

SEQ ID NO: 89431 - protein, 14 aa, Homo sapiens
  CDR3 for alpha chain variable domain of TCR clone 44716 (TRAV12-2, TRAJ53)
CAVTGGGSNYKLTF

SEQ ID NO: 89432 - protein, 14 aa, Homo sapiens
  CDR3 for beta chain variable domain of TCR clone 44716 (TRBV7-7, TRBJ2-2)
CATRQDSDTGELFF

SEQ ID NO: 89433 - protein, 12 aa, Homo sapiens
  CDR3 for alpha chain variable domain of TCR clone 44717 (TRAV1-1, TRAJ8)
CAGGKGFQKLVF

SEQ ID NO: 89434 - protein, 15 aa, Homo sapiens
  CDR3 for beta chain variable domain of TCR clone 44717 (TRBV7-9, TRBJ1-4)
CASSRTGGFNEKLFF

SEQ ID NO: 89435 - protein, 11 aa, Homo sapiens
  CDR3 for alpha chain variable domain of TCR clone 44718 (TRAV1-1, TRAJ16)
CAAGDGQKLLF

SEQ ID NO: 89436 - protein, 15 aa, Homo sapiens
  CDR3 for beta chain variable domain of TCR clone 44718 (TRBV28, TRBJ1-2)
CASIPQGSDDYGDTF

SEQ ID NO: 89437 - protein, 12 aa, Homo sapiens
  CDR3 for alpha chain variable domain of TCR clone 44719 (TRAV13-1, TRAJ21)
CAAKEGFNKFYF

SEQ ID NO: 89438 - protein, 20 aa, Homo sapiens
  CDR3 for beta chain variable domain of TCR clone 44719 (TRBV28, TRBJ2-1)
CASTPIGRSPGLAGGDEQFF

SEQ ID NO: 89439 - protein, 14 aa, Homo sapiens
  CDR3 for alpha chain variable domain of TCR clone 44720 (TRAV13-2, TRAJ32)
CAENHGGATNKLIF

SEQ ID NO: 89440 - protein, 14 aa, Homo sapiens
  CDR3 for beta chain variable domain of TCR clone 44720 (TRBV19, TRBJ1-5)
CASSFTGSNQPQHF

SEQ ID NO: 89441 - protein, 13 aa, Homo sapiens
  CDR3 for alpha chain variable domain of TCR clone 44721 (TRAV9-2, TRAJ58)
CSATGTSGSRLTF

SEQ ID NO: 89442 - protein, 16 aa, Homo sapiens
  CDR3 for beta chain variable domain of TCR clone 44721 (TRBV20-1, TRBJ1-4)
CSAPGQGLLTNEKLFF

SEQ ID NO: 89443 - protein, 17 aa, Homo sapiens
  CDR3 for alpha chain variable domain of TCR clone 44722 (TRAV3, TRAJ6)
CAVRDGPRAGGSYIPTF

SEQ ID NO: 89444 - protein, 20 aa, Homo sapiens
  CDR3 for beta chain variable domain of TCR clone 44722 (TRBV28, TRBJ2-1)
CASTPIGRSPGLAGGNEQCF

SEQ ID NO: 89445 - protein, 12 aa, Homo sapiens
  CDR3 for alpha chain variable domain of TCR clone 44723 (TRAV27, TRAJ33)
CAGDGSNYQLIW

SEQ ID NO: 89446 - protein, 15 aa, Homo sapiens
  CDR3 for beta chain variable domain of TCR clone 44723 (TRBV27, TRBJ2-1)
CASSNGGGSSNEQFF

SEQ ID NO: 89447 - protein, 17 aa, Homo sapiens
  CDR3 for alpha chain variable domain of TCR clone 44724 (TRAV16, TRAJ42)
CALSPKLYGGSQGNLIF

SEQ ID NO: 89448 - protein, 13 aa, Homo sapiens
  CDR3 for beta chain variable domain of TCR clone 44724 (TRBV19, TRBJ1-5)
CASSTRRDQHQHF

SEQ ID NO: 89449 - protein, 12 aa, Homo sapiens
  CDR3 for alpha chain variable domain of TCR clone 44725 (TRAV13-1, TRAJ21)
CAAKEGFNKFYF

SEQ ID NO: 89450 - protein, 14 aa, Homo sapiens
  CDR3 for beta chain variable domain of TCR clone 44725 (TRBV5-1, TRBJ2-2)
CASSLGGGSGELFF

SEQ ID NO: 89451 - protein, 12 aa, Homo sapiens
  CDR3 for alpha chain variable domain of TCR clone 44726 (TRAV12-3, TRAJ4)
CAMTGAGTRLAV

SEQ ID NO: 89452 - protein, 14 aa, Homo sapiens
  CDR3 for beta chain variable domain of TCR clone 44726 (TRBV10-3, TRBJ1-1)
CAISDADRGVEAFF

SEQ ID NO: 89453 - protein, 13 aa, Homo sapiens
  CDR3 for alpha chain variable domain of TCR clone 44727 (TRAV27, TRAJ45)
CRSSGGGADGLTF

SEQ ID NO: 89454 - protein, 11 aa, Homo sapiens
  CDR3 for beta chain variable domain of TCR clone 44727 (TRBV11-2, TRBJ2-2)
CASSLPGELFF

SEQ ID NO: 89455 - protein, 14 aa, Homo sapiens
  CDR3 for alpha chain variable domain of TCR clone 44728 (TRAV12-3, TRAJ35)
CAMSLIGFGNVLHF

SEQ ID NO: 89456 - protein, 12 aa, Homo sapiens
  CDR3 for beta chain variable domain of TCR clone 44728 (TRBV12-4, TRBJ1-1)
CASSLAGLEAFF

SEQ ID NO: 89457 - protein, 16 aa, Homo sapiens
  CDR3 for alpha chain variable domain of TCR clone 44729 (TRAV19, TRAJ35)
CALKRDVEGFGNVLHC

SEQ ID NO: 89458 - protein, 14 aa, Homo sapiens
  CDR3 for beta chain variable domain of TCR clone 44729 (TRBV7-9, TRBJ1-1)
CASTPLQSYTEAFF

SEQ ID NO: 89459 - protein, 12 aa, Homo sapiens
  CDR3 for alpha chain variable domain of TCR clone 44730 (TRAV2, TRAJ34)
CAVERNTDKLIF

SEQ ID NO: 89460 - protein, 14 aa, Homo sapiens
  CDR3 for beta chain variable domain of TCR clone 44730 (TRBV7-9, TRBJ2-1)
CASSENSGYNEQFF

SEQ ID NO: 89461 - protein, 11 aa, Homo sapiens
  CDR3 for alpha chain variable domain of TCR clone 44731 (TRAV1-1, TRAJ23)
CAVRQGGKLIF

SEQ ID NO: 89462 - protein, 16 aa, Homo sapiens
  CDR3 for beta chain variable domain of TCR clone 44731 (TRBV7-7, TRBJ2-1)
CASSLASGTSYNEQFF

SEQ ID NO: 89463 - protein, 14 aa, Homo sapiens
  CDR3 for alpha chain variable domain of TCR clone 44732 (TRAV13-1, TRAJ24)
CAASRTDSWGKLQF

SEQ ID NO: 89464 - protein, 14 aa, Homo sapiens
  CDR3 for beta chain variable domain of TCR clone 44732 (TRBV6-1, TRBJ1-3)
CASVQGGGENTIYF

SEQ ID NO: 89465 - protein, 17 aa, Homo sapiens
  CDR3 for alpha chain variable domain of TCR clone 44733 (TRAV26-1, TRAJ47)
CIVPSLLYMEYGNKLFF

SEQ ID NO: 89466 - protein, 14 aa, Homo sapiens
  CDR3 for beta chain variable domain of TCR clone 44733 (TRBV7-3, TRBJ1-5)
RASSFSGCNQPQHF

SEQ ID NO: 89467 - protein, 14 aa, Homo sapiens
  CDR3 for alpha chain variable domain of TCR clone 44734 (TRAV38-1, TRAJ29)
CAFITPLGNTPLVF

SEQ ID NO: 89468 - protein, 14 aa, Homo sapiens
  CDR3 for beta chain variable domain of TCR clone 44734 (TRBV18, TRBJ2-7)
CASSPRGGAYEQYF

SEQ ID NO: 89469 - protein, 15 aa, Homo sapiens
  CDR3 for alpha chain variable domain of TCR clone 44735 (TRAV17, TRAJ13)
CATDAGSGGSQKVTF

SEQ ID NO: 89470 - protein, 17 aa, Homo sapiens
  CDR3 for beta chain variable domain of TCR clone 44735 (TRBV11-2, TRBJ2-1)
CASSLYPPGVEYNEQFF

SEQ ID NO: 89471 - protein, 15 aa, Homo sapiens
  CDR3 for alpha chain variable domain of TCR clone 44736 (TRAV17, TRAJ16)
CATALRFSDGQKLLF

SEQ ID NO: 89472 - protein, 15 aa, Homo sapiens
  CDR3 for beta chain variable domain of TCR clone 44736 (TRBV20-1, TRBJ1-1)
YSASRGVTGNTEAFF

SEQ ID NO: 89473 - protein, 14 aa, Homo sapiens
  CDR3 for alpha chain variable domain of TCR clone 44737 (TRAV12-3, TRAJ10)
SHLPLTGGGNKLTF

SEQ ID NO: 89474 - protein, 16 aa, Homo sapiens
  CDR3 for beta chain variable domain of TCR clone 44737 (TRBV27, TRBJ2-5)
CASSFGPGGTKETQYF

SEQ ID NO: 89475 - protein, 15 aa, Homo sapiens
  CDR3 for alpha chain variable domain of TCR clone 44738 (TRAV12-1, TRAJ42)
CVVTRDGGSQRNLIF

SEQ ID NO: 89476 - protein, 14 aa, Homo sapiens
  CDR3 for beta chain variable domain of TCR clone 44738 (TRBV11-2, TRBJ2-3)
CASSLGGGANTQYF

SEQ ID NO: 89477 - protein, 13 aa, Homo sapiens
  CDR3 for alpha chain variable domain of TCR clone 44739 (TRAV25, TRAJ30)
CAGRVDRDDKIIF

SEQ ID NO: 89478 - protein, 17 aa, Homo sapiens
  CDR3 for beta chain variable domain of TCR clone 44739 (TRBV7-9, TRBJ2-6)
CASSCGAGYSGANVLTF

SEQ ID NO: 89479 - protein, 16 aa, Homo sapiens
  CDR3 for alpha chain variable domain of TCR clone 44740 (TRAV1-2, TRAJ10)
CAVRGILTGGGNKLTF

SEQ ID NO: 89480 - protein, 12 aa, Homo sapiens
  CDR3 for beta chain variable domain of TCR clone 44740 (TRBV7-8, TRBJ2-7)
CASSLGDREQYF

SEQ ID NO: 89481 - protein, 16 aa, Homo sapiens
  CDR3 for alpha chain variable domain of TCR clone 44741 (TRAV16, TRAJ52)
CALSGVGGTIYGKLTF

SEQ ID NO: 89482 - protein, 14 aa, Homo sapiens
  CDR3 for beta chain variable domain of TCR clone 44741 (TRBV19, TRBJ1-2)
CASSLQGQAYGYTF

SEQ ID NO: 89483 - protein, 16 aa, Homo sapiens
  CDR3 for alpha chain variable domain of TCR clone 44742 (TRAV30, TRAJ24)
CGTEIVDADSWGKFQF

SEQ ID NO: 89484 - protein, 14 aa, Homo sapiens
  CDR3 for beta chain variable domain of TCR clone 44742 (TRBV12-5, TRBJ2-5)
CASGSRTHQETQYF

SEQ ID NO: 89485 - protein, 12 aa, Homo sapiens
  CDR3 for alpha chain variable domain of TCR clone 44743 (TRAV17, TRAJ53)
CAFGGSNYKLTF

SEQ ID NO: 89486 - protein, 16 aa, Homo sapiens
  CDR3 for beta chain variable domain of TCR clone 44743 (TRBV11-2, TRBJ2-4)
CASSQEGRGGLDSQYF

SEQ ID NO: 89487 - protein, 14 aa, Homo sapiens
  CDR3 for alpha chain variable domain of TCR clone 44744 (TRAV12-2, TRAJ24)
CAVTPADSWGKLQL

SEQ ID NO: 89488 - protein, 12 aa, Homo sapiens
  CDR3 for beta chain variable domain of TCR clone 44744 (TRBV3-1, TRBJ2-1)
CASSQGSSGQFF

SEQ ID NO: 89489 - protein, 15 aa, Homo sapiens
  CDR3 for alpha chain variable domain of TCR clone 44745 (TRAV26-1, TRAJ3)
CIVRSGYSSASKIIF

SEQ ID NO: 89490 - protein, 14 aa, Homo sapiens
  CDR3 for beta chain variable domain of TCR clone 44745 (TRBV13, TRBJ2-5)
CASYRRLAEETQYL

SEQ ID NO: 89491 - protein, 12 aa, Homo sapiens
  CDR3 for alpha chain variable domain of TCR clone 44746 (TRAV20, TRAJ24)
CAAYNSWGKLQF

SEQ ID NO: 89492 - protein, 15 aa, Homo sapiens
  CDR3 for beta chain variable domain of TCR clone 44746 (TRBV20-1, TRBJ2-5)
CSARVPPSGRETQYF

SEQ ID NO: 89493 - protein, 12 aa, Homo sapiens
  CDR3 for alpha chain variable domain of TCR clone 44747 (TRAV17, TRAJ30)
CVTERRDDKIIF

SEQ ID NO: 89494 - protein, 14 aa, Homo sapiens
  CDR3 for beta chain variable domain of TCR clone 44747 (TRBV7-7, TRBJ2-2)
CASSRDRSTGELFF

SEQ ID NO: 89495 - protein, 15 aa, Homo sapiens
  CDR3 for alpha chain variable domain of TCR clone 44748 (TRAV8-4, TRAJ3)
CAVTGENLVQQCFQD

SEQ ID NO: 89496 - protein, 16 aa, Homo sapiens
  CDR3 for beta chain variable domain of TCR clone 44748 (TRBV4-2, TRBJ1-1)
CASSQAGFGMNTEAVF

SEQ ID NO: 89497 - protein, 14 aa, Homo sapiens
  CDR3 for alpha chain variable domain of TCR clone 44749 (TRAV17, TRAJ57)
CATDHQGGSEKLVF

SEQ ID NO: 89498 - protein, 18 aa, Homo sapiens
  CDR3 for beta chain variable domain of TCR clone 44749 (TRBV20-1, TRBJ2-3)
CSASGLAGGPGTTDTQYF

SEQ ID NO: 89499 - protein, 14 aa, Homo sapiens
  CDR3 for alpha chain variable domain of TCR clone 44750 (TRAV12-2, TRAJ5)
CAVKRSTGRRALTF

SEQ ID NO: 89500 - protein, 12 aa, Homo sapiens
  CDR3 for beta chain variable domain of TCR clone 44750 (TRBV19, TRBJ1-5)
CASSIAQQPQHF

SEQ ID NO: 89501 - protein, 11 aa, Homo sapiens
  CDR3 for alpha chain variable domain of TCR clone 44751 (TRAV1-2, TRAJ40)
CAVPGTYKYIF

SEQ ID NO: 89502 - protein, 12 aa, Homo sapiens
  CDR3 for beta chain variable domain of TCR clone 44751 (TRBV6-3, TRBJ2-7)
CASSLTPYEQYF

SEQ ID NO: 89503 - protein, 16 aa, Homo sapiens
  CDR3 for alpha chain variable domain of TCR clone 44752 (TRAV20, TRAJ10)
CAVLRGPTGGGNKLTF

SEQ ID NO: 89504 - protein, 14 aa, Homo sapiens
  CDR3 for beta chain variable domain of TCR clone 44752 (TRBV19, TRBJ1-5)
CASRAPDSFLSQHF

SEQ ID NO: 89505 - protein, 15 aa, Homo sapiens
  CDR3 for alpha chain variable domain of TCR clone 44753 (TRAV17, TRAJ4)
CATGTWSGGYNKLIF

SEQ ID NO: 89506 - protein, 13 aa, Homo sapiens
  CDR3 for beta chain variable domain of TCR clone 44753 (TRBV6-6, TRBJ2-7)
CASSPKRLAEKYF

SEQ ID NO: 89507 - protein, 12 aa, Homo sapiens
  CDR3 for alpha chain variable domain of TCR clone 44754 (TRAV36/DV7, TRAJ54)
CAVVRGAQKLLF

SEQ ID NO: 89508 - protein, 14 aa, Homo sapiens
  CDR3 for beta chain variable domain of TCR clone 44754 (TRBV7-3, TRBJ1-1)
CASSLKGGNTEAFF

SEQ ID NO: 89509 - protein, 15 aa, Homo sapiens
  CDR3 for alpha chain variable domain of TCR clone 44755 (TRAV12-3, TRAJ27)
CAMSRLNTNAGKSTF

SEQ ID NO: 89510 - protein, 14 aa, Homo sapiens
  CDR3 for beta chain variable domain of TCR clone 44755 (TRBV2, TRBJ2-7)
CASSLTSGGYEQYF

SEQ ID NO: 89511 - protein, 15 aa, Homo sapiens
  CDR3 for alpha chain variable domain of TCR clone 44756 (TRAV12-2, TRAJ53)
CAVNGGGGSNYKLTF

SEQ ID NO: 89512 - protein, 13 aa, Homo sapiens
  CDR3 for beta chain variable domain of TCR clone 44756 (TRBV7-3, TRBJ1-1)
CASSQDWGAEAFF

SEQ ID NO: 89513 - protein, 18 aa, Homo sapiens
  CDR3 for alpha chain variable domain of TCR clone 44757 (TRAV26-1, TRAJ5)
CIVRVVHPRDTGRRALTF

SEQ ID NO: 89514 - protein, 15 aa, Homo sapiens
  CDR3 for beta chain variable domain of TCR clone 44757 (TRBV7-9, TRBJ2-7)
CASSLPMGQANEQYF

SEQ ID NO: 89515 - protein, 10 aa, Homo sapiens
  CDR3 for alpha chain variable domain of TCR clone 44758 (TRAV30, TRAJ48)
CGIGNEKLTF

SEQ ID NO: 89516 - protein, 17 aa, Homo sapiens
  CDR3 for beta chain variable domain of TCR clone 44758 (TRBV7-8, TRBJ2-6)
CASSAGTGGAGANVLTF

SEQ ID NO: 89517 - protein, 13 aa, Homo sapiens
  CDR3 for alpha chain variable domain of TCR clone 44759 (TRAV3, TRAJ27)
CAVGPLGAGESTF

SEQ ID NO: 89518 - protein, 13 aa, Homo sapiens
  CDR3 for beta chain variable domain of TCR clone 44759 (TRBV7-9, TRBJ2-3)
CASSPGSTDTQYF

SEQ ID NO: 89519 - protein, 13 aa, Homo sapiens
  CDR3 for alpha chain variable domain of TCR clone 44760 (TRAV30, TRAJ24)
CGTVTDSWGKLQF

SEQ ID NO: 89520 - protein, 15 aa, Homo sapiens
  CDR3 for beta chain variable domain of TCR clone 44760 (TRBV7-9, TRBJ2-2)
CASGPLDTFPGELFF

SEQ ID NO: 89521 - protein, 14 aa, Homo sapiens
  CDR3 for alpha chain variable domain of TCR clone 44761 (TRAV26-1, TRAJ38)
CIADSAGNNRKLIW

SEQ ID NO: 89522 - protein, 12 aa, Homo sapiens
  CDR3 for beta chain variable domain of TCR clone 44761 (TRBV5-1, TRBJ2-7)
CASSFRGYEQYF

SEQ ID NO: 89523 - protein, 17 aa, Homo sapiens
  CDR3 for alpha chain variable domain of TCR clone 44762 (TRAV16, TRAJ58)
CITVLSNGETSGSRLTF

SEQ ID NO: 89524 - protein, 17 aa, Homo sapiens
  CDR3 for beta chain variable domain of TCR clone 44762 (TRBV18, TRBJ2-1)
CASSRGLSGGADNEQFF

SEQ ID NO: 89525 - protein, 15 aa, Homo sapiens
  CDR3 for alpha chain variable domain of TCR clone 44763 (TRAV4, TRAJ39)
CLVGPNNNAGNMLTS

SEQ ID NO: 89526 - protein, 13 aa, Homo sapiens
  CDR3 for beta chain variable domain of TCR clone 44763 (TRBV11-2, TRBJ2-5)
CASSSTGEETQYF

SEQ ID NO: 89527 - protein, 13 aa, Homo sapiens
  CDR3 for alpha chain variable domain of TCR clone 44764 (TRAV12-2, TRAJ4)
CAGFSGGYNKLIF

SEQ ID NO: 89528 - protein, 14 aa, Homo sapiens
  CDR3 for beta chain variable domain of TCR clone 44764 (TRBV24-1, TRBJ1-1)
CATSIPRGDTVAFF

SEQ ID NO: 89529 - protein, 15 aa, Homo sapiens
  CDR3 for alpha chain variable domain of TCR clone 44765 (TRAV2, TRAJ15)
CAVEDQGQAGTALIF

SEQ ID NO: 89530 - protein, 13 aa, Homo sapiens
  CDR3 for beta chain variable domain of TCR clone 44765 (TRBV10-2, TRBJ2-7)
CASGASGGYEQYF

SEQ ID NO: 89531 - protein, 15 aa, Homo sapiens
  CDR3 for alpha chain variable domain of TCR clone 44766 (TRAV3, TRAJ5)
WAVRDRKTGRRALTF

SEQ ID NO: 89532 - protein, 15 aa, Homo sapiens
  CDR3 for beta chain variable domain of TCR clone 44766 (TRBV7-8, TRBJ2-1)
CASSLADSLYNEQFF

SEQ ID NO: 89533 - protein, 14 aa, Homo sapiens
  CDR3 for alpha chain variable domain of TCR clone 44767 (TRAV13-1, TRAJ44)
CAAKATGTASKLTF

SEQ ID NO: 89534 - protein, 15 aa, Homo sapiens
  CDR3 for beta chain variable domain of TCR clone 44767 (TRBV19, TRBJ1-1)
CASTSGQIQNTEAFF

SEQ ID NO: 89535 - protein, 13 aa, Homo sapiens
  CDR3 for alpha chain variable domain of TCR clone 44768 (TRAV20, TRAJ21)
CAVEGYKFNKFYF

SEQ ID NO: 89536 - protein, 14 aa, Homo sapiens
  CDR3 for beta chain variable domain of TCR clone 44768 (TRBV3-1, TRBJ2-5)
CASSQGPDQETQYF

SEQ ID NO: 89537 - protein, 13 aa, Homo sapiens
  CDR3 for alpha chain variable domain of TCR clone 44769 (TRAV13-2, TRAJ13)
CVERPGGYQKVTF

SEQ ID NO: 89538 - protein, 15 aa, Homo sapiens
  CDR3 for beta chain variable domain of TCR clone 44769 (TRBV4-1, TRBJ1-4)
CASSDTGGTNERLFF

SEQ ID NO: 89539 - protein, 13 aa, Homo sapiens
  CDR3 for alpha chain variable domain of TCR clone 44770 (TRAV30, TRAJ34)
CGTVGYNTDKLIF

SEQ ID NO: 89540 - protein, 16 aa, Homo sapiens
  CDR3 for beta chain variable domain of TCR clone 44770 (TRBV7-9, TRBJ1-2)
CASSLGFPSGEDGYTF

SEQ ID NO: 89541 - protein, 14 aa, Homo sapiens
  CDR3 for alpha chain variable domain of TCR clone 44771 (TRAV12-1, TRAJ29)
CVVNEGSGNTPLVF

SEQ ID NO: 89542 - protein, 13 aa, Homo sapiens
  CDR3 for beta chain variable domain of TCR clone 44771 (TRBV7-9, TRBJ2-3)
CASSPGPTDTQYF

SEQ ID NO: 89543 - protein, 14 aa, Homo sapiens
  CDR3 for alpha chain variable domain of TCR clone 44772 (TRAV13-1, TRAJ57)
VPPLSQGGSEKLVF

SEQ ID NO: 89544 - protein, 17 aa, Homo sapiens
  CDR3 for beta chain variable domain of TCR clone 44772 (TRBV7-3, TRBJ2-3)
CASSLMKRMRGADTQYF

SEQ ID NO: 89545 - protein, 12 aa, Homo sapiens
  CDR3 for alpha chain variable domain of TCR clone 44773 (TRAV25, TRAJ11)
CAGASGYSTLTF

SEQ ID NO: 89546 - protein, 14 aa, Homo sapiens
  CDR3 for beta chain variable domain of TCR clone 44773 (TRBV19, TRBJ2-1)
CASPTFVLSGEQFF

SEQ ID NO: 89547 - protein, 14 aa, Homo sapiens
  CDR3 for alpha chain variable domain of TCR clone 44774 (TRAV8-3, TRAJ10)
CAVGNAGGGNKLTF

SEQ ID NO: 89548 - protein, 16 aa, Homo sapiens
  CDR3 for beta chain variable domain of TCR clone 44774 (TRBV11-2, TRBJ1-2)
CASSLDTRGADYGYTF

SEQ ID NO: 89549 - protein, 14 aa, Homo sapiens
  CDR3 for alpha chain variable domain of TCR clone 44775 (TRAV2, TRAJ37)
CAVDFTSNTGKLIF

SEQ ID NO: 89550 - protein, 18 aa, Homo sapiens
  CDR3 for beta chain variable domain of TCR clone 44775 (TRBV7-2, TRBJ2-3)
CASSLETSRGRKADTQYF

SEQ ID NO: 89551 - protein, 15 aa, Homo sapiens
  CDR3 for alpha chain variable domain of TCR clone 44776 (TRAV12-2, TRAJ43)
CAFDMRFGAGTRLTV

SEQ ID NO: 89552 - protein, 16 aa, Homo sapiens
  CDR3 for beta chain variable domain of TCR clone 44776 (TRBV13, TRBJ2-3)
CQQPLRVAGGRNTQYF

SEQ ID NO: 89553 - protein, 11 aa, Homo sapiens
  CDR3 for alpha chain variable domain of TCR clone 44777 (TRAV1-1, TRAJ23)
CAVRQGGKLIF

SEQ ID NO: 89554 - protein, 20 aa, Homo sapiens
  CDR3 for beta chain variable domain of TCR clone 44777 (TRBV7-8, TRBJ2-2)
CASSHLIPGPTIHITGELFF

SEQ ID NO: 89555 - protein, 16 aa, Homo sapiens
  CDR3 for alpha chain variable domain of TCR clone 44778 (TRAV30, TRAJ49)
SAAQRVGPNTGNQFYF

SEQ ID NO: 89556 - protein, 16 aa, Homo sapiens
  CDR3 for beta chain variable domain of TCR clone 44778 (TRBV12-4, TRBJ2-7)
CASSPEGQGSSYEQYF

SEQ ID NO: 89557 - protein, 14 aa, Homo sapiens
  CDR3 for alpha chain variable domain of TCR clone 44779 (TRAV26-1, TRAJ21)
CIVRPPYNFNKFYF

SEQ ID NO: 89558 - protein, 14 aa, Homo sapiens
  CDR3 for beta chain variable domain of TCR clone 44779 (TRBV11-3, TRBJ2-1)
CAGSATTSGSIQFF

SEQ ID NO: 89559 - protein, 16 aa, Homo sapiens
  CDR3 for alpha chain variable domain of TCR clone 44780 (TRAV3, TRAJ18)
CAVRDGRGSTLGRLYF

SEQ ID NO: 89560 - protein, 15 aa, Homo sapiens
  CDR3 for beta chain variable domain of TCR clone 44780 (TRBV7-9, TRBJ1-6)
CASSSPGRGNPPLHF

SEQ ID NO: 89561 - protein, 16 aa, Homo sapiens
  CDR3 for alpha chain variable domain of TCR clone 44781 (TRAV3, TRAJ10)
CAVRDMRAGGGNKLTF

SEQ ID NO: 89562 - protein, 14 aa, Homo sapiens
  CDR3 for beta chain variable domain of TCR clone 44781 (TRBV25-1, TRBJ1-1)
CASTHLGGHTEAFF

SEQ ID NO: 89563 - protein, 12 aa, Homo sapiens
  CDR3 for alpha chain variable domain of TCR clone 44782 (TRAV12-3, TRAJ17)
CAMTLTGNKLTF

SEQ ID NO: 89564 - protein, 16 aa, Homo sapiens
  CDR3 for beta chain variable domain of TCR clone 44782 (TRBV4-2, TRBJ2-3)
CASSQELAGDTDTQYF

SEQ ID NO: 89565 - protein, 14 aa, Homo sapiens
  CDR3 for alpha chain variable domain of TCR clone 44783 (TRAV4, TRAJ13)
CLVGYSGGYQKVTF

SEQ ID NO: 89566 - protein, 13 aa, Homo sapiens
  CDR3 for beta chain variable domain of TCR clone 44783 (TRBV18, TRBJ1-1)
CASSGGRNTEAFS

SEQ ID NO: 89567 - protein, 14 aa, Homo sapiens
  CDR3 for alpha chain variable domain of TCR clone 44784 (TRAV12-3, TRAJ12)
CAMSEVDSSYKLTF

SEQ ID NO: 89568 - protein, 12 aa, Homo sapiens
  CDR3 for beta chain variable domain of TCR clone 44784 (TRBV18, TRBJ1-4)
CASSPSREKLFF

SEQ ID NO: 89569 - protein, 15 aa, Homo sapiens
  CDR3 for alpha chain variable domain of TCR clone 44785 (TRAV12-3, TRAJ6)
CAMSATSGGSYIPTF

SEQ ID NO: 89570 - protein, 15 aa, Homo sapiens
  CDR3 for beta chain variable domain of TCR clone 44785 (TRBV20-1, TRBJ2-7)
CSARDRVSGMDEQYF

SEQ ID NO: 89571 - protein, 14 aa, Homo sapiens
  CDR3 for alpha chain variable domain of TCR clone 44786 (TRAV12-2, TRAJ11)
CAVEGGSGYSTLTF

SEQ ID NO: 89572 - protein, 15 aa, Homo sapiens
  CDR3 for beta chain variable domain of TCR clone 44786 (TRBV2, TRBJ2-7)
CASILRGTGSWEQYF

SEQ ID NO: 89573 - protein, 14 aa, Homo sapiens
  CDR3 for alpha chain variable domain of TCR clone 44787 (TRAV16, TRAJ33)
CALSAMDSNYQLTW

SEQ ID NO: 89574 - protein, 12 aa, Homo sapiens
  CDR3 for beta chain variable domain of TCR clone 44787 (TRBV28, TRBJ2-6)
CAIQAGANVLTF

SEQ ID NO: 89575 - protein, 14 aa, Homo sapiens
  CDR3 for alpha chain variable domain of TCR clone 44788 (TRAV12-2, TRAJ17)
CAVLFKAAGNKLTF

SEQ ID NO: 89576 - protein, 17 aa, Homo sapiens
  CDR3 for beta chain variable domain of TCR clone 44788 (TRBV20-1, TRBJ2-2)
CSASGSGQGGLTGKLFF

SEQ ID NO: 89577 - protein, 14 aa, Homo sapiens
  CDR3 for alpha chain variable domain of TCR clone 44789 (TRAV13-1, TRAJ40)
CAASMTSGTYKYIF

SEQ ID NO: 89578 - protein, 12 aa, Homo sapiens
  CDR3 for beta chain variable domain of TCR clone 44789 (TRBV14, TRBJ2-7)
CASSLYKDEQYF

SEQ ID NO: 89579 - protein, 16 aa, Homo sapiens
  CDR3 for alpha chain variable domain of TCR clone 44790 (TRAV29/DV5, TRAJ52)
CAASGRRGTSYGKLTF

SEQ ID NO: 89580 - protein, 15 aa, Homo sapiens
  CDR3 for beta chain variable domain of TCR clone 44790 (TRBV4-1, TRBJ2-7)
CASSQQGQGFDEQYF

SEQ ID NO: 89581 - protein, 16 aa, Homo sapiens
  CDR3 for alpha chain variable domain of TCR clone 44791 (TRAV4, TRAJ22)
CLVGDLYSGSARQLTF

SEQ ID NO: 89582 - protein, 14 aa, Homo sapiens
  CDR3 for beta chain variable domain of TCR clone 44791 (TRBV19, TRBJ2-1)
CASPTFVLSGEQFF

SEQ ID NO: 89583 - protein, 12 aa, Homo sapiens
  CDR3 for alpha chain variable domain of TCR clone 44792 (TRAV12-1, TRAJ30)
CVVNMGDDKIIF

SEQ ID NO: 89584 - protein, 17 aa, Homo sapiens
  CDR3 for beta chain variable domain of TCR clone 44792 (TRBV6-3, TRBJ2-2)
CASSYGEEWGRTGELFF

SEQ ID NO: 89585 - protein, 11 aa, Homo sapiens
  CDR3 for alpha chain variable domain of TCR clone 44793 (TRAV17, TRAJ9)
CATTGGFKTIF

SEQ ID NO: 89586 - protein, 14 aa, Homo sapiens
  CDR3 for beta chain variable domain of TCR clone 44793 (TRBV19, TRBJ2-1)
CASPTFVLSGEQFF

SEQ ID NO: 89587 - protein, 14 aa, Homo sapiens
  CDR3 for alpha chain variable domain of TCR clone 44794 (TRAV17, TRAJ39)
CATDPVREGNMLTF

SEQ ID NO: 89588 - protein, 15 aa, Homo sapiens
  CDR3 for beta chain variable domain of TCR clone 44794 (TRBV13, TRBJ1-5)
CASSFGQGGVQPQHF

SEQ ID NO: 89589 - protein, 12 aa, Homo sapiens
  CDR3 for alpha chain variable domain of TCR clone 44795 (TRAV29/DV5, TRAJ43)
CAAPYNNNDMRS

SEQ ID NO: 89590 - protein, 17 aa, Homo sapiens
  CDR3 for beta chain variable domain of TCR clone 44795 (TRBV19, TRBJ2-6)
CASSTGQVFSGANVLTF

SEQ ID NO: 89591 - protein, 16 aa, Homo sapiens
  CDR3 for alpha chain variable domain of TCR clone 44796 (TRAV30, TRAJ24)
CGTEIVDADSWGKFQF

SEQ ID NO: 89592 - protein, 19 aa, Homo sapiens
  CDR3 for beta chain variable domain of TCR clone 44796 (TRBV25-1, TRBJ2-2)
CALLVYRVDRGRKTGELFF

SEQ ID NO: 89593 - protein, 10 aa, Homo sapiens
  CDR3 for alpha chain variable domain of TCR clone 44797 (TRAV1-2, TRAJ20)
CALNDYKLSF

SEQ ID NO: 89594 - protein, 14 aa, Homo sapiens
  CDR3 for beta chain variable domain of TCR clone 44797 (TRBV25-1, TRBJ1-1)
CASTHLGGNTEAFF

SEQ ID NO: 89595 - protein, 10 aa, Homo sapiens
  CDR3 for alpha chain variable domain of TCR clone 44798 (TRAV12-2, TRAJ49)
CAVRRNQFYF

SEQ ID NO: 89596 - protein, 14 aa, Homo sapiens
  CDR3 for beta chain variable domain of TCR clone 44798 (TRBV19, TRBJ2-1)
CASPTFVLSGEQFF

SEQ ID NO: 89597 - protein, 14 aa, Homo sapiens
  CDR3 for alpha chain variable domain of TCR clone 44799 (TRAV12-3, TRAJ10)
SHLPLTGGGNKLTF

SEQ ID NO: 89598 - protein, 17 aa, Homo sapiens
  CDR3 for beta chain variable domain of TCR clone 44799 (TRBV5-4, TRBJ2-3)
CISVPAVLTASTDTQYF

SEQ ID NO: 89599 - protein, 11 aa, Homo sapiens
  CDR3 for alpha chain variable domain of TCR clone 44800 (TRAV21, TRAJ34)
CAHYNTDKLIF

SEQ ID NO: 89600 - protein, 16 aa, Homo sapiens
  CDR3 for beta chain variable domain of TCR clone 44800 (TRBV7-3, TRBJ2-2)
CASSLKRGTLSGELFF

SEQ ID NO: 89601 - protein, 13 aa, Homo sapiens
  CDR3 for alpha chain variable domain of TCR clone 44801 (TRAV12-3, TRAJ9)
CAMGNTGGFKTIF

SEQ ID NO: 89602 - protein, 14 aa, Homo sapiens
  CDR3 for beta chain variable domain of TCR clone 44801 (TRBV11-2, TRBJ2-7)
CASSSTGEGYEQYF

SEQ ID NO: 89603 - protein, 15 aa, Homo sapiens
  CDR3 for alpha chain variable domain of TCR clone 44802 (TRAV8-3, TRAJ45)
CASSYSGGGADGLAF

SEQ ID NO: 89604 - protein, 17 aa, Homo sapiens
  CDR3 for beta chain variable domain of TCR clone 44802 (TRBV7-8, TRBJ1-2)
CASSLRPLQGHLYGYTF

SEQ ID NO: 89605 - protein, 15 aa, Homo sapiens
  CDR3 for alpha chain variable domain of TCR clone 44803 (TRAV34, TRAJ38)
CGADFTPGNNRKLVW

SEQ ID NO: 89606 - protein, 12 aa, Homo sapiens
  CDR3 for beta chain variable domain of TCR clone 44803 (TRBV7-9, TRBJ2-7)
CATRTDAYEQYF

SEQ ID NO: 89607 - protein, 17 aa, Homo sapiens
  CDR3 for alpha chain variable domain of TCR clone 44804 (TRAV3, TRAJ6)
CAVRDGPRAGGSYIPTF

SEQ ID NO: 89608 - protein, 14 aa, Homo sapiens
  CDR3 for beta chain variable domain of TCR clone 44804 (TRBV7-2, TRBJ2-7)
GASSPKTSFYEQYF

SEQ ID NO: 89609 - protein, 14 aa, Homo sapiens
  CDR3 for alpha chain variable domain of TCR clone 44805 (TRAV1-2, TRAJ16)
CAVNRFSDGQKLLF

SEQ ID NO: 89610 - protein, 16 aa, Homo sapiens
  CDR3 for beta chain variable domain of TCR clone 44805 (TRBV29-1, TRBJ2-7)
CSVEVVGTSGSYEQYL

SEQ ID NO: 89611 - protein, 16 aa, Homo sapiens
  CDR3 for alpha chain variable domain of TCR clone 44806 (TRAV8-3, TRAJ10)
CAVGPILTGGGNKLTF

SEQ ID NO: 89612 - protein, 16 aa, Homo sapiens
  CDR3 for beta chain variable domain of TCR clone 44806 (TRBV7-2, TRBJ2-5)
CASSSEWLSGQETQYF

SEQ ID NO: 89613 - protein, 15 aa, Homo sapiens
  CDR3 for alpha chain variable domain of TCR clone 44807 (TRAV38-1, TRAJ37)
CAFIFGSGNTGKLIF

SEQ ID NO: 89614 - protein, 12 aa, Homo sapiens
  CDR3 for beta chain variable domain of TCR clone 44807 (TRBV7-9, TRBJ2-7)
CASSSEGYEQYF

SEQ ID NO: 89615 - protein, 17 aa, Homo sapiens
  CDR3 for alpha chain variable domain of TCR clone 44808 (TRAV13-1, TRAJ52)
CAAGRNAGGTSYGKLTF

SEQ ID NO: 89616 - protein, 13 aa, Homo sapiens
  CDR3 for beta chain variable domain of TCR clone 44808 (TRBV12-4, TRBJ1-1)
CASSPGTGFEAFF

SEQ ID NO: 89617 - protein, 14 aa, Homo sapiens
  CDR3 for alpha chain variable domain of TCR clone 44809 (TRAV17, TRAJ22)
RATSPSGSARQLTF

SEQ ID NO: 89618 - protein, 13 aa, Homo sapiens
  CDR3 for beta chain variable domain of TCR clone 44809 (TRBV12-4, TRBJ1-2)
CASSLRQGKGYTF

SEQ ID NO: 89619 - protein, 14 aa, Homo sapiens
  CDR3 for alpha chain variable domain of TCR clone 44810 (TRAV1-2, TRAJ16)
CAVNRFSDGQKLLF

SEQ ID NO: 89620 - protein, 16 aa, Homo sapiens
  CDR3 for beta chain variable domain of TCR clone 44810 (TRBV12-4, TRBJ1-5)
CASSSGPRGSNQPQHF

SEQ ID NO: 89621 - protein, 16 aa, Homo sapiens
  CDR3 for alpha chain variable domain of TCR clone 44811 (TRAV30, TRAJ24)
CGTEIVDADSWGKFRF

SEQ ID NO: 89622 - protein, 15 aa, Homo sapiens
  CDR3 for beta chain variable domain of TCR clone 44811 (TRBV9, TRBJ1-6)
CASSVAGTGDSPLHF

SEQ ID NO: 89623 - protein, 12 aa, Homo sapiens
  CDR3 for alpha chain variable domain of TCR clone 44812 (TRAV12-3, TRAJ17)
CAMTLTGNKLTF

SEQ ID NO: 89624 - protein, 13 aa, Homo sapiens
  CDR3 for beta chain variable domain of TCR clone 44812 (TRBV5-1, TRBJ1-2)
CASNSTGVYGYTF

SEQ ID NO: 89625 - protein, 16 aa, Homo sapiens
  CDR3 for alpha chain variable domain of TCR clone 44813 (TRAV30, TRAJ24)
CGTEIVDADSWGKFQF

SEQ ID NO: 89626 - protein, 14 aa, Homo sapiens
  CDR3 for beta chain variable domain of TCR clone 44813 (TRBV12-5, TRBJ2-5)
CASASRTHQETQYF

SEQ ID NO: 89627 - protein, 14 aa, Homo sapiens
  CDR3 for alpha chain variable domain of TCR clone 44814 (TRAV8-3, TRAJ3)
CAVVPRSSASKIIF

SEQ ID NO: 89628 - protein, 18 aa, Homo sapiens
  CDR3 for beta chain variable domain of TCR clone 44814 (TRBV4-1, TRBJ2-3)
CASSQLTSGGGIRSILAQ

SEQ ID NO: 89629 - protein, 16 aa, Homo sapiens
  CDR3 for alpha chain variable domain of TCR clone 44815 (TRAV3, TRAJ28)
CAVLPRSGAGSYQLTF

SEQ ID NO: 89630 - protein, 13 aa, Homo sapiens
  CDR3 for beta chain variable domain of TCR clone 44815 (TRBV12-4, TRBJ2-5)
CASRLAAQETQYF

SEQ ID NO: 89631 - protein, 14 aa, Homo sapiens
  CDR3 for alpha chain variable domain of TCR clone 44816 (TRAV9-2, TRAJ17)
CALYIYNAGNMLTF

SEQ ID NO: 89632 - protein, 15 aa, Homo sapiens
  CDR3 for beta chain variable domain of TCR clone 44816 (TRBV7-2, TRBJ1-2)
CASSLAPDRGLGYTF

SEQ ID NO: 89633 - protein, 13 aa, Homo sapiens
  CDR3 for alpha chain variable domain of TCR clone 44817 (TRAV8-3, TRAJ36)
CAVGATGANNLFF

SEQ ID NO: 89634 - protein, 13 aa, Homo sapiens
  CDR3 for beta chain variable domain of TCR clone 44817 (TRBV12-4, TRBJ1-2)
CASSLRQGKGDTF

SEQ ID NO: 89635 - protein, 11 aa, Homo sapiens
  CDR3 for alpha chain variable domain of TCR clone 44818 (TRAV35, TRAJ34)
CWARNTDELIF

SEQ ID NO: 89636 - protein, 14 aa, Homo sapiens
  CDR3 for beta chain variable domain of TCR clone 44818 (TRBV5-1, TRBJ2-7)
CASSRGESLYEQYF

SEQ ID NO: 89637 - protein, 12 aa, Homo sapiens
  CDR3 for alpha chain variable domain of TCR clone 44819 (TRAV13-2, TRAJ23)
CAERHRGGKLIF

SEQ ID NO: 89638 - protein, 16 aa, Homo sapiens
  CDR3 for beta chain variable domain of TCR clone 44819 (TRBV20-1, TRBJ1-4)
CSAPRQGLLTNEKLFF

SEQ ID NO: 89639 - protein, 14 aa, Homo sapiens
  CDR3 for alpha chain variable domain of TCR clone 44820 (TRAV1-2, TRAJ8)
CAVREDTGFQKLVF

SEQ ID NO: 89640 - protein, 15 aa, Homo sapiens
  CDR3 for beta chain variable domain of TCR clone 44820 (TRBV11-3, TRBJ2-1)
CASSLGDSPHNEQFF

SEQ ID NO: 89641 - protein, 16 aa, Homo sapiens
  CDR3 for alpha chain variable domain of TCR clone 44821 (TRAV12-3, TRAJ53)
CAMSPGSGGSNYKLTF

SEQ ID NO: 89642 - protein, 14 aa, Homo sapiens
  CDR3 for beta chain variable domain of TCR clone 44821 (TRBV7-6, TRBJ2-3)
CASSLGTVTDTQYL

SEQ ID NO: 89643 - protein, 14 aa, Homo sapiens
  CDR3 for alpha chain variable domain of TCR clone 44822 (TRAV13-1, TRAJ35)
CAASKGGLGMCCIA

SEQ ID NO: 89644 - protein, 13 aa, Homo sapiens
  CDR3 for beta chain variable domain of TCR clone 44822 (TRBV7-3, TRBJ1-1)
CASSQDWGAEAFF

SEQ ID NO: 89645 - protein, 15 aa, Homo sapiens
  CDR3 for alpha chain variable domain of TCR clone 44823 (TRAV8-3, TRAJ45)
CASSYSGGGADGPTF

SEQ ID NO: 89646 - protein, 15 aa, Homo sapiens
  CDR3 for beta chain variable domain of TCR clone 44823 (TRBV18, TRBJ1-1)
CASSPRQGENTEAFF

SEQ ID NO: 89647 - protein, 13 aa, Homo sapiens
  CDR3 for alpha chain variable domain of TCR clone 44824 (TRAV2, TRAJ40)
CAVVTSGTYKYIF

SEQ ID NO: 89648 - protein, 15 aa, Homo sapiens
  CDR3 for beta chain variable domain of TCR clone 44824 (TRBV28, TRBJ2-5)
CASSSGRTIQETQYF

SEQ ID NO: 89649 - protein, 13 aa, Homo sapiens
  CDR3 for alpha chain variable domain of TCR clone 44825 (TRAV3, TRAJ21)
CAVREPNFNKFYF

SEQ ID NO: 89650 - protein, 13 aa, Homo sapiens
  CDR3 for beta chain variable domain of TCR clone 44825 (TRBV9, TRBJ2-1)
CASSPSGGNEQFF

SEQ ID NO: 89651 - protein, 15 aa, Homo sapiens
  CDR3 for alpha chain variable domain of TCR clone 44826 (TRAV3, TRAJ20)
CAVRDIKLSDYKLSF

SEQ ID NO: 89652 - protein, 15 aa, Homo sapiens
  CDR3 for beta chain variable domain of TCR clone 44826 (TRBV7-9, TRBJ1-6)
CSSSSPGRGNSPLHF

SEQ ID NO: 89653 - protein, 17 aa, Homo sapiens
  CDR3 for alpha chain variable domain of TCR clone 44827 (TRAV12-2, TRAJ52)
CAVNPYAGGTSYGKLTF

SEQ ID NO: 89654 - protein, 13 aa, Homo sapiens
  CDR3 for beta chain variable domain of TCR clone 44827 (TRBV11-3, TRBJ2-3)
CASSHDTKDTQYF

SEQ ID NO: 89655 - protein, 14 aa, Homo sapiens
  CDR3 for alpha chain variable domain of TCR clone 44828 (TRAV12-2, TRAJ40)
CAVKIPSGTYKYIF

SEQ ID NO: 89656 - protein, 20 aa, Homo sapiens
  CDR3 for beta chain variable domain of TCR clone 44828 (TRBV7-8, TRBJ2-2)
CASSHLFPGPTIHITGELFF

SEQ ID NO: 89657 - protein, 18 aa, Homo sapiens
  CDR3 for alpha chain variable domain of TCR clone 44829 (TRAV21, TRAJ52)
CAVRPSPAGGTSYGKLTF

SEQ ID NO: 89658 - protein, 13 aa, Homo sapiens
  CDR3 for beta chain variable domain of TCR clone 44829 (TRBV19, TRBJ1-1)
CASSPSNGGEAFF

SEQ ID NO: 89659 - protein, 16 aa, Homo sapiens
  CDR3 for alpha chain variable domain of TCR clone 44830 (TRAV12-1, TRAJ43)
CVVSPHRFGAGTRLTV

SEQ ID NO: 89660 - protein, 16 aa, Homo sapiens
  CDR3 for beta chain variable domain of TCR clone 44830 (TRBV27, TRBJ2-2)
CASSSTGGGDTGELFF

SEQ ID NO: 89661 - protein, 13 aa, Homo sapiens
  CDR3 for alpha chain variable domain of TCR clone 44831 (TRAV21, TRAJ27)
CAARPGNAGKSTF

SEQ ID NO: 89662 - protein, 14 aa, Homo sapiens
  CDR3 for beta chain variable domain of TCR clone 44831 (TRBV11-2, TRBJ2-7)
CASSFGAGAYEQYF

SEQ ID NO: 89663 - protein, 15 aa, Homo sapiens
  CDR3 for alpha chain variable domain of TCR clone 44832 (TRAV21, TRAJ38)
CAVRQDAGNNRKLTW

SEQ ID NO: 89664 - protein, 16 aa, Homo sapiens
  CDR3 for beta chain variable domain of TCR clone 44832 (TRBV4-2, TRBJ1-1)
CASRPLDGGGDTEAFF

SEQ ID NO: 89665 - protein, 13 aa, Homo sapiens
  CDR3 for alpha chain variable domain of TCR clone 44833 (TRAV36/DV7, TRAJ7)
CAGTRYGNNRLAF

SEQ ID NO: 89666 - protein, 14 aa, Homo sapiens
  CDR3 for beta chain variable domain of TCR clone 44833 (TRBV19, TRBJ2-1)
CASPTFVLSCEQFF

SEQ ID NO: 89667 - protein, 17 aa, Homo sapiens
  CDR3 for alpha chain variable domain of TCR clone 44834 (TRAV3, TRAJ6)
CAVRDGPRAGGSYIPTF

SEQ ID NO: 89668 - protein, 16 aa, Homo sapiens
  CDR3 for beta chain variable domain of TCR clone 44834 (TRBV19, TRBJ2-3)
CASSPGAASRTDTQYF

SEQ ID NO: 89669 - protein, 18 aa, Homo sapiens
  CDR3 for alpha chain variable domain of TCR clone 44835 (TRAV9-2, TRAJ52)
CALSRHNAGGTSYGKLTF

SEQ ID NO: 89670 - protein, 13 aa, Homo sapiens
  CDR3 for beta chain variable domain of TCR clone 44835 (TRBV11-3, TRBJ2-7)
CASSLDKLYEQYF

SEQ ID NO: 89671 - protein, 13 aa, Homo sapiens
  CDR3 for alpha chain variable domain of TCR clone 44836 (TRAV17, TRAJ26)
CATVDNYGQNFVF

SEQ ID NO: 89672 - protein, 16 aa, Homo sapiens
  CDR3 for beta chain variable domain of TCR clone 44836 (TRBV2, TRBJ2-1)
CASSVGGSLSYNEQLF

SEQ ID NO: 89673 - protein, 16 aa, Homo sapiens
  CDR3 for alpha chain variable domain of TCR clone 44837 (TRAV22, TRAJ45)
CAVERGKRGGADGLTF

SEQ ID NO: 89674 - protein, 13 aa, Homo sapiens
  CDR3 for beta chain variable domain of TCR clone 44837 (TRBV27, TRBJ1-1)
YASSLSIGAEAFF

SEQ ID NO: 89675 - protein, 17 aa, Homo sapiens
  CDR3 for alpha chain variable domain of TCR clone 44838 (TRAV17, TRAJ16)
CATALRFSDARSCSLQG

SEQ ID NO: 89676 - protein, 15 aa, Homo sapiens
  CDR3 for beta chain variable domain of TCR clone 44838 (TRBV20-1, TRBJ1-1)
CSASRGVTGNTEAFF

SEQ ID NO: 89677 - protein, 14 aa, Homo sapiens
  CDR3 for alpha chain variable domain of TCR clone 44839 (TRAV9-2, TRAJ39)
CALYIYNAGNMLTF

SEQ ID NO: 89678 - protein, 14 aa, Homo sapiens
  CDR3 for beta chain variable domain of TCR clone 44839 (TRBV9, TRBJ2-7)
CASSPLRAVGERYF

SEQ ID NO: 89679 - protein, 14 aa, Homo sapiens
  CDR3 for alpha chain variable domain of TCR clone 44840 (TRAV16, TRAJ15)
CALSFNQAGTAPIF

SEQ ID NO: 89680 - protein, 14 aa, Homo sapiens
  CDR3 for beta chain variable domain of TCR clone 44840 (TRBV19, TRBJ2-2)
CATTGHANTGELFF

SEQ ID NO: 89681 - protein, 15 aa, Homo sapiens
  CDR3 for alpha chain variable domain of TCR clone 44841 (TRAV21, TRAJ24)
CAARYSTDSWGKLQF

SEQ ID NO: 89682 - protein, 13 aa, Homo sapiens
  CDR3 for beta chain variable domain of TCR clone 44841 (TRBV11-2, TRBJ2-5)
CASSSTGEETQYF

SEQ ID NO: 89683 - protein, 14 aa, Homo sapiens
  CDR3 for alpha chain variable domain of TCR clone 44842 (TRAV13-2, TRAJ16)
CAENNWEDGQRLLF

SEQ ID NO: 89684 - protein, 14 aa, Homo sapiens
  CDR3 for beta chain variable domain of TCR clone 44842 (TRBV7-9, TRBJ1-1)
CASSLGGLKTEAFF

SEQ ID NO: 89685 - protein, 16 aa, Homo sapiens
  CDR3 for alpha chain variable domain of TCR clone 44843 (TRAV1-2, TRAJ10)
CAVRGVLTGGGNELTF

SEQ ID NO: 89686 - protein, 12 aa, Homo sapiens
  CDR3 for beta chain variable domain of TCR clone 44843 (TRBV7-8, TRBJ2-7)
CASSLGDREQCF

SEQ ID NO: 89687 - protein, 18 aa, Homo sapiens
  CDR3 for alpha chain variable domain of TCR clone 44844 (TRAV2, TRAJ45)
TTVLWRIRSGGGADGLTF

SEQ ID NO: 89688 - protein, 13 aa, Homo sapiens
  CDR3 for beta chain variable domain of TCR clone 44844 (TRBV20-1, TRBJ1-1)
CSARGGGNTEAFF

SEQ ID NO: 89689 - protein, 12 aa, Homo sapiens
  CDR3 for alpha chain variable domain of TCR clone 44845 (TRAV3, TRAJ31)
CAVRDGNARLMF

SEQ ID NO: 89690 - protein, 18 aa, Homo sapiens
  CDR3 for beta chain variable domain of TCR clone 44845 (TRBV7-2, TRBJ2-3)
CAGSLKREGSGITDTQYF

SEQ ID NO: 89691 - protein, 12 aa, Homo sapiens
  CDR3 for alpha chain variable domain of TCR clone 44846 (TRAV30, TRAJ43)
CGTAERGNDMRF

SEQ ID NO: 89692 - protein, 13 aa, Homo sapiens
  CDR3 for beta chain variable domain of TCR clone 44846 (TRBV27, TRBJ2-7)
CASSFSQGYEQYF

SEQ ID NO: 89693 - protein, 12 aa, Homo sapiens
  CDR3 for alpha chain variable domain of TCR clone 44847 (TRAV21, TRAJ39)
CAADDAGNMLTF

SEQ ID NO: 89694 - protein, 13 aa, Homo sapiens
  CDR3 for beta chain variable domain of TCR clone 44847 (TRBV6-1, TRBJ1-1)
CASSRQGNTEAFF

SEQ ID NO: 89695 - protein, 12 aa, Homo sapiens
  CDR3 for alpha chain variable domain of TCR clone 44848 (TRAV9-2, TRAJ26)
CALRGYGQNFVF

SEQ ID NO: 89696 - protein, 16 aa, Homo sapiens
  CDR3 for beta chain variable domain of TCR clone 44848 (TRBV7-3, TRBJ2-2)
CASSLKRGTLSGELFF

SEQ ID NO: 89697 - protein, 14 aa, Homo sapiens
  CDR3 for alpha chain variable domain of TCR clone 44849 (TRAV1-2, TRAJ16)
CAVNRFSDGQKLLF

SEQ ID NO: 89698 - protein, 13 aa, Homo sapiens
  CDR3 for beta chain variable domain of TCR clone 44849 (TRBV11-2, TRBJ2-1)
CASSLDLVNEQFF

SEQ ID NO: 89699 - protein, 11 aa, Homo sapiens
  CDR3 for alpha chain variable domain of TCR clone 44850 (TRAV12-3, TRAJ27)
CAMANADKSTF

SEQ ID NO: 89700 - protein, 13 aa, Homo sapiens
  CDR3 for beta chain variable domain of TCR clone 44850 (TRBV20-1, TRBJ1-1)
CSARVGGNTEAFF

SEQ ID NO: 89701 - protein, 13 aa, Homo sapiens
  CDR3 for alpha chain variable domain of TCR clone 44851 (TRAV12-2, TRAJ22)
CAVKWGSARQLTF

SEQ ID NO: 89702 - protein, 16 aa, Homo sapiens
  CDR3 for beta chain variable domain of TCR clone 44851 (TRBV5-1, TRBJ2-1)
CASSLSSLRESNEQFF

SEQ ID NO: 89703 - protein, 11 aa, Homo sapiens
  CDR3 for alpha chain variable domain of TCR clone 44852 (TRAV23/DV6, TRAJ48)
CAPRWGEKLTF

SEQ ID NO: 89704 - protein, 13 aa, Homo sapiens
  CDR3 for beta chain variable domain of TCR clone 44852 (TRBV12-4, TRBJ2-5)
CASSPGAEETQYF

SEQ ID NO: 89705 - protein, 10 aa, Homo sapiens
  CDR3 for alpha chain variable domain of TCR clone 44853 (TRAV12-2, TRAJ43)
CAAKVLSMRF

SEQ ID NO: 89706 - protein, 14 aa, Homo sapiens
  CDR3 for beta chain variable domain of TCR clone 44853 (TRBV11-2, TRBJ2-7)
SASSLGNSLYEQYF

SEQ ID NO: 89707 - protein, 16 aa, Homo sapiens
  CDR3 for alpha chain variable domain of TCR clone 44854 (TRAV27, TRAJ53)
CAAPAGSGGSNYKLTF

SEQ ID NO: 89708 - protein, 15 aa, Homo sapiens
  CDR3 for beta chain variable domain of TCR clone 44854 (TRBV20-1, TRBJ1-1)
CSASRGVTGNTEAFF

SEQ ID NO: 89709 - protein, 13 aa, Homo sapiens
  CDR3 for alpha chain variable domain of TCR clone 44855 (TRAV12-2, TRAJ7)
CAVNLYGNNRLAF

SEQ ID NO: 89710 - protein, 14 aa, Homo sapiens
  CDR3 for beta chain variable domain of TCR clone 44855 (TRBV25-1, TRBJ1-2)
CASSEATGPYGDTF

SEQ ID NO: 89711 - protein, 14 aa, Homo sapiens
  CDR3 for alpha chain variable domain of TCR clone 44856 (TRAV21, TRAJ52)
CGRAGGTSYGKLTF

SEQ ID NO: 89712 - protein, 14 aa, Homo sapiens
  CDR3 for beta chain variable domain of TCR clone 44856 (TRBV19, TRBJ1-2)
CASGVLGYNYGYTF

SEQ ID NO: 89713 - protein, 14 aa, Homo sapiens
  CDR3 for alpha chain variable domain of TCR clone 44857 (TRAV1-2, TRAJ16)
CAVNRFPDGQKLLF

SEQ ID NO: 89714 - protein, 16 aa, Homo sapiens
  CDR3 for beta chain variable domain of TCR clone 44857 (TRBV20-1, TRBJ1-2)
CSASMGQGVANYGYTF

SEQ ID NO: 89715 - protein, 11 aa, Homo sapiens
  CDR3 for alpha chain variable domain of TCR clone 44858 (TRAV27, TRAJ49)
CAGEPVTSSIL

SEQ ID NO: 89716 - protein, 15 aa, Homo sapiens
  CDR3 for beta chain variable domain of TCR clone 44858 (TRBV7-2, TRBJ2-2)
CASSPTGANTGELFF

SEQ ID NO: 89717 - protein, 16 aa, Homo sapiens
  CDR3 for alpha chain variable domain of TCR clone 44859 (TRAV17, TRAJ35)
CATAEGGIGLGNVLHC

SEQ ID NO: 89718 - protein, 19 aa, Homo sapiens
  CDR3 for beta chain variable domain of TCR clone 44859 (TRBV19, TRBJ2-5)
CASSIGQVTDFFLGETQYF

SEQ ID NO: 89719 - protein, 11 aa, Homo sapiens
  CDR3 for alpha chain variable domain of TCR clone 44860 (TRAV17, TRAJ9)
CATTGGFKTIF

SEQ ID NO: 89720 - protein, 14 aa, Homo sapiens
  CDR3 for beta chain variable domain of TCR clone 44860 (TRBV7-9, TRBJ2-2)
CASSGLADIGELFF

SEQ ID NO: 89721 - protein, 13 aa, Homo sapiens
  CDR3 for alpha chain variable domain of TCR clone 44861 (TRAV2, TRAJ47)
CAVDRGYGNKLVF

SEQ ID NO: 89722 - protein, 17 aa, Homo sapiens
  CDR3 for beta chain variable domain of TCR clone 44861 (TRBV15, TRBJ1-5)
CATSRVKGIYSNQPQHF

SEQ ID NO: 89723 - protein, 13 aa, Homo sapiens
  CDR3 for alpha chain variable domain of TCR clone 44862 (TRAV21, TRAJ57)
CAVTQGGSEKLVF

SEQ ID NO: 89724 - protein, 12 aa, Homo sapiens
  CDR3 for beta chain variable domain of TCR clone 44862 (TRBV28, TRBJ2-3)
CASSLYRDTQYF

SEQ ID NO: 89725 - protein, 12 aa, Homo sapiens
  CDR3 for alpha chain variable domain of TCR clone 44863 (TRAV5, TRAJ16)
CAETSDGQKLLF

SEQ ID NO: 89726 - protein, 16 aa, Homo sapiens
  CDR3 for beta chain variable domain of TCR clone 44863 (TRBV20-1, TRBJ1-4)
CSAPGQGLLTNEKLFF

SEQ ID NO: 89727 - protein, 14 aa, Homo sapiens
  CDR3 for alpha chain variable domain of TCR clone 44864 (TRAV12-1, TRAJ12)
CVVTRMDSSDKLIF

SEQ ID NO: 89728 - protein, 13 aa, Homo sapiens
  CDR3 for beta chain variable domain of TCR clone 44864 (TRBV20-1, TRBJ1-1)
CSARGGGNTEAFF

SEQ ID NO: 89729 - protein, 14 aa, Homo sapiens
  CDR3 for alpha chain variable domain of TCR clone 44865 (TRAV13-1, TRAJ40)
CAASMTSGTYKYIF

SEQ ID NO: 89730 - protein, 15 aa, Homo sapiens
  CDR3 for beta chain variable domain of TCR clone 44865 (TRBV7-3, TRBJ2-1)
CASSLTGGGEVEQFF

SEQ ID NO: 89731 - protein, 14 aa, Homo sapiens
  CDR3 for alpha chain variable domain of TCR clone 44866 (TRAV26-1, TRAJ34)
CIVRVAYNTDKLIF

SEQ ID NO: 89732 - protein, 15 aa, Homo sapiens
  CDR3 for beta chain variable domain of TCR clone 44866 (TRBV20-1, TRBJ2-7)
CSARVPAAYVYEQYF

SEQ ID NO: 89733 - protein, 16 aa, Homo sapiens
  CDR3 for alpha chain variable domain of TCR clone 44867 (TRAV38-2/DV8, TRAJ45)
CAYTTTSGGGADGLTF

SEQ ID NO: 89734 - protein, 14 aa, Homo sapiens
  CDR3 for beta chain variable domain of TCR clone 44867 (TRBV7-9, TRBJ2-2)
CASSLGHLTGELFF

SEQ ID NO: 89735 - protein, 14 aa, Homo sapiens
  CDR3 for alpha chain variable domain of TCR clone 44868 (TRAV38-1, TRAJ29)
CAFVTPSGNTPLVF

SEQ ID NO: 89736 - protein, 14 aa, Homo sapiens
  CDR3 for beta chain variable domain of TCR clone 44868 (TRBV18, TRBJ2-7)
CASSPRGGAYEQYF

SEQ ID NO: 89737 - protein, 15 aa, Homo sapiens
  CDR3 for alpha chain variable domain of TCR clone 44869 (TRAV12-2, TRAJ53)
CAVNGGGGSNYKLTF

SEQ ID NO: 89738 - protein, 19 aa, Homo sapiens
  CDR3 for beta chain variable domain of TCR clone 44869 (TRBV28, TRBJ2-7)
CASSYSGTSRLGWVYEQYF

SEQ ID NO: 89739 - protein, 13 aa, Homo sapiens
  CDR3 for alpha chain variable domain of TCR clone 44870 (TRAV2, TRAJ40)
CAVVTSGTYKYIF

SEQ ID NO: 89740 - protein, 14 aa, Homo sapiens
  CDR3 for beta chain variable domain of TCR clone 44870 (TRBV19, TRBJ2-1)
CASPPFVLSSEQFF

SEQ ID NO: 89741 - protein, 16 aa, Homo sapiens
  CDR3 for alpha chain variable domain of TCR clone 44871 (TRAV4, TRAJ18)
CCVLLIGGSTLGRLYF

SEQ ID NO: 89742 - protein, 15 aa, Homo sapiens
  CDR3 for beta chain variable domain of TCR clone 44871 (TRBV12-4, TRBJ2-5)
CASSPPTGLQETQYF

SEQ ID NO: 89743 - protein, 12 aa, Homo sapiens
  CDR3 for alpha chain variable domain of TCR clone 44872 (TRAV27, TRAJ9)
CAGESGVFKTIF

SEQ ID NO: 89744 - protein, 14 aa, Homo sapiens
  CDR3 for beta chain variable domain of TCR clone 44872 (TRBV6-1, TRBJ2-1)
CASAKDGFYNEQFF

SEQ ID NO: 89745 - protein, 11 aa, Homo sapiens
  CDR3 for alpha chain variable domain of TCR clone 44873 (TRAV12-1, TRAJ30)
CVVNGQDKIIF

SEQ ID NO: 89746 - protein, 16 aa, Homo sapiens
  CDR3 for beta chain variable domain of TCR clone 44873 (TRBV24-1, TRBJ2-3)
CTTSDAISGITDTQYF

SEQ ID NO: 89747 - protein, 12 aa, Homo sapiens
  CDR3 for alpha chain variable domain of TCR clone 44874 (TRAV12-3, TRAJ17)
CAMTLTGNKLTF

SEQ ID NO: 89748 - protein, 13 aa, Homo sapiens
  CDR3 for beta chain variable domain of TCR clone 44874 (TRBV7-9, TRBJ1-2)
CASSLRQNYGYTF

SEQ ID NO: 89749 - protein, 15 aa, Homo sapiens
  CDR3 for alpha chain variable domain of TCR clone 44875 (TRAV8-3, TRAJ40)
CAAPSLGSGTYKYIF

SEQ ID NO: 89750 - protein, 16 aa, Homo sapiens
  CDR3 for beta chain variable domain of TCR clone 44875 (TRBV7-3, TRBJ2-3)
CASSLSGYRPDDTQYF

SEQ ID NO: 89751 - protein, 14 aa, Homo sapiens
  CDR3 for alpha chain variable domain of TCR clone 44876 (TRAV27, TRAJ23)
CAGLSYNQGGKLIL

SEQ ID NO: 89752 - protein, 15 aa, Homo sapiens
  CDR3 for beta chain variable domain of TCR clone 44876 (TRBV20-1, TRBJ2-7)
CSARDRVSGMDEQYF

SEQ ID NO: 89753 - protein, 13 aa, Homo sapiens
  CDR3 for alpha chain variable domain of TCR clone 44877 (TRAV8-4, TRAJ30)
CAVSVNRDDKIIF

SEQ ID NO: 89754 - protein, 13 aa, Homo sapiens
  CDR3 for beta chain variable domain of TCR clone 44877 (TRBV10-2, TRBJ2-3)
CASSESGDHTQYF

SEQ ID NO: 89755 - protein, 15 aa, Homo sapiens
  CDR3 for alpha chain variable domain of TCR clone 44878 (TRAV21, TRAJ53)
CATLNSGDSNYKLTF

SEQ ID NO: 89756 - protein, 15 aa, Homo sapiens
  CDR3 for beta chain variable domain of TCR clone 44878 (TRBV20-1, TRBJ2-7)
CSARDRVSGMDEQYF

SEQ ID NO: 89757 - protein, 13 aa, Homo sapiens
  CDR3 for alpha chain variable domain of TCR clone 44879 (TRAV27, TRAJ17)
CAGAATAGKKLTF

SEQ ID NO: 89758 - protein, 15 aa, Homo sapiens
  CDR3 for beta chain variable domain of TCR clone 44879 (TRBV5-1, TRBJ2-3)
CASRNQAGSTDTQYF

SEQ ID NO: 89759 - protein, 15 aa, Homo sapiens
  CDR3 for alpha chain variable domain of TCR clone 44880 (TRAV13-2, TRAJ10)
CAESRDTGGGNKLTF

SEQ ID NO: 89760 - protein, 20 aa, Homo sapiens
  CDR3 for beta chain variable domain of TCR clone 44880 (TRBV28, TRBJ2-1)
CASTPIGRSPGLAGGNEQFF

SEQ ID NO: 89761 - protein, 13 aa, Homo sapiens
  CDR3 for alpha chain variable domain of TCR clone 44881 (TRAV2, TRAJ15)
CAVASQARTALIF

SEQ ID NO: 89762 - protein, 16 aa, Homo sapiens
  CDR3 for beta chain variable domain of TCR clone 44881 (TRBV5-1, TRBJ1-1)
CASSSGGNSLNTEAFF

SEQ ID NO: 89763 - protein, 11 aa, Homo sapiens
  CDR3 for alpha chain variable domain of TCR clone 44882 (TRAV12-3, TRAJ20)
CAMSYDYKLSF

SEQ ID NO: 89764 - protein, 13 aa, Homo sapiens
  CDR3 for beta chain variable domain of TCR clone 44882 (TRBV7-9, TRBJ2-5)
CASLPSGRETQYF

SEQ ID NO: 89765 - protein, 14 aa, Homo sapiens
  CDR3 for alpha chain variable domain of TCR clone 44883 (TRAV8-6, TRAJ29)
CAVSRASGNTHLVF

SEQ ID NO: 89766 - protein, 13 aa, Homo sapiens
  CDR3 for beta chain variable domain of TCR clone 44883 (TRBV19, TRBJ1-5)
CASSEGSNQPQHF

SEQ ID NO: 89767 - protein, 14 aa, Homo sapiens
  CDR3 for alpha chain variable domain of TCR clone 44884 (TRAV17, TRAJ22)
CATSPAGSARQLTF

SEQ ID NO: 89768 - protein, 15 aa, Homo sapiens
  CDR3 for beta chain variable domain of TCR clone 44884 (TRBV4-1, TRBJ2-5)
CASSQWDLYQETQYF

SEQ ID NO: 89769 - protein, 16 aa, Homo sapiens
  CDR3 for alpha chain variable domain of TCR clone 44885 (TRAV35, TRAJ28)
CAGQRYSGAGSYQLTF

SEQ ID NO: 89770 - protein, 14 aa, Homo sapiens
  CDR3 for beta chain variable domain of TCR clone 44885 (TRBV20-1, TRBJ2-7)
CSAKRGRSSYEQYF

SEQ ID NO: 89771 - protein, 14 aa, Homo sapiens
  CDR3 for alpha chain variable domain of TCR clone 44886 (TRAV13-1, TRAJ9)
RAASALTGGFKTIF

SEQ ID NO: 89772 - protein, 13 aa, Homo sapiens
  CDR3 for beta chain variable domain of TCR clone 44886 (TRBV20-1, TRBJ1-1)
CSAGTVGNTEAFF

SEQ ID NO: 89773 - protein, 14 aa, Homo sapiens
  CDR3 for alpha chain variable domain of TCR clone 44887 (TRAV1-2, TRAJ16)
CAVNRFSDGQKLLF

SEQ ID NO: 89774 - protein, 13 aa, Homo sapiens
  CDR3 for beta chain variable domain of TCR clone 44887 (TRBV7-9, TRBJ1-2)
CASSLKQNYGYTL

SEQ ID NO: 89775 - protein, 14 aa, Homo sapiens
  CDR3 for alpha chain variable domain of TCR clone 44888 (TRAV4, TRAJ20)
CLVGDKVTTTSSAF

SEQ ID NO: 89776 - protein, 15 aa, Homo sapiens
  CDR3 for beta chain variable domain of TCR clone 44888 (TRBV18, TRBJ2-7)
CASSPSSTGNYEQYF

SEQ ID NO: 89777 - protein, 14 aa, Homo sapiens
  CDR3 for alpha chain variable domain of TCR clone 44889 (TRAV1-2, TRAJ16)
CAVNRFSDGKKLLF

SEQ ID NO: 89778 - protein, 12 aa, Homo sapiens
  CDR3 for beta chain variable domain of TCR clone 44889 (TRBV11-2, TRBJ2-2)
CASSLGGGELFF

SEQ ID NO: 89779 - protein, 12 aa, Homo sapiens
  CDR3 for alpha chain variable domain of TCR clone 44890 (TRAV21, TRAJ49)
CAVNDGGNQFYF

SEQ ID NO: 89780 - protein, 14 aa, Homo sapiens
  CDR3 for beta chain variable domain of TCR clone 44890 (TRBV18, TRBJ2-7)
CASSPRGGSYGQYF

SEQ ID NO: 89781 - protein, 14 aa, Homo sapiens
  CDR3 for alpha chain variable domain of TCR clone 44891 (TRAV12-1, TRAJ17)
CVVNYKAAGNKLTF

SEQ ID NO: 89782 - protein, 14 aa, Homo sapiens
  CDR3 for beta chain variable domain of TCR clone 44891 (TRBV12-5, TRBJ2-5)
CASGSRTHQETQYF

SEQ ID NO: 89783 - protein, 14 aa, Homo sapiens
  CDR3 for alpha chain variable domain of TCR clone 44892 (TRAV12-3, TRAJ57)
CAMSAWGGSEKLVF

SEQ ID NO: 89784 - protein, 14 aa, Homo sapiens
  CDR3 for beta chain variable domain of TCR clone 44892 (TRBV18, TRBJ2-5)
CASPPGVSQETQYF

SEQ ID NO: 89785 - protein, 12 aa, Homo sapiens
  CDR3 for alpha chain variable domain of TCR clone 44893 (TRAV12-3, TRAJ17)
CAVTLTGNKLTF

SEQ ID NO: 89786 - protein, 17 aa, Homo sapiens
  CDR3 for beta chain variable domain of TCR clone 44893 (TRBV11-2, TRBJ2-1)
CASSLYPPGVEYNEQFF

SEQ ID NO: 89787 - protein, 12 aa, Homo sapiens
  CDR3 for alpha chain variable domain of TCR clone 44894 (TRAV13-1, TRAJ20)
CAASRGDYKLSF

SEQ ID NO: 89788 - protein, 13 aa, Homo sapiens
  CDR3 for beta chain variable domain of TCR clone 44894 (TRBV7-9, TRBJ1-2)
CASSLKQNYGYTF

SEQ ID NO: 89789 - protein, 12 aa, Homo sapiens
  CDR3 for alpha chain variable domain of TCR clone 44895 (TRAV12-2, TRAJ10)
WGVTGGGNKLTF

SEQ ID NO: 89790 - protein, 13 aa, Homo sapiens
  CDR3 for beta chain variable domain of TCR clone 44895 (TRBV10-3, TRBJ2-7)
CASKLAVNYEQYF

SEQ ID NO: 89791 - protein, 17 aa, Homo sapiens
  CDR3 for alpha chain variable domain of TCR clone 44896 (TRAV17, TRAJ28)
RATDPRRGGAGSYQLTF

SEQ ID NO: 89792 - protein, 16 aa, Homo sapiens
  CDR3 for beta chain variable domain of TCR clone 44896 (TRBV25-1, TRBJ1-1)
CASSGDRDRGRIEAFF

SEQ ID NO: 89793 - protein, 16 aa, Homo sapiens
  CDR3 for alpha chain variable domain of TCR clone 44897 (TRAV12-2, TRAJ32)
CAVNLGQGGSTNKLIF

SEQ ID NO: 89794 - protein, 15 aa, Homo sapiens
  CDR3 for beta chain variable domain of TCR clone 44897 (TRBV20-1, TRBJ2-7)
CSARGPLAGGREQYF

SEQ ID NO: 89795 - protein, 13 aa, Homo sapiens
  CDR3 for alpha chain variable domain of TCR clone 44898 (TRAV27, TRAJ45)
CRSSGGGADGLTF

SEQ ID NO: 89796 - protein, 11 aa, Homo sapiens
  CDR3 for beta chain variable domain of TCR clone 44898 (TRBV19, TRBJ1-1)
CASSIGSEAFL

SEQ ID NO: 89797 - protein, 16 aa, Homo sapiens
  CDR3 for alpha chain variable domain of TCR clone 44899 (TRAV8-3, TRAJ13)
CAVGAYSSGGYQKVTF

SEQ ID NO: 89798 - protein, 15 aa, Homo sapiens
  CDR3 for beta chain variable domain of TCR clone 44899 (TRBV19, TRBJ1-5)
CASSIVWADNQPQHF

SEQ ID NO: 89799 - protein, 20 aa, Homo sapiens
  CDR3 for alpha chain variable domain of TCR clone 44900 (TRAV26-1, TRAJ42)
CCVPLHRQTYYGGSQGNLIF

SEQ ID NO: 89800 - protein, 16 aa, Homo sapiens
  CDR3 for beta chain variable domain of TCR clone 44900 (TRBV7-3, TRBJ2-2)
CASSLKRGTLSGELFF

SEQ ID NO: 89801 - protein, 17 aa, Homo sapiens
  CDR3 for alpha chain variable domain of TCR clone 44901 (TRAV3, TRAJ6)
CAVRDGPRAGGSYIPTS

SEQ ID NO: 89802 - protein, 14 aa, Homo sapiens
  CDR3 for beta chain variable domain of TCR clone 44901 (TRBV7-2, TRBJ2-7)
CASNPKTSFYEQYF

SEQ ID NO: 89803 - protein, 17 aa, Homo sapiens
  CDR3 for alpha chain variable domain of TCR clone 44902 (TRAV3, TRAJ6)
CAVRDGPRAGGSYIPTF

SEQ ID NO: 89804 - protein, 14 aa, Homo sapiens
  CDR3 for beta chain variable domain of TCR clone 44902 (TRBV20-1, TRBJ2-1)
CSPNDEASYNEQFF

SEQ ID NO: 89805 - protein, 11 aa, Homo sapiens
  CDR3 for alpha chain variable domain of TCR clone 44903 (TRAV3, TRAJ21)
RAVGNFNKFYF

SEQ ID NO: 89806 - protein, 16 aa, Homo sapiens
  CDR3 for beta chain variable domain of TCR clone 44903 (TRBV19, TRBJ2-1)
CASGKAGPSSYNEQFF

SEQ ID NO: 89807 - protein, 11 aa, Homo sapiens
  CDR3 for alpha chain variable domain of TCR clone 44904 (TRAV1-1, TRAJ23)
CAVRQGGKLIF

SEQ ID NO: 89808 - protein, 20 aa, Homo sapiens
  CDR3 for beta chain variable domain of TCR clone 44904 (TRBV7-8, TRBJ2-2)
CASSHLFPGATIHITGELFF

SEQ ID NO: 89809 - protein, 18 aa, Homo sapiens
  CDR3 for alpha chain variable domain of TCR clone 44905 (TRAV13-1, TRAJ52)
CAASKRSAGGTSYGKLTF

SEQ ID NO: 89810 - protein, 13 aa, Homo sapiens
  CDR3 for beta chain variable domain of TCR clone 44905 (TRBV12-4, TRBJ2-5)
CASSPGTEETQYF

SEQ ID NO: 89811 - protein, 14 aa, Homo sapiens
  CDR3 for alpha chain variable domain of TCR clone 44906 (TRAV12-3, TRAJ10)
SHLPLTGGGNKLTF

SEQ ID NO: 89812 - protein, 13 aa, Homo sapiens
  CDR3 for beta chain variable domain of TCR clone 44906 (TRBV27, TRBJ1-1)
CASSLSIGAEAFS

SEQ ID NO: 89813 - protein, 12 aa, Homo sapiens
  CDR3 for alpha chain variable domain of TCR clone 44907 (TRAV21, TRAJ13)
PGPSGGHQKVTF

SEQ ID NO: 89814 - protein, 15 aa, Homo sapiens
  CDR3 for beta chain variable domain of TCR clone 44907 (TRBV7-9, TRBJ1-6)
CASSSPGRGNSPLHF

SEQ ID NO: 89815 - protein, 16 aa, Homo sapiens
  CDR3 for alpha chain variable domain of TCR clone 44908 (TRAV30, TRAJ24)
CGTEIVDADSWGNSSL

SEQ ID NO: 89816 - protein, 14 aa, Homo sapiens
  CDR3 for beta chain variable domain of TCR clone 44908 (TRBV19, TRBJ2-7)
CASNFRDTFTGMYF

SEQ ID NO: 89817 - protein, 13 aa, Homo sapiens
  CDR3 for alpha chain variable domain of TCR clone 44909 (TRAV1-1, TRAJ9)
CAAKNTGGCKTIF

SEQ ID NO: 89818 - protein, 14 aa, Homo sapiens
  CDR3 for beta chain variable domain of TCR clone 44909 (TRBV20-1, TRBJ2-1)
CSAQIGGSANEQFF

SEQ ID NO: 89819 - protein, 16 aa, Homo sapiens
  CDR3 for alpha chain variable domain of TCR clone 44910 (TRAV17, TRAJ52)
CATGIIGGTSYGKLTF

SEQ ID NO: 89820 - protein, 12 aa, Homo sapiens
  CDR3 for beta chain variable domain of TCR clone 44910 (TRBV7-3, TRBJ2-1)
RASSFINNEQFF

SEQ ID NO: 89821 - protein, 12 aa, Homo sapiens
  CDR3 for alpha chain variable domain of TCR clone 44911 (TRAV13-1, TRAJ15)
CAANQAGTALIF

SEQ ID NO: 89822 - protein, 14 aa, Homo sapiens
  CDR3 for beta chain variable domain of TCR clone 44911 (TRBV20-1, TRBJ2-5)
CSARYRRLQETQYF

SEQ ID NO: 89823 - protein, 16 aa, Homo sapiens
  CDR3 for alpha chain variable domain of TCR clone 44912 (TRAV12-2, TRAJ18)
CAVTTDRGPTLGRLYF

SEQ ID NO: 89824 - protein, 13 aa, Homo sapiens
  CDR3 for beta chain variable domain of TCR clone 44912 (TRBV19, TRBJ2-3)
CATWDKITDTQYF

SEQ ID NO: 89825 - protein, 13 aa, Homo sapiens
  CDR3 for alpha chain variable domain of TCR clone 44913 (TRAV26-2, TRAJ43)
CILRAVNNNDMRF

SEQ ID NO: 89826 - protein, 15 aa, Homo sapiens
  CDR3 for beta chain variable domain of TCR clone 44913 (TRBV7-2, TRBJ2-1)
CASIHGTGIYNEQFF

SEQ ID NO: 89827 - protein, 15 aa, Homo sapiens
  CDR3 for alpha chain variable domain of TCR clone 44914 (TRAV13-1, TRAJ11)
CAASNRNPGYSTLTF

SEQ ID NO: 89828 - protein, 13 aa, Homo sapiens
  CDR3 for beta chain variable domain of TCR clone 44914 (TRBV4-2, TRBJ1-1)
CASSQAGNTEAFF

SEQ ID NO: 89829 - protein, 15 aa, Homo sapiens
  CDR3 for alpha chain variable domain of TCR clone 44915 (TRAV17, TRAJ57)
CATGPSQGGSEKLVF

SEQ ID NO: 89830 - protein, 14 aa, Homo sapiens
  CDR3 for beta chain variable domain of TCR clone 44915 (TRBV6-5, TRBJ1-2)
CASTRGGGSDGYTF

SEQ ID NO: 89831 - protein, 15 aa, Homo sapiens
  CDR3 for alpha chain variable domain of TCR clone 44916 (TRAV27, TRAJ22)
TVPGWKSGSAGQLTF

SEQ ID NO: 89832 - protein, 17 aa, Homo sapiens
  CDR3 for beta chain variable domain of TCR clone 44916 (TRBV5-5, TRBJ1-1)
CASSLRFRGLMNTEAFF

SEQ ID NO: 89833 - protein, 17 aa, Homo sapiens
  CDR3 for alpha chain variable domain of TCR clone 44917 (TRAV26-1, TRAJ47)
CIVPSLLYMEYGNKLAF

SEQ ID NO: 89834 - protein, 14 aa, Homo sapiens
  CDR3 for beta chain variable domain of TCR clone 44917 (TRBV7-3, TRBJ1-5)
RASSFSGCNQPQHF

SEQ ID NO: 89835 - protein, 16 aa, Homo sapiens
  CDR3 for alpha chain variable domain of TCR clone 44918 (TRAV30, TRAJ24)
CGTEIVDADSWGKFQF

SEQ ID NO: 89836 - protein, 12 aa, Homo sapiens
  CDR3 for beta chain variable domain of TCR clone 44918 (TRBV11-2, TRBJ2-2)
CASSLGGGKLFF

SEQ ID NO: 89837 - protein, 13 aa, Homo sapiens
  CDR3 for alpha chain variable domain of TCR clone 44919 (TRAV26-2, TRAJ43)
CILRAVNNSDMRF

SEQ ID NO: 89838 - protein, 14 aa, Homo sapiens
  CDR3 for beta chain variable domain of TCR clone 44919 (TRBV15, TRBJ2-3)
CATRSGTSTDTQYF

SEQ ID NO: 89839 - protein, 16 aa, Homo sapiens
  CDR3 for alpha chain variable domain of TCR clone 44920 (TRAV12-2, TRAJ45)
CAVILLSGGGADGLTF

SEQ ID NO: 89840 - protein, 19 aa, Homo sapiens
  CDR3 for beta chain variable domain of TCR clone 44920 (TRBV28, TRBJ2-4)
CASSFQPGGPAHYKNIQYF

SEQ ID NO: 89841 - protein, 15 aa, Homo sapiens
  CDR3 for alpha chain variable domain of TCR clone 44921 (TRAV8-3, TRAJ45)
CASSYSGGGADGLTF

SEQ ID NO: 89842 - protein, 17 aa, Homo sapiens
  CDR3 for beta chain variable domain of TCR clone 44921 (TRBV7-8, TRBJ1-2)
CASSLRPLQVHLYGYTF

SEQ ID NO: 89843 - protein, 15 aa, Homo sapiens
  CDR3 for alpha chain variable domain of TCR clone 44922 (TRAV21, TRAJ53)
CATLNSGGSNYKLTF

SEQ ID NO: 89844 - protein, 16 aa, Homo sapiens
  CDR3 for beta chain variable domain of TCR clone 44922 (TRBV29-1, TRBJ1-2)
CSVKANRDIANYGYTF

SEQ ID NO: 89845 - protein, 14 aa, Homo sapiens
  CDR3 for alpha chain variable domain of TCR clone 44923 (TRAV12-2, TRAJ9)
CAVNMEGGGFKPIF

SEQ ID NO: 89846 - protein, 14 aa, Homo sapiens
  CDR3 for beta chain variable domain of TCR clone 44923 (TRBV2, TRBJ2-5)
CASSEVLAQETQYF

SEQ ID NO: 89847 - protein, 15 aa, Homo sapiens
  CDR3 for alpha chain variable domain of TCR clone 44924 (TRAV8-3, TRAJ45)
CSSSYSGGGADGLTF

SEQ ID NO: 89848 - protein, 17 aa, Homo sapiens
  CDR3 for beta chain variable domain of TCR clone 44924 (TRBV7-8, TRBJ1-2)
CASSLRPLQGHLYGYTF

SEQ ID NO: 89849 - protein, 10 aa, Homo sapiens
  CDR3 for alpha chain variable domain of TCR clone 44925 (TRAV26-1, )
CIVSHRVERF

SEQ ID NO: 89850 - protein, 14 aa, Homo sapiens
  CDR3 for beta chain variable domain of TCR clone 44925 (TRBV20-1, TRBJ2-7)
CSAWTALSSYEQYF

SEQ ID NO: 89851 - protein, 12 aa, Homo sapiens
  CDR3 for alpha chain variable domain of TCR clone 44926 (TRAV13-2, TRAJ39)
CAENSERNMLTF

SEQ ID NO: 89852 - protein, 14 aa, Homo sapiens
  CDR3 for beta chain variable domain of TCR clone 44926 (TRBV20-1, TRBJ1-1)
CSAMGGIANTEAFF

SEQ ID NO: 89853 - protein, 15 aa, Homo sapiens
  CDR3 for alpha chain variable domain of TCR clone 44927 (TRAV12-2, TRAJ53)
CAVNGGGGSNYKLTF

SEQ ID NO: 89854 - protein, 15 aa, Homo sapiens
  CDR3 for beta chain variable domain of TCR clone 44927 (TRBV10-2, TRBJ2-6)
CASSEQGTGANVLTF

SEQ ID NO: 89855 - protein, 13 aa, Homo sapiens
  CDR3 for alpha chain variable domain of TCR clone 44928 (TRAV12-3, TRAJ33)
CAMSVNSKYQLIW

SEQ ID NO: 89856 - protein, 13 aa, Homo sapiens
  CDR3 for beta chain variable domain of TCR clone 44928 (TRBV7-2, TRBJ2-2)
CASSLAVTGELFF

SEQ ID NO: 89857 - protein, 11 aa, Homo sapiens
  CDR3 for alpha chain variable domain of TCR clone 44929 (TRAV12-2, TRAJ29)
CAVTLRSPLVF

SEQ ID NO: 89858 - protein, 16 aa, Homo sapiens
  CDR3 for beta chain variable domain of TCR clone 44929 (TRBV19, TRBJ1-5)
CASSRDRGGPRQPQHF

SEQ ID NO: 89859 - protein, 14 aa, Homo sapiens
  CDR3 for alpha chain variable domain of TCR clone 44930 (TRAV25, TRAJ27)
CAGTGNTNAGKSTF

SEQ ID NO: 89860 - protein, 16 aa, Homo sapiens
  CDR3 for beta chain variable domain of TCR clone 44930 (TRBV4-1, TRBJ2-6)
CASSQDGGPGANVLTF

SEQ ID NO: 89861 - protein, 12 aa, Homo sapiens
  CDR3 for alpha chain variable domain of TCR clone 44931 (TRAV3, TRAJ20)
CAVRDGDYNLSF

SEQ ID NO: 89862 - protein, 13 aa, Homo sapiens
  CDR3 for beta chain variable domain of TCR clone 44931 (TRBV9, TRBJ2-1)
CASSVGQGGEQFF

SEQ ID NO: 89863 - protein, 12 aa, Homo sapiens
  CDR3 for alpha chain variable domain of TCR clone 44932 (TRAV1-1, TRAJ39)
CAVPVVGNMPTF

SEQ ID NO: 89864 - protein, 15 aa, Homo sapiens
  CDR3 for beta chain variable domain of TCR clone 44932 (TRBV19, TRBJ1-6)
CASSTQGAVGSPLHF

SEQ ID NO: 89865 - protein, 14 aa, Homo sapiens
  CDR3 for alpha chain variable domain of TCR clone 44933 (TRAV34, TRAJ22)
CGADTSGSARQLTF

SEQ ID NO: 89866 - protein, 16 aa, Homo sapiens
  CDR3 for beta chain variable domain of TCR clone 44933 (TRBV2, TRBJ2-3)
CQHRGTPRRWTDTQYF

SEQ ID NO: 89867 - protein, 16 aa, Homo sapiens
  CDR3 for alpha chain variable domain of TCR clone 44934 (TRAV8-3, TRAJ8)
CAVPRDGNTGFQRLVF

SEQ ID NO: 89868 - protein, 14 aa, Homo sapiens
  CDR3 for beta chain variable domain of TCR clone 44934 (TRBV28, TRBJ1-1)
CASSESGRGTEAFF

SEQ ID NO: 89869 - protein, 11 aa, Homo sapiens
  CDR3 for alpha chain variable domain of TCR clone 44935 (TRAV12-3, TRAJ43)
CAMSVSNDMRF

SEQ ID NO: 89870 - protein, 17 aa, Homo sapiens
  CDR3 for beta chain variable domain of TCR clone 44935 (TRBV4-3, TRBJ2-7)
CASSQGGEGSTSSTSGR

SEQ ID NO: 89871 - protein, 15 aa, Homo sapiens
  CDR3 for alpha chain variable domain of TCR clone 44936 (TRAV38-1, TRAJ37)
CAFIFGSGNTGKLIF

SEQ ID NO: 89872 - protein, 12 aa, Homo sapiens
  CDR3 for beta chain variable domain of TCR clone 44936 (TRBV7-9, TRBJ2-7)
CANSLEGYEQYF

SEQ ID NO: 89873 - protein, 14 aa, Homo sapiens
  CDR3 for alpha chain variable domain of TCR clone 44937 (TRAV17, TRAJ31)
CATVPLSCNARLMF

SEQ ID NO: 89874 - protein, 15 aa, Homo sapiens
  CDR3 for beta chain variable domain of TCR clone 44937 (TRBV15, TRBJ2-2)
CATSGTGGRVGELFF

SEQ ID NO: 89875 - protein, 12 aa, Homo sapiens
  CDR3 for alpha chain variable domain of TCR clone 44938 (TRAV12-1, TRAJ40)
CVVYSGTYKYIF

SEQ ID NO: 89876 - protein, 14 aa, Homo sapiens
  CDR3 for beta chain variable domain of TCR clone 44938 (TRBV6-1, TRBJ1-3)
CASVQGGGGNTIYF

SEQ ID NO: 89877 - protein, 16 aa, Homo sapiens
  CDR3 for alpha chain variable domain of TCR clone 44939 (TRAV17, TRAJ28)
CATDEYSGAGSYQLTF

SEQ ID NO: 89878 - protein, 13 aa, Homo sapiens
  CDR3 for beta chain variable domain of TCR clone 44939 (TRBV7-9, TRBJ1-2)
CASRTGPNYGYAF

SEQ ID NO: 89879 - protein, 14 aa, Homo sapiens
  CDR3 for alpha chain variable domain of TCR clone 44940 (TRAV1-2, TRAJ16)
CAVNRFSDGQKLLF

SEQ ID NO: 89880 - protein, 17 aa, Homo sapiens
  CDR3 for beta chain variable domain of TCR clone 44940 (TRBV9, TRBJ1-6)
CASSVAGQGIHPSTLGT

SEQ ID NO: 89881 - protein, 14 aa, Homo sapiens
  CDR3 for alpha chain variable domain of TCR clone 44941 (TRAV2, TRAJ9)
CAVEDRSGGSKTIF

SEQ ID NO: 89882 - protein, 12 aa, Homo sapiens
  CDR3 for beta chain variable domain of TCR clone 44941 (TRBV7-9, TRBJ2-7)
CASSLEGYEQYF

SEQ ID NO: 89883 - protein, 13 aa, Homo sapiens
  CDR3 for alpha chain variable domain of TCR clone 44942 (TRAV38-2/DV8, TRAJ34)
CAYRNYNTDKLIF

SEQ ID NO: 89884 - protein, 14 aa, Homo sapiens
  CDR3 for beta chain variable domain of TCR clone 44942 (TRBV12-5, TRBJ2-5)
CASGSRTHQETQYF

SEQ ID NO: 89885 - protein, 14 aa, Homo sapiens
  CDR3 for alpha chain variable domain of TCR clone 44943 (TRAV8-1, TRAJ5)
CAVRTDTGRRALTF

SEQ ID NO: 89886 - protein, 12 aa, Homo sapiens
  CDR3 for beta chain variable domain of TCR clone 44943 (TRBV11-2, TRBJ2-1)
CASSPGNSEQFF

SEQ ID NO: 89887 - protein, 15 aa, Homo sapiens
  CDR3 for alpha chain variable domain of TCR clone 44944 (TRAV12-2, TRAJ53)
CAVNGGGGSNYNLTF

SEQ ID NO: 89888 - protein, 13 aa, Homo sapiens
  CDR3 for beta chain variable domain of TCR clone 44944 (TRBV3-1, TRBJ1-1)
CASSPGVITEAFF

SEQ ID NO: 89889 - protein, 15 aa, Homo sapiens
  CDR3 for alpha chain variable domain of TCR clone 44945 (TRAV8-4, TRAJ37)
CAVTYGSSNTGKLIF

SEQ ID NO: 89890 - protein, 13 aa, Homo sapiens
  CDR3 for beta chain variable domain of TCR clone 44945 (TRBV12-4, TRBJ2-5)
CASSLGGSGTQYF

SEQ ID NO: 89891 - protein, 14 aa, Homo sapiens
  CDR3 for alpha chain variable domain of TCR clone 44946 (TRAV17, TRAJ35)
CATDRPGFGNVLHC

SEQ ID NO: 89892 - protein, 19 aa, Homo sapiens
  CDR3 for beta chain variable domain of TCR clone 44946 (TRBV11-3, TRBJ2-2)
CASSTRPGAKTTNTGELSF

SEQ ID NO: 89893 - protein, 13 aa, Homo sapiens
  CDR3 for alpha chain variable domain of TCR clone 44947 (TRAV3, TRAJ29)
CAVRDIIDTPLVF

SEQ ID NO: 89894 - protein, 14 aa, Homo sapiens
  CDR3 for beta chain variable domain of TCR clone 44947 (TRBV27, TRBJ2-1)
CASSATRGYNEQFF

SEQ ID NO: 89895 - protein, 14 aa, Homo sapiens
  CDR3 for alpha chain variable domain of TCR clone 44948 (TRAV35, TRAJ33)
CAGSSQDSNYQLIW

SEQ ID NO: 89896 - protein, 13 aa, Homo sapiens
  CDR3 for beta chain variable domain of TCR clone 44948 (TRBV19, TRBJ1-2)
CASSVPGQDGYTF

SEQ ID NO: 89897 - protein, 12 aa, Homo sapiens
  CDR3 for alpha chain variable domain of TCR clone 44949 (TRAV27, TRAJ24)
CAGEGSWGKFQF

SEQ ID NO: 89898 - protein, 16 aa, Homo sapiens
  CDR3 for beta chain variable domain of TCR clone 44949 (TRBV12-4, TRBJ1-5)
CASSRPVGGSNQPQHF

SEQ ID NO: 89899 - protein, 14 aa, Homo sapiens
  CDR3 for alpha chain variable domain of TCR clone 44950 (TRAV2, TRAJ9)
CAVEDRSGGFKTIF

SEQ ID NO: 89900 - protein, 12 aa, Homo sapiens
  CDR3 for beta chain variable domain of TCR clone 44950 (TRBV12-5, TRBJ2-5)
CASGQGVDTQYF

SEQ ID NO: 89901 - protein, 16 aa, Homo sapiens
  CDR3 for alpha chain variable domain of TCR clone 44951 (TRAV26-1, TRAJ53)
CIVRVAMGGSNYKLTF

SEQ ID NO: 89902 - protein, 12 aa, Homo sapiens
  CDR3 for beta chain variable domain of TCR clone 44951 (TRBV7-9, TRBJ1-5)
CASSTQGQPQHF

SEQ ID NO: 89903 - protein, 11 aa, Homo sapiens
  CDR3 for alpha chain variable domain of TCR clone 44952 (TRAV13-1, TRAJ23)
QGYNQGGKLTF

SEQ ID NO: 89904 - protein, 15 aa, Homo sapiens
  CDR3 for beta chain variable domain of TCR clone 44952 (TRBV2, TRBJ2-1)
CASSDRSSGAREQFF

SEQ ID NO: 89905 - protein, 16 aa, Homo sapiens
  CDR3 for alpha chain variable domain of TCR clone 44953 (TRAV21, TRAJ37)
CAVRTAGSSNTGKLIF

SEQ ID NO: 89906 - protein, 13 aa, Homo sapiens
  CDR3 for beta chain variable domain of TCR clone 44953 (TRBV7-9, TRBJ2-5)
CASLPSGRETEYF

SEQ ID NO: 89907 - protein, 13 aa, Homo sapiens
  CDR3 for alpha chain variable domain of TCR clone 44954 (TRAV3, TRAJ21)
CAVREPDFNKFYF

SEQ ID NO: 89908 - protein, 14 aa, Homo sapiens
  CDR3 for beta chain variable domain of TCR clone 44954 (TRBV12-4, TRBJ1-1)
CASSLGTGGTEAFF

SEQ ID NO: 89909 - protein, 16 aa, Homo sapiens
  CDR3 for alpha chain variable domain of TCR clone 44955 (TRAV30, TRAJ24)
CGTEIVDADSWGKFQF

SEQ ID NO: 89910 - protein, 12 aa, Homo sapiens
  CDR3 for beta chain variable domain of TCR clone 44955 (TRBV11-2, TRBJ2-1)
CASSPENNEQFF

SEQ ID NO: 89911 - protein, 14 aa, Homo sapiens
  CDR3 for alpha chain variable domain of TCR clone 44956 (TRAV20, TRAJ56)
CAVQFSGANSKLTF

SEQ ID NO: 89912 - protein, 14 aa, Homo sapiens
  CDR3 for beta chain variable domain of TCR clone 44956 (TRBV20-1, TRBJ2-7)
CSAKRGRSSYEQYF

SEQ ID NO: 89913 - protein, 17 aa, Homo sapiens
  CDR3 for alpha chain variable domain of TCR clone 44957 (TRAV3, TRAJ42)
CAVRDRDYGGSQGNLIF

SEQ ID NO: 89914 - protein, 15 aa, Homo sapiens
  CDR3 for beta chain variable domain of TCR clone 44957 (TRBV3-1, TRBJ2-1)
CASSQVVDDWEEQFF

SEQ ID NO: 89915 - protein, 15 aa, Homo sapiens
  CDR3 for alpha chain variable domain of TCR clone 44958 (TRAV8-3, TRAJ45)
CASSYSGGGADGLTF

SEQ ID NO: 89916 - protein, 15 aa, Homo sapiens
  CDR3 for beta chain variable domain of TCR clone 44958 (TRBV7-9, TRBJ1-5)
CASSQGHQPNQPQHF

SEQ ID NO: 89917 - protein, 16 aa, Homo sapiens
  CDR3 for alpha chain variable domain of TCR clone 44959 (TRAV12-1, TRAJ22)
CVVNTISSSSARQLTF

SEQ ID NO: 89918 - protein, 13 aa, Homo sapiens
  CDR3 for beta chain variable domain of TCR clone 44959 (TRBV19, TRBJ2-1)
CASNGGVFSEQFF

SEQ ID NO: 89919 - protein, 13 aa, Homo sapiens
  CDR3 for alpha chain variable domain of TCR clone 44960 (TRAV21, TRAJ20)
CAVGLMVDYKLSF

SEQ ID NO: 89920 - protein, 15 aa, Homo sapiens
  CDR3 for beta chain variable domain of TCR clone 44960 (TRBV29-1, TRBJ2-1)
CSVPTGLALYNEQFF

SEQ ID NO: 89921 - protein, 19 aa, Homo sapiens
  CDR3 for alpha chain variable domain of TCR clone 44961 (TRAV29/DV5, TRAJ49)
CSVLLCSKLTVDTGNQFYF

SEQ ID NO: 89922 - protein, 17 aa, Homo sapiens
  CDR3 for beta chain variable domain of TCR clone 44961 (TRBV13, TRBJ2-3)
CASSLARVAGGRNTQYF

SEQ ID NO: 89923 - protein, 17 aa, Homo sapiens
  CDR3 for alpha chain variable domain of TCR clone 44962 (TRAV13-1, TRAJ28)
CAASPPYSGARSYQLTF

SEQ ID NO: 89924 - protein, 15 aa, Homo sapiens
  CDR3 for beta chain variable domain of TCR clone 44962 (TRBV6-3, TRBJ2-2)
CASSFLATLTGELFF

SEQ ID NO: 89925 - protein, 16 aa, Homo sapiens
  CDR3 for alpha chain variable domain of TCR clone 44963 (TRAV30, TRAJ24)
CGTEIVDADSWGKFQF

SEQ ID NO: 89926 - protein, 13 aa, Homo sapiens
  CDR3 for beta chain variable domain of TCR clone 44963 (TRBV12-5, TRBJ2-5)
ASGSRTHQETQYF

SEQ ID NO: 89927 - protein, 14 aa, Homo sapiens
  CDR3 for alpha chain variable domain of TCR clone 44964 (TRAV6, TRAJ6)
CALPTSGGSYTPTF

SEQ ID NO: 89928 - protein, 17 aa, Homo sapiens
  CDR3 for beta chain variable domain of TCR clone 44964 (TRBV5-1, TRBJ2-5)
CASSPVALGQNQETQYF

SEQ ID NO: 89929 - protein, 14 aa, Homo sapiens
  CDR3 for alpha chain variable domain of TCR clone 44965 (TRAV12-2, TRAJ17)
CAVLFKAAGNKLTF

SEQ ID NO: 89930 - protein, 18 aa, Homo sapiens
  CDR3 for beta chain variable domain of TCR clone 44965 (TRBV20-1, TRBJ2-2)
CSARVQTARPSGTGELFF

SEQ ID NO: 89931 - protein, 14 aa, Homo sapiens
  CDR3 for alpha chain variable domain of TCR clone 44966 (TRAV30, TRAJ50)
CGTALKTSYDKVIF

SEQ ID NO: 89932 - protein, 13 aa, Homo sapiens
  CDR3 for beta chain variable domain of TCR clone 44966 (TRBV19, TRBJ1-5)
CASSIEPVQPQHF

SEQ ID NO: 89933 - protein, 11 aa, Homo sapiens
  CDR3 for alpha chain variable domain of TCR clone 44967 (TRAV12-3, TRAJ43)
CAMSVSNDMLF

SEQ ID NO: 89934 - protein, 13 aa, Homo sapiens
  CDR3 for beta chain variable domain of TCR clone 44967 (TRBV20-1, TRBJ1-1)
CSAPLGGGTEAFF

SEQ ID NO: 89935 - protein, 14 aa, Homo sapiens
  CDR3 for alpha chain variable domain of TCR clone 44968 (TRAV9-2, TRAJ39)
CALYIYNAGNMLTF

SEQ ID NO: 89936 - protein, 13 aa, Homo sapiens
  CDR3 for beta chain variable domain of TCR clone 44968 (TRBV7-7, TRBJ2-5)
CASSRSGQETQYF

SEQ ID NO: 89937 - protein, 15 aa, Homo sapiens
  CDR3 for alpha chain variable domain of TCR clone 44969 (TRAV8-1, TRAJ6)
CAVNTPPRRKLHTYI

SEQ ID NO: 89938 - protein, 14 aa, Homo sapiens
  CDR3 for beta chain variable domain of TCR clone 44969 (TRBV12-5, TRBJ2-5)
CASGSRTHQETQYF

SEQ ID NO: 89939 - protein, 12 aa, Homo sapiens
  CDR3 for alpha chain variable domain of TCR clone 44970 (TRAV13-2, TRAJ23)
CAERHRGGKLIF

SEQ ID NO: 89940 - protein, 15 aa, Homo sapiens
  CDR3 for beta chain variable domain of TCR clone 44970 (TRBV7-9, TRBJ1-6)
CASSSPGRGNSTLHF

SEQ ID NO: 89941 - protein, 13 aa, Homo sapiens
  CDR3 for alpha chain variable domain of TCR clone 44971 (TRAV21, TRAJ56)
CAARLGANSKLTF

SEQ ID NO: 89942 - protein, 12 aa, Homo sapiens
  CDR3 for beta chain variable domain of TCR clone 44971 (TRBV12-4, TRBJ2-3)
CASSSTTDTQYF

SEQ ID NO: 89943 - protein, 14 aa, Homo sapiens
  CDR3 for alpha chain variable domain of TCR clone 44972 (TRAV12-1, TRAJ17)
CVVNYKAAGNKLTF

SEQ ID NO: 89944 - protein, 15 aa, Homo sapiens
  CDR3 for beta chain variable domain of TCR clone 44972 (TRBV5-1, TRBJ1-4)
FAPAAWKDGNEKLFF

SEQ ID NO: 89945 - protein, 15 aa, Homo sapiens
  CDR3 for alpha chain variable domain of TCR clone 44973 (TRAV13-1, TRAJ6)
FAAIHPSGGSYIPTF

SEQ ID NO: 89946 - protein, 14 aa, Homo sapiens
  CDR3 for beta chain variable domain of TCR clone 44973 (TRBV7-9, TRBJ2-2)
CASGLAINTGELFF

SEQ ID NO: 89947 - protein, 19 aa, Homo sapiens
  CDR3 for alpha chain variable domain of TCR clone 44974 (TRAV2, TRAJ20)
ILQVREADAAVYRDCKLSF

SEQ ID NO: 89948 - protein, 14 aa, Homo sapiens
  CDR3 for beta chain variable domain of TCR clone 44974 (TRBV20-1, TRBJ2-5)
QCRGTGGLQETQYF

SEQ ID NO: 89949 - protein, 13 aa, Homo sapiens
  CDR3 for alpha chain variable domain of TCR clone 44975 (TRAV8-3, TRAJ28)
CAVGAVGSYQLTF

SEQ ID NO: 89950 - protein, 13 aa, Homo sapiens
  CDR3 for beta chain variable domain of TCR clone 44975 (TRBV7-3, TRBJ1-1)
CASSQDWGAEAFF

SEQ ID NO: 89951 - protein, 13 aa, Homo sapiens
  CDR3 for alpha chain variable domain of TCR clone 44976 (TRAV21, TRAJ57)
CAVTQGGSEKLVF

SEQ ID NO: 89952 - protein, 12 aa, Homo sapiens
  CDR3 for beta chain variable domain of TCR clone 44976 (TRBV7-8, TRBJ2-7)
CASSLGDREQYF

SEQ ID NO: 89953 - protein, 13 aa, Homo sapiens
  CDR3 for alpha chain variable domain of TCR clone 44977 (TRAV35, TRAJ43)
CAGYPYNNNDMRF

SEQ ID NO: 89954 - protein, 15 aa, Homo sapiens
  CDR3 for beta chain variable domain of TCR clone 44977 (TRBV25-1, TRBJ1-4)
CASSKRVATNEKLFF

SEQ ID NO: 89955 - protein, 12 aa, Homo sapiens
  CDR3 for alpha chain variable domain of TCR clone 44978 (TRAV3, TRAJ20)
CAVRDPDYKLSF

SEQ ID NO: 89956 - protein, 14 aa, Homo sapiens
  CDR3 for beta chain variable domain of TCR clone 44978 (TRBV19, TRBJ1-5)
CASRAPDSFLSQHF

SEQ ID NO: 89957 - protein, 16 aa, Homo sapiens
  CDR3 for alpha chain variable domain of TCR clone 44979 (TRAV12-2, TRAJ10)
CAVNRVLTGGGKKLTF

SEQ ID NO: 89958 - protein, 12 aa, Homo sapiens
  CDR3 for beta chain variable domain of TCR clone 44979 (TRBV28, TRBJ2-7)
CASSFSSYEQYF

SEQ ID NO: 89959 - protein, 13 aa, Homo sapiens
  CDR3 for alpha chain variable domain of TCR clone 44980 (TRAV38-2/DV8, TRAJ34)
CAYRTWNTDKLIF

SEQ ID NO: 89960 - protein, 18 aa, Homo sapiens
  CDR3 for beta chain variable domain of TCR clone 44980 (TRBV6-6, TRBJ1-3)
CASSYSKWDSISGSTIYF

SEQ ID NO: 89961 - protein, 13 aa, Homo sapiens
  CDR3 for alpha chain variable domain of TCR clone 44981 (TRAV12-1, TRAJ26)
CVVRRNYGQNFVF

SEQ ID NO: 89962 - protein, 14 aa, Homo sapiens
  CDR3 for beta chain variable domain of TCR clone 44981 (TRBV6-1, TRBJ1-3)
CASVQGGGGNTIYF

SEQ ID NO: 89963 - protein, 15 aa, Homo sapiens
  CDR3 for alpha chain variable domain of TCR clone 44982 (TRAV1-2, TRAJ12)
CADARWMDSSYKLIF

SEQ ID NO: 89964 - protein, 18 aa, Homo sapiens
  CDR3 for beta chain variable domain of TCR clone 44982 (TRBV11-2, TRBJ2-7)
CASSGGGPRRAVLRAGHQ

SEQ ID NO: 89965 - protein, 14 aa, Homo sapiens
  CDR3 for alpha chain variable domain of TCR clone 44983 (TRAV12-3, TRAJ9)
CAMSPNTGGFKTIF

SEQ ID NO: 89966 - protein, 13 aa, Homo sapiens
  CDR3 for beta chain variable domain of TCR clone 44983 (TRBV19, TRBJ1-5)
CASSIGGEQPQHF

SEQ ID NO: 89967 - protein, 14 aa, Homo sapiens
  CDR3 for alpha chain variable domain of TCR clone 44984 (TRAV1-2, TRAJ8)
CAVREDTGFQKLVF

SEQ ID NO: 89968 - protein, 14 aa, Homo sapiens
  CDR3 for beta chain variable domain of TCR clone 44984 (TRBV19, TRBJ1-1)
CASSLGGANTEAFF

SEQ ID NO: 89969 - protein, 15 aa, Homo sapiens
  CDR3 for alpha chain variable domain of TCR clone 44985 (TRAV4, TRAJ39)
CLVGPNNNAGNMLTF

SEQ ID NO: 89970 - protein, 13 aa, Homo sapiens
  CDR3 for beta chain variable domain of TCR clone 44985 (TRBV11-2, TRBJ2-5)
CASGSTGEETQYF

SEQ ID NO: 89971 - protein, 11 aa, Homo sapiens
  CDR3 for alpha chain variable domain of TCR clone 44986 (TRAV3, TRAJ21)
CAVGNFNKFYF

SEQ ID NO: 89972 - protein, 18 aa, Homo sapiens
  CDR3 for beta chain variable domain of TCR clone 44986 (TRBV6-1, TRBJ1-6)
CASSGSDGRRINNSPLHF

SEQ ID NO: 89973 - protein, 14 aa, Homo sapiens
  CDR3 for alpha chain variable domain of TCR clone 44987 (TRAV12-1, TRAJ17)
CVVTYKAAGNKLTF

SEQ ID NO: 89974 - protein, 17 aa, Homo sapiens
  CDR3 for beta chain variable domain of TCR clone 44987 (TRBV20-1, TRBJ2-1)
CSASSSGLAGSYNEQFF

SEQ ID NO: 89975 - protein, 14 aa, Homo sapiens
  CDR3 for alpha chain variable domain of TCR clone 44988 (TRAV3, TRAJ22)
CAVRDYGSARQLTF

SEQ ID NO: 89976 - protein, 12 aa, Homo sapiens
  CDR3 for beta chain variable domain of TCR clone 44988 (TRBV11-2, TRBJ2-2)
CASSLGGGELFF

SEQ ID NO: 89977 - protein, 11 aa, Homo sapiens
  CDR3 for alpha chain variable domain of TCR clone 44989 (TRAV2, TRAJ13)
CASGGYQKVTF

SEQ ID NO: 89978 - protein, 17 aa, Homo sapiens
  CDR3 for beta chain variable domain of TCR clone 44989 (TRBV7-2, TRBJ2-1)
CASSLGPPWGGLDEQFF

SEQ ID NO: 89979 - protein, 14 aa, Homo sapiens
  CDR3 for alpha chain variable domain of TCR clone 44990 (TRAV12-3, TRAJ5)
CAMSTYTGWRALTF

SEQ ID NO: 89980 - protein, 13 aa, Homo sapiens
  CDR3 for beta chain variable domain of TCR clone 44990 (TRBV28, TRBJ2-3)
CASSTGGGDTQYF

SEQ ID NO: 89981 - protein, 11 aa, Homo sapiens
  CDR3 for alpha chain variable domain of TCR clone 44991 (TRAV12-2, TRAJ43)
CAAYNNNDMRF

SEQ ID NO: 89982 - protein, 14 aa, Homo sapiens
  CDR3 for beta chain variable domain of TCR clone 44991 (TRBV7-8, TRBJ1-2)
CASSAGTAIYGYAF

SEQ ID NO: 89983 - protein, 17 aa, Homo sapiens
  CDR3 for alpha chain variable domain of TCR clone 44992 (TRAV19, TRAJ28)
CALSEASSGAGSYQLTF

SEQ ID NO: 89984 - protein, 20 aa, Homo sapiens
  CDR3 for beta chain variable domain of TCR clone 44992 (TRBV28, TRBJ2-1)
CASTPIGRLPGLAGGNEQFF

SEQ ID NO: 89985 - protein, 11 aa, Homo sapiens
  CDR3 for alpha chain variable domain of TCR clone 44993 (TRAV17, TRAJ9)
CATTGGFKTIF

SEQ ID NO: 89986 - protein, 13 aa, Homo sapiens
  CDR3 for beta chain variable domain of TCR clone 44993 (TRBV2, TRBJ1-1)
CASSVSGYTEAFF

SEQ ID NO: 89987 - protein, 16 aa, Homo sapiens
  CDR3 for alpha chain variable domain of TCR clone 44994 (TRAV27, TRAJ13)
CAGAKSDSGGYQKVTF

SEQ ID NO: 89988 - protein, 13 aa, Homo sapiens
  CDR3 for beta chain variable domain of TCR clone 44994 (TRBV10-3, TRBJ2-7)
CASKLAVNYEQYF

SEQ ID NO: 89989 - protein, 11 aa, Homo sapiens
  CDR3 for alpha chain variable domain of TCR clone 44995 (TRAV13-1, TRAJ6)
CATLRSYIPTF

SEQ ID NO: 89990 - protein, 12 aa, Homo sapiens
  CDR3 for beta chain variable domain of TCR clone 44995 (TRBV11-2, TRBJ2-1)
CASSPGNNEQFF

SEQ ID NO: 89991 - protein, 15 aa, Homo sapiens
  CDR3 for alpha chain variable domain of TCR clone 44996 (TRAV29/DV5, TRAJ24)
CAASGATDSWGKFQF

SEQ ID NO: 89992 - protein, 12 aa, Homo sapiens
  CDR3 for beta chain variable domain of TCR clone 44996 (TRBV11-2, TRBJ2-2)
CASSLPAGELFF

SEQ ID NO: 89993 - protein, 12 aa, Homo sapiens
  CDR3 for alpha chain variable domain of TCR clone 44997 (TRAV13-1, TRAJ21)
CAAKEGFNKFYF

SEQ ID NO: 89994 - protein, 16 aa, Homo sapiens
  CDR3 for beta chain variable domain of TCR clone 44997 (TRBV5-4, TRBJ1-1)
CASSLDSRRDEAFLDK

SEQ ID NO: 89995 - protein, 13 aa, Homo sapiens
  CDR3 for alpha chain variable domain of TCR clone 44998 (TRAV30, TRAJ24)
CGTVTDSWGRLQF

SEQ ID NO: 89996 - protein, 15 aa, Homo sapiens
  CDR3 for beta chain variable domain of TCR clone 44998 (TRBV25-1, TRBJ1-4)
CASSPGDSTNEKLFF

SEQ ID NO: 89997 - protein, 15 aa, Homo sapiens
  CDR3 for alpha chain variable domain of TCR clone 44999 (TRAV2, TRAJ22)
CAVPSRGGSARPLTF

SEQ ID NO: 89998 - protein, 11 aa, Homo sapiens
  CDR3 for beta chain variable domain of TCR clone 44999 (TRBV27, TRBJ2-3)
CASSLGDTQYF

SEQ ID NO: 89999 - protein, 14 aa, Homo sapiens
  CDR3 for alpha chain variable domain of TCR clone 45000 (TRAV26-2, TRAJ32)
CCVGYGGATNKLIF

SEQ ID NO: 90000 - protein, 15 aa, Homo sapiens
  CDR3 for beta chain variable domain of TCR clone 45000 (TRBV7-9, TRBJ1-4)
CASSRTGGFNEKLFF

SEQ ID NO: 90001 - protein, 13 aa, Homo sapiens
  CDR3 for alpha chain variable domain of TCR clone 45001 (TRAV27, TRAJ56)
CAGKPGANSKLTF

SEQ ID NO: 90002 - protein, 18 aa, Homo sapiens
  CDR3 for beta chain variable domain of TCR clone 45001 (TRBV11-2, TRBJ2-3)
WASSLGGASRGAPNTQYF

SEQ ID NO: 90003 - protein, 11 aa, Homo sapiens
  CDR3 for alpha chain variable domain of TCR clone 45002 (TRAV1-2, TRAJ40)
CADPGTYKYIF

SEQ ID NO: 90004 - protein, 16 aa, Homo sapiens
  CDR3 for beta chain variable domain of TCR clone 45002 (TRBV29-1, TRBJ2-7)
CSVEVVGTSGSYEQYF

SEQ ID NO: 90005 - protein, 13 aa, Homo sapiens
  CDR3 for alpha chain variable domain of TCR clone 45003 (TRAV3, TRAJ21)
CAVGEPDFNKFYF

SEQ ID NO: 90006 - protein, 12 aa, Homo sapiens
  CDR3 for beta chain variable domain of TCR clone 45003 (TRBV5-1, TRBJ2-4)
LAGEWTKNIQYF

SEQ ID NO: 90007 - protein, 15 aa, Homo sapiens
  CDR3 for alpha chain variable domain of TCR clone 45004 (TRAV17, TRAJ13)
CATDARSGGYQKVTF

SEQ ID NO: 90008 - protein, 17 aa, Homo sapiens
  CDR3 for beta chain variable domain of TCR clone 45004 (TRBV11-2, TRBJ2-1)
CASSLYPPGVEYNEQFF

SEQ ID NO: 90009 - protein, 11 aa, Homo sapiens
  CDR3 for alpha chain variable domain of TCR clone 45005 (TRAV27, TRAJ49)
CAGEPVTSSIL

SEQ ID NO: 90010 - protein, 20 aa, Homo sapiens
  CDR3 for beta chain variable domain of TCR clone 45005 (TRBV7-8, TRBJ2-2)
CASSHLFPGPTIHITGELFF

SEQ ID NO: 90011 - protein, 14 aa, Homo sapiens
  CDR3 for alpha chain variable domain of TCR clone 45006 (TRAV38-2/DV8, TRAJ30)
CAYMDGLGGDKIIF

SEQ ID NO: 90012 - protein, 15 aa, Homo sapiens
  CDR3 for beta chain variable domain of TCR clone 45006 (TRBV7-9, TRBJ2-2)
CASRPADRDTGELLF

SEQ ID NO: 90013 - protein, 13 aa, Homo sapiens
  CDR3 for alpha chain variable domain of TCR clone 45007 (TRAV12-3, TRAJ41)
CAIAPNSGYALNL

SEQ ID NO: 90014 - protein, 14 aa, Homo sapiens
  CDR3 for beta chain variable domain of TCR clone 45007 (TRBV7-2, TRBJ1-3)
CASSLGTAGNTIYF

SEQ ID NO: 90015 - protein, 16 aa, Homo sapiens
  CDR3 for alpha chain variable domain of TCR clone 45008 (TRAV1-2, TRAJ10)
CAVRGVLTGGGNKLTF

SEQ ID NO: 90016 - protein, 18 aa, Homo sapiens
  CDR3 for beta chain variable domain of TCR clone 45008 (TRBV20-1, TRBJ2-6)
CSAETTPTHGSGANVLTF

SEQ ID NO: 90017 - protein, 13 aa, Homo sapiens
  CDR3 for alpha chain variable domain of TCR clone 45009 (TRAV21, TRAJ57)
CAVTQGGSEKLVF

SEQ ID NO: 90018 - protein, 16 aa, Homo sapiens
  CDR3 for beta chain variable domain of TCR clone 45009 (TRBV29-1, TRBJ2-7)
CSVEDAEDGTAHEQYF

SEQ ID NO: 90019 - protein, 15 aa, Homo sapiens
  CDR3 for alpha chain variable domain of TCR clone 45010 (TRAV8-3, TRAJ45)
CASSYSGGGADGLTF

SEQ ID NO: 90020 - protein, 14 aa, Homo sapiens
  CDR3 for beta chain variable domain of TCR clone 45010 (TRBV7-9, TRBJ2-5)
CASSLDTAQETQYF

SEQ ID NO: 90021 - protein, 13 aa, Homo sapiens
  CDR3 for alpha chain variable domain of TCR clone 45011 (TRAV12-2, TRAJ37)
CAGGSGNTCKLIF

SEQ ID NO: 90022 - protein, 14 aa, Homo sapiens
  CDR3 for beta chain variable domain of TCR clone 45011 (TRBV6-1, TRBJ2-6)
CASQQGAGANVLTF

SEQ ID NO: 90023 - protein, 14 aa, Homo sapiens
  CDR3 for alpha chain variable domain of TCR clone 45012 (TRAV1-2, TRAJ8)
CAVREDTGFQKLVF

SEQ ID NO: 90024 - protein, 15 aa, Homo sapiens
  CDR3 for beta chain variable domain of TCR clone 45012 (TRBV28, TRBJ1-5)
CASSRTGGYVQPQHF

SEQ ID NO: 90025 - protein, 16 aa, Homo sapiens
  CDR3 for alpha chain variable domain of TCR clone 45013 (TRAV17, TRAJ35)
CATAEGGIGFGNVLHC

SEQ ID NO: 90026 - protein, 12 aa, Homo sapiens
  CDR3 for beta chain variable domain of TCR clone 45013 (TRBV11-2, TRBJ2-2)
CASSLEGGELFF

SEQ ID NO: 90027 - protein, 18 aa, Homo sapiens
  CDR3 for alpha chain variable domain of TCR clone 45014 (TRAV12-3, TRAJ52)
CAMSRTNAGGTSCGKLTF

SEQ ID NO: 90028 - protein, 17 aa, Homo sapiens
  CDR3 for beta chain variable domain of TCR clone 45014 (TRBV7-3, TRBJ2-3)
CASSLMKRMRGADTQYF

SEQ ID NO: 90029 - protein, 14 aa, Homo sapiens
  CDR3 for alpha chain variable domain of TCR clone 45015 (TRAV13-1, TRAJ23)
CAASRLGRGGKLIF

SEQ ID NO: 90030 - protein, 13 aa, Homo sapiens
  CDR3 for beta chain variable domain of TCR clone 45015 (TRBV20-1, TRBJ1-1)
CSTPLGGGTEAFL

SEQ ID NO: 90031 - protein, 15 aa, Homo sapiens
  CDR3 for alpha chain variable domain of TCR clone 45016 (TRAV2, TRAJ15)
CAVEDRVQAGTALIF

SEQ ID NO: 90032 - protein, 13 aa, Homo sapiens
  CDR3 for beta chain variable domain of TCR clone 45016 (TRBV10-2, TRBJ2-7)
CASGASGGYEQYF

SEQ ID NO: 90033 - protein, 18 aa, Homo sapiens
  CDR3 for alpha chain variable domain of TCR clone 45017 (TRAV21, TRAJ52)
CPVRPSPAGGTSYGKLTF

SEQ ID NO: 90034 - protein, 17 aa, Homo sapiens
  CDR3 for beta chain variable domain of TCR clone 45017 (TRBV13, TRBJ2-3)
CASSLSRVAGGRNTQYF

SEQ ID NO: 90035 - protein, 16 aa, Homo sapiens
  CDR3 for alpha chain variable domain of TCR clone 45018 (TRAV17, TRAJ22)
CATGPISSGSARQLNF

SEQ ID NO: 90036 - protein, 13 aa, Homo sapiens
  CDR3 for beta chain variable domain of TCR clone 45018 (TRBV11-2, TRBJ2-1)
CASSLGLAGGRFF

SEQ ID NO: 90037 - protein, 18 aa, Homo sapiens
  CDR3 for alpha chain variable domain of TCR clone 45019 (TRAV3, TRAJ54)
CAVRARRGGRSCRQQANF

SEQ ID NO: 90038 - protein, 14 aa, Homo sapiens
  CDR3 for beta chain variable domain of TCR clone 45019 (TRBV4-1, TRBJ2-2)
CASSQAVNTGELFF

SEQ ID NO: 90039 - protein, 12 aa, Homo sapiens
  CDR3 for alpha chain variable domain of TCR clone 45020 (TRAV2, TRAJ10)
CASTGGGNKLTF

SEQ ID NO: 90040 - protein, 14 aa, Homo sapiens
  CDR3 for beta chain variable domain of TCR clone 45020 (TRBV7-2, TRBJ2-2)
CASRGQGAAGELFF

SEQ ID NO: 90041 - protein, 13 aa, Homo sapiens
  CDR3 for alpha chain variable domain of TCR clone 45021 (TRAV29/DV5, TRAJ31)
CAASRNNNARLMF

SEQ ID NO: 90042 - protein, 12 aa, Homo sapiens
  CDR3 for beta chain variable domain of TCR clone 45021 (TRBV14, TRBJ2-7)
CASSLYKDEQHF

SEQ ID NO: 90043 - protein, 13 aa, Homo sapiens
  CDR3 for alpha chain variable domain of TCR clone 45022 (TRAV2, TRAJ20)
CAVEDPSEYKLSF

SEQ ID NO: 90044 - protein, 18 aa, Homo sapiens
  CDR3 for beta chain variable domain of TCR clone 45022 (TRBV25-1, TRBJ2-7)
CASSELTGGESTSSTSGR

SEQ ID NO: 90045 - protein, 14 aa, Homo sapiens
  CDR3 for alpha chain variable domain of TCR clone 45023 (TRAV26-1, TRAJ38)
CIADNAGNSRKLIW

SEQ ID NO: 90046 - protein, 15 aa, Homo sapiens
  CDR3 for beta chain variable domain of TCR clone 45023 (TRBV20-1, TRBJ2-7)
CSARDRVSGMDEQYF

SEQ ID NO: 90047 - protein, 18 aa, Homo sapiens
  CDR3 for alpha chain variable domain of TCR clone 45024 (TRAV21, TRAJ52)
CAVRPSPAGGTSYGKLTF

SEQ ID NO: 90048 - protein, 12 aa, Homo sapiens
  CDR3 for beta chain variable domain of TCR clone 45024 (TRBV7-9, TRBJ1-5)
CASSPQGQPQHF

SEQ ID NO: 90049 - protein, 15 aa, Homo sapiens
  CDR3 for alpha chain variable domain of TCR clone 45025 (TRAV25, TRAJ52)
CAGTSGGTSYGKPTF

SEQ ID NO: 90050 - protein, 16 aa, Homo sapiens
  CDR3 for beta chain variable domain of TCR clone 45025 (TRBV15, TRBJ1-2)
CATSRGPRTGGGGYTF

SEQ ID NO: 90051 - protein, 14 aa, Homo sapiens
  CDR3 for alpha chain variable domain of TCR clone 45026 (TRAV26-1, TRAJ45)
CIEVTGGGAAGLTF

SEQ ID NO: 90052 - protein, 13 aa, Homo sapiens
  CDR3 for beta chain variable domain of TCR clone 45026 (TRBV7-6, TRBJ1-2)
CASSLVADYGYTF

SEQ ID NO: 90053 - protein, 13 aa, Homo sapiens
  CDR3 for alpha chain variable domain of TCR clone 45027 (TRAV35, TRAJ37)
CAGSSGNTGKLIF

SEQ ID NO: 90054 - protein, 16 aa, Homo sapiens
  CDR3 for beta chain variable domain of TCR clone 45027 (TRBV10-3, TRBJ2-1)
CAVSLTSGNSYNEQFF

SEQ ID NO: 90055 - protein, 10 aa, Homo sapiens
  CDR3 for alpha chain variable domain of TCR clone 45028 (TRAV1-2, TRAJ31)
CVSEDARLMI

SEQ ID NO: 90056 - protein, 14 aa, Homo sapiens
  CDR3 for beta chain variable domain of TCR clone 45028 (TRBV19, TRBJ2-1)
CASPTFVLSGEQFF

SEQ ID NO: 90057 - protein, 14 aa, Homo sapiens
  CDR3 for alpha chain variable domain of TCR clone 45029 (TRAV17, TRAJ16)
CATADFSDGQKLLF

SEQ ID NO: 90058 - protein, 15 aa, Homo sapiens
  CDR3 for beta chain variable domain of TCR clone 45029 (TRBV18, TRBJ2-1)
CASSPPSASYNKQFF

SEQ ID NO: 90059 - protein, 13 aa, Homo sapiens
  CDR3 for alpha chain variable domain of TCR clone 45030 (TRAV8-1, TRAJ39)
CAVASNAGNMLTF

SEQ ID NO: 90060 - protein, 15 aa, Homo sapiens
  CDR3 for beta chain variable domain of TCR clone 45030 (TRBV7-2, TRBJ2-1)
CASSLNRGAYNEQFF

SEQ ID NO: 90061 - protein, 15 aa, Homo sapiens
  CDR3 for alpha chain variable domain of TCR clone 45031 (TRAV12-1, TRAJ9)
CVVSFGDTGGFKTIF

SEQ ID NO: 90062 - protein, 15 aa, Homo sapiens
  CDR3 for beta chain variable domain of TCR clone 45031 (TRBV28, TRBJ2-5)
CASSPGQGSIETQYF

SEQ ID NO: 90063 - protein, 14 aa, Homo sapiens
  CDR3 for alpha chain variable domain of TCR clone 45032 (TRAV8-3, TRAJ4)
CAVGASGGYNKLIF

SEQ ID NO: 90064 - protein, 15 aa, Homo sapiens
  CDR3 for beta chain variable domain of TCR clone 45032 (TRBV27, TRBJ1-4)
CASSPRHATNEKLFF

SEQ ID NO: 90065 - protein, 14 aa, Homo sapiens
  CDR3 for alpha chain variable domain of TCR clone 45033 (TRAV20, TRAJ42)
CCAADGGSQGNLIF

SEQ ID NO: 90066 - protein, 14 aa, Homo sapiens
  CDR3 for beta chain variable domain of TCR clone 45033 (TRBV14, TRBJ2-3)
CASSRKLTADTQYF

SEQ ID NO: 90067 - protein, 14 aa, Homo sapiens
  CDR3 for alpha chain variable domain of TCR clone 45034 (TRAV12-2, TRAJ17)
CAVLFKVAGNKLTF

SEQ ID NO: 90068 - protein, 12 aa, Homo sapiens
  CDR3 for beta chain variable domain of TCR clone 45034 (TRBV29-1, TRBJ2-3)
CSVTGGADTQYF

SEQ ID NO: 90069 - protein, 18 aa, Homo sapiens
  CDR3 for alpha chain variable domain of TCR clone 45035 (TRAV21, TRAJ52)
CAVRPPPAGGTSYGKLTF

SEQ ID NO: 90070 - protein, 15 aa, Homo sapiens
  CDR3 for beta chain variable domain of TCR clone 45035 (TRBV19, TRBJ1-1)
CASTSGQIQNTEAFF

SEQ ID NO: 90071 - protein, 18 aa, Homo sapiens
  CDR3 for alpha chain variable domain of TCR clone 45036 (TRAV13-1, TRAJ45)
CAASIGVYSGGGADGLTL

SEQ ID NO: 90072 - protein, 13 aa, Homo sapiens
  CDR3 for beta chain variable domain of TCR clone 45036 (TRBV27, TRBJ1-1)
CASSYATNTEAFF

SEQ ID NO: 90073 - protein, 12 aa, Homo sapiens
  CDR3 for alpha chain variable domain of TCR clone 45037 (TRAV3, TRAJ20)
CAARDPDYKLSF

SEQ ID NO: 90074 - protein, 15 aa, Homo sapiens
  CDR3 for beta chain variable domain of TCR clone 45037 (TRBV2, TRBJ2-2)
CASSRETVGTGELFF

SEQ ID NO: 90075 - protein, 12 aa, Homo sapiens
  CDR3 for alpha chain variable domain of TCR clone 45038 (TRAV30, TRAJ43)
CGTEERGNDMRF

SEQ ID NO: 90076 - protein, 13 aa, Homo sapiens
  CDR3 for beta chain variable domain of TCR clone 45038 (TRBV27, TRBJ2-7)
CASGFSQGYEQYF

SEQ ID NO: 90077 - protein, 12 aa, Homo sapiens
  CDR3 for alpha chain variable domain of TCR clone 45039 (TRAV13-2, TRAJ23)
CAERHRGGKLIF

SEQ ID NO: 90078 - protein, 12 aa, Homo sapiens
  CDR3 for beta chain variable domain of TCR clone 45039 (TRBV7-8, TRBJ1-1)
CASGTATTEAFF

SEQ ID NO: 90079 - protein, 14 aa, Homo sapiens
  CDR3 for alpha chain variable domain of TCR clone 45040 (TRAV12-3, TRAJ53)
CGATSGGSNYKLTF

SEQ ID NO: 90080 - protein, 13 aa, Homo sapiens
  CDR3 for beta chain variable domain of TCR clone 45040 (TRBV19, TRBJ1-5)
CASSTQDGQPRHF

SEQ ID NO: 90081 - protein, 12 aa, Homo sapiens
  CDR3 for alpha chain variable domain of TCR clone 45041 (TRAV29/DV5, TRAJ27)
CAASTNADKSTF

SEQ ID NO: 90082 - protein, 13 aa, Homo sapiens
  CDR3 for beta chain variable domain of TCR clone 45041 (TRBV6-5, TRBJ2-7)
CASSYSGQYEQYF

SEQ ID NO: 90083 - protein, 13 aa, Homo sapiens
  CDR3 for alpha chain variable domain of TCR clone 45042 (TRAV13-2, TRAJ13)
CAERPGGYQKVTF

SEQ ID NO: 90084 - protein, 16 aa, Homo sapiens
  CDR3 for beta chain variable domain of TCR clone 45042 (TRBV18, TRBJ2-5)
CASSPPPSGGAKTQYF

SEQ ID NO: 90085 - protein, 14 aa, Homo sapiens
  CDR3 for alpha chain variable domain of TCR clone 45043 (TRAV12-3, TRAJ10)
SHLPLTGGGDKLTF

SEQ ID NO: 90086 - protein, 12 aa, Homo sapiens
  CDR3 for beta chain variable domain of TCR clone 45043 (TRBV7-3, TRBJ2-5)
CASSSPGGTQYF

SEQ ID NO: 90087 - protein, 12 aa, Homo sapiens
  CDR3 for alpha chain variable domain of TCR clone 45044 (TRAV13-1, TRAJ15)
CAASQAGTALIF

SEQ ID NO: 90088 - protein, 14 aa, Homo sapiens
  CDR3 for beta chain variable domain of TCR clone 45044 (TRBV19, TRBJ2-2)
CASSTLHRSGELFL

SEQ ID NO: 90089 - protein, 11 aa, Homo sapiens
  CDR3 for alpha chain variable domain of TCR clone 45045 (TRAV29/DV5, TRAJ31)
CAAMNNARLMF

SEQ ID NO: 90090 - protein, 15 aa, Homo sapiens
  CDR3 for beta chain variable domain of TCR clone 45045 (TRBV9, TRBJ1-6)
CASSVAGTGDSPLHF

SEQ ID NO: 90091 - protein, 13 aa, Homo sapiens
  CDR3 for alpha chain variable domain of TCR clone 45046 (TRAV38-2/DV8, TRAJ34)
CAYRTWNTDKLIF

SEQ ID NO: 90092 - protein, 14 aa, Homo sapiens
  CDR3 for beta chain variable domain of TCR clone 45046 (TRBV7-2, TRBJ2-7)
CASSLYPGRYEQYF

SEQ ID NO: 90093 - protein, 16 aa, Homo sapiens
  CDR3 for alpha chain variable domain of TCR clone 45047 (TRAV20, TRAJ38)
CAVQASNAGNNRKPIW

SEQ ID NO: 90094 - protein, 16 aa, Homo sapiens
  CDR3 for beta chain variable domain of TCR clone 45047 (TRBV7-8, TRBJ2-6)
CASRVGDSSGANVLTF

SEQ ID NO: 90095 - protein, 15 aa, Homo sapiens
  CDR3 for alpha chain variable domain of TCR clone 45048 (TRAV25, TRAJ52)
CAGRPGGTSYGKLTF

SEQ ID NO: 90096 - protein, 16 aa, Homo sapiens
  CDR3 for beta chain variable domain of TCR clone 45048 (TRBV27, TRBJ2-2)
CASSFRGLVRTGELFF

SEQ ID NO: 90097 - protein, 15 aa, Homo sapiens
  CDR3 for alpha chain variable domain of TCR clone 45049 (TRAV8-3, TRAJ6)
CAVGPLGGGSYIPTF

SEQ ID NO: 90098 - protein, 14 aa, Homo sapiens
  CDR3 for beta chain variable domain of TCR clone 45049 (TRBV19, TRBJ2-2)
CASSTGQGAGELSF

SEQ ID NO: 90099 - protein, 13 aa, Homo sapiens
  CDR3 for alpha chain variable domain of TCR clone 45050 (TRAV21, TRAJ27)
CAARPGNAGKSAL

SEQ ID NO: 90100 - protein, 14 aa, Homo sapiens
  CDR3 for beta chain variable domain of TCR clone 45050 (TRBV7-6, TRBJ2-3)
CASGLGTVTDTQYF

SEQ ID NO: 90101 - protein, 16 aa, Homo sapiens
  CDR3 for alpha chain variable domain of TCR clone 45051 (TRAV30, TRAJ24)
CGTEIVDADSWGKFQF

SEQ ID NO: 90102 - protein, 17 aa, Homo sapiens
  CDR3 for beta chain variable domain of TCR clone 45051 (TRBV4-3, TRBJ1-1)
CASSQDLSGLVNTEAFF

SEQ ID NO: 90103 - protein, 16 aa, Homo sapiens
  CDR3 for alpha chain variable domain of TCR clone 45052 (TRAV26-1, TRAJ37)
CIVRGDGSGNIGKLIF

SEQ ID NO: 90104 - protein, 17 aa, Homo sapiens
  CDR3 for beta chain variable domain of TCR clone 45052 (TRBV4-1, TRBJ2-7)
CASSRDPLGVRGGEQYF

SEQ ID NO: 90105 - protein, 14 aa, Homo sapiens
  CDR3 for alpha chain variable domain of TCR clone 45053 (TRAV12-2, TRAJ13)
CAVKKTGGYQKVTF

SEQ ID NO: 90106 - protein, 11 aa, Homo sapiens
  CDR3 for beta chain variable domain of TCR clone 45053 (TRBV29-1, TRBJ2-5)
CSEDRTRTQYF

SEQ ID NO: 90107 - protein, 14 aa, Homo sapiens
  CDR3 for alpha chain variable domain of TCR clone 45054 (TRAV8-4, TRAJ9)
CAVRINTGGFKTIF

SEQ ID NO: 90108 - protein, 15 aa, Homo sapiens
  CDR3 for beta chain variable domain of TCR clone 45054 (TRBV20-1, TRBJ2-7)
CSARDRVSGMEEQYF

SEQ ID NO: 90109 - protein, 12 aa, Homo sapiens
  CDR3 for alpha chain variable domain of TCR clone 45055 (TRAV20, TRAJ56)
CVVTGANSKLTF

SEQ ID NO: 90110 - protein, 14 aa, Homo sapiens
  CDR3 for beta chain variable domain of TCR clone 45055 (TRBV20-1, TRBJ2-5)
CSALVPGYQETQYF

SEQ ID NO: 90111 - protein, 13 aa, Homo sapiens
  CDR3 for alpha chain variable domain of TCR clone 45056 (TRAV27, TRAJ8)
CAGGPTGFQTLVF

SEQ ID NO: 90112 - protein, 15 aa, Homo sapiens
  CDR3 for beta chain variable domain of TCR clone 45056 (TRBV6-1, TRBJ2-7)
CASSESMGDFYEQYF

SEQ ID NO: 90113 - protein, 13 aa, Homo sapiens
  CDR3 for alpha chain variable domain of TCR clone 45057 (TRAV20, TRAJ20)
CAAQALNDYKLSF

SEQ ID NO: 90114 - protein, 13 aa, Homo sapiens
  CDR3 for beta chain variable domain of TCR clone 45057 (TRBV7-9, TRBJ1-4)
CASSLPGIEKLFF

SEQ ID NO: 90115 - protein, 14 aa, Homo sapiens
  CDR3 for alpha chain variable domain of TCR clone 45058 (TRAV8-4, TRAJ29)
CAVSAVEGNTPLVF

SEQ ID NO: 90116 - protein, 13 aa, Homo sapiens
  CDR3 for beta chain variable domain of TCR clone 45058 (TRBV12-4, TRBJ2-7)
CASSFQGRYEQYS

SEQ ID NO: 90117 - protein, 16 aa, Homo sapiens
  CDR3 for alpha chain variable domain of TCR clone 45059 (TRAV8-3, TRAJ38)
CAVGASNAGNNHIQNP

SEQ ID NO: 90118 - protein, 15 aa, Homo sapiens
  CDR3 for beta chain variable domain of TCR clone 45059 (TRBV11-3, TRBJ1-3)
CASSLFGPSGNTIYF

SEQ ID NO: 90119 - protein, 13 aa, Homo sapiens
  CDR3 for alpha chain variable domain of TCR clone 45060 (TRAV27, TRAJ45)
CRSSGGGGDGLTF

SEQ ID NO: 90120 - protein, 17 aa, Homo sapiens
  CDR3 for beta chain variable domain of TCR clone 45060 (TRBV11-2, TRBJ2-1)
CASSLYPPGVEYNEQFF

SEQ ID NO: 90121 - protein, 14 aa, Homo sapiens
  CDR3 for alpha chain variable domain of TCR clone 45061 (TRAV38-1, TRAJ45)
CAYYSGGGADGLTF

SEQ ID NO: 90122 - protein, 16 aa, Homo sapiens
  CDR3 for beta chain variable domain of TCR clone 45061 (TRBV28, TRBJ2-7)
CASSLFFETGGPEQYF

SEQ ID NO: 90123 - protein, 15 aa, Homo sapiens
  CDR3 for alpha chain variable domain of TCR clone 45062 (TRAV2, TRAJ9)
CAVEDRGTGGFKTIF

SEQ ID NO: 90124 - protein, 17 aa, Homo sapiens
  CDR3 for beta chain variable domain of TCR clone 45062 (TRBV4-3, TRBJ2-1)
CASSQFSSGRASGEQFL

SEQ ID NO: 90125 - protein, 11 aa, Homo sapiens
  CDR3 for alpha chain variable domain of TCR clone 45063 (TRAV1-1, TRAJ23)
CAVRQGGKLIF

SEQ ID NO: 90126 - protein, 11 aa, Homo sapiens
  CDR3 for beta chain variable domain of TCR clone 45063 (TRBV12-4, TRBJ2-3)
CASTATDTQYF

SEQ ID NO: 90127 - protein, 16 aa, Homo sapiens
  CDR3 for alpha chain variable domain of TCR clone 45064 (TRAV16, TRAJ4)
CALSRMFSGGYNKLIF

SEQ ID NO: 90128 - protein, 16 aa, Homo sapiens
  CDR3 for beta chain variable domain of TCR clone 45064 (TRBV24-1, TRBJ2-3)
CATSDPGTGATDKQYF

SEQ ID NO: 90129 - protein, 14 aa, Homo sapiens
  CDR3 for alpha chain variable domain of TCR clone 45065 (TRAV35, TRAJ33)
CAGSSQDSNYQLIW

SEQ ID NO: 90130 - protein, 12 aa, Homo sapiens
  CDR3 for beta chain variable domain of TCR clone 45065 (TRBV7-9, TRBJ2-7)
CASSFGSYEQYF

SEQ ID NO: 90131 - protein, 13 aa, Homo sapiens
  CDR3 for alpha chain variable domain of TCR clone 45066 (TRAV1-2, TRAJ9)
CAALNTGGFKTIV

SEQ ID NO: 90132 - protein, 13 aa, Homo sapiens
  CDR3 for beta chain variable domain of TCR clone 45066 (TRBV19, TRBJ1-2)
CASSVPGQDGYTF

SEQ ID NO: 90133 - protein, 13 aa, Homo sapiens
  CDR3 for alpha chain variable domain of TCR clone 45067 (TRAV17, TRAJ5)
CAPMDTGRRALTF

SEQ ID NO: 90134 - protein, 20 aa, Homo sapiens
  CDR3 for beta chain variable domain of TCR clone 45067 (TRBV28, TRBJ2-1)
CASTPIGRSPGLAGGNEQFF

SEQ ID NO: 90135 - protein, 12 aa, Homo sapiens
  CDR3 for alpha chain variable domain of TCR clone 45068 (TRAV21, TRAJ33)
CAKMDSNYQLIW

SEQ ID NO: 90136 - protein, 17 aa, Homo sapiens
  CDR3 for beta chain variable domain of TCR clone 45068 (TRBV20-1, TRBJ2-2)
CSASGSGQGGLTGELFL

SEQ ID NO: 90137 - protein, 15 aa, Homo sapiens
  CDR3 for alpha chain variable domain of TCR clone 45069 (TRAV3, TRAJ5)
CAVRGLDTGRRALTF

SEQ ID NO: 90138 - protein, 15 aa, Homo sapiens
  CDR3 for beta chain variable domain of TCR clone 45069 (TRBV20-1, TRBJ2-1)
CSARSPGGPGNEQFF

SEQ ID NO: 90139 - protein, 12 aa, Homo sapiens
  CDR3 for alpha chain variable domain of TCR clone 45070 (TRAV12-3, TRAJ17)
CAMTLTGNKLTF

SEQ ID NO: 90140 - protein, 12 aa, Homo sapiens
  CDR3 for beta chain variable domain of TCR clone 45070 (TRBV14, TRBJ2-5)
CASSQLKEAQYF

SEQ ID NO: 90141 - protein, 18 aa, Homo sapiens
  CDR3 for alpha chain variable domain of TCR clone 45071 (TRAV21, TRAJ53)
CAVKGGENSGGSNYKLTF

SEQ ID NO: 90142 - protein, 14 aa, Homo sapiens
  CDR3 for beta chain variable domain of TCR clone 45071 (TRBV7-6, TRBJ2-3)
CASSLGTVTDTQYF

SEQ ID NO: 90143 - protein, 13 aa, Homo sapiens
  CDR3 for alpha chain variable domain of TCR clone 45072 (TRAV35, TRAJ36)
CAGPRIVANNLFF

SEQ ID NO: 90144 - protein, 15 aa, Homo sapiens
  CDR3 for beta chain variable domain of TCR clone 45072 (TRBV28, TRBJ2-5)
CASSPPWSYQETQYF

SEQ ID NO: 90145 - protein, 12 aa, Homo sapiens
  CDR3 for alpha chain variable domain of TCR clone 45073 (TRAV29/DV5, TRAJ49)
CAATDTGNQFYF

SEQ ID NO: 90146 - protein, 15 aa, Homo sapiens
  CDR3 for beta chain variable domain of TCR clone 45073 (TRBV6-3, TRBJ2-7)
CASSSPGTVFYEQYF

SEQ ID NO: 90147 - protein, 18 aa, Homo sapiens
  CDR3 for alpha chain variable domain of TCR clone 45074 (TRAV35, TRAJ28)
CAGHNYPLSGAGSYHLTF

SEQ ID NO: 90148 - protein, 12 aa, Homo sapiens
  CDR3 for beta chain variable domain of TCR clone 45074 (TRBV7-9, TRBJ1-1)
CASSLEGTEAFF

SEQ ID NO: 90149 - protein, 14 aa, Homo sapiens
  CDR3 for alpha chain variable domain of TCR clone 45075 (TRAV12-3, TRAJ22)
CAMSLFGSARQLPF

SEQ ID NO: 90150 - protein, 11 aa, Homo sapiens
  CDR3 for beta chain variable domain of TCR clone 45075 (TRBV12-4, TRBJ2-2)
CASSSAGELFF

SEQ ID NO: 90151 - protein, 12 aa, Homo sapiens
  CDR3 for alpha chain variable domain of TCR clone 45076 (TRAV2, TRAJ26)
CAGSPGRLRSEF

SEQ ID NO: 90152 - protein, 13 aa, Homo sapiens
  CDR3 for beta chain variable domain of TCR clone 45076 (TRBV7-9, TRBJ1-2)
CASSLKQNYGYTF

SEQ ID NO: 90153 - protein, 12 aa, Homo sapiens
  CDR3 for alpha chain variable domain of TCR clone 45077 (TRAV36/DV7, TRAJ40)
RAVAGGTYKYIF

SEQ ID NO: 90154 - protein, 18 aa, Homo sapiens
  CDR3 for beta chain variable domain of TCR clone 45077 (TRBV27, TRBJ2-3)
CASSKGTSGRTSTDTQYF

SEQ ID NO: 90155 - protein, 14 aa, Homo sapiens
  CDR3 for alpha chain variable domain of TCR clone 45078 (TRAV13-1, TRAJ3)
CAAEGYSSASKIIF

SEQ ID NO: 90156 - protein, 14 aa, Homo sapiens
  CDR3 for beta chain variable domain of TCR clone 45078 (TRBV11-2, TRBJ2-3)
CASSRLARTDTQYF

SEQ ID NO: 90157 - protein, 12 aa, Homo sapiens
  CDR3 for alpha chain variable domain of TCR clone 45079 (TRAV17, TRAJ57)
CSTDGGSEKLVF

SEQ ID NO: 90158 - protein, 13 aa, Homo sapiens
  CDR3 for beta chain variable domain of TCR clone 45079 (TRBV7-9, TRBJ2-7)
CASSFAGAYEQYF

SEQ ID NO: 90159 - protein, 12 aa, Homo sapiens
  CDR3 for alpha chain variable domain of TCR clone 45080 (TRAV2, TRAJ33)
CAVEDSNYQLIW

SEQ ID NO: 90160 - protein, 14 aa, Homo sapiens
  CDR3 for beta chain variable domain of TCR clone 45080 (TRBV19, TRBJ2-1)
CASPTFVLSGEQFF

SEQ ID NO: 90161 - protein, 13 aa, Homo sapiens
  CDR3 for alpha chain variable domain of TCR clone 45081 (TRAV2, TRAJ40)
CAVVTSGTYKYIF

SEQ ID NO: 90162 - protein, 14 aa, Homo sapiens
  CDR3 for beta chain variable domain of TCR clone 45081 (TRBV2, TRBJ2-1)
CASSDRAYYNEQFF

SEQ ID NO: 90163 - protein, 13 aa, Homo sapiens
  CDR3 for alpha chain variable domain of TCR clone 45082 (TRAV12-1, TRAJ9)
CVVRNTGGFKTIF

SEQ ID NO: 90164 - protein, 14 aa, Homo sapiens
  CDR3 for beta chain variable domain of TCR clone 45082 (TRBV20-1, TRBJ2-1)
CSAQVGGSANEQFF

SEQ ID NO: 90165 - protein, 14 aa, Homo sapiens
  CDR3 for alpha chain variable domain of TCR clone 45083 (TRAV13-1, TRAJ44)
CAAKATGTASKLTF

SEQ ID NO: 90166 - protein, 18 aa, Homo sapiens
  CDR3 for beta chain variable domain of TCR clone 45083 (TRBV7-9, TRBJ2-7)
CASSLTTSGSRTWYEQYF

SEQ ID NO: 90167 - protein, 14 aa, Homo sapiens
  CDR3 for alpha chain variable domain of TCR clone 45084 (TRAV13-2, TRAJ45)
CAESYRRRCRRTHL

SEQ ID NO: 90168 - protein, 17 aa, Homo sapiens
  CDR3 for beta chain variable domain of TCR clone 45084 (TRBV19, TRBJ1-1)
CASSIAGRGLMNTEAFF

SEQ ID NO: 90169 - protein, 11 aa, Homo sapiens
  CDR3 for alpha chain variable domain of TCR clone 45085 (TRAV2, TRAJ33)
YAVDSNYQLIW

SEQ ID NO: 90170 - protein, 14 aa, Homo sapiens
  CDR3 for beta chain variable domain of TCR clone 45085 (TRBV11-2, TRBJ2-3)
CASSRLARTDTQYF

SEQ ID NO: 90171 - protein, 15 aa, Homo sapiens
  CDR3 for alpha chain variable domain of TCR clone 45086 (TRAV8-3, TRAJ11)
CAVGLLNSGYSTLPF

SEQ ID NO: 90172 - protein, 14 aa, Homo sapiens
  CDR3 for beta chain variable domain of TCR clone 45086 (TRBV4-1, TRBJ2-5)
CASSRSGSGETQYF

SEQ ID NO: 90173 - protein, 18 aa, Homo sapiens
  CDR3 for alpha chain variable domain of TCR clone 45087 (TRAV13-1, TRAJ52)
CAASKRSAGGTSYAKLTF

SEQ ID NO: 90174 - protein, 13 aa, Homo sapiens
  CDR3 for beta chain variable domain of TCR clone 45087 (TRBV12-4, TRBJ1-2)
CASSLRQGKGYTF

SEQ ID NO: 90175 - protein, 12 aa, Homo sapiens
  CDR3 for alpha chain variable domain of TCR clone 45088 (TRAV8-3, TRAJ26)
CAGDNYGQNFIF

SEQ ID NO: 90176 - protein, 12 aa, Homo sapiens
  CDR3 for beta chain variable domain of TCR clone 45088 (TRBV11-2, TRBJ2-1)
CASSPGNNEQFF

SEQ ID NO: 90177 - protein, 14 aa, Homo sapiens
  CDR3 for alpha chain variable domain of TCR clone 45089 (TRAV1-2, TRAJ13)
CAVKHSGGYQKVTF

SEQ ID NO: 90178 - protein, 14 aa, Homo sapiens
  CDR3 for beta chain variable domain of TCR clone 45089 (TRBV7-9, TRBJ2-1)
CASSPRDSLYEQFF

SEQ ID NO: 90179 - protein, 15 aa, Homo sapiens
  CDR3 for alpha chain variable domain of TCR clone 45090 (TRAV8-2, TRAJ40)
CVVLGTTSGTYKYIF

SEQ ID NO: 90180 - protein, 16 aa, Homo sapiens
  CDR3 for beta chain variable domain of TCR clone 45090 (TRBV7-3, TRBJ2-1)
CASSLEGYRSYDEQFF

SEQ ID NO: 90181 - protein, 16 aa, Homo sapiens
  CDR3 for alpha chain variable domain of TCR clone 45091 (TRAV14/DV4, TRAJ53)
CAMREGGGGSNYKLTF

SEQ ID NO: 90182 - protein, 14 aa, Homo sapiens
  CDR3 for beta chain variable domain of TCR clone 45091 (TRBV25-1, TRBJ1-1)
CASTHLGGNTEAFF

SEQ ID NO: 90183 - protein, 16 aa, Homo sapiens
  CDR3 for alpha chain variable domain of TCR clone 45092 (TRAV4, TRAJ5)
CLVGPDRGHGQESTYF

SEQ ID NO: 90184 - protein, 20 aa, Homo sapiens
  CDR3 for beta chain variable domain of TCR clone 45092 (TRBV27, TRBJ2-5)
CTSSLIPSGGGDPVLRARHA

SEQ ID NO: 90185 - protein, 11 aa, Homo sapiens
  CDR3 for alpha chain variable domain of TCR clone 45093 (TRAV17, TRAJ43)
CSTPRSNDMRF

SEQ ID NO: 90186 - protein, 15 aa, Homo sapiens
  CDR3 for beta chain variable domain of TCR clone 45093 (TRBV11-2, TRBJ2-1)
CASSLGTSGLNEQFF

SEQ ID NO: 90187 - protein, 16 aa, Homo sapiens
  CDR3 for alpha chain variable domain of TCR clone 45094 (TRAV12-2, TRAJ6)
CAAPLAGSGGSHIPTF

SEQ ID NO: 90188 - protein, 10 aa, Homo sapiens
  CDR3 for beta chain variable domain of TCR clone 45094 (TRBV28, TRBJ1-2)
CASSSDRAVF

SEQ ID NO: 90189 - protein, 15 aa, Homo sapiens
  CDR3 for alpha chain variable domain of TCR clone 45095 (TRAV25, TRAJ53)
CPTSNSGGSNYKLTL

SEQ ID NO: 90190 - protein, 14 aa, Homo sapiens
  CDR3 for beta chain variable domain of TCR clone 45095 (TRBV11-2, TRBJ2-3)
CASSRLARTDTQYF

SEQ ID NO: 90191 - protein, 13 aa, Homo sapiens
  CDR3 for alpha chain variable domain of TCR clone 45096 (TRAV3, TRAJ15)
CAVRDPAGTALIF

SEQ ID NO: 90192 - protein, 15 aa, Homo sapiens
  CDR3 for beta chain variable domain of TCR clone 45096 (TRBV11-1, TRBJ2-7)
CASSLNYGASYEQYF

SEQ ID NO: 90193 - protein, 12 aa, Homo sapiens
  CDR3 for alpha chain variable domain of TCR clone 45097 (TRAV26-2, TRAJ21)
CILKGNFNKFYF

SEQ ID NO: 90194 - protein, 17 aa, Homo sapiens
  CDR3 for beta chain variable domain of TCR clone 45097 (TRBV15, TRBJ1-2)
CATSGREIDVVNYGYTF

SEQ ID NO: 90195 - protein, 14 aa, Homo sapiens
  CDR3 for alpha chain variable domain of TCR clone 45098 (TRAV12-2, TRAJ44)
CAVNPAGTASILTF

SEQ ID NO: 90196 - protein, 13 aa, Homo sapiens
  CDR3 for beta chain variable domain of TCR clone 45098 (TRBV20-1, TRBJ1-6)
CSAPLGVGSPLHF

SEQ ID NO: 90197 - protein, 12 aa, Homo sapiens
  CDR3 for alpha chain variable domain of TCR clone 45099 (TRAV1-2, TRAJ8)
CAVRTGFQKLVF

SEQ ID NO: 90198 - protein, 16 aa, Homo sapiens
  CDR3 for beta chain variable domain of TCR clone 45099 (TRBV18, TRBJ2-7)
CASSPMGNRRAHEQYF

SEQ ID NO: 90199 - protein, 13 aa, Homo sapiens
  CDR3 for alpha chain variable domain of TCR clone 45100 (TRAV13-2, TRAJ48)
CAEMDFGNEKLTF

SEQ ID NO: 90200 - protein, 13 aa, Homo sapiens
  CDR3 for beta chain variable domain of TCR clone 45100 (TRBV7-3, TRBJ2-5)
CASSFRGGETQYF

SEQ ID NO: 90201 - protein, 12 aa, Homo sapiens
  CDR3 for alpha chain variable domain of TCR clone 45101 (TRAV13-1, TRAJ27)
CAAHTNAGKSTF

SEQ ID NO: 90202 - protein, 13 aa, Homo sapiens
  CDR3 for beta chain variable domain of TCR clone 45101 (TRBV4-2, TRBJ1-1)
CASSQAGNTEAFF

SEQ ID NO: 90203 - protein, 13 aa, Homo sapiens
  CDR3 for alpha chain variable domain of TCR clone 45102 (TRAV8-3, TRAJ44)
CAVAPGTASKLTF

SEQ ID NO: 90204 - protein, 14 aa, Homo sapiens
  CDR3 for beta chain variable domain of TCR clone 45102 (TRBV11-2, TRBJ2-3)
CASSRLARTDTQHF

SEQ ID NO: 90205 - protein, 14 aa, Homo sapiens
  CDR3 for alpha chain variable domain of TCR clone 45103 (TRAV1-2, TRAJ8)
CAVREDTGFQKLVF

SEQ ID NO: 90206 - protein, 13 aa, Homo sapiens
  CDR3 for beta chain variable domain of TCR clone 45103 (TRBV11-2, TRBJ2-5)
CASSSTGEETQYF

SEQ ID NO: 90207 - protein, 11 aa, Homo sapiens
  CDR3 for alpha chain variable domain of TCR clone 45104 (TRAV27, TRAJ45)
CAGAQAEVLTD

SEQ ID NO: 90208 - protein, 17 aa, Homo sapiens
  CDR3 for beta chain variable domain of TCR clone 45104 (TRBV11-2, TRBJ2-1)
CASSLYPPGVEYNEQFF

SEQ ID NO: 90209 - protein, 13 aa, Homo sapiens
  CDR3 for alpha chain variable domain of TCR clone 45105 (TRAV8-3, TRAJ28)
CAVGVVGSYQLTF

SEQ ID NO: 90210 - protein, 15 aa, Homo sapiens
  CDR3 for beta chain variable domain of TCR clone 45105 (TRBV7-9, TRBJ1-5)
CASSQGHQPNQPQHF

SEQ ID NO: 90211 - protein, 13 aa, Homo sapiens
  CDR3 for alpha chain variable domain of TCR clone 45106 (TRAV12-2, TRAJ15)
CAVFNQSGTALIF

SEQ ID NO: 90212 - protein, 15 aa, Homo sapiens
  CDR3 for beta chain variable domain of TCR clone 45106 (TRBV7-8, TRBJ1-5)
CASSRGGGADQPQHF

SEQ ID NO: 90213 - protein, 13 aa, Homo sapiens
  CDR3 for alpha chain variable domain of TCR clone 45107 (TRAV12-3, TRAJ33)
CAMSVNSNYQLTW

SEQ ID NO: 90214 - protein, 13 aa, Homo sapiens
  CDR3 for beta chain variable domain of TCR clone 45107 (TRBV4-1, TRBJ2-2)
CASSQENTGELFF

SEQ ID NO: 90215 - protein, 11 aa, Homo sapiens
  CDR3 for alpha chain variable domain of TCR clone 45108 (TRAV16, TRAJ26)
CALTRWSGFCL

SEQ ID NO: 90216 - protein, 16 aa, Homo sapiens
  CDR3 for beta chain variable domain of TCR clone 45108 (TRBV9, TRBJ2-1)
CASSVGGGGNYNEQFF

SEQ ID NO: 90217 - protein, 17 aa, Homo sapiens
  CDR3 for alpha chain variable domain of TCR clone 45109 (TRAV26-1, TRAJ37)
RIVRVITVSSNTGKLIF

SEQ ID NO: 90218 - protein, 15 aa, Homo sapiens
  CDR3 for beta chain variable domain of TCR clone 45109 (TRBV10-1, TRBJ2-3)
CASSATSGGFDTQYF

SEQ ID NO: 90219 - protein, 13 aa, Homo sapiens
  CDR3 for alpha chain variable domain of TCR clone 45110 (TRAV12-1, TRAJ40)
CVVPTSGTYKYIF

SEQ ID NO: 90220 - protein, 18 aa, Homo sapiens
  CDR3 for beta chain variable domain of TCR clone 45110 (TRBV7-6, TRBJ2-1)
CASIPRTSGMSSYNEQFF

SEQ ID NO: 90221 - protein, 12 aa, Homo sapiens
  CDR3 for alpha chain variable domain of TCR clone 45111 (TRAV2, TRAJ31)
CAVEDNNARLMF

SEQ ID NO: 90222 - protein, 16 aa, Homo sapiens
  CDR3 for beta chain variable domain of TCR clone 45111 (TRBV10-3, TRBJ2-1)
CAISGAGDGGGGEQFF

SEQ ID NO: 90223 - protein, 13 aa, Homo sapiens
  CDR3 for alpha chain variable domain of TCR clone 45112 (TRAV21, TRAJ27)
CAALNTNAGKSTF

SEQ ID NO: 90224 - protein, 14 aa, Homo sapiens
  CDR3 for beta chain variable domain of TCR clone 45112 (TRBV19, TRBJ1-5)
CASSQGYSNQPQHF

SEQ ID NO: 90225 - protein, 14 aa, Homo sapiens
  CDR3 for alpha chain variable domain of TCR clone 45113 (TRAV38-1, TRAJ45)
CAYYSGGGADGLTF

SEQ ID NO: 90226 - protein, 20 aa, Homo sapiens
  CDR3 for beta chain variable domain of TCR clone 45113 (TRBV28, TRBJ2-1)
CSSTPIGRSPGLAGGNEQFF

SEQ ID NO: 90227 - protein, 14 aa, Homo sapiens
  CDR3 for alpha chain variable domain of TCR clone 45114 (TRAV12-3, TRAJ29)
CAMSPYSGNTPLVF

SEQ ID NO: 90228 - protein, 12 aa, Homo sapiens
  CDR3 for beta chain variable domain of TCR clone 45114 (TRBV9, TRBJ2-1)
CASSVGGADIFF

SEQ ID NO: 90229 - protein, 15 aa, Homo sapiens
  CDR3 for alpha chain variable domain of TCR clone 45115 (TRAV26-1, TRAJ42)
FIVRVKGGSQGNLIF

SEQ ID NO: 90230 - protein, 14 aa, Homo sapiens
  CDR3 for beta chain variable domain of TCR clone 45115 (TRBV19, TRBJ2-2)
CATTGNANTGELFF

SEQ ID NO: 90231 - protein, 16 aa, Homo sapiens
  CDR3 for alpha chain variable domain of TCR clone 45116 (TRAV16, TRAJ4)
CALSRMFSGGYNKLIF

SEQ ID NO: 90232 - protein, 16 aa, Homo sapiens
  CDR3 for beta chain variable domain of TCR clone 45116 (TRBV15, TRBJ1-2)
CATSRGPRTGGGGYTF

SEQ ID NO: 90233 - protein, 14 aa, Homo sapiens
  CDR3 for alpha chain variable domain of TCR clone 45117 (TRAV1-2, TRAJ8)
CAVREDTGFQKLVF

SEQ ID NO: 90234 - protein, 16 aa, Homo sapiens
  CDR3 for beta chain variable domain of TCR clone 45117 (TRBV7-6, TRBJ2-1)
CASSAPGPSSYNEQFF

SEQ ID NO: 90235 - protein, 12 aa, Homo sapiens
  CDR3 for alpha chain variable domain of TCR clone 45118 (TRAV12-3, TRAJ31)
CAMSVPNARLMF

SEQ ID NO: 90236 - protein, 12 aa, Homo sapiens
  CDR3 for beta chain variable domain of TCR clone 45118 (TRBV11-2, TRBJ2-1)
RASSVQREGQFF

SEQ ID NO: 90237 - protein, 11 aa, Homo sapiens
  CDR3 for alpha chain variable domain of TCR clone 45119 (TRAV12-2, TRAJ31)
CAILNNARLMF

SEQ ID NO: 90238 - protein, 16 aa, Homo sapiens
  CDR3 for beta chain variable domain of TCR clone 45119 (TRBV13, TRBJ2-2)
CASSTRTGEHTGELFF

SEQ ID NO: 90239 - protein, 14 aa, Homo sapiens
  CDR3 for alpha chain variable domain of TCR clone 45120 (TRAV1-2, TRAJ16)
CAVNRFSDGQKLLF

SEQ ID NO: 90240 - protein, 12 aa, Homo sapiens
  CDR3 for beta chain variable domain of TCR clone 45120 (TRBV2, TRBJ2-1)
CAKREGYNEQFF

SEQ ID NO: 90241 - protein, 14 aa, Homo sapiens
  CDR3 for alpha chain variable domain of TCR clone 45121 (TRAV38-1, TRAJ45)
CAYYSGGGADGLTF

SEQ ID NO: 90242 - protein, 20 aa, Homo sapiens
  CDR3 for beta chain variable domain of TCR clone 45121 (TRBV28, TRBJ2-1)
CASTPIGRSPALAGGNEQFF

SEQ ID NO: 90243 - protein, 13 aa, Homo sapiens
  CDR3 for alpha chain variable domain of TCR clone 45122 (TRAV20, TRAJ34)
CAVSSYNTDELIF

SEQ ID NO: 90244 - protein, 13 aa, Homo sapiens
  CDR3 for beta chain variable domain of TCR clone 45122 (TRBV7-9, TRBJ1-2)
CASSLKQNYGYTF

SEQ ID NO: 90245 - protein, 17 aa, Homo sapiens
  CDR3 for alpha chain variable domain of TCR clone 45123 (TRAV8-3, TRAJ42)
CCGAGLNYGGSQGNLIF

SEQ ID NO: 90246 - protein, 11 aa, Homo sapiens
  CDR3 for beta chain variable domain of TCR clone 45123 (TRBV7-2, TRBJ2-3)
CASSSSDTQYF

SEQ ID NO: 90247 - protein, 13 aa, Homo sapiens
  CDR3 for alpha chain variable domain of TCR clone 45124 (TRAV8-3, TRAJ28)
CAVGAVGSYQLTF

SEQ ID NO: 90248 - protein, 14 aa, Homo sapiens
  CDR3 for beta chain variable domain of TCR clone 45124 (TRBV7-2, TRBJ2-7)
CASRSKGAAYEQYF

SEQ ID NO: 90249 - protein, 16 aa, Homo sapiens
  CDR3 for alpha chain variable domain of TCR clone 45125 (TRAV3, TRAJ21)
CAVRDIERGNFNKFYF

SEQ ID NO: 90250 - protein, 13 aa, Homo sapiens
  CDR3 for beta chain variable domain of TCR clone 45125 (TRBV27, TRBJ2-7)
CASRLTTGYEQYF

SEQ ID NO: 90251 - protein, 14 aa, Homo sapiens
  CDR3 for alpha chain variable domain of TCR clone 45126 (TRAV12-3, TRAJ54)
CAMRGIQGAQKLVF

SEQ ID NO: 90252 - protein, 14 aa, Homo sapiens
  CDR3 for beta chain variable domain of TCR clone 45126 (TRBV19, TRBJ2-1)
CASPTFVLSGEQFF

SEQ ID NO: 90253 - protein, 16 aa, Homo sapiens
  CDR3 for alpha chain variable domain of TCR clone 45127 (TRAV4, TRAJ22)
CLVGDPYSGSARQLTF

SEQ ID NO: 90254 - protein, 14 aa, Homo sapiens
  CDR3 for beta chain variable domain of TCR clone 45127 (TRBV28, TRBJ2-3)
CASSWRGRADTQYF

SEQ ID NO: 90255 - protein, 23 aa, Homo sapiens
  CDR3 for alpha chain variable domain of TCR clone 45128 (TRAV26-1, TRAJ38)
CIADNAGNNHIQNPDPAVNQLRD

SEQ ID NO: 90256 - protein, 13 aa, Homo sapiens
  CDR3 for beta chain variable domain of TCR clone 45128 (TRBV20-1, TRBJ1-1)
CSARGGGNTEAFF

SEQ ID NO: 90257 - protein, 12 aa, Homo sapiens
  CDR3 for alpha chain variable domain of TCR clone 45129 (TRAV12-1, TRAJ31)
CVVNKDNARLMF

SEQ ID NO: 90258 - protein, 13 aa, Homo sapiens
  CDR3 for beta chain variable domain of TCR clone 45129 (TRBV30, TRBJ1-1)
CAWSRMLFPEAFF

SEQ ID NO: 90259 - protein, 15 aa, Homo sapiens
  CDR3 for alpha chain variable domain of TCR clone 45130 (TRAV21, TRAJ53)
CATLNSGGSNYKLTF

SEQ ID NO: 90260 - protein, 14 aa, Homo sapiens
  CDR3 for beta chain variable domain of TCR clone 45130 (TRBV23-1, TRBJ2-5)
CASSFLRSQETQYF

SEQ ID NO: 90261 - protein, 16 aa, Homo sapiens
  CDR3 for alpha chain variable domain of TCR clone 45131 (TRAV16, TRAJ4)
CALSRMFSGGYNQLIF

SEQ ID NO: 90262 - protein, 16 aa, Homo sapiens
  CDR3 for beta chain variable domain of TCR clone 45131 (TRBV24-1, TRBJ2-3)
CATSDPGTGATDTQYF

SEQ ID NO: 90263 - protein, 17 aa, Homo sapiens
  CDR3 for alpha chain variable domain of TCR clone 45132 (TRAV3, TRAJ6)
RAVRDGPRAGGSYIPTF

SEQ ID NO: 90264 - protein, 14 aa, Homo sapiens
  CDR3 for beta chain variable domain of TCR clone 45132 (TRBV7-8, TRBJ2-5)
CASSATGGQETQYF

SEQ ID NO: 90265 - protein, 13 aa, Homo sapiens
  CDR3 for alpha chain variable domain of TCR clone 45133 (TRAV2, TRAJ21)
CTVEDLNFNKFYF

SEQ ID NO: 90266 - protein, 15 aa, Homo sapiens
  CDR3 for beta chain variable domain of TCR clone 45133 (TRBV28, TRBJ2-5)
CASSPGQGSIETQYF

SEQ ID NO: 90267 - protein, 12 aa, Homo sapiens
  CDR3 for alpha chain variable domain of TCR clone 45134 (TRAV8-3, TRAJ26)
CAGDNYGQNFVF

SEQ ID NO: 90268 - protein, 15 aa, Homo sapiens
  CDR3 for beta chain variable domain of TCR clone 45134 (TRBV28, TRBJ2-1)
CASSLGTRLYNEQFF

SEQ ID NO: 90269 - protein, 15 aa, Homo sapiens
  CDR3 for alpha chain variable domain of TCR clone 45135 (TRAV27, TRAJ38)
CAARRNAGNNRKLLW

SEQ ID NO: 90270 - protein, 13 aa, Homo sapiens
  CDR3 for beta chain variable domain of TCR clone 45135 (TRBV12-5, TRBJ2-3)
CASGDRQSDTQYL

SEQ ID NO: 90271 - protein, 11 aa, Homo sapiens
  CDR3 for alpha chain variable domain of TCR clone 45136 (TRAV8-3, TRAJ49)
CAVNTGNQFYF

SEQ ID NO: 90272 - protein, 12 aa, Homo sapiens
  CDR3 for beta chain variable domain of TCR clone 45136 (TRBV11-2, TRBJ2-7)
CAISPPADEQYF

SEQ ID NO: 90273 - protein, 16 aa, Homo sapiens
  CDR3 for alpha chain variable domain of TCR clone 45137 (TRAV16, TRAJ4)
CALSRMFSGGYNKLIF

SEQ ID NO: 90274 - protein, 16 aa, Homo sapiens
  CDR3 for beta chain variable domain of TCR clone 45137 (TRBV24-1, TRBJ2-3)
CATRDPGTGATDTQYF

SEQ ID NO: 90275 - protein, 14 aa, Homo sapiens
  CDR3 for alpha chain variable domain of TCR clone 45138 (TRAV1-2, TRAJ8)
CAVREDTGFQKLVF

SEQ ID NO: 90276 - protein, 15 aa, Homo sapiens
  CDR3 for beta chain variable domain of TCR clone 45138 (TRBV28, TRBJ2-1)
SASSIIAGGRSEQFF

SEQ ID NO: 90277 - protein, 14 aa, Homo sapiens
  CDR3 for alpha chain variable domain of TCR clone 45139 (TRAV8-6, TRAJ12)
CAVKAADSSYKLIF

SEQ ID NO: 90278 - protein, 12 aa, Homo sapiens
  CDR3 for beta chain variable domain of TCR clone 45139 (TRBV11-2, TRBJ2-2)
CASSLGGGELFF

SEQ ID NO: 90279 - protein, 14 aa, Homo sapiens
  CDR3 for alpha chain variable domain of TCR clone 45140 (TRAV1-2, TRAJ16)
CAVNRFSDGQKLLF

SEQ ID NO: 90280 - protein, 16 aa, Homo sapiens
  CDR3 for beta chain variable domain of TCR clone 45140 (TRBV19, TRBJ2-1)
CASSKAGPSSHNEQFF

SEQ ID NO: 90281 - protein, 11 aa, Homo sapiens
  CDR3 for alpha chain variable domain of TCR clone 45141 (TRAV1-1, TRAJ23)
CAVRPGGKLIF

SEQ ID NO: 90282 - protein, 14 aa, Homo sapiens
  CDR3 for beta chain variable domain of TCR clone 45141 (TRBV19, TRBJ2-1)
CASPTFVLSGEQFF

SEQ ID NO: 90283 - protein, 12 aa, Homo sapiens
  CDR3 for alpha chain variable domain of TCR clone 45142 (TRAV13-1, TRAJ48)
CAANFGNEKLTF

SEQ ID NO: 90284 - protein, 11 aa, Homo sapiens
  CDR3 for beta chain variable domain of TCR clone 45142 (TRBV20-1, TRBJ1-5)
CSAQGGQPQHF

SEQ ID NO: 90285 - protein, 12 aa, Homo sapiens
  CDR3 for alpha chain variable domain of TCR clone 45143 (TRAV1-2, TRAJ29)
CAVTSGNTPLVF

SEQ ID NO: 90286 - protein, 14 aa, Homo sapiens
  CDR3 for beta chain variable domain of TCR clone 45143 (TRBV18, TRBJ2-5)
CASSPGVSQETQYF

SEQ ID NO: 90287 - protein, 13 aa, Homo sapiens
  CDR3 for alpha chain variable domain of TCR clone 45144 (TRAV13-1, TRAJ39)
CAASIWAGNMLTF

SEQ ID NO: 90288 - protein, 15 aa, Homo sapiens
  CDR3 for beta chain variable domain of TCR clone 45144 (TRBV4-1, TRBJ1-4)
CASSDTGGTNEKLFF

SEQ ID NO: 90289 - protein, 10 aa, Homo sapiens
  CDR3 for alpha chain variable domain of TCR clone 45145 (TRAV23/DV6, TRAJ57)
CAASSTLSQG

SEQ ID NO: 90290 - protein, 13 aa, Homo sapiens
  CDR3 for beta chain variable domain of TCR clone 45145 (TRBV4-1, TRBJ2-1)
CASSQAGGDEQFF

SEQ ID NO: 90291 - protein, 17 aa, Homo sapiens
  CDR3 for alpha chain variable domain of TCR clone 45146 (TRAV3, TRAJ42)
CAVRDRDYGGSQGNLIY

SEQ ID NO: 90292 - protein, 13 aa, Homo sapiens
  CDR3 for beta chain variable domain of TCR clone 45146 (TRBV3-1, TRBJ1-1)
CASSPGVITEAFF

SEQ ID NO: 90293 - protein, 14 aa, Homo sapiens
  CDR3 for alpha chain variable domain of TCR clone 45147 (TRAV1-2, TRAJ16)
CAVNRFSDGQKLLF

SEQ ID NO: 90294 - protein, 17 aa, Homo sapiens
  CDR3 for beta chain variable domain of TCR clone 45147 (TRBV25-1, TRBJ2-1)
CASSAYGQGRGVYEQFF

SEQ ID NO: 90295 - protein, 14 aa, Homo sapiens
  CDR3 for alpha chain variable domain of TCR clone 45148 (TRAV12-2, TRAJ40)
CAVKIPSGTCKYIF

SEQ ID NO: 90296 - protein, 16 aa, Homo sapiens
  CDR3 for beta chain variable domain of TCR clone 45148 (TRBV28, TRBJ2-5)
CASSFSPAGGWETQYF

SEQ ID NO: 90297 - protein, 18 aa, Homo sapiens
  CDR3 for alpha chain variable domain of TCR clone 45149 (TRAV26-1, TRAJ23)
CIVRVGLEVWNQGGKVIF

SEQ ID NO: 90298 - protein, 16 aa, Homo sapiens
  CDR3 for beta chain variable domain of TCR clone 45149 (TRBV12-4, TRBJ2-5)
CASSFFVRGRQETQYF

SEQ ID NO: 90299 - protein, 15 aa, Homo sapiens
  CDR3 for alpha chain variable domain of TCR clone 45150 (TRAV17, TRAJ57)
CATGPSQGGSEKLVF

SEQ ID NO: 90300 - protein, 14 aa, Homo sapiens
  CDR3 for beta chain variable domain of TCR clone 45150 (TRBV12-5, TRBJ2-5)
CASGSRTHQETQYF

SEQ ID NO: 90301 - protein, 14 aa, Homo sapiens
  CDR3 for alpha chain variable domain of TCR clone 45151 (TRAV1-2, TRAJ8)
CAVREDTGFQKLVF

SEQ ID NO: 90302 - protein, 17 aa, Homo sapiens
  CDR3 for beta chain variable domain of TCR clone 45151 (TRBV13, TRBJ2-3)
CASSLPRVAGGRNTQYF

SEQ ID NO: 90303 - protein, 11 aa, Homo sapiens
  CDR3 for alpha chain variable domain of TCR clone 45152 (TRAV3, TRAJ17)
CAEAAGNKLTL

SEQ ID NO: 90304 - protein, 14 aa, Homo sapiens
  CDR3 for beta chain variable domain of TCR clone 45152 (TRBV20-1, TRBJ2-2)
SAVLALRRTGELFF

SEQ ID NO: 90305 - protein, 14 aa, Homo sapiens
  CDR3 for alpha chain variable domain of TCR clone 45153 (TRAV3, TRAJ9)
CAVRLNTGGFKTIF

SEQ ID NO: 90306 - protein, 15 aa, Homo sapiens
  CDR3 for beta chain variable domain of TCR clone 45153 (TRBV19, TRBJ2-1)
CASSSPGVPLDEQFF

SEQ ID NO: 90307 - protein, 12 aa, Homo sapiens
  CDR3 for alpha chain variable domain of TCR clone 45154 (TRAV12-2, TRAJ52)
IGGGTSYGKLTF

SEQ ID NO: 90308 - protein, 13 aa, Homo sapiens
  CDR3 for beta chain variable domain of TCR clone 45154 (TRBV2, TRBJ1-4)
CASSERAGEKLFF

SEQ ID NO: 90309 - protein, 13 aa, Homo sapiens
  CDR3 for alpha chain variable domain of TCR clone 45155 (TRAV8-3, TRAJ44)
CAVVPGTASKLTF

SEQ ID NO: 90310 - protein, 14 aa, Homo sapiens
  CDR3 for beta chain variable domain of TCR clone 45155 (TRBV11-2, TRBJ2-3)
CASSRLARTGTQYF

SEQ ID NO: 90311 - protein, 15 aa, Homo sapiens
  CDR3 for alpha chain variable domain of TCR clone 45156 (TRAV8-3, TRAJ45)
CASSYSGGGADGLTF

SEQ ID NO: 90312 - protein, 15 aa, Homo sapiens
  CDR3 for beta chain variable domain of TCR clone 45156 (TRBV28, TRBJ1-4)
CASSVSGSGLEKLFF

SEQ ID NO: 90313 - protein, 14 aa, Homo sapiens
  CDR3 for alpha chain variable domain of TCR clone 45157 (TRAV8-1, TRAJ36)
CAVNSPTGANNPFF

SEQ ID NO: 90314 - protein, 15 aa, Homo sapiens
  CDR3 for beta chain variable domain of TCR clone 45157 (TRBV7-2, TRBJ2-3)
CASSLEQGGTDTQYF

SEQ ID NO: 90315 - protein, 13 aa, Homo sapiens
  CDR3 for alpha chain variable domain of TCR clone 45158 (TRAV12-2, TRAJ6)
CAVPSGGSYIPTF

SEQ ID NO: 90316 - protein, 14 aa, Homo sapiens
  CDR3 for beta chain variable domain of TCR clone 45158 (TRBV19, TRBJ2-1)
CASPTFVLSGEQFF

SEQ ID NO: 90317 - protein, 13 aa, Homo sapiens
  CDR3 for alpha chain variable domain of TCR clone 45159 (TRAV12-1, TRAJ34)
CVVTGYNTDKLIS

SEQ ID NO: 90318 - protein, 13 aa, Homo sapiens
  CDR3 for beta chain variable domain of TCR clone 45159 (TRBV28, TRBJ2-7)
CASKAGGVYEQYF

SEQ ID NO: 90319 - protein, 11 aa, Homo sapiens
  CDR3 for alpha chain variable domain of TCR clone 45160 (TRAV21, TRAJ39)
LLVNAGNMLTF

SEQ ID NO: 90320 - protein, 13 aa, Homo sapiens
  CDR3 for beta chain variable domain of TCR clone 45160 (TRBV7-9, TRBJ2-3)
CASSPGSTDTQYF

SEQ ID NO: 90321 - protein, 14 aa, Homo sapiens
  CDR3 for alpha chain variable domain of TCR clone 45161 (TRAV12-3, TRAJ9)
CAMSPNTGGFETIF

SEQ ID NO: 90322 - protein, 12 aa, Homo sapiens
  CDR3 for beta chain variable domain of TCR clone 45161 (TRBV11-2, TRBJ2-2)
CASSLGGGELLF

SEQ ID NO: 90323 - protein, 11 aa, Homo sapiens
  CDR3 for alpha chain variable domain of TCR clone 45162 (TRAV3, TRAJ21)
CAVGNFNKFYF

SEQ ID NO: 90324 - protein, 16 aa, Homo sapiens
  CDR3 for beta chain variable domain of TCR clone 45162 (TRBV19, TRBJ2-1)
CATSKAGPSSYNEQFF

SEQ ID NO: 90325 - protein, 16 aa, Homo sapiens
  CDR3 for alpha chain variable domain of TCR clone 45163 (TRAV3, TRAJ10)
CAVRDMRAGGGNNLTF

SEQ ID NO: 90326 - protein, 19 aa, Homo sapiens
  CDR3 for beta chain variable domain of TCR clone 45163 (TRBV6-3, TRBJ1-2)
CASSYSKGRTGPPNYGYTF

SEQ ID NO: 90327 - protein, 13 aa, Homo sapiens
  CDR3 for alpha chain variable domain of TCR clone 45164 (TRAV1-2, TRAJ9)
CAALNTAGFKTIF

SEQ ID NO: 90328 - protein, 13 aa, Homo sapiens
  CDR3 for beta chain variable domain of TCR clone 45164 (TRBV19, TRBJ1-2)
CASSVPGQDGYTF

SEQ ID NO: 90329 - protein, 15 aa, Homo sapiens
  CDR3 for alpha chain variable domain of TCR clone 45165 (TRAV4, TRAJ39)
CLVGPNNNAGNMLTF

SEQ ID NO: 90330 - protein, 16 aa, Homo sapiens
  CDR3 for beta chain variable domain of TCR clone 45165 (TRBV13, TRBJ2-2)
CASSPRTGEHTGELFF

SEQ ID NO: 90331 - protein, 14 aa, Homo sapiens
  CDR3 for alpha chain variable domain of TCR clone 45166 (TRAV12-3, TRAJ10)
SHQPLTGGGNKLTF

SEQ ID NO: 90332 - protein, 11 aa, Homo sapiens
  CDR3 for beta chain variable domain of TCR clone 45166 (TRBV11-2, TRBJ2-2)
CASSLPGELFF

SEQ ID NO: 90333 - protein, 17 aa, Homo sapiens
  CDR3 for alpha chain variable domain of TCR clone 45167 (TRAV38-2/DV8, TRAJ28)
CAFLTLYSGAGSYQLTF

SEQ ID NO: 90334 - protein, 14 aa, Homo sapiens
  CDR3 for beta chain variable domain of TCR clone 45167 (TRBV7-2, TRBJ2-5)
CACSLSGGGETQYF

SEQ ID NO: 90335 - protein, 16 aa, Homo sapiens
  CDR3 for alpha chain variable domain of TCR clone 45168 (TRAV3, TRAJ37)
CAVRGKGSGNTGKLIF

SEQ ID NO: 90336 - protein, 15 aa, Homo sapiens
  CDR3 for beta chain variable domain of TCR clone 45168 (TRBV7-3, TRBJ2-2)
CASSETGQGTGELLF

SEQ ID NO: 90337 - protein, 14 aa, Homo sapiens
  CDR3 for alpha chain variable domain of TCR clone 45169 (TRAV8-4, TRAJ48)
CAVSETFGNEKLTF

SEQ ID NO: 90338 - protein, 14 aa, Homo sapiens
  CDR3 for beta chain variable domain of TCR clone 45169 (TRBV13, TRBJ2-7)
CASSLEGASYEQYF

SEQ ID NO: 90339 - protein, 15 aa, Homo sapiens
  CDR3 for alpha chain variable domain of TCR clone 45170 (TRAV8-3, TRAJ45)
CASSYSGGGADGLTF

SEQ ID NO: 90340 - protein, 14 aa, Homo sapiens
  CDR3 for beta chain variable domain of TCR clone 45170 (TRBV6-1, TRBJ1-3)
CASVQGGGGNTIYF

SEQ ID NO: 90341 - protein, 13 aa, Homo sapiens
  CDR3 for alpha chain variable domain of TCR clone 45171 (TRAV2, TRAJ15)
CAVASQAGTALIF

SEQ ID NO: 90342 - protein, 13 aa, Homo sapiens
  CDR3 for beta chain variable domain of TCR clone 45171 (TRBV25-1, TRBJ1-1)
CQHPPGGNTEAFF

SEQ ID NO: 90343 - protein, 14 aa, Homo sapiens
  CDR3 for alpha chain variable domain of TCR clone 45172 (TRAV12-2, TRAJ13)
CAVKKTGGYQKVTF

SEQ ID NO: 90344 - protein, 12 aa, Homo sapiens
  CDR3 for beta chain variable domain of TCR clone 45172 (TRBV5-5, TRBJ2-5)
CASSYFGETQYF

SEQ ID NO: 90345 - protein, 11 aa, Homo sapiens
  CDR3 for alpha chain variable domain of TCR clone 45173 (TRAV12-2, TRAJ49)
CALQGGNQLYF

SEQ ID NO: 90346 - protein, 13 aa, Homo sapiens
  CDR3 for beta chain variable domain of TCR clone 45173 (TRBV4-1, TRBJ1-1)
CASSQLGTGEAFF

SEQ ID NO: 90347 - protein, 15 aa, Homo sapiens
  CDR3 for alpha chain variable domain of TCR clone 45174 (TRAV12-1, TRAJ36)
CVVNEHQTGANNLFF

SEQ ID NO: 90348 - protein, 12 aa, Homo sapiens
  CDR3 for beta chain variable domain of TCR clone 45174 (TRBV19, TRBJ1-5)
CASSIAQQPQHF

SEQ ID NO: 90349 - protein, 18 aa, Homo sapiens
  CDR3 for alpha chain variable domain of TCR clone 45175 (TRAV21, TRAJ22)
CAVRPSPAGGTSYGKLTF

SEQ ID NO: 90350 - protein, 16 aa, Homo sapiens
  CDR3 for beta chain variable domain of TCR clone 45175 (TRBV19, TRBJ2-1)
CASSSKGARSYNEQFF

SEQ ID NO: 90351 - protein, 14 aa, Homo sapiens
  CDR3 for alpha chain variable domain of TCR clone 45176 (TRAV29/DV5, TRAJ48)
CAAMALFGNEKLTF

SEQ ID NO: 90352 - protein, 14 aa, Homo sapiens
  CDR3 for beta chain variable domain of TCR clone 45176 (TRBV18, TRBJ2-5)
CASSPGVSQETQYF

SEQ ID NO: 90353 - protein, 13 aa, Homo sapiens
  CDR3 for alpha chain variable domain of TCR clone 45177 (TRAV2, TRAJ40)
CAVVTSGTYKYIF

SEQ ID NO: 90354 - protein, 13 aa, Homo sapiens
  CDR3 for beta chain variable domain of TCR clone 45177 (TRBV12-5, TRBJ2-3)
CASGDRQSDTQYF

SEQ ID NO: 90355 - protein, 14 aa, Homo sapiens
  CDR3 for alpha chain variable domain of TCR clone 45178 (TRAV1-2, TRAJ8)
CAVREDTGFQKLVF

SEQ ID NO: 90356 - protein, 17 aa, Homo sapiens
  CDR3 for beta chain variable domain of TCR clone 45178 (TRBV4-1, TRBJ2-3)
CASSQGYVSGGTDTQYF

SEQ ID NO: 90357 - protein, 14 aa, Homo sapiens
  CDR3 for alpha chain variable domain of TCR clone 45179 (TRAV12-2, TRAJ5)
CAVNRSTGRRALTF

SEQ ID NO: 90358 - protein, 12 aa, Homo sapiens
  CDR3 for beta chain variable domain of TCR clone 45179 (TRBV19, TRBJ1-5)
CASSVAQQPQHF

SEQ ID NO: 90359 - protein, 14 aa, Homo sapiens
  CDR3 for alpha chain variable domain of TCR clone 45180 (TRAV14/DV4, TRAJ42)
CPRGSLRSQGNLTF

SEQ ID NO: 90360 - protein, 16 aa, Homo sapiens
  CDR3 for beta chain variable domain of TCR clone 45180 (TRBV19, TRBJ2-1)
CASSKAGPSSYNEQFF

SEQ ID NO: 90361 - protein, 13 aa, Homo sapiens
  CDR3 for alpha chain variable domain of TCR clone 45181 (TRAV17, TRAJ5)
CATMDTGRRALTL

SEQ ID NO: 90362 - protein, 15 aa, Homo sapiens
  CDR3 for beta chain variable domain of TCR clone 45181 (TRBV20-1, TRBJ2-5)
CSATRTSGSLETQYF

SEQ ID NO: 90363 - protein, 12 aa, Homo sapiens
  CDR3 for alpha chain variable domain of TCR clone 45182 (TRAV13-1, TRAJ26)
QVQDNYGQNFVF

SEQ ID NO: 90364 - protein, 13 aa, Homo sapiens
  CDR3 for beta chain variable domain of TCR clone 45182 (TRBV7-9, TRBJ2-7)
CASSAGLQYEQYL

SEQ ID NO: 90365 - protein, 13 aa, Homo sapiens
  CDR3 for alpha chain variable domain of TCR clone 45183 (TRAV2, TRAJ40)
CAVVTSGTYKYIF

SEQ ID NO: 90366 - protein, 14 aa, Homo sapiens
  CDR3 for beta chain variable domain of TCR clone 45183 (TRBV19, TRBJ2-1)
CASPAFALSGEQFF

SEQ ID NO: 90367 - protein, 14 aa, Homo sapiens
  CDR3 for alpha chain variable domain of TCR clone 45184 (TRAV23/DV6, TRAJ11)
CATSLESGYSTLTF

SEQ ID NO: 90368 - protein, 13 aa, Homo sapiens
  CDR3 for beta chain variable domain of TCR clone 45184 (TRBV4-1, TRBJ2-5)
CASSLTRGETQYF

SEQ ID NO: 90369 - protein, 16 aa, Homo sapiens
  CDR3 for alpha chain variable domain of TCR clone 45185 (TRAV1-2, TRAJ27)
CAVREPQTPMQANQPL

SEQ ID NO: 90370 - protein, 13 aa, Homo sapiens
  CDR3 for beta chain variable domain of TCR clone 45185 (TRBV6-1, TRBJ1-2)
YASSAREGYGYTF

SEQ ID NO: 90371 - protein, 17 aa, Homo sapiens
  CDR3 for alpha chain variable domain of TCR clone 45186 (TRAV3, TRAJ6)
CAVRDGPRAGGSYIPAF

SEQ ID NO: 90372 - protein, 14 aa, Homo sapiens
  CDR3 for beta chain variable domain of TCR clone 45186 (TRBV7-2, TRBJ2-7)
CASSPKTSFYEQYF

SEQ ID NO: 90373 - protein, 14 aa, Homo sapiens
  CDR3 for alpha chain variable domain of TCR clone 45187 (TRAV12-2, TRAJ53)
CAVKGGGSSYKLTF

SEQ ID NO: 90374 - protein, 14 aa, Homo sapiens
  CDR3 for beta chain variable domain of TCR clone 45187 (TRBV19, TRBJ2-1)
CASPTFVLSGEQFF

SEQ ID NO: 90375 - protein, 13 aa, Homo sapiens
  CDR3 for alpha chain variable domain of TCR clone 45188 (TRAV17, TRAJ40)
CAGALGGTYKYIF

SEQ ID NO: 90376 - protein, 16 aa, Homo sapiens
  CDR3 for beta chain variable domain of TCR clone 45188 (TRBV7-2, TRBJ1-4)
CASSLAPGRRDEKLFF

SEQ ID NO: 90377 - protein, 16 aa, Homo sapiens
  CDR3 for alpha chain variable domain of TCR clone 45189 (TRAV14/DV4, TRAJ54)
CAMREGRIQGAQKLVF

SEQ ID NO: 90378 - protein, 17 aa, Homo sapiens
  CDR3 for beta chain variable domain of TCR clone 45189 (TRBV11-2, TRBJ2-1)
CASSLYPPGVEYNEQFF

SEQ ID NO: 90379 - protein, 16 aa, Homo sapiens
  CDR3 for alpha chain variable domain of TCR clone 45190 (TRAV20, TRAJ22)
CAVQASSSGTARQLTF

SEQ ID NO: 90380 - protein, 13 aa, Homo sapiens
  CDR3 for beta chain variable domain of TCR clone 45190 (TRBV7-2, TRBJ2-5)
CASSQTSVETQYF

SEQ ID NO: 90381 - protein, 12 aa, Homo sapiens
  CDR3 for alpha chain variable domain of TCR clone 45191 (TRAV3, TRAJ20)
CAVRDGDYKLSF

SEQ ID NO: 90382 - protein, 14 aa, Homo sapiens
  CDR3 for beta chain variable domain of TCR clone 45191 (TRBV6-1, TRBJ1-3)
CASVQGGGGNTIYF

SEQ ID NO: 90383 - protein, 17 aa, Homo sapiens
  CDR3 for alpha chain variable domain of TCR clone 45192 (TRAV12-3, TRAJ6)
CAMSARGGAGGSYIPTF

SEQ ID NO: 90384 - protein, 12 aa, Homo sapiens
  CDR3 for beta chain variable domain of TCR clone 45192 (TRBV12-4, TRBJ2-3)
CASSTLTDTQYF

SEQ ID NO: 90385 - protein, 15 aa, Homo sapiens
  CDR3 for alpha chain variable domain of TCR clone 45193 (TRAV1-1, TRAJ5)
CAVRLMDTGRRALTF

SEQ ID NO: 90386 - protein, 17 aa, Homo sapiens
  CDR3 for beta chain variable domain of TCR clone 45193 (TRBV28, TRBJ2-7)
CASSPGLAGGDSSEQYF

SEQ ID NO: 90387 - protein, 16 aa, Homo sapiens
  CDR3 for alpha chain variable domain of TCR clone 45194 (TRAV16, TRAJ4)
CALSLMFSGGYNKLIF

SEQ ID NO: 90388 - protein, 16 aa, Homo sapiens
  CDR3 for beta chain variable domain of TCR clone 45194 (TRBV24-1, TRBJ2-3)
CATSDPGTGATDTQYF

SEQ ID NO: 90389 - protein, 14 aa, Homo sapiens
  CDR3 for alpha chain variable domain of TCR clone 45195 (TRAV12-3, TRAJ57)
CAMSAWGGSEKLVF

SEQ ID NO: 90390 - protein, 14 aa, Homo sapiens
  CDR3 for beta chain variable domain of TCR clone 45195 (TRBV18, TRBJ2-5)
CASSPGVSQETQYS

SEQ ID NO: 90391 - protein, 13 aa, Homo sapiens
  CDR3 for alpha chain variable domain of TCR clone 45196 (TRAV13-2, TRAJ13)
CAERPGGYQKVTF

SEQ ID NO: 90392 - protein, 14 aa, Homo sapiens
  CDR3 for beta chain variable domain of TCR clone 45196 (TRBV23-1, TRBJ2-5)
CASSFLRSQENQYF

SEQ ID NO: 90393 - protein, 14 aa, Homo sapiens
  CDR3 for alpha chain variable domain of TCR clone 45197 (TRAV17, TRAJ16)
CATADFSDGQKLLF

SEQ ID NO: 90394 - protein, 15 aa, Homo sapiens
  CDR3 for beta chain variable domain of TCR clone 45197 (TRBV18, TRBJ2-1)
CAGSPPSASYNEQFF

SEQ ID NO: 90395 - protein, 17 aa, Homo sapiens
  CDR3 for alpha chain variable domain of TCR clone 45198 (TRAV13-1, TRAJ31)
CAPRDRLMFGDGTQLVV

SEQ ID NO: 90396 - protein, 12 aa, Homo sapiens
  CDR3 for beta chain variable domain of TCR clone 45198 (TRBV11-2, TRBJ2-2)
CASSLGGGELFF

SEQ ID NO: 90397 - protein, 14 aa, Homo sapiens
  CDR3 for alpha chain variable domain of TCR clone 45199 (TRAV12-2, TRAJ3)
CAVSLYSSASKIIF

SEQ ID NO: 90398 - protein, 14 aa, Homo sapiens
  CDR3 for beta chain variable domain of TCR clone 45199 (TRBV27, TRBJ2-1)
CAGSIAEAYNEQFF

SEQ ID NO: 90399 - protein, 14 aa, Homo sapiens
  CDR3 for alpha chain variable domain of TCR clone 45200 (TRAV12-2, TRAJ17)
CAVNIKAAGNKLTF

SEQ ID NO: 90400 - protein, 13 aa, Homo sapiens
  CDR3 for beta chain variable domain of TCR clone 45200 (TRBV2, TRBJ2-7)
CANGLAGDYEQYF

SEQ ID NO: 90401 - protein, 14 aa, Homo sapiens
  CDR3 for alpha chain variable domain of TCR clone 45201 (TRAV8-4, TRAJ15)
CAGTIREAGTALIF

SEQ ID NO: 90402 - protein, 13 aa, Homo sapiens
  CDR3 for beta chain variable domain of TCR clone 45201 (TRBV10-3, TRBJ2-7)
CAISEKGGYEQYF

SEQ ID NO: 90403 - protein, 15 aa, Homo sapiens
  CDR3 for alpha chain variable domain of TCR clone 45202 (TRAV26-1, TRAJ15)
CIVRAANQAGTALIF

SEQ ID NO: 90404 - protein, 15 aa, Homo sapiens
  CDR3 for beta chain variable domain of TCR clone 45202 (TRBV20-1, TRBJ1-1)
CSARSAATSSTEAFF

SEQ ID NO: 90405 - protein, 12 aa, Homo sapiens
  CDR3 for alpha chain variable domain of TCR clone 45203 (TRAV8-3, TRAJ41)
CAVALSGYALNF

SEQ ID NO: 90406 - protein, 16 aa, Homo sapiens
  CDR3 for beta chain variable domain of TCR clone 45203 (TRBV27, TRBJ2-7)
CASSSERKDSAYEQYF

SEQ ID NO: 90407 - protein, 14 aa, Homo sapiens
  CDR3 for alpha chain variable domain of TCR clone 45204 (TRAV12-2, TRAJ17)
CAVNIKAAGNKLTF

SEQ ID NO: 90408 - protein, 17 aa, Homo sapiens
  CDR3 for beta chain variable domain of TCR clone 45204 (TRBV20-1, TRBJ2-2)
CSASGSGQGGLTGELFF

SEQ ID NO: 90409 - protein, 13 aa, Homo sapiens
  CDR3 for alpha chain variable domain of TCR clone 45205 (TRAV27, TRAJ54)
CAGAGQGAQKLAF

SEQ ID NO: 90410 - protein, 15 aa, Homo sapiens
  CDR3 for beta chain variable domain of TCR clone 45205 (TRBV18, TRBJ2-6)
CASSPSYAGANVLTF

SEQ ID NO: 90411 - protein, 15 aa, Homo sapiens
  CDR3 for alpha chain variable domain of TCR clone 45206 (TRAV22, TRAJ24)
CAVPLSTDSWGKLQF

SEQ ID NO: 90412 - protein, 16 aa, Homo sapiens
  CDR3 for beta chain variable domain of TCR clone 45206 (TRBV28, TRBJ2-7)
CASSFPDRCLTYEQYF

SEQ ID NO: 90413 - protein, 12 aa, Homo sapiens
  CDR3 for alpha chain variable domain of TCR clone 45207 (TRAV12-2, TRAJ52)
IGGGTSYGKLTF

SEQ ID NO: 90414 - protein, 13 aa, Homo sapiens
  CDR3 for beta chain variable domain of TCR clone 45207 (TRBV15, TRBJ2-7)
CATITTGHYEQYF

SEQ ID NO: 90415 - protein, 15 aa, Homo sapiens
  CDR3 for alpha chain variable domain of TCR clone 45208 (TRAV23/DV6, TRAJ18)
CAARYRGSTLGRLYF

SEQ ID NO: 90416 - protein, 12 aa, Homo sapiens
  CDR3 for beta chain variable domain of TCR clone 45208 (TRBV11-2, TRBJ2-2)
CASSLPTGELFF

SEQ ID NO: 90417 - protein, 14 aa, Homo sapiens
  CDR3 for alpha chain variable domain of TCR clone 45209 (TRAV26-1, TRAJ38)
CIADNAGNNRKLIW

SEQ ID NO: 90418 - protein, 13 aa, Homo sapiens
  CDR3 for beta chain variable domain of TCR clone 45209 (TRBV4-2, TRBJ1-1)
CASSQAGNTEAFF

SEQ ID NO: 90419 - protein, 10 aa, Homo sapiens
  CDR3 for alpha chain variable domain of TCR clone 45210 (TRAV5, TRAJ34)
CAEYPDKLIF

SEQ ID NO: 90420 - protein, 12 aa, Homo sapiens
  CDR3 for beta chain variable domain of TCR clone 45210 (TRBV12-4, TRBJ2-1)
CASSLQGSEQFF

SEQ ID NO: 90421 - protein, 12 aa, Homo sapiens
  CDR3 for alpha chain variable domain of TCR clone 45211 (TRAV10, TRAJ43)
CVVVRVGNDMRF

SEQ ID NO: 90422 - protein, 15 aa, Homo sapiens
  CDR3 for beta chain variable domain of TCR clone 45211 (TRBV2, TRBJ2-7)
CASSEGLARYYEQYF

SEQ ID NO: 90423 - protein, 17 aa, Homo sapiens
  CDR3 for alpha chain variable domain of TCR clone 45212 (TRAV8-6, TRAJ58)
CAVSSWVGETSGSRLTF

SEQ ID NO: 90424 - protein, 16 aa, Homo sapiens
  CDR3 for beta chain variable domain of TCR clone 45212 (TRBV7-8, TRBJ2-4)
CASSAERTLAKNIQYF

SEQ ID NO: 90425 - protein, 15 aa, Homo sapiens
  CDR3 for alpha chain variable domain of TCR clone 45213 (TRAV12-1, TRAJ42)
FVVTRDGGSQGNLIF

SEQ ID NO: 90426 - protein, 14 aa, Homo sapiens
  CDR3 for beta chain variable domain of TCR clone 45213 (TRBV11-2, TRBJ2-3)
CASSLGGGANTQYF

SEQ ID NO: 90427 - protein, 14 aa, Homo sapiens
  CDR3 for alpha chain variable domain of TCR clone 45214 (TRAV1-2, TRAJ16)
CAVNRFSDGQKLLV

SEQ ID NO: 90428 - protein, 14 aa, Homo sapiens
  CDR3 for beta chain variable domain of TCR clone 45214 (TRBV23-1, TRBJ2-5)
CASSFLRSQETQYF

SEQ ID NO: 90429 - protein, 14 aa, Homo sapiens
  CDR3 for alpha chain variable domain of TCR clone 45215 (TRAV26-1, TRAJ39)
CIVRDSRAGNMLTF

SEQ ID NO: 90430 - protein, 15 aa, Homo sapiens
  CDR3 for beta chain variable domain of TCR clone 45215 (TRBV7-9, TRBJ1-5)
CASSQGHQPNQPQHF

SEQ ID NO: 90431 - protein, 16 aa, Homo sapiens
  CDR3 for alpha chain variable domain of TCR clone 45216 (TRAV3, TRAJ10)
CAVRDMRAGGGNKLTF

SEQ ID NO: 90432 - protein, 16 aa, Homo sapiens
  CDR3 for beta chain variable domain of TCR clone 45216 (TRBV2, TRBJ2-3)
CASSTSVEGVTDTQYF

SEQ ID NO: 90433 - protein, 13 aa, Homo sapiens
  CDR3 for alpha chain variable domain of TCR clone 45217 (TRAV12-3, TRAJ9)
CATRNTGGFKTIF

SEQ ID NO: 90434 - protein, 15 aa, Homo sapiens
  CDR3 for beta chain variable domain of TCR clone 45217 (TRBV20-1, TRBJ2-7)
CSARDRVSGMDEQYF

SEQ ID NO: 90435 - protein, 16 aa, Homo sapiens
  CDR3 for alpha chain variable domain of TCR clone 45218 (TRAV38-2/DV8, TRAJ45)
CAYTTTSGRGADGLTF

SEQ ID NO: 90436 - protein, 14 aa, Homo sapiens
  CDR3 for beta chain variable domain of TCR clone 45218 (TRBV7-9, TRBJ2-2)
CASSLGHRTGELFF

SEQ ID NO: 90437 - protein, 15 aa, Homo sapiens
  CDR3 for alpha chain variable domain of TCR clone 45219 (TRAV8-3, TRAJ40)
CAAPSLGSGTYKYIF

SEQ ID NO: 90438 - protein, 16 aa, Homo sapiens
  CDR3 for beta chain variable domain of TCR clone 45219 (TRBV7-3, TRBJ2-3)
CASSLSGYQPEDTQYF

SEQ ID NO: 90439 - protein, 15 aa, Homo sapiens
  CDR3 for alpha chain variable domain of TCR clone 45220 (TRAV26-1, TRAJ40)
CIVRVTTSGTYKYIF

SEQ ID NO: 90440 - protein, 12 aa, Homo sapiens
  CDR3 for beta chain variable domain of TCR clone 45220 (TRBV7-9, TRBJ1-4)
CASGTDREKLFF

SEQ ID NO: 90441 - protein, 12 aa, Homo sapiens
  CDR3 for alpha chain variable domain of TCR clone 45221 (TRAV12-3, TRAJ17)
CAMTLTGNKLTF

SEQ ID NO: 90442 - protein, 15 aa, Homo sapiens
  CDR3 for beta chain variable domain of TCR clone 45221 (TRBV5-4, TRBJ2-3)
CASSLYRGRTDTQYF

SEQ ID NO: 90443 - protein, 13 aa, Homo sapiens
  CDR3 for alpha chain variable domain of TCR clone 45222 (TRAV26-1, TRAJ48)
CIVRVVRDEKLTF

SEQ ID NO: 90444 - protein, 16 aa, Homo sapiens
  CDR3 for beta chain variable domain of TCR clone 45222 (TRBV12-5, TRBJ2-5)
CASGPRTSGNQETQYF

SEQ ID NO: 90445 - protein, 14 aa, Homo sapiens
  CDR3 for alpha chain variable domain of TCR clone 45223 (TRAV12-2, TRAJ45)
CAVNKGGGADGLIF

SEQ ID NO: 90446 - protein, 15 aa, Homo sapiens
  CDR3 for beta chain variable domain of TCR clone 45223 (TRBV9, TRBJ1-6)
CASSVAGTGDSPLHF

SEQ ID NO: 90447 - protein, 14 aa, Homo sapiens
  CDR3 for alpha chain variable domain of TCR clone 45224 (TRAV12-2, TRAJ40)
CAVKIPSGTYKYIF

SEQ ID NO: 90448 - protein, 18 aa, Homo sapiens
  CDR3 for beta chain variable domain of TCR clone 45224 (TRBV10-3, TRBJ2-3)
CAISESRVGPMRGDTQYF

SEQ ID NO: 90449 - protein, 13 aa, Homo sapiens
  CDR3 for alpha chain variable domain of TCR clone 45225 (TRAV17, TRAJ7)
CATDNYGNDRLAF

SEQ ID NO: 90450 - protein, 16 aa, Homo sapiens
  CDR3 for beta chain variable domain of TCR clone 45225 (TRBV4-1, TRBJ2-5)
CASSQAIAASSATQYF

SEQ ID NO: 90451 - protein, 15 aa, Homo sapiens
  CDR3 for alpha chain variable domain of TCR clone 45226 (TRAV17, TRAJ16)
CATALRFSDGQKLLS

SEQ ID NO: 90452 - protein, 12 aa, Homo sapiens
  CDR3 for beta chain variable domain of TCR clone 45226 (TRBV2, TRBJ2-7)
CASSDPDYEQYF

SEQ ID NO: 90453 - protein, 15 aa, Homo sapiens
  CDR3 for alpha chain variable domain of TCR clone 45227 (TRAV39, TRAJ48)
CAVDPRGSGNEKLTF

SEQ ID NO: 90454 - protein, 14 aa, Homo sapiens
  CDR3 for beta chain variable domain of TCR clone 45227 (TRBV5-1, TRBJ2-5)
CASSFWGAQETQYF

SEQ ID NO: 90455 - protein, 13 aa, Homo sapiens
  CDR3 for alpha chain variable domain of TCR clone 45228 (TRAV8-6, TRAJ32)
CAVSDSATNKLIF

SEQ ID NO: 90456 - protein, 13 aa, Homo sapiens
  CDR3 for beta chain variable domain of TCR clone 45228 (TRBV11-2, TRBJ2-7)
CASSLDLGYEQYF

SEQ ID NO: 90457 - protein, 15 aa, Homo sapiens
  CDR3 for alpha chain variable domain of TCR clone 45229 (TRAV17, TRAJ37)
CAADHGSSNTGKLIF

SEQ ID NO: 90458 - protein, 14 aa, Homo sapiens
  CDR3 for beta chain variable domain of TCR clone 45229 (TRBV7-2, TRBJ2-3)
CASSRTSGADTQYF

SEQ ID NO: 90459 - protein, 12 aa, Homo sapiens
  CDR3 for alpha chain variable domain of TCR clone 45230 (TRAV27, TRAJ42)
CAGAGSQGNLIF

SEQ ID NO: 90460 - protein, 17 aa, Homo sapiens
  CDR3 for beta chain variable domain of TCR clone 45230 (TRBV27, TRBJ2-7)
CASSRSMGGMATYEQYF

SEQ ID NO: 90461 - protein, 14 aa, Homo sapiens
  CDR3 for alpha chain variable domain of TCR clone 45231 (TRAV1-2, TRAJ8)
CAVREDTGFQKLVF

SEQ ID NO: 90462 - protein, 14 aa, Homo sapiens
  CDR3 for beta chain variable domain of TCR clone 45231 (TRBV19, TRBJ2-1)
CASKDPSSYNEQFF

SEQ ID NO: 90463 - protein, 12 aa, Homo sapiens
  CDR3 for alpha chain variable domain of TCR clone 45232 (TRAV8-3, TRAJ20)
CAVGANDYKLSF

SEQ ID NO: 90464 - protein, 12 aa, Homo sapiens
  CDR3 for beta chain variable domain of TCR clone 45232 (TRBV14, TRBJ2-7)
CASSLYKDEQYF

SEQ ID NO: 90465 - protein, 11 aa, Homo sapiens
  CDR3 for alpha chain variable domain of TCR clone 45233 (TRAV12-2, TRAJ31)
CAVTRWARLLF

SEQ ID NO: 90466 - protein, 15 aa, Homo sapiens
  CDR3 for beta chain variable domain of TCR clone 45233 (TRBV19, TRBJ2-7)
CASSIGGGLVNEQYF

SEQ ID NO: 90467 - protein, 12 aa, Homo sapiens
  CDR3 for alpha chain variable domain of TCR clone 45234 (TRAV3, TRAJ13)
CAVSGGYQKVTF

SEQ ID NO: 90468 - protein, 14 aa, Homo sapiens
  CDR3 for beta chain variable domain of TCR clone 45234 (TRBV20-1, TRBJ1-1)
CSAQTRIGGTEAFF

SEQ ID NO: 90469 - protein, 13 aa, Homo sapiens
  CDR3 for alpha chain variable domain of TCR clone 45235 (TRAV12-3, TRAJ13)
CAMSSGGYQKVAF

SEQ ID NO: 90470 - protein, 13 aa, Homo sapiens
  CDR3 for beta chain variable domain of TCR clone 45235 (TRBV20-1, TRBJ1-1)
CSAPPGGHTEAFF

SEQ ID NO: 90471 - protein, 15 aa, Homo sapiens
  CDR3 for alpha chain variable domain of TCR clone 45236 (TRAV12-1, TRAJ44)
CVVDTPRGTASKLTF

SEQ ID NO: 90472 - protein, 14 aa, Homo sapiens
  CDR3 for beta chain variable domain of TCR clone 45236 (TRBV7-9, TRBJ2-1)
CASSPRDSLYEQFF

SEQ ID NO: 90473 - protein, 14 aa, Homo sapiens
  CDR3 for alpha chain variable domain of TCR clone 45237 (TRAV8-1, TRAJ5)
CAVRTDTGRRALTF

SEQ ID NO: 90474 - protein, 14 aa, Homo sapiens
  CDR3 for beta chain variable domain of TCR clone 45237 (TRBV7-8, TRBJ2-3)
CASSFLDGQDTQYF

SEQ ID NO: 90475 - protein, 11 aa, Homo sapiens
  CDR3 for alpha chain variable domain of TCR clone 45238 (TRAV9-2, TRAJ43)
CALNNNNGMRF

SEQ ID NO: 90476 - protein, 13 aa, Homo sapiens
  CDR3 for beta chain variable domain of TCR clone 45238 (TRBV20-1, TRBJ2-1)
CSASTGTSNEQFF

SEQ ID NO: 90477 - protein, 17 aa, Homo sapiens
  CDR3 for alpha chain variable domain of TCR clone 45239 (TRAV38-2/DV8, TRAJ28)
CAFLTLYSGAGSYQLTF

SEQ ID NO: 90478 - protein, 13 aa, Homo sapiens
  CDR3 for beta chain variable domain of TCR clone 45239 (TRBV7-2, TRBJ2-5)
CQQLVRGGVTQYF

SEQ ID NO: 90479 - protein, 13 aa, Homo sapiens
  CDR3 for alpha chain variable domain of TCR clone 45240 (TRAV17, TRAJ33)
CATDADSNYQLIW

SEQ ID NO: 90480 - protein, 14 aa, Homo sapiens
  CDR3 for beta chain variable domain of TCR clone 45240 (TRBV20-1, TRBJ2-3)
CLTGTSGGQDTQYF

SEQ ID NO: 90481 - protein, 15 aa, Homo sapiens
  CDR3 for alpha chain variable domain of TCR clone 45241 (TRAV2, TRAJ9)
CAVAALNTGGFKTIF

SEQ ID NO: 90482 - protein, 12 aa, Homo sapiens
  CDR3 for beta chain variable domain of TCR clone 45241 (TRBV14, TRBJ1-1)
CASSQLKGLAFF

SEQ ID NO: 90483 - protein, 16 aa, Homo sapiens
  CDR3 for alpha chain variable domain of TCR clone 45242 (TRAV30, TRAJ24)
CGTEIVDADSWGKFQL

SEQ ID NO: 90484 - protein, 14 aa, Homo sapiens
  CDR3 for beta chain variable domain of TCR clone 45242 (TRBV12-5, TRBJ2-5)
CASGSRTHQGTQYF

SEQ ID NO: 90485 - protein, 15 aa, Homo sapiens
  CDR3 for alpha chain variable domain of TCR clone 45243 (TRAV2, TRAJ9)
CAVEDRGTGGFKTIF

SEQ ID NO: 90486 - protein, 15 aa, Homo sapiens
  CDR3 for beta chain variable domain of TCR clone 45243 (TRBV6-5, TRBJ1-2)
CASSYSPPRFYGYTF

SEQ ID NO: 90487 - protein, 15 aa, Homo sapiens
  CDR3 for alpha chain variable domain of TCR clone 45244 (TRAV3, TRAJ22)
CAVRDRGGSARQLTF

SEQ ID NO: 90488 - protein, 16 aa, Homo sapiens
  CDR3 for beta chain variable domain of TCR clone 45244 (TRBV5-4, TRBJ2-3)
CDSQQPGAGGADTQYF

SEQ ID NO: 90489 - protein, 14 aa, Homo sapiens
  CDR3 for alpha chain variable domain of TCR clone 45245 (TRAV21, TRAJ35)
CAVMPIGFGNVLHC

SEQ ID NO: 90490 - protein, 12 aa, Homo sapiens
  CDR3 for beta chain variable domain of TCR clone 45245 (TRBV7-9, TRBJ2-7)
CACSIKREEQYF

SEQ ID NO: 90491 - protein, 18 aa, Homo sapiens
  CDR3 for alpha chain variable domain of TCR clone 45246 (TRAV21, TRAJ52)
CAVRPSPAGGTSYGRLTF

SEQ ID NO: 90492 - protein, 13 aa, Homo sapiens
  CDR3 for beta chain variable domain of TCR clone 45246 (TRBV7-3, TRBJ1-1)
CASSQDWGAEAFF

SEQ ID NO: 90493 - protein, 14 aa, Homo sapiens
  CDR3 for alpha chain variable domain of TCR clone 45247 (TRAV3, TRAJ28)
CAVRRGAGSYQPTF

SEQ ID NO: 90494 - protein, 16 aa, Homo sapiens
  CDR3 for beta chain variable domain of TCR clone 45247 (TRBV4-1, TRBJ2-7)
CASSQEWTSGPLEQYF

SEQ ID NO: 90495 - protein, 14 aa, Homo sapiens
  CDR3 for alpha chain variable domain of TCR clone 45248 (TRAV12-3, TRAJ9)
CAMSPNTGGFKTIF

SEQ ID NO: 90496 - protein, 15 aa, Homo sapiens
  CDR3 for beta chain variable domain of TCR clone 45248 (TRBV20-1, TRBJ2-7)
CSARDRVSGMDEQYF

SEQ ID NO: 90497 - protein, 11 aa, Homo sapiens
  CDR3 for alpha chain variable domain of TCR clone 45249 (TRAV17, TRAJ9)
CGFTGGFKNIF

SEQ ID NO: 90498 - protein, 14 aa, Homo sapiens
  CDR3 for beta chain variable domain of TCR clone 45249 (TRBV7-9, TRBJ2-2)
CASSLVQDTGELFF

SEQ ID NO: 90499 - protein, 14 aa, Homo sapiens
  CDR3 for alpha chain variable domain of TCR clone 45250 (TRAV17, TRAJ34)
CATDSLEGTDKLIF

SEQ ID NO: 90500 - protein, 13 aa, Homo sapiens
  CDR3 for beta chain variable domain of TCR clone 45250 (TRBV11-2, TRBJ2-7)
CASSGTRPYEQCF

SEQ ID NO: 90501 - protein, 10 aa, Homo sapiens
  CDR3 for alpha chain variable domain of TCR clone 45251 (TRAV8-4, TRAJ43)
CSVSADDMRF

SEQ ID NO: 90502 - protein, 15 aa, Homo sapiens
  CDR3 for beta chain variable domain of TCR clone 45251 (TRBV5-1, TRBJ2-3)
CASSVTSGSTDTQYF

SEQ ID NO: 90503 - protein, 15 aa, Homo sapiens
  CDR3 for alpha chain variable domain of TCR clone 45252 (TRAV26-1, TRAJ44)
CIAGVPFGTASKLTF

SEQ ID NO: 90504 - protein, 17 aa, Homo sapiens
  CDR3 for beta chain variable domain of TCR clone 45252 (TRBV24-1, TRBJ2-4)
CATSDAEARGVRNIQYF

SEQ ID NO: 90505 - protein, 23 aa, Homo sapiens
  CDR3 for alpha chain variable domain of TCR clone 45253 (TRAV26-1, TRAJ38)
CIADNAGNNHIQNPDPAVYQLRD

SEQ ID NO: 90506 - protein, 15 aa, Homo sapiens
  CDR3 for beta chain variable domain of TCR clone 45253 (TRBV27, TRBJ2-1)
CASSNGEGPPMSSSS

SEQ ID NO: 90507 - protein, 14 aa, Homo sapiens
  CDR3 for alpha chain variable domain of TCR clone 45254 (TRAV13-1, TRAJ40)
CAASMTSGTYKYIF

SEQ ID NO: 90508 - protein, 15 aa, Homo sapiens
  CDR3 for beta chain variable domain of TCR clone 45254 (TRBV7-3, TRBJ2-1)
CASSPTGGGEVGQFF

SEQ ID NO: 90509 - protein, 16 aa, Homo sapiens
  CDR3 for alpha chain variable domain of TCR clone 45255 (TRAV26-1, TRAJ56)
CIVRVAETGANSKLTF

SEQ ID NO: 90510 - protein, 14 aa, Homo sapiens
  CDR3 for beta chain variable domain of TCR clone 45255 (TRBV20-1, TRBJ2-3)
CSARGGTSTDTQYF

SEQ ID NO: 90511 - protein, 15 aa, Homo sapiens
  CDR3 for alpha chain variable domain of TCR clone 45256 (TRAV3, TRAJ5)
CAVRDLDTGRRALTF

SEQ ID NO: 90512 - protein, 15 aa, Homo sapiens
  CDR3 for beta chain variable domain of TCR clone 45256 (TRBV15, TRBJ2-2)
CATSGTGGRVGELFF

SEQ ID NO: 90513 - protein, 14 aa, Homo sapiens
  CDR3 for alpha chain variable domain of TCR clone 45257 (TRAV13-1, TRAJ35)
CAASKGGFGNVLHC

SEQ ID NO: 90514 - protein, 13 aa, Homo sapiens
  CDR3 for beta chain variable domain of TCR clone 45257 (TRBV7-2, TRBJ2-2)
CASSSVRAGELFF

SEQ ID NO: 90515 - protein, 12 aa, Homo sapiens
  CDR3 for alpha chain variable domain of TCR clone 45258 (TRAV17, TRAJ53)
CSGGGSNYKLTF

SEQ ID NO: 90516 - protein, 16 aa, Homo sapiens
  CDR3 for beta chain variable domain of TCR clone 45258 (TRBV11-2, TRBJ2-3)
CASSFQGRGALDTQYF

SEQ ID NO: 90517 - protein, 17 aa, Homo sapiens
  CDR3 for alpha chain variable domain of TCR clone 45259 (TRAV26-1, TRAJ53)
CIVRVDDSGGSNYKLTF

SEQ ID NO: 90518 - protein, 14 aa, Homo sapiens
  CDR3 for beta chain variable domain of TCR clone 45259 (TRBV4-1, TRBJ2-2)
CASSQAVNTGELFF

SEQ ID NO: 90519 - protein, 15 aa, Homo sapiens
  CDR3 for alpha chain variable domain of TCR clone 45260 (TRAV17, TRAJ57)
CATGPSQGGSEKLVF

SEQ ID NO: 90520 - protein, 18 aa, Homo sapiens
  CDR3 for beta chain variable domain of TCR clone 45260 (TRBV7-9, TRBJ2-7)
FASSLTTSGSRTWYEQYF

SEQ ID NO: 90521 - protein, 14 aa, Homo sapiens
  CDR3 for alpha chain variable domain of TCR clone 45261 (TRAV12-1, TRAJ17)
CVVNYKAAGNKLTF

SEQ ID NO: 90522 - protein, 13 aa, Homo sapiens
  CDR3 for beta chain variable domain of TCR clone 45261 (TRBV20-1, TRBJ1-1)
CSAGTVGNTEAFF

SEQ ID NO: 90523 - protein, 14 aa, Homo sapiens
  CDR3 for alpha chain variable domain of TCR clone 45262 (TRAV38-1, TRAJ45)
CASHSGGCADGLTF

SEQ ID NO: 90524 - protein, 13 aa, Homo sapiens
  CDR3 for beta chain variable domain of TCR clone 45262 (TRBV10-3, TRBJ1-2)
CAISERDSYGYTF

SEQ ID NO: 90525 - protein, 11 aa, Homo sapiens
  CDR3 for alpha chain variable domain of TCR clone 45263 (TRAV23/DV6, TRAJ58)
CAARLLRGETS

SEQ ID NO: 90526 - protein, 14 aa, Homo sapiens
  CDR3 for beta chain variable domain of TCR clone 45263 (TRBV7-2, TRBJ2-7)
CASSPKTSFYEQYF

SEQ ID NO: 90527 - protein, 14 aa, Homo sapiens
  CDR3 for alpha chain variable domain of TCR clone 45264 (TRAV20, TRAJ22)
CAVALGGSARQLTF

SEQ ID NO: 90528 - protein, 14 aa, Homo sapiens
  CDR3 for beta chain variable domain of TCR clone 45264 (TRBV11-2, TRBJ1-5)
CASSLDRGRQPQHF

SEQ ID NO: 90529 - protein, 12 aa, Homo sapiens
  CDR3 for alpha chain variable domain of TCR clone 45265 (TRAV13-2, TRAJ23)
CAERHRGGKLIF

SEQ ID NO: 90530 - protein, 16 aa, Homo sapiens
  CDR3 for beta chain variable domain of TCR clone 45265 (TRBV20-1, TRBJ1-4)
CSAPGKGLLTNEKLFF

SEQ ID NO: 90531 - protein, 14 aa, Homo sapiens
  CDR3 for alpha chain variable domain of TCR clone 45266 (TRAV21, TRAJ37)
CAVKGSSNTGKLIF

SEQ ID NO: 90532 - protein, 14 aa, Homo sapiens
  CDR3 for beta chain variable domain of TCR clone 45266 (TRBV19, TRBJ2-1)
CASPTFVLSGEQFF

SEQ ID NO: 90533 - protein, 13 aa, Homo sapiens
  CDR3 for alpha chain variable domain of TCR clone 45267 (TRAV3, TRAJ21)
CAVREPAFNKFYF

SEQ ID NO: 90534 - protein, 14 aa, Homo sapiens
  CDR3 for beta chain variable domain of TCR clone 45267 (TRBV4-2, TRBJ2-1)
CASGLDRAYNEQFF

SEQ ID NO: 90535 - protein, 11 aa, Homo sapiens
  CDR3 for alpha chain variable domain of TCR clone 45268 (TRAV1-2, TRAJ20)
CAVANDYKFSF

SEQ ID NO: 90536 - protein, 18 aa, Homo sapiens
  CDR3 for beta chain variable domain of TCR clone 45268 (TRBV20-1, TRBJ2-6)
CSAETTPTHGSGANVLTF

SEQ ID NO: 90537 - protein, 14 aa, Homo sapiens
  CDR3 for alpha chain variable domain of TCR clone 45269 (TRAV21, TRAJ37)
CAVKRSSNTGKLIF

SEQ ID NO: 90538 - protein, 14 aa, Homo sapiens
  CDR3 for beta chain variable domain of TCR clone 45269 (TRBV7-2, TRBJ2-1)
CASSRGGARNEQFF

SEQ ID NO: 90539 - protein, 16 aa, Homo sapiens
  CDR3 for alpha chain variable domain of TCR clone 45270 (TRAV13-1, TRAJ37)
CAASSLGSSNTGKLIF

SEQ ID NO: 90540 - protein, 12 aa, Homo sapiens
  CDR3 for beta chain variable domain of TCR clone 45270 (TRBV6-1, TRBJ2-5)
CASGEGRETQYF

SEQ ID NO: 90541 - protein, 15 aa, Homo sapiens
  CDR3 for alpha chain variable domain of TCR clone 45271 (TRAV17, TRAJ57)
CATGPSQGGSEKLVF

SEQ ID NO: 90542 - protein, 14 aa, Homo sapiens
  CDR3 for beta chain variable domain of TCR clone 45271 (TRBV12-5, TRBJ2-5)
CASGSRTHKETQYF

SEQ ID NO: 90543 - protein, 14 aa, Homo sapiens
  CDR3 for alpha chain variable domain of TCR clone 45272 (TRAV26-1, TRAJ34)
CIVRVAYDTDKLIF

SEQ ID NO: 90544 - protein, 15 aa, Homo sapiens
  CDR3 for beta chain variable domain of TCR clone 45272 (TRBV20-1, TRBJ2-7)
CSARVPAAYFYEQYF

SEQ ID NO: 90545 - protein, 17 aa, Homo sapiens
  CDR3 for alpha chain variable domain of TCR clone 45273 (TRAV3, TRAJ12)
CAVRDGGGMDSSYKLIF

SEQ ID NO: 90546 - protein, 13 aa, Homo sapiens
  CDR3 for beta chain variable domain of TCR clone 45273 (TRBV15, TRBJ1-6)
CATSGGLNSPLHF

SEQ ID NO: 90547 - protein, 17 aa, Homo sapiens
  CDR3 for alpha chain variable domain of TCR clone 45274 (TRAV2, TRAJ36)
CAVEDRGDWGKQPLLWD

SEQ ID NO: 90548 - protein, 14 aa, Homo sapiens
  CDR3 for beta chain variable domain of TCR clone 45274 (TRBV7-9, TRBJ2-5)
CASSLDTAQETQYF

SEQ ID NO: 90549 - protein, 14 aa, Homo sapiens
  CDR3 for alpha chain variable domain of TCR clone 45275 (TRAV12-3, TRAJ10)
SHLPLTGGGNKLTF

SEQ ID NO: 90550 - protein, 15 aa, Homo sapiens
  CDR3 for beta chain variable domain of TCR clone 45275 (TRBV7-9, TRBJ1-6)
CASSSPGRGNSPLYF

SEQ ID NO: 90551 - protein, 15 aa, Homo sapiens
  CDR3 for alpha chain variable domain of TCR clone 45276 (TRAV12-3, TRAJ6)
CAMSATSGGSYIPTF

SEQ ID NO: 90552 - protein, 13 aa, Homo sapiens
  CDR3 for beta chain variable domain of TCR clone 45276 (TRBV7-2, TRBJ2-1)
CASSLGVYNEQFF

SEQ ID NO: 90553 - protein, 13 aa, Homo sapiens
  CDR3 for alpha chain variable domain of TCR clone 45277 (TRAV12-3, TRAJ7)
CAMTPYGNNRLDF

SEQ ID NO: 90554 - protein, 16 aa, Homo sapiens
  CDR3 for beta chain variable domain of TCR clone 45277 (TRBV20-1, TRBJ1-4)
CSARPYGGELNEKLFF

SEQ ID NO: 90555 - protein, 14 aa, Homo sapiens
  CDR3 for alpha chain variable domain of TCR clone 45278 (TRAV4, TRAJ20)
CLVGRRSNDYKLSF

SEQ ID NO: 90556 - protein, 18 aa, Homo sapiens
  CDR3 for beta chain variable domain of TCR clone 45278 (TRBV2, TRBJ2-5)
CASSGDPQGRGAQGTQYF

SEQ ID NO: 90557 - protein, 15 aa, Homo sapiens
  CDR3 for alpha chain variable domain of TCR clone 45279 (TRAV3, TRAJ5)
CAVRDRKTGRRALTF

SEQ ID NO: 90558 - protein, 15 aa, Homo sapiens
  CDR3 for beta chain variable domain of TCR clone 45279 (TRBV7-8, TRBJ2-1)
CASSLADSLYNKQFF

SEQ ID NO: 90559 - protein, 18 aa, Homo sapiens
  CDR3 for alpha chain variable domain of TCR clone 45280 (TRAV21, TRAJ52)
CAVRPSPAGGTSYGKLTF

SEQ ID NO: 90560 - protein, 17 aa, Homo sapiens
  CDR3 for beta chain variable domain of TCR clone 45280 (TRBV13, TRBJ2-3)
CASSLSRVAGGRNPQYF

SEQ ID NO: 90561 - protein, 13 aa, Homo sapiens
  CDR3 for alpha chain variable domain of TCR clone 45281 (TRAV13-2, TRAJ13)
CAERPGGYQKVTF

SEQ ID NO: 90562 - protein, 14 aa, Homo sapiens
  CDR3 for beta chain variable domain of TCR clone 45281 (TRBV4-1, TRBJ2-2)
CASSQAVNTGELFF

SEQ ID NO: 90563 - protein, 14 aa, Homo sapiens
  CDR3 for alpha chain variable domain of TCR clone 45282 (TRAV13-2, TRAJ17)
CAENSKAAGNKLTF

SEQ ID NO: 90564 - protein, 20 aa, Homo sapiens
  CDR3 for beta chain variable domain of TCR clone 45282 (TRBV7-8, TRBJ2-2)
CASSHLFPGPTIHITGELFL

SEQ ID NO: 90565 - protein, 13 aa, Homo sapiens
  CDR3 for alpha chain variable domain of TCR clone 45283 (TRAV16, TRAJ31)
CALSAHNNARLVF

SEQ ID NO: 90566 - protein, 17 aa, Homo sapiens
  CDR3 for beta chain variable domain of TCR clone 45283 (TRBV12-4, TRBJ2-1)
CASSPGLAGGRINEQFF

SEQ ID NO: 90567 - protein, 15 aa, Homo sapiens
  CDR3 for alpha chain variable domain of TCR clone 45284 (TRAV12-1, TRAJ42)
CVVTRDGGSEGNLIF

SEQ ID NO: 90568 - protein, 14 aa, Homo sapiens
  CDR3 for beta chain variable domain of TCR clone 45284 (TRBV11-2, TRBJ2-3)
CASSLGGGANTQYF

SEQ ID NO: 90569 - protein, 15 aa, Homo sapiens
  CDR3 for alpha chain variable domain of TCR clone 45285 (TRAV12-2, TRAJ53)
CAVNGGGGSHYKLTF

SEQ ID NO: 90570 - protein, 13 aa, Homo sapiens
  CDR3 for beta chain variable domain of TCR clone 45285 (TRBV3-1, TRBJ1-1)
CASSPGVITEAFF

SEQ ID NO: 90571 - protein, 11 aa, Homo sapiens
  CDR3 for alpha chain variable domain of TCR clone 45286 (TRAV2, TRAJ33)
CAVESNYQLIW

SEQ ID NO: 90572 - protein, 14 aa, Homo sapiens
  CDR3 for beta chain variable domain of TCR clone 45286 (TRBV4-2, TRBJ1-1)
CASSRKSPNTEAFF

SEQ ID NO: 90573 - protein, 14 aa, Homo sapiens
  CDR3 for alpha chain variable domain of TCR clone 45287 (TRAV12-2, TRAJ10)
CAVNEAGGGNKLTF

SEQ ID NO: 90574 - protein, 15 aa, Homo sapiens
  CDR3 for beta chain variable domain of TCR clone 45287 (TRBV27, TRBJ2-5)
CASSLYPRGGETQYF

SEQ ID NO: 90575 - protein, 12 aa, Homo sapiens
  CDR3 for alpha chain variable domain of TCR clone 45288 (TRAV12-1, TRAJ31)
CVSWNNNARLMF

SEQ ID NO: 90576 - protein, 15 aa, Homo sapiens
  CDR3 for beta chain variable domain of TCR clone 45288 (TRBV7-2, TRBJ1-5)
CASSLDRGQDKPQHF

SEQ ID NO: 90577 - protein, 11 aa, Homo sapiens
  CDR3 for alpha chain variable domain of TCR clone 45289 (TRAV2, TRAJ33)
CAVDSNYQLIW

SEQ ID NO: 90578 - protein, 15 aa, Homo sapiens
  CDR3 for beta chain variable domain of TCR clone 45289 (TRBV19, TRBJ1-2)
CASGVGQVLNYGYTF

SEQ ID NO: 90579 - protein, 13 aa, Homo sapiens
  CDR3 for alpha chain variable domain of TCR clone 45290 (TRAV23/DV6, TRAJ31)
CAARRGNNARLML

SEQ ID NO: 90580 - protein, 15 aa, Homo sapiens
  CDR3 for beta chain variable domain of TCR clone 45290 (TRBV5-4, TRBJ2-3)
CASSLAGRVTDTQYF

SEQ ID NO: 90581 - protein, 15 aa, Homo sapiens
  CDR3 for alpha chain variable domain of TCR clone 45291 (TRAV17, TRAJ57)
CATGPSQGGSEKLVF

SEQ ID NO: 90582 - protein, 18 aa, Homo sapiens
  CDR3 for beta chain variable domain of TCR clone 45291 (TRBV7-9, TRBJ2-7)
CASSLTTSGSRTWYEQYF

SEQ ID NO: 90583 - protein, 13 aa, Homo sapiens
  CDR3 for alpha chain variable domain of TCR clone 45292 (TRAV38-2/DV8, TRAJ34)
CAYRTWNTDKLIL

SEQ ID NO: 90584 - protein, 16 aa, Homo sapiens
  CDR3 for beta chain variable domain of TCR clone 45292 (TRBV19, TRBJ2-1)
CASSKAGPSSYNEQFF

SEQ ID NO: 90585 - protein, 19 aa, Homo sapiens
  CDR3 for alpha chain variable domain of TCR clone 45293 (TRAV1-1, TRAJ37)
CLLLLRCKRSGSNTGKLIF

SEQ ID NO: 90586 - protein, 14 aa, Homo sapiens
  CDR3 for beta chain variable domain of TCR clone 45293 (TRBV29-1, TRBJ2-2)
CSALGGVGAGELFF

SEQ ID NO: 90587 - protein, 15 aa, Homo sapiens
  CDR3 for alpha chain variable domain of TCR clone 45294 (TRAV6, TRAJ4)
CALGGFSGGYNKLIF

SEQ ID NO: 90588 - protein, 10 aa, Homo sapiens
  CDR3 for beta chain variable domain of TCR clone 45294 (TRBV19, TRBJ1-2)
CASSVPDRMA

SEQ ID NO: 90589 - protein, 14 aa, Homo sapiens
  CDR3 for alpha chain variable domain of TCR clone 45295 (TRAV12-3, TRAJ10)
SHLPLTGGGNKLIF

SEQ ID NO: 90590 - protein, 14 aa, Homo sapiens
  CDR3 for beta chain variable domain of TCR clone 45295 (TRBV6-1, TRBJ1-3)
CASVQGGGGNTIYF

SEQ ID NO: 90591 - protein, 11 aa, Homo sapiens
  CDR3 for alpha chain variable domain of TCR clone 45296 (TRAV3, TRAJ21)
CAVGNFNKFYF

SEQ ID NO: 90592 - protein, 15 aa, Homo sapiens
  CDR3 for beta chain variable domain of TCR clone 45296 (TRBV10-1, TRBJ2-3)
CASSATSGGFDTQYF

SEQ ID NO: 90593 - protein, 13 aa, Homo sapiens
  CDR3 for alpha chain variable domain of TCR clone 45297 (TRAV12-3, TRAJ13)
CAMSSGGYQKVTF

SEQ ID NO: 90594 - protein, 17 aa, Homo sapiens
  CDR3 for beta chain variable domain of TCR clone 45297 (TRBV13, TRBJ2-3)
CASSLSRVAGGRNTQYF

SEQ ID NO: 90595 - protein, 14 aa, Homo sapiens
  CDR3 for alpha chain variable domain of TCR clone 45298 (TRAV12-1, TRAJ17)
CVVNYKAAGNKLTF

SEQ ID NO: 90596 - protein, 17 aa, Homo sapiens
  CDR3 for beta chain variable domain of TCR clone 45298 (TRBV20-1, TRBJ2-1)
CSASFSGLAGSYNEQFS

SEQ ID NO: 90597 - protein, 12 aa, Homo sapiens
  CDR3 for alpha chain variable domain of TCR clone 45299 (TRAV8-3, TRAJ26)
CAGDNYGQNFVF

SEQ ID NO: 90598 - protein, 15 aa, Homo sapiens
  CDR3 for beta chain variable domain of TCR clone 45299 (TRBV9, TRBJ2-1)
CASSLAGRSYNEQFF

SEQ ID NO: 90599 - protein, 11 aa, Homo sapiens
  CDR3 for alpha chain variable domain of TCR clone 45300 (TRAV3, TRAJ21)
CAVGNFNKFYF

SEQ ID NO: 90600 - protein, 14 aa, Homo sapiens
  CDR3 for beta chain variable domain of TCR clone 45300 (TRBV28, TRBJ2-3)
CASSWRGRADTQYF

SEQ ID NO: 90601 - protein, 14 aa, Homo sapiens
  CDR3 for alpha chain variable domain of TCR clone 45301 (TRAV12-2, TRAJ45)
CALPEGGGADGLTF

SEQ ID NO: 90602 - protein, 14 aa, Homo sapiens
  CDR3 for beta chain variable domain of TCR clone 45301 (TRBV18, TRBJ1-5)
CASSPGNSNQPQHF

SEQ ID NO: 90603 - protein, 17 aa, Homo sapiens
  CDR3 for alpha chain variable domain of TCR clone 45302 (TRAV3, TRAJ6)
CAVSRRTDTGGSYIPTF

SEQ ID NO: 90604 - protein, 16 aa, Homo sapiens
  CDR3 for beta chain variable domain of TCR clone 45302 (TRBV2, TRBJ1-4)
CASNLLQGATNEKLFF

SEQ ID NO: 90605 - protein, 15 aa, Homo sapiens
  CDR3 for alpha chain variable domain of TCR clone 45303 (TRAV35, TRAJ23)
CAGPLGNNQGGKLIF

SEQ ID NO: 90606 - protein, 13 aa, Homo sapiens
  CDR3 for beta chain variable domain of TCR clone 45303 (TRBV7-9, TRBJ2-2)
CASSLDPTGELFF

SEQ ID NO: 90607 - protein, 15 aa, Homo sapiens
  CDR3 for alpha chain variable domain of TCR clone 45304 (TRAV3, TRAJ3)
CAVRDGHSSASKMIF

SEQ ID NO: 90608 - protein, 17 aa, Homo sapiens
  CDR3 for beta chain variable domain of TCR clone 45304 (TRBV25-1, TRBJ2-7)
CASSDARVVFSSYEQYF

SEQ ID NO: 90609 - protein, 15 aa, Homo sapiens
  CDR3 for alpha chain variable domain of TCR clone 45305 (TRAV3, TRAJ3)
YAVRDRDSSASKIIF

SEQ ID NO: 90610 - protein, 18 aa, Homo sapiens
  CDR3 for beta chain variable domain of TCR clone 45305 (TRBV25-1, TRBJ1-2)
CASSGLQNGQGLIFGYTF

SEQ ID NO: 90611 - protein, 11 aa, Homo sapiens
  CDR3 for alpha chain variable domain of TCR clone 45306 (TRAV2, TRAJ13)
CASGGYQKVTF

SEQ ID NO: 90612 - protein, 15 aa, Homo sapiens
  CDR3 for beta chain variable domain of TCR clone 45306 (TRBV20-1, TRBJ2-7)
CSARDRVSGMDEQCF

SEQ ID NO: 90613 - protein, 14 aa, Homo sapiens
  CDR3 for alpha chain variable domain of TCR clone 45307 (TRAV9-2, TRAJ39)
CALYIYNAGNMLTF

SEQ ID NO: 90614 - protein, 13 aa, Homo sapiens
  CDR3 for beta chain variable domain of TCR clone 45307 (TRBV19, TRBJ2-7)
CASSPRQSYEQYF

SEQ ID NO: 90615 - protein, 13 aa, Homo sapiens
  CDR3 for alpha chain variable domain of TCR clone 45308 (TRAV22, TRAJ29)
CAVGGSGNTPLVF

SEQ ID NO: 90616 - protein, 18 aa, Homo sapiens
  CDR3 for beta chain variable domain of TCR clone 45308 (TRBV10-3, TRBJ2-3)
CAISESRVGPMRGDTQCF

SEQ ID NO: 90617 - protein, 12 aa, Homo sapiens
  CDR3 for alpha chain variable domain of TCR clone 45309 (TRAV1-1, TRAJ8)
CAGGTGFQKLVF

SEQ ID NO: 90618 - protein, 14 aa, Homo sapiens
  CDR3 for beta chain variable domain of TCR clone 45309 (TRBV25-1, TRBJ1-1)
CASTHLGGNTEAFF

SEQ ID NO: 90619 - protein, 18 aa, Homo sapiens
  CDR3 for alpha chain variable domain of TCR clone 45310 (TRAV26-1, TRAJ23)
CIVRVGLEVWNQGGKLIF

SEQ ID NO: 90620 - protein, 16 aa, Homo sapiens
  CDR3 for beta chain variable domain of TCR clone 45310 (TRBV12-4, TRBJ2-5)
CASSFFVRGRQETQYC

SEQ ID NO: 90621 - protein, 14 aa, Homo sapiens
  CDR3 for alpha chain variable domain of TCR clone 45311 (TRAV38-1, TRAJ45)
CASHSGGGADGLTF

SEQ ID NO: 90622 - protein, 13 aa, Homo sapiens
  CDR3 for beta chain variable domain of TCR clone 45311 (TRBV10-3, TRBJ1-2)
CAISGRDSYGYTF

SEQ ID NO: 90623 - protein, 11 aa, Homo sapiens
  CDR3 for alpha chain variable domain of TCR clone 45312 (TRAV26-1, TRAJ37)
CIVRVGRKLIF

SEQ ID NO: 90624 - protein, 13 aa, Homo sapiens
  CDR3 for beta chain variable domain of TCR clone 45312 (TRBV14, TRBJ1-2)
CASSEDRRYGDTF

SEQ ID NO: 90625 - protein, 16 aa, Homo sapiens
  CDR3 for alpha chain variable domain of TCR clone 45313 (TRAV3, TRAJ21)
CAVRDIESGNFNKFYF

SEQ ID NO: 90626 - protein, 13 aa, Homo sapiens
  CDR3 for beta chain variable domain of TCR clone 45313 (TRBV27, TRBJ2-7)
CASSLTTGYEQYF

SEQ ID NO: 90627 - protein, 17 aa, Homo sapiens
  CDR3 for alpha chain variable domain of TCR clone 45314 (TRAV8-6, TRAJ58)
CAVSSWVGETSGSRLTF

SEQ ID NO: 90628 - protein, 14 aa, Homo sapiens
  CDR3 for beta chain variable domain of TCR clone 45314 (TRBV4-2, TRBJ2-1)
CVSGLDRAYNEQFF

SEQ ID NO: 90629 - protein, 17 aa, Homo sapiens
  CDR3 for alpha chain variable domain of TCR clone 45315 (TRAV13-1, TRAJ31)
CAPRDRLMFGVGTQLVV

SEQ ID NO: 90630 - protein, 12 aa, Homo sapiens
  CDR3 for beta chain variable domain of TCR clone 45315 (TRBV7-9, TRBJ2-7)
CASSLEGYEQYF

SEQ ID NO: 90631 - protein, 15 aa, Homo sapiens
  CDR3 for alpha chain variable domain of TCR clone 45316 (TRAV3, TRAJ17)
CAVRDTGAAGNKLTF

SEQ ID NO: 90632 - protein, 16 aa, Homo sapiens
  CDR3 for beta chain variable domain of TCR clone 45316 (TRBV19, TRBJ1-1)
CASSPTRFWPGTEAFF

SEQ ID NO: 90633 - protein, 14 aa, Homo sapiens
  CDR3 for alpha chain variable domain of TCR clone 45317 (TRAV2, TRAJ9)
CAVDPNTGGFKTIF

SEQ ID NO: 90634 - protein, 13 aa, Homo sapiens
  CDR3 for beta chain variable domain of TCR clone 45317 (TRBV20-1, TRBJ2-1)
CSASTGTSNEHFF

SEQ ID NO: 90635 - protein, 16 aa, Homo sapiens
  CDR3 for alpha chain variable domain of TCR clone 45318 (TRAV3, TRAJ37)
CAVRGKVSGNTGKLIF

SEQ ID NO: 90636 - protein, 13 aa, Homo sapiens
  CDR3 for beta chain variable domain of TCR clone 45318 (TRBV14, TRBJ2-7)
CASSQDRRYEQYF

SEQ ID NO: 90637 - protein, 17 aa, Homo sapiens
  CDR3 for alpha chain variable domain of TCR clone 45319 (TRAV12-3, TRAJ6)
CAMSARGGAGGSYIPTF

SEQ ID NO: 90638 - protein, 12 aa, Homo sapiens
  CDR3 for beta chain variable domain of TCR clone 45319 (TRBV12-4, TRBJ2-3)
CASSTIPDTQYF

SEQ ID NO: 90639 - protein, 12 aa, Homo sapiens
  CDR3 for alpha chain variable domain of TCR clone 45320 (TRAV3, TRAJ26)
CAVRDYGQNFVF

SEQ ID NO: 90640 - protein, 16 aa, Homo sapiens
  CDR3 for beta chain variable domain of TCR clone 45320 (TRBV11-2, TRBJ1-2)
CASSPSGRGANYGYTF

SEQ ID NO: 90641 - protein, 11 aa, Homo sapiens
  CDR3 for alpha chain variable domain of TCR clone 45321 (TRAV27, TRAJ39)
CAGERRQHAHL

SEQ ID NO: 90642 - protein, 14 aa, Homo sapiens
  CDR3 for beta chain variable domain of TCR clone 45321 (TRBV15, TRBJ2-7)
CATSPDRGLYEQYF

SEQ ID NO: 90643 - protein, 11 aa, Homo sapiens
  CDR3 for alpha chain variable domain of TCR clone 45322 (TRAV17, TRAJ31)
CATDRTARLMF

SEQ ID NO: 90644 - protein, 14 aa, Homo sapiens
  CDR3 for beta chain variable domain of TCR clone 45322 (TRBV4-2, TRBJ2-3)
CAISQERGTDTQYF

SEQ ID NO: 90645 - protein, 12 aa, Homo sapiens
  CDR3 for alpha chain variable domain of TCR clone 45323 (TRAV2, TRAJ33)
CAVPDSNYQLIW

SEQ ID NO: 90646 - protein, 15 aa, Homo sapiens
  CDR3 for beta chain variable domain of TCR clone 45323 (TRBV15, TRBJ1-5)
CATSRDPVSNRPQHF

SEQ ID NO: 90647 - protein, 13 aa, Homo sapiens
  CDR3 for alpha chain variable domain of TCR clone 45324 (TRAV27, TRAJ29)
CAGAHSGNTPLVF

SEQ ID NO: 90648 - protein, 13 aa, Homo sapiens
  CDR3 for beta chain variable domain of TCR clone 45324 (TRBV7-9, TRBJ1-2)
CASSLKQNYGYTF

SEQ ID NO: 90649 - protein, 16 aa, Homo sapiens
  CDR3 for alpha chain variable domain of TCR clone 45325 (TRAV1-2, TRAJ10)
CAVRGVRTGGGNKLTF

SEQ ID NO: 90650 - protein, 12 aa, Homo sapiens
  CDR3 for beta chain variable domain of TCR clone 45325 (TRBV7-8, TRBJ2-7)
CASSLGDREQYF

SEQ ID NO: 90651 - protein, 13 aa, Homo sapiens
  CDR3 for alpha chain variable domain of TCR clone 45326 (TRAV1-2, TRAJ9)
CAVLNTGGFETIF

SEQ ID NO: 90652 - protein, 14 aa, Homo sapiens
  CDR3 for beta chain variable domain of TCR clone 45326 (TRBV20-1, TRBJ2-3)
RSARGGTSTDTQYF

SEQ ID NO: 90653 - protein, 11 aa, Homo sapiens
  CDR3 for alpha chain variable domain of TCR clone 45327 (TRAV1-1, TRAJ16)
CAAGDGQKLLF

SEQ ID NO: 90654 - protein, 14 aa, Homo sapiens
  CDR3 for beta chain variable domain of TCR clone 45327 (TRBV12-5, TRBJ2-5)
CASGSRTHQETQYL

SEQ ID NO: 90655 - protein, 11 aa, Homo sapiens
  CDR3 for alpha chain variable domain of TCR clone 45328 (TRAV21, TRAJ11)
CAVNGYSTLTF

SEQ ID NO: 90656 - protein, 11 aa, Homo sapiens
  CDR3 for beta chain variable domain of TCR clone 45328 (TRBV11-2, TRBJ2-7)
WASSSDYEQYF

SEQ ID NO: 90657 - protein, 11 aa, Homo sapiens
  CDR3 for alpha chain variable domain of TCR clone 45329 (TRAV12-1, TRAJ31)
CVGRVQRQTHV

SEQ ID NO: 90658 - protein, 14 aa, Homo sapiens
  CDR3 for beta chain variable domain of TCR clone 45329 (TRBV28, TRBJ2-1)
CASSYYTAYNEQFF

SEQ ID NO: 90659 - protein, 13 aa, Homo sapiens
  CDR3 for alpha chain variable domain of TCR clone 45330 (TRAV2, TRAJ15)
CAVASQAGTALIF

SEQ ID NO: 90660 - protein, 14 aa, Homo sapiens
  CDR3 for beta chain variable domain of TCR clone 45330 (TRBV7-2, TRBJ1-1)
CASSFLTGTTEAFF

SEQ ID NO: 90661 - protein, 17 aa, Homo sapiens
  CDR3 for alpha chain variable domain of TCR clone 45331 (TRAV3, TRAJ6)
CAVRDGPRAGGSYIPTF

SEQ ID NO: 90662 - protein, 14 aa, Homo sapiens
  CDR3 for beta chain variable domain of TCR clone 45331 (TRBV7-2, TRBJ2-7)
CASSPKTSFFEQYF

SEQ ID NO: 90663 - protein, 15 aa, Homo sapiens
  CDR3 for alpha chain variable domain of TCR clone 45332 (TRAV21, TRAJ40)
CAARPQTSGTYKYIF

SEQ ID NO: 90664 - protein, 13 aa, Homo sapiens
  CDR3 for beta chain variable domain of TCR clone 45332 (TRBV7-2, TRBJ2-2)
CASSSVRAGELFF

SEQ ID NO: 90665 - protein, 15 aa, Homo sapiens
  CDR3 for alpha chain variable domain of TCR clone 45333 (TRAV12-2, TRAJ43)
CAFDMRFGAGTRLTV

SEQ ID NO: 90666 - protein, 18 aa, Homo sapiens
  CDR3 for beta chain variable domain of TCR clone 45333 (TRBV20-1, TRBJ2-3)
CSASGLAGGPGTTDTQYS

SEQ ID NO: 90667 - protein, 14 aa, Homo sapiens
  CDR3 for alpha chain variable domain of TCR clone 45334 (TRAV20, TRAJ10)
CAVRVEGGGNKLTF

SEQ ID NO: 90668 - protein, 18 aa, Homo sapiens
  CDR3 for beta chain variable domain of TCR clone 45334 (TRBV24-1, TRBJ2-1)
CATSDLMFLGRGVHEQSF

SEQ ID NO: 90669 - protein, 17 aa, Homo sapiens
  CDR3 for alpha chain variable domain of TCR clone 45335 (TRAV3, TRAJ42)
CAVRDRDHGGSQGNLIF

SEQ ID NO: 90670 - protein, 15 aa, Homo sapiens
  CDR3 for beta chain variable domain of TCR clone 45335 (TRBV6-6, TRBJ2-7)
CASSYSYGGSYEQYF

SEQ ID NO: 90671 - protein, 14 aa, Homo sapiens
  CDR3 for alpha chain variable domain of TCR clone 45336 (TRAV17, TRAJ16)
CATADFSDGQKLLF

SEQ ID NO: 90672 - protein, 12 aa, Homo sapiens
  CDR3 for beta chain variable domain of TCR clone 45336 (TRBV24-1, TRBJ1-1)
CATLCPDTEAFF

SEQ ID NO: 90673 - protein, 13 aa, Homo sapiens
  CDR3 for alpha chain variable domain of TCR clone 45337 (TRAV8-6, TRAJ9)
CAVSHTGGFKTIF

SEQ ID NO: 90674 - protein, 17 aa, Homo sapiens
  CDR3 for beta chain variable domain of TCR clone 45337 (TRBV13, TRBJ2-3)
CASSLSRVAGGRNTQYF

SEQ ID NO: 90675 - protein, 14 aa, Homo sapiens
  CDR3 for alpha chain variable domain of TCR clone 45338 (TRAV26-1, TRAJ21)
CIVRPPYNFNKFYF

SEQ ID NO: 90676 - protein, 13 aa, Homo sapiens
  CDR3 for beta chain variable domain of TCR clone 45338 (TRBV4-2, TRBJ1-1)
CASSQAGNTEAFF

SEQ ID NO: 90677 - protein, 18 aa, Homo sapiens
  CDR3 for alpha chain variable domain of TCR clone 45339 (TRAV26-1, TRAJ23)
CIVRVGLEVWNRGGKLIF

SEQ ID NO: 90678 - protein, 16 aa, Homo sapiens
  CDR3 for beta chain variable domain of TCR clone 45339 (TRBV12-4, TRBJ2-5)
CASSFFVRGRQETQYF

SEQ ID NO: 90679 - protein, 15 aa, Homo sapiens
  CDR3 for alpha chain variable domain of TCR clone 45340 (TRAV20, TRAJ43)
CAVQAGKSNNNDMRF

SEQ ID NO: 90680 - protein, 14 aa, Homo sapiens
  CDR3 for beta chain variable domain of TCR clone 45340 (TRBV27, TRBJ2-1)
CASRHLGGGKEQFF

SEQ ID NO: 90681 - protein, 15 aa, Homo sapiens
  CDR3 for alpha chain variable domain of TCR clone 45341 (TRAV12-2, TRAJ43)
CAFDMRFGAGTRLTV

SEQ ID NO: 90682 - protein, 13 aa, Homo sapiens
  CDR3 for beta chain variable domain of TCR clone 45341 (TRBV4-2, TRBJ1-1)
CASSLAGNTEAFF

SEQ ID NO: 90683 - protein, 11 aa, Homo sapiens
  CDR3 for alpha chain variable domain of TCR clone 45342 (TRAV1-2, TRAJ20)
CAVANDYKISF

SEQ ID NO: 90684 - protein, 18 aa, Homo sapiens
  CDR3 for beta chain variable domain of TCR clone 45342 (TRBV20-1, TRBJ2-6)
CSAETTPTHGSGANVLTF

SEQ ID NO: 90685 - protein, 15 aa, Homo sapiens
  CDR3 for alpha chain variable domain of TCR clone 45343 (TRAV3, TRAJ22)
CAVRGRGGSARQLTF

SEQ ID NO: 90686 - protein, 16 aa, Homo sapiens
  CDR3 for beta chain variable domain of TCR clone 45343 (TRBV5-4, TRBJ2-3)
CASQQPGAGGADTQYF

SEQ ID NO: 90687 - protein, 12 aa, Homo sapiens
  CDR3 for alpha chain variable domain of TCR clone 45344 (TRAV12-3, TRAJ3)
CAIDSSASKMIF

SEQ ID NO: 90688 - protein, 17 aa, Homo sapiens
  CDR3 for beta chain variable domain of TCR clone 45344 (TRBV7-9, TRBJ2-3)
CASSLEEAGAYPDTQYF

SEQ ID NO: 90689 - protein, 17 aa, Homo sapiens
  CDR3 for alpha chain variable domain of TCR clone 45345 (TRAV26-1, TRAJ53)
CIVRVDDSGGSNYKLTF

SEQ ID NO: 90690 - protein, 13 aa, Homo sapiens
  CDR3 for beta chain variable domain of TCR clone 45345 (TRBV7-9, TRBJ1-2)
CASSLKQNYGYTF

SEQ ID NO: 90691 - protein, 16 aa, Homo sapiens
  CDR3 for alpha chain variable domain of TCR clone 45346 (TRAV26-1, TRAJ33)
CIVPFWGEDSNYQLIW

SEQ ID NO: 90692 - protein, 12 aa, Homo sapiens
  CDR3 for beta chain variable domain of TCR clone 45346 (TRBV6-1, TRBJ2-7)
CASSDYSYEQYF

SEQ ID NO: 90693 - protein, 13 aa, Homo sapiens
  CDR3 for alpha chain variable domain of TCR clone 45347 (TRAV8-3, TRAJ43)
CAVGPDNNNDMRF

SEQ ID NO: 90694 - protein, 15 aa, Homo sapiens
  CDR3 for beta chain variable domain of TCR clone 45347 (TRBV5-5, TRBJ1-5)
CASSSTPGSNQPQHF

SEQ ID NO: 90695 - protein, 21 aa, Homo sapiens
  CDR3 for alpha chain variable domain of TCR clone 45348 (TRAV1-1, TRAJ6)
CLLLLRCGRLERTGGSYIPTF

SEQ ID NO: 90696 - protein, 13 aa, Homo sapiens
  CDR3 for beta chain variable domain of TCR clone 45348 (TRBV10-2, TRBJ2-7)
CASGASGGYEQYF

SEQ ID NO: 90697 - protein, 13 aa, Homo sapiens
  CDR3 for alpha chain variable domain of TCR clone 45349 (TRAV29/DV5, TRAJ31)
CAASRNNNARLMF

SEQ ID NO: 90698 - protein, 13 aa, Homo sapiens
  CDR3 for beta chain variable domain of TCR clone 45349 (TRBV7-2, TRBJ2-4)
CASSREHANMQYF

SEQ ID NO: 90699 - protein, 15 aa, Homo sapiens
  CDR3 for alpha chain variable domain of TCR clone 45350 (TRAV12-1, TRAJ33)
CVVNGNLDSNYQLIW

SEQ ID NO: 90700 - protein, 13 aa, Homo sapiens
  CDR3 for beta chain variable domain of TCR clone 45350 (TRBV9, TRBJ2-7)
CASSKTGTYEQYL

SEQ ID NO: 90701 - protein, 16 aa, Homo sapiens
  CDR3 for alpha chain variable domain of TCR clone 45351 (TRAV4, TRAJ22)
CLVGDLYSGSARQLTF

SEQ ID NO: 90702 - protein, 13 aa, Homo sapiens
  CDR3 for beta chain variable domain of TCR clone 45351 (TRBV20-1, TRBJ1-1)
CSARGGGNTEAFF

SEQ ID NO: 90703 - protein, 12 aa, Homo sapiens
  CDR3 for alpha chain variable domain of TCR clone 45352 (TRAV13-1, TRAJ48)
CAANFGNEKLTF

SEQ ID NO: 90704 - protein, 17 aa, Homo sapiens
  CDR3 for beta chain variable domain of TCR clone 45352 (TRBV11-2, TRBJ2-1)
CASSLYPPGVEYNEQFF

SEQ ID NO: 90705 - protein, 12 aa, Homo sapiens
  CDR3 for alpha chain variable domain of TCR clone 45353 (TRAV13-1, TRAJ21)
CAAFFDFSKFYF

SEQ ID NO: 90706 - protein, 14 aa, Homo sapiens
  CDR3 for beta chain variable domain of TCR clone 45353 (TRBV4-1, TRBJ2-7)
CASRLTSGSYEQYF

SEQ ID NO: 90707 - protein, 14 aa, Homo sapiens
  CDR3 for alpha chain variable domain of TCR clone 45354 (TRAV12-3, TRAJ35)
CAMSLIGFGNVPHC

SEQ ID NO: 90708 - protein, 16 aa, Homo sapiens
  CDR3 for beta chain variable domain of TCR clone 45354 (TRBV7-6, TRBJ2-7)
CQQLSSASGNSYEQYF

SEQ ID NO: 90709 - protein, 18 aa, Homo sapiens
  CDR3 for alpha chain variable domain of TCR clone 45355 (TRAV21, TRAJ52)
CAVRPSPAGGTSYGKLTF

SEQ ID NO: 90710 - protein, 16 aa, Homo sapiens
  CDR3 for beta chain variable domain of TCR clone 45355 (TRBV19, TRBJ2-3)
CASSPGAASRTDTQYF

SEQ ID NO: 90711 - protein, 11 aa, Homo sapiens
  CDR3 for alpha chain variable domain of TCR clone 45356 (TRAV2, TRAJ13)
CASGGYQKVTF

SEQ ID NO: 90712 - protein, 15 aa, Homo sapiens
  CDR3 for beta chain variable domain of TCR clone 45356 (TRBV7-9, TRBJ1-6)
CASSPPGRGNSPLHF

SEQ ID NO: 90713 - protein, 13 aa, Homo sapiens
  CDR3 for alpha chain variable domain of TCR clone 45357 (TRAV2, TRAJ15)
CAVASQAGNALIF

SEQ ID NO: 90714 - protein, 15 aa, Homo sapiens
  CDR3 for beta chain variable domain of TCR clone 45357 (TRBV7-3, TRBJ2-2)
CASSETGQGTGELFF

SEQ ID NO: 90715 - protein, 14 aa, Homo sapiens
  CDR3 for alpha chain variable domain of TCR clone 45358 (TRAV1-2, TRAJ16)
CAVNRLSDGQKLLF

SEQ ID NO: 90716 - protein, 13 aa, Homo sapiens
  CDR3 for beta chain variable domain of TCR clone 45358 (TRBV19, TRBJ1-2)
CASSVPGQDGYTF

SEQ ID NO: 90717 - protein, 12 aa, Homo sapiens
  CDR3 for alpha chain variable domain of TCR clone 45359 (TRAV12-3, TRAJ17)
CAMTLTGNKLTF

SEQ ID NO: 90718 - protein, 15 aa, Homo sapiens
  CDR3 for beta chain variable domain of TCR clone 45359 (TRBV6-3, TRBJ2-7)
CASSSPRTVFYEQYL

SEQ ID NO: 90719 - protein, 12 aa, Homo sapiens
  CDR3 for alpha chain variable domain of TCR clone 45360 (TRAV17, TRAJ57)
CATDGGSEKLVF

SEQ ID NO: 90720 - protein, 12 aa, Homo sapiens
  CDR3 for beta chain variable domain of TCR clone 45360 (TRBV29-1, TRBJ2-2)
CSADKYTGELFF

SEQ ID NO: 90721 - protein, 14 aa, Homo sapiens
  CDR3 for alpha chain variable domain of TCR clone 45361 (TRAV1-2, TRAJ16)
CAVNRFSDGQKLLF

SEQ ID NO: 90722 - protein, 14 aa, Homo sapiens
  CDR3 for beta chain variable domain of TCR clone 45361 (TRBV12-4, TRBJ1-1)
CASTWTGHDTEAFF

SEQ ID NO: 90723 - protein, 10 aa, Homo sapiens
  CDR3 for alpha chain variable domain of TCR clone 45362 (TRAV8-4, TRAJ43)
CAVSVDDMRF

SEQ ID NO: 90724 - protein, 15 aa, Homo sapiens
  CDR3 for beta chain variable domain of TCR clone 45362 (TRBV5-1, TRBJ2-3)
CASSVTSGSTDTQYF

SEQ ID NO: 90725 - protein, 15 aa, Homo sapiens
  CDR3 for alpha chain variable domain of TCR clone 45363 (TRAV17, TRAJ22)
CATVAPSGSARQLTF

SEQ ID NO: 90726 - protein, 16 aa, Homo sapiens
  CDR3 for beta chain variable domain of TCR clone 45363 (TRBV10-3, TRBJ2-7)
CAISADFADRHYEQYF

SEQ ID NO: 90727 - protein, 23 aa, Homo sapiens
  CDR3 for alpha chain variable domain of TCR clone 45364 (TRAV8-3, )
CAVVTTRIPDIQNPDPAVYQLRD

SEQ ID NO: 90728 - protein, 14 aa, Homo sapiens
  CDR3 for beta chain variable domain of TCR clone 45364 (TRBV11-2, TRBJ2-7)
CASSPSTTSYEKYF

SEQ ID NO: 90729 - protein, 13 aa, Homo sapiens
  CDR3 for alpha chain variable domain of TCR clone 45365 (TRAV1-1, TRAJ9)
CAAKNTGGFKTIF

SEQ ID NO: 90730 - protein, 13 aa, Homo sapiens
  CDR3 for beta chain variable domain of TCR clone 45365 (TRBV27, TRBJ1-1)
CASSLSIGAEAFF

SEQ ID NO: 90731 - protein, 14 aa, Homo sapiens
  CDR3 for alpha chain variable domain of TCR clone 45366 (TRAV3, TRAJ33)
CAVRDMDSNYQLIW

SEQ ID NO: 90732 - protein, 19 aa, Homo sapiens
  CDR3 for beta chain variable domain of TCR clone 45366 (TRBV7-3, TRBJ1-2)
CASSLPQGNDGELWLHLRF

SEQ ID NO: 90733 - protein, 10 aa, Homo sapiens
  CDR3 for alpha chain variable domain of TCR clone 45367 (TRAV23/DV6, TRAJ15)
SQPAGTALIF

SEQ ID NO: 90734 - protein, 14 aa, Homo sapiens
  CDR3 for beta chain variable domain of TCR clone 45367 (TRBV7-9, TRBJ1-2)
CASSRQGANYGYTS

SEQ ID NO: 90735 - protein, 16 aa, Homo sapiens
  CDR3 for alpha chain variable domain of TCR clone 45368 (TRAV4, TRAJ5)
CLVGPDRGHGQESTYF

SEQ ID NO: 90736 - protein, 15 aa, Homo sapiens
  CDR3 for beta chain variable domain of TCR clone 45368 (TRBV27, TRBJ2-5)
CASSLIPSGGETQYF

SEQ ID NO: 90737 - protein, 20 aa, Homo sapiens
  CDR3 for alpha chain variable domain of TCR clone 45369 (TRAV12-1, TRAJ42)
SSVIQPPTSVKGGSQGNLIF

SEQ ID NO: 90738 - protein, 12 aa, Homo sapiens
  CDR3 for beta chain variable domain of TCR clone 45369 (TRBV7-9, TRBJ2-7)
CASSIKREEQYF

SEQ ID NO: 90739 - protein, 15 aa, Homo sapiens
  CDR3 for alpha chain variable domain of TCR clone 45370 (TRAV3, TRAJ22)
CAVRDRGGSARQLTF

SEQ ID NO: 90740 - protein, 13 aa, Homo sapiens
  CDR3 for beta chain variable domain of TCR clone 45370 (TRBV4-1, TRBJ2-5)
CASSLTRGETQYF

SEQ ID NO: 90741 - protein, 14 aa, Homo sapiens
  CDR3 for alpha chain variable domain of TCR clone 45371 (TRAV16, TRAJ8)
CALLLNAGFQKLVF

SEQ ID NO: 90742 - protein, 15 aa, Homo sapiens
  CDR3 for beta chain variable domain of TCR clone 45371 (TRBV7-7, TRBJ2-2)
CATSKLAMNTGELFF

SEQ ID NO: 90743 - protein, 14 aa, Homo sapiens
  CDR3 for alpha chain variable domain of TCR clone 45372 (TRAV21, TRAJ35)
CAVMPIGFGNVLHW

SEQ ID NO: 90744 - protein, 12 aa, Homo sapiens
  CDR3 for beta chain variable domain of TCR clone 45372 (TRBV7-9, TRBJ2-7)
CASSIKREEQYF

SEQ ID NO: 90745 - protein, 16 aa, Homo sapiens
  CDR3 for alpha chain variable domain of TCR clone 45373 (TRAV3, TRAJ21)
CAVRDIERGNFNKFYF

SEQ ID NO: 90746 - protein, 16 aa, Homo sapiens
  CDR3 for beta chain variable domain of TCR clone 45373 (TRBV12-4, TRBJ1-5)
CASNRPVGGSNQPQHF

SEQ ID NO: 90747 - protein, 11 aa, Homo sapiens
  CDR3 for alpha chain variable domain of TCR clone 45374 (TRAV13-1, TRAJ23)
CAASSRGKLIF

SEQ ID NO: 90748 - protein, 13 aa, Homo sapiens
  CDR3 for beta chain variable domain of TCR clone 45374 (TRBV7-3, TRBJ2-5)
CASSVRGGETQYF

SEQ ID NO: 90749 - protein, 14 aa, Homo sapiens
  CDR3 for alpha chain variable domain of TCR clone 45375 (TRAV1-2, TRAJ16)
CAVNRFSDGQKLLF

SEQ ID NO: 90750 - protein, 16 aa, Homo sapiens
  CDR3 for beta chain variable domain of TCR clone 45375 (TRBV28, TRBJ2-2)
CASSLEGGSNTGELFF

SEQ ID NO: 90751 - protein, 14 aa, Homo sapiens
  CDR3 for alpha chain variable domain of TCR clone 45376 (TRAV2, TRAJ37)
CAVDFTSNTGKLIF

SEQ ID NO: 90752 - protein, 15 aa, Homo sapiens
  CDR3 for beta chain variable domain of TCR clone 45376 (TRBV28, TRBJ2-7)
CASSPGGRGFYEQYF

SEQ ID NO: 90753 - protein, 16 aa, Homo sapiens
  CDR3 for alpha chain variable domain of TCR clone 45377 (TRAV35, TRAJ28)
CAGQRYSGAGSYQLTF

SEQ ID NO: 90754 - protein, 13 aa, Homo sapiens
  CDR3 for beta chain variable domain of TCR clone 45377 (TRBV19, TRBJ1-2)
CASSQRQVYGYTF

SEQ ID NO: 90755 - protein, 11 aa, Homo sapiens
  CDR3 for alpha chain variable domain of TCR clone 45378 (TRAV16, TRAJ49)
CSLNTGNQFYF

SEQ ID NO: 90756 - protein, 12 aa, Homo sapiens
  CDR3 for beta chain variable domain of TCR clone 45378 (TRBV7-9, TRBJ1-4)
CASSTGREKLFF

SEQ ID NO: 90757 - protein, 14 aa, Homo sapiens
  CDR3 for alpha chain variable domain of TCR clone 45379 (TRAV1-2, TRAJ8)
CAVREDTGFQKLVF

SEQ ID NO: 90758 - protein, 13 aa, Homo sapiens
  CDR3 for beta chain variable domain of TCR clone 45379 (TRBV19, TRBJ2-7)
CASSIDRTYEQYF

SEQ ID NO: 90759 - protein, 14 aa, Homo sapiens
  CDR3 for alpha chain variable domain of TCR clone 45380 (TRAV16, TRAJ33)
CALSAMDSNYQLIW

SEQ ID NO: 90760 - protein, 15 aa, Homo sapiens
  CDR3 for beta chain variable domain of TCR clone 45380 (TRBV28, TRBJ2-7)
CASSLEAYTIYEQYF

SEQ ID NO: 90761 - protein, 12 aa, Homo sapiens
  CDR3 for alpha chain variable domain of TCR clone 45381 (TRAV8-1, TRAJ23)
CAVGNQGGKLIF

SEQ ID NO: 90762 - protein, 14 aa, Homo sapiens
  CDR3 for beta chain variable domain of TCR clone 45381 (TRBV7-9, TRBJ1-1)
CASSLVPVWTEAFF

SEQ ID NO: 90763 - protein, 14 aa, Homo sapiens
  CDR3 for alpha chain variable domain of TCR clone 45382 (TRAV12-3, TRAJ10)
SHLPLTGGGNKLTF

SEQ ID NO: 90764 - protein, 16 aa, Homo sapiens
  CDR3 for beta chain variable domain of TCR clone 45382 (TRBV11-2, TRBJ2-7)
CASSPTTGGVSYEQYF

SEQ ID NO: 90765 - protein, 14 aa, Homo sapiens
  CDR3 for alpha chain variable domain of TCR clone 45383 (TRAV12-1, TRAJ17)
CAVNYKAAGNKLTF

SEQ ID NO: 90766 - protein, 15 aa, Homo sapiens
  CDR3 for beta chain variable domain of TCR clone 45383 (TRBV7-2, TRBJ2-1)
CASTHGTGIYNEQFF

SEQ ID NO: 90767 - protein, 14 aa, Homo sapiens
  CDR3 for alpha chain variable domain of TCR clone 45384 (TRAV1-2, TRAJ16)
CAVNRFSDGQKLLF

SEQ ID NO: 90768 - protein, 14 aa, Homo sapiens
  CDR3 for beta chain variable domain of TCR clone 45384 (TRBV7-9, TRBJ2-7)
CASSLGGSSYEQYF

SEQ ID NO: 90769 - protein, 12 aa, Homo sapiens
  CDR3 for alpha chain variable domain of TCR clone 45385 (TRAV1-2, TRAJ11)
SAVRGGYSTLTF

SEQ ID NO: 90770 - protein, 11 aa, Homo sapiens
  CDR3 for beta chain variable domain of TCR clone 45385 (TRBV6-3, TRBJ2-3)
CATGQADTQYF

SEQ ID NO: 90771 - protein, 12 aa, Homo sapiens
  CDR3 for alpha chain variable domain of TCR clone 45386 (TRAV3, TRAJ20)
CAVRDPDYKLSF

SEQ ID NO: 90772 - protein, 13 aa, Homo sapiens
  CDR3 for beta chain variable domain of TCR clone 45386 (TRBV19, TRBJ1-2)
CASSVPGQDGYTF

SEQ ID NO: 90773 - protein, 14 aa, Homo sapiens
  CDR3 for alpha chain variable domain of TCR clone 45387 (TRAV12-1, TRAJ12)
CVVKRMDSSYKLIF

SEQ ID NO: 90774 - protein, 13 aa, Homo sapiens
  CDR3 for beta chain variable domain of TCR clone 45387 (TRBV20-1, TRBJ1-1)
CSARGGGNTEAFF

SEQ ID NO: 90775 - protein, 14 aa, Homo sapiens
  CDR3 for alpha chain variable domain of TCR clone 45388 (TRAV12-3, TRAJ10)
SHLPLTGGGNKLTF

SEQ ID NO: 90776 - protein, 15 aa, Homo sapiens
  CDR3 for beta chain variable domain of TCR clone 45388 (TRBV7-2, TRBJ2-1)
CASSFQADEYNEQFF

SEQ ID NO: 90777 - protein, 17 aa, Homo sapiens
  CDR3 for alpha chain variable domain of TCR clone 45389 (TRAV13-1, TRAJ53)
CAASWKSSGGSNYKLTF

SEQ ID NO: 90778 - protein, 19 aa, Homo sapiens
  CDR3 for beta chain variable domain of TCR clone 45389 (TRBV7-9, TRBJ2-1)
CASSHNRGALLRSYNGQFF

SEQ ID NO: 90779 - protein, 14 aa, Homo sapiens
  CDR3 for alpha chain variable domain of TCR clone 45390 (TRAV26-1, TRAJ38)
CIDDNAGNNRKLIW

SEQ ID NO: 90780 - protein, 13 aa, Homo sapiens
  CDR3 for beta chain variable domain of TCR clone 45390 (TRBV15, TRBJ1-6)
CATSGGLNSPLHF

SEQ ID NO: 90781 - protein, 13 aa, Homo sapiens
  CDR3 for alpha chain variable domain of TCR clone 45391 (TRAV4, TRAJ42)
CLVGGGSQGNLIF

SEQ ID NO: 90782 - protein, 12 aa, Homo sapiens
  CDR3 for beta chain variable domain of TCR clone 45391 (TRBV5-4, TRBJ2-5)
CASSSTRETQYF

SEQ ID NO: 90783 - protein, 14 aa, Homo sapiens
  CDR3 for alpha chain variable domain of TCR clone 45392 (TRAV1-2, TRAJ16)
CAVNRFSDGQKLLF

SEQ ID NO: 90784 - protein, 15 aa, Homo sapiens
  CDR3 for beta chain variable domain of TCR clone 45392 (TRBV7-9, TRBJ1-6)
CASSSPGRGNSPLHF

SEQ ID NO: 90785 - protein, 18 aa, Homo sapiens
  CDR3 for alpha chain variable domain of TCR clone 45393 (TRAV29/DV5, TRAJ52)
CAAGFRGAGGTSYGKLTF

SEQ ID NO: 90786 - protein, 14 aa, Homo sapiens
  CDR3 for beta chain variable domain of TCR clone 45393 (TRBV7-2, TRBJ2-7)
CASSPKTSFYEQYF

SEQ ID NO: 90787 - protein, 16 aa, Homo sapiens
  CDR3 for alpha chain variable domain of TCR clone 45394 (TRAV26-1, TRAJ23)
CIVRVHPYDQGGKLIF

SEQ ID NO: 90788 - protein, 15 aa, Homo sapiens
  CDR3 for beta chain variable domain of TCR clone 45394 (TRBV5-7, TRBJ2-7)
CASSPYFEGSYEQYF

SEQ ID NO: 90789 - protein, 12 aa, Homo sapiens
  CDR3 for alpha chain variable domain of TCR clone 45395 (TRAV38-2/DV8, TRAJ48)
CALLSGNEKFTF

SEQ ID NO: 90790 - protein, 15 aa, Homo sapiens
  CDR3 for beta chain variable domain of TCR clone 45395 (TRBV6-1, TRBJ2-1)
CASSELRGQYNEQFF

SEQ ID NO: 90791 - protein, 13 aa, Homo sapiens
  CDR3 for alpha chain variable domain of TCR clone 45396 (TRAV35, TRAJ43)
CAGYPYNNNDMRF

SEQ ID NO: 90792 - protein, 15 aa, Homo sapiens
  CDR3 for beta chain variable domain of TCR clone 45396 (TRBV25-1, TRBJ1-4)
CASSKRIAANEKLFF

SEQ ID NO: 90793 - protein, 11 aa, Homo sapiens
  CDR3 for alpha chain variable domain of TCR clone 45397 (TRAV35, TRAJ34)
CWARDTDKLIF

SEQ ID NO: 90794 - protein, 14 aa, Homo sapiens
  CDR3 for beta chain variable domain of TCR clone 45397 (TRBV5-1, TRBJ2-7)
CASSRGESLYEQYF

SEQ ID NO: 90795 - protein, 14 aa, Homo sapiens
  CDR3 for alpha chain variable domain of TCR clone 45398 (TRAV20, TRAJ22)
CAVALGGSARQLTF

SEQ ID NO: 90796 - protein, 15 aa, Homo sapiens
  CDR3 for beta chain variable domain of TCR clone 45398 (TRBV7-2, TRBJ1-1)
CASSFAGDRDAEAFF

SEQ ID NO: 90797 - protein, 15 aa, Homo sapiens
  CDR3 for alpha chain variable domain of TCR clone 45399 (TRAV12-3, TRAJ10)
CASYILTGGGNKPTF

SEQ ID NO: 90798 - protein, 15 aa, Homo sapiens
  CDR3 for beta chain variable domain of TCR clone 45399 (TRBV7-2, TRBJ1-6)
CASSLGPDRGMPLHF

SEQ ID NO: 90799 - protein, 14 aa, Homo sapiens
  CDR3 for alpha chain variable domain of TCR clone 45400 (TRAV1-2, TRAJ8)
CAVREDTGFQKLVF

SEQ ID NO: 90800 - protein, 14 aa, Homo sapiens
  CDR3 for beta chain variable domain of TCR clone 45400 (TRBV20-1, TRBJ2-5)
CSARDGRAGETQYF

SEQ ID NO: 90801 - protein, 15 aa, Homo sapiens
  CDR3 for alpha chain variable domain of TCR clone 45401 (TRAV3, TRAJ5)
CAVRDLDTGRRALTF

SEQ ID NO: 90802 - protein, 14 aa, Homo sapiens
  CDR3 for beta chain variable domain of TCR clone 45401 (TRBV25-1, TRBJ1-4)
CASNGGGQPEKLFF

SEQ ID NO: 90803 - protein, 15 aa, Homo sapiens
  CDR3 for alpha chain variable domain of TCR clone 45402 (TRAV3, TRAJ20)
CAVRDIKLSGYKLSF

SEQ ID NO: 90804 - protein, 15 aa, Homo sapiens
  CDR3 for beta chain variable domain of TCR clone 45402 (TRBV7-9, TRBJ1-6)
CASSSPGRGNSPLHF

SEQ ID NO: 90805 - protein, 12 aa, Homo sapiens
  CDR3 for alpha chain variable domain of TCR clone 45403 (TRAV21, TRAJ33)
CAKMDSNYQLIW

SEQ ID NO: 90806 - protein, 16 aa, Homo sapiens
  CDR3 for beta chain variable domain of TCR clone 45403 (TRBV20-1, TRBJ1-4)
CSAPGQGLLTNEKLFF

SEQ ID NO: 90807 - protein, 16 aa, Homo sapiens
  CDR3 for alpha chain variable domain of TCR clone 45404 (TRAV26-1, TRAJ23)
CIVRVHPYNQGGKLTF

SEQ ID NO: 90808 - protein, 15 aa, Homo sapiens
  CDR3 for beta chain variable domain of TCR clone 45404 (TRBV5-7, TRBJ2-7)
CASSPYFEGSYEQYF

SEQ ID NO: 90809 - protein, 23 aa, Homo sapiens
  CDR3 for alpha chain variable domain of TCR clone 45405 (TRAV30, TRAJ43)
CTLRPPSSVAQEPTSAALSDMRF

SEQ ID NO: 90810 - protein, 13 aa, Homo sapiens
  CDR3 for beta chain variable domain of TCR clone 45405 (TRBV12-4, TRBJ2-2)
CASSITGSGELFF

SEQ ID NO: 90811 - protein, 12 aa, Homo sapiens
  CDR3 for alpha chain variable domain of TCR clone 45406 (TRAV3, TRAJ39)
CAVIEWSNMLTF

SEQ ID NO: 90812 - protein, 14 aa, Homo sapiens
  CDR3 for beta chain variable domain of TCR clone 45406 (TRBV7-8, TRBJ2-3)
CASSFPDGQGTQYF

SEQ ID NO: 90813 - protein, 13 aa, Homo sapiens
  CDR3 for alpha chain variable domain of TCR clone 45407 (TRAV30, TRAJ6)
CGFIEGGSYIPTF

SEQ ID NO: 90814 - protein, 14 aa, Homo sapiens
  CDR3 for beta chain variable domain of TCR clone 45407 (TRBV6-1, TRBJ1-3)
CASVQGGGGNTIYF

SEQ ID NO: 90815 - protein, 15 aa, Homo sapiens
  CDR3 for alpha chain variable domain of TCR clone 45408 (TRAV13-1, TRAJ17)
CAAGIERAAGNKLTF

SEQ ID NO: 90816 - protein, 12 aa, Homo sapiens
  CDR3 for beta chain variable domain of TCR clone 45408 (TRBV5-7, TRBJ1-1)
CASSLGRGKAFF

SEQ ID NO: 90817 - protein, 11 aa, Homo sapiens
  CDR3 for alpha chain variable domain of TCR clone 45409 (TRAV12-1, TRAJ43)
CVEYDDNDMRF

SEQ ID NO: 90818 - protein, 17 aa, Homo sapiens
  CDR3 for beta chain variable domain of TCR clone 45409 (TRBV20-1, TRBJ2-1)
CSARDPLAGVWDNEQFF

SEQ ID NO: 90819 - protein, 11 aa, Homo sapiens
  CDR3 for alpha chain variable domain of TCR clone 45410 (TRAV21, TRAJ7)
CAAYGNNRLAF

SEQ ID NO: 90820 - protein, 14 aa, Homo sapiens
  CDR3 for beta chain variable domain of TCR clone 45410 (TRBV4-1, TRBJ2-7)
CASSRTGVACEQYF

SEQ ID NO: 90821 - protein, 13 aa, Homo sapiens
  CDR3 for alpha chain variable domain of TCR clone 45411 (TRAV13-1, TRAJ6)
CARGSGGSYIPTF

SEQ ID NO: 90822 - protein, 17 aa, Homo sapiens
  CDR3 for beta chain variable domain of TCR clone 45411 (TRBV7-8, TRBJ2-1)
CAGSPPTGTLAYNEQFF

SEQ ID NO: 90823 - protein, 14 aa, Homo sapiens
  CDR3 for alpha chain variable domain of TCR clone 45412 (TRAV8-4, TRAJ9)
CAVRINTGGFKTIS

SEQ ID NO: 90824 - protein, 15 aa, Homo sapiens
  CDR3 for beta chain variable domain of TCR clone 45412 (TRBV10-2, TRBJ2-6)
CASSEQGTGANVLTF

SEQ ID NO: 90825 - protein, 14 aa, Homo sapiens
  CDR3 for alpha chain variable domain of TCR clone 45413 (TRAV38-1, TRAJ29)
CAFITPSGNTPLVF

SEQ ID NO: 90826 - protein, 11 aa, Homo sapiens
  CDR3 for beta chain variable domain of TCR clone 45413 (TRBV19, TRBJ1-1)
CASSIGSEAFF

SEQ ID NO: 90827 - protein, 14 aa, Homo sapiens
  CDR3 for alpha chain variable domain of TCR clone 45414 (TRAV1-2, TRAJ16)
CAVNRFSDGQKLLF

SEQ ID NO: 90828 - protein, 12 aa, Homo sapiens
  CDR3 for beta chain variable domain of TCR clone 45414 (TRBV7-8, TRBJ2-1)
CASSLGHNEQFF

SEQ ID NO: 90829 - protein, 12 aa, Homo sapiens
  CDR3 for alpha chain variable domain of TCR clone 45415 (TRAV21, TRAJ29)
CAVTSGNTPLVF

SEQ ID NO: 90830 - protein, 14 aa, Homo sapiens
  CDR3 for beta chain variable domain of TCR clone 45415 (TRBV28, TRBJ1-2)
CASRIQGANYGYTF

SEQ ID NO: 90831 - protein, 12 aa, Homo sapiens
  CDR3 for alpha chain variable domain of TCR clone 45416 (TRAV12-3, TRAJ17)
CAMTLTGNKLTF

SEQ ID NO: 90832 - protein, 20 aa, Homo sapiens
  CDR3 for beta chain variable domain of TCR clone 45416 (TRBV6-6, TRBJ2-5)
CASSPGGGLRGDPVLRARHA

SEQ ID NO: 90833 - protein, 13 aa, Homo sapiens
  CDR3 for alpha chain variable domain of TCR clone 45417 (TRAV27, TRAJ27)
CAGGITNAGKSTF

SEQ ID NO: 90834 - protein, 13 aa, Homo sapiens
  CDR3 for beta chain variable domain of TCR clone 45417 (TRBV20-1, TRBJ1-2)
CSASLGVGYGYAF

SEQ ID NO: 90835 - protein, 18 aa, Homo sapiens
  CDR3 for alpha chain variable domain of TCR clone 45418 (TRAV21, TRAJ52)
CAVRPSPAGGTSYGKLTF

SEQ ID NO: 90836 - protein, 15 aa, Homo sapiens
  CDR3 for beta chain variable domain of TCR clone 45418 (TRBV5-1, TRBJ2-7)
CASSLGDFTTYEQYF

SEQ ID NO: 90837 - protein, 14 aa, Homo sapiens
  CDR3 for alpha chain variable domain of TCR clone 45419 (TRAV12-2, TRAJ53)
CAVKGGGSNYKLTF

SEQ ID NO: 90838 - protein, 17 aa, Homo sapiens
  CDR3 for beta chain variable domain of TCR clone 45419 (TRBV7-2, TRBJ1-4)
CASSFKAGSTTNEKLFF

SEQ ID NO: 90839 - protein, 11 aa, Homo sapiens
  CDR3 for alpha chain variable domain of TCR clone 45420 (TRAV17, TRAJ49)
CATNTGNQFYF

SEQ ID NO: 90840 - protein, 12 aa, Homo sapiens
  CDR3 for beta chain variable domain of TCR clone 45420 (TRBV2, TRBJ2-7)
CASSGGSGNPYF

SEQ ID NO: 90841 - protein, 15 aa, Homo sapiens
  CDR3 for alpha chain variable domain of TCR clone 45421 (TRAV12-1, TRAJ44)
CVVFVNTGTASKLTF

SEQ ID NO: 90842 - protein, 13 aa, Homo sapiens
  CDR3 for beta chain variable domain of TCR clone 45421 (TRBV19, TRBJ1-2)
CASSVPGQDGYTF

SEQ ID NO: 90843 - protein, 12 aa, Homo sapiens
  CDR3 for alpha chain variable domain of TCR clone 45422 (TRAV13-1, TRAJ11)
CAGPSGYSTLTF

SEQ ID NO: 90844 - protein, 15 aa, Homo sapiens
  CDR3 for beta chain variable domain of TCR clone 45422 (TRBV27, TRBJ2-1)
CASSNGGGSSNEQFF

SEQ ID NO: 90845 - protein, 14 aa, Homo sapiens
  CDR3 for alpha chain variable domain of TCR clone 45423 (TRAV23/DV6, TRAJ8)
CAASKAAGFQRLVF

SEQ ID NO: 90846 - protein, 15 aa, Homo sapiens
  CDR3 for beta chain variable domain of TCR clone 45423 (TRBV28, TRBJ2-3)
CASSPDRQGANTQYF

SEQ ID NO: 90847 - protein, 14 aa, Homo sapiens
  CDR3 for alpha chain variable domain of TCR clone 45424 (TRAV12-2, TRAJ53)
CAVKGGGSNYKLTF

SEQ ID NO: 90848 - protein, 16 aa, Homo sapiens
  CDR3 for beta chain variable domain of TCR clone 45424 (TRBV20-1, TRBJ1-4)
CSARPYGGELNEKLFF

SEQ ID NO: 90849 - protein, 13 aa, Homo sapiens
  CDR3 for alpha chain variable domain of TCR clone 45425 (TRAV23/DV6, TRAJ36)
CAASRTGANNLFF

SEQ ID NO: 90850 - protein, 13 aa, Homo sapiens
  CDR3 for beta chain variable domain of TCR clone 45425 (TRBV5-4, TRBJ1-5)
CASSLGGDQPQHF

SEQ ID NO: 90851 - protein, 13 aa, Homo sapiens
  CDR3 for alpha chain variable domain of TCR clone 45426 (TRAV8-3, TRAJ28)
CAVCAVGSYQLTF

SEQ ID NO: 90852 - protein, 16 aa, Homo sapiens
  CDR3 for beta chain variable domain of TCR clone 45426 (TRBV19, TRBJ2-1)
CASSKAGPSSYNEQFF

SEQ ID NO: 90853 - protein, 15 aa, Homo sapiens
  CDR3 for alpha chain variable domain of TCR clone 45427 (TRAV17, TRAJ57)
CATGPSQGGSEKLVF

SEQ ID NO: 90854 - protein, 16 aa, Homo sapiens
  CDR3 for beta chain variable domain of TCR clone 45427 (TRBV12-4, TRBJ1-5)
CASSRPVGWSNQPQHF

SEQ ID NO: 90855 - protein, 15 aa, Homo sapiens
  CDR3 for alpha chain variable domain of TCR clone 45428 (TRAV21, TRAJ40)
CAVRPQTSGTYKSIF

SEQ ID NO: 90856 - protein, 13 aa, Homo sapiens
  CDR3 for beta chain variable domain of TCR clone 45428 (TRBV7-2, TRBJ2-2)
CASSSVRAGELFF

SEQ ID NO: 90857 - protein, 12 aa, Homo sapiens
  CDR3 for alpha chain variable domain of TCR clone 45429 (TRAV30, TRAJ20)
CGTESNDYKLSF

SEQ ID NO: 90858 - protein, 14 aa, Homo sapiens
  CDR3 for beta chain variable domain of TCR clone 45429 (TRBV20-1, TRBJ1-1)
CSAQTRIGGTEAFF

SEQ ID NO: 90859 - protein, 11 aa, Homo sapiens
  CDR3 for alpha chain variable domain of TCR clone 45430 (TRAV26-1, TRAJ37)
RIVRVGRKLIF

SEQ ID NO: 90860 - protein, 13 aa, Homo sapiens
  CDR3 for beta chain variable domain of TCR clone 45430 (TRBV7-3, TRBJ1-1)
CASSQDWGAEAFF

SEQ ID NO: 90861 - protein, 15 aa, Homo sapiens
  CDR3 for alpha chain variable domain of TCR clone 45431 (TRAV2, TRAJ11)
RAVGGRNSGYSTLTF

SEQ ID NO: 90862 - protein, 14 aa, Homo sapiens
  CDR3 for beta chain variable domain of TCR clone 45431 (TRBV4-1, TRBJ2-2)
CASSQAVNTGELFF

SEQ ID NO: 90863 - protein, 16 aa, Homo sapiens
  CDR3 for alpha chain variable domain of TCR clone 45432 (TRAV3, TRAJ18)
CAVRDGRGSSLGRLYF

SEQ ID NO: 90864 - protein, 15 aa, Homo sapiens
  CDR3 for beta chain variable domain of TCR clone 45432 (TRBV7-9, TRBJ1-6)
CASSSPGRGNSPLHF

SEQ ID NO: 90865 - protein, 13 aa, Homo sapiens
  CDR3 for alpha chain variable domain of TCR clone 45433 (TRAV12-3, TRAJ13)
CAMSSGGYQKVTF

SEQ ID NO: 90866 - protein, 14 aa, Homo sapiens
  CDR3 for beta chain variable domain of TCR clone 45433 (TRBV20-1, TRBJ2-2)
CSALHRGGTGELFF

SEQ ID NO: 90867 - protein, 15 aa, Homo sapiens
  CDR3 for alpha chain variable domain of TCR clone 45434 (TRAV29/DV5, TRAJ42)
CAAKTDGGSQGNLIF

SEQ ID NO: 90868 - protein, 15 aa, Homo sapiens
  CDR3 for beta chain variable domain of TCR clone 45434 (TRBV5-1, TRBJ2-2)
CASSSQGGNTGGLFF

SEQ ID NO: 90869 - protein, 14 aa, Homo sapiens
  CDR3 for alpha chain variable domain of TCR clone 45435 (TRAV13-2, TRAJ43)
CAEILTYNNNDMRF

SEQ ID NO: 90870 - protein, 15 aa, Homo sapiens
  CDR3 for beta chain variable domain of TCR clone 45435 (TRBV7-9, TRBJ2-2)
CASGPLDTFPGELFF

SEQ ID NO: 90871 - protein, 15 aa, Homo sapiens
  CDR3 for alpha chain variable domain of TCR clone 45436 (TRAV21, TRAJ53)
CATLNSGGSNYKLTF

SEQ ID NO: 90872 - protein, 17 aa, Homo sapiens
  CDR3 for beta chain variable domain of TCR clone 45436 (TRBV25-1, TRBJ2-7)
CASSDARVVFSSYEQYF

SEQ ID NO: 90873 - protein, 11 aa, Homo sapiens
  CDR3 for alpha chain variable domain of TCR clone 45437 (TRAV12-3, TRAJ49)
CAANTGNQFYF

SEQ ID NO: 90874 - protein, 17 aa, Homo sapiens
  CDR3 for beta chain variable domain of TCR clone 45437 (TRBV11-2, TRBJ2-1)
CASSLYPPGVECNEQFF

SEQ ID NO: 90875 - protein, 11 aa, Homo sapiens
  CDR3 for alpha chain variable domain of TCR clone 45438 (TRAV3, TRAJ21)
CAVGNFNKFYF

SEQ ID NO: 90876 - protein, 17 aa, Homo sapiens
  CDR3 for beta chain variable domain of TCR clone 45438 (TRBV28, TRBJ2-1)
CASSLSVAGGPVDEQFF

SEQ ID NO: 90877 - protein, 12 aa, Homo sapiens
  CDR3 for alpha chain variable domain of TCR clone 45439 (TRAV8-2, TRAJ45)
CVQGGGADGLTF

SEQ ID NO: 90878 - protein, 14 aa, Homo sapiens
  CDR3 for beta chain variable domain of TCR clone 45439 (TRBV4-2, TRBJ1-1)
CASSQGWTPARAFF

SEQ ID NO: 90879 - protein, 13 aa, Homo sapiens
  CDR3 for alpha chain variable domain of TCR clone 45440 (TRAV8-3, TRAJ36)
CAVGATGANNLFF

SEQ ID NO: 90880 - protein, 12 aa, Homo sapiens
  CDR3 for beta chain variable domain of TCR clone 45440 (TRBV11-3, TRBJ1-1)
CASSHRQGEAFF

SEQ ID NO: 90881 - protein, 13 aa, Homo sapiens
  CDR3 for alpha chain variable domain of TCR clone 45441 (TRAV1-2, TRAJ9)
CAALNTGGFKTIF

SEQ ID NO: 90882 - protein, 13 aa, Homo sapiens
  CDR3 for beta chain variable domain of TCR clone 45441 (TRBV19, TRBJ1-2)
CARSVPGQDGYTF

SEQ ID NO: 90883 - protein, 13 aa, Homo sapiens
  CDR3 for alpha chain variable domain of TCR clone 45442 (TRAV8-3, TRAJ48)
CCGCNFGNEQLTF

SEQ ID NO: 90884 - protein, 12 aa, Homo sapiens
  CDR3 for beta chain variable domain of TCR clone 45442 (TRBV7-2, TRBJ2-5)
CASSQYQETQYF

SEQ ID NO: 90885 - protein, 11 aa, Homo sapiens
  CDR3 for alpha chain variable domain of TCR clone 45443 (TRAV13-2, TRAJ45)
VTGGGADGLTF

SEQ ID NO: 90886 - protein, 17 aa, Homo sapiens
  CDR3 for beta chain variable domain of TCR clone 45443 (TRBV19, TRBJ1-1)
CASSIAGRGLMNTEAFS

SEQ ID NO: 90887 - protein, 13 aa, Homo sapiens
  CDR3 for alpha chain variable domain of TCR clone 45444 (TRAV21, TRAJ27)
CAARPGNAGKSTL

SEQ ID NO: 90888 - protein, 15 aa, Homo sapiens
  CDR3 for beta chain variable domain of TCR clone 45444 (TRBV11-3, TRBJ2-7)
CASSPGPASSYEQYF

SEQ ID NO: 90889 - protein, 14 aa, Homo sapiens
  CDR3 for alpha chain variable domain of TCR clone 45445 (TRAV35, TRAJ53)
CAGNSRGSNYKLTF

SEQ ID NO: 90890 - protein, 15 aa, Homo sapiens
  CDR3 for beta chain variable domain of TCR clone 45445 (TRBV7-9, TRBJ2-1)
CASSLGWGRANEQFF

SEQ ID NO: 90891 - protein, 13 aa, Homo sapiens
  CDR3 for alpha chain variable domain of TCR clone 45446 (TRAV8-3, TRAJ28)
CAVGAVGSYQLTF

SEQ ID NO: 90892 - protein, 14 aa, Homo sapiens
  CDR3 for beta chain variable domain of TCR clone 45446 (TRBV25-1, TRBJ1-1)
CASTHLGGKTEAFF

SEQ ID NO: 90893 - protein, 16 aa, Homo sapiens
  CDR3 for alpha chain variable domain of TCR clone 45447 (TRAV22, TRAJ45)
CAVERGKRGGADGLTF

SEQ ID NO: 90894 - protein, 15 aa, Homo sapiens
  CDR3 for beta chain variable domain of TCR clone 45447 (TRBV4-2, TRBJ1-1)
CASSQQGAGDTEAFF

SEQ ID NO: 90895 - protein, 14 aa, Homo sapiens
  CDR3 for alpha chain variable domain of TCR clone 45448 (TRAV12-3, TRAJ13)
CAMRNSGGYQKVTF

SEQ ID NO: 90896 - protein, 14 aa, Homo sapiens
  CDR3 for beta chain variable domain of TCR clone 45448 (TRBV4-1, TRBJ1-6)
CASSPGSGSSPLHF

SEQ ID NO: 90897 - protein, 11 aa, Homo sapiens
  CDR3 for alpha chain variable domain of TCR clone 45449 (TRAV1-2, TRAJ20)
CALSNDYKLSF

SEQ ID NO: 90898 - protein, 16 aa, Homo sapiens
  CDR3 for beta chain variable domain of TCR clone 45449 (TRBV29-1, TRBJ2-6)
CSVEDITYSGANVLTF

SEQ ID NO: 90899 - protein, 12 aa, Homo sapiens
  CDR3 for alpha chain variable domain of TCR clone 45450 (TRAV12-3, TRAJ29)
CAAREGNTPLVF

SEQ ID NO: 90900 - protein, 17 aa, Homo sapiens
  CDR3 for beta chain variable domain of TCR clone 45450 (TRBV18, TRBJ2-1)
CASSPLATGAGDNEQFF

SEQ ID NO: 90901 - protein, 16 aa, Homo sapiens
  CDR3 for alpha chain variable domain of TCR clone 45451 (TRAV30, TRAJ24)
CGTEIVDADSWGKFQF

SEQ ID NO: 90902 - protein, 14 aa, Homo sapiens
  CDR3 for beta chain variable domain of TCR clone 45451 (TRBV5-7, TRBJ1-1)
CASSLAGDWTEAFF

SEQ ID NO: 90903 - protein, 14 aa, Homo sapiens
  CDR3 for alpha chain variable domain of TCR clone 45452 (TRAV12-1, TRAJ13)
CVVIDSGGYQKVTF

SEQ ID NO: 90904 - protein, 16 aa, Homo sapiens
  CDR3 for beta chain variable domain of TCR clone 45452 (TRBV7-9, TRBJ1-2)
CASSLGFSSGEDGYTF

SEQ ID NO: 90905 - protein, 15 aa, Homo sapiens
  CDR3 for alpha chain variable domain of TCR clone 45453 (TRAV26-1, TRAJ23)
CIVRVAGYQGGKLIF

SEQ ID NO: 90906 - protein, 18 aa, Homo sapiens
  CDR3 for beta chain variable domain of TCR clone 45453 (TRBV28, TRBJ2-1)
CASSSTSGRANSYNEQLF

SEQ ID NO: 90907 - protein, 14 aa, Homo sapiens
  CDR3 for alpha chain variable domain of TCR clone 45454 (TRAV35, TRAJ13)
CAGRSPGGYQKVTF

SEQ ID NO: 90908 - protein, 13 aa, Homo sapiens
  CDR3 for beta chain variable domain of TCR clone 45454 (TRBV7-9, TRBJ1-2)
CASSLKQNYGYTF

SEQ ID NO: 90909 - protein, 13 aa, Homo sapiens
  CDR3 for alpha chain variable domain of TCR clone 45455 (TRAV21, TRAJ20)
CAVGLRVDYKLSF

SEQ ID NO: 90910 - protein, 13 aa, Homo sapiens
  CDR3 for beta chain variable domain of TCR clone 45455 (TRBV6-1, TRBJ1-1)
CASGRQGNTEAFF

SEQ ID NO: 90911 - protein, 13 aa, Homo sapiens
  CDR3 for alpha chain variable domain of TCR clone 45456 (TRAV21, TRAJ27)
CAAPPGNAGKSTF

SEQ ID NO: 90912 - protein, 14 aa, Homo sapiens
  CDR3 for beta chain variable domain of TCR clone 45456 (TRBV7-6, TRBJ2-3)
CASSLGTVTDTQYF

SEQ ID NO: 90913 - protein, 11 aa, Homo sapiens
  CDR3 for alpha chain variable domain of TCR clone 45457 (TRAV2, TRAJ13)
CASGGYQKVTF

SEQ ID NO: 90914 - protein, 15 aa, Homo sapiens
  CDR3 for beta chain variable domain of TCR clone 45457 (TRBV5-1, TRBJ1-1)
CASSSTTGTNTEAFF

SEQ ID NO: 90915 - protein, 15 aa, Homo sapiens
  CDR3 for alpha chain variable domain of TCR clone 45458 (TRAV8-3, TRAJ27)
FAVGPSKTNAGKSTF

SEQ ID NO: 90916 - protein, 15 aa, Homo sapiens
  CDR3 for beta chain variable domain of TCR clone 45458 (TRBV7-2, TRBJ2-1)
CASSSGLAGGNEQFF

SEQ ID NO: 90917 - protein, 14 aa, Homo sapiens
  CDR3 for alpha chain variable domain of TCR clone 45459 (TRAV9-2, TRAJ22)
CALTGASSARQLTF

SEQ ID NO: 90918 - protein, 16 aa, Homo sapiens
  CDR3 for beta chain variable domain of TCR clone 45459 (TRBV11-2, TRBJ2-7)
CASSTVTAPKTYEQYF

SEQ ID NO: 90919 - protein, 13 aa, Homo sapiens
  CDR3 for alpha chain variable domain of TCR clone 45460 (TRAV3, TRAJ20)
CAVRSLNDDKLSF

SEQ ID NO: 90920 - protein, 13 aa, Homo sapiens
  CDR3 for beta chain variable domain of TCR clone 45460 (TRBV6-1, TRBJ2-1)
CAGMDPTNNEQFF

SEQ ID NO: 90921 - protein, 13 aa, Homo sapiens
  CDR3 for alpha chain variable domain of TCR clone 45461 (TRAV8-3, TRAJ28)
CAVGAVGSYQLTF

SEQ ID NO: 90922 - protein, 14 aa, Homo sapiens
  CDR3 for beta chain variable domain of TCR clone 45461 (TRBV7-2, TRBJ2-7)
CASRSQRAAYEQYF

SEQ ID NO: 90923 - protein, 13 aa, Homo sapiens
  CDR3 for alpha chain variable domain of TCR clone 45462 (TRAV21, TRAJ27)
CAALNTNAGKSTF

SEQ ID NO: 90924 - protein, 17 aa, Homo sapiens
  CDR3 for beta chain variable domain of TCR clone 45462 (TRBV11-2, TRBJ2-1)
CASSLYPPGVEYNEQFF

SEQ ID NO: 90925 - protein, 16 aa, Homo sapiens
  CDR3 for alpha chain variable domain of TCR clone 45463 (TRAV39, TRAJ42)
CAVPMNYGGSQGNLIF

SEQ ID NO: 90926 - protein, 13 aa, Homo sapiens
  CDR3 for beta chain variable domain of TCR clone 45463 (TRBV6-3, TRBJ2-7)
CASSYPITYEQYF

SEQ ID NO: 90927 - protein, 14 aa, Homo sapiens
  CDR3 for alpha chain variable domain of TCR clone 45464 (TRAV17, TRAJ16)
CATADFSDGQKLLF

SEQ ID NO: 90928 - protein, 12 aa, Homo sapiens
  CDR3 for beta chain variable domain of TCR clone 45464 (TRBV24-1, TRBJ1-1)
CATLYPDTGAFF

SEQ ID NO: 90929 - protein, 11 aa, Homo sapiens
  CDR3 for alpha chain variable domain of TCR clone 45465 (TRAV17, TRAJ43)
CATPRSNDMRF

SEQ ID NO: 90930 - protein, 15 aa, Homo sapiens
  CDR3 for beta chain variable domain of TCR clone 45465 (TRBV11-2, TRBJ2-1)
RASSLGTSGLNEQFF

SEQ ID NO: 90931 - protein, 12 aa, Homo sapiens
  CDR3 for alpha chain variable domain of TCR clone 45466 (TRAV1-1, TRAJ24)
CAVRGSWGKFQF

SEQ ID NO: 90932 - protein, 14 aa, Homo sapiens
  CDR3 for beta chain variable domain of TCR clone 45466 (TRBV19, TRBJ2-1)
CASPTFVLSGEQFF

SEQ ID NO: 90933 - protein, 14 aa, Homo sapiens
  CDR3 for alpha chain variable domain of TCR clone 45467 (TRAV12-1, TRAJ9)
CVVTGDTGGFKTIF

SEQ ID NO: 90934 - protein, 16 aa, Homo sapiens
  CDR3 for beta chain variable domain of TCR clone 45467 (TRBV29-1, TRBJ1-2)
CSVEANRDIANYDYTF

SEQ ID NO: 90935 - protein, 15 aa, Homo sapiens
  CDR3 for alpha chain variable domain of TCR clone 45468 (TRAV8-3, TRAJ27)
CAVGPSKTNAGKSTF

SEQ ID NO: 90936 - protein, 15 aa, Homo sapiens
  CDR3 for beta chain variable domain of TCR clone 45468 (TRBV7-2, TRBJ2-1)
CASSSGLAGDNEQFF

SEQ ID NO: 90937 - protein, 16 aa, Homo sapiens
  CDR3 for alpha chain variable domain of TCR clone 45469 (TRAV30, TRAJ24)
CGTEIVDADSWGKFQS

SEQ ID NO: 90938 - protein, 12 aa, Homo sapiens
  CDR3 for beta chain variable domain of TCR clone 45469 (TRBV11-2, TRBJ2-2)
CASSLGGGELFF

SEQ ID NO: 90939 - protein, 15 aa, Homo sapiens
  CDR3 for alpha chain variable domain of TCR clone 45470 (TRAV12-3, TRAJ42)
CAMSGHGGSQGNLIF

SEQ ID NO: 90940 - protein, 15 aa, Homo sapiens
  CDR3 for beta chain variable domain of TCR clone 45470 (TRBV27, TRBJ2-1)
CASSNGGGSSNEQFF

SEQ ID NO: 90941 - protein, 13 aa, Homo sapiens
  CDR3 for alpha chain variable domain of TCR clone 45471 (TRAV13-2, TRAJ48)
CAEMDFGNEKLTF

SEQ ID NO: 90942 - protein, 16 aa, Homo sapiens
  CDR3 for beta chain variable domain of TCR clone 45471 (TRBV18, TRBJ1-1)
CASSPGVGGRGGEAFF

SEQ ID NO: 90943 - protein, 15 aa, Homo sapiens
  CDR3 for alpha chain variable domain of TCR clone 45472 (TRAV8-3, TRAJ41)
CAVGSNSNSGYALNF

SEQ ID NO: 90944 - protein, 17 aa, Homo sapiens
  CDR3 for beta chain variable domain of TCR clone 45472 (TRBV25-1, TRBJ2-1)
CASSAYGHGRGVYEQFF

SEQ ID NO: 90945 - protein, 13 aa, Homo sapiens
  CDR3 for alpha chain variable domain of TCR clone 45473 (TRAV12-1, TRAJ6)
CVVFPGGRYIPTF

SEQ ID NO: 90946 - protein, 14 aa, Homo sapiens
  CDR3 for beta chain variable domain of TCR clone 45473 (TRBV20-1, TRBJ1-3)
CSASPTGAGNTIYF

SEQ ID NO: 90947 - protein, 17 aa, Homo sapiens
  CDR3 for alpha chain variable domain of TCR clone 45474 (TRAV17, TRAJ52)
CATDRNAGGTSYGKLTF

SEQ ID NO: 90948 - protein, 17 aa, Homo sapiens
  CDR3 for beta chain variable domain of TCR clone 45474 (TRBV11-2, TRBJ2-1)
CASSLYPPGVEYNEQFF

SEQ ID NO: 90949 - protein, 14 aa, Homo sapiens
  CDR3 for alpha chain variable domain of TCR clone 45475 (TRAV12-1, TRAJ12)
CVVTRMDSSYKLIF

SEQ ID NO: 90950 - protein, 14 aa, Homo sapiens
  CDR3 for beta chain variable domain of TCR clone 45475 (TRBV7-2, TRBJ2-7)
CASRSQGAAYEQYF

SEQ ID NO: 90951 - protein, 17 aa, Homo sapiens
  CDR3 for alpha chain variable domain of TCR clone 45476 (TRAV3, TRAJ6)
CAVRDGPRAGGSYIPTF

SEQ ID NO: 90952 - protein, 12 aa, Homo sapiens
  CDR3 for beta chain variable domain of TCR clone 45476 (TRBV7-9, TRBJ1-1)
AYSNRGGTEAFF

SEQ ID NO: 90953 - protein, 14 aa, Homo sapiens
  CDR3 for alpha chain variable domain of TCR clone 45477 (TRAV8-3, TRAJ4)
CAVGAAGGCNKLIF

SEQ ID NO: 90954 - protein, 15 aa, Homo sapiens
  CDR3 for beta chain variable domain of TCR clone 45477 (TRBV6-5, TRBJ2-1)
CASSYDAGAGNEQFF

SEQ ID NO: 90955 - protein, 12 aa, Homo sapiens
  CDR3 for alpha chain variable domain of TCR clone 45478 (TRAV13-1, TRAJ21)
CAAKEGFNKFYF

SEQ ID NO: 90956 - protein, 14 aa, Homo sapiens
  CDR3 for beta chain variable domain of TCR clone 45478 (TRBV7-8, TRBJ2-3)
CASSLEAGTDTQYF

SEQ ID NO: 90957 - protein, 17 aa, Homo sapiens
  CDR3 for alpha chain variable domain of TCR clone 45479 (TRAV3, TRAJ6)
CAVRGGPRAGGSYIPTF

SEQ ID NO: 90958 - protein, 14 aa, Homo sapiens
  CDR3 for beta chain variable domain of TCR clone 45479 (TRBV7-2, TRBJ2-7)
CASSPKTSFYEQCF

SEQ ID NO: 90959 - protein, 11 aa, Homo sapiens
  CDR3 for alpha chain variable domain of TCR clone 45480 (TRAV21, TRAJ48)
CAVDGNEKLTF

SEQ ID NO: 90960 - protein, 16 aa, Homo sapiens
  CDR3 for beta chain variable domain of TCR clone 45480 (TRBV19, TRBJ2-1)
CASSSKGTRSHNEQFF

SEQ ID NO: 90961 - protein, 15 aa, Homo sapiens
  CDR3 for alpha chain variable domain of TCR clone 45481 (TRAV35, TRAJ40)
CAGQLGTSGTYKYIF

SEQ ID NO: 90962 - protein, 14 aa, Homo sapiens
  CDR3 for beta chain variable domain of TCR clone 45481 (TRBV7-3, TRBJ2-1)
CASSLAGWTNEQFF

SEQ ID NO: 90963 - protein, 12 aa, Homo sapiens
  CDR3 for alpha chain variable domain of TCR clone 45482 (TRAV21, TRAJ6)
CAVKGGSYIPTF

SEQ ID NO: 90964 - protein, 13 aa, Homo sapiens
  CDR3 for beta chain variable domain of TCR clone 45482 (TRBV11-2, TRBJ1-1)
CASGFTENTEAFF

SEQ ID NO: 90965 - protein, 10 aa, Homo sapiens
  CDR3 for alpha chain variable domain of TCR clone 45483 (TRAV12-3, TRAJ49)
CAMNDDQFYF

SEQ ID NO: 90966 - protein, 15 aa, Homo sapiens
  CDR3 for beta chain variable domain of TCR clone 45483 (TRBV20-1, TRBJ2-7)
CSARGRVSGMDEQYF

SEQ ID NO: 90967 - protein, 15 aa, Homo sapiens
  CDR3 for alpha chain variable domain of TCR clone 45484 (TRAV12-2, TRAJ8)
CAVREENTGFQKLVF

SEQ ID NO: 90968 - protein, 14 aa, Homo sapiens
  CDR3 for beta chain variable domain of TCR clone 45484 (TRBV25-1, TRBJ1-1)
CASTHLGGNTEAFF

SEQ ID NO: 90969 - protein, 12 aa, Homo sapiens
  CDR3 for alpha chain variable domain of TCR clone 45485 (TRAV8-6, TRAJ43)
CAVGHNNNDMRF

SEQ ID NO: 90970 - protein, 14 aa, Homo sapiens
  CDR3 for beta chain variable domain of TCR clone 45485 (TRBV10-3, TRBJ1-1)
CAISDGSGVTGAFF

SEQ ID NO: 90971 - protein, 15 aa, Homo sapiens
  CDR3 for alpha chain variable domain of TCR clone 45486 (TRAV23/DV6, TRAJ18)
CAARYRGSTLGKLYF

SEQ ID NO: 90972 - protein, 13 aa, Homo sapiens
  CDR3 for beta chain variable domain of TCR clone 45486 (TRBV7-2, TRBJ2-7)
CASSSPSGSEQYF

SEQ ID NO: 90973 - protein, 16 aa, Homo sapiens
  CDR3 for alpha chain variable domain of TCR clone 45487 (TRAV3, TRAJ4)
CAVRPSPSGGYNKLTF

SEQ ID NO: 90974 - protein, 12 aa, Homo sapiens
  CDR3 for beta chain variable domain of TCR clone 45487 (TRBV7-9, TRBJ2-7)
CASSQGVYEQYF

SEQ ID NO: 90975 - protein, 13 aa, Homo sapiens
  CDR3 for alpha chain variable domain of TCR clone 45488 (TRAV12-3, TRAJ33)
CAMSVNSNYQLIW

SEQ ID NO: 90976 - protein, 16 aa, Homo sapiens
  CDR3 for beta chain variable domain of TCR clone 45488 (TRBV19, TRBJ2-2)
CASRSPGTGATGELFF

SEQ ID NO: 90977 - protein, 15 aa, Homo sapiens
  CDR3 for alpha chain variable domain of TCR clone 45489 (TRAV3, TRAJ32)
CAVSSYGCATNKLIF

SEQ ID NO: 90978 - protein, 13 aa, Homo sapiens
  CDR3 for beta chain variable domain of TCR clone 45489 (TRBV20-1, TRBJ2-7)
CSARPSTNYEQYF

SEQ ID NO: 90979 - protein, 10 aa, Homo sapiens
  CDR3 for alpha chain variable domain of TCR clone 45490 (TRAV30, TRAJ48)
CGIGNEKLTF

SEQ ID NO: 90980 - protein, 15 aa, Homo sapiens
  CDR3 for beta chain variable domain of TCR clone 45490 (TRBV28, TRBJ2-5)
CASSPPWAYQETQYF

SEQ ID NO: 90981 - protein, 16 aa, Homo sapiens
  CDR3 for alpha chain variable domain of TCR clone 45491 (TRAV3, TRAJ18)
CAVRGGRGSTLGRLYF

SEQ ID NO: 90982 - protein, 15 aa, Homo sapiens
  CDR3 for beta chain variable domain of TCR clone 45491 (TRBV7-9, TRBJ1-6)
CASSSPGRGNSPLHF

SEQ ID NO: 90983 - protein, 13 aa, Homo sapiens
  CDR3 for alpha chain variable domain of TCR clone 45492 (TRAV1-2, TRAJ9)
CAALNTGGFKTIF

SEQ ID NO: 90984 - protein, 13 aa, Homo sapiens
  CDR3 for beta chain variable domain of TCR clone 45492 (TRBV7-9, TRBJ1-2)
CASSLKQNYGDTF

SEQ ID NO: 90985 - protein, 14 aa, Homo sapiens
  CDR3 for alpha chain variable domain of TCR clone 45493 (TRAV26-1, TRAJ39)
CIVRGSRAGNMLTF

SEQ ID NO: 90986 - protein, 13 aa, Homo sapiens
  CDR3 for beta chain variable domain of TCR clone 45493 (TRBV7-9, TRBJ1-2)
CASSLKQNYGYTF

SEQ ID NO: 90987 - protein, 14 aa, Homo sapiens
  CDR3 for alpha chain variable domain of TCR clone 45494 (TRAV13-1, TRAJ44)
CAAKATGTASKLTF

SEQ ID NO: 90988 - protein, 12 aa, Homo sapiens
  CDR3 for beta chain variable domain of TCR clone 45494 (TRBV7-8, TRBJ2-7)
CASSLGDGEQYF

SEQ ID NO: 90989 - protein, 15 aa, Homo sapiens
  CDR3 for alpha chain variable domain of TCR clone 45495 (TRAV12-3, TRAJ49)
CATAVTPNTGNQFYF

SEQ ID NO: 90990 - protein, 15 aa, Homo sapiens
  CDR3 for beta chain variable domain of TCR clone 45495 (TRBV11-3, TRBJ2-7)
CASSPGPASSYEQYF

SEQ ID NO: 90991 - protein, 15 aa, Homo sapiens
  CDR3 for alpha chain variable domain of TCR clone 45496 (TRAV17, TRAJ57)
CATGPSQAGSEKLVF

SEQ ID NO: 90992 - protein, 16 aa, Homo sapiens
  CDR3 for beta chain variable domain of TCR clone 45496 (TRBV12-4, TRBJ1-5)
CASSRPVGGSNQPQHF

SEQ ID NO: 90993 - protein, 13 aa, Homo sapiens
  CDR3 for alpha chain variable domain of TCR clone 45497 (TRAV2, TRAJ40)
CAVVTSGTYKYIF

SEQ ID NO: 90994 - protein, 18 aa, Homo sapiens
  CDR3 for beta chain variable domain of TCR clone 45497 (TRBV7-9, TRBJ2-7)
CASSLTTSGSRTWYEQYF

SEQ ID NO: 90995 - protein, 12 aa, Homo sapiens
  CDR3 for alpha chain variable domain of TCR clone 45498 (TRAV1-1, TRAJ8)
CAGSTGFQKLVF

SEQ ID NO: 90996 - protein, 16 aa, Homo sapiens
  CDR3 for beta chain variable domain of TCR clone 45498 (TRBV12-5, TRBJ2-5)
CASGPRTSGNQETQYF

SEQ ID NO: 90997 - protein, 18 aa, Homo sapiens
  CDR3 for alpha chain variable domain of TCR clone 45499 (TRAV12-3, TRAJ52)
CAMSRTNAGGTSYGKLTF

SEQ ID NO: 90998 - protein, 17 aa, Homo sapiens
  CDR3 for beta chain variable domain of TCR clone 45499 (TRBV7-3, TRBJ2-3)
CSSSLMKRMRGADTQYF

SEQ ID NO: 90999 - protein, 13 aa, Homo sapiens
  CDR3 for alpha chain variable domain of TCR clone 45500 (TRAV22, TRAJ29)
CAVGGSGNTPLVF

SEQ ID NO: 91000 - protein, 15 aa, Homo sapiens
  CDR3 for beta chain variable domain of TCR clone 45500 (TRBV20-1, TRBJ2-7)
CSARDRVSGMDEQYF

SEQ ID NO: 91001 - protein, 15 aa, Homo sapiens
  CDR3 for alpha chain variable domain of TCR clone 45501 (TRAV17, TRAJ35)
CDTAFVIGFGNVLHC

SEQ ID NO: 91002 - protein, 14 aa, Homo sapiens
  CDR3 for beta chain variable domain of TCR clone 45501 (TRBV12-4, TRBJ2-5)
CASSQSGGGETQYF

SEQ ID NO: 91003 - protein, 12 aa, Homo sapiens
  CDR3 for alpha chain variable domain of TCR clone 45502 (TRAV4, TRAJ26)
CLVGDYGPNFVF

SEQ ID NO: 91004 - protein, 16 aa, Homo sapiens
  CDR3 for beta chain variable domain of TCR clone 45502 (TRBV7-2, TRBJ1-2)
CASSSNQDRRGHGYTF

SEQ ID NO: 91005 - protein, 12 aa, Homo sapiens
  CDR3 for alpha chain variable domain of TCR clone 45503 (TRAV13-1, TRAJ21)
CAAKEGFNKFYF

SEQ ID NO: 91006 - protein, 15 aa, Homo sapiens
  CDR3 for beta chain variable domain of TCR clone 45503 (TRBV27, TRBJ2-7)
CASSTAGTGSYEQYF

SEQ ID NO: 91007 - protein, 14 aa, Homo sapiens
  CDR3 for alpha chain variable domain of TCR clone 45504 (TRAV3, TRAJ22)
CAVRDYGSARQLTL

SEQ ID NO: 91008 - protein, 12 aa, Homo sapiens
  CDR3 for beta chain variable domain of TCR clone 45504 (TRBV11-2, TRBJ2-2)
CASSLGGGELFF

SEQ ID NO: 91009 - protein, 11 aa, Homo sapiens
  CDR3 for alpha chain variable domain of TCR clone 45505 (TRAV1-2, TRAJ40)
CAVPGTYKYIF

SEQ ID NO: 91010 - protein, 14 aa, Homo sapiens
  CDR3 for beta chain variable domain of TCR clone 45505 (TRBV11-2, TRBJ2-5)
CASSRTGGIETQYF

SEQ ID NO: 91011 - protein, 11 aa, Homo sapiens
  CDR3 for alpha chain variable domain of TCR clone 45506 (TRAV2, TRAJ21)
CAVFNFNKFYF

SEQ ID NO: 91012 - protein, 14 aa, Homo sapiens
  CDR3 for beta chain variable domain of TCR clone 45506 (TRBV15, TRBJ2-3)
CATRSRTSTDTQYF

SEQ ID NO: 91013 - protein, 14 aa, Homo sapiens
  CDR3 for alpha chain variable domain of TCR clone 45507 (TRAV12-1, TRAJ12)
CVVTRMDSSYKLIF

SEQ ID NO: 91014 - protein, 18 aa, Homo sapiens
  CDR3 for beta chain variable domain of TCR clone 45507 (TRBV20-1, TRBJ2-6)
CSAETTPTHGPGANVLTF

SEQ ID NO: 91015 - protein, 14 aa, Homo sapiens
  CDR3 for alpha chain variable domain of TCR clone 45508 (TRAV1-1, TRAJ5)
CAVRDGAGRRALTF

SEQ ID NO: 91016 - protein, 14 aa, Homo sapiens
  CDR3 for beta chain variable domain of TCR clone 45508 (TRBV28, TRBJ2-1)
CDGSYYTAYNEQFF

SEQ ID NO: 91017 - protein, 11 aa, Homo sapiens
  CDR3 for alpha chain variable domain of TCR clone 45509 (TRAV2, TRAJ13)
CASGGYQKVTF

SEQ ID NO: 91018 - protein, 15 aa, Homo sapiens
  CDR3 for beta chain variable domain of TCR clone 45509 (TRBV7-9, TRBJ1-6)
CASSSPGRGNSPLHS

SEQ ID NO: 91019 - protein, 16 aa, Homo sapiens
  CDR3 for alpha chain variable domain of TCR clone 45510 (TRAV13-1, TRAJ48)
CAASIFGNFGNEKLTF

SEQ ID NO: 91020 - protein, 16 aa, Homo sapiens
  CDR3 for beta chain variable domain of TCR clone 45510 (TRBV19, TRBJ2-1)
CASSKAGPSSYNEQFF

SEQ ID NO: 91021 - protein, 14 aa, Homo sapiens
  CDR3 for alpha chain variable domain of TCR clone 45511 (TRAV29/DV5, TRAJ45)
CAASCRGGADGLTF

SEQ ID NO: 91022 - protein, 11 aa, Homo sapiens
  CDR3 for beta chain variable domain of TCR clone 45511 (TRBV11-2, TRBJ2-2)
CASSLPGELFF

SEQ ID NO: 91023 - protein, 13 aa, Homo sapiens
  CDR3 for alpha chain variable domain of TCR clone 45512 (TRAV35, TRAJ36)
CAGPRIGANNLFF

SEQ ID NO: 91024 - protein, 15 aa, Homo sapiens
  CDR3 for beta chain variable domain of TCR clone 45512 (TRBV28, TRBJ2-5)
CASSPPWSYQETQDF

SEQ ID NO: 91025 - protein, 13 aa, Homo sapiens
  CDR3 for alpha chain variable domain of TCR clone 45513 (TRAV27, TRAJ6)
CAGGTRGSYIPAF

SEQ ID NO: 91026 - protein, 13 aa, Homo sapiens
  CDR3 for beta chain variable domain of TCR clone 45513 (TRBV4-1, TRBJ2-2)
CASSQENTGELFF

SEQ ID NO: 91027 - protein, 14 aa, Homo sapiens
  CDR3 for alpha chain variable domain of TCR clone 45514 (TRAV13-2, TRAJ10)
CAESITGGGNKLTF

SEQ ID NO: 91028 - protein, 15 aa, Homo sapiens
  CDR3 for beta chain variable domain of TCR clone 45514 (TRBV7-2, TRBJ2-7)
CASSLGGAKSGEQYF

SEQ ID NO: 91029 - protein, 17 aa, Homo sapiens
  CDR3 for alpha chain variable domain of TCR clone 45515 (TRAV35, TRAJ28)
CAGLQVYSGAGSYQLPF

SEQ ID NO: 91030 - protein, 15 aa, Homo sapiens
  CDR3 for beta chain variable domain of TCR clone 45515 (TRBV2, TRBJ1-2)
CASSEIGGANYGYTF

SEQ ID NO: 91031 - protein, 13 aa, Homo sapiens
  CDR3 for alpha chain variable domain of TCR clone 45516 (TRAV21, TRAJ49)
CAVRQSTGNQFYF

SEQ ID NO: 91032 - protein, 14 aa, Homo sapiens
  CDR3 for beta chain variable domain of TCR clone 45516 (TRBV9, TRBJ2-1)
CASSVDPRGKEQFF

SEQ ID NO: 91033 - protein, 14 aa, Homo sapiens
  CDR3 for alpha chain variable domain of TCR clone 45517 (TRAV12-2, TRAJ40)
CAVKIPSGTYKYIF

SEQ ID NO: 91034 - protein, 13 aa, Homo sapiens
  CDR3 for beta chain variable domain of TCR clone 45517 (TRBV20-1, TRBJ1-1)
CSARGGGNTEAFF

SEQ ID NO: 91035 - protein, 15 aa, Homo sapiens
  CDR3 for alpha chain variable domain of TCR clone 45518 (TRAV27, TRAJ38)
CAARRNAGNNRKLIW

SEQ ID NO: 91036 - protein, 11 aa, Homo sapiens
  CDR3 for beta chain variable domain of TCR clone 45518 (TRBV11-2, TRBJ2-2)
CASSLPGELFF

SEQ ID NO: 91037 - protein, 16 aa, Homo sapiens
  CDR3 for alpha chain variable domain of TCR clone 45519 (TRAV27, TRAJ34)
CAGGGLGDYNTDKPIF

SEQ ID NO: 91038 - protein, 15 aa, Homo sapiens
  CDR3 for beta chain variable domain of TCR clone 45519 (TRBV9, TRBJ1-4)
CASSVGGSTNEKLFF

SEQ ID NO: 91039 - protein, 17 aa, Homo sapiens
  CDR3 for alpha chain variable domain of TCR clone 45520 (TRAV13-1, TRAJ52)
CAAGRNAGGTSYGKLTF

SEQ ID NO: 91040 - protein, 13 aa, Homo sapiens
  CDR3 for beta chain variable domain of TCR clone 45520 (TRBV7-2, TRBJ1-1)
SASNLKGAKVAFF

SEQ ID NO: 91041 - protein, 14 aa, Homo sapiens
  CDR3 for alpha chain variable domain of TCR clone 45521 (TRAV12-1, TRAJ33)
CVVNPEDSNYQLIW

SEQ ID NO: 91042 - protein, 11 aa, Homo sapiens
  CDR3 for beta chain variable domain of TCR clone 45521 (TRBV7-6, TRBJ2-1)
CARSNYGEQFF

SEQ ID NO: 91043 - protein, 15 aa, Homo sapiens
  CDR3 for alpha chain variable domain of TCR clone 45522 (TRAV12-3, TRAJ6)
CAMSATTGGSYIPTC

SEQ ID NO: 91044 - protein, 16 aa, Homo sapiens
  CDR3 for beta chain variable domain of TCR clone 45522 (TRBV20-1, TRBJ1-2)
CSASMGQGVANYGYTF

SEQ ID NO: 91045 - protein, 12 aa, Homo sapiens
  CDR3 for alpha chain variable domain of TCR clone 45523 (TRAV16, TRAJ10)
CSRTGGGNKLTF

SEQ ID NO: 91046 - protein, 16 aa, Homo sapiens
  CDR3 for beta chain variable domain of TCR clone 45523 (TRBV27, TRBJ2-2)
CASSFRGLVRTGELFF

SEQ ID NO: 91047 - protein, 23 aa, Homo sapiens
  CDR3 for alpha chain variable domain of TCR clone 45524 (TRAV26-1, TRAJ38)
CIADNAGNNHIQNPEPAVYQLRD

SEQ ID NO: 91048 - protein, 13 aa, Homo sapiens
  CDR3 for beta chain variable domain of TCR clone 45524 (TRBV20-1, TRBJ1-1)
CSARGGGNTEAFF

SEQ ID NO: 91049 - protein, 17 aa, Homo sapiens
  CDR3 for alpha chain variable domain of TCR clone 45525 (TRAV38-1, TRAJ44)
CDVFPCASAGTASKLTF

SEQ ID NO: 91050 - protein, 13 aa, Homo sapiens
  CDR3 for beta chain variable domain of TCR clone 45525 (TRBV18, TRBJ1-1)
CASSPNGDTEAFF

SEQ ID NO: 91051 - protein, 12 aa, Homo sapiens
  CDR3 for alpha chain variable domain of TCR clone 45526 (TRAV12-3, TRAJ21)
CAMFNNFNNFYF

SEQ ID NO: 91052 - protein, 14 aa, Homo sapiens
  CDR3 for beta chain variable domain of TCR clone 45526 (TRBV28, TRBJ2-1)
CASSIQGTVGEQFF

SEQ ID NO: 91053 - protein, 12 aa, Homo sapiens
  CDR3 for alpha chain variable domain of TCR clone 45527 (TRAV16, TRAJ10)
CSRTGGGNKLTF

SEQ ID NO: 91054 - protein, 16 aa, Homo sapiens
  CDR3 for beta chain variable domain of TCR clone 45527 (TRBV20-1, TRBJ1-4)
CSAPGQGLLTNEKLFF

SEQ ID NO: 91055 - protein, 15 aa, Homo sapiens
  CDR3 for alpha chain variable domain of TCR clone 45528 (TRAV26-1, TRAJ48)
CIVRVGYFGNEKLTF

SEQ ID NO: 91056 - protein, 16 aa, Homo sapiens
  CDR3 for beta chain variable domain of TCR clone 45528 (TRBV4-1, TRBJ2-3)
CASSQRAGGLTDTQYF

SEQ ID NO: 91057 - protein, 18 aa, Homo sapiens
  CDR3 for alpha chain variable domain of TCR clone 45529 (TRAV21, TRAJ52)
CAVRPSPAGGTSYGKLTF

SEQ ID NO: 91058 - protein, 16 aa, Homo sapiens
  CDR3 for beta chain variable domain of TCR clone 45529 (TRBV20-1, TRBJ1-2)
CSASMGQGVANYGYTF

SEQ ID NO: 91059 - protein, 12 aa, Homo sapiens
  CDR3 for alpha chain variable domain of TCR clone 45530 (TRAV1-1, TRAJ8)
CAGGTGFQKLVF

SEQ ID NO: 91060 - protein, 15 aa, Homo sapiens
  CDR3 for beta chain variable domain of TCR clone 45530 (TRBV7-9, TRBJ1-4)
CANSRTGGFNEKLFF

SEQ ID NO: 91061 - protein, 12 aa, Homo sapiens
  CDR3 for alpha chain variable domain of TCR clone 45531 (TRAV12-2, TRAJ30)
CAVRNRDDKIIF

SEQ ID NO: 91062 - protein, 15 aa, Homo sapiens
  CDR3 for beta chain variable domain of TCR clone 45531 (TRBV6-3, TRBJ1-5)
CAGRVDRWSNQPQHF

SEQ ID NO: 91063 - protein, 13 aa, Homo sapiens
  CDR3 for alpha chain variable domain of TCR clone 45532 (TRAV26-1, TRAJ33)
CIVRVDSNYLLIW

SEQ ID NO: 91064 - protein, 15 aa, Homo sapiens
  CDR3 for beta chain variable domain of TCR clone 45532 (TRBV7-2, TRBJ1-5)
CASSFSAGINQPQHF

SEQ ID NO: 91065 - protein, 13 aa, Homo sapiens
  CDR3 for alpha chain variable domain of TCR clone 45533 (TRAV17, TRAJ9)
CATFLTGGFKTIF

SEQ ID NO: 91066 - protein, 15 aa, Homo sapiens
  CDR3 for beta chain variable domain of TCR clone 45533 (TRBV7-2, TRBJ2-3)
CASSLNLRDTDTQYF

SEQ ID NO: 91067 - protein, 17 aa, Homo sapiens
  CDR3 for alpha chain variable domain of TCR clone 45534 (TRAV16, TRAJ58)
CITVLSNGETSSSRLTF

SEQ ID NO: 91068 - protein, 17 aa, Homo sapiens
  CDR3 for beta chain variable domain of TCR clone 45534 (TRBV18, TRBJ2-1)
CASSKGLSGGADNEQFF

SEQ ID NO: 91069 - protein, 15 aa, Homo sapiens
  CDR3 for alpha chain variable domain of TCR clone 45535 (TRAV12-2, TRAJ50)
CAVNGLETSYDKGIF

SEQ ID NO: 91070 - protein, 16 aa, Homo sapiens
  CDR3 for beta chain variable domain of TCR clone 45535 (TRBV5-4, TRBJ2-3)
CASQQPGAGGADTQYF

SEQ ID NO: 91071 - protein, 12 aa, Homo sapiens
  CDR3 for alpha chain variable domain of TCR clone 45536 (TRAV17, TRAJ4)
CATDGGYNKLIF

SEQ ID NO: 91072 - protein, 13 aa, Homo sapiens
  CDR3 for beta chain variable domain of TCR clone 45536 (TRBV29-1, TRBJ2-2)
CSTTGVNTGELFV

SEQ ID NO: 91073 - protein, 12 aa, Homo sapiens
  CDR3 for alpha chain variable domain of TCR clone 45537 (TRAV12-3, TRAJ17)
CAMTLTGNKLTF

SEQ ID NO: 91074 - protein, 13 aa, Homo sapiens
  CDR3 for beta chain variable domain of TCR clone 45537 (TRBV7-3, TRBJ1-1)
CASNQDWGAEAFF

SEQ ID NO: 91075 - protein, 12 aa, Homo sapiens
  CDR3 for alpha chain variable domain of TCR clone 45538 (TRAV3, TRAJ20)
CAVRDGDYKLSF

SEQ ID NO: 91076 - protein, 14 aa, Homo sapiens
  CDR3 for beta chain variable domain of TCR clone 45538 (TRBV7-8, TRBJ2-3)
CASSLEAGTDTQYF

SEQ ID NO: 91077 - protein, 16 aa, Homo sapiens
  CDR3 for alpha chain variable domain of TCR clone 45539 (TRAV16, TRAJ4)
CALSRMFSGGYNKMIF

SEQ ID NO: 91078 - protein, 16 aa, Homo sapiens
  CDR3 for beta chain variable domain of TCR clone 45539 (TRBV12-4, TRBJ1-5)
CASSRPVGGSNQPQHF

SEQ ID NO: 91079 - protein, 16 aa, Homo sapiens
  CDR3 for alpha chain variable domain of TCR clone 45540 (TRAV23/DV6, TRAJ9)
CAASIGGNTGGFKTLF

SEQ ID NO: 91080 - protein, 14 aa, Homo sapiens
  CDR3 for beta chain variable domain of TCR clone 45540 (TRBV9, TRBJ2-7)
CASSVGVGSYEQYF

SEQ ID NO: 91081 - protein, 14 aa, Homo sapiens
  CDR3 for alpha chain variable domain of TCR clone 45541 (TRAV12-2, TRAJ10)
CAVTPTGGGNKLTF

SEQ ID NO: 91082 - protein, 14 aa, Homo sapiens
  CDR3 for beta chain variable domain of TCR clone 45541 (TRBV6-1, TRBJ1-3)
CASVQGGGGNTIYF

SEQ ID NO: 91083 - protein, 14 aa, Homo sapiens
  CDR3 for alpha chain variable domain of TCR clone 45542 (TRAV27, TRAJ49)
CAGRPEGTGSQFYF

SEQ ID NO: 91084 - protein, 16 aa, Homo sapiens
  CDR3 for beta chain variable domain of TCR clone 45542 (TRBV12-5, TRBJ2-5)
CASGPRTSGNQETQYF

SEQ ID NO: 91085 - protein, 15 aa, Homo sapiens
  CDR3 for alpha chain variable domain of TCR clone 45543 (TRAV17, TRAJ37)
CATDHGSSNTGRLIF

SEQ ID NO: 91086 - protein, 14 aa, Homo sapiens
  CDR3 for beta chain variable domain of TCR clone 45543 (TRBV7-2, TRBJ2-3)
CASSRTSGADTQYF

SEQ ID NO: 91087 - protein, 14 aa, Homo sapiens
  CDR3 for alpha chain variable domain of TCR clone 45544 (TRAV8-3, TRAJ4)
CAVGAAGGYNKLIF

SEQ ID NO: 91088 - protein, 11 aa, Homo sapiens
  CDR3 for beta chain variable domain of TCR clone 45544 (TRBV29-1, TRBJ2-5)
CSEDRTGTQYF

SEQ ID NO: 91089 - protein, 14 aa, Homo sapiens
  CDR3 for alpha chain variable domain of TCR clone 45545 (TRAV13-1, TRAJ53)
CAASISGSNYKLTF

SEQ ID NO: 91090 - protein, 15 aa, Homo sapiens
  CDR3 for beta chain variable domain of TCR clone 45545 (TRBV4-1, TRBJ1-4)
CASSDTGGANEKLFF

SEQ ID NO: 91091 - protein, 13 aa, Homo sapiens
  CDR3 for alpha chain variable domain of TCR clone 45546 (TRAV21, TRAJ57)
CAVTQGGSEKLVF

SEQ ID NO: 91092 - protein, 15 aa, Homo sapiens
  CDR3 for beta chain variable domain of TCR clone 45546 (TRBV6-1, TRBJ2-1)
CASSEAAYSYNEQFF

SEQ ID NO: 91093 - protein, 13 aa, Homo sapiens
  CDR3 for alpha chain variable domain of TCR clone 45547 (TRAV12-1, TRAJ17)
CVVNKAAGNKLTF

SEQ ID NO: 91094 - protein, 16 aa, Homo sapiens
  CDR3 for beta chain variable domain of TCR clone 45547 (TRBV11-3, TRBJ2-2)
CASSLRTGNLIGELFF

SEQ ID NO: 91095 - protein, 16 aa, Homo sapiens
  CDR3 for alpha chain variable domain of TCR clone 45548 (TRAV3, TRAJ23)
CAVKIGIYNQGGKLIL

SEQ ID NO: 91096 - protein, 17 aa, Homo sapiens
  CDR3 for beta chain variable domain of TCR clone 45548 (TRBV10-3, TRBJ2-6)
CAISESTAPSGANVLTF

SEQ ID NO: 91097 - protein, 14 aa, Homo sapiens
  CDR3 for alpha chain variable domain of TCR clone 45549 (TRAV17, TRAJ6)
CATDASGGRYIPTF

SEQ ID NO: 91098 - protein, 19 aa, Homo sapiens
  CDR3 for beta chain variable domain of TCR clone 45549 (TRBV4-3, TRBJ2-7)
CASSQEFIGWQVTPCEQYF

SEQ ID NO: 91099 - protein, 15 aa, Homo sapiens
  CDR3 for alpha chain variable domain of TCR clone 45550 (TRAV3, TRAJ5)
CAVRDLDTGRRALTF

SEQ ID NO: 91100 - protein, 13 aa, Homo sapiens
  CDR3 for beta chain variable domain of TCR clone 45550 (TRBV12-4, TRBJ2-7)
CASSPTKTYEQYF

SEQ ID NO: 91101 - protein, 14 aa, Homo sapiens
  CDR3 for alpha chain variable domain of TCR clone 45551 (TRAV24, TRAJ39)
CAFPSSNAGNMLTF

SEQ ID NO: 91102 - protein, 13 aa, Homo sapiens
  CDR3 for beta chain variable domain of TCR clone 45551 (TRBV6-5, TRBJ1-6)
CASSYERSTPLHF

SEQ ID NO: 91103 - protein, 15 aa, Homo sapiens
  CDR3 for alpha chain variable domain of TCR clone 45552 (TRAV17, TRAJ13)
CSTDAGSGGYQKVTF

SEQ ID NO: 91104 - protein, 17 aa, Homo sapiens
  CDR3 for beta chain variable domain of TCR clone 45552 (TRBV11-2, TRBJ2-1)
CASSLYPPGVEYNEQFF

SEQ ID NO: 91105 - protein, 14 aa, Homo sapiens
  CDR3 for alpha chain variable domain of TCR clone 45553 (TRAV21, TRAJ38)
CAVMGAGNNRKLIW

SEQ ID NO: 91106 - protein, 13 aa, Homo sapiens
  CDR3 for beta chain variable domain of TCR clone 45553 (TRBV7-3, TRBJ2-5)
CASSIGFFEDQYF

SEQ ID NO: 91107 - protein, 13 aa, Homo sapiens
  CDR3 for alpha chain variable domain of TCR clone 45554 (TRAV30, TRAJ24)
CGTVTDSWGKLQF

SEQ ID NO: 91108 - protein, 14 aa, Homo sapiens
  CDR3 for beta chain variable domain of TCR clone 45554 (TRBV6-3, TRBJ2-2)
CASTYTPDTGELFS

SEQ ID NO: 91109 - protein, 14 aa, Homo sapiens
  CDR3 for alpha chain variable domain of TCR clone 45555 (TRAV38-1, TRAJ45)
CADYSGGGADGLTF

SEQ ID NO: 91110 - protein, 20 aa, Homo sapiens
  CDR3 for beta chain variable domain of TCR clone 45555 (TRBV28, TRBJ2-1)
CASTPIGRSPGLAGGNEQFF

SEQ ID NO: 91111 - protein, 15 aa, Homo sapiens
  CDR3 for alpha chain variable domain of TCR clone 45556 (TRAV8-2, TRAJ40)
CVVSDRGSGTYKYIF

SEQ ID NO: 91112 - protein, 17 aa, Homo sapiens
  CDR3 for beta chain variable domain of TCR clone 45556 (TRBV13, TRBJ2-3)
CASSLSRVAGGRNTQYF

SEQ ID NO: 91113 - protein, 18 aa, Homo sapiens
  CDR3 for alpha chain variable domain of TCR clone 45557 (TRAV26-1, TRAJ5)
CIVRVAPPRDTGRRALTF

SEQ ID NO: 91114 - protein, 15 aa, Homo sapiens
  CDR3 for beta chain variable domain of TCR clone 45557 (TRBV7-9, TRBJ2-7)
CASSLPMGQANEQYF

SEQ ID NO: 91115 - protein, 14 aa, Homo sapiens
  CDR3 for alpha chain variable domain of TCR clone 45558 (TRAV1-2, TRAJ8)
CAVRGDTGFQKLVF

SEQ ID NO: 91116 - protein, 14 aa, Homo sapiens
  CDR3 for beta chain variable domain of TCR clone 45558 (TRBV7-9, TRBJ1-1)
CACTPLQSYTEAFF

SEQ ID NO: 91117 - protein, 14 aa, Homo sapiens
  CDR3 for alpha chain variable domain of TCR clone 45559 (TRAV12-1, TRAJ30)
CVVNIGGRDDKIIF

SEQ ID NO: 91118 - protein, 15 aa, Homo sapiens
  CDR3 for beta chain variable domain of TCR clone 45559 (TRBV28, TRBJ2-5)
CASSPPWSYQETQYF

SEQ ID NO: 91119 - protein, 22 aa, Homo sapiens
  CDR3 for alpha chain variable domain of TCR clone 45560 (TRAV16, )
CALRTQIPDIQDPDPAVYQLRD

SEQ ID NO: 91120 - protein, 16 aa, Homo sapiens
  CDR3 for beta chain variable domain of TCR clone 45560 (TRBV7-2, TRBJ1-2)
CASSSNQDRRGHGYTF

SEQ ID NO: 91121 - protein, 16 aa, Homo sapiens
  CDR3 for alpha chain variable domain of TCR clone 45561 (TRAV20, TRAJ28)
CAVRDPSGAGSYQPTF

SEQ ID NO: 91122 - protein, 14 aa, Homo sapiens
  CDR3 for beta chain variable domain of TCR clone 45561 (TRBV19, TRBJ2-1)
CASPTFVLSGEQFF

SEQ ID NO: 91123 - protein, 14 aa, Homo sapiens
  CDR3 for alpha chain variable domain of TCR clone 45562 (TRAV20, TRAJ40)
CAVSPTSGTYKYIF

SEQ ID NO: 91124 - protein, 21 aa, Homo sapiens
  CDR3 for beta chain variable domain of TCR clone 45562 (TRBV27, TRBJ1-1)
CASSFLETARREFSLKLSLDK

SEQ ID NO: 91125 - protein, 14 aa, Homo sapiens
  CDR3 for alpha chain variable domain of TCR clone 45563 (TRAV16, TRAJ17)
CALSGRAAGNKLTF

SEQ ID NO: 91126 - protein, 15 aa, Homo sapiens
  CDR3 for beta chain variable domain of TCR clone 45563 (TRBV3-1, TRBJ1-2)
CASSPTRLPEGGYTL

SEQ ID NO: 91127 - protein, 11 aa, Homo sapiens
  CDR3 for alpha chain variable domain of TCR clone 45564 (TRAV2, TRAJ13)
CASGGYQKVIF

SEQ ID NO: 91128 - protein, 14 aa, Homo sapiens
  CDR3 for beta chain variable domain of TCR clone 45564 (TRBV7-3, TRBJ2-1)
CASSLAGGTNEQFF

SEQ ID NO: 91129 - protein, 16 aa, Homo sapiens
  CDR3 for alpha chain variable domain of TCR clone 45565 (TRAV12-2, TRAJ40)
CAVIRGGTSGTHKYIF

SEQ ID NO: 91130 - protein, 14 aa, Homo sapiens
  CDR3 for beta chain variable domain of TCR clone 45565 (TRBV20-1, TRBJ2-5)
CSARDGRAGETQYF

SEQ ID NO: 91131 - protein, 14 aa, Homo sapiens
  CDR3 for alpha chain variable domain of TCR clone 45566 (TRAV2, TRAJ9)
CAVEDRSGGFKTIF

SEQ ID NO: 91132 - protein, 14 aa, Homo sapiens
  CDR3 for beta chain variable domain of TCR clone 45566 (TRBV19, TRBJ2-2)
CASSTLHRSGELFF

SEQ ID NO: 91133 - protein, 14 aa, Homo sapiens
  CDR3 for alpha chain variable domain of TCR clone 45567 (TRAV26-1, TRAJ57)
CIVITQGGSEKLVF

SEQ ID NO: 91134 - protein, 12 aa, Homo sapiens
  CDR3 for beta chain variable domain of TCR clone 45567 (TRBV7-8, TRBJ2-7)
CASSLGDREQYF

SEQ ID NO: 91135 - protein, 11 aa, Homo sapiens
  CDR3 for alpha chain variable domain of TCR clone 45568 (TRAV4, TRAJ31)
CLVGLNARLMF

SEQ ID NO: 91136 - protein, 16 aa, Homo sapiens
  CDR3 for beta chain variable domain of TCR clone 45568 (TRBV15, TRBJ2-6)
CATSVNGGFLANVLTS

SEQ ID NO: 91137 - protein, 13 aa, Homo sapiens
  CDR3 for alpha chain variable domain of TCR clone 45569 (TRAV26-1, TRAJ35)
CIVSRRVGEMLHF

SEQ ID NO: 91138 - protein, 17 aa, Homo sapiens
  CDR3 for beta chain variable domain of TCR clone 45569 (TRBV7-9, TRBJ2-7)
CASSFDGSRGGAYEQYF

SEQ ID NO: 91139 - protein, 15 aa, Homo sapiens
  CDR3 for alpha chain variable domain of TCR clone 45570 (TRAV35, TRAJ58)
CAGRRQETSGSRLTF

SEQ ID NO: 91140 - protein, 11 aa, Homo sapiens
  CDR3 for beta chain variable domain of TCR clone 45570 (TRBV11-2, TRBJ1-1)
CASSINTEALF

SEQ ID NO: 91141 - protein, 11 aa, Homo sapiens
  CDR3 for alpha chain variable domain of TCR clone 45571 (TRAV2, TRAJ13)
CASGGYQKVTF

SEQ ID NO: 91142 - protein, 15 aa, Homo sapiens
  CDR3 for beta chain variable domain of TCR clone 45571 (TRBV7-9, TRBJ1-4)
CASSRTGGFNEKLFF

SEQ ID NO: 91143 - protein, 16 aa, Homo sapiens
  CDR3 for alpha chain variable domain of TCR clone 45572 (TRAV12-1, TRAJ12)
CVVNTLLMDSSYKLIF

SEQ ID NO: 91144 - protein, 20 aa, Homo sapiens
  CDR3 for beta chain variable domain of TCR clone 45572 (TRBV11-2, TRBJ2-2)
LRTRPCISVPAALEAGSCFF

SEQ ID NO: 91145 - protein, 15 aa, Homo sapiens
  CDR3 for alpha chain variable domain of TCR clone 45573 (TRAV26-1, TRAJ22)
CIVRVSFWFCKATDL

SEQ ID NO: 91146 - protein, 14 aa, Homo sapiens
  CDR3 for beta chain variable domain of TCR clone 45573 (TRBV7-2, TRBJ2-7)
CASSPKTSFYEQYF

SEQ ID NO: 91147 - protein, 19 aa, Homo sapiens
  CDR3 for alpha chain variable domain of TCR clone 45574 (TRAV2, TRAJ20)
ILQVREADAAVYRDCKLSF

SEQ ID NO: 91148 - protein, 17 aa, Homo sapiens
  CDR3 for beta chain variable domain of TCR clone 45574 (TRBV11-2, TRBJ2-1)
CACSLYPPGVEYNEQFF

SEQ ID NO: 91149 - protein, 15 aa, Homo sapiens
  CDR3 for alpha chain variable domain of TCR clone 45575 (TRAV25, TRAJ23)
CAGVPIYNQGGKLIF

SEQ ID NO: 91150 - protein, 15 aa, Homo sapiens
  CDR3 for beta chain variable domain of TCR clone 45575 (TRBV19, TRBJ2-3)
CASRMRGSFTDTQYF

SEQ ID NO: 91151 - protein, 12 aa, Homo sapiens
  CDR3 for alpha chain variable domain of TCR clone 45576 (TRAV12-1, TRAJ40)
CVVYSGTYKYIF

SEQ ID NO: 91152 - protein, 16 aa, Homo sapiens
  CDR3 for beta chain variable domain of TCR clone 45576 (TRBV19, TRBJ2-1)
CASSKAGPSSYNEQFF

SEQ ID NO: 91153 - protein, 14 aa, Homo sapiens
  CDR3 for alpha chain variable domain of TCR clone 45577 (TRAV12-3, TRAJ10)
SHLPLTGGGNKLTF

SEQ ID NO: 91154 - protein, 15 aa, Homo sapiens
  CDR3 for beta chain variable domain of TCR clone 45577 (TRBV18, TRBJ2-6)
CASSPSYAGANVLTF

SEQ ID NO: 91155 - protein, 14 aa, Homo sapiens
  CDR3 for alpha chain variable domain of TCR clone 45578 (TRAV1-2, TRAJ6)
CAVRSSGGSYIPTF

SEQ ID NO: 91156 - protein, 16 aa, Homo sapiens
  CDR3 for beta chain variable domain of TCR clone 45578 (TRBV7-3, TRBJ2-2)
CASSLKRGTLSGELFF

SEQ ID NO: 91157 - protein, 12 aa, Homo sapiens
  CDR3 for alpha chain variable domain of TCR clone 45579 (TRAV17, TRAJ4)
CATDGGYKKLIF

SEQ ID NO: 91158 - protein, 13 aa, Homo sapiens
  CDR3 for beta chain variable domain of TCR clone 45579 (TRBV29-1, TRBJ2-2)
CSTTGVNTGELFF

SEQ ID NO: 91159 - protein, 13 aa, Homo sapiens
  CDR3 for alpha chain variable domain of TCR clone 45580 (TRAV8-2, TRAJ43)
CVVSDQGDNDMRF

SEQ ID NO: 91160 - protein, 12 aa, Homo sapiens
  CDR3 for beta chain variable domain of TCR clone 45580 (TRBV7-9, TRBJ2-7)
CASRTGFDGQYF

SEQ ID NO: 91161 - protein, 13 aa, Homo sapiens
  CDR3 for alpha chain variable domain of TCR clone 45581 (TRAV12-2, TRAJ12)
CAVNWDSSYKLIF

SEQ ID NO: 91162 - protein, 14 aa, Homo sapiens
  CDR3 for beta chain variable domain of TCR clone 45581 (TRBV5-1, TRBJ2-1)
CASSQRDIYNEQFF

SEQ ID NO: 91163 - protein, 14 aa, Homo sapiens
  CDR3 for alpha chain variable domain of TCR clone 45582 (TRAV8-2, TRAJ4)
CVVSPSGGYNKLIF

SEQ ID NO: 91164 - protein, 15 aa, Homo sapiens
  CDR3 for beta chain variable domain of TCR clone 45582 (TRBV4-1, TRBJ1-4)
CASSDTGGTKEKLFF

SEQ ID NO: 91165 - protein, 18 aa, Homo sapiens
  CDR3 for alpha chain variable domain of TCR clone 45583 (TRAV12-3, TRAJ52)
CAMSRTNAVGTSYGKLTF

SEQ ID NO: 91166 - protein, 17 aa, Homo sapiens
  CDR3 for beta chain variable domain of TCR clone 45583 (TRBV7-3, TRBJ2-3)
CASSLMKRMRGADTQYF

SEQ ID NO: 91167 - protein, 14 aa, Homo sapiens
  CDR3 for alpha chain variable domain of TCR clone 45584 (TRAV1-2, TRAJ16)
CAVNRFSDGQKLLF

SEQ ID NO: 91168 - protein, 13 aa, Homo sapiens
  CDR3 for beta chain variable domain of TCR clone 45584 (TRBV6-5, TRBJ2-5)
CASSPQGGETQYF

SEQ ID NO: 91169 - protein, 12 aa, Homo sapiens
  CDR3 for alpha chain variable domain of TCR clone 45585 (TRAV12-3, TRAJ17)
CAMTLTGNKLTF

SEQ ID NO: 91170 - protein, 17 aa, Homo sapiens
  CDR3 for beta chain variable domain of TCR clone 45585 (TRBV7-9, TRBJ1-1)
CASSLGIAGAENTEAFF

SEQ ID NO: 91171 - protein, 13 aa, Homo sapiens
  CDR3 for alpha chain variable domain of TCR clone 45586 (TRAV21, TRAJ27)
CAARPGNAGKSTF

SEQ ID NO: 91172 - protein, 14 aa, Homo sapiens
  CDR3 for beta chain variable domain of TCR clone 45586 (TRBV11-2, TRBJ2-7)
CVSSLGAGAYEQYF

SEQ ID NO: 91173 - protein, 15 aa, Homo sapiens
  CDR3 for alpha chain variable domain of TCR clone 45587 (TRAV8-2, TRAJ40)
CVVLGTTSGTYKYIF

SEQ ID NO: 91174 - protein, 16 aa, Homo sapiens
  CDR3 for beta chain variable domain of TCR clone 45587 (TRBV7-3, TRBJ2-1)
CASSLEGYRSHNEQFF

SEQ ID NO: 91175 - protein, 18 aa, Homo sapiens
  CDR3 for alpha chain variable domain of TCR clone 45588 (TRAV21, TRAJ52)
CAVRPPPAGGTSYRKLTF

SEQ ID NO: 91176 - protein, 17 aa, Homo sapiens
  CDR3 for beta chain variable domain of TCR clone 45588 (TRBV13, TRBJ2-3)
CASSLSRVAGGRNTQYF

SEQ ID NO: 91177 - protein, 11 aa, Homo sapiens
  CDR3 for alpha chain variable domain of TCR clone 45589 (TRAV3, TRAJ21)
CAVGNFNKFYF

SEQ ID NO: 91178 - protein, 15 aa, Homo sapiens
  CDR3 for beta chain variable domain of TCR clone 45589 (TRBV19, TRBJ2-1)
CSSKAGPSSYNEQFF

SEQ ID NO: 91179 - protein, 10 aa, Homo sapiens
  CDR3 for alpha chain variable domain of TCR clone 45590 (TRAV16, TRAJ22)
SAMYLRRLTF

SEQ ID NO: 91180 - protein, 15 aa, Homo sapiens
  CDR3 for beta chain variable domain of TCR clone 45590 (TRBV7-9, TRBJ1-6)
CASSSPGRGNSPLHF

SEQ ID NO: 91181 - protein, 13 aa, Homo sapiens
  CDR3 for alpha chain variable domain of TCR clone 45591 (TRAV2, TRAJ12)
CAVGADGSYKLIF

SEQ ID NO: 91182 - protein, 13 aa, Homo sapiens
  CDR3 for beta chain variable domain of TCR clone 45591 (TRBV20-1, TRBJ2-1)
CSARSSPRDEQFF

SEQ ID NO: 91183 - protein, 16 aa, Homo sapiens
  CDR3 for alpha chain variable domain of TCR clone 45592 (TRAV12-3, TRAJ53)
CAMSPGSGGSNYKLTF

SEQ ID NO: 91184 - protein, 15 aa, Homo sapiens
  CDR3 for beta chain variable domain of TCR clone 45592 (TRBV20-1, TRBJ2-1)
CSARGIGGTYNEQFF

SEQ ID NO: 91185 - protein, 14 aa, Homo sapiens
  CDR3 for alpha chain variable domain of TCR clone 45593 (TRAV12-3, TRAJ10)
SHLPLTGGGNKLTF

SEQ ID NO: 91186 - protein, 15 aa, Homo sapiens
  CDR3 for beta chain variable domain of TCR clone 45593 (TRBV7-8, TRBJ2-2)
CASSETGQGTGELFF

SEQ ID NO: 91187 - protein, 15 aa, Homo sapiens
  CDR3 for alpha chain variable domain of TCR clone 45594 (TRAV23/DV6, TRAJ13)
CAAWPGGGGYQKVTF

SEQ ID NO: 91188 - protein, 17 aa, Homo sapiens
  CDR3 for beta chain variable domain of TCR clone 45594 (TRBV19, TRBJ2-7)
CASSTSFYDSYPYEQYF

SEQ ID NO: 91189 - protein, 17 aa, Homo sapiens
  CDR3 for alpha chain variable domain of TCR clone 45595 (TRAV3, TRAJ42)
CAVRDRDCGGSQGNLIF

SEQ ID NO: 91190 - protein, 15 aa, Homo sapiens
  CDR3 for beta chain variable domain of TCR clone 45595 (TRBV6-6, TRBJ2-7)
CASSYSYGGSYEQYF

SEQ ID NO: 91191 - protein, 14 aa, Homo sapiens
  CDR3 for alpha chain variable domain of TCR clone 45596 (TRAV16, TRAJ32)
CALKSGGATNKLIF

SEQ ID NO: 91192 - protein, 18 aa, Homo sapiens
  CDR3 for beta chain variable domain of TCR clone 45596 (TRBV2, TRBJ2-1)
CASRGLAGGPRTYNEQFF

SEQ ID NO: 91193 - protein, 15 aa, Homo sapiens
  CDR3 for alpha chain variable domain of TCR clone 45597 (TRAV8-3, TRAJ45)
CASSYSGGGANGLTF

SEQ ID NO: 91194 - protein, 11 aa, Homo sapiens
  CDR3 for beta chain variable domain of TCR clone 45597 (TRBV12-4, TRBJ2-3)
CASTATDTQYF

SEQ ID NO: 91195 - protein, 14 aa, Homo sapiens
  CDR3 for alpha chain variable domain of TCR clone 45598 (TRAV8-3, TRAJ9)
CAVVYNTGGFKTIF

SEQ ID NO: 91196 - protein, 14 aa, Homo sapiens
  CDR3 for beta chain variable domain of TCR clone 45598 (TRBV7-3, TRBJ2-2)
CARSSGGYTGELFF

SEQ ID NO: 91197 - protein, 13 aa, Homo sapiens
  CDR3 for alpha chain variable domain of TCR clone 45599 (TRAV13-1, TRAJ5)
CAASDTGRRALTF

SEQ ID NO: 91198 - protein, 12 aa, Homo sapiens
  CDR3 for beta chain variable domain of TCR clone 45599 (TRBV28, TRBJ2-3)
CASSLYRDTQCF

SEQ ID NO: 91199 - protein, 16 aa, Homo sapiens
  CDR3 for alpha chain variable domain of TCR clone 45600 (TRAV29/DV5, TRAJ54)
CAASDVLFGQGTRLTI

SEQ ID NO: 91200 - protein, 16 aa, Homo sapiens
  CDR3 for beta chain variable domain of TCR clone 45600 (TRBV7-8, TRBJ2-3)
CASSLDPAGAADTQYF

SEQ ID NO: 91201 - protein, 14 aa, Homo sapiens
  CDR3 for alpha chain variable domain of TCR clone 45601 (TRAV35, TRAJ13)
CAGSPSGGYQKVTF

SEQ ID NO: 91202 - protein, 15 aa, Homo sapiens
  CDR3 for beta chain variable domain of TCR clone 45601 (TRBV11-3, TRBJ2-3)
CASLKDGREGDTQYF

SEQ ID NO: 91203 - protein, 13 aa, Homo sapiens
  CDR3 for alpha chain variable domain of TCR clone 45602 (TRAV22, TRAJ29)
CAVGGSGNTPIVF

SEQ ID NO: 91204 - protein, 13 aa, Homo sapiens
  CDR3 for beta chain variable domain of TCR clone 45602 (TRBV4-2, TRBJ1-1)
CASSQAGNTEAFF

SEQ ID NO: 91205 - protein, 15 aa, Homo sapiens
  CDR3 for alpha chain variable domain of TCR clone 45603 (TRAV12-3, TRAJ27)
CTMRAYNTNAGKSTF

SEQ ID NO: 91206 - protein, 13 aa, Homo sapiens
  CDR3 for beta chain variable domain of TCR clone 45603 (TRBV11-2, TRBJ2-5)
CASSRGPSETQYF

SEQ ID NO: 91207 - protein, 17 aa, Homo sapiens
  CDR3 for alpha chain variable domain of TCR clone 45604 (TRAV12-2, TRAJ22)
CAVNRIPFSGSARQLTF

SEQ ID NO: 91208 - protein, 13 aa, Homo sapiens
  CDR3 for beta chain variable domain of TCR clone 45604 (TRBV11-3, TRBJ1-1)
CAGSSNRDTEAFF

SEQ ID NO: 91209 - protein, 13 aa, Homo sapiens
  CDR3 for alpha chain variable domain of TCR clone 45605 (TRAV1-2, TRAJ12)
CAVSMDSSYKLIF

SEQ ID NO: 91210 - protein, 15 aa, Homo sapiens
  CDR3 for beta chain variable domain of TCR clone 45605 (TRBV27, TRBJ2-5)
CASSLIPSGGDTQYF

SEQ ID NO: 91211 - protein, 15 aa, Homo sapiens
  CDR3 for alpha chain variable domain of TCR clone 45606 (TRAV19, TRAJ9)
CALSLPDTGGFKTIF

SEQ ID NO: 91212 - protein, 17 aa, Homo sapiens
  CDR3 for beta chain variable domain of TCR clone 45606 (TRBV20-1, TRBJ2-1)
CSARDPLAGVWDNEQFL

SEQ ID NO: 91213 - protein, 14 aa, Homo sapiens
  CDR3 for alpha chain variable domain of TCR clone 45607 (TRAV12-2, TRAJ17)
CAVLFKVAGNKLTF

SEQ ID NO: 91214 - protein, 17 aa, Homo sapiens
  CDR3 for beta chain variable domain of TCR clone 45607 (TRBV20-1, TRBJ2-2)
CSASGSGQGGLTGELFF

SEQ ID NO: 91215 - protein, 14 aa, Homo sapiens
  CDR3 for alpha chain variable domain of TCR clone 45608 (TRAV2, TRAJ9)
CAVEEGTGGFKTIF

SEQ ID NO: 91216 - protein, 17 aa, Homo sapiens
  CDR3 for beta chain variable domain of TCR clone 45608 (TRBV5-4, TRBJ2-1)
CASSSAGGRGPYNEQFF

SEQ ID NO: 91217 - protein, 12 aa, Homo sapiens
  CDR3 for alpha chain variable domain of TCR clone 45609 (TRAV20, TRAJ13)
CCVKRGYQKVTF

SEQ ID NO: 91218 - protein, 13 aa, Homo sapiens
  CDR3 for beta chain variable domain of TCR clone 45609 (TRBV12-5, TRBJ2-1)
CASGLGRGNEQLF

SEQ ID NO: 91219 - protein, 14 aa, Homo sapiens
  CDR3 for alpha chain variable domain of TCR clone 45610 (TRAV12-1, TRAJ12)
CVVNGRDNSYKLIF

SEQ ID NO: 91220 - protein, 13 aa, Homo sapiens
  CDR3 for beta chain variable domain of TCR clone 45610 (TRBV28, TRBJ2-2)
CASIRESTGELFF

SEQ ID NO: 91221 - protein, 13 aa, Homo sapiens
  CDR3 for alpha chain variable domain of TCR clone 45611 (TRAV2, TRAJ29)
CAAQNSGNTPLVF

SEQ ID NO: 91222 - protein, 16 aa, Homo sapiens
  CDR3 for beta chain variable domain of TCR clone 45611 (TRBV7-9, TRBJ2-4)
CASSLAMGVTFSNSAP

SEQ ID NO: 91223 - protein, 22 aa, Homo sapiens
  CDR3 for alpha chain variable domain of TCR clone 45612 (TRAV13-1, TRAJ32)
CAASNGWWCYKQAHLWNWHFAC

SEQ ID NO: 91224 - protein, 15 aa, Homo sapiens
  CDR3 for beta chain variable domain of TCR clone 45612 (TRBV18, TRBJ2-1)
CASSPPSASYNEQFF

SEQ ID NO: 91225 - protein, 16 aa, Homo sapiens
  CDR3 for alpha chain variable domain of TCR clone 45613 (TRAV23/DV6, TRAJ9)
CAAIIGGNTGGFKTIF

SEQ ID NO: 91226 - protein, 12 aa, Homo sapiens
  CDR3 for beta chain variable domain of TCR clone 45613 (TRBV11-2, TRBJ2-1)
CASSVQREGQFF

SEQ ID NO: 91227 - protein, 15 aa, Homo sapiens
  CDR3 for alpha chain variable domain of TCR clone 45614 (TRAV8-3, TRAJ45)
CASSYSGGGADGLTF

SEQ ID NO: 91228 - protein, 14 aa, Homo sapiens
  CDR3 for beta chain variable domain of TCR clone 45614 (TRBV4-1, TRBJ2-2)
CASSQAVNTGELFF

SEQ ID NO: 91229 - protein, 13 aa, Homo sapiens
  CDR3 for alpha chain variable domain of TCR clone 45615 (TRAV30, TRAJ9)
CATDYTGGFKTIF

SEQ ID NO: 91230 - protein, 14 aa, Homo sapiens
  CDR3 for beta chain variable domain of TCR clone 45615 (TRBV19, TRBJ2-5)
CASSMTGQQETQYF

SEQ ID NO: 91231 - protein, 17 aa, Homo sapiens
  CDR3 for alpha chain variable domain of TCR clone 45616 (TRAV26-1, TRAJ38)
CIVRPLNAGNNHIQNPD

SEQ ID NO: 91232 - protein, 13 aa, Homo sapiens
  CDR3 for beta chain variable domain of TCR clone 45616 (TRBV18, TRBJ1-1)
CASSPNGDTEAFF

SEQ ID NO: 91233 - protein, 15 aa, Homo sapiens
  CDR3 for alpha chain variable domain of TCR clone 45617 (TRAV17, TRAJ54)
CATTRSAQGAQKLVF

SEQ ID NO: 91234 - protein, 16 aa, Homo sapiens
  CDR3 for beta chain variable domain of TCR clone 45617 (TRBV12-4, TRBJ2-3)
CASSLRLAETTDTQYF

SEQ ID NO: 91235 - protein, 15 aa, Homo sapiens
  CDR3 for alpha chain variable domain of TCR clone 45618 (TRAV26-1, TRAJ29)
CIVRVEGSGNTPLVF

SEQ ID NO: 91236 - protein, 12 aa, Homo sapiens
  CDR3 for beta chain variable domain of TCR clone 45618 (TRBV14, TRBJ2-5)
CASSQLKETQYF

SEQ ID NO: 91237 - protein, 14 aa, Homo sapiens
  CDR3 for alpha chain variable domain of TCR clone 45619 (TRAV12-2, TRAJ44)
CAVNTAGTASKLTF

SEQ ID NO: 91238 - protein, 13 aa, Homo sapiens
  CDR3 for beta chain variable domain of TCR clone 45619 (TRBV20-1, TRBJ1-6)
CSAPLGVGSPLHF

SEQ ID NO: 91239 - protein, 15 aa, Homo sapiens
  CDR3 for alpha chain variable domain of TCR clone 45620 (TRAV12-2, TRAJ53)
CAVNGGGGSSYKLTF

SEQ ID NO: 91240 - protein, 13 aa, Homo sapiens
  CDR3 for beta chain variable domain of TCR clone 45620 (TRBV3-1, TRBJ1-1)
CASSPGVITEAFF

SEQ ID NO: 91241 - protein, 13 aa, Homo sapiens
  CDR3 for alpha chain variable domain of TCR clone 45621 (TRAV25, TRAJ10)
CAGHTGGGNKLTF

SEQ ID NO: 91242 - protein, 15 aa, Homo sapiens
  CDR3 for beta chain variable domain of TCR clone 45621 (TRBV19, TRBJ2-1)
CASSSPGVPLDEQFF

SEQ ID NO: 91243 - protein, 14 aa, Homo sapiens
  CDR3 for alpha chain variable domain of TCR clone 45622 (TRAV14/DV4, TRAJ20)
CAMREGYNDYKLSF

SEQ ID NO: 91244 - protein, 15 aa, Homo sapiens
  CDR3 for beta chain variable domain of TCR clone 45622 (TRBV28, TRBJ2-7)
CASSSISGGSYEQYF

SEQ ID NO: 91245 - protein, 12 aa, Homo sapiens
  CDR3 for alpha chain variable domain of TCR clone 45623 (TRAV36/DV7, TRAJ54)
CAVVRGAQKLEF

SEQ ID NO: 91246 - protein, 14 aa, Homo sapiens
  CDR3 for beta chain variable domain of TCR clone 45623 (TRBV7-3, TRBJ1-1)
CASSLKGGNTEAFF

SEQ ID NO: 91247 - protein, 16 aa, Homo sapiens
  CDR3 for alpha chain variable domain of TCR clone 45624 (TRAV8-2, TRAJ7)
CVVSEGPYYGNNRLAF

SEQ ID NO: 91248 - protein, 16 aa, Homo sapiens
  CDR3 for beta chain variable domain of TCR clone 45624 (TRBV12-4, TRBJ1-4)
CASSLKGIGHGEKLFF

SEQ ID NO: 91249 - protein, 10 aa, Homo sapiens
  CDR3 for alpha chain variable domain of TCR clone 45625 (TRAV20, TRAJ22)
CAAPARQLTF

SEQ ID NO: 91250 - protein, 14 aa, Homo sapiens
  CDR3 for beta chain variable domain of TCR clone 45625 (TRBV19, TRBJ2-1)
CASSMSSGATEQFF

SEQ ID NO: 91251 - protein, 14 aa, Homo sapiens
  CDR3 for alpha chain variable domain of TCR clone 45626 (TRAV13-2, TRAJ17)
CAENSKAAGNKLTF

SEQ ID NO: 91252 - protein, 14 aa, Homo sapiens
  CDR3 for beta chain variable domain of TCR clone 45626 (TRBV15, TRBJ2-3)
CATRSGTSTDTQYF

SEQ ID NO: 91253 - protein, 13 aa, Homo sapiens
  CDR3 for alpha chain variable domain of TCR clone 45627 (TRAV30, TRAJ39)
CGTENNAGNMLTF

SEQ ID NO: 91254 - protein, 14 aa, Homo sapiens
  CDR3 for beta chain variable domain of TCR clone 45627 (TRBV7-9, TRBJ2-1)
CASSPRDSLYEQFF

SEQ ID NO: 91255 - protein, 15 aa, Homo sapiens
  CDR3 for alpha chain variable domain of TCR clone 45628 (TRAV29/DV5, TRAJ24)
CAASGATDSWGKFQF

SEQ ID NO: 91256 - protein, 14 aa, Homo sapiens
  CDR3 for beta chain variable domain of TCR clone 45628 (TRBV19, TRBJ2-1)
CASPTFVLSGEQFF

SEQ ID NO: 91257 - protein, 18 aa, Homo sapiens
  CDR3 for alpha chain variable domain of TCR clone 45629 (TRAV21, TRAJ45)
CCGGPQGGSGGGADGLTF

SEQ ID NO: 91258 - protein, 17 aa, Homo sapiens
  CDR3 for beta chain variable domain of TCR clone 45629 (TRBV6-1, TRBJ2-7)
CASRWGPPGKAAYEQYF

SEQ ID NO: 91259 - protein, 14 aa, Homo sapiens
  CDR3 for alpha chain variable domain of TCR clone 45630 (TRAV1-2, TRAJ16)
CAVNRFSDGQKLLF

SEQ ID NO: 91260 - protein, 13 aa, Homo sapiens
  CDR3 for beta chain variable domain of TCR clone 45630 (TRBV7-9, TRBJ1-2)
CASSLKQNCGYTF

SEQ ID NO: 91261 - protein, 10 aa, Homo sapiens
  CDR3 for alpha chain variable domain of TCR clone 45631 (TRAV1-2, TRAJ20)
CACNDYKLSF

SEQ ID NO: 91262 - protein, 15 aa, Homo sapiens
  CDR3 for beta chain variable domain of TCR clone 45631 (TRBV7-2, TRBJ2-1)
CASSLASGRVNEQFF

SEQ ID NO: 91263 - protein, 18 aa, Homo sapiens
  CDR3 for alpha chain variable domain of TCR clone 45632 (TRAV13-1, TRAJ52)
CAAKNPNAGGTSYGKLTF

SEQ ID NO: 91264 - protein, 15 aa, Homo sapiens
  CDR3 for beta chain variable domain of TCR clone 45632 (TRBV6-1, TRBJ2-3)
CASSERDGITDTQYF

SEQ ID NO: 91265 - protein, 12 aa, Homo sapiens
  CDR3 for alpha chain variable domain of TCR clone 45633 (TRAV13-2, TRAJ41)
CAKNIGRYALNF

SEQ ID NO: 91266 - protein, 12 aa, Homo sapiens
  CDR3 for beta chain variable domain of TCR clone 45633 (TRBV7-9, TRBJ1-1)
RASSLSGGVAFF

SEQ ID NO: 91267 - protein, 14 aa, Homo sapiens
  CDR3 for alpha chain variable domain of TCR clone 45634 (TRAV13-2, TRAJ11)
CAETGNSGYSTLTF

SEQ ID NO: 91268 - protein, 11 aa, Homo sapiens
  CDR3 for beta chain variable domain of TCR clone 45634 (TRBV10-3, TRBJ2-7)
CAISEGLEQYL

SEQ ID NO: 91269 - protein, 15 aa, Homo sapiens
  CDR3 for alpha chain variable domain of TCR clone 45635 (TRAV12-3, TRAJ49)
CAMAVTPNSGNQFYF

SEQ ID NO: 91270 - protein, 14 aa, Homo sapiens
  CDR3 for beta chain variable domain of TCR clone 45635 (TRBV7-8, TRBJ2-3)
CASSLEAGTDTQYF

SEQ ID NO: 91271 - protein, 14 aa, Homo sapiens
  CDR3 for alpha chain variable domain of TCR clone 45636 (TRAV12-1, TRAJ12)
CVVTRMDSSYKLIF

SEQ ID NO: 91272 - protein, 15 aa, Homo sapiens
  CDR3 for beta chain variable domain of TCR clone 45636 (TRBV20-1, TRBJ1-1)
CSARGGGKLKLSLDK

SEQ ID NO: 91273 - protein, 14 aa, Homo sapiens
  CDR3 for alpha chain variable domain of TCR clone 45637 (TRAV4, TRAJ39)
CLGQAYNAGNMLTL

SEQ ID NO: 91274 - protein, 12 aa, Homo sapiens
  CDR3 for beta chain variable domain of TCR clone 45637 (TRBV12-4, TRBJ2-1)
CASSPGRNEQFF

SEQ ID NO: 91275 - protein, 14 aa, Homo sapiens
  CDR3 for alpha chain variable domain of TCR clone 45638 (TRAV26-2, TRAJ38)
CILYNAGNNRKPIW

SEQ ID NO: 91276 - protein, 14 aa, Homo sapiens
  CDR3 for beta chain variable domain of TCR clone 45638 (TRBV19, TRBJ2-1)
CASPTFVLSGEQFF

SEQ ID NO: 91277 - protein, 15 aa, Homo sapiens
  CDR3 for alpha chain variable domain of TCR clone 45639 (TRAV21, TRAJ40)
CAVRPQTSGTYKYIF

SEQ ID NO: 91278 - protein, 13 aa, Homo sapiens
  CDR3 for beta chain variable domain of TCR clone 45639 (TRBV28, TRBJ1-5)
CASSDRGNQPQHF

SEQ ID NO: 91279 - protein, 12 aa, Homo sapiens
  CDR3 for alpha chain variable domain of TCR clone 45640 (TRAV13-2, TRAJ23)
YAERHRGGKLIF

SEQ ID NO: 91280 - protein, 15 aa, Homo sapiens
  CDR3 for beta chain variable domain of TCR clone 45640 (TRBV15, TRBJ2-1)
CATSRPGQGLHEQLF

SEQ ID NO: 91281 - protein, 14 aa, Homo sapiens
  CDR3 for alpha chain variable domain of TCR clone 45641 (TRAV21, TRAJ35)
CAVMPIGFGNVLHC

SEQ ID NO: 91282 - protein, 12 aa, Homo sapiens
  CDR3 for beta chain variable domain of TCR clone 45641 (TRBV7-9, TRBJ2-7)
CANSIKREEQYF

SEQ ID NO: 91283 - protein, 13 aa, Homo sapiens
  CDR3 for alpha chain variable domain of TCR clone 45642 (TRAV12-3, TRAJ40)
CAMSDSGTYKYIF

SEQ ID NO: 91284 - protein, 14 aa, Homo sapiens
  CDR3 for beta chain variable domain of TCR clone 45642 (TRBV7-2, TRBJ1-5)
CASSTQGAGQAQHF

SEQ ID NO: 91285 - protein, 14 aa, Homo sapiens
  CDR3 for alpha chain variable domain of TCR clone 45643 (TRAV12-1, TRAJ17)
CVVNYKAAGSKLTF

SEQ ID NO: 91286 - protein, 14 aa, Homo sapiens
  CDR3 for beta chain variable domain of TCR clone 45643 (TRBV7-2, TRBJ2-7)
CASRSQGAAYEQYF

SEQ ID NO: 91287 - protein, 14 aa, Homo sapiens
  CDR3 for alpha chain variable domain of TCR clone 45644 (TRAV13-2, TRAJ26)
CAENLGSYGQNFVF

SEQ ID NO: 91288 - protein, 14 aa, Homo sapiens
  CDR3 for beta chain variable domain of TCR clone 45644 (TRBV19, TRBJ1-3)
CASNRGNSGNTIYF

SEQ ID NO: 91289 - protein, 16 aa, Homo sapiens
  CDR3 for alpha chain variable domain of TCR clone 45645 (TRAV16, TRAJ57)
CAPYLITQGESEKLVF

SEQ ID NO: 91290 - protein, 17 aa, Homo sapiens
  CDR3 for beta chain variable domain of TCR clone 45645 (TRBV24-1, TRBJ2-4)
CATSDAEARGVRNIQYF

SEQ ID NO: 91291 - protein, 16 aa, Homo sapiens
  CDR3 for alpha chain variable domain of TCR clone 45646 (TRAV12-1, TRAJ43)
CVVNPHRFGAGTRLTG

SEQ ID NO: 91292 - protein, 16 aa, Homo sapiens
  CDR3 for beta chain variable domain of TCR clone 45646 (TRBV27, TRBJ2-2)
CASSSTGGGDTGELFF

SEQ ID NO: 91293 - protein, 14 aa, Homo sapiens
  CDR3 for alpha chain variable domain of TCR clone 45647 (TRAV26-1, TRAJ45)
CIEVTGGGADGVTF

SEQ ID NO: 91294 - protein, 13 aa, Homo sapiens
  CDR3 for beta chain variable domain of TCR clone 45647 (TRBV7-6, TRBJ1-2)
CASSLVADYGYTF

SEQ ID NO: 91295 - protein, 14 aa, Homo sapiens
  CDR3 for alpha chain variable domain of TCR clone 45648 (TRAV12-3, TRAJ57)
CAMSAWGGSEKLVF

SEQ ID NO: 91296 - protein, 15 aa, Homo sapiens
  CDR3 for beta chain variable domain of TCR clone 45648 (TRBV9, TRBJ1-6)
CASSVAGTGDSPLHF

SEQ ID NO: 91297 - protein, 18 aa, Homo sapiens
  CDR3 for alpha chain variable domain of TCR clone 45649 (TRAV13-1, TRAJ52)
CAAKNPNAGGTSYGKLTF

SEQ ID NO: 91298 - protein, 15 aa, Homo sapiens
  CDR3 for beta chain variable domain of TCR clone 45649 (TRBV7-9, TRBJ1-5)
CASSQGHQPNQPQHF

SEQ ID NO: 91299 - protein, 12 aa, Homo sapiens
  CDR3 for alpha chain variable domain of TCR clone 45650 (TRAV8-4, TRAJ20)
CAVSDDDYKLSF

SEQ ID NO: 91300 - protein, 17 aa, Homo sapiens
  CDR3 for beta chain variable domain of TCR clone 45650 (TRBV12-4, TRBJ1-5)
CASSRHQAGGVNQHQHF

SEQ ID NO: 91301 - protein, 14 aa, Homo sapiens
  CDR3 for alpha chain variable domain of TCR clone 45651 (TRAV26-1, TRAJ39)
CIVRGSRAGNMLTF

SEQ ID NO: 91302 - protein, 15 aa, Homo sapiens
  CDR3 for beta chain variable domain of TCR clone 45651 (TRBV7-9, TRBJ1-5)
CANSQGHQPNQPQHF

SEQ ID NO: 91303 - protein, 14 aa, Homo sapiens
  CDR3 for alpha chain variable domain of TCR clone 45652 (TRAV12-2, TRAJ13)
CAVKKTGGYQKVTF

SEQ ID NO: 91304 - protein, 15 aa, Homo sapiens
  CDR3 for beta chain variable domain of TCR clone 45652 (TRBV28, TRBJ2-5)
CASSPPWLYQETQYF

SEQ ID NO: 91305 - protein, 12 aa, Homo sapiens
  CDR3 for alpha chain variable domain of TCR clone 45653 (TRAV21, TRAJ23)
CAVMLQGGKLIF

SEQ ID NO: 91306 - protein, 14 aa, Homo sapiens
  CDR3 for beta chain variable domain of TCR clone 45653 (TRBV7-9, TRBJ1-4)
CAITEGEANDKLFF

SEQ ID NO: 91307 - protein, 13 aa, Homo sapiens
  CDR3 for alpha chain variable domain of TCR clone 45654 (TRAV36/DV7, TRAJ54)
CAVDIQGAQKLVF

SEQ ID NO: 91308 - protein, 16 aa, Homo sapiens
  CDR3 for beta chain variable domain of TCR clone 45654 (TRBV12-4, TRBJ1-5)
CASSRPVGGSNQPQHF

SEQ ID NO: 91309 - protein, 13 aa, Homo sapiens
  CDR3 for alpha chain variable domain of TCR clone 45655 (TRAV2, TRAJ40)
CAVVTSVTYKYIF

SEQ ID NO: 91310 - protein, 14 aa, Homo sapiens
  CDR3 for beta chain variable domain of TCR clone 45655 (TRBV11-3, TRBJ1-6)
CASSFSGGDSPLHF

SEQ ID NO: 91311 - protein, 11 aa, Homo sapiens
  CDR3 for alpha chain variable domain of TCR clone 45656 (TRAV8-4, TRAJ20)
CAVTNVLTTTS

SEQ ID NO: 91312 - protein, 16 aa, Homo sapiens
  CDR3 for beta chain variable domain of TCR clone 45656 (TRBV6-1, TRBJ1-2)
CASSRAWQGRSHGYTF

SEQ ID NO: 91313 - protein, 12 aa, Homo sapiens
  CDR3 for alpha chain variable domain of TCR clone 45657 (TRAV16, TRAJ12)
FAHGDSSYKLIF

SEQ ID NO: 91314 - protein, 12 aa, Homo sapiens
  CDR3 for beta chain variable domain of TCR clone 45657 (TRBV28, TRBJ2-1)
CASSRLVGEQFF

SEQ ID NO: 91315 - protein, 12 aa, Homo sapiens
  CDR3 for alpha chain variable domain of TCR clone 45658 (TRAV35, TRAJ39)
LAPNNAGNMPTF

SEQ ID NO: 91316 - protein, 16 aa, Homo sapiens
  CDR3 for beta chain variable domain of TCR clone 45658 (TRBV2, TRBJ2-3)
CASSTSVEGVTDTQYF

SEQ ID NO: 91317 - protein, 10 aa, Homo sapiens
  CDR3 for alpha chain variable domain of TCR clone 45659 (TRAV13-1, TRAJ43)
CAASKNDMRF

SEQ ID NO: 91318 - protein, 13 aa, Homo sapiens
  CDR3 for beta chain variable domain of TCR clone 45659 (TRBV20-1, TRBJ1-5)
CSARTGVNQPQNF

SEQ ID NO: 91319 - protein, 11 aa, Homo sapiens
  CDR3 for alpha chain variable domain of TCR clone 45660 (TRAV1-2, TRAJ20)
CAVANDYKLSF

SEQ ID NO: 91320 - protein, 18 aa, Homo sapiens
  CDR3 for beta chain variable domain of TCR clone 45660 (TRBV20-1, TRBJ2-6)
CIAETTPTHGSGANVLTF

SEQ ID NO: 91321 - protein, 13 aa, Homo sapiens
  CDR3 for alpha chain variable domain of TCR clone 45661 (TRAV8-6, TRAJ49)
CAVITNTGNQFYF

SEQ ID NO: 91322 - protein, 14 aa, Homo sapiens
  CDR3 for beta chain variable domain of TCR clone 45661 (TRBV5-1, TRBJ2-7)
CASSRGESSYEQYF

SEQ ID NO: 91323 - protein, 15 aa, Homo sapiens
  CDR3 for alpha chain variable domain of TCR clone 45662 (TRAV17, TRAJ57)
CATGPSQGGSEKLVI

SEQ ID NO: 91324 - protein, 16 aa, Homo sapiens
  CDR3 for beta chain variable domain of TCR clone 45662 (TRBV12-4, TRBJ1-5)
CASSRPVGGSNQPQHF

SEQ ID NO: 91325 - protein, 11 aa, Homo sapiens
  CDR3 for alpha chain variable domain of TCR clone 45663 (TRAV12-1, TRAJ30)
CVVNGQDKIIF

SEQ ID NO: 91326 - protein, 14 aa, Homo sapiens
  CDR3 for beta chain variable domain of TCR clone 45663 (TRBV20-1, TRBJ2-1)
CSAQIGGSANEQFF

SEQ ID NO: 91327 - protein, 16 aa, Homo sapiens
  CDR3 for alpha chain variable domain of TCR clone 45664 (TRAV20, TRAJ22)
CAAQASSSGSARQLTF

SEQ ID NO: 91328 - protein, 13 aa, Homo sapiens
  CDR3 for beta chain variable domain of TCR clone 45664 (TRBV7-2, TRBJ2-5)
CASSQTSVETQYF

SEQ ID NO: 91329 - protein, 16 aa, Homo sapiens
  CDR3 for alpha chain variable domain of TCR clone 45665 (TRAV27, TRAJ53)
CAAPEGGGGSNYKLTF

SEQ ID NO: 91330 - protein, 14 aa, Homo sapiens
  CDR3 for beta chain variable domain of TCR clone 45665 (TRBV4-3, TRBJ1-5)
CASSQGGQGWPQHF

SEQ ID NO: 91331 - protein, 14 aa, Homo sapiens
  CDR3 for alpha chain variable domain of TCR clone 45666 (TRAV17, TRAJ22)
CATSPSGSARQLTF

SEQ ID NO: 91332 - protein, 18 aa, Homo sapiens
  CDR3 for beta chain variable domain of TCR clone 45666 (TRBV11-2, TRBJ2-3)
CASSLGGASRGAPNTQYF

SEQ ID NO: 91333 - protein, 11 aa, Homo sapiens
  CDR3 for alpha chain variable domain of TCR clone 45667 (TRAV16, TRAJ33)
CALHSNYQLIW

SEQ ID NO: 91334 - protein, 15 aa, Homo sapiens
  CDR3 for beta chain variable domain of TCR clone 45667 (TRBV4-1, TRBJ2-7)
CASSQQGQGFDEQYS

SEQ ID NO: 91335 - protein, 15 aa, Homo sapiens
  CDR3 for alpha chain variable domain of TCR clone 45668 (TRAV2, TRAJ15)
CAVEDRGQAGTALIF

SEQ ID NO: 91336 - protein, 13 aa, Homo sapiens
  CDR3 for beta chain variable domain of TCR clone 45668 (TRBV10-2, TRBJ2-7)
CASGASGGYEQYI

SEQ ID NO: 91337 - protein, 13 aa, Homo sapiens
  CDR3 for alpha chain variable domain of TCR clone 45669 (TRAV22, TRAJ29)
CAVGGSGNTPLVF

SEQ ID NO: 91338 - protein, 15 aa, Homo sapiens
  CDR3 for beta chain variable domain of TCR clone 45669 (TRBV4-2, TRBJ2-1)
CASSQDVGLAGEQFF

SEQ ID NO: 91339 - protein, 13 aa, Homo sapiens
  CDR3 for alpha chain variable domain of TCR clone 45670 (TRAV27, TRAJ49)
CAPRPYTGNQYYF

SEQ ID NO: 91340 - protein, 16 aa, Homo sapiens
  CDR3 for beta chain variable domain of TCR clone 45670 (TRBV4-1, TRBJ1-2)
CASSQDAGQVLYGYTF

SEQ ID NO: 91341 - protein, 14 aa, Homo sapiens
  CDR3 for alpha chain variable domain of TCR clone 45671 (TRAV12-3, TRAJ42)
CAMNYGGRQGNLIF

SEQ ID NO: 91342 - protein, 15 aa, Homo sapiens
  CDR3 for beta chain variable domain of TCR clone 45671 (TRBV5-7, TRBJ1-5)
CASSYGKLWDQPQHF

SEQ ID NO: 91343 - protein, 17 aa, Homo sapiens
  CDR3 for alpha chain variable domain of TCR clone 45672 (TRAV13-1, TRAJ52)
CAAGRNAGGTSYGNLTF

SEQ ID NO: 91344 - protein, 13 aa, Homo sapiens
  CDR3 for beta chain variable domain of TCR clone 45672 (TRBV7-2, TRBJ1-1)
CASNLKGAKVAFF

SEQ ID NO: 91345 - protein, 13 aa, Homo sapiens
  CDR3 for alpha chain variable domain of TCR clone 45673 (TRAV8-6, TRAJ54)
CAVSEEGAQKLVF

SEQ ID NO: 91346 - protein, 15 aa, Homo sapiens
  CDR3 for beta chain variable domain of TCR clone 45673 (TRBV27, TRBJ2-5)
CASSLYPRGGETRYF

SEQ ID NO: 91347 - protein, 15 aa, Homo sapiens
  CDR3 for alpha chain variable domain of TCR clone 45674 (TRAV8-3, TRAJ11)
CAVGLLNSGYSTLTS

SEQ ID NO: 91348 - protein, 23 aa, Homo sapiens
  CDR3 for beta chain variable domain of TCR clone 45674 (TRBV7-9, TRBJ1-2)
EAQLEKSRLLSDRFSSGEDGYTF

SEQ ID NO: 91349 - protein, 14 aa, Homo sapiens
  CDR3 for alpha chain variable domain of TCR clone 45675 (TRAV12-3, TRAJ10)
SHLPLTGGGSKLTF

SEQ ID NO: 91350 - protein, 13 aa, Homo sapiens
  CDR3 for beta chain variable domain of TCR clone 45675 (TRBV20-1, TRBJ2-1)
TSGALPPGNEQFF

SEQ ID NO: 91351 - protein, 15 aa, Homo sapiens
  CDR3 for alpha chain variable domain of TCR clone 45676 (TRAV13-1, TRAJ52)
SYYNAGGTSYGKLTF

SEQ ID NO: 91352 - protein, 11 aa, Homo sapiens
  CDR3 for beta chain variable domain of TCR clone 45676 (TRBV6-1, TRBJ2-1)
CASISSNEQFF

SEQ ID NO: 91353 - protein, 15 aa, Homo sapiens
  CDR3 for alpha chain variable domain of TCR clone 45677 (TRAV26-1, TRAJ44)
CIVRANTGTASKLTF

SEQ ID NO: 91354 - protein, 16 aa, Homo sapiens
  CDR3 for beta chain variable domain of TCR clone 45677 (TRBV7-7, TRBJ2-1)
CASSLASGSSYNEQFF

SEQ ID NO: 91355 - protein, 11 aa, Homo sapiens
  CDR3 for alpha chain variable domain of TCR clone 45678 (TRAV12-3, TRAJ27)
CAMANAGKSTF

SEQ ID NO: 91356 - protein, 13 aa, Homo sapiens
  CDR3 for beta chain variable domain of TCR clone 45678 (TRBV20-1, TRBJ1-1)
CSARVGGNTEDFF

SEQ ID NO: 91357 - protein, 17 aa, Homo sapiens
  CDR3 for alpha chain variable domain of TCR clone 45679 (TRAV27, TRAJ26)
CAGARAPLDNYGQNFVF

SEQ ID NO: 91358 - protein, 15 aa, Homo sapiens
  CDR3 for beta chain variable domain of TCR clone 45679 (TRBV11-2, TRBJ2-5)
CASSPRSGGLENQYF

SEQ ID NO: 91359 - protein, 15 aa, Homo sapiens
  CDR3 for alpha chain variable domain of TCR clone 45680 (TRAV17, TRAJ57)
CATGPSQGGSEKLVF

SEQ ID NO: 91360 - protein, 14 aa, Homo sapiens
  CDR3 for beta chain variable domain of TCR clone 45680 (TRBV7-9, TRBJ2-1)
CASSPRDSLYEQFF

SEQ ID NO: 91361 - protein, 14 aa, Homo sapiens
  CDR3 for alpha chain variable domain of TCR clone 45681 (TRAV4, TRAJ26)
CLVGPHNYGQTFVF

SEQ ID NO: 91362 - protein, 17 aa, Homo sapiens
  CDR3 for beta chain variable domain of TCR clone 45681 (TRBV24-1, TRBJ2-1)
CATSDVSTSGTYNEQFF

SEQ ID NO: 91363 - protein, 12 aa, Homo sapiens
  CDR3 for alpha chain variable domain of TCR clone 45682 (TRAV12-1, TRAJ40)
CVVYSGTYKYIF

SEQ ID NO: 91364 - protein, 18 aa, Homo sapiens
  CDR3 for beta chain variable domain of TCR clone 45682 (TRBV11-2, TRBJ2-3)
CASSLGGASRGAPNMQYF

SEQ ID NO: 91365 - protein, 13 aa, Homo sapiens
  CDR3 for alpha chain variable domain of TCR clone 45683 (TRAV27, TRAJ41)
CAGEGNSGYALNF

SEQ ID NO: 91366 - protein, 14 aa, Homo sapiens
  CDR3 for beta chain variable domain of TCR clone 45683 (TRBV7-2, TRBJ1-1)
CDSSFLTGTTEAFF

SEQ ID NO: 91367 - protein, 14 aa, Homo sapiens
  CDR3 for alpha chain variable domain of TCR clone 45684 (TRAV12-2, TRAJ17)
CAVLFKAAGNKLTF

SEQ ID NO: 91368 - protein, 16 aa, Homo sapiens
  CDR3 for beta chain variable domain of TCR clone 45684 (TRBV12-5, TRBJ2-5)
CASGPRTSGNQETQYF

SEQ ID NO: 91369 - protein, 13 aa, Homo sapiens
  CDR3 for alpha chain variable domain of TCR clone 45685 (TRAV13-1, TRAJ39)
CSKNSNAGNMLTF

SEQ ID NO: 91370 - protein, 16 aa, Homo sapiens
  CDR3 for beta chain variable domain of TCR clone 45685 (TRBV20-1, TRBJ1-4)
CSAPGQGLLTNEKLFF

SEQ ID NO: 91371 - protein, 13 aa, Homo sapiens
  CDR3 for alpha chain variable domain of TCR clone 45686 (TRAV12-1, TRAJ16)
CVVNTRNGQKLLS

SEQ ID NO: 91372 - protein, 19 aa, Homo sapiens
  CDR3 for beta chain variable domain of TCR clone 45686 (TRBV6-1, TRBJ2-5)
CASSRFGAGGPGLEETQYF

SEQ ID NO: 91373 - protein, 12 aa, Homo sapiens
  CDR3 for alpha chain variable domain of TCR clone 45687 (TRAV29/DV5, TRAJ49)
CAATDTGNQCYF

SEQ ID NO: 91374 - protein, 12 aa, Homo sapiens
  CDR3 for beta chain variable domain of TCR clone 45687 (TRBV12-4, TRBJ2-7)
CASSLGGYEQYF

SEQ ID NO: 91375 - protein, 12 aa, Homo sapiens
  CDR3 for alpha chain variable domain of TCR clone 45688 (TRAV1-1, TRAJ39)
CAVPVVGNMLTF

SEQ ID NO: 91376 - protein, 18 aa, Homo sapiens
  CDR3 for beta chain variable domain of TCR clone 45688 (TRBV7-9, TRBJ2-7)
CASSLTASGSRTWYEQYF

SEQ ID NO: 91377 - protein, 14 aa, Homo sapiens
  CDR3 for alpha chain variable domain of TCR clone 45689 (TRAV35, TRAJ24)
CAGPRRDSWGKLQF

SEQ ID NO: 91378 - protein, 12 aa, Homo sapiens
  CDR3 for beta chain variable domain of TCR clone 45689 (TRBV12-4, TRBJ2-3)
CASSLGRDTQYF

SEQ ID NO: 91379 - protein, 13 aa, Homo sapiens
  CDR3 for alpha chain variable domain of TCR clone 45690 (TRAV1-2, TRAJ9)
CAVLNTGGFKTIF

SEQ ID NO: 91380 - protein, 14 aa, Homo sapiens
  CDR3 for beta chain variable domain of TCR clone 45690 (TRBV20-1, TRBJ2-3)
CSSRGGTSTDTQYF

SEQ ID NO: 91381 - protein, 16 aa, Homo sapiens
  CDR3 for alpha chain variable domain of TCR clone 45691 (TRAV20, TRAJ53)
CAVQAESGGSNYKLTF

SEQ ID NO: 91382 - protein, 14 aa, Homo sapiens
  CDR3 for beta chain variable domain of TCR clone 45691 (TRBV27, TRBJ2-5)
CASSRTFLVDTRYF

SEQ ID NO: 91383 - protein, 12 aa, Homo sapiens
  CDR3 for alpha chain variable domain of TCR clone 45692 (TRAV10, TRAJ43)
CVVVRVGNDMRF

SEQ ID NO: 91384 - protein, 15 aa, Homo sapiens
  CDR3 for beta chain variable domain of TCR clone 45692 (TRBV2, TRBJ2-7)
CASSEGLTRSYEQYF

SEQ ID NO: 91385 - protein, 17 aa, Homo sapiens
  CDR3 for alpha chain variable domain of TCR clone 45693 (TRAV2, TRAJ36)
CAVEDRGNWGKQPLLWD

SEQ ID NO: 91386 - protein, 14 aa, Homo sapiens
  CDR3 for beta chain variable domain of TCR clone 45693 (TRBV7-9, TRBJ2-5)
CASSLDTAQETQYL

SEQ ID NO: 91387 - protein, 16 aa, Homo sapiens
  CDR3 for alpha chain variable domain of TCR clone 45694 (TRAV13-1, TRAJ37)
CAASSLGSSNAGKLIF

SEQ ID NO: 91388 - protein, 12 aa, Homo sapiens
  CDR3 for beta chain variable domain of TCR clone 45694 (TRBV6-1, TRBJ2-5)
CASSEGRETQYF

SEQ ID NO: 91389 - protein, 12 aa, Homo sapiens
  CDR3 for alpha chain variable domain of TCR clone 45695 (TRAV3, TRAJ31)
CAVRDGNARLML

SEQ ID NO: 91390 - protein, 18 aa, Homo sapiens
  CDR3 for beta chain variable domain of TCR clone 45695 (TRBV7-2, TRBJ2-3)
CASSLKREGSGITDTQYF

SEQ ID NO: 91391 - protein, 15 aa, Homo sapiens
  CDR3 for alpha chain variable domain of TCR clone 45696 (TRAV38-1, TRAJ57)
CAFMDSQGGSEKLVV

SEQ ID NO: 91392 - protein, 16 aa, Homo sapiens
  CDR3 for beta chain variable domain of TCR clone 45696 (TRBV10-3, TRBJ2-1)
CAIRGGGRGDYNEQFF

SEQ ID NO: 91393 - protein, 14 aa, Homo sapiens
  CDR3 for alpha chain variable domain of TCR clone 45697 (TRAV9-2, TRAJ39)
CALYIYNAGNMLTF

SEQ ID NO: 91394 - protein, 13 aa, Homo sapiens
  CDR3 for beta chain variable domain of TCR clone 45697 (TRBV11-2, TRBJ2-1)
CASSLDLVNEQFF

SEQ ID NO: 91395 - protein, 14 aa, Homo sapiens
  CDR3 for alpha chain variable domain of TCR clone 45698 (TRAV38-1, TRAJ43)
CAFMKHNNNNDMRF

SEQ ID NO: 91396 - protein, 12 aa, Homo sapiens
  CDR3 for beta chain variable domain of TCR clone 45698 (TRBV11-2, TRBJ2-2)
CASSLGGGELFF

SEQ ID NO: 91397 - protein, 16 aa, Homo sapiens
  CDR3 for alpha chain variable domain of TCR clone 45699 (TRAV3, TRAJ10)
CAVRDVRAGGGNKLTF

SEQ ID NO: 91398 - protein, 17 aa, Homo sapiens
  CDR3 for beta chain variable domain of TCR clone 45699 (TRBV28, TRBJ2-5)
CASSTPEGDALQETQYF

SEQ ID NO: 91399 - protein, 11 aa, Homo sapiens
  CDR3 for alpha chain variable domain of TCR clone 45700 (TRAV21, TRAJ11)
CAENGYSTLTF

SEQ ID NO: 91400 - protein, 11 aa, Homo sapiens
  CDR3 for beta chain variable domain of TCR clone 45700 (TRBV19, TRBJ1-1)
CASSIGSEAFF

SEQ ID NO: 91401 - protein, 13 aa, Homo sapiens
  CDR3 for alpha chain variable domain of TCR clone 45701 (TRAV2, TRAJ40)
CAVVTSGTYKYIF

SEQ ID NO: 91402 - protein, 16 aa, Homo sapiens
  CDR3 for beta chain variable domain of TCR clone 45701 (TRBV4-2, TRBJ2-3)
CASSQELAGDTDTQYF

SEQ ID NO: 91403 - protein, 14 aa, Homo sapiens
  CDR3 for alpha chain variable domain of TCR clone 45702 (TRAV8-2, TRAJ11)
CVVSEKSGYSTLTF

SEQ ID NO: 91404 - protein, 16 aa, Homo sapiens
  CDR3 for beta chain variable domain of TCR clone 45702 (TRBV28, TRBJ2-1)
CASSPPEYPRDNEQFF

SEQ ID NO: 91405 - protein, 13 aa, Homo sapiens
  CDR3 for alpha chain variable domain of TCR clone 45703 (TRAV21, TRAJ36)
CAVIKTGANNLFF

SEQ ID NO: 91406 - protein, 11 aa, Homo sapiens
  CDR3 for beta chain variable domain of TCR clone 45703 (TRBV6-1, TRBJ2-1)
CASISSNEQFF

SEQ ID NO: 91407 - protein, 11 aa, Homo sapiens
  CDR3 for alpha chain variable domain of TCR clone 45704 (TRAV21, TRAJ48)
CAVDGTEKLTF

SEQ ID NO: 91408 - protein, 16 aa, Homo sapiens
  CDR3 for beta chain variable domain of TCR clone 45704 (TRBV12-4, TRBJ1-5)
CASSSGPRGSNQPQHF

SEQ ID NO: 91409 - protein, 12 aa, Homo sapiens
  CDR3 for alpha chain variable domain of TCR clone 45705 (TRAV10, TRAJ34)
CVVSGKHRQAHL

SEQ ID NO: 91410 - protein, 14 aa, Homo sapiens
  CDR3 for beta chain variable domain of TCR clone 45705 (TRBV19, TRBJ2-1)
CAGPTFALSGEQFF

SEQ ID NO: 91411 - protein, 11 aa, Homo sapiens
  CDR3 for alpha chain variable domain of TCR clone 45706 (TRAV1-2, TRAJ31)
CAVDNNARLMF

SEQ ID NO: 91412 - protein, 18 aa, Homo sapiens
  CDR3 for beta chain variable domain of TCR clone 45706 (TRBV25-1, TRBJ1-2)
CASSGLQNGQGLIFGYTF

SEQ ID NO: 91413 - protein, 18 aa, Homo sapiens
  CDR3 for alpha chain variable domain of TCR clone 45707 (TRAV26-1, TRAJ23)
FIVRVGLEVWNQGGKLIF

SEQ ID NO: 91414 - protein, 16 aa, Homo sapiens
  CDR3 for beta chain variable domain of TCR clone 45707 (TRBV12-4, TRBJ2-5)
CASSFFVRGRQETQYF

SEQ ID NO: 91415 - protein, 13 aa, Homo sapiens
  CDR3 for alpha chain variable domain of TCR clone 45708 (TRAV2, TRAJ21)
CAVEDLNFNKFYF

SEQ ID NO: 91416 - protein, 15 aa, Homo sapiens
  CDR3 for beta chain variable domain of TCR clone 45708 (TRBV6-5, TRBJ2-1)
CASSYDAGAGNEQFF

SEQ ID NO: 91417 - protein, 14 aa, Homo sapiens
  CDR3 for alpha chain variable domain of TCR clone 45709 (TRAV1-2, TRAJ16)
CAVNRFSDGQKLLF

SEQ ID NO: 91418 - protein, 11 aa, Homo sapiens
  CDR3 for beta chain variable domain of TCR clone 45709 (TRBV29-1, TRBJ2-5)
CSEDRTGAQYF

SEQ ID NO: 91419 - protein, 11 aa, Homo sapiens
  CDR3 for alpha chain variable domain of TCR clone 45710 (TRAV12-1, TRAJ30)
CVVNGQDKIIF

SEQ ID NO: 91420 - protein, 13 aa, Homo sapiens
  CDR3 for beta chain variable domain of TCR clone 45710 (TRBV19, TRBJ1-2)
CASSVPGQDGYTF

SEQ ID NO: 91421 - protein, 16 aa, Homo sapiens
  CDR3 for alpha chain variable domain of TCR clone 45711 (TRAV30, TRAJ24)
CGTEIVDADSWGKFPF

SEQ ID NO: 91422 - protein, 13 aa, Homo sapiens
  CDR3 for beta chain variable domain of TCR clone 45711 (TRBV11-2, TRBJ2-5)
CASSSTGEETQYF

SEQ ID NO: 91423 - protein, 14 aa, Homo sapiens
  CDR3 for alpha chain variable domain of TCR clone 45712 (TRAV35, TRAJ13)
CAGSPSGDYQKVTF

SEQ ID NO: 91424 - protein, 13 aa, Homo sapiens
  CDR3 for beta chain variable domain of TCR clone 45712 (TRBV29-1, TRBJ1-1)
CSVGDSRNTEAFF

SEQ ID NO: 91425 - protein, 14 aa, Homo sapiens
  CDR3 for alpha chain variable domain of TCR clone 45713 (TRAV2, TRAJ9)
CAVEDRSGGFKTIF

SEQ ID NO: 91426 - protein, 15 aa, Homo sapiens
  CDR3 for beta chain variable domain of TCR clone 45713 (TRBV5-1, TRBJ2-2)
CASSSQGGNTGELFF

SEQ ID NO: 91427 - protein, 13 aa, Homo sapiens
  CDR3 for alpha chain variable domain of TCR clone 45714 (TRAV8-3, TRAJ28)
CAVGAVGSYQLTF

SEQ ID NO: 91428 - protein, 12 aa, Homo sapiens
  CDR3 for beta chain variable domain of TCR clone 45714 (TRBV7-8, TRBJ2-7)
CASSLGDREQYF

SEQ ID NO: 91429 - protein, 14 aa, Homo sapiens
  CDR3 for alpha chain variable domain of TCR clone 45715 (TRAV12-2, TRAJ17)
CAVLFKAAGNKLTF

SEQ ID NO: 91430 - protein, 14 aa, Homo sapiens
  CDR3 for beta chain variable domain of TCR clone 45715 (TRBV12-4, TRBJ1-1)
CASSLGTGGTEAFF

SEQ ID NO: 91431 - protein, 13 aa, Homo sapiens
  CDR3 for alpha chain variable domain of TCR clone 45716 (TRAV12-2, TRAJ30)
CAVNLNRDDKIIF

SEQ ID NO: 91432 - protein, 14 aa, Homo sapiens
  CDR3 for beta chain variable domain of TCR clone 45716 (TRBV7-8, TRBJ1-2)
CASSLGRASYEQYF

SEQ ID NO: 91433 - protein, 13 aa, Homo sapiens
  CDR3 for alpha chain variable domain of TCR clone 45717 (TRAV13-1, TRAJ21)
CAASIHNFNKFYF

SEQ ID NO: 91434 - protein, 13 aa, Homo sapiens
  CDR3 for beta chain variable domain of TCR clone 45717 (TRBV27, TRBJ1-4)
CASSLMGDEKLFF

SEQ ID NO: 91435 - protein, 15 aa, Homo sapiens
  CDR3 for alpha chain variable domain of TCR clone 45718 (TRAV26-1, TRAJ40)
CIVRGTTSGTYKYIF

SEQ ID NO: 91436 - protein, 12 aa, Homo sapiens
  CDR3 for beta chain variable domain of TCR clone 45718 (TRBV7-9, TRBJ1-4)
CASSTDREKLFF

SEQ ID NO: 91437 - protein, 16 aa, Homo sapiens
  CDR3 for alpha chain variable domain of TCR clone 45719 (TRAV4, TRAJ9)
CLVGDPNRPGGFKTIL

SEQ ID NO: 91438 - protein, 16 aa, Homo sapiens
  CDR3 for beta chain variable domain of TCR clone 45719 (TRBV28, TRBJ1-4)
CASSPPYRGRSEKLFF

SEQ ID NO: 91439 - protein, 14 aa, Homo sapiens
  CDR3 for alpha chain variable domain of TCR clone 45720 (TRAV26-1, TRAJ26)
CVVRATFLGQNFVF

SEQ ID NO: 91440 - protein, 16 aa, Homo sapiens
  CDR3 for beta chain variable domain of TCR clone 45720 (TRBV12-4, TRBJ2-7)
CASRSTGTGPSYEQYF

SEQ ID NO: 91441 - protein, 23 aa, Homo sapiens
  CDR3 for alpha chain variable domain of TCR clone 45721 (TRAV13-1, )
CAASTRRAQIPDIQNPDPAVYQL

SEQ ID NO: 91442 - protein, 13 aa, Homo sapiens
  CDR3 for beta chain variable domain of TCR clone 45721 (TRBV5-1, TRBJ2-7)
CASSATGGNEQYF

SEQ ID NO: 91443 - protein, 13 aa, Homo sapiens
  CDR3 for alpha chain variable domain of TCR clone 45722 (TRAV1-1, TRAJ9)
CAAKNTGGFKTIF

SEQ ID NO: 91444 - protein, 15 aa, Homo sapiens
  CDR3 for beta chain variable domain of TCR clone 45722 (TRBV27, TRBJ2-1)
CASSNGGGSSNEQFF

SEQ ID NO: 91445 - protein, 17 aa, Homo sapiens
  CDR3 for alpha chain variable domain of TCR clone 45723 (TRAV3, TRAJ6)
CAVRDGPRAGGCYIPTF

SEQ ID NO: 91446 - protein, 14 aa, Homo sapiens
  CDR3 for beta chain variable domain of TCR clone 45723 (TRBV7-2, TRBJ2-7)
CASSPKTSFYEQYF

SEQ ID NO: 91447 - protein, 12 aa, Homo sapiens
  CDR3 for alpha chain variable domain of TCR clone 45724 (TRAV2, TRAJ33)
CAVPDRNYQLIW

SEQ ID NO: 91448 - protein, 15 aa, Homo sapiens
  CDR3 for beta chain variable domain of TCR clone 45724 (TRBV15, TRBJ1-5)
CATSRDPVSNQPQHF

SEQ ID NO: 91449 - protein, 18 aa, Homo sapiens
  CDR3 for alpha chain variable domain of TCR clone 45725 (TRAV26-2, TRAJ54)
CILRDVEVGIQGAQKLVF

SEQ ID NO: 91450 - protein, 16 aa, Homo sapiens
  CDR3 for beta chain variable domain of TCR clone 45725 (TRBV6-1, TRBJ2-5)
CASSGTLDRGAETQYF

SEQ ID NO: 91451 - protein, 12 aa, Homo sapiens
  CDR3 for alpha chain variable domain of TCR clone 45726 (TRAV13-1, TRAJ49)
CAAPNTGNQLYF

SEQ ID NO: 91452 - protein, 17 aa, Homo sapiens
  CDR3 for beta chain variable domain of TCR clone 45726 (TRBV25-1, TRBJ2-7)
CASSDARVVFSSYEQYF

SEQ ID NO: 91453 - protein, 13 aa, Homo sapiens
  CDR3 for alpha chain variable domain of TCR clone 45727 (TRAV21, TRAJ27)
CAARPGNAGKSTF

SEQ ID NO: 91454 - protein, 14 aa, Homo sapiens
  CDR3 for beta chain variable domain of TCR clone 45727 (TRBV7-6, TRBJ2-3)
CASSLGTVRDTQYF

SEQ ID NO: 91455 - protein, 13 aa, Homo sapiens
  CDR3 for alpha chain variable domain of TCR clone 45728 (TRAV12-2, TRAJ18)
CAVRGSTLGRLYF

SEQ ID NO: 91456 - protein, 14 aa, Homo sapiens
  CDR3 for beta chain variable domain of TCR clone 45728 (TRBV7-2, TRBJ2-7)
CASSLPPGQGPQYF

SEQ ID NO: 91457 - protein, 14 aa, Homo sapiens
  CDR3 for alpha chain variable domain of TCR clone 45729 (TRAV12-1, TRAJ17)
CVVNYKAAGNKLTF

SEQ ID NO: 91458 - protein, 16 aa, Homo sapiens
  CDR3 for beta chain variable domain of TCR clone 45729 (TRBV4-1, TRBJ2-3)
CASSQSTSGAEDTQYF

SEQ ID NO: 91459 - protein, 13 aa, Homo sapiens
  CDR3 for alpha chain variable domain of TCR clone 45730 (TRAV8-3, TRAJ28)
CAVGAVGSYQLTF

SEQ ID NO: 91460 - protein, 15 aa, Homo sapiens
  CDR3 for beta chain variable domain of TCR clone 45730 (TRBV19, TRBJ2-1)
CASSSPGVPLDEQFF

SEQ ID NO: 91461 - protein, 14 aa, Homo sapiens
  CDR3 for alpha chain variable domain of TCR clone 45731 (TRAV1-2, TRAJ16)
RAVNRFSDGQKLLF

SEQ ID NO: 91462 - protein, 13 aa, Homo sapiens
  CDR3 for beta chain variable domain of TCR clone 45731 (TRBV7-9, TRBJ1-2)
CASSLKQNYGYTF

SEQ ID NO: 91463 - protein, 15 aa, Homo sapiens
  CDR3 for alpha chain variable domain of TCR clone 45732 (TRAV26-1, TRAJ29)
CIVRVEGSGNTPLVF

SEQ ID NO: 91464 - protein, 15 aa, Homo sapiens
  CDR3 for beta chain variable domain of TCR clone 45732 (TRBV7-9, TRBJ1-5)
CTSSQGHQPNQPQHF

SEQ ID NO: 91465 - protein, 14 aa, Homo sapiens
  CDR3 for alpha chain variable domain of TCR clone 45733 (TRAV23/DV6, TRAJ4)
CAAPSSGGYNKLIF

SEQ ID NO: 91466 - protein, 11 aa, Homo sapiens
  CDR3 for beta chain variable domain of TCR clone 45733 (TRBV7-9, TRBJ2-3)
CASSPTDTQYF

SEQ ID NO: 91467 - protein, 15 aa, Homo sapiens
  CDR3 for alpha chain variable domain of TCR clone 45734 (TRAV1-2, TRAJ28)
CAVQYSGAVSYQLTF

SEQ ID NO: 91468 - protein, 13 aa, Homo sapiens
  CDR3 for beta chain variable domain of TCR clone 45734 (TRBV20-1, TRBJ2-7)
CSATHTSGYEQYF

SEQ ID NO: 91469 - protein, 13 aa, Homo sapiens
  CDR3 for alpha chain variable domain of TCR clone 45735 (TRAV1-2, TRAJ9)
CAVLNTGGFKIIF

SEQ ID NO: 91470 - protein, 14 aa, Homo sapiens
  CDR3 for beta chain variable domain of TCR clone 45735 (TRBV20-1, TRBJ2-3)
CSARGGTSTDTQYF

SEQ ID NO: 91471 - protein, 14 aa, Homo sapiens
  CDR3 for alpha chain variable domain of TCR clone 45736 (TRAV1-2, TRAJ12)
CAVSGTDSSYKLIF

SEQ ID NO: 91472 - protein, 15 aa, Homo sapiens
  CDR3 for beta chain variable domain of TCR clone 45736 (TRBV2, TRBJ2-4)
CASSGTNLAKNIRYF

SEQ ID NO: 91473 - protein, 13 aa, Homo sapiens
  CDR3 for alpha chain variable domain of TCR clone 45737 (TRAV13-1, TRAJ9)
CAASGTGDFKTIF

SEQ ID NO: 91474 - protein, 13 aa, Homo sapiens
  CDR3 for beta chain variable domain of TCR clone 45737 (TRBV12-4, TRBJ2-7)
CASSLERVREQYF

SEQ ID NO: 91475 - protein, 15 aa, Homo sapiens
  CDR3 for alpha chain variable domain of TCR clone 45738 (TRAV26-1, TRAJ40)
CIVRVTTSGTYQYIF

SEQ ID NO: 91476 - protein, 12 aa, Homo sapiens
  CDR3 for beta chain variable domain of TCR clone 45738 (TRBV7-9, TRBJ1-4)
CASSTDREKLFF

SEQ ID NO: 91477 - protein, 14 aa, Homo sapiens
  CDR3 for alpha chain variable domain of TCR clone 45739 (TRAV12-3, TRAJ10)
SHLPLTGGGNKLTF

SEQ ID NO: 91478 - protein, 16 aa, Homo sapiens
  CDR3 for beta chain variable domain of TCR clone 45739 (TRBV7-6, TRBJ1-6)
CASSLSSRIGDSPLHF

SEQ ID NO: 91479 - protein, 11 aa, Homo sapiens
  CDR3 for alpha chain variable domain of TCR clone 45740 (TRAV12-3, TRAJ43)
CAMSVSNDMRF

SEQ ID NO: 91480 - protein, 14 aa, Homo sapiens
  CDR3 for beta chain variable domain of TCR clone 45740 (TRBV7-2, TRBJ2-7)
CASSPKTSFYEQYF

SEQ ID NO: 91481 - protein, 13 aa, Homo sapiens
  CDR3 for alpha chain variable domain of TCR clone 45741 (TRAV20, TRAJ48)
CAVQGVGNEKLTF

SEQ ID NO: 91482 - protein, 14 aa, Homo sapiens
  CDR3 for beta chain variable domain of TCR clone 45741 (TRBV27, TRBJ2-7)
CASSFRDGPYERYF

SEQ ID NO: 91483 - protein, 17 aa, Homo sapiens
  CDR3 for alpha chain variable domain of TCR clone 45742 (TRAV3, TRAJ6)
CAVRDGPRAGGSYIPTF

SEQ ID NO: 91484 - protein, 13 aa, Homo sapiens
  CDR3 for beta chain variable domain of TCR clone 45742 (TRBV15, TRBJ1-6)
CATSGGLNSPLHF

SEQ ID NO: 91485 - protein, 15 aa, Homo sapiens
  CDR3 for alpha chain variable domain of TCR clone 45743 (TRAV12-3, TRAJ6)
CAMSATTGGSYIPTF

SEQ ID NO: 91486 - protein, 14 aa, Homo sapiens
  CDR3 for beta chain variable domain of TCR clone 45743 (TRBV28, TRBJ2-5)
CQQPPWSYQETQYF

SEQ ID NO: 91487 - protein, 14 aa, Homo sapiens
  CDR3 for alpha chain variable domain of TCR clone 45744 (TRAV12-3, TRAJ10)
SHLPLTGGGNKLTF

SEQ ID NO: 91488 - protein, 15 aa, Homo sapiens
  CDR3 for beta chain variable domain of TCR clone 45744 (TRBV19, TRBJ1-6)
CASSTQGAVGSPLHF

SEQ ID NO: 91489 - protein, 15 aa, Homo sapiens
  CDR3 for alpha chain variable domain of TCR clone 45745 (TRAV38-1, TRAJ37)
CAFIFGSGNTGNLIF

SEQ ID NO: 91490 - protein, 12 aa, Homo sapiens
  CDR3 for beta chain variable domain of TCR clone 45745 (TRBV7-9, TRBJ2-7)
CASSLEGYEQYF

SEQ ID NO: 91491 - protein, 12 aa, Homo sapiens
  CDR3 for alpha chain variable domain of TCR clone 45746 (TRAV12-3, TRAJ29)
CAAREGNTPLAS

SEQ ID NO: 91492 - protein, 17 aa, Homo sapiens
  CDR3 for beta chain variable domain of TCR clone 45746 (TRBV18, TRBJ2-1)
CASSPLAAGAGDNEQFF

SEQ ID NO: 91493 - protein, 11 aa, Homo sapiens
  CDR3 for alpha chain variable domain of TCR clone 45747 (TRAV17, TRAJ9)
CGFTGGFKTIL

SEQ ID NO: 91494 - protein, 14 aa, Homo sapiens
  CDR3 for beta chain variable domain of TCR clone 45747 (TRBV7-9, TRBJ2-2)
CASSLVQDTGELFF

SEQ ID NO: 91495 - protein, 13 aa, Homo sapiens
  CDR3 for alpha chain variable domain of TCR clone 45748 (TRAV29/DV5, TRAJ31)
CAASRNNNARLMF

SEQ ID NO: 91496 - protein, 11 aa, Homo sapiens
  CDR3 for beta chain variable domain of TCR clone 45748 (TRBV11-2, TRBJ2-2)
CASSLPGELFF

SEQ ID NO: 91497 - protein, 11 aa, Homo sapiens
  CDR3 for alpha chain variable domain of TCR clone 45749 (TRAV2, TRAJ13)
CASAGYQKVTF

SEQ ID NO: 91498 - protein, 16 aa, Homo sapiens
  CDR3 for beta chain variable domain of TCR clone 45749 (TRBV6-1, TRBJ2-5)
CASSETLDRGAETQYF

SEQ ID NO: 91499 - protein, 11 aa, Homo sapiens
  CDR3 for alpha chain variable domain of TCR clone 45750 (TRAV2, TRAJ13)
CAPGGYQKVTF

SEQ ID NO: 91500 - protein, 13 aa, Homo sapiens
  CDR3 for beta chain variable domain of TCR clone 45750 (TRBV27, TRBJ1-4)
CASSLMGDEKLFF

SEQ ID NO: 91501 - protein, 20 aa, Homo sapiens
  CDR3 for alpha chain variable domain of TCR clone 45751 (TRAV12-3, TRAJ41)
SLFIRDSQPSDSATPEALNF

SEQ ID NO: 91502 - protein, 13 aa, Homo sapiens
  CDR3 for beta chain variable domain of TCR clone 45751 (TRBV10-2, TRBJ2-7)
CASGASGGYEQYF

SEQ ID NO: 91503 - protein, 17 aa, Homo sapiens
  CDR3 for alpha chain variable domain of TCR clone 45752 (TRAV3, TRAJ6)
CAVRDGPRAGGSYIPTF

SEQ ID NO: 91504 - protein, 14 aa, Homo sapiens
  CDR3 for beta chain variable domain of TCR clone 45752 (TRBV7-2, TRBJ2-7)
CASSRKTSFYEQYF

SEQ ID NO: 91505 - protein, 14 aa, Homo sapiens
  CDR3 for alpha chain variable domain of TCR clone 45753 (TRAV12-2, TRAJ3)
CAVTGPRGASKIIF

SEQ ID NO: 91506 - protein, 12 aa, Homo sapiens
  CDR3 for beta chain variable domain of TCR clone 45753 (TRBV5-8, TRBJ2-5)
CASSLLRETQYF

SEQ ID NO: 91507 - protein, 14 aa, Homo sapiens
  CDR3 for alpha chain variable domain of TCR clone 45754 (TRAV1-2, TRAJ16)
CAVNRFSDGQKLLF

SEQ ID NO: 91508 - protein, 14 aa, Homo sapiens
  CDR3 for beta chain variable domain of TCR clone 45754 (TRBV28, TRBJ1-1)
CASSLWWSLAEAFF

SEQ ID NO: 91509 - protein, 14 aa, Homo sapiens
  CDR3 for alpha chain variable domain of TCR clone 45755 (TRAV12-2, TRAJ13)
CAVKKTGGYQKVTF

SEQ ID NO: 91510 - protein, 11 aa, Homo sapiens
  CDR3 for beta chain variable domain of TCR clone 45755 (TRBV6-3, TRBJ2-3)
CATGQADTQYF

SEQ ID NO: 91511 - protein, 23 aa, Homo sapiens
  CDR3 for alpha chain variable domain of TCR clone 45756 (TRAV12-1, TRAJ26)
CVVNSWVTMVRILSLVPEPDCPC

SEQ ID NO: 91512 - protein, 13 aa, Homo sapiens
  CDR3 for beta chain variable domain of TCR clone 45756 (TRBV10-3, TRBJ2-7)
CASKLAVNYEQYF

SEQ ID NO: 91513 - protein, 14 aa, Homo sapiens
  CDR3 for alpha chain variable domain of TCR clone 45757 (TRAV12-3, TRAJ10)
SHLPLTGGGNKLTF

SEQ ID NO: 91514 - protein, 16 aa, Homo sapiens
  CDR3 for beta chain variable domain of TCR clone 45757 (TRBV7-6, TRBJ2-1)
CASSAPGPSSYNEQFF

SEQ ID NO: 91515 - protein, 17 aa, Homo sapiens
  CDR3 for alpha chain variable domain of TCR clone 45758 (TRAV26-1, TRAJ53)
CIVRVDESGGSNYKLTF

SEQ ID NO: 91516 - protein, 15 aa, Homo sapiens
  CDR3 for beta chain variable domain of TCR clone 45758 (TRBV20-1, TRBJ2-7)
CSARVPAAYFYEQYF

SEQ ID NO: 91517 - protein, 13 aa, Homo sapiens
  CDR3 for alpha chain variable domain of TCR clone 45759 (TRAV26-2, TRAJ43)
CILRAVNNNDMRF

SEQ ID NO: 91518 - protein, 15 aa, Homo sapiens
  CDR3 for beta chain variable domain of TCR clone 45759 (TRBV7-2, TRBJ2-1)
CASTNGTGIYNEQFF

SEQ ID NO: 91519 - protein, 13 aa, Homo sapiens
  CDR3 for alpha chain variable domain of TCR clone 45760 (TRAV16, TRAJ26)
CITVLCLGQNFVF

SEQ ID NO: 91520 - protein, 12 aa, Homo sapiens
  CDR3 for beta chain variable domain of TCR clone 45760 (TRBV11-2, TRBJ2-1)
CASSPENSEQFF

SEQ ID NO: 91521 - protein, 13 aa, Homo sapiens
  CDR3 for alpha chain variable domain of TCR clone 45761 (TRAV21, TRAJ27)
CAARPGNAGKPTF

SEQ ID NO: 91522 - protein, 14 aa, Homo sapiens
  CDR3 for beta chain variable domain of TCR clone 45761 (TRBV11-2, TRBJ2-7)
CASSLGAGAYEQYF

SEQ ID NO: 91523 - protein, 18 aa, Homo sapiens
  CDR3 for alpha chain variable domain of TCR clone 45762 (TRAV12-3, TRAJ52)
CAMSVGGAGGTSYGKLTF

SEQ ID NO: 91524 - protein, 15 aa, Homo sapiens
  CDR3 for beta chain variable domain of TCR clone 45762 (TRBV27, TRBJ1-6)
CASSFDRGPGSPLHF

SEQ ID NO: 91525 - protein, 14 aa, Homo sapiens
  CDR3 for alpha chain variable domain of TCR clone 45763 (TRAV1-2, TRAJ16)
CAVTLFSDGQKLLF

SEQ ID NO: 91526 - protein, 15 aa, Homo sapiens
  CDR3 for beta chain variable domain of TCR clone 45763 (TRBV9, TRBJ1-6)
CASSVSGTGDSPLHF

SEQ ID NO: 91527 - protein, 14 aa, Homo sapiens
  CDR3 for alpha chain variable domain of TCR clone 45764 (TRAV12-1, TRAJ12)
CVVTRMDSSHKLIF

SEQ ID NO: 91528 - protein, 13 aa, Homo sapiens
  CDR3 for beta chain variable domain of TCR clone 45764 (TRBV20-1, TRBJ1-1)
CSARGGGNTEAFF

SEQ ID NO: 91529 - protein, 14 aa, Homo sapiens
  CDR3 for alpha chain variable domain of TCR clone 45765 (TRAV1-2, TRAJ8)
CAVREDTGFQKLVF

SEQ ID NO: 91530 - protein, 15 aa, Homo sapiens
  CDR3 for beta chain variable domain of TCR clone 45765 (TRBV10-3, TRBJ2-3)
CAISLASGGTDTQYF

SEQ ID NO: 91531 - protein, 15 aa, Homo sapiens
  CDR3 for alpha chain variable domain of TCR clone 45766 (TRAV26-1, TRAJ29)
CIVRVEGSGNTPLVF

SEQ ID NO: 91532 - protein, 14 aa, Homo sapiens
  CDR3 for beta chain variable domain of TCR clone 45766 (TRBV18, TRBJ2-7)
CASSPRGGAYEQYF

SEQ ID NO: 91533 - protein, 12 aa, Homo sapiens
  CDR3 for alpha chain variable domain of TCR clone 45767 (TRAV21, TRAJ11)
CAATSGYSTLTF

SEQ ID NO: 91534 - protein, 14 aa, Homo sapiens
  CDR3 for beta chain variable domain of TCR clone 45767 (TRBV5-4, TRBJ1-1)
CASSLDSRRDEAFF

SEQ ID NO: 91535 - protein, 15 aa, Homo sapiens
  CDR3 for alpha chain variable domain of TCR clone 45768 (TRAV3, TRAJ22)
CAVRDRGGSARKLTF

SEQ ID NO: 91536 - protein, 13 aa, Homo sapiens
  CDR3 for beta chain variable domain of TCR clone 45768 (TRBV7-3, TRBJ2-1)
CASSPVAYNEQFF

SEQ ID NO: 91537 - protein, 14 aa, Homo sapiens
  CDR3 for alpha chain variable domain of TCR clone 45769 (TRAV29/DV5, TRAJ44)
CAASALGTASKLTF

SEQ ID NO: 91538 - protein, 11 aa, Homo sapiens
  CDR3 for beta chain variable domain of TCR clone 45769 (TRBV29-1, TRBJ1-3)
CSVAIGNTIYL

SEQ ID NO: 91539 - protein, 15 aa, Homo sapiens
  CDR3 for alpha chain variable domain of TCR clone 45770 (TRAV8-2, TRAJ16)
CVVSGGFSDGQKLLF

SEQ ID NO: 91540 - protein, 14 aa, Homo sapiens
  CDR3 for beta chain variable domain of TCR clone 45770 (TRBV7-3, TRBJ1-1)
CASSLGTGYTEAFF

SEQ ID NO: 91541 - protein, 12 aa, Homo sapiens
  CDR3 for alpha chain variable domain of TCR clone 45771 (TRAV1-1, TRAJ39)
CAVPVVGNMLTF

SEQ ID NO: 91542 - protein, 15 aa, Homo sapiens
  CDR3 for beta chain variable domain of TCR clone 45771 (TRBV20-1, TRBJ2-7)
CSARDRVSGMDEQYF

SEQ ID NO: 91543 - protein, 14 aa, Homo sapiens
  CDR3 for alpha chain variable domain of TCR clone 45772 (TRAV3, TRAJ4)
CSKHVSGGYNKLIF

SEQ ID NO: 91544 - protein, 13 aa, Homo sapiens
  CDR3 for beta chain variable domain of TCR clone 45772 (TRBV12-4, TRBJ2-5)
CASSPGTEETQYF

SEQ ID NO: 91545 - protein, 10 aa, Homo sapiens
  CDR3 for alpha chain variable domain of TCR clone 45773 (TRAV12-1, TRAJ43)
CVVHNNDMRF

SEQ ID NO: 91546 - protein, 13 aa, Homo sapiens
  CDR3 for beta chain variable domain of TCR clone 45773 (TRBV12-4, TRBJ1-2)
CASSSGLTVISSF

SEQ ID NO: 91547 - protein, 17 aa, Homo sapiens
  CDR3 for alpha chain variable domain of TCR clone 45774 (TRAV26-1, TRAJ27)
CIVSTPWISTNAGKSTF

SEQ ID NO: 91548 - protein, 16 aa, Homo sapiens
  CDR3 for beta chain variable domain of TCR clone 45774 (TRBV7-9, TRBJ2-1)
CASSLDPGLAIDEQFF

SEQ ID NO: 91549 - protein, 16 aa, Homo sapiens
  CDR3 for alpha chain variable domain of TCR clone 45775 (TRAV14/DV4, TRAJ20)
CAMREGRSRDDYKLSF

SEQ ID NO: 91550 - protein, 13 aa, Homo sapiens
  CDR3 for beta chain variable domain of TCR clone 45775 (TRBV12-4, TRBJ1-2)
CASSLRQGKGYTF

SEQ ID NO: 91551 - protein, 15 aa, Homo sapiens
  CDR3 for alpha chain variable domain of TCR clone 45776 (TRAV8-3, TRAJ11)
CAVGLLNSGYSTLTF

SEQ ID NO: 91552 - protein, 16 aa, Homo sapiens
  CDR3 for beta chain variable domain of TCR clone 45776 (TRBV19, TRBJ2-7)
CASSAPSSGRYYEQYF

SEQ ID NO: 91553 - protein, 15 aa, Homo sapiens
  CDR3 for alpha chain variable domain of TCR clone 45777 (TRAV26-2, TRAJ45)
CILRDGVDQEEVLTD

SEQ ID NO: 91554 - protein, 15 aa, Homo sapiens
  CDR3 for beta chain variable domain of TCR clone 45777 (TRBV7-6, TRBJ2-5)
CASSKPTGPQETQYF

SEQ ID NO: 91555 - protein, 14 aa, Homo sapiens
  CDR3 for alpha chain variable domain of TCR clone 45778 (TRAV12-3, TRAJ22)
CATSLFGSARQLTF

SEQ ID NO: 91556 - protein, 11 aa, Homo sapiens
  CDR3 for beta chain variable domain of TCR clone 45778 (TRBV12-4, TRBJ2-2)
CASSSAGELFF

SEQ ID NO: 91557 - protein, 15 aa, Homo sapiens
  CDR3 for alpha chain variable domain of TCR clone 45779 (TRAV3, TRAJ24)
CAVRDKMTAGGNCSL

SEQ ID NO: 91558 - protein, 14 aa, Homo sapiens
  CDR3 for beta chain variable domain of TCR clone 45779 (TRBV7-2, TRBJ2-3)
CGSSQTGSSYTQYF

SEQ ID NO: 91559 - protein, 17 aa, Homo sapiens
  CDR3 for alpha chain variable domain of TCR clone 45780 (TRAV3, TRAJ6)
CAVRDGPRAGGSYIPTF

SEQ ID NO: 91560 - protein, 13 aa, Homo sapiens
  CDR3 for beta chain variable domain of TCR clone 45780 (TRBV7-9, TRBJ2-3)
CASSPGSTDTQYF

SEQ ID NO: 91561 - protein, 14 aa, Homo sapiens
  CDR3 for alpha chain variable domain of TCR clone 45781 (TRAV12-2, TRAJ40)
CAVKIPSGTYKYIF

SEQ ID NO: 91562 - protein, 14 aa, Homo sapiens
  CDR3 for beta chain variable domain of TCR clone 45781 (TRBV7-2, TRBJ1-2)
CASSQTGSTYGYTF

SEQ ID NO: 91563 - protein, 11 aa, Homo sapiens
  CDR3 for alpha chain variable domain of TCR clone 45782 (TRAV21, TRAJ11)
CAVNGYSTLTF

SEQ ID NO: 91564 - protein, 14 aa, Homo sapiens
  CDR3 for beta chain variable domain of TCR clone 45782 (TRBV25-1, TRBJ1-1)
CASTHLGGNTEAFF

SEQ ID NO: 91565 - protein, 13 aa, Homo sapiens
  CDR3 for alpha chain variable domain of TCR clone 45783 (TRAV13-1, TRAJ10)
CAATAGGGNKLTF

SEQ ID NO: 91566 - protein, 17 aa, Homo sapiens
  CDR3 for beta chain variable domain of TCR clone 45783 (TRBV7-8, TRBJ2-6)
CASSAGTGGAGANVLTF

SEQ ID NO: 91567 - protein, 14 aa, Homo sapiens
  CDR3 for alpha chain variable domain of TCR clone 45784 (TRAV26-1, TRAJ34)
CIVRVAYNTDKLIF

SEQ ID NO: 91568 - protein, 17 aa, Homo sapiens
  CDR3 for beta chain variable domain of TCR clone 45784 (TRBV13, TRBJ2-3)
CASSLSRVAGGRNTQYF

SEQ ID NO: 91569 - protein, 14 aa, Homo sapiens
  CDR3 for alpha chain variable domain of TCR clone 45785 (TRAV16, TRAJ17)
CAPRIKAAGNKLTF

SEQ ID NO: 91570 - protein, 17 aa, Homo sapiens
  CDR3 for beta chain variable domain of TCR clone 45785 (TRBV7-2, TRBJ2-3)
CASSSYSGTRIADTQYF

SEQ ID NO: 91571 - protein, 11 aa, Homo sapiens
  CDR3 for alpha chain variable domain of TCR clone 45786 (TRAV12-3, TRAJ22)
CAMTLARQLTF

SEQ ID NO: 91572 - protein, 17 aa, Homo sapiens
  CDR3 for beta chain variable domain of TCR clone 45786 (TRBV11-3, TRBJ2-1)
CASSLYPPGVEYNEQFF

SEQ ID NO: 91573 - protein, 16 aa, Homo sapiens
  CDR3 for alpha chain variable domain of TCR clone 45787 (TRAV12-2, TRAJ32)
CAVNLGQGGAPNKLIF

SEQ ID NO: 91574 - protein, 15 aa, Homo sapiens
  CDR3 for beta chain variable domain of TCR clone 45787 (TRBV20-1, TRBJ2-7)
CSARGPLAGGREQYF

SEQ ID NO: 91575 - protein, 14 aa, Homo sapiens
  CDR3 for alpha chain variable domain of TCR clone 45788 (TRAV26-1, TRAJ21)
CIVRVVYNFNKFYF

SEQ ID NO: 91576 - protein, 12 aa, Homo sapiens
  CDR3 for beta chain variable domain of TCR clone 45788 (TRBV12-4, TRBJ2-7)
CASSLGGYEQYF

SEQ ID NO: 91577 - protein, 12 aa, Homo sapiens
  CDR3 for alpha chain variable domain of TCR clone 45789 (TRAV21, TRAJ11)
CAATSGYSTLTF

SEQ ID NO: 91578 - protein, 13 aa, Homo sapiens
  CDR3 for beta chain variable domain of TCR clone 45789 (TRBV20-1, TRBJ1-1)
CSARGGGNTEALF

SEQ ID NO: 91579 - protein, 13 aa, Homo sapiens
  CDR3 for alpha chain variable domain of TCR clone 45790 (TRAV20, TRAJ31)
CAVQAIGGARLMF

SEQ ID NO: 91580 - protein, 16 aa, Homo sapiens
  CDR3 for beta chain variable domain of TCR clone 45790 (TRBV19, TRBJ2-1)
CASSKAGPSSYNEQFF

SEQ ID NO: 91581 - protein, 14 aa, Homo sapiens
  CDR3 for alpha chain variable domain of TCR clone 45791 (TRAV12-3, TRAJ10)
SHLPLTGGGNKLTF

SEQ ID NO: 91582 - protein, 13 aa, Homo sapiens
  CDR3 for beta chain variable domain of TCR clone 45791 (TRBV7-3, TRBJ1-2)
CASSLKRGYGYTF

SEQ ID NO: 91583 - protein, 16 aa, Homo sapiens
  CDR3 for alpha chain variable domain of TCR clone 45792 (TRAV8-2, TRAJ7)
CVVREGPYYGNNRLAF

SEQ ID NO: 91584 - protein, 15 aa, Homo sapiens
  CDR3 for beta chain variable domain of TCR clone 45792 (TRBV27, TRBJ2-3)
CASSLGLAATDTQYF

SEQ ID NO: 91585 - protein, 16 aa, Homo sapiens
  CDR3 for alpha chain variable domain of TCR clone 45793 (TRAV27, TRAJ13)
CAGAKSDSVGYQKVTF

SEQ ID NO: 91586 - protein, 15 aa, Homo sapiens
  CDR3 for beta chain variable domain of TCR clone 45793 (TRBV29-1, TRBJ2-1)
CSVGRHALFYNEQFF

SEQ ID NO: 91587 - protein, 14 aa, Homo sapiens
  CDR3 for alpha chain variable domain of TCR clone 45794 (TRAV17, TRAJ37)
CATDGSSNPGKLIF

SEQ ID NO: 91588 - protein, 13 aa, Homo sapiens
  CDR3 for beta chain variable domain of TCR clone 45794 (TRBV11-2, TRBJ2-1)
CASSLDLVNEQFF

SEQ ID NO: 91589 - protein, 16 aa, Homo sapiens
  CDR3 for alpha chain variable domain of TCR clone 45795 (TRAV30, TRAJ24)
CGTEIVDADSWGKFQF

SEQ ID NO: 91590 - protein, 16 aa, Homo sapiens
  CDR3 for beta chain variable domain of TCR clone 45795 (TRBV11-2, TRBJ1-2)
CASSLDTGGADYGYTF

SEQ ID NO: 91591 - protein, 15 aa, Homo sapiens
  CDR3 for alpha chain variable domain of TCR clone 45796 (TRAV8-1, TRAJ6)
CAVNIPPGGGYIPTF

SEQ ID NO: 91592 - protein, 14 aa, Homo sapiens
  CDR3 for beta chain variable domain of TCR clone 45796 (TRBV12-4, TRBJ2-1)
CASSLGQGASEQFF

SEQ ID NO: 91593 - protein, 15 aa, Homo sapiens
  CDR3 for alpha chain variable domain of TCR clone 45797 (TRAV29/DV5, TRAJ42)
CAAKTAGGSQGNLIF

SEQ ID NO: 91594 - protein, 15 aa, Homo sapiens
  CDR3 for beta chain variable domain of TCR clone 45797 (TRBV5-1, TRBJ2-2)
CASSSQGGNTGELFF

SEQ ID NO: 91595 - protein, 13 aa, Homo sapiens
  CDR3 for alpha chain variable domain of TCR clone 45798 (TRAV2, TRAJ29)
CAAQNSGNTPLVF

SEQ ID NO: 91596 - protein, 14 aa, Homo sapiens
  CDR3 for beta chain variable domain of TCR clone 45798 (TRBV7-9, TRBJ2-4)
CASSLAMGGNTQYF

SEQ ID NO: 91597 - protein, 12 aa, Homo sapiens
  CDR3 for alpha chain variable domain of TCR clone 45799 (TRAV10, TRAJ34)
CVVSGKHRQAHL

SEQ ID NO: 91598 - protein, 14 aa, Homo sapiens
  CDR3 for beta chain variable domain of TCR clone 45799 (TRBV19, TRBJ2-1)
CTSPTFVLSGEQFF

SEQ ID NO: 91599 - protein, 15 aa, Homo sapiens
  CDR3 for alpha chain variable domain of TCR clone 45800 (TRAV38-1, TRAJ37)
CAFIHGSGNTGKLLF

SEQ ID NO: 91600 - protein, 12 aa, Homo sapiens
  CDR3 for beta chain variable domain of TCR clone 45800 (TRBV7-9, TRBJ2-7)
CASSFGSYEQYF

SEQ ID NO: 91601 - protein, 10 aa, Homo sapiens
  CDR3 for alpha chain variable domain of TCR clone 45801 (TRAV5, TRAJ34)
RAEDTDKLIF

SEQ ID NO: 91602 - protein, 17 aa, Homo sapiens
  CDR3 for beta chain variable domain of TCR clone 45801 (TRBV20-1, TRBJ2-1)
CSASSSGLAGSYNEQFF

SEQ ID NO: 91603 - protein, 16 aa, Homo sapiens
  CDR3 for alpha chain variable domain of TCR clone 45802 (TRAV38-2/DV8, TRAJ47)
CAYRSAIMEYGNKLVF

SEQ ID NO: 91604 - protein, 14 aa, Homo sapiens
  CDR3 for beta chain variable domain of TCR clone 45802 (TRBV19, TRBJ2-7)
CASSIVAGTYEQYF

SEQ ID NO: 91605 - protein, 13 aa, Homo sapiens
  CDR3 for alpha chain variable domain of TCR clone 45803 (TRAV2, TRAJ15)
CAVDSQAGTALIF

SEQ ID NO: 91606 - protein, 17 aa, Homo sapiens
  CDR3 for beta chain variable domain of TCR clone 45803 (TRBV20-1, TRBJ2-2)
CSASGSGQGGLTGELFF

SEQ ID NO: 91607 - protein, 11 aa, Homo sapiens
  CDR3 for alpha chain variable domain of TCR clone 45804 (TRAV27, TRAJ45)
CAGAQEEVLTD

SEQ ID NO: 91608 - protein, 17 aa, Homo sapiens
  CDR3 for beta chain variable domain of TCR clone 45804 (TRBV11-2, TRBJ2-1)
CASSLSPPGVEYNEQFF

SEQ ID NO: 91609 - protein, 13 aa, Homo sapiens
  CDR3 for alpha chain variable domain of TCR clone 45805 (TRAV26-1, TRAJ34)
CIVRPWITDKLIF

SEQ ID NO: 91610 - protein, 14 aa, Homo sapiens
  CDR3 for beta chain variable domain of TCR clone 45805 (TRBV12-4, TRBJ1-4)
CASSRQGANEELFF

SEQ ID NO: 91611 - protein, 12 aa, Homo sapiens
  CDR3 for alpha chain variable domain of TCR clone 45806 (TRAV12-3, TRAJ17)
CAMTLTGDKLTF

SEQ ID NO: 91612 - protein, 15 aa, Homo sapiens
  CDR3 for beta chain variable domain of TCR clone 45806 (TRBV6-3, TRBJ2-7)
CASSSPGTVFYEQYF

SEQ ID NO: 91613 - protein, 12 aa, Homo sapiens
  CDR3 for alpha chain variable domain of TCR clone 45807 (TRAV12-3, TRAJ17)
CAMTLTGNKLTF

SEQ ID NO: 91614 - protein, 15 aa, Homo sapiens
  CDR3 for beta chain variable domain of TCR clone 45807 (TRBV11-2, TRBJ2-1)
CASSSPSTRYNEQFF

SEQ ID NO: 91615 - protein, 16 aa, Homo sapiens
  CDR3 for alpha chain variable domain of TCR clone 45808 (TRAV12-2, TRAJ40)
CAVIRGGTSGTYKYNF

SEQ ID NO: 91616 - protein, 14 aa, Homo sapiens
  CDR3 for beta chain variable domain of TCR clone 45808 (TRBV20-1, TRBJ2-5)
CSARDGRAGETQYF

SEQ ID NO: 91617 - protein, 18 aa, Homo sapiens
  CDR3 for alpha chain variable domain of TCR clone 45809 (TRAV17, TRAJ28)
CATDPPRGSGAGSYQLTF

SEQ ID NO: 91618 - protein, 14 aa, Homo sapiens
  CDR3 for beta chain variable domain of TCR clone 45809 (TRBV13, TRBJ2-5)
YASSLDYPQETQYF

SEQ ID NO: 91619 - protein, 11 aa, Homo sapiens
  CDR3 for alpha chain variable domain of TCR clone 45810 (TRAV12-1, TRAJ34)
CVVNKGRELIF

SEQ ID NO: 91620 - protein, 12 aa, Homo sapiens
  CDR3 for beta chain variable domain of TCR clone 45810 (TRBV2, TRBJ2-1)
CAYGPPGSEQFF

SEQ ID NO: 91621 - protein, 12 aa, Homo sapiens
  CDR3 for alpha chain variable domain of TCR clone 45811 (TRAV2, TRAJ26)
CAGSPGGLWSEF

SEQ ID NO: 91622 - protein, 13 aa, Homo sapiens
  CDR3 for beta chain variable domain of TCR clone 45811 (TRBV7-9, TRBJ1-2)
CASSLKQNYGYTF

SEQ ID NO: 91623 - protein, 14 aa, Homo sapiens
  CDR3 for alpha chain variable domain of TCR clone 45812 (TRAV12-2, TRAJ45)
CAVYSGGGVDGLTF

SEQ ID NO: 91624 - protein, 13 aa, Homo sapiens
  CDR3 for beta chain variable domain of TCR clone 45812 (TRBV7-7, TRBJ2-3)
CASSLSRADTQYF

SEQ ID NO: 91625 - protein, 13 aa, Homo sapiens
  CDR3 for alpha chain variable domain of TCR clone 45813 (TRAV12-1, TRAJ9)
CVVLNTGGFRTIF

SEQ ID NO: 91626 - protein, 13 aa, Homo sapiens
  CDR3 for beta chain variable domain of TCR clone 45813 (TRBV19, TRBJ1-2)
CASSVPGQDGYTF

SEQ ID NO: 91627 - protein, 12 aa, Homo sapiens
  CDR3 for alpha chain variable domain of TCR clone 45814 (TRAV12-3, TRAJ17)
CAMTLTGNKLTF

SEQ ID NO: 91628 - protein, 15 aa, Homo sapiens
  CDR3 for beta chain variable domain of TCR clone 45814 (TRBV11-2, TRBJ1-2)
CASSLEGVQRNGYTF

SEQ ID NO: 91629 - protein, 12 aa, Homo sapiens
  CDR3 for alpha chain variable domain of TCR clone 45815 (TRAV8-3, TRAJ4)
PAFSGGYNKLIF

SEQ ID NO: 91630 - protein, 13 aa, Homo sapiens
  CDR3 for beta chain variable domain of TCR clone 45815 (TRBV20-1, TRBJ1-3)
CSAGAYSGNTIYF

SEQ ID NO: 91631 - protein, 13 aa, Homo sapiens
  CDR3 for alpha chain variable domain of TCR clone 45816 (TRAV1-2, TRAJ12)
CAVSMDSSYKLIF

SEQ ID NO: 91632 - protein, 13 aa, Homo sapiens
  CDR3 for beta chain variable domain of TCR clone 45816 (TRBV7-2, TRBJ2-7)
CASSSPSGSEQYF

SEQ ID NO: 91633 - protein, 12 aa, Homo sapiens
  CDR3 for alpha chain variable domain of TCR clone 45817 (TRAV12-2, TRAJ16)
CAVNPDGQKLIF

SEQ ID NO: 91634 - protein, 12 aa, Homo sapiens
  CDR3 for beta chain variable domain of TCR clone 45817 (TRBV5-7, TRBJ2-7)
CASSVRGGEQYF

SEQ ID NO: 91635 - protein, 12 aa, Homo sapiens
  CDR3 for alpha chain variable domain of TCR clone 45818 (TRAV12-3, TRAJ17)
CAMTLTGNRLTF

SEQ ID NO: 91636 - protein, 14 aa, Homo sapiens
  CDR3 for beta chain variable domain of TCR clone 45818 (TRBV4-1, TRBJ2-7)
CASSQDREHVEQYF

SEQ ID NO: 91637 - protein, 15 aa, Homo sapiens
  CDR3 for alpha chain variable domain of TCR clone 45819 (TRAV12-1, TRAJ44)
CVADLTTGTASKLTF

SEQ ID NO: 91638 - protein, 13 aa, Homo sapiens
  CDR3 for beta chain variable domain of TCR clone 45819 (TRBV6-5, TRBJ2-5)
CASSPQGGETQYF

SEQ ID NO: 91639 - protein, 18 aa, Homo sapiens
  CDR3 for alpha chain variable domain of TCR clone 45820 (TRAV26-1, TRAJ52)
CIVRVAGAGGTSYGKLTF

SEQ ID NO: 91640 - protein, 13 aa, Homo sapiens
  CDR3 for beta chain variable domain of TCR clone 45820 (TRBV7-8, TRBJ1-2)
CASSAQSYYGNTL

SEQ ID NO: 91641 - protein, 13 aa, Homo sapiens
  CDR3 for alpha chain variable domain of TCR clone 45821 (TRAV13-1, TRAJ11)
CAAVLAGYSALTF

SEQ ID NO: 91642 - protein, 17 aa, Homo sapiens
  CDR3 for beta chain variable domain of TCR clone 45821 (TRBV25-1, TRBJ2-7)
CASSDARVVFSSYEQYF

SEQ ID NO: 91643 - protein, 16 aa, Homo sapiens
  CDR3 for alpha chain variable domain of TCR clone 45822 (TRAV8-6, TRAJ32)
CAVSDPYGGATNKLIF

SEQ ID NO: 91644 - protein, 13 aa, Homo sapiens
  CDR3 for beta chain variable domain of TCR clone 45822 (TRBV10-3, TRBJ2-5)
CAMTSGAGETQYF

SEQ ID NO: 91645 - protein, 13 aa, Homo sapiens
  CDR3 for alpha chain variable domain of TCR clone 45823 (TRAV12-3, TRAJ33)
CAMSGNSNYQLIW

SEQ ID NO: 91646 - protein, 12 aa, Homo sapiens
  CDR3 for beta chain variable domain of TCR clone 45823 (TRBV11-2, TRBJ2-2)
CASSLGGGELFF

SEQ ID NO: 91647 - protein, 11 aa, Homo sapiens
  CDR3 for alpha chain variable domain of TCR clone 45824 (TRAV12-3, TRAJ43)
CAMSVSNDMRC

SEQ ID NO: 91648 - protein, 13 aa, Homo sapiens
  CDR3 for beta chain variable domain of TCR clone 45824 (TRBV20-1, TRBJ1-1)
CSAPLGGGTEAFF

SEQ ID NO: 91649 - protein, 15 aa, Homo sapiens
  CDR3 for alpha chain variable domain of TCR clone 45825 (TRAV17, TRAJ57)
CATGPSQGGSKKLVF

SEQ ID NO: 91650 - protein, 15 aa, Homo sapiens
  CDR3 for beta chain variable domain of TCR clone 45825 (TRBV12-4, TRBJ1-5)
CQQPTGRGSNQPQHF

SEQ ID NO: 91651 - protein, 14 aa, Homo sapiens
  CDR3 for alpha chain variable domain of TCR clone 45826 (TRAV8-6, TRAJ12)
CAVKAADGSYKLIF

SEQ ID NO: 91652 - protein, 15 aa, Homo sapiens
  CDR3 for beta chain variable domain of TCR clone 45826 (TRBV5-1, TRBJ2-5)
CASSLGLAEQETQYF

SEQ ID NO: 91653 - protein, 11 aa, Homo sapiens
  CDR3 for alpha chain variable domain of TCR clone 45827 (TRAV12-3, TRAJ43)
CAMSVSNGMRF

SEQ ID NO: 91654 - protein, 11 aa, Homo sapiens
  CDR3 for beta chain variable domain of TCR clone 45827 (TRBV29-1, TRBJ2-5)
CSEDRTGTQYF

SEQ ID NO: 91655 - protein, 15 aa, Homo sapiens
  CDR3 for alpha chain variable domain of TCR clone 45828 (TRAV35, TRAJ41)
CAGQLFSNSGYALNF

SEQ ID NO: 91656 - protein, 14 aa, Homo sapiens
  CDR3 for beta chain variable domain of TCR clone 45828 (TRBV7-2, TRBJ1-2)
CASSRGGTNYGDTF

SEQ ID NO: 91657 - protein, 12 aa, Homo sapiens
  CDR3 for alpha chain variable domain of TCR clone 45829 (TRAV12-1, TRAJ40)
CVVPSGTYKYIS

SEQ ID NO: 91658 - protein, 15 aa, Homo sapiens
  CDR3 for beta chain variable domain of TCR clone 45829 (TRBV12-4, TRBJ2-1)
CASSPLSGRNSEQFF

SEQ ID NO: 91659 - protein, 13 aa, Homo sapiens
  CDR3 for alpha chain variable domain of TCR clone 45830 (TRAV8-3, TRAJ36)
CAVGATGANNLFF

SEQ ID NO: 91660 - protein, 15 aa, Homo sapiens
  CDR3 for beta chain variable domain of TCR clone 45830 (TRBV28, TRBJ2-1)
CASSIIAGGRSEQFF

SEQ ID NO: 91661 - protein, 14 aa, Homo sapiens
  CDR3 for alpha chain variable domain of TCR clone 45831 (TRAV13-1, TRAJ44)
CAAKATGTASKLTF

SEQ ID NO: 91662 - protein, 17 aa, Homo sapiens
  CDR3 for beta chain variable domain of TCR clone 45831 (TRBV7-3, TRBJ2-3)
CDSSLMKRMRGADTQYF

SEQ ID NO: 91663 - protein, 12 aa, Homo sapiens
  CDR3 for alpha chain variable domain of TCR clone 45832 (TRAV1-1, TRAJ9)
CAVDTGGFKTIF

SEQ ID NO: 91664 - protein, 15 aa, Homo sapiens
  CDR3 for beta chain variable domain of TCR clone 45832 (TRBV4-1, TRBJ2-7)
CASSQQGQGFDEQYF

SEQ ID NO: 91665 - protein, 14 aa, Homo sapiens
  CDR3 for alpha chain variable domain of TCR clone 45833 (TRAV1-2, TRAJ16)
CAVNRFSDGQKQLF

SEQ ID NO: 91666 - protein, 15 aa, Homo sapiens
  CDR3 for beta chain variable domain of TCR clone 45833 (TRBV9, TRBJ1-6)
CASSVAGTGDSPLHF

SEQ ID NO: 91667 - protein, 13 aa, Homo sapiens
  CDR3 for alpha chain variable domain of TCR clone 45834 (TRAV13-2, TRAJ53)
CAENMGSNYKLTF

SEQ ID NO: 91668 - protein, 13 aa, Homo sapiens
  CDR3 for beta chain variable domain of TCR clone 45834 (TRBV4-1, TRBJ2-2)
CTSSQENTGELFF

SEQ ID NO: 91669 - protein, 11 aa, Homo sapiens
  CDR3 for alpha chain variable domain of TCR clone 45835 (TRAV12-1, TRAJ34)
CVVNKGRELIF

SEQ ID NO: 91670 - protein, 17 aa, Homo sapiens
  CDR3 for beta chain variable domain of TCR clone 45835 (TRBV11-2, TRBJ2-1)
CASSLYPPGVEYNEQFF

SEQ ID NO: 91671 - protein, 14 aa, Homo sapiens
  CDR3 for alpha chain variable domain of TCR clone 45836 (TRAV29/DV5, TRAJ48)
CAAMALFGNEKLAF

SEQ ID NO: 91672 - protein, 15 aa, Homo sapiens
  CDR3 for beta chain variable domain of TCR clone 45836 (TRBV7-2, TRBJ2-1)
CASTHGTGIYNEQFF

SEQ ID NO: 91673 - protein, 16 aa, Homo sapiens
  CDR3 for alpha chain variable domain of TCR clone 45837 (TRAV27, TRAJ13)
CAGAKSDSGGYQKVTF

SEQ ID NO: 91674 - protein, 15 aa, Homo sapiens
  CDR3 for beta chain variable domain of TCR clone 45837 (TRBV5-1, TRBJ1-1)
CASSSTTGTNTEAFF

SEQ ID NO: 91675 - protein, 13 aa, Homo sapiens
  CDR3 for alpha chain variable domain of TCR clone 45838 (TRAV21, TRAJ10)
CAVRPGGGDKLTF

SEQ ID NO: 91676 - protein, 14 aa, Homo sapiens
  CDR3 for beta chain variable domain of TCR clone 45838 (TRBV5-4, TRBJ2-7)
CASSADAGSYEQYF

SEQ ID NO: 91677 - protein, 14 aa, Homo sapiens
  CDR3 for alpha chain variable domain of TCR clone 45839 (TRAV1-2, TRAJ16)
CAVNRFSDGQKLLF

SEQ ID NO: 91678 - protein, 14 aa, Homo sapiens
  CDR3 for beta chain variable domain of TCR clone 45839 (TRBV28, TRBJ1-2)
CASRIQGANYGYTF

SEQ ID NO: 91679 - protein, 15 aa, Homo sapiens
  CDR3 for alpha chain variable domain of TCR clone 45840 (TRAV12-2, TRAJ57)
CAVSRGQGGSEKLVF

SEQ ID NO: 91680 - protein, 16 aa, Homo sapiens
  CDR3 for beta chain variable domain of TCR clone 45840 (TRBV18, TRBJ1-1)
CASSPGVGGRGGEAFF

SEQ ID NO: 91681 - protein, 15 aa, Homo sapiens
  CDR3 for alpha chain variable domain of TCR clone 45841 (TRAV38-1, TRAJ37)
CAFIFGSCNTGKLIF

SEQ ID NO: 91682 - protein, 12 aa, Homo sapiens
  CDR3 for beta chain variable domain of TCR clone 45841 (TRBV7-9, TRBJ2-7)
CASSLEGYEQYF

SEQ ID NO: 91683 - protein, 13 aa, Homo sapiens
  CDR3 for alpha chain variable domain of TCR clone 45842 (TRAV17, TRAJ5)
CATMDTGRIALTF

SEQ ID NO: 91684 - protein, 15 aa, Homo sapiens
  CDR3 for beta chain variable domain of TCR clone 45842 (TRBV20-1, TRBJ2-5)
CSATRTSGSLETQYF

SEQ ID NO: 91685 - protein, 13 aa, Homo sapiens
  CDR3 for alpha chain variable domain of TCR clone 45843 (TRAV12-3, TRAJ33)
CAMSVNSNYQLIW

SEQ ID NO: 91686 - protein, 13 aa, Homo sapiens
  CDR3 for beta chain variable domain of TCR clone 45843 (TRBV7-2, TRBJ2-2)
CTSSLAVTGELFF

SEQ ID NO: 91687 - protein, 10 aa, Homo sapiens
  CDR3 for alpha chain variable domain of TCR clone 45844 (TRAV8-1, TRAJ43)
CAVSVDDMRF

SEQ ID NO: 91688 - protein, 12 aa, Homo sapiens
  CDR3 for beta chain variable domain of TCR clone 45844 (TRBV11-2, TRBJ2-1)
CASSPGNNEQFF

SEQ ID NO: 91689 - protein, 15 aa, Homo sapiens
  CDR3 for alpha chain variable domain of TCR clone 45845 (TRAV8-3, TRAJ45)
CASSYSGGGADGLTF

SEQ ID NO: 91690 - protein, 15 aa, Homo sapiens
  CDR3 for beta chain variable domain of TCR clone 45845 (TRBV10-1, TRBJ2-1)
CASSTGTELYNEQFF

SEQ ID NO: 91691 - protein, 16 aa, Homo sapiens
  CDR3 for alpha chain variable domain of TCR clone 45846 (TRAV30, TRAJ24)
RGTEIVDADSWGKFQF

SEQ ID NO: 91692 - protein, 15 aa, Homo sapiens
  CDR3 for beta chain variable domain of TCR clone 45846 (TRBV20-1, TRBJ2-7)
CSARDRVSGMDEQYF

SEQ ID NO: 91693 - protein, 14 aa, Homo sapiens
  CDR3 for alpha chain variable domain of TCR clone 45847 (TRAV12-2, TRAJ13)
CAVKKTGGYQKVTL

SEQ ID NO: 91694 - protein, 13 aa, Homo sapiens
  CDR3 for beta chain variable domain of TCR clone 45847 (TRBV28, TRBJ2-7)
CASKAGGVYEQYF

SEQ ID NO: 91695 - protein, 16 aa, Homo sapiens
  CDR3 for alpha chain variable domain of TCR clone 45848 (TRAV26-1, TRAJ22)
CIVRVPSSGSARQLTF

SEQ ID NO: 91696 - protein, 14 aa, Homo sapiens
  CDR3 for beta chain variable domain of TCR clone 45848 (TRBV7-9, TRBJ2-7)
CASSPSGGQNEQYF

SEQ ID NO: 91697 - protein, 14 aa, Homo sapiens
  CDR3 for alpha chain variable domain of TCR clone 45849 (TRAV16, TRAJ15)
CALSGPRAGTALIF

SEQ ID NO: 91698 - protein, 12 aa, Homo sapiens
  CDR3 for beta chain variable domain of TCR clone 45849 (TRBV18, TRBJ2-5)
CASSPSKETQYF

SEQ ID NO: 91699 - protein, 18 aa, Homo sapiens
  CDR3 for alpha chain variable domain of TCR clone 45850 (TRAV26-1, TRAJ23)
CIVRVGLEVWNQGGKIIF

SEQ ID NO: 91700 - protein, 16 aa, Homo sapiens
  CDR3 for beta chain variable domain of TCR clone 45850 (TRBV12-4, TRBJ2-5)
CASSFFVRGRQETQYF

SEQ ID NO: 91701 - protein, 15 aa, Homo sapiens
  CDR3 for alpha chain variable domain of TCR clone 45851 (TRAV12-1, TRAJ44)
CVADLPTGTASKLTF

SEQ ID NO: 91702 - protein, 13 aa, Homo sapiens
  CDR3 for beta chain variable domain of TCR clone 45851 (TRBV6-5, TRBJ2-5)
CASSTQGGETQYF

SEQ ID NO: 91703 - protein, 13 aa, Homo sapiens
  CDR3 for alpha chain variable domain of TCR clone 45852 (TRAV12-3, TRAJ33)
CAMSVNSNYQLIW

SEQ ID NO: 91704 - protein, 15 aa, Homo sapiens
  CDR3 for beta chain variable domain of TCR clone 45852 (TRBV20-1, TRBJ2-7)
CSARDRVSGMDEQYL

SEQ ID NO: 91705 - protein, 16 aa, Homo sapiens
  CDR3 for alpha chain variable domain of TCR clone 45853 (TRAV3, TRAJ3)
CAVRDRAKSSASKIIF

SEQ ID NO: 91706 - protein, 13 aa, Homo sapiens
  CDR3 for beta chain variable domain of TCR clone 45853 (TRBV10-3, TRBJ2-7)
CASKLAVNYEKYF

SEQ ID NO: 91707 - protein, 16 aa, Homo sapiens
  CDR3 for alpha chain variable domain of TCR clone 45854 (TRAV8-6, TRAJ53)
CAVRENSGGSNYKLTF

SEQ ID NO: 91708 - protein, 16 aa, Homo sapiens
  CDR3 for beta chain variable domain of TCR clone 45854 (TRBV27, TRBJ2-2)
CASSFRGIVRTGELFF

SEQ ID NO: 91709 - protein, 18 aa, Homo sapiens
  CDR3 for alpha chain variable domain of TCR clone 45855 (TRAV21, TRAJ52)
CAVRPSPAGGTSYGKLTF

SEQ ID NO: 91710 - protein, 12 aa, Homo sapiens
  CDR3 for beta chain variable domain of TCR clone 45855 (TRBV7-9, TRBJ2-7)
CASSIKREEQYF

SEQ ID NO: 91711 - protein, 14 aa, Homo sapiens
  CDR3 for alpha chain variable domain of TCR clone 45856 (TRAV1-2, TRAJ8)
CAVREDTGFQKLVF

SEQ ID NO: 91712 - protein, 17 aa, Homo sapiens
  CDR3 for beta chain variable domain of TCR clone 45856 (TRBV20-1, TRBJ2-2)
CSASGSGRGGLTGELFF

SEQ ID NO: 91713 - protein, 14 aa, Homo sapiens
  CDR3 for alpha chain variable domain of TCR clone 45857 (TRAV1-2, TRAJ16)
CAVNRFSGGQKLLF

SEQ ID NO: 91714 - protein, 16 aa, Homo sapiens
  CDR3 for beta chain variable domain of TCR clone 45857 (TRBV11-2, TRBJ1-2)
CASSLDTGGADYGYTF

SEQ ID NO: 91715 - protein, 14 aa, Homo sapiens
  CDR3 for alpha chain variable domain of TCR clone 45858 (TRAV13-1, TRAJ9)
CAVSALTGGFKTIF

SEQ ID NO: 91716 - protein, 13 aa, Homo sapiens
  CDR3 for beta chain variable domain of TCR clone 45858 (TRBV20-1, TRBJ1-1)
CSAGTVGNTEAFF

SEQ ID NO: 91717 - protein, 15 aa, Homo sapiens
  CDR3 for alpha chain variable domain of TCR clone 45859 (TRAV12-2, TRAJ53)
CAVNGGGGSNYKPTF

SEQ ID NO: 91718 - protein, 17 aa, Homo sapiens
  CDR3 for beta chain variable domain of TCR clone 45859 (TRBV7-3, TRBJ2-3)
CASSLMKRMRGADTQYF

SEQ ID NO: 91719 - protein, 15 aa, Homo sapiens
  CDR3 for alpha chain variable domain of TCR clone 45860 (TRAV19, TRAJ9)
CALSEARTGSFKTIF

SEQ ID NO: 91720 - protein, 17 aa, Homo sapiens
  CDR3 for beta chain variable domain of TCR clone 45860 (TRBV28, TRBJ2-5)
CASSTPEGDALQETQYF

SEQ ID NO: 91721 - protein, 14 aa, Homo sapiens
  CDR3 for alpha chain variable domain of TCR clone 45861 (TRAV35, TRAJ22)
CAGLRPGSAWQLTF

SEQ ID NO: 91722 - protein, 15 aa, Homo sapiens
  CDR3 for beta chain variable domain of TCR clone 45861 (TRBV12-4, TRBJ2-5)
CASSPPTGLQETQYF

SEQ ID NO: 91723 - protein, 16 aa, Homo sapiens
  CDR3 for alpha chain variable domain of TCR clone 45862 (TRAV1-2, TRAJ10)
CAVRGVLTGGGNKLTF

SEQ ID NO: 91724 - protein, 17 aa, Homo sapiens
  CDR3 for beta chain variable domain of TCR clone 45862 (TRBV20-1, TRBJ2-2)
CSASGSGQGGLTGELFF

SEQ ID NO: 91725 - protein, 12 aa, Homo sapiens
  CDR3 for alpha chain variable domain of TCR clone 45863 (TRAV25, TRAJ11)
CAGYSGYSTLTF

SEQ ID NO: 91726 - protein, 13 aa, Homo sapiens
  CDR3 for beta chain variable domain of TCR clone 45863 (TRBV7-9, TRBJ1-2)
CASSLEQNYGYTF

SEQ ID NO: 91727 - protein, 15 aa, Homo sapiens
  CDR3 for alpha chain variable domain of TCR clone 45864 (TRAV35, TRAJ40)
RAGQLGTSGTYKYIF

SEQ ID NO: 91728 - protein, 14 aa, Homo sapiens
  CDR3 for beta chain variable domain of TCR clone 45864 (TRBV7-3, TRBJ2-1)
CASSLAGGTNEQFF

SEQ ID NO: 91729 - protein, 14 aa, Homo sapiens
  CDR3 for alpha chain variable domain of TCR clone 45865 (TRAV8-2, TRAJ4)
CVVSLSGGYNKLIF

SEQ ID NO: 91730 - protein, 15 aa, Homo sapiens
  CDR3 for beta chain variable domain of TCR clone 45865 (TRBV2, TRBJ2-1)
CASSELAGSYNEQFF

SEQ ID NO: 91731 - protein, 13 aa, Homo sapiens
  CDR3 for alpha chain variable domain of TCR clone 45866 (TRAV12-1, TRAJ26)
CVVRRNYGQNFVF

SEQ ID NO: 91732 - protein, 14 aa, Homo sapiens
  CDR3 for beta chain variable domain of TCR clone 45866 (TRBV6-3, TRBJ1-1)
CTSRYTGESTEAFF

SEQ ID NO: 91733 - protein, 14 aa, Homo sapiens
  CDR3 for alpha chain variable domain of TCR clone 45867 (TRAV8-4, TRAJ9)
CAVRINTGGFKTIF

SEQ ID NO: 91734 - protein, 15 aa, Homo sapiens
  CDR3 for beta chain variable domain of TCR clone 45867 (TRBV10-2, TRBJ2-6)
CASSEQRTGANVLTF

SEQ ID NO: 91735 - protein, 15 aa, Homo sapiens
  CDR3 for alpha chain variable domain of TCR clone 45868 (TRAV21, TRAJ53)
CATLYSGGSNYKLTF

SEQ ID NO: 91736 - protein, 14 aa, Homo sapiens
  CDR3 for beta chain variable domain of TCR clone 45868 (TRBV7-2, TRBJ2-7)
CASRSQGAAYEQYF

SEQ ID NO: 91737 - protein, 14 aa, Homo sapiens
  CDR3 for alpha chain variable domain of TCR clone 45869 (TRAV12-2, TRAJ40)
CAVKIPSGTYKYIF

SEQ ID NO: 91738 - protein, 20 aa, Homo sapiens
  CDR3 for beta chain variable domain of TCR clone 45869 (TRBV28, TRBJ2-1)
CASTPIGRSPGLAGGNEKFF

SEQ ID NO: 91739 - protein, 15 aa, Homo sapiens
  CDR3 for alpha chain variable domain of TCR clone 45870 (TRAV12-1, TRAJ10)
CVVNKLTGGGNKLTF

SEQ ID NO: 91740 - protein, 17 aa, Homo sapiens
  CDR3 for beta chain variable domain of TCR clone 45870 (TRBV5-1, TRBJ1-6)
CAGSPSLQGSDNSPLHF

SEQ ID NO: 91741 - protein, 14 aa, Homo sapiens
  CDR3 for alpha chain variable domain of TCR clone 45871 (TRAV12-2, TRAJ40)
CAVKIPSGTYKYIF

SEQ ID NO: 91742 - protein, 16 aa, Homo sapiens
  CDR3 for beta chain variable domain of TCR clone 45871 (TRBV20-1, TRBJ2-3)
CSAREQLASSSDTQYF

SEQ ID NO: 91743 - protein, 14 aa, Homo sapiens
  CDR3 for alpha chain variable domain of TCR clone 45872 (TRAV21, TRAJ35)
CAVMPIGFGNVLHC

SEQ ID NO: 91744 - protein, 12 aa, Homo sapiens
  CDR3 for beta chain variable domain of TCR clone 45872 (TRBV7-9, TRBJ2-7)
YASSIKRGEQYF

SEQ ID NO: 91745 - protein, 14 aa, Homo sapiens
  CDR3 for alpha chain variable domain of TCR clone 45873 (TRAV26-1, TRAJ38)
CIADNAGNNRKLIW

SEQ ID NO: 91746 - protein, 15 aa, Homo sapiens
  CDR3 for beta chain variable domain of TCR clone 45873 (TRBV18, TRBJ2-5)
CASSPRASEAETQYF

SEQ ID NO: 91747 - protein, 11 aa, Homo sapiens
  CDR3 for alpha chain variable domain of TCR clone 45874 (TRAV2, TRAJ13)
CASGGYQKVTF

SEQ ID NO: 91748 - protein, 13 aa, Homo sapiens
  CDR3 for beta chain variable domain of TCR clone 45874 (TRBV27, TRBJ2-7)
CASSFVSSYEQYF

SEQ ID NO: 91749 - protein, 13 aa, Homo sapiens
  CDR3 for alpha chain variable domain of TCR clone 45875 (TRAV26-2, TRAJ43)
CILRAVNNNDMRF

SEQ ID NO: 91750 - protein, 15 aa, Homo sapiens
  CDR3 for beta chain variable domain of TCR clone 45875 (TRBV7-2, TRBJ2-1)
FASTHGTGIYNEQFF

SEQ ID NO: 91751 - protein, 13 aa, Homo sapiens
  CDR3 for alpha chain variable domain of TCR clone 45876 (TRAV27, TRAJ49)
CAPRPYTGNQFHF

SEQ ID NO: 91752 - protein, 16 aa, Homo sapiens
  CDR3 for beta chain variable domain of TCR clone 45876 (TRBV4-1, TRBJ1-2)
CASSQDAGQVLYGYTF

SEQ ID NO: 91753 - protein, 15 aa, Homo sapiens
  CDR3 for alpha chain variable domain of TCR clone 45877 (TRAV14/DV4, TRAJ15)
CAMREGWQAGTALIF

SEQ ID NO: 91754 - protein, 14 aa, Homo sapiens
  CDR3 for beta chain variable domain of TCR clone 45877 (TRBV19, TRBJ2-5)
CDSSMTGQQETQYF

SEQ ID NO: 91755 - protein, 14 aa, Homo sapiens
  CDR3 for alpha chain variable domain of TCR clone 45878 (TRAV12-2, TRAJ13)
CAVKKTGGYQKVTF

SEQ ID NO: 91756 - protein, 16 aa, Homo sapiens
  CDR3 for beta chain variable domain of TCR clone 45878 (TRBV13, TRBJ2-3)
CQQPLQGSGGRNTQYF

SEQ ID NO: 91757 - protein, 16 aa, Homo sapiens
  CDR3 for alpha chain variable domain of TCR clone 45879 (TRAV27, TRAJ13)
CAGAKSDSGGYQKVTF

SEQ ID NO: 91758 - protein, 15 aa, Homo sapiens
  CDR3 for beta chain variable domain of TCR clone 45879 (TRBV29-1, TRBJ2-1)
CSVGRHALFYNEQFV

SEQ ID NO: 91759 - protein, 14 aa, Homo sapiens
  CDR3 for alpha chain variable domain of TCR clone 45880 (TRAV35, TRAJ22)
CAGLRPGSARQLTF

SEQ ID NO: 91760 - protein, 15 aa, Homo sapiens
  CDR3 for beta chain variable domain of TCR clone 45880 (TRBV2, TRBJ2-3)
CASSDFEKATDTQYV

SEQ ID NO: 91761 - protein, 12 aa, Homo sapiens
  CDR3 for alpha chain variable domain of TCR clone 45881 (TRAV13-1, TRAJ21)
CAAKEGLNKFYF

SEQ ID NO: 91762 - protein, 15 aa, Homo sapiens
  CDR3 for beta chain variable domain of TCR clone 45881 (TRBV25-1, TRBJ1-4)
CASSPGDSTNEKLFF

SEQ ID NO: 91763 - protein, 15 aa, Homo sapiens
  CDR3 for alpha chain variable domain of TCR clone 45882 (TRAV35, TRAJ40)
CAGQLGTSGTYKYIF

SEQ ID NO: 91764 - protein, 14 aa, Homo sapiens
  CDR3 for beta chain variable domain of TCR clone 45882 (TRBV7-3, TRBJ2-1)
CASSLARGTNEQFF

SEQ ID NO: 91765 - protein, 13 aa, Homo sapiens
  CDR3 for alpha chain variable domain of TCR clone 45883 (TRAV29/DV5, TRAJ31)
CSASRNNNARLMF

SEQ ID NO: 91766 - protein, 12 aa, Homo sapiens
  CDR3 for beta chain variable domain of TCR clone 45883 (TRBV14, TRBJ2-5)
CASSQLKETQYF

SEQ ID NO: 91767 - protein, 14 aa, Homo sapiens
  CDR3 for alpha chain variable domain of TCR clone 45884 (TRAV1-2, TRAJ8)
CAVGEDTGFQKLVF

SEQ ID NO: 91768 - protein, 13 aa, Homo sapiens
  CDR3 for beta chain variable domain of TCR clone 45884 (TRBV15, TRBJ2-7)
CATSTTGHYEQYF

SEQ ID NO: 91769 - protein, 15 aa, Homo sapiens
  CDR3 for alpha chain variable domain of TCR clone 45885 (TRAV27, TRAJ38)
CAARRNAGNNRKLIW

SEQ ID NO: 91770 - protein, 17 aa, Homo sapiens
  CDR3 for beta chain variable domain of TCR clone 45885 (TRBV13, TRBJ2-3)
RASSLSRVAGGRNTQYF

SEQ ID NO: 91771 - protein, 10 aa, Homo sapiens
  CDR3 for alpha chain variable domain of TCR clone 45886 (TRAV30, TRAJ48)
CGIGNEKLTF

SEQ ID NO: 91772 - protein, 14 aa, Homo sapiens
  CDR3 for beta chain variable domain of TCR clone 45886 (TRBV7-6, TRBJ2-3)
CAGSVAGGTDTQYF

SEQ ID NO: 91773 - protein, 10 aa, Homo sapiens
  CDR3 for alpha chain variable domain of TCR clone 45887 (TRAV12-2, TRAJ22)
CAVNETQLTF

SEQ ID NO: 91774 - protein, 13 aa, Homo sapiens
  CDR3 for beta chain variable domain of TCR clone 45887 (TRBV6-5, TRBJ2-6)
CASSTSGPRRLDF

SEQ ID NO: 91775 - protein, 16 aa, Homo sapiens
  CDR3 for alpha chain variable domain of TCR clone 45888 (TRAV26-1, TRAJ38)
CIVRPLNAGNNRKLIW

SEQ ID NO: 91776 - protein, 13 aa, Homo sapiens
  CDR3 for beta chain variable domain of TCR clone 45888 (TRBV18, TRBJ1-1)
CASSPNGDTEAFL

SEQ ID NO: 91777 - protein, 16 aa, Homo sapiens
  CDR3 for alpha chain variable domain of TCR clone 45889 (TRAV16, TRAJ42)
CARKMNYGGSQRNLIF

SEQ ID NO: 91778 - protein, 13 aa, Homo sapiens
  CDR3 for beta chain variable domain of TCR clone 45889 (TRBV20-1, TRBJ2-7)
CSASPPSSYEQYF

SEQ ID NO: 91779 - protein, 14 aa, Homo sapiens
  CDR3 for alpha chain variable domain of TCR clone 45890 (TRAV16, TRAJ15)
CALRPNQAGTALIF

SEQ ID NO: 91780 - protein, 11 aa, Homo sapiens
  CDR3 for beta chain variable domain of TCR clone 45890 (TRBV19, TRBJ2-4)
CASSNKNIQYF

SEQ ID NO: 91781 - protein, 14 aa, Homo sapiens
  CDR3 for alpha chain variable domain of TCR clone 45891 (TRAV8-2, TRAJ37)
CVVSISGNTGKLIF

SEQ ID NO: 91782 - protein, 17 aa, Homo sapiens
  CDR3 for beta chain variable domain of TCR clone 45891 (TRBV7-9, TRBJ2-3)
RASSPTVAGDLTDTQYF

SEQ ID NO: 91783 - protein, 12 aa, Homo sapiens
  CDR3 for alpha chain variable domain of TCR clone 45892 (TRAV12-3, TRAJ4)
CAMTGAGTRLAV

SEQ ID NO: 91784 - protein, 14 aa, Homo sapiens
  CDR3 for beta chain variable domain of TCR clone 45892 (TRBV10-3, TRBJ1-1)
CAIGDTDRGVEAFF

SEQ ID NO: 91785 - protein, 14 aa, Homo sapiens
  CDR3 for alpha chain variable domain of TCR clone 45893 (TRAV29/DV5, TRAJ45)
CAVYSGGGADGLTF

SEQ ID NO: 91786 - protein, 13 aa, Homo sapiens
  CDR3 for beta chain variable domain of TCR clone 45893 (TRBV20-1, TRBJ1-1)
CSPRGGGNTEAFF

SEQ ID NO: 91787 - protein, 14 aa, Homo sapiens
  CDR3 for alpha chain variable domain of TCR clone 45894 (TRAV26-1, TRAJ38)
CFADNAGNNRKLIW

SEQ ID NO: 91788 - protein, 13 aa, Homo sapiens
  CDR3 for beta chain variable domain of TCR clone 45894 (TRBV20-1, TRBJ1-1)
CSARGGGNTEAFF

SEQ ID NO: 91789 - protein, 12 aa, Homo sapiens
  CDR3 for alpha chain variable domain of TCR clone 45895 (TRAV29/DV5, TRAJ49)
CAATDTGNQFYF

SEQ ID NO: 91790 - protein, 18 aa, Homo sapiens
  CDR3 for beta chain variable domain of TCR clone 45895 (TRBV25-1, TRBJ2-2)
CHPSLPGGQGAQNRGAVF

SEQ ID NO: 91791 - protein, 13 aa, Homo sapiens
  CDR3 for alpha chain variable domain of TCR clone 45896 (TRAV8-3, TRAJ44)
CAVVPGTASKLTF

SEQ ID NO: 91792 - protein, 14 aa, Homo sapiens
  CDR3 for beta chain variable domain of TCR clone 45896 (TRBV11-2, TRBJ2-3)
CASRRIARTDTQYF

SEQ ID NO: 91793 - protein, 14 aa, Homo sapiens
  CDR3 for alpha chain variable domain of TCR clone 45897 (TRAV1-2, TRAJ16)
CAVNRFSDGQQLLF

SEQ ID NO: 91794 - protein, 14 aa, Homo sapiens
  CDR3 for beta chain variable domain of TCR clone 45897 (TRBV7-9, TRBJ2-3)
CASSLEDGTDTQYF

SEQ ID NO: 91795 - protein, 14 aa, Homo sapiens
  CDR3 for alpha chain variable domain of TCR clone 45898 (TRAV23/DV6, TRAJ8)
CAASKNTGFQKLLF

SEQ ID NO: 91796 - protein, 16 aa, Homo sapiens
  CDR3 for beta chain variable domain of TCR clone 45898 (TRBV4-1, TRBJ2-6)
CASSQVGDPGANVLTF

SEQ ID NO: 91797 - protein, 16 aa, Homo sapiens
  CDR3 for alpha chain variable domain of TCR clone 45899 (TRAV12-2, TRAJ28)
CAVITDSVAGSYQLTF

SEQ ID NO: 91798 - protein, 14 aa, Homo sapiens
  CDR3 for beta chain variable domain of TCR clone 45899 (TRBV25-1, TRBJ1-1)
CASTHLGGNTEAFF

SEQ ID NO: 91799 - protein, 11 aa, Homo sapiens
  CDR3 for alpha chain variable domain of TCR clone 45900 (TRAV22, TRAJ20)
CAPLHDYKLSF

SEQ ID NO: 91800 - protein, 15 aa, Homo sapiens
  CDR3 for beta chain variable domain of TCR clone 45900 (TRBV7-3, TRBJ2-1)
CASSPTGGGEVEQFF

SEQ ID NO: 91801 - protein, 13 aa, Homo sapiens
  CDR3 for alpha chain variable domain of TCR clone 45901 (TRAV12-3, TRAJ43)
CAMIRPNNNDMHF

SEQ ID NO: 91802 - protein, 12 aa, Homo sapiens
  CDR3 for beta chain variable domain of TCR clone 45901 (TRBV11-2, TRBJ2-5)
CASSLGQETQYF

SEQ ID NO: 91803 - protein, 13 aa, Homo sapiens
  CDR3 for alpha chain variable domain of TCR clone 45902 (TRAV2, TRAJ15)
CAVASQAGAALIF

SEQ ID NO: 91804 - protein, 14 aa, Homo sapiens
  CDR3 for beta chain variable domain of TCR clone 45902 (TRBV25-1, TRBJ1-1)
CASTHLGGNTEAFF

SEQ ID NO: 91805 - protein, 16 aa, Homo sapiens
  CDR3 for alpha chain variable domain of TCR clone 45903 (TRAV30, TRAJ24)
CGTEIVDADSWGKFQF

SEQ ID NO: 91806 - protein, 18 aa, Homo sapiens
  CDR3 for beta chain variable domain of TCR clone 45903 (TRBV7-9, TRBJ2-7)
CASSLTTNGSRTWYEQYF

SEQ ID NO: 91807 - protein, 10 aa, Homo sapiens
  CDR3 for alpha chain variable domain of TCR clone 45904 (TRAV23/DV6, TRAJ57)
CAASSTLSQG

SEQ ID NO: 91808 - protein, 15 aa, Homo sapiens
  CDR3 for beta chain variable domain of TCR clone 45904 (TRBV5-1, TRBJ2-3)
CASSVTSGSTDTQYF

SEQ ID NO: 91809 - protein, 13 aa, Homo sapiens
  CDR3 for alpha chain variable domain of TCR clone 45905 (TRAV2, TRAJ15)
CAVASQAGTALIF

SEQ ID NO: 91810 - protein, 18 aa, Homo sapiens
  CDR3 for beta chain variable domain of TCR clone 45905 (TRBV5-1, TRBJ1-1)
CASSSGGNSLNTEAFLDK

SEQ ID NO: 91811 - protein, 14 aa, Homo sapiens
  CDR3 for alpha chain variable domain of TCR clone 45906 (TRAV13-2, TRAJ6)
CAERGSGGSYIPTF

SEQ ID NO: 91812 - protein, 15 aa, Homo sapiens
  CDR3 for beta chain variable domain of TCR clone 45906 (TRBV28, TRBJ1-1)
CASTSTRGLNTEAFF

SEQ ID NO: 91813 - protein, 14 aa, Homo sapiens
  CDR3 for alpha chain variable domain of TCR clone 45907 (TRAV29/DV5, TRAJ49)
CSKLTVDTGNQFYF

SEQ ID NO: 91814 - protein, 14 aa, Homo sapiens
  CDR3 for beta chain variable domain of TCR clone 45907 (TRBV18, TRBJ2-5)
CASSPGVSQETQYF

SEQ ID NO: 91815 - protein, 14 aa, Homo sapiens
  CDR3 for alpha chain variable domain of TCR clone 45908 (TRAV12-3, TRAJ54)
CAMRGIQGAQKLVF

SEQ ID NO: 91816 - protein, 13 aa, Homo sapiens
  CDR3 for beta chain variable domain of TCR clone 45908 (TRBV19, TRBJ1-1)
CTSSPSNGGEAFF

SEQ ID NO: 91817 - protein, 15 aa, Homo sapiens
  CDR3 for alpha chain variable domain of TCR clone 45909 (TRAV3, TRAJ22)
CAVRDRGGSARQLAF

SEQ ID NO: 91818 - protein, 14 aa, Homo sapiens
  CDR3 for beta chain variable domain of TCR clone 45909 (TRBV25-1, TRBJ1-1)
CASTHLGGNTEAFF

SEQ ID NO: 91819 - protein, 13 aa, Homo sapiens
  CDR3 for alpha chain variable domain of TCR clone 45910 (TRAV12-2, TRAJ52)
CNAGGTSYGKLTF

SEQ ID NO: 91820 - protein, 12 aa, Homo sapiens
  CDR3 for beta chain variable domain of TCR clone 45910 (TRBV3-1, TRBJ2-2)
CASSLFPGELFF

SEQ ID NO: 91821 - protein, 12 aa, Homo sapiens
  CDR3 for alpha chain variable domain of TCR clone 45911 (TRAV12-2, TRAJ21)
CAVRYNFNNFYF

SEQ ID NO: 91822 - protein, 14 aa, Homo sapiens
  CDR3 for beta chain variable domain of TCR clone 45911 (TRBV28, TRBJ2-1)
CASSYYTAYNEQFF

SEQ ID NO: 91823 - protein, 12 aa, Homo sapiens
  CDR3 for alpha chain variable domain of TCR clone 45912 (TRAV2, TRAJ9)
CAAGAGGFKAIF

SEQ ID NO: 91824 - protein, 16 aa, Homo sapiens
  CDR3 for beta chain variable domain of TCR clone 45912 (TRBV13, TRBJ2-2)
CASSPRTGEHTGELFF

SEQ ID NO: 91825 - protein, 15 aa, Homo sapiens
  CDR3 for alpha chain variable domain of TCR clone 45913 (TRAV21, TRAJ24)
CAARSSTDSWGKLQF

SEQ ID NO: 91826 - protein, 13 aa, Homo sapiens
  CDR3 for beta chain variable domain of TCR clone 45913 (TRBV11-2, TRBJ2-5)
CASSSTWEETQYF

SEQ ID NO: 91827 - protein, 14 aa, Homo sapiens
  CDR3 for alpha chain variable domain of TCR clone 45914 (TRAV20, TRAJ29)
CAVQARVGNTPLVF

SEQ ID NO: 91828 - protein, 15 aa, Homo sapiens
  CDR3 for beta chain variable domain of TCR clone 45914 (TRBV29-1, TRBJ2-7)
CSVEFFDRGSYEQYF

SEQ ID NO: 91829 - protein, 15 aa, Homo sapiens
  CDR3 for alpha chain variable domain of TCR clone 45915 (TRAV26-1, TRAJ29)
CIVRVEGSGNTPLVF

SEQ ID NO: 91830 - protein, 15 aa, Homo sapiens
  CDR3 for beta chain variable domain of TCR clone 45915 (TRBV19, TRBJ1-1)
CASTSGQIQNTEAFF

SEQ ID NO: 91831 - protein, 13 aa, Homo sapiens
  CDR3 for alpha chain variable domain of TCR clone 45916 (TRAV3, TRAJ21)
CAVREPDFNKFYF

SEQ ID NO: 91832 - protein, 13 aa, Homo sapiens
  CDR3 for beta chain variable domain of TCR clone 45916 (TRBV9, TRBJ2-1)
CASSPSCGNEQFF

SEQ ID NO: 91833 - protein, 13 aa, Homo sapiens
  CDR3 for alpha chain variable domain of TCR clone 45917 (TRAV3, TRAJ21)
CAVRDPDFNKFYF

SEQ ID NO: 91834 - protein, 13 aa, Homo sapiens
  CDR3 for beta chain variable domain of TCR clone 45917 (TRBV9, TRBJ2-1)
CASSPSGGNEQFF

SEQ ID NO: 91835 - protein, 12 aa, Homo sapiens
  CDR3 for alpha chain variable domain of TCR clone 45918 (TRAV35, TRAJ34)
CWAFYNTDKLIF

SEQ ID NO: 91836 - protein, 12 aa, Homo sapiens
  CDR3 for beta chain variable domain of TCR clone 45918 (TRBV12-4, TRBJ1-1)
CASSLVDTEAFF

SEQ ID NO: 91837 - protein, 13 aa, Homo sapiens
  CDR3 for alpha chain variable domain of TCR clone 45919 (TRAV2, TRAJ15)
CAVASQAGTALIF

SEQ ID NO: 91838 - protein, 15 aa, Homo sapiens
  CDR3 for beta chain variable domain of TCR clone 45919 (TRBV2, TRBJ2-2)
CASSRETVGTGELFF

SEQ ID NO: 91839 - protein, 15 aa, Homo sapiens
  CDR3 for alpha chain variable domain of TCR clone 45920 (TRAV8-3, TRAJ23)
CAVGDRYNQGGKLIF

SEQ ID NO: 91840 - protein, 22 aa, Homo sapiens
  CDR3 for beta chain variable domain of TCR clone 45920 (TRBV29-1, TRBJ2-5)
TVSNMSPEDSSIYLRSAGTQYF

SEQ ID NO: 91841 - protein, 13 aa, Homo sapiens
  CDR3 for alpha chain variable domain of TCR clone 45921 (TRAV21, TRAJ27)
CAARPGNAGKSTF

SEQ ID NO: 91842 - protein, 14 aa, Homo sapiens
  CDR3 for beta chain variable domain of TCR clone 45921 (TRBV7-6, TRBJ2-3)
CASSLGTVTDTQNF

SEQ ID NO: 91843 - protein, 14 aa, Homo sapiens
  CDR3 for alpha chain variable domain of TCR clone 45922 (TRAV3, TRAJ9)
CAVRLNTGGFKTIF

SEQ ID NO: 91844 - protein, 13 aa, Homo sapiens
  CDR3 for beta chain variable domain of TCR clone 45922 (TRBV7-3, TRBJ1-1)
CASSQDWGAEAFF

SEQ ID NO: 91845 - protein, 15 aa, Homo sapiens
  CDR3 for alpha chain variable domain of TCR clone 45923 (TRAV21, TRAJ53)
CATLNSGGSNYKLTF

SEQ ID NO: 91846 - protein, 16 aa, Homo sapiens
  CDR3 for beta chain variable domain of TCR clone 45923 (TRBV9, TRBJ2-1)
CASSVGGGGNYNGQFF

SEQ ID NO: 91847 - protein, 15 aa, Homo sapiens
  CDR3 for alpha chain variable domain of TCR clone 45924 (TRAV8-3, TRAJ23)
CAVGDRYNQGGKRIF

SEQ ID NO: 91848 - protein, 22 aa, Homo sapiens
  CDR3 for beta chain variable domain of TCR clone 45924 (TRBV29-1, TRBJ2-5)
TVSNMSPEDSSIYLCSAGTQYF

SEQ ID NO: 91849 - protein, 14 aa, Homo sapiens
  CDR3 for alpha chain variable domain of TCR clone 45925 (TRAV12-2, TRAJ13)
CSVKKTGGYQKVTF

SEQ ID NO: 91850 - protein, 16 aa, Homo sapiens
  CDR3 for beta chain variable domain of TCR clone 45925 (TRBV2, TRBJ2-1)
CASRSPAGGKYNEQFF

SEQ ID NO: 91851 - protein, 16 aa, Homo sapiens
  CDR3 for alpha chain variable domain of TCR clone 45926 (TRAV26-1, TRAJ53)
CIVRVAMGGSNYKLTF

SEQ ID NO: 91852 - protein, 12 aa, Homo sapiens
  CDR3 for beta chain variable domain of TCR clone 45926 (TRBV7-9, TRBJ1-5)
CAGSPQGQPQHF

SEQ ID NO: 91853 - protein, 13 aa, Homo sapiens
  CDR3 for alpha chain variable domain of TCR clone 45927 (TRAV2, TRAJ15)
CAVASQAGTALIF

SEQ ID NO: 91854 - protein, 16 aa, Homo sapiens
  CDR3 for beta chain variable domain of TCR clone 45927 (TRBV19, TRBJ2-2)
CASRSPGTGATGELFF

SEQ ID NO: 91855 - protein, 12 aa, Homo sapiens
  CDR3 for alpha chain variable domain of TCR clone 45928 (TRAV12-1, TRAJ40)
CVVYSGTYKYIF

SEQ ID NO: 91856 - protein, 18 aa, Homo sapiens
  CDR3 for beta chain variable domain of TCR clone 45928 (TRBV11-2, TRBJ2-3)
CASSLGGASRGAPNAQYF

SEQ ID NO: 91857 - protein, 15 aa, Homo sapiens
  CDR3 for alpha chain variable domain of TCR clone 45929 (TRAV12-2, TRAJ53)
CAVNGGGGSNYKLTF

SEQ ID NO: 91858 - protein, 13 aa, Homo sapiens
  CDR3 for beta chain variable domain of TCR clone 45929 (TRBV3-1, TRBJ1-1)
CSSSPGVITEAFF

SEQ ID NO: 91859 - protein, 14 aa, Homo sapiens
  CDR3 for alpha chain variable domain of TCR clone 45930 (TRAV16, TRAJ26)
CALSSANYGQNFAF

SEQ ID NO: 91860 - protein, 16 aa, Homo sapiens
  CDR3 for beta chain variable domain of TCR clone 45930 (TRBV20-1, TRBJ1-4)
CSAPGQGLLTNEKLFF

SEQ ID NO: 91861 - protein, 14 aa, Homo sapiens
  CDR3 for alpha chain variable domain of TCR clone 45931 (TRAV12-2, TRAJ13)
CAVKETGGYQKVTF

SEQ ID NO: 91862 - protein, 13 aa, Homo sapiens
  CDR3 for beta chain variable domain of TCR clone 45931 (TRBV10-3, TRBJ2-7)
CASKLAVNYEQYF

SEQ ID NO: 91863 - protein, 14 aa, Homo sapiens
  CDR3 for alpha chain variable domain of TCR clone 45932 (TRAV12-2, TRAJ17)
CTVLFKAAGNKLTF

SEQ ID NO: 91864 - protein, 15 aa, Homo sapiens
  CDR3 for beta chain variable domain of TCR clone 45932 (TRBV20-1, TRBJ2-7)
CSARDRVSGMDEQYF

SEQ ID NO: 91865 - protein, 14 aa, Homo sapiens
  CDR3 for alpha chain variable domain of TCR clone 45933 (TRAV12-3, TRAJ6)
CAMSATGGSYMPTF

SEQ ID NO: 91866 - protein, 16 aa, Homo sapiens
  CDR3 for beta chain variable domain of TCR clone 45933 (TRBV4-2, TRBJ2-1)
CASSPRAGQGANEQFF

SEQ ID NO: 91867 - protein, 11 aa, Homo sapiens
  CDR3 for alpha chain variable domain of TCR clone 45934 (TRAV17, TRAJ9)
CGFTGGFKTIF

SEQ ID NO: 91868 - protein, 16 aa, Homo sapiens
  CDR3 for beta chain variable domain of TCR clone 45934 (TRBV7-6, TRBJ2-3)
CASSPRRGGLGDTQYF

SEQ ID NO: 91869 - protein, 20 aa, Homo sapiens
  CDR3 for alpha chain variable domain of TCR clone 45935 (TRAV26-1, TRAJ42)
CCVLLYRQTYYGGSQGNLIF

SEQ ID NO: 91870 - protein, 16 aa, Homo sapiens
  CDR3 for beta chain variable domain of TCR clone 45935 (TRBV7-3, TRBJ2-2)
CASSLKRGTLSGELFF

SEQ ID NO: 91871 - protein, 14 aa, Homo sapiens
  CDR3 for alpha chain variable domain of TCR clone 45936 (TRAV2, TRAJ9)
CAVEDRSGGFKTIF

SEQ ID NO: 91872 - protein, 12 aa, Homo sapiens
  CDR3 for beta chain variable domain of TCR clone 45936 (TRBV6-1, TRBJ2-7)
CASSEPLYEQYF

SEQ ID NO: 91873 - protein, 17 aa, Homo sapiens
  CDR3 for alpha chain variable domain of TCR clone 45937 (TRAV13-1, TRAJ52)
CAASSGSGGTSYGKLTF

SEQ ID NO: 91874 - protein, 13 aa, Homo sapiens
  CDR3 for beta chain variable domain of TCR clone 45937 (TRBV20-1, TRBJ1-1)
CSAPLGGGTEAFF

SEQ ID NO: 91875 - protein, 13 aa, Homo sapiens
  CDR3 for alpha chain variable domain of TCR clone 45938 (TRAV1-1, TRAJ9)
CAAKNTGGFKTIF

SEQ ID NO: 91876 - protein, 14 aa, Homo sapiens
  CDR3 for beta chain variable domain of TCR clone 45938 (TRBV20-1, TRBJ2-1)
CNAQIGGSANEQFF

SEQ ID NO: 91877 - protein, 13 aa, Homo sapiens
  CDR3 for alpha chain variable domain of TCR clone 45939 (TRAV20, TRAJ54)
CAVQAGGAQKLVF

SEQ ID NO: 91878 - protein, 17 aa, Homo sapiens
  CDR3 for beta chain variable domain of TCR clone 45939 (TRBV28, TRBJ2-1)
CASSSARQALTYNEQFF

SEQ ID NO: 91879 - protein, 12 aa, Homo sapiens
  CDR3 for alpha chain variable domain of TCR clone 45940 (TRAV12-3, TRAJ17)
CAMTLTGNKLTF

SEQ ID NO: 91880 - protein, 13 aa, Homo sapiens
  CDR3 for beta chain variable domain of TCR clone 45940 (TRBV28, TRBJ1-2)
CASSLQGRGGYTF

SEQ ID NO: 91881 - protein, 15 aa, Homo sapiens
  CDR3 for alpha chain variable domain of TCR clone 45941 (TRAV12-1, TRAJ44)
CVVFVNTGTASKLTF

SEQ ID NO: 91882 - protein, 17 aa, Homo sapiens
  CDR3 for beta chain variable domain of TCR clone 45941 (TRBV7-8, TRBJ2-6)
CASSAGTGGAGANVLSF

SEQ ID NO: 91883 - protein, 16 aa, Homo sapiens
  CDR3 for alpha chain variable domain of TCR clone 45942 (TRAV3, TRAJ5)
CAVRSLMDTGRRALTF

SEQ ID NO: 91884 - protein, 16 aa, Homo sapiens
  CDR3 for beta chain variable domain of TCR clone 45942 (TRBV4-2, TRBJ2-7)
CASSQEGLANSYEQYF

SEQ ID NO: 91885 - protein, 10 aa, Homo sapiens
  CDR3 for alpha chain variable domain of TCR clone 45943 (TRAV12-1, TRAJ37)
ARGNTGKLIF

SEQ ID NO: 91886 - protein, 15 aa, Homo sapiens
  CDR3 for beta chain variable domain of TCR clone 45943 (TRBV7-2, TRBJ2-3)
CASSLEQGGTGTQYF

SEQ ID NO: 91887 - protein, 11 aa, Homo sapiens
  CDR3 for alpha chain variable domain of TCR clone 45944 (TRAV8-6, TRAJ34)
CAVWNTDKLIF

SEQ ID NO: 91888 - protein, 12 aa, Homo sapiens
  CDR3 for beta chain variable domain of TCR clone 45944 (TRBV11-2, TRBJ2-2)
CASSLGGGELFF

SEQ ID NO: 91889 - protein, 12 aa, Homo sapiens
  CDR3 for alpha chain variable domain of TCR clone 45945 (TRAV35, TRAJ49)
CAGWNTGNQFYF

SEQ ID NO: 91890 - protein, 16 aa, Homo sapiens
  CDR3 for beta chain variable domain of TCR clone 45945 (TRBV5-1, TRBJ2-2)
CVSSLWDTTNTGELFF

SEQ ID NO: 91891 - protein, 14 aa, Homo sapiens
  CDR3 for alpha chain variable domain of TCR clone 45946 (TRAV13-1, TRAJ6)
CAASITGGSYIPTF

SEQ ID NO: 91892 - protein, 13 aa, Homo sapiens
  CDR3 for beta chain variable domain of TCR clone 45946 (TRBV19, TRBJ1-2)
CASSVPGQDGYTF

SEQ ID NO: 91893 - protein, 15 aa, Homo sapiens
  CDR3 for alpha chain variable domain of TCR clone 45947 (TRAV36/DV7, TRAJ53)
CAVEGSGGSNYKLTF

SEQ ID NO: 91894 - protein, 16 aa, Homo sapiens
  CDR3 for beta chain variable domain of TCR clone 45947 (TRBV27, TRBJ2-2)
CASSLSGVWVTGELFF

SEQ ID NO: 91895 - protein, 13 aa, Homo sapiens
  CDR3 for alpha chain variable domain of TCR clone 45948 (TRAV3, TRAJ27)
CAVRPLGAGKSTF

SEQ ID NO: 91896 - protein, 15 aa, Homo sapiens
  CDR3 for beta chain variable domain of TCR clone 45948 (TRBV9, TRBJ1-6)
CASSVAGTGDSPLLF

SEQ ID NO: 91897 - protein, 14 aa, Homo sapiens
  CDR3 for alpha chain variable domain of TCR clone 45949 (TRAV1-1, TRAJ27)
CAVIYNTNAGKSTF

SEQ ID NO: 91898 - protein, 15 aa, Homo sapiens
  CDR3 for beta chain variable domain of TCR clone 45949 (TRBV6-3, TRBJ2-7)
CASSSPGKVFYEQYF

SEQ ID NO: 91899 - protein, 16 aa, Homo sapiens
  CDR3 for alpha chain variable domain of TCR clone 45950 (TRAV1-2, TRAJ10)
CAVKGVLTGGGNKLTF

SEQ ID NO: 91900 - protein, 12 aa, Homo sapiens
  CDR3 for beta chain variable domain of TCR clone 45950 (TRBV7-8, TRBJ2-7)
CASSLGDREQYF

SEQ ID NO: 91901 - protein, 14 aa, Homo sapiens
  CDR3 for alpha chain variable domain of TCR clone 45951 (TRAV16, TRAJ48)
CALTPGFGNEKLNF

SEQ ID NO: 91902 - protein, 15 aa, Homo sapiens
  CDR3 for beta chain variable domain of TCR clone 45951 (TRBV6-6, TRBJ2-7)
CASSYSYGGSYEQYF

SEQ ID NO: 91903 - protein, 14 aa, Homo sapiens
  CDR3 for alpha chain variable domain of TCR clone 45952 (TRAV4, TRAJ20)
CLVGRRSNDYKLNF

SEQ ID NO: 91904 - protein, 13 aa, Homo sapiens
  CDR3 for beta chain variable domain of TCR clone 45952 (TRBV19, TRBJ1-2)
CASSVPGQDGYTF

SEQ ID NO: 91905 - protein, 11 aa, Homo sapiens
  CDR3 for alpha chain variable domain of TCR clone 45953 (TRAV3, TRAJ21)
CAVGNFNKFYI

SEQ ID NO: 91906 - protein, 16 aa, Homo sapiens
  CDR3 for beta chain variable domain of TCR clone 45953 (TRBV19, TRBJ2-1)
CASSKAGPSSYNEQFF

SEQ ID NO: 91907 - protein, 16 aa, Homo sapiens
  CDR3 for alpha chain variable domain of TCR clone 45954 (TRAV12-1, TRAJ42)
CVVTPYYGGSQGNLVF

SEQ ID NO: 91908 - protein, 15 aa, Homo sapiens
  CDR3 for beta chain variable domain of TCR clone 45954 (TRBV4-3, TRBJ2-7)
CASSQGGRGIYEQYF

SEQ ID NO: 91909 - protein, 13 aa, Homo sapiens
  CDR3 for alpha chain variable domain of TCR clone 45955 (TRAV3, TRAJ27)
CAVRPLGAGKSTF

SEQ ID NO: 91910 - protein, 12 aa, Homo sapiens
  CDR3 for beta chain variable domain of TCR clone 45955 (TRBV7-9, TRBJ2-7)
CAARTDAYEQYF

SEQ ID NO: 91911 - protein, 13 aa, Homo sapiens
  CDR3 for alpha chain variable domain of TCR clone 45956 (TRAV27, TRAJ8)
CAGGPTGFQRLVF

SEQ ID NO: 91912 - protein, 15 aa, Homo sapiens
  CDR3 for beta chain variable domain of TCR clone 45956 (TRBV6-1, TRBJ2-7)
CASSESMGDFYEQYF

SEQ ID NO: 91913 - protein, 13 aa, Homo sapiens
  CDR3 for alpha chain variable domain of TCR clone 45957 (TRAV16, TRAJ26)
CITVLCLGQNFVF

SEQ ID NO: 91914 - protein, 12 aa, Homo sapiens
  CDR3 for beta chain variable domain of TCR clone 45957 (TRBV11-2, TRBJ2-1)
CAISPGNNEQFF

SEQ ID NO: 91915 - protein, 15 aa, Homo sapiens
  CDR3 for alpha chain variable domain of TCR clone 45958 (TRAV26-2, TRAJ39)
CILRGNNNAGNMLTF

SEQ ID NO: 91916 - protein, 15 aa, Homo sapiens
  CDR3 for beta chain variable domain of TCR clone 45958 (TRBV5-4, TRBJ1-1)
CASSSLGWANTEAFF

SEQ ID NO: 91917 - protein, 14 aa, Homo sapiens
  CDR3 for alpha chain variable domain of TCR clone 45959 (TRAV12-3, TRAJ53)
CGATSGGSNYKMTF

SEQ ID NO: 91918 - protein, 13 aa, Homo sapiens
  CDR3 for beta chain variable domain of TCR clone 45959 (TRBV19, TRBJ1-5)
CASSTQDGQPQHF

SEQ ID NO: 91919 - protein, 12 aa, Homo sapiens
  CDR3 for alpha chain variable domain of TCR clone 45960 (TRAV27, TRAJ21)
CAGVRRLQQILL

SEQ ID NO: 91920 - protein, 14 aa, Homo sapiens
  CDR3 for beta chain variable domain of TCR clone 45960 (TRBV7-9, TRBJ1-4)
CASSLEGQSEKLFF

SEQ ID NO: 91921 - protein, 12 aa, Homo sapiens
  CDR3 for alpha chain variable domain of TCR clone 45961 (TRAV25, TRAJ5)
CAGGGGQESTYF

SEQ ID NO: 91922 - protein, 15 aa, Homo sapiens
  CDR3 for beta chain variable domain of TCR clone 45961 (TRBV20-1, TRBJ2-7)
CSARDRVSGMDEQYF

SEQ ID NO: 91923 - protein, 14 aa, Homo sapiens
  CDR3 for alpha chain variable domain of TCR clone 45962 (TRAV2, TRAJ16)
CAVERGSDGQRLLF

SEQ ID NO: 91924 - protein, 12 aa, Homo sapiens
  CDR3 for beta chain variable domain of TCR clone 45962 (TRBV6-5, TRBJ2-7)
CASYIYGYERYF

SEQ ID NO: 91925 - protein, 15 aa, Homo sapiens
  CDR3 for alpha chain variable domain of TCR clone 45963 (TRAV25, TRAJ52)
CAGRPGGTSYGKLTF

SEQ ID NO: 91926 - protein, 17 aa, Homo sapiens
  CDR3 for beta chain variable domain of TCR clone 45963 (TRBV7-8, TRBJ2-6)
CASSTGTGGAGANVLTF

SEQ ID NO: 91927 - protein, 15 aa, Homo sapiens
  CDR3 for alpha chain variable domain of TCR clone 45964 (TRAV3, TRAJ4)
CAVRDGTGGYNKLIF

SEQ ID NO: 91928 - protein, 12 aa, Homo sapiens
  CDR3 for beta chain variable domain of TCR clone 45964 (TRBV7-8, TRBJ2-7)
CASSLGDREQYF

SEQ ID NO: 91929 - protein, 15 aa, Homo sapiens
  CDR3 for alpha chain variable domain of TCR clone 45965 (TRAV6, TRAJ37)
CALGGGSGNTGKLIF

SEQ ID NO: 91930 - protein, 14 aa, Homo sapiens
  CDR3 for beta chain variable domain of TCR clone 45965 (TRBV5-7, TRBJ2-5)
CASSVWTVQETQYF

SEQ ID NO: 91931 - protein, 12 aa, Homo sapiens
  CDR3 for alpha chain variable domain of TCR clone 45966 (TRAV16, TRAJ10)
CSRMGGGNKLTF

SEQ ID NO: 91932 - protein, 15 aa, Homo sapiens
  CDR3 for beta chain variable domain of TCR clone 45966 (TRBV6-3, TRBJ2-7)
CASSSPGTVFYEQYS

SEQ ID NO: 91933 - protein, 15 aa, Homo sapiens
  CDR3 for alpha chain variable domain of TCR clone 45967 (TRAV3, TRAJ22)
CAVRDRGGSARPLTF

SEQ ID NO: 91934 - protein, 14 aa, Homo sapiens
  CDR3 for beta chain variable domain of TCR clone 45967 (TRBV19, TRBJ1-5)
CASSLGLIGQPQHF

SEQ ID NO: 91935 - protein, 13 aa, Homo sapiens
  CDR3 for alpha chain variable domain of TCR clone 45968 (TRAV8-1, TRAJ30)
CAVIMNRDDKIIL

SEQ ID NO: 91936 - protein, 14 aa, Homo sapiens
  CDR3 for beta chain variable domain of TCR clone 45968 (TRBV7-2, TRBJ1-6)
CASSLQGANSPLHF

SEQ ID NO: 91937 - protein, 13 aa, Homo sapiens
  CDR3 for alpha chain variable domain of TCR clone 45969 (TRAV27, TRAJ56)
CAGKPGANSKLTF

SEQ ID NO: 91938 - protein, 13 aa, Homo sapiens
  CDR3 for beta chain variable domain of TCR clone 45969 (TRBV7-3, TRBJ2-1)
CASSLDSYNEQFF

SEQ ID NO: 91939 - protein, 15 aa, Homo sapiens
  CDR3 for alpha chain variable domain of TCR clone 45970 (TRAV2, TRAJ9)
CAVEDRGTGGFKTIF

SEQ ID NO: 91940 - protein, 19 aa, Homo sapiens
  CDR3 for beta chain variable domain of TCR clone 45970 (TRBV25-1, TRBJ2-2)
CAILVYRVDRGRKTGELFF

SEQ ID NO: 91941 - protein, 14 aa, Homo sapiens
  CDR3 for alpha chain variable domain of TCR clone 45971 (TRAV38-1, TRAJ29)
CAFITPSGNTPLVF

SEQ ID NO: 91942 - protein, 17 aa, Homo sapiens
  CDR3 for beta chain variable domain of TCR clone 45971 (TRBV13, TRBJ2-3)
CASSLSRVAGGRNTQYF

SEQ ID NO: 91943 - protein, 11 aa, Homo sapiens
  CDR3 for alpha chain variable domain of TCR clone 45972 (TRAV17, TRAJ9)
CATTGGFKTIF

SEQ ID NO: 91944 - protein, 14 aa, Homo sapiens
  CDR3 for beta chain variable domain of TCR clone 45972 (TRBV7-9, TRBJ2-2)
CASSGLADTEELFF

SEQ ID NO: 91945 - protein, 11 aa, Homo sapiens
  CDR3 for alpha chain variable domain of TCR clone 45973 (TRAV2, TRAJ13)
CASGGYQKVTF

SEQ ID NO: 91946 - protein, 13 aa, Homo sapiens
  CDR3 for beta chain variable domain of TCR clone 45973 (TRBV27, TRBJ1-1)
CASSLSIGAEAFF

SEQ ID NO: 91947 - protein, 16 aa, Homo sapiens
  CDR3 for alpha chain variable domain of TCR clone 45974 (TRAV12-2, TRAJ32)
CAVNLGQGGATNKLIF

SEQ ID NO: 91948 - protein, 15 aa, Homo sapiens
  CDR3 for beta chain variable domain of TCR clone 45974 (TRBV5-1, TRBJ2-1)
CASSPPRAPYNEQFF

SEQ ID NO: 91949 - protein, 12 aa, Homo sapiens
  CDR3 for alpha chain variable domain of TCR clone 45975 (TRAV13-2, TRAJ23)
CAERHRGGKLIF

SEQ ID NO: 91950 - protein, 16 aa, Homo sapiens
  CDR3 for beta chain variable domain of TCR clone 45975 (TRBV20-1, TRBJ1-4)
CSGPGQGLLTNEKLFF

SEQ ID NO: 91951 - protein, 13 aa, Homo sapiens
  CDR3 for alpha chain variable domain of TCR clone 45976 (TRAV12-1, TRAJ26)
CVVRRNYGQNFVF

SEQ ID NO: 91952 - protein, 13 aa, Homo sapiens
  CDR3 for beta chain variable domain of TCR clone 45976 (TRBV7-3, TRBJ1-1)
CASSQDWGAEAFF

SEQ ID NO: 91953 - protein, 13 aa, Homo sapiens
  CDR3 for alpha chain variable domain of TCR clone 45977 (TRAV21, TRAJ27)
CAALNTNAGKSTF

SEQ ID NO: 91954 - protein, 14 aa, Homo sapiens
  CDR3 for beta chain variable domain of TCR clone 45977 (TRBV27, TRBJ1-1)
CASSLLSGISEAFF

SEQ ID NO: 91955 - protein, 15 aa, Homo sapiens
  CDR3 for alpha chain variable domain of TCR clone 45978 (TRAV25, TRAJ52)
CAGRPGGTSYGELTF

SEQ ID NO: 91956 - protein, 13 aa, Homo sapiens
  CDR3 for beta chain variable domain of TCR clone 45978 (TRBV4-1, TRBJ2-1)
CASSQAGGDEQFF

SEQ ID NO: 91957 - protein, 13 aa, Homo sapiens
  CDR3 for alpha chain variable domain of TCR clone 45979 (TRAV20, TRAJ21)
CAVEGYNFNKFYF

SEQ ID NO: 91958 - protein, 14 aa, Homo sapiens
  CDR3 for beta chain variable domain of TCR clone 45979 (TRBV3-1, TRBJ2-5)
CANSQGPDQETQYF

SEQ ID NO: 91959 - protein, 11 aa, Homo sapiens
  CDR3 for alpha chain variable domain of TCR clone 45980 (TRAV1-2, TRAJ31)
CAVNNNARLMF

SEQ ID NO: 91960 - protein, 15 aa, Homo sapiens
  CDR3 for beta chain variable domain of TCR clone 45980 (TRBV28, TRBJ2-1)
CASSRIAGGRSEQFF

SEQ ID NO: 91961 - protein, 14 aa, Homo sapiens
  CDR3 for alpha chain variable domain of TCR clone 45981 (TRAV1-2, TRAJ16)
CAVNRFSDGQKLLF

SEQ ID NO: 91962 - protein, 13 aa, Homo sapiens
  CDR3 for beta chain variable domain of TCR clone 45981 (TRBV5-1, TRBJ2-1)
CASSLGSYNEQFF

SEQ ID NO: 91963 - protein, 16 aa, Homo sapiens
  CDR3 for alpha chain variable domain of TCR clone 45982 (TRAV16, TRAJ52)
CALSAAGGTSYGKLTF

SEQ ID NO: 91964 - protein, 13 aa, Homo sapiens
  CDR3 for beta chain variable domain of TCR clone 45982 (TRBV29-1, TRBJ1-1)
CSVGDSRNTEAFF

SEQ ID NO: 91965 - protein, 15 aa, Homo sapiens
  CDR3 for alpha chain variable domain of TCR clone 45983 (TRAV8-4, TRAJ47)
CAGSDPEEYGNKLVF

SEQ ID NO: 91966 - protein, 15 aa, Homo sapiens
  CDR3 for beta chain variable domain of TCR clone 45983 (TRBV11-2, TRBJ2-1)
CASSLGPDSYNEQFF

SEQ ID NO: 91967 - protein, 18 aa, Homo sapiens
  CDR3 for alpha chain variable domain of TCR clone 45984 (TRAV13-1, TRAJ52)
CAAKNPNAGGTSYGKLTF

SEQ ID NO: 91968 - protein, 14 aa, Homo sapiens
  CDR3 for beta chain variable domain of TCR clone 45984 (TRBV7-3, TRBJ1-1)
CASSLKGGNTEAFF

SEQ ID NO: 91969 - protein, 13 aa, Homo sapiens
  CDR3 for alpha chain variable domain of TCR clone 45985 (TRAV20, TRAJ37)
CAGCSSNTGKLII

SEQ ID NO: 91970 - protein, 11 aa, Homo sapiens
  CDR3 for beta chain variable domain of TCR clone 45985 (TRBV12-4, TRBJ2-3)
CASTATDTQYF

SEQ ID NO: 91971 - protein, 16 aa, Homo sapiens
  CDR3 for alpha chain variable domain of TCR clone 45986 (TRAV26-1, TRAJ53)
CIVRVTMGGSNYKLTF

SEQ ID NO: 91972 - protein, 12 aa, Homo sapiens
  CDR3 for beta chain variable domain of TCR clone 45986 (TRBV7-9, TRBJ1-5)
CASSPQGQPQHF

SEQ ID NO: 91973 - protein, 12 aa, Homo sapiens
  CDR3 for alpha chain variable domain of TCR clone 45987 (TRAV8-3, TRAJ41)
CAVALSGYVLNF

SEQ ID NO: 91974 - protein, 17 aa, Homo sapiens
  CDR3 for beta chain variable domain of TCR clone 45987 (TRBV7-3, TRBJ2-2)
CASSLSGTSGGTGELFF

SEQ ID NO: 91975 - protein, 13 aa, Homo sapiens
  CDR3 for alpha chain variable domain of TCR clone 45988 (TRAV38-1, TRAJ42)
CARWGGSQGNLIF

SEQ ID NO: 91976 - protein, 13 aa, Homo sapiens
  CDR3 for beta chain variable domain of TCR clone 45988 (TRBV28, TRBJ1-5)
CASSDRGNQPQHF

SEQ ID NO: 91977 - protein, 15 aa, Homo sapiens
  CDR3 for alpha chain variable domain of TCR clone 45989 (TRAV3, TRAJ4)
CAVRDGTGGFNKLIF

SEQ ID NO: 91978 - protein, 16 aa, Homo sapiens
  CDR3 for beta chain variable domain of TCR clone 45989 (TRBV27, TRBJ2-2)
CASSSSGVSNTGELFF

SEQ ID NO: 91979 - protein, 14 aa, Homo sapiens
  CDR3 for alpha chain variable domain of TCR clone 45990 (TRAV8-3, TRAJ4)
CAVRASGGYNKLIF

SEQ ID NO: 91980 - protein, 17 aa, Homo sapiens
  CDR3 for beta chain variable domain of TCR clone 45990 (TRBV11-2, TRBJ2-1)
CASSLYPPGVEYNEQFF

SEQ ID NO: 91981 - protein, 14 aa, Homo sapiens
  CDR3 for alpha chain variable domain of TCR clone 45991 (TRAV12-2, TRAJ17)
CSVNIKAAGNKLTF

SEQ ID NO: 91982 - protein, 16 aa, Homo sapiens
  CDR3 for beta chain variable domain of TCR clone 45991 (TRBV20-1, TRBJ2-6)
CSASSQGYDGANVLTF

SEQ ID NO: 91983 - protein, 16 aa, Homo sapiens
  CDR3 for alpha chain variable domain of TCR clone 45992 (TRAV20, TRAJ53)
CAVQGNSGGSNYKLTF

SEQ ID NO: 91984 - protein, 14 aa, Homo sapiens
  CDR3 for beta chain variable domain of TCR clone 45992 (TRBV6-5, TRBJ2-7)
CASSPHGGLREQYF

SEQ ID NO: 91985 - protein, 11 aa, Homo sapiens
  CDR3 for alpha chain variable domain of TCR clone 45993 (TRAV2, TRAJ21)
CAVFNFNKFYF

SEQ ID NO: 91986 - protein, 14 aa, Homo sapiens
  CDR3 for beta chain variable domain of TCR clone 45993 (TRBV15, TRBJ2-3)
CATGSGTSTDTQYF

SEQ ID NO: 91987 - protein, 15 aa, Homo sapiens
  CDR3 for alpha chain variable domain of TCR clone 45994 (TRAV3, TRAJ20)
CAVRDIKLSDYKLSF

SEQ ID NO: 91988 - protein, 14 aa, Homo sapiens
  CDR3 for beta chain variable domain of TCR clone 45994 (TRBV11-1, TRBJ2-7)
CASSFRQGSYEQYF

SEQ ID NO: 91989 - protein, 15 aa, Homo sapiens
  CDR3 for alpha chain variable domain of TCR clone 45995 (TRAV17, TRAJ57)
CATGPSQGGSEKLVF

SEQ ID NO: 91990 - protein, 13 aa, Homo sapiens
  CDR3 for beta chain variable domain of TCR clone 45995 (TRBV7-9, TRBJ1-2)
CASSLEQNYGYTF

SEQ ID NO: 91991 - protein, 11 aa, Homo sapiens
  CDR3 for alpha chain variable domain of TCR clone 45996 (TRAV2, TRAJ13)
CASGGYRKVTF

SEQ ID NO: 91992 - protein, 11 aa, Homo sapiens
  CDR3 for beta chain variable domain of TCR clone 45996 (TRBV6-3, TRBJ2-3)
CATGQADTQYF

SEQ ID NO: 91993 - protein, 14 aa, Homo sapiens
  CDR3 for alpha chain variable domain of TCR clone 45997 (TRAV13-1, TRAJ6)
CAASITGGSYIPTF

SEQ ID NO: 91994 - protein, 14 aa, Homo sapiens
  CDR3 for beta chain variable domain of TCR clone 45997 (TRBV6-3, TRBJ2-1)
CASLHAAYYNEQFF

SEQ ID NO: 91995 - protein, 18 aa, Homo sapiens
  CDR3 for alpha chain variable domain of TCR clone 45998 (TRAV21, TRAJ52)
CAVRPSPAGGTSYGKLTF

SEQ ID NO: 91996 - protein, 16 aa, Homo sapiens
  CDR3 for beta chain variable domain of TCR clone 45998 (TRBV7-3, TRBJ2-1)
CASSLEGDRSYNEQFF

SEQ ID NO: 91997 - protein, 15 aa, Homo sapiens
  CDR3 for alpha chain variable domain of TCR clone 45999 (TRAV12-3, TRAJ49)
CAMAVTPNTGNHFYF

SEQ ID NO: 91998 - protein, 18 aa, Homo sapiens
  CDR3 for beta chain variable domain of TCR clone 45999 (TRBV4-1, TRBJ1-5)
CASSQDPRGQGLNQPQHF

SEQ ID NO: 91999 - protein, 10 aa, Homo sapiens
  CDR3 for alpha chain variable domain of TCR clone 46000 (TRAV21, TRAJ43)
CAVRIGDMRF

SEQ ID NO: 92000 - protein, 13 aa, Homo sapiens
  CDR3 for beta chain variable domain of TCR clone 46000 (TRBV20-1, TRBJ2-7)
CSAPGLADYGQYF

SEQ ID NO: 92001 - protein, 16 aa, Homo sapiens
  CDR3 for alpha chain variable domain of TCR clone 46001 (TRAV12-1, TRAJ22)
CVVNTISSGSARQLTL

SEQ ID NO: 92002 - protein, 13 aa, Homo sapiens
  CDR3 for beta chain variable domain of TCR clone 46001 (TRBV19, TRBJ2-1)
CASNGGVFSEQFF

SEQ ID NO: 92003 - protein, 14 aa, Homo sapiens
  CDR3 for alpha chain variable domain of TCR clone 46002 (TRAV35, TRAJ40)
CAGSTTSGTYKYIF

SEQ ID NO: 92004 - protein, 15 aa, Homo sapiens
  CDR3 for beta chain variable domain of TCR clone 46002 (TRBV20-1, TRBJ2-7)
CSARDRVSGMDEQYF

SEQ ID NO: 92005 - protein, 16 aa, Homo sapiens
  CDR3 for alpha chain variable domain of TCR clone 46003 (TRAV3, TRAJ37)
CAVRPHGSGNTGKLVF

SEQ ID NO: 92006 - protein, 16 aa, Homo sapiens
  CDR3 for beta chain variable domain of TCR clone 46003 (TRBV9, TRBJ1-2)
CASSVEEKVSPYGYTF

SEQ ID NO: 92007 - protein, 15 aa, Homo sapiens
  CDR3 for alpha chain variable domain of TCR clone 46004 (TRAV17, TRAJ13)
CATDAGSGGYQKVTF

SEQ ID NO: 92008 - protein, 17 aa, Homo sapiens
  CDR3 for beta chain variable domain of TCR clone 46004 (TRBV11-2, TRBJ2-1)
CASSLYPPGVEHNEQFF

SEQ ID NO: 92009 - protein, 12 aa, Homo sapiens
  CDR3 for alpha chain variable domain of TCR clone 46005 (TRAV17, TRAJ57)
CATDGGSEKLVF

SEQ ID NO: 92010 - protein, 13 aa, Homo sapiens
  CDR3 for beta chain variable domain of TCR clone 46005 (TRBV7-9, TRBJ2-7)
CASSFAGACEQYF

SEQ ID NO: 92011 - protein, 14 aa, Homo sapiens
  CDR3 for alpha chain variable domain of TCR clone 46006 (TRAV8-3, TRAJ12)
CAVGARDSSYKLIF

SEQ ID NO: 92012 - protein, 16 aa, Homo sapiens
  CDR3 for beta chain variable domain of TCR clone 46006 (TRBV7-9, TRBJ2-1)
CASSDVAGGSYNEQFF

SEQ ID NO: 92013 - protein, 12 aa, Homo sapiens
  CDR3 for alpha chain variable domain of TCR clone 46007 (TRAV8-3, TRAJ26)
CAGDNYGQNFVF

SEQ ID NO: 92014 - protein, 11 aa, Homo sapiens
  CDR3 for beta chain variable domain of TCR clone 46007 (TRBV19, TRBJ1-1)
CASSIGSEALF

SEQ ID NO: 92015 - protein, 11 aa, Homo sapiens
  CDR3 for alpha chain variable domain of TCR clone 46008 (TRAV21, TRAJ11)
CAVNGDSTLTF

SEQ ID NO: 92016 - protein, 11 aa, Homo sapiens
  CDR3 for beta chain variable domain of TCR clone 46008 (TRBV19, TRBJ1-1)
CASSIGSEAFF

SEQ ID NO: 92017 - protein, 14 aa, Homo sapiens
  CDR3 for alpha chain variable domain of TCR clone 46009 (TRAV38-1, TRAJ29)
CAFITPSGNTPLAF

SEQ ID NO: 92018 - protein, 15 aa, Homo sapiens
  CDR3 for beta chain variable domain of TCR clone 46009 (TRBV20-1, TRBJ2-7)
CSARDRVSGMDEQYF

SEQ ID NO: 92019 - protein, 13 aa, Homo sapiens
  CDR3 for alpha chain variable domain of TCR clone 46010 (TRAV2, TRAJ15)
CAVASQAGTALIF

SEQ ID NO: 92020 - protein, 16 aa, Homo sapiens
  CDR3 for beta chain variable domain of TCR clone 46010 (TRBV5-1, TRBJ1-1)
CARSSGGNSLNTEAFF

SEQ ID NO: 92021 - protein, 14 aa, Homo sapiens
  CDR3 for alpha chain variable domain of TCR clone 46011 (TRAV12-1, TRAJ9)
CVVNRRTGGFKTIF

SEQ ID NO: 92022 - protein, 17 aa, Homo sapiens
  CDR3 for beta chain variable domain of TCR clone 46011 (TRBV20-1, TRBJ2-2)
RSASGSGQGGLTGELFF

SEQ ID NO: 92023 - protein, 23 aa, Homo sapiens
  CDR3 for alpha chain variable domain of TCR clone 46012 (TRAV8-4, TRAJ38)
CARLNAGNNHIQNPDPAVYQLSD

SEQ ID NO: 92024 - protein, 14 aa, Homo sapiens
  CDR3 for beta chain variable domain of TCR clone 46012 (TRBV7-8, TRBJ2-3)
CASSLEAGTDTQYF

SEQ ID NO: 92025 - protein, 18 aa, Homo sapiens
  CDR3 for alpha chain variable domain of TCR clone 46013 (TRAV26-1, TRAJ39)
CIVRPPDLYNNAGNMLTF

SEQ ID NO: 92026 - protein, 15 aa, Homo sapiens
  CDR3 for beta chain variable domain of TCR clone 46013 (TRBV7-4, TRBJ1-2)
CQQPLTGGLSYGYIF

SEQ ID NO: 92027 - protein, 21 aa, Homo sapiens
  CDR3 for alpha chain variable domain of TCR clone 46014 (TRAV8-4, TRAJ47)
HLTKPSAHMSDAAERGDKLVF

SEQ ID NO: 92028 - protein, 14 aa, Homo sapiens
  CDR3 for beta chain variable domain of TCR clone 46014 (TRBV7-9, TRBJ2-1)
CASSPRDSLYEQFF

SEQ ID NO: 92029 - protein, 17 aa, Homo sapiens
  CDR3 for alpha chain variable domain of TCR clone 46015 (TRAV12-1, TRAJ42)
CVVMRMNYGGSQGNLIF

SEQ ID NO: 92030 - protein, 13 aa, Homo sapiens
  CDR3 for beta chain variable domain of TCR clone 46015 (TRBV7-2, TRBJ1-1)
CASSLARPAEASF

SEQ ID NO: 92031 - protein, 13 aa, Homo sapiens
  CDR3 for alpha chain variable domain of TCR clone 46016 (TRAV12-1, TRAJ36)
CVVRGTGANNLFF

SEQ ID NO: 92032 - protein, 12 aa, Homo sapiens
  CDR3 for beta chain variable domain of TCR clone 46016 (TRBV29-1, TRBJ2-3)
CSVTGGADTQYF

SEQ ID NO: 92033 - protein, 11 aa, Homo sapiens
  CDR3 for alpha chain variable domain of TCR clone 46017 (TRAV8-3, TRAJ15)
CAVGPGTALIF

SEQ ID NO: 92034 - protein, 15 aa, Homo sapiens
  CDR3 for beta chain variable domain of TCR clone 46017 (TRBV7-9, TRBJ2-7)
CASSLALAEAHEQYF

SEQ ID NO: 92035 - protein, 19 aa, Homo sapiens
  CDR3 for alpha chain variable domain of TCR clone 46018 (TRAV8-6, TRAJ38)
CAVRNAGNNHIQNPDPAVY

SEQ ID NO: 92036 - protein, 15 aa, Homo sapiens
  CDR3 for beta chain variable domain of TCR clone 46018 (TRBV4-1, TRBJ2-2)
CASSEGQGITGELFF

SEQ ID NO: 92037 - protein, 15 aa, Homo sapiens
  CDR3 for alpha chain variable domain of TCR clone 46019 (TRAV38-1, TRAJ37)
CAFIHGSGNTGKLIF

SEQ ID NO: 92038 - protein, 12 aa, Homo sapiens
  CDR3 for beta chain variable domain of TCR clone 46019 (TRBV7-9, TRBJ2-7)
CASGFGSYEQYF

SEQ ID NO: 92039 - protein, 15 aa, Homo sapiens
  CDR3 for alpha chain variable domain of TCR clone 46020 (TRAV26-1, TRAJ42)
FIVRVKGGSQGNFIF

SEQ ID NO: 92040 - protein, 14 aa, Homo sapiens
  CDR3 for beta chain variable domain of TCR clone 46020 (TRBV19, TRBJ2-2)
CATTGHANTGELFF

SEQ ID NO: 92041 - protein, 15 aa, Homo sapiens
  CDR3 for alpha chain variable domain of TCR clone 46021 (TRAV4, TRAJ39)
CLVGPNNNAGNMLTF

SEQ ID NO: 92042 - protein, 14 aa, Homo sapiens
  CDR3 for beta chain variable domain of TCR clone 46021 (TRBV7-2, TRBJ2-7)
CASRSQGAAYEQYF

SEQ ID NO: 92043 - protein, 18 aa, Homo sapiens
  CDR3 for alpha chain variable domain of TCR clone 46022 (TRAV21, TRAJ52)
CAVGPSPAGGTSYGKLTF

SEQ ID NO: 92044 - protein, 13 aa, Homo sapiens
  CDR3 for beta chain variable domain of TCR clone 46022 (TRBV7-3, TRBJ1-1)
CASSQDWGAEAFF

SEQ ID NO: 92045 - protein, 14 aa, Homo sapiens
  CDR3 for alpha chain variable domain of TCR clone 46023 (TRAV21, TRAJ52)
CGRAGGTSYGKLTL

SEQ ID NO: 92046 - protein, 14 aa, Homo sapiens
  CDR3 for beta chain variable domain of TCR clone 46023 (TRBV19, TRBJ1-2)
CASSVLGYNYGYTF

SEQ ID NO: 92047 - protein, 14 aa, Homo sapiens
  CDR3 for alpha chain variable domain of TCR clone 46024 (TRAV13-1, TRAJ35)
CAASKGGFGNVLHC

SEQ ID NO: 92048 - protein, 11 aa, Homo sapiens
  CDR3 for beta chain variable domain of TCR clone 46024 (TRBV12-4, TRBJ2-3)
CASTATDTQYF

SEQ ID NO: 92049 - protein, 12 aa, Homo sapiens
  CDR3 for alpha chain variable domain of TCR clone 46025 (TRAV1-1, TRAJ30)
CAVRGRDDKIIF

SEQ ID NO: 92050 - protein, 13 aa, Homo sapiens
  CDR3 for beta chain variable domain of TCR clone 46025 (TRBV11-3, TRBJ2-7)
CASSLDKLYEQYL

SEQ ID NO: 92051 - protein, 15 aa, Homo sapiens
  CDR3 for alpha chain variable domain of TCR clone 46026 (TRAV21, TRAJ32)
CAVNSYGCATNKLIF

SEQ ID NO: 92052 - protein, 18 aa, Homo sapiens
  CDR3 for beta chain variable domain of TCR clone 46026 (TRBV7-9, TRBJ2-1)
CASSTGLAEGSSYNEQFF

SEQ ID NO: 92053 - protein, 14 aa, Homo sapiens
  CDR3 for alpha chain variable domain of TCR clone 46027 (TRAV12-1, TRAJ17)
CVVNYKAAGNELTF

SEQ ID NO: 92054 - protein, 14 aa, Homo sapiens
  CDR3 for beta chain variable domain of TCR clone 46027 (TRBV7-2, TRBJ2-7)
CASRSQGAAYEQYF

SEQ ID NO: 92055 - protein, 12 aa, Homo sapiens
  CDR3 for alpha chain variable domain of TCR clone 46028 (TRAV27, TRAJ34)
CAEPYNTDKLIF

SEQ ID NO: 92056 - protein, 13 aa, Homo sapiens
  CDR3 for beta chain variable domain of TCR clone 46028 (TRBV2, TRBJ1-1)
CASSVSGYTEAFF

SEQ ID NO: 92057 - protein, 14 aa, Homo sapiens
  CDR3 for alpha chain variable domain of TCR clone 46029 (TRAV35, TRAJ33)
CAGSSQDSNYQLIW

SEQ ID NO: 92058 - protein, 15 aa, Homo sapiens
  CDR3 for beta chain variable domain of TCR clone 46029 (TRBV20-1, TRBJ2-7)
CSAESGTNGAYEQYF

SEQ ID NO: 92059 - protein, 12 aa, Homo sapiens
  CDR3 for alpha chain variable domain of TCR clone 46030 (TRAV17, TRAJ20)
CATQFNDYKLSF

SEQ ID NO: 92060 - protein, 13 aa, Homo sapiens
  CDR3 for beta chain variable domain of TCR clone 46030 (TRBV10-3, TRBJ1-1)
CAIIPEGGTEAFF

SEQ ID NO: 92061 - protein, 14 aa, Homo sapiens
  CDR3 for alpha chain variable domain of TCR clone 46031 (TRAV23/DV6, TRAJ37)
FAASTSSNTGKLIF

SEQ ID NO: 92062 - protein, 13 aa, Homo sapiens
  CDR3 for beta chain variable domain of TCR clone 46031 (TRBV7-7, TRBJ1-1)
CASSLGANTEAFF

SEQ ID NO: 92063 - protein, 13 aa, Homo sapiens
  CDR3 for alpha chain variable domain of TCR clone 46032 (TRAV12-3, TRAJ33)
YAMSVNSNYQLIW

SEQ ID NO: 92064 - protein, 16 aa, Homo sapiens
  CDR3 for beta chain variable domain of TCR clone 46032 (TRBV7-3, TRBJ2-3)
CASSLSGYRPEDTQYF

SEQ ID NO: 92065 - protein, 14 aa, Homo sapiens
  CDR3 for alpha chain variable domain of TCR clone 46033 (TRAV14/DV4, TRAJ54)
CAMRGIQGAQKLVF

SEQ ID NO: 92066 - protein, 14 aa, Homo sapiens
  CDR3 for beta chain variable domain of TCR clone 46033 (TRBV12-4, TRBJ1-1)
CASSLGTGGTEAFF

SEQ ID NO: 92067 - protein, 12 aa, Homo sapiens
  CDR3 for alpha chain variable domain of TCR clone 46034 (TRAV21, TRAJ31)
CVLVGNNARLMF

SEQ ID NO: 92068 - protein, 16 aa, Homo sapiens
  CDR3 for beta chain variable domain of TCR clone 46034 (TRBV27, TRBJ2-5)
CASSFGPGGTKETQYF

SEQ ID NO: 92069 - protein, 17 aa, Homo sapiens
  CDR3 for alpha chain variable domain of TCR clone 46035 (TRAV3, TRAJ6)
CAVRDGPGAGGSYIPTF

SEQ ID NO: 92070 - protein, 13 aa, Homo sapiens
  CDR3 for beta chain variable domain of TCR clone 46035 (TRBV29-1, TRBJ1-1)
CSVGDSRNTEAFF

SEQ ID NO: 92071 - protein, 14 aa, Homo sapiens
  CDR3 for alpha chain variable domain of TCR clone 46036 (TRAV12-2, TRAJ13)
CAVKKTGGYQKVTF

SEQ ID NO: 92072 - protein, 14 aa, Homo sapiens
  CDR3 for beta chain variable domain of TCR clone 46036 (TRBV7-2, TRBJ2-7)
CASSPKASFYEQYF

SEQ ID NO: 92073 - protein, 14 aa, Homo sapiens
  CDR3 for alpha chain variable domain of TCR clone 46037 (TRAV2, TRAJ37)
CAVDFTSNTGKLIF

SEQ ID NO: 92074 - protein, 17 aa, Homo sapiens
  CDR3 for beta chain variable domain of TCR clone 46037 (TRBV20-1, TRBJ1-1)
CSASRGVTGTLKLSLDK

SEQ ID NO: 92075 - protein, 13 aa, Homo sapiens
  CDR3 for alpha chain variable domain of TCR clone 46038 (TRAV8-3, TRAJ43)
CAVGPDNNNYMRF

SEQ ID NO: 92076 - protein, 12 aa, Homo sapiens
  CDR3 for beta chain variable domain of TCR clone 46038 (TRBV7-2, TRBJ1-6)
CASSLSSSPLHF

SEQ ID NO: 92077 - protein, 14 aa, Homo sapiens
  CDR3 for alpha chain variable domain of TCR clone 46039 (TRAV26-1, TRAJ38)
CIADNAGNNRKLIL

SEQ ID NO: 92078 - protein, 13 aa, Homo sapiens
  CDR3 for beta chain variable domain of TCR clone 46039 (TRBV20-1, TRBJ1-1)
CSAGGGGNTEAFF

SEQ ID NO: 92079 - protein, 14 aa, Homo sapiens
  CDR3 for alpha chain variable domain of TCR clone 46040 (TRAV8-6, TRAJ36)
CAVSEKDGANNLFF

SEQ ID NO: 92080 - protein, 15 aa, Homo sapiens
  CDR3 for beta chain variable domain of TCR clone 46040 (TRBV12-4, TRBJ2-7)
CASSQTGAISYEQYF

SEQ ID NO: 92081 - protein, 15 aa, Homo sapiens
  CDR3 for alpha chain variable domain of TCR clone 46041 (TRAV27, TRAJ38)
CAARRNAGNNRKLIW

SEQ ID NO: 92082 - protein, 11 aa, Homo sapiens
  CDR3 for beta chain variable domain of TCR clone 46041 (TRBV12-4, TRBJ2-2)
CASSSAGELFL

SEQ ID NO: 92083 - protein, 12 aa, Homo sapiens
  CDR3 for alpha chain variable domain of TCR clone 46042 (TRAV8-3, TRAJ26)
CAGDNYGQNFVF

SEQ ID NO: 92084 - protein, 15 aa, Homo sapiens
  CDR3 for beta chain variable domain of TCR clone 46042 (TRBV9, TRBJ2-1)
CASSLAGSSYNKQFF

SEQ ID NO: 92085 - protein, 15 aa, Homo sapiens
  CDR3 for alpha chain variable domain of TCR clone 46043 (TRAV12-1, TRAJ9)
CVVSFGDTGGFKTIF

SEQ ID NO: 92086 - protein, 19 aa, Homo sapiens
  CDR3 for beta chain variable domain of TCR clone 46043 (TRBV25-1, TRBJ2-2)
CAILVYRVGRGRKTGELFF

SEQ ID NO: 92087 - protein, 15 aa, Homo sapiens
  CDR3 for alpha chain variable domain of TCR clone 46044 (TRAV25, TRAJ53)
CPTSNSGGRNYKLTF

SEQ ID NO: 92088 - protein, 14 aa, Homo sapiens
  CDR3 for beta chain variable domain of TCR clone 46044 (TRBV7-7, TRBJ2-2)
CATRQDSDTGELFF

SEQ ID NO: 92089 - protein, 13 aa, Homo sapiens
  CDR3 for alpha chain variable domain of TCR clone 46045 (TRAV8-3, TRAJ28)
CAVGAVGSYQLTF

SEQ ID NO: 92090 - protein, 15 aa, Homo sapiens
  CDR3 for beta chain variable domain of TCR clone 46045 (TRBV7-9, TRBJ1-5)
YASSQGHQPNQPQHF

SEQ ID NO: 92091 - protein, 21 aa, Homo sapiens
  CDR3 for alpha chain variable domain of TCR clone 46046 (TRAV12-1, TRAJ43)
SSVIQPPTSVWRTNNNNDMRF

SEQ ID NO: 92092 - protein, 14 aa, Homo sapiens
  CDR3 for beta chain variable domain of TCR clone 46046 (TRBV7-9, TRBJ2-2)
CASSLVQDTGELFF

SEQ ID NO: 92093 - protein, 13 aa, Homo sapiens
  CDR3 for alpha chain variable domain of TCR clone 46047 (TRAV17, TRAJ5)
CAPMDTGRRALTF

SEQ ID NO: 92094 - protein, 16 aa, Homo sapiens
  CDR3 for beta chain variable domain of TCR clone 46047 (TRBV29-1, TRBJ1-2)
CSVEANRDIANYGYTF

SEQ ID NO: 92095 - protein, 13 aa, Homo sapiens
  CDR3 for alpha chain variable domain of TCR clone 46048 (TRAV8-3, TRAJ28)
CAVGAVGSYQLTF

SEQ ID NO: 92096 - protein, 14 aa, Homo sapiens
  CDR3 for beta chain variable domain of TCR clone 46048 (TRBV5-4, TRBJ1-1)
CASSLDSRRDEAFF

SEQ ID NO: 92097 - protein, 16 aa, Homo sapiens
  CDR3 for alpha chain variable domain of TCR clone 46049 (TRAV30, TRAJ42)
CGTSKNYGGSQGNPIF

SEQ ID NO: 92098 - protein, 14 aa, Homo sapiens
  CDR3 for beta chain variable domain of TCR clone 46049 (TRBV19, TRBJ1-5)
CASNSYGTHQPRHF

SEQ ID NO: 92099 - protein, 16 aa, Homo sapiens
  CDR3 for alpha chain variable domain of TCR clone 46050 (TRAV29/DV5, TRAJ39)
CAASLLFNNAGNMLAF

SEQ ID NO: 92100 - protein, 16 aa, Homo sapiens
  CDR3 for beta chain variable domain of TCR clone 46050 (TRBV19, TRBJ2-6)
CASSMSGLSGANVLTF

SEQ ID NO: 92101 - protein, 11 aa, Homo sapiens
  CDR3 for alpha chain variable domain of TCR clone 46051 (TRAV21, TRAJ20)
CAVRGDYKLSF

SEQ ID NO: 92102 - protein, 14 aa, Homo sapiens
  CDR3 for beta chain variable domain of TCR clone 46051 (TRBV12-4, TRBJ1-1)
CASSFSQMNTEAFF

SEQ ID NO: 92103 - protein, 14 aa, Homo sapiens
  CDR3 for alpha chain variable domain of TCR clone 46052 (TRAV3, TRAJ28)
CAVRRGAGSYQLTF

SEQ ID NO: 92104 - protein, 17 aa, Homo sapiens
  CDR3 for beta chain variable domain of TCR clone 46052 (TRBV19, TRBJ2-7)
CASSISFYDSYPYEQYF

SEQ ID NO: 92105 - protein, 12 aa, Homo sapiens
  CDR3 for alpha chain variable domain of TCR clone 46053 (TRAV12-3, TRAJ17)
CAMTLTGNKLTF

SEQ ID NO: 92106 - protein, 16 aa, Homo sapiens
  CDR3 for beta chain variable domain of TCR clone 46053 (TRBV12-4, TRBJ2-5)
FASSFFVRGRQETQYF

SEQ ID NO: 92107 - protein, 10 aa, Homo sapiens
  CDR3 for alpha chain variable domain of TCR clone 46054 (TRAV12-3, TRAJ49)
CAMSDDQFYF

SEQ ID NO: 92108 - protein, 13 aa, Homo sapiens
  CDR3 for beta chain variable domain of TCR clone 46054 (TRBV12-4, TRBJ1-1)
CASSPGTGSEAFF

SEQ ID NO: 92109 - protein, 12 aa, Homo sapiens
  CDR3 for alpha chain variable domain of TCR clone 46055 (TRAV12-3, TRAJ4)
CAMTGAGTRLAV

SEQ ID NO: 92110 - protein, 14 aa, Homo sapiens
  CDR3 for beta chain variable domain of TCR clone 46055 (TRBV10-3, TRBJ1-1)
CAISDSDRGVEAFF

SEQ ID NO: 92111 - protein, 12 aa, Homo sapiens
  CDR3 for alpha chain variable domain of TCR clone 46056 (TRAV16, TRAJ49)
CALNEGGNQFYF

SEQ ID NO: 92112 - protein, 14 aa, Homo sapiens
  CDR3 for beta chain variable domain of TCR clone 46056 (TRBV7-9, TRBJ2-1)
CASRPTGLRNEEFF

SEQ ID NO: 92113 - protein, 15 aa, Homo sapiens
  CDR3 for alpha chain variable domain of TCR clone 46057 (TRAV12-2, TRAJ53)
CAVNGGGGSNYKLTF

SEQ ID NO: 92114 - protein, 14 aa, Homo sapiens
  CDR3 for beta chain variable domain of TCR clone 46057 (TRBV6-1, TRBJ1-3)
CASVQGGGGNTMYF

SEQ ID NO: 92115 - protein, 17 aa, Homo sapiens
  CDR3 for alpha chain variable domain of TCR clone 46058 (TRAV3, TRAJ6)
CAVSRRTDTGGSYIPAF

SEQ ID NO: 92116 - protein, 18 aa, Homo sapiens
  CDR3 for beta chain variable domain of TCR clone 46058 (TRBV7-2, TRBJ2-3)
CASSLETSRGRKADTQYF

SEQ ID NO: 92117 - protein, 13 aa, Homo sapiens
  CDR3 for alpha chain variable domain of TCR clone 46059 (TRAV13-2, TRAJ48)
CAEMDFGNEKLTF

SEQ ID NO: 92118 - protein, 12 aa, Homo sapiens
  CDR3 for beta chain variable domain of TCR clone 46059 (TRBV7-8, TRBJ2-7)
CASSLGDREQYF

SEQ ID NO: 92119 - protein, 14 aa, Homo sapiens
  CDR3 for alpha chain variable domain of TCR clone 46060 (TRAV1-2, TRAJ8)
CAVREGTGFQKLVF

SEQ ID NO: 92120 - protein, 14 aa, Homo sapiens
  CDR3 for beta chain variable domain of TCR clone 46060 (TRBV25-1, TRBJ1-1)
CASTHLGGNTEAFF

SEQ ID NO: 92121 - protein, 14 aa, Homo sapiens
  CDR3 for alpha chain variable domain of TCR clone 46061 (TRAV4, TRAJ26)
CLVGPRNYGQNFVF

SEQ ID NO: 92122 - protein, 17 aa, Homo sapiens
  CDR3 for beta chain variable domain of TCR clone 46061 (TRBV24-1, TRBJ2-1)
CATSDVSTSGTYNEQFF

SEQ ID NO: 92123 - protein, 13 aa, Homo sapiens
  CDR3 for alpha chain variable domain of TCR clone 46062 (TRAV3, TRAJ21)
CAVREPDFNKFYF

SEQ ID NO: 92124 - protein, 14 aa, Homo sapiens
  CDR3 for beta chain variable domain of TCR clone 46062 (TRBV4-1, TRBJ2-2)
CASSRAVNTGELFF

SEQ ID NO: 92125 - protein, 14 aa, Homo sapiens
  CDR3 for alpha chain variable domain of TCR clone 46063 (TRAV8-4, TRAJ13)
CAVTLSGGYQKVTF

SEQ ID NO: 92126 - protein, 14 aa, Homo sapiens
  CDR3 for beta chain variable domain of TCR clone 46063 (TRBV7-2, TRBJ1-2)
CASSQTGSTYGYNF

SEQ ID NO: 92127 - protein, 11 aa, Homo sapiens
  CDR3 for alpha chain variable domain of TCR clone 46064 (TRAV21, TRAJ34)
CAHYNTDKLIF

SEQ ID NO: 92128 - protein, 13 aa, Homo sapiens
  CDR3 for beta chain variable domain of TCR clone 46064 (TRBV7-2, TRBJ1-1)
CASNLKGAKVAFF

SEQ ID NO: 92129 - protein, 19 aa, Homo sapiens
  CDR3 for alpha chain variable domain of TCR clone 46065 (TRAV2, TRAJ20)
ILQVREADAAVYRDCKLSF

SEQ ID NO: 92130 - protein, 12 aa, Homo sapiens
  CDR3 for beta chain variable domain of TCR clone 46065 (TRBV11-2, TRBJ2-2)
CASSLGGGGLFF

SEQ ID NO: 92131 - protein, 14 aa, Homo sapiens
  CDR3 for alpha chain variable domain of TCR clone 46066 (TRAV26-1, TRAJ39)
CIVRGSRAGNMLTF

SEQ ID NO: 92132 - protein, 15 aa, Homo sapiens
  CDR3 for beta chain variable domain of TCR clone 46066 (TRBV7-9, TRBJ1-5)
CASSHGHQPNQPQHF

SEQ ID NO: 92133 - protein, 13 aa, Homo sapiens
  CDR3 for alpha chain variable domain of TCR clone 46067 (TRAV16, TRAJ9)
CALRATGGFKTIF

SEQ ID NO: 92134 - protein, 16 aa, Homo sapiens
  CDR3 for beta chain variable domain of TCR clone 46067 (TRBV5-1, TRBJ1-3)
CASSRSGEDSGNTIYL

SEQ ID NO: 92135 - protein, 15 aa, Homo sapiens
  CDR3 for alpha chain variable domain of TCR clone 46068 (TRAV1-2, TRAJ28)
CAVQYSGAGSYQLTS

SEQ ID NO: 92136 - protein, 13 aa, Homo sapiens
  CDR3 for beta chain variable domain of TCR clone 46068 (TRBV20-1, TRBJ2-7)
CSATHTSGYEQYF

SEQ ID NO: 92137 - protein, 16 aa, Homo sapiens
  CDR3 for alpha chain variable domain of TCR clone 46069 (TRAV30, TRAJ44)
CGTEDKGTGTASKLTF

SEQ ID NO: 92138 - protein, 16 aa, Homo sapiens
  CDR3 for beta chain variable domain of TCR clone 46069 (TRBV10-2, TRBJ2-7)
CASSESPGSSGFEQYF

SEQ ID NO: 92139 - protein, 14 aa, Homo sapiens
  CDR3 for alpha chain variable domain of TCR clone 46070 (TRAV26-1, TRAJ49)
CIVRLTNTGNQFYF

SEQ ID NO: 92140 - protein, 13 aa, Homo sapiens
  CDR3 for beta chain variable domain of TCR clone 46070 (TRBV4-1, TRBJ2-7)
CDSSQGQAYEQYF

SEQ ID NO: 92141 - protein, 12 aa, Homo sapiens
  CDR3 for alpha chain variable domain of TCR clone 46071 (TRAV13-2, TRAJ23)
CAERHRGGKLIF

SEQ ID NO: 92142 - protein, 12 aa, Homo sapiens
  CDR3 for beta chain variable domain of TCR clone 46071 (TRBV7-3, TRBJ2-5)
CQQLPGGETQYF

SEQ ID NO: 92143 - protein, 12 aa, Homo sapiens
  CDR3 for alpha chain variable domain of TCR clone 46072 (TRAV38-2/DV8, TRAJ47)
CVLMEYGNKLVF

SEQ ID NO: 92144 - protein, 14 aa, Homo sapiens
  CDR3 for beta chain variable domain of TCR clone 46072 (TRBV20-1, TRBJ1-5)
CSATDRGSNQHQHF

SEQ ID NO: 92145 - protein, 14 aa, Homo sapiens
  CDR3 for alpha chain variable domain of TCR clone 46073 (TRAV1-2, TRAJ16)
CAVNRVSDGQKLLF

SEQ ID NO: 92146 - protein, 13 aa, Homo sapiens
  CDR3 for beta chain variable domain of TCR clone 46073 (TRBV19, TRBJ1-2)
CASSVPGQDGYTF

SEQ ID NO: 92147 - protein, 13 aa, Homo sapiens
  CDR3 for alpha chain variable domain of TCR clone 46074 (TRAV8-6, TRAJ49)
CAVITNTGNQFYF

SEQ ID NO: 92148 - protein, 15 aa, Homo sapiens
  CDR3 for beta chain variable domain of TCR clone 46074 (TRBV6-1, TRBJ2-1)
CASSELRGQYNEQFF

SEQ ID NO: 92149 - protein, 13 aa, Homo sapiens
  CDR3 for alpha chain variable domain of TCR clone 46075 (TRAV17, TRAJ5)
CALRGTGRRALTF

SEQ ID NO: 92150 - protein, 13 aa, Homo sapiens
  CDR3 for beta chain variable domain of TCR clone 46075 (TRBV7-9, TRBJ1-2)
CASSLKQNYGYTF

SEQ ID NO: 92151 - protein, 15 aa, Homo sapiens
  CDR3 for alpha chain variable domain of TCR clone 46076 (TRAV2, TRAJ15)
CAVEDRGQAGTALTF

SEQ ID NO: 92152 - protein, 13 aa, Homo sapiens
  CDR3 for beta chain variable domain of TCR clone 46076 (TRBV10-2, TRBJ2-7)
CASGASGGYEQYF

SEQ ID NO: 92153 - protein, 12 aa, Homo sapiens
  CDR3 for alpha chain variable domain of TCR clone 46077 (TRAV12-2, TRAJ10)
WGVTGGGNKLTF

SEQ ID NO: 92154 - protein, 12 aa, Homo sapiens
  CDR3 for beta chain variable domain of TCR clone 46077 (TRBV7-8, TRBJ2-7)
CASSLGDREQYF

SEQ ID NO: 92155 - protein, 12 aa, Homo sapiens
  CDR3 for alpha chain variable domain of TCR clone 46078 (TRAV1-1, TRAJ8)
CAGGTGFQKLVF

SEQ ID NO: 92156 - protein, 15 aa, Homo sapiens
  CDR3 for beta chain variable domain of TCR clone 46078 (TRBV7-9, TRBJ1-4)
CASSRTGGFNGKLFF

SEQ ID NO: 92157 - protein, 14 aa, Homo sapiens
  CDR3 for alpha chain variable domain of TCR clone 46079 (TRAV8-3, TRAJ4)
CAVGAAGVYNKLIF

SEQ ID NO: 92158 - protein, 15 aa, Homo sapiens
  CDR3 for beta chain variable domain of TCR clone 46079 (TRBV6-5, TRBJ2-1)
CASSYDAGAGNEQFF

SEQ ID NO: 92159 - protein, 12 aa, Homo sapiens
  CDR3 for alpha chain variable domain of TCR clone 46080 (TRAV12-3, TRAJ17)
CAMALTGNKLTF

SEQ ID NO: 92160 - protein, 18 aa, Homo sapiens
  CDR3 for beta chain variable domain of TCR clone 46080 (TRBV4-3, TRBJ1-6)
CASSQETPASSYNSPLHF

SEQ ID NO: 92161 - protein, 13 aa, Homo sapiens
  CDR3 for alpha chain variable domain of TCR clone 46081 (TRAV3, TRAJ21)
CAVREPDFNKFYF

SEQ ID NO: 92162 - protein, 14 aa, Homo sapiens
  CDR3 for beta chain variable domain of TCR clone 46081 (TRBV19, TRBJ1-5)
CASRAPDSFLSQHF

SEQ ID NO: 92163 - protein, 14 aa, Homo sapiens
  CDR3 for alpha chain variable domain of TCR clone 46082 (TRAV1-2, TRAJ8)
CAVREDTGFQKLVF

SEQ ID NO: 92164 - protein, 12 aa, Homo sapiens
  CDR3 for beta chain variable domain of TCR clone 46082 (TRBV11-2, TRBJ2-2)
CDSSLGGGELFF

SEQ ID NO: 92165 - protein, 12 aa, Homo sapiens
  CDR3 for alpha chain variable domain of TCR clone 46083 (TRAV2, TRAJ33)
CASMDSNYQLIW

SEQ ID NO: 92166 - protein, 16 aa, Homo sapiens
  CDR3 for beta chain variable domain of TCR clone 46083 (TRBV2, TRBJ2-7)
CASSEPWTGPSYEQYF

SEQ ID NO: 92167 - protein, 12 aa, Homo sapiens
  CDR3 for alpha chain variable domain of TCR clone 46084 (TRAV17, TRAJ4)
CATDGGYNKRIF

SEQ ID NO: 92168 - protein, 13 aa, Homo sapiens
  CDR3 for beta chain variable domain of TCR clone 46084 (TRBV29-1, TRBJ2-2)
CSTTGVNTGELFF

SEQ ID NO: 92169 - protein, 14 aa, Homo sapiens
  CDR3 for alpha chain variable domain of TCR clone 46085 (TRAV12-1, TRAJ17)
CVVNYKAAGNKLTF

SEQ ID NO: 92170 - protein, 15 aa, Homo sapiens
  CDR3 for beta chain variable domain of TCR clone 46085 (TRBV7-2, TRBJ2-1)
CASSSGLAGGNEQFF

SEQ ID NO: 92171 - protein, 14 aa, Homo sapiens
  CDR3 for alpha chain variable domain of TCR clone 46086 (TRAV13-1, TRAJ44)
CAAKATGTASKLTF

SEQ ID NO: 92172 - protein, 15 aa, Homo sapiens
  CDR3 for beta chain variable domain of TCR clone 46086 (TRBV4-3, TRBJ1-1)
CASSQELGRGAEAFF

SEQ ID NO: 92173 - protein, 13 aa, Homo sapiens
  CDR3 for alpha chain variable domain of TCR clone 46087 (TRAV1-2, TRAJ9)
CAVLNTGDFKTIF

SEQ ID NO: 92174 - protein, 14 aa, Homo sapiens
  CDR3 for beta chain variable domain of TCR clone 46087 (TRBV20-1, TRBJ2-3)
CSARGGTSTDTQYF

SEQ ID NO: 92175 - protein, 13 aa, Homo sapiens
  CDR3 for alpha chain variable domain of TCR clone 46088 (TRAV1-1, TRAJ9)
CAAKNTGGFKTIF

SEQ ID NO: 92176 - protein, 15 aa, Homo sapiens
  CDR3 for beta chain variable domain of TCR clone 46088 (TRBV5-1, TRBJ2-1)
CANTGSGRTYNEQFF

SEQ ID NO: 92177 - protein, 15 aa, Homo sapiens
  CDR3 for alpha chain variable domain of TCR clone 46089 (TRAV2, TRAJ15)
CAVEDRGQAGTALIF

SEQ ID NO: 92178 - protein, 13 aa, Homo sapiens
  CDR3 for beta chain variable domain of TCR clone 46089 (TRBV10-2, TRBJ2-7)
CARGASGGYEQYF

SEQ ID NO: 92179 - protein, 13 aa, Homo sapiens
  CDR3 for alpha chain variable domain of TCR clone 46090 (TRAV21, TRAJ27)
CAARPGNAGKSAL

SEQ ID NO: 92180 - protein, 14 aa, Homo sapiens
  CDR3 for beta chain variable domain of TCR clone 46090 (TRBV7-6, TRBJ2-3)
CASILGTVTDTQYF

SEQ ID NO: 92181 - protein, 13 aa, Homo sapiens
  CDR3 for alpha chain variable domain of TCR clone 46091 (TRAV8-1, TRAJ30)
CAVTMNRDDKIIF

SEQ ID NO: 92182 - protein, 14 aa, Homo sapiens
  CDR3 for beta chain variable domain of TCR clone 46091 (TRBV7-2, TRBJ1-6)
CASSLQGANSPLHF

SEQ ID NO: 92183 - protein, 12 aa, Homo sapiens
  CDR3 for alpha chain variable domain of TCR clone 46092 (TRAV12-3, TRAJ17)
CAMTLTGNKLTF

SEQ ID NO: 92184 - protein, 14 aa, Homo sapiens
  CDR3 for beta chain variable domain of TCR clone 46092 (TRBV19, TRBJ2-1)
CARGARSFQWEQFF

SEQ ID NO: 92185 - protein, 11 aa, Homo sapiens
  CDR3 for alpha chain variable domain of TCR clone 46093 (TRAV35, TRAJ34)
CWARNTDKLIF

SEQ ID NO: 92186 - protein, 14 aa, Homo sapiens
  CDR3 for beta chain variable domain of TCR clone 46093 (TRBV25-1, TRBJ1-1)
CASTHLGGNTEAFF

SEQ ID NO: 92187 - protein, 11 aa, Homo sapiens
  CDR3 for alpha chain variable domain of TCR clone 46094 (TRAV17, TRAJ21)
CATGNFNKSYF

SEQ ID NO: 92188 - protein, 16 aa, Homo sapiens
  CDR3 for beta chain variable domain of TCR clone 46094 (TRBV2, TRBJ2-1)
CASSANPRDWQAEQFF

SEQ ID NO: 92189 - protein, 12 aa, Homo sapiens
  CDR3 for alpha chain variable domain of TCR clone 46095 (TRAV35, TRAJ49)
CAGWNNGNQFYF

SEQ ID NO: 92190 - protein, 16 aa, Homo sapiens
  CDR3 for beta chain variable domain of TCR clone 46095 (TRBV5-1, TRBJ2-2)
CASSLWDTTNTGELFF

SEQ ID NO: 92191 - protein, 15 aa, Homo sapiens
  CDR3 for alpha chain variable domain of TCR clone 46096 (TRAV3, TRAJ7)
CAVRGKDNGNNRLAF

SEQ ID NO: 92192 - protein, 19 aa, Homo sapiens
  CDR3 for beta chain variable domain of TCR clone 46096 (TRBV5-8, TRBJ2-3)
CASSFLGTSGSHRTDTQYF

SEQ ID NO: 92193 - protein, 14 aa, Homo sapiens
  CDR3 for alpha chain variable domain of TCR clone 46097 (TRAV21, TRAJ28)
CAVGSGAGRYQLTF

SEQ ID NO: 92194 - protein, 14 aa, Homo sapiens
  CDR3 for beta chain variable domain of TCR clone 46097 (TRBV18, TRBJ1-4)
CASSPGPNGEKLFF

SEQ ID NO: 92195 - protein, 15 aa, Homo sapiens
  CDR3 for alpha chain variable domain of TCR clone 46098 (TRAV34, TRAJ38)
CGADFTPGNNRKLIW

SEQ ID NO: 92196 - protein, 20 aa, Homo sapiens
  CDR3 for beta chain variable domain of TCR clone 46098 (TRBV7-8, TRBJ2-2)
CASSHLFPGPTIHITGELFF

SEQ ID NO: 92197 - protein, 13 aa, Homo sapiens
  CDR3 for alpha chain variable domain of TCR clone 46099 (TRAV12-1, TRAJ9)
CVVLNTGGFKTIF

SEQ ID NO: 92198 - protein, 14 aa, Homo sapiens
  CDR3 for beta chain variable domain of TCR clone 46099 (TRBV7-6, TRBJ2-3)
CASSLGTVTDTQYC

SEQ ID NO: 92199 - protein, 13 aa, Homo sapiens
  CDR3 for alpha chain variable domain of TCR clone 46100 (TRAV35, TRAJ42)
CAGFPGSQGNLIS

SEQ ID NO: 92200 - protein, 13 aa, Homo sapiens
  CDR3 for beta chain variable domain of TCR clone 46100 (TRBV29-1, TRBJ2-1)
CSVEGGRVNEQFF

SEQ ID NO: 92201 - protein, 16 aa, Homo sapiens
  CDR3 for alpha chain variable domain of TCR clone 46101 (TRAV16, TRAJ52)
CALSAAGGTSYGKLTF

SEQ ID NO: 92202 - protein, 15 aa, Homo sapiens
  CDR3 for beta chain variable domain of TCR clone 46101 (TRBV19, TRBJ2-2)
CASSPRTGWTGELFF

SEQ ID NO: 92203 - protein, 12 aa, Homo sapiens
  CDR3 for alpha chain variable domain of TCR clone 46102 (TRAV13-1, TRAJ21)
CAAKEGFNKFYF

SEQ ID NO: 92204 - protein, 14 aa, Homo sapiens
  CDR3 for beta chain variable domain of TCR clone 46102 (TRBV19, TRBJ2-2)
CASSTLHRSGELFF

SEQ ID NO: 92205 - protein, 13 aa, Homo sapiens
  CDR3 for alpha chain variable domain of TCR clone 46103 (TRAV3, TRAJ27)
CAVRPLGAGKSTF

SEQ ID NO: 92206 - protein, 13 aa, Homo sapiens
  CDR3 for beta chain variable domain of TCR clone 46103 (TRBV7-9, TRBJ2-3)
CSSSPGSTDTQYF

SEQ ID NO: 92207 - protein, 16 aa, Homo sapiens
  CDR3 for alpha chain variable domain of TCR clone 46104 (TRAV27, TRAJ48)
TAAQPGDTGLYLPLTF

SEQ ID NO: 92208 - protein, 15 aa, Homo sapiens
  CDR3 for beta chain variable domain of TCR clone 46104 (TRBV11-2, TRBJ2-1)
CASSSPSTRYNEQFF

SEQ ID NO: 92209 - protein, 14 aa, Homo sapiens
  CDR3 for alpha chain variable domain of TCR clone 46105 (TRAV8-2, TRAJ37)
CVVSISGNTGKLIF

SEQ ID NO: 92210 - protein, 11 aa, Homo sapiens
  CDR3 for beta chain variable domain of TCR clone 46105 (TRBV18, TRBJ2-5)
CASSPRETQYS

SEQ ID NO: 92211 - protein, 11 aa, Homo sapiens
  CDR3 for alpha chain variable domain of TCR clone 46106 (TRAV1-2, TRAJ40)
CAVPGTYKYIF

SEQ ID NO: 92212 - protein, 19 aa, Homo sapiens
  CDR3 for beta chain variable domain of TCR clone 46106 (TRBV29-1, TRBJ2-7)
SAAFKSWGLAGATSSTSGR

SEQ ID NO: 92213 - protein, 12 aa, Homo sapiens
  CDR3 for alpha chain variable domain of TCR clone 46107 (TRAV21, TRAJ8)
CDVNTGFQKLVF

SEQ ID NO: 92214 - protein, 13 aa, Homo sapiens
  CDR3 for beta chain variable domain of TCR clone 46107 (TRBV6-3, TRBJ2-1)
CASSYDNYNEQFF

SEQ ID NO: 92215 - protein, 12 aa, Homo sapiens
  CDR3 for alpha chain variable domain of TCR clone 46108 (TRAV17, TRAJ4)
CATDGGYNKLIF

SEQ ID NO: 92216 - protein, 13 aa, Homo sapiens
  CDR3 for beta chain variable domain of TCR clone 46108 (TRBV29-1, TRBJ2-2)
CSTTGVNTRELFF

SEQ ID NO: 92217 - protein, 13 aa, Homo sapiens
  CDR3 for alpha chain variable domain of TCR clone 46109 (TRAV1-2, TRAJ9)
CAALNTGGFKTIF

SEQ ID NO: 92218 - protein, 13 aa, Homo sapiens
  CDR3 for beta chain variable domain of TCR clone 46109 (TRBV19, TRBJ1-2)
CSSSVPGQDGYTF

SEQ ID NO: 92219 - protein, 15 aa, Homo sapiens
  CDR3 for alpha chain variable domain of TCR clone 46110 (TRAV26-2, TRAJ21)
CILSNTTSTNFTLDL

SEQ ID NO: 92220 - protein, 16 aa, Homo sapiens
  CDR3 for beta chain variable domain of TCR clone 46110 (TRBV4-2, TRBJ2-6)
CASSQARSSGADVLTF

SEQ ID NO: 92221 - protein, 14 aa, Homo sapiens
  CDR3 for alpha chain variable domain of TCR clone 46111 (TRAV12-2, TRAJ13)
CAAKKTGGYQKVTF

SEQ ID NO: 92222 - protein, 13 aa, Homo sapiens
  CDR3 for beta chain variable domain of TCR clone 46111 (TRBV20-1, TRBJ1-1)
CSARLGQGTEAFF

SEQ ID NO: 92223 - protein, 12 aa, Homo sapiens
  CDR3 for alpha chain variable domain of TCR clone 46112 (TRAV12-1, TRAJ40)
CVVYSGTYKYIF

SEQ ID NO: 92224 - protein, 18 aa, Homo sapiens
  CDR3 for beta chain variable domain of TCR clone 46112 (TRBV11-2, TRBJ2-3)
CASSLGGASRGAPNTQYC

SEQ ID NO: 92225 - protein, 12 aa, Homo sapiens
  CDR3 for alpha chain variable domain of TCR clone 46113 (TRAV12-3, TRAJ17)
CAMTLTGNKLTF

SEQ ID NO: 92226 - protein, 14 aa, Homo sapiens
  CDR3 for beta chain variable domain of TCR clone 46113 (TRBV19, TRBJ2-1)
CASPTFVLSGDQFF

SEQ ID NO: 92227 - protein, 13 aa, Homo sapiens
  CDR3 for alpha chain variable domain of TCR clone 46114 (TRAV8-6, TRAJ49)
CAVITNTGNQFYF

SEQ ID NO: 92228 - protein, 17 aa, Homo sapiens
  CDR3 for beta chain variable domain of TCR clone 46114 (TRBV11-2, TRBJ2-1)
CASSLCPPGVEYNEQFF

SEQ ID NO: 92229 - protein, 17 aa, Homo sapiens
  CDR3 for alpha chain variable domain of TCR clone 46115 (TRAV12-3, TRAJ6)
CAMSARGGAGGSYIPTF

SEQ ID NO: 92230 - protein, 13 aa, Homo sapiens
  CDR3 for beta chain variable domain of TCR clone 46115 (TRBV7-9, TRBJ1-2)
CASSLKQNYGYTF

SEQ ID NO: 92231 - protein, 13 aa, Homo sapiens
  CDR3 for alpha chain variable domain of TCR clone 46116 (TRAV9-2, TRAJ22)
CALSEGSARQLTF

SEQ ID NO: 92232 - protein, 17 aa, Homo sapiens
  CDR3 for beta chain variable domain of TCR clone 46116 (TRBV3-1, TRBJ2-5)
CASSQGLVRGTQETQYF

SEQ ID NO: 92233 - protein, 12 aa, Homo sapiens
  CDR3 for alpha chain variable domain of TCR clone 46117 (TRAV21, TRAJ33)
CAKMDSNYQLIW

SEQ ID NO: 92234 - protein, 15 aa, Homo sapiens
  CDR3 for beta chain variable domain of TCR clone 46117 (TRBV10-2, TRBJ2-6)
CASSEQGTGANVLTF

SEQ ID NO: 92235 - protein, 16 aa, Homo sapiens
  CDR3 for alpha chain variable domain of TCR clone 46118 (TRAV30, TRAJ24)
CGTEIVDADSWGKFQF

SEQ ID NO: 92236 - protein, 15 aa, Homo sapiens
  CDR3 for beta chain variable domain of TCR clone 46118 (TRBV7-8, TRBJ2-1)
CASSLADSLYNEQFF

SEQ ID NO: 92237 - protein, 15 aa, Homo sapiens
  CDR3 for alpha chain variable domain of TCR clone 46119 (TRAV26-1, TRAJ17)
CIVSSFEAAGNKLTF

SEQ ID NO: 92238 - protein, 14 aa, Homo sapiens
  CDR3 for beta chain variable domain of TCR clone 46119 (TRBV6-1, TRBJ2-2)
CASTWQGNTGELFF

SEQ ID NO: 92239 - protein, 13 aa, Homo sapiens
  CDR3 for alpha chain variable domain of TCR clone 46120 (TRAV21, TRAJ27)
CAARPGNAGKSTF

SEQ ID NO: 92240 - protein, 13 aa, Homo sapiens
  CDR3 for beta chain variable domain of TCR clone 46120 (TRBV20-1, TRBJ2-1)
QCGRSGEYNEQFF

SEQ ID NO: 92241 - protein, 13 aa, Homo sapiens
  CDR3 for alpha chain variable domain of TCR clone 46121 (TRAV17, TRAJ26)
CATVDNYGQNFVF

SEQ ID NO: 92242 - protein, 14 aa, Homo sapiens
  CDR3 for beta chain variable domain of TCR clone 46121 (TRBV7-2, TRBJ2-7)
CASRSQGAAYEQYF

SEQ ID NO: 92243 - protein, 12 aa, Homo sapiens
  CDR3 for alpha chain variable domain of TCR clone 46122 (TRAV23/DV6, TRAJ30)
CAASKGDDKIIL

SEQ ID NO: 92244 - protein, 18 aa, Homo sapiens
  CDR3 for beta chain variable domain of TCR clone 46122 (TRBV10-3, TRBJ2-3)
CAISESRVGPMRGDTQYF

SEQ ID NO: 92245 - protein, 23 aa, Homo sapiens
  CDR3 for alpha chain variable domain of TCR clone 46123 (TRAV26-1, TRAJ38)
CIADNAGNNHIQNPDPAVYQLKD

SEQ ID NO: 92246 - protein, 13 aa, Homo sapiens
  CDR3 for beta chain variable domain of TCR clone 46123 (TRBV20-1, TRBJ1-1)
CSARGGGNTEAFF

SEQ ID NO: 92247 - protein, 22 aa, Homo sapiens
  CDR3 for alpha chain variable domain of TCR clone 46124 (TRAV3, TRAJ38)
CAVRDCLNAGNNHIKNPDPAVY

SEQ ID NO: 92248 - protein, 13 aa, Homo sapiens
  CDR3 for beta chain variable domain of TCR clone 46124 (TRBV23-1, TRBJ1-4)
CASRGKFNEKLFF

SEQ ID NO: 92249 - protein, 14 aa, Homo sapiens
  CDR3 for alpha chain variable domain of TCR clone 46125 (TRAV12-3, TRAJ10)
SHLPLTGGGNKLTF

SEQ ID NO: 92250 - protein, 11 aa, Homo sapiens
  CDR3 for beta chain variable domain of TCR clone 46125 (TRBV19, TRBJ1-1)
CASSTGSEAFF

SEQ ID NO: 92251 - protein, 11 aa, Homo sapiens
  CDR3 for alpha chain variable domain of TCR clone 46126 (TRAV3, TRAJ17)
PRGAAGNKLTF

SEQ ID NO: 92252 - protein, 15 aa, Homo sapiens
  CDR3 for beta chain variable domain of TCR clone 46126 (TRBV5-1, TRBJ2-2)
CASSSQGGNTGELFF

SEQ ID NO: 92253 - protein, 15 aa, Homo sapiens
  CDR3 for alpha chain variable domain of TCR clone 46127 (TRAV13-1, TRAJ17)
CAASIERAAGNKLTF

SEQ ID NO: 92254 - protein, 15 aa, Homo sapiens
  CDR3 for beta chain variable domain of TCR clone 46127 (TRBV6-1, TRBJ2-3)
CASSERGGVTDTQYF

SEQ ID NO: 92255 - protein, 15 aa, Homo sapiens
  CDR3 for alpha chain variable domain of TCR clone 46128 (TRAV26-2, TRAJ28)
CILVESGAGSYQLTF

SEQ ID NO: 92256 - protein, 16 aa, Homo sapiens
  CDR3 for beta chain variable domain of TCR clone 46128 (TRBV4-2, TRBJ1-2)
CASSQEIGGASYGDTF

SEQ ID NO: 92257 - protein, 14 aa, Homo sapiens
  CDR3 for alpha chain variable domain of TCR clone 46129 (TRAV12-2, TRAJ44)
CAVNKAGTASKLTF

SEQ ID NO: 92258 - protein, 14 aa, Homo sapiens
  CDR3 for beta chain variable domain of TCR clone 46129 (TRBV12-5, TRBJ2-5)
CASGSRTHQETQYF

SEQ ID NO: 92259 - protein, 14 aa, Homo sapiens
  CDR3 for alpha chain variable domain of TCR clone 46130 (TRAV8-3, TRAJ4)
CAVGAAGGYNKLIF

SEQ ID NO: 92260 - protein, 16 aa, Homo sapiens
  CDR3 for beta chain variable domain of TCR clone 46130 (TRBV11-1, TRBJ1-1)
CATNPRDRAFNTEAFF

SEQ ID NO: 92261 - protein, 15 aa, Homo sapiens
  CDR3 for alpha chain variable domain of TCR clone 46131 (TRAV20, TRAJ43)
CAVQAGKSRNNDMRF

SEQ ID NO: 92262 - protein, 14 aa, Homo sapiens
  CDR3 for beta chain variable domain of TCR clone 46131 (TRBV27, TRBJ2-1)
CASRHLGGGKEQFF

SEQ ID NO: 92263 - protein, 10 aa, Homo sapiens
  CDR3 for alpha chain variable domain of TCR clone 46132 (TRAV12-2, TRAJ22)
CAVNETQLTF

SEQ ID NO: 92264 - protein, 16 aa, Homo sapiens
  CDR3 for beta chain variable domain of TCR clone 46132 (TRBV6-4, TRBJ1-2)
CASSEAVGDPNYGYTF

SEQ ID NO: 92265 - protein, 17 aa, Homo sapiens
  CDR3 for alpha chain variable domain of TCR clone 46133 (TRAV26-1, TRAJ28)
CIARALYSGAGSYQLTF

SEQ ID NO: 92266 - protein, 12 aa, Homo sapiens
  CDR3 for beta chain variable domain of TCR clone 46133 (TRBV12-4, TRBJ2-1)
CASRQTENEQFF

SEQ ID NO: 92267 - protein, 13 aa, Homo sapiens
  CDR3 for alpha chain variable domain of TCR clone 46134 (TRAV12-2, TRAJ9)
CVVNRAGGFKTIF

SEQ ID NO: 92268 - protein, 15 aa, Homo sapiens
  CDR3 for beta chain variable domain of TCR clone 46134 (TRBV27, TRBJ1-5)
CASTFNRGSNQPQHF

SEQ ID NO: 92269 - protein, 14 aa, Homo sapiens
  CDR3 for alpha chain variable domain of TCR clone 46135 (TRAV38-1, TRAJ40)
CALRPTSGTYKYIF

SEQ ID NO: 92270 - protein, 14 aa, Homo sapiens
  CDR3 for beta chain variable domain of TCR clone 46135 (TRBV7-3, TRBJ2-2)
CASSSGGYTGELFF

SEQ ID NO: 92271 - protein, 13 aa, Homo sapiens
  CDR3 for alpha chain variable domain of TCR clone 46136 (TRAV3, TRAJ21)
CAVREPDFNKFYF

SEQ ID NO: 92272 - protein, 16 aa, Homo sapiens
  CDR3 for beta chain variable domain of TCR clone 46136 (TRBV2, TRBJ2-1)
CASSELAGGGTMSSSS

SEQ ID NO: 92273 - protein, 15 aa, Homo sapiens
  CDR3 for alpha chain variable domain of TCR clone 46137 (TRAV27, TRAJ38)
CAARRNAGNNRKLIW

SEQ ID NO: 92274 - protein, 14 aa, Homo sapiens
  CDR3 for beta chain variable domain of TCR clone 46137 (TRBV28, TRBJ1-5)
CASSLGVLVKPQHF

SEQ ID NO: 92275 - protein, 14 aa, Homo sapiens
  CDR3 for alpha chain variable domain of TCR clone 46138 (TRAV20, TRAJ42)
CAVQAGGSQGNLIF

SEQ ID NO: 92276 - protein, 14 aa, Homo sapiens
  CDR3 for beta chain variable domain of TCR clone 46138 (TRBV28, TRBJ1-2)
CASRIQGANYGHTF

SEQ ID NO: 92277 - protein, 13 aa, Homo sapiens
  CDR3 for alpha chain variable domain of TCR clone 46139 (TRAV1-1, TRAJ13)
CAVNSGGYQTVTF

SEQ ID NO: 92278 - protein, 12 aa, Homo sapiens
  CDR3 for beta chain variable domain of TCR clone 46139 (TRBV28, TRBJ2-1)
CASSVQINEQFF

SEQ ID NO: 92279 - protein, 12 aa, Homo sapiens
  CDR3 for alpha chain variable domain of TCR clone 46140 (TRAV17, TRAJ39)
CATGAAGNMLTF

SEQ ID NO: 92280 - protein, 14 aa, Homo sapiens
  CDR3 for beta chain variable domain of TCR clone 46140 (TRBV7-9, TRBJ1-2)
CASSRQGANYGHTF

SEQ ID NO: 92281 - protein, 15 aa, Homo sapiens
  CDR3 for alpha chain variable domain of TCR clone 46141 (TRAV3, TRAJ32)
CAVRDPGGATNKLIF

SEQ ID NO: 92282 - protein, 13 aa, Homo sapiens
  CDR3 for beta chain variable domain of TCR clone 46141 (TRBV15, TRBJ1-1)
CATSRGIQARAFF

SEQ ID NO: 92283 - protein, 16 aa, Homo sapiens
  CDR3 for alpha chain variable domain of TCR clone 46142 (TRAV30, TRAJ24)
CGTEIVDADSWGKFQF

SEQ ID NO: 92284 - protein, 14 aa, Homo sapiens
  CDR3 for beta chain variable domain of TCR clone 46142 (TRBV7-2, TRBJ2-7)
CASSPKTGFYEQYF

SEQ ID NO: 92285 - protein, 11 aa, Homo sapiens
  CDR3 for alpha chain variable domain of TCR clone 46143 (TRAV21, TRAJ11)
CAVNGYSTLTF

SEQ ID NO: 92286 - protein, 16 aa, Homo sapiens
  CDR3 for beta chain variable domain of TCR clone 46143 (TRBV13, TRBJ2-2)
CASSPRTGEHTGELFF

SEQ ID NO: 92287 - protein, 11 aa, Homo sapiens
  CDR3 for alpha chain variable domain of TCR clone 46144 (TRAV12-3, TRAJ43)
CATSVSNDMRF

SEQ ID NO: 92288 - protein, 13 aa, Homo sapiens
  CDR3 for beta chain variable domain of TCR clone 46144 (TRBV20-1, TRBJ1-1)
CSAPLGGGTEAFF

SEQ ID NO: 92289 - protein, 15 aa, Homo sapiens
  CDR3 for alpha chain variable domain of TCR clone 46145 (TRAV22, TRAJ24)
CAVPLSTDSRGKLQF

SEQ ID NO: 92290 - protein, 16 aa, Homo sapiens
  CDR3 for beta chain variable domain of TCR clone 46145 (TRBV28, TRBJ2-7)
CASSFPDRRLTYEQYF

SEQ ID NO: 92291 - protein, 13 aa, Homo sapiens
  CDR3 for alpha chain variable domain of TCR clone 46146 (TRAV9-2, TRAJ6)
CALSAGGSYIPTF

SEQ ID NO: 92292 - protein, 15 aa, Homo sapiens
  CDR3 for beta chain variable domain of TCR clone 46146 (TRBV9, TRBJ1-6)
CASSVAGTGDSPLHF

SEQ ID NO: 92293 - protein, 12 aa, Homo sapiens
  CDR3 for alpha chain variable domain of TCR clone 46147 (TRAV35, TRAJ39)
LAPNNAGNMLTF

SEQ ID NO: 92294 - protein, 13 aa, Homo sapiens
  CDR3 for beta chain variable domain of TCR clone 46147 (TRBV7-3, TRBJ1-1)
CASSQDWGAEAFF

SEQ ID NO: 92295 - protein, 15 aa, Homo sapiens
  CDR3 for alpha chain variable domain of TCR clone 46148 (TRAV1-2, TRAJ24)
CAVKGSTDSWGKFQF

SEQ ID NO: 92296 - protein, 16 aa, Homo sapiens
  CDR3 for beta chain variable domain of TCR clone 46148 (TRBV20-1, TRBJ2-1)
CSAATQGPVSYNEQFF

SEQ ID NO: 92297 - protein, 14 aa, Homo sapiens
  CDR3 for alpha chain variable domain of TCR clone 46149 (TRAV20, TRAJ34)
FVLCTRDNTDKLIF

SEQ ID NO: 92298 - protein, 15 aa, Homo sapiens
  CDR3 for beta chain variable domain of TCR clone 46149 (TRBV2, TRBJ2-1)
CASSVTSEGTDEQFF

SEQ ID NO: 92299 - protein, 14 aa, Homo sapiens
  CDR3 for alpha chain variable domain of TCR clone 46150 (TRAV12-2, TRAJ6)
CASKWGGGSYIPTF

SEQ ID NO: 92300 - protein, 13 aa, Homo sapiens
  CDR3 for beta chain variable domain of TCR clone 46150 (TRBV2, TRBJ1-1)
RASSEGGNTEAFF

SEQ ID NO: 92301 - protein, 15 aa, Homo sapiens
  CDR3 for alpha chain variable domain of TCR clone 46151 (TRAV21, TRAJ40)
CAVRPQTSGTYKYIF

SEQ ID NO: 92302 - protein, 14 aa, Homo sapiens
  CDR3 for beta chain variable domain of TCR clone 46151 (TRBV12-4, TRBJ2-5)
CASSSGLVQETQYF

SEQ ID NO: 92303 - protein, 12 aa, Homo sapiens
  CDR3 for alpha chain variable domain of TCR clone 46152 (TRAV25, TRAJ11)
CAGYSGYSTLTF

SEQ ID NO: 92304 - protein, 18 aa, Homo sapiens
  CDR3 for beta chain variable domain of TCR clone 46152 (TRBV5-4, TRBJ2-3)
CASSPTAGLLPSTDTQYF

SEQ ID NO: 92305 - protein, 18 aa, Homo sapiens
  CDR3 for alpha chain variable domain of TCR clone 46153 (TRAV12-3, TRAJ52)
CAMSRTNAGGTSYGKLTF

SEQ ID NO: 92306 - protein, 17 aa, Homo sapiens
  CDR3 for beta chain variable domain of TCR clone 46153 (TRBV7-3, TRBJ2-3)
CASSLTKWMRGADTQYF

SEQ ID NO: 92307 - protein, 11 aa, Homo sapiens
  CDR3 for alpha chain variable domain of TCR clone 46154 (TRAV17, TRAJ9)
CGFTGGFKTIS

SEQ ID NO: 92308 - protein, 18 aa, Homo sapiens
  CDR3 for beta chain variable domain of TCR clone 46154 (TRBV12-4, TRBJ2-2)
CASSLVAGTRGRTGELFF

SEQ ID NO: 92309 - protein, 14 aa, Homo sapiens
  CDR3 for alpha chain variable domain of TCR clone 46155 (TRAV38-1, TRAJ45)
CAYYSGGGADGLTF

SEQ ID NO: 92310 - protein, 20 aa, Homo sapiens
  CDR3 for beta chain variable domain of TCR clone 46155 (TRBV28, TRBJ2-1)
CASTPIGRSPGLAGVNEQFF

SEQ ID NO: 92311 - protein, 18 aa, Homo sapiens
  CDR3 for alpha chain variable domain of TCR clone 46156 (TRAV9-2, TRAJ52)
CALSRHNAGGTSYGRLTF

SEQ ID NO: 92312 - protein, 14 aa, Homo sapiens
  CDR3 for beta chain variable domain of TCR clone 46156 (TRBV25-1, TRBJ1-1)
CASTHLGGNTEAFF

SEQ ID NO: 92313 - protein, 14 aa, Homo sapiens
  CDR3 for alpha chain variable domain of TCR clone 46157 (TRAV2, TRAJ22)
CAVGRGGSARQLTF

SEQ ID NO: 92314 - protein, 14 aa, Homo sapiens
  CDR3 for beta chain variable domain of TCR clone 46157 (TRBV7-2, TRBJ2-7)
CASRSQGAAYEQYF

SEQ ID NO: 92315 - protein, 16 aa, Homo sapiens
  CDR3 for alpha chain variable domain of TCR clone 46158 (TRAV3, TRAJ37)
CAVRGKGSGNTGKLIF

SEQ ID NO: 92316 - protein, 20 aa, Homo sapiens
  CDR3 for beta chain variable domain of TCR clone 46158 (TRBV28, TRBJ2-1)
CASTPIGRSPGLAGGNEQFF

SEQ ID NO: 92317 - protein, 14 aa, Homo sapiens
  CDR3 for alpha chain variable domain of TCR clone 46159 (TRAV12-2, TRAJ40)
CAVKIPSGTYKYIF

SEQ ID NO: 92318 - protein, 13 aa, Homo sapiens
  CDR3 for beta chain variable domain of TCR clone 46159 (TRBV7-9, TRBJ2-3)
CASSPGSTDTQYF

SEQ ID NO: 92319 - protein, 14 aa, Homo sapiens
  CDR3 for alpha chain variable domain of TCR clone 46160 (TRAV25, TRAJ45)
CARESGGGADGLNF

SEQ ID NO: 92320 - protein, 12 aa, Homo sapiens
  CDR3 for beta chain variable domain of TCR clone 46160 (TRBV7-9, TRBJ2-7)
CASSFDSYEQYF

SEQ ID NO: 92321 - protein, 13 aa, Homo sapiens
  CDR3 for alpha chain variable domain of TCR clone 46161 (TRAV8-3, TRAJ44)
CAVVPGTASNLTF

SEQ ID NO: 92322 - protein, 14 aa, Homo sapiens
  CDR3 for beta chain variable domain of TCR clone 46161 (TRBV11-2, TRBJ2-3)
CASSRLARTDTQYF

SEQ ID NO: 92323 - protein, 12 aa, Homo sapiens
  CDR3 for alpha chain variable domain of TCR clone 46162 (TRAV12-3, TRAJ34)
CAMDYNTDKLIF

SEQ ID NO: 92324 - protein, 14 aa, Homo sapiens
  CDR3 for beta chain variable domain of TCR clone 46162 (TRBV4-1, TRBJ2-2)
CASSQAVNTGELFF

SEQ ID NO: 92325 - protein, 14 aa, Homo sapiens
  CDR3 for alpha chain variable domain of TCR clone 46163 (TRAV16, TRAJ37)
CALDISGNAGKLIF

SEQ ID NO: 92326 - protein, 11 aa, Homo sapiens
  CDR3 for beta chain variable domain of TCR clone 46163 (TRBV6-1, TRBJ2-1)
CASISSNEQFF

SEQ ID NO: 92327 - protein, 15 aa, Homo sapiens
  CDR3 for alpha chain variable domain of TCR clone 46164 (TRAV26-1, TRAJ29)
CIVRVEGSGNTPLVF

SEQ ID NO: 92328 - protein, 14 aa, Homo sapiens
  CDR3 for beta chain variable domain of TCR clone 46164 (TRBV7-9, TRBJ2-7)
CASSLAYRNHEQYF

SEQ ID NO: 92329 - protein, 18 aa, Homo sapiens
  CDR3 for alpha chain variable domain of TCR clone 46165 (TRAV26-1, TRAJ57)
CIVRVALRFQGGSEKLVF

SEQ ID NO: 92330 - protein, 15 aa, Homo sapiens
  CDR3 for beta chain variable domain of TCR clone 46165 (TRBV27, TRBJ2-1)
CAISNGGGSSNEQFF

SEQ ID NO: 92331 - protein, 16 aa, Homo sapiens
  CDR3 for alpha chain variable domain of TCR clone 46166 (TRAV16, TRAJ4)
CALSRMFSGGYNKLIF

SEQ ID NO: 92332 - protein, 16 aa, Homo sapiens
  CDR3 for beta chain variable domain of TCR clone 46166 (TRBV15, TRBJ2-3)
CATSSPTGLFADTQYF

SEQ ID NO: 92333 - protein, 14 aa, Homo sapiens
  CDR3 for alpha chain variable domain of TCR clone 46167 (TRAV12-3, TRAJ10)
SHLPLTGGGNKLTF

SEQ ID NO: 92334 - protein, 15 aa, Homo sapiens
  CDR3 for beta chain variable domain of TCR clone 46167 (TRBV7-9, TRBJ1-6)
CASSSPGRANSPLHF

SEQ ID NO: 92335 - protein, 13 aa, Homo sapiens
  CDR3 for alpha chain variable domain of TCR clone 46168 (TRAV8-6, TRAJ49)
CAVITNTGNQCYF

SEQ ID NO: 92336 - protein, 14 aa, Homo sapiens
  CDR3 for beta chain variable domain of TCR clone 46168 (TRBV5-1, TRBJ2-7)
CASSRGESLYEQYF

SEQ ID NO: 92337 - protein, 15 aa, Homo sapiens
  CDR3 for alpha chain variable domain of TCR clone 46169 (TRAV14/DV4, TRAJ12)
CAMREERDSSYKLIF

SEQ ID NO: 92338 - protein, 15 aa, Homo sapiens
  CDR3 for beta chain variable domain of TCR clone 46169 (TRBV6-6, TRBJ2-5)
CASSHGGGLEETQYF

SEQ ID NO: 92339 - protein, 15 aa, Homo sapiens
  CDR3 for alpha chain variable domain of TCR clone 46170 (TRAV35, TRAJ40)
CAGHLGTSGTYKYIF

SEQ ID NO: 92340 - protein, 14 aa, Homo sapiens
  CDR3 for beta chain variable domain of TCR clone 46170 (TRBV7-3, TRBJ2-1)
CASSLAGGTNEQFF

SEQ ID NO: 92341 - protein, 14 aa, Homo sapiens
  CDR3 for alpha chain variable domain of TCR clone 46171 (TRAV12-1, TRAJ43)
CVVNGRSNNNDIRF

SEQ ID NO: 92342 - protein, 12 aa, Homo sapiens
  CDR3 for beta chain variable domain of TCR clone 46171 (TRBV29-1, TRBJ2-3)
CSVTGGADTQYF

SEQ ID NO: 92343 - protein, 13 aa, Homo sapiens
  CDR3 for alpha chain variable domain of TCR clone 46172 (TRAV16, TRAJ29)
CALSRRGNTPLVF

SEQ ID NO: 92344 - protein, 16 aa, Homo sapiens
  CDR3 for beta chain variable domain of TCR clone 46172 (TRBV4-1, TRBJ2-3)
CASSQSTSGAEDTQYF

SEQ ID NO: 92345 - protein, 14 aa, Homo sapiens
  CDR3 for alpha chain variable domain of TCR clone 46173 (TRAV12-2, TRAJ40)
CAGKIPSGTYKYIF

SEQ ID NO: 92346 - protein, 17 aa, Homo sapiens
  CDR3 for beta chain variable domain of TCR clone 46173 (TRBV11-2, TRBJ2-1)
CASSLYPPGVEYNEQFF

SEQ ID NO: 92347 - protein, 18 aa, Homo sapiens
  CDR3 for alpha chain variable domain of TCR clone 46174 (TRAV12-3, TRAJ52)
CAMSRTNAGGTSYGKLTF

SEQ ID NO: 92348 - protein, 17 aa, Homo sapiens
  CDR3 for beta chain variable domain of TCR clone 46174 (TRBV7-3, TRBJ2-3)
CASSLTKRMRGADTQYF

SEQ ID NO: 92349 - protein, 12 aa, Homo sapiens
  CDR3 for alpha chain variable domain of TCR clone 46175 (TRAV27, TRAJ13)
CVGVRGYQKVTF

SEQ ID NO: 92350 - protein, 16 aa, Homo sapiens
  CDR3 for beta chain variable domain of TCR clone 46175 (TRBV28, TRBJ2-1)
CASSSSYSGSLNEQFF

SEQ ID NO: 92351 - protein, 13 aa, Homo sapiens
  CDR3 for alpha chain variable domain of TCR clone 46176 (TRAV21, TRAJ27)
CAARPGNAGKSTF

SEQ ID NO: 92352 - protein, 15 aa, Homo sapiens
  CDR3 for beta chain variable domain of TCR clone 46176 (TRBV2, TRBJ2-7)
CASSEGLARSYEQYF

SEQ ID NO: 92353 - protein, 14 aa, Homo sapiens
  CDR3 for alpha chain variable domain of TCR clone 46177 (TRAV12-2, TRAJ33)
CAVKRARRNYQLIW

SEQ ID NO: 92354 - protein, 12 aa, Homo sapiens
  CDR3 for beta chain variable domain of TCR clone 46177 (TRBV24-1, TRBJ2-3)
CATSDSTDTQYF

SEQ ID NO: 92355 - protein, 14 aa, Homo sapiens
  CDR3 for alpha chain variable domain of TCR clone 46178 (TRAV27, TRAJ23)
CAGLSYNQGGKRIF

SEQ ID NO: 92356 - protein, 15 aa, Homo sapiens
  CDR3 for beta chain variable domain of TCR clone 46178 (TRBV19, TRBJ2-2)
CASSLNRGVTGELFF

SEQ ID NO: 92357 - protein, 14 aa, Homo sapiens
  CDR3 for alpha chain variable domain of TCR clone 46179 (TRAV12-2, TRAJ30)
CVPTGTNRDDKIIF

SEQ ID NO: 92358 - protein, 11 aa, Homo sapiens
  CDR3 for beta chain variable domain of TCR clone 46179 (TRBV4-1, TRBJ2-2)
CASEHTGELFF

SEQ ID NO: 92359 - protein, 11 aa, Homo sapiens
  CDR3 for alpha chain variable domain of TCR clone 46180 (TRAV25, TRAJ49)
CAGNTGNQFYF

SEQ ID NO: 92360 - protein, 18 aa, Homo sapiens
  CDR3 for beta chain variable domain of TCR clone 46180 (TRBV11-2, TRBJ2-3)
CASSLGGASRGAPNAQYF

SEQ ID NO: 92361 - protein, 16 aa, Homo sapiens
  CDR3 for alpha chain variable domain of TCR clone 46181 (TRAV17, TRAJ22)
CATGPISSCSARQLTF

SEQ ID NO: 92362 - protein, 13 aa, Homo sapiens
  CDR3 for beta chain variable domain of TCR clone 46181 (TRBV11-2, TRBJ2-1)
CASSLGLAGGRFF

SEQ ID NO: 92363 - protein, 13 aa, Homo sapiens
  CDR3 for alpha chain variable domain of TCR clone 46182 (TRAV29/DV5, TRAJ31)
CAASRSNNARLMF

SEQ ID NO: 92364 - protein, 12 aa, Homo sapiens
  CDR3 for beta chain variable domain of TCR clone 46182 (TRBV14, TRBJ2-5)
CASSQLKETQYF

SEQ ID NO: 92365 - protein, 11 aa, Homo sapiens
  CDR3 for alpha chain variable domain of TCR clone 46183 (TRAV12-1, TRAJ30)
CVVNGQDKIIF

SEQ ID NO: 92366 - protein, 12 aa, Homo sapiens
  CDR3 for beta chain variable domain of TCR clone 46183 (TRBV6-3, TRBJ2-2)
CASKLFTGELFF

SEQ ID NO: 92367 - protein, 18 aa, Homo sapiens
  CDR3 for alpha chain variable domain of TCR clone 46184 (TRAV13-1, TRAJ52)
CAASKRSAGGTSYGKLTF

SEQ ID NO: 92368 - protein, 15 aa, Homo sapiens
  CDR3 for beta chain variable domain of TCR clone 46184 (TRBV20-1, TRBJ2-7)
CSAESGTSGAYEQYF

SEQ ID NO: 92369 - protein, 14 aa, Homo sapiens
  CDR3 for alpha chain variable domain of TCR clone 46185 (TRAV1-2, TRAJ16)
CAVNRFSDGQKLLF

SEQ ID NO: 92370 - protein, 18 aa, Homo sapiens
  CDR3 for beta chain variable domain of TCR clone 46185 (TRBV20-1, TRBJ2-6)
CSAETAPTHGSGANVLTF

SEQ ID NO: 92371 - protein, 12 aa, Homo sapiens
  CDR3 for alpha chain variable domain of TCR clone 46186 (TRAV26-1, TRAJ36)
CIVRVRADNLFF

SEQ ID NO: 92372 - protein, 15 aa, Homo sapiens
  CDR3 for beta chain variable domain of TCR clone 46186 (TRBV6-3, TRBJ2-7)
CASSFPGTVFYEQYF

SEQ ID NO: 92373 - protein, 12 aa, Homo sapiens
  CDR3 for alpha chain variable domain of TCR clone 46187 (TRAV8-3, TRAJ26)
CAGDNYGQNFVF

SEQ ID NO: 92374 - protein, 12 aa, Homo sapiens
  CDR3 for beta chain variable domain of TCR clone 46187 (TRBV12-4, TRBJ2-7)
CASSLGGYEQYF

SEQ ID NO: 92375 - protein, 11 aa, Homo sapiens
  CDR3 for alpha chain variable domain of TCR clone 46188 (TRAV13-2, TRAJ54)
RAVRGAQKLVF

SEQ ID NO: 92376 - protein, 15 aa, Homo sapiens
  CDR3 for beta chain variable domain of TCR clone 46188 (TRBV11-2, TRBJ1-2)
CASSLEGVQRNGYTF

SEQ ID NO: 92377 - protein, 11 aa, Homo sapiens
  CDR3 for alpha chain variable domain of TCR clone 46189 (TRAV1-2, TRAJ20)
CAVANDYKLSF

SEQ ID NO: 92378 - protein, 15 aa, Homo sapiens
  CDR3 for beta chain variable domain of TCR clone 46189 (TRBV28, TRBJ1-1)
CASSLLGRGNTEAFF

SEQ ID NO: 92379 - protein, 16 aa, Homo sapiens
  CDR3 for alpha chain variable domain of TCR clone 46190 (TRAV38-2/DV8, TRAJ57)
CAYRRRAQGGSEKLVF

SEQ ID NO: 92380 - protein, 15 aa, Homo sapiens
  CDR3 for beta chain variable domain of TCR clone 46190 (TRBV3-1, TRBJ2-5)
CASSANLGGPETQYF

SEQ ID NO: 92381 - protein, 14 aa, Homo sapiens
  CDR3 for alpha chain variable domain of TCR clone 46191 (TRAV8-4, TRAJ13)
CAVTLSGGYQKVTF

SEQ ID NO: 92382 - protein, 17 aa, Homo sapiens
  CDR3 for beta chain variable domain of TCR clone 46191 (TRBV20-1, TRBJ2-1)
CSASSSGLAGSYNEQFF

SEQ ID NO: 92383 - protein, 14 aa, Homo sapiens
  CDR3 for alpha chain variable domain of TCR clone 46192 (TRAV12-2, TRAJ17)
CAVLFKAAGNKLTF

SEQ ID NO: 92384 - protein, 16 aa, Homo sapiens
  CDR3 for beta chain variable domain of TCR clone 46192 (TRBV5-1, TRBJ1-1)
CASSSGGNSLNTEAFF

SEQ ID NO: 92385 - protein, 14 aa, Homo sapiens
  CDR3 for alpha chain variable domain of TCR clone 46193 (TRAV26-1, TRAJ38)
CIADNAGNNRKLIW

SEQ ID NO: 92386 - protein, 14 aa, Homo sapiens
  CDR3 for beta chain variable domain of TCR clone 46193 (TRBV7-8, TRBJ2-3)
CASSLEAGTDTQYF

SEQ ID NO: 92387 - protein, 12 aa, Homo sapiens
  CDR3 for alpha chain variable domain of TCR clone 46194 (TRAV30, TRAJ43)
CGTEERGNDMRF

SEQ ID NO: 92388 - protein, 13 aa, Homo sapiens
  CDR3 for beta chain variable domain of TCR clone 46194 (TRBV12-4, TRBJ1-2)
CASSAGSKDGYTF

SEQ ID NO: 92389 - protein, 14 aa, Homo sapiens
  CDR3 for alpha chain variable domain of TCR clone 46195 (TRAV1-2, TRAJ16)
CAVNRFSDGQKLLF

SEQ ID NO: 92390 - protein, 15 aa, Homo sapiens
  CDR3 for beta chain variable domain of TCR clone 46195 (TRBV19, TRBJ1-5)
CASSMVWADNQPQHF

SEQ ID NO: 92391 - protein, 15 aa, Homo sapiens
  CDR3 for alpha chain variable domain of TCR clone 46196 (TRAV21, TRAJ37)
CAVRPTLSNTGKLIF

SEQ ID NO: 92392 - protein, 16 aa, Homo sapiens
  CDR3 for beta chain variable domain of TCR clone 46196 (TRBV24-1, TRBJ2-3)
CATSDRRQDLTDTQYV

SEQ ID NO: 92393 - protein, 15 aa, Homo sapiens
  CDR3 for alpha chain variable domain of TCR clone 46197 (TRAV17, TRAJ57)
CATGPSQGGSEKLVF

SEQ ID NO: 92394 - protein, 16 aa, Homo sapiens
  CDR3 for beta chain variable domain of TCR clone 46197 (TRBV12-4, TRBJ1-5)
CASSRPVGGSNQPLHF

SEQ ID NO: 92395 - protein, 13 aa, Homo sapiens
  CDR3 for alpha chain variable domain of TCR clone 46198 (TRAV12-2, TRAJ13)
CREEDWGYQKVTF

SEQ ID NO: 92396 - protein, 13 aa, Homo sapiens
  CDR3 for beta chain variable domain of TCR clone 46198 (TRBV12-4, TRBJ1-1)
CASSPGTGFEAFF

SEQ ID NO: 92397 - protein, 14 aa, Homo sapiens
  CDR3 for alpha chain variable domain of TCR clone 46199 (TRAV8-4, TRAJ9)
CAVRINTGGFKTIF

SEQ ID NO: 92398 - protein, 15 aa, Homo sapiens
  CDR3 for beta chain variable domain of TCR clone 46199 (TRBV10-2, TRBJ2-6)
CASSAQGTGANVLTF

SEQ ID NO: 92399 - protein, 15 aa, Homo sapiens
  CDR3 for alpha chain variable domain of TCR clone 46200 (TRAV3, TRAJ42)
CAVRGGTGSQGNLIF

SEQ ID NO: 92400 - protein, 14 aa, Homo sapiens
  CDR3 for beta chain variable domain of TCR clone 46200 (TRBV19, TRBJ1-2)
CASSSLFARDVDTF

SEQ ID NO: 92401 - protein, 14 aa, Homo sapiens
  CDR3 for alpha chain variable domain of TCR clone 46201 (TRAV35, TRAJ44)
CAGRPSRTASKLAF

SEQ ID NO: 92402 - protein, 14 aa, Homo sapiens
  CDR3 for beta chain variable domain of TCR clone 46201 (TRBV7-2, TRBJ1-3)
CASSRGGTGNTIYF

SEQ ID NO: 92403 - protein, 14 aa, Homo sapiens
  CDR3 for alpha chain variable domain of TCR clone 46202 (TRAV12-3, TRAJ10)
SHLPLAGGGNKLTF

SEQ ID NO: 92404 - protein, 15 aa, Homo sapiens
  CDR3 for beta chain variable domain of TCR clone 46202 (TRBV18, TRBJ1-1)
CASSPRQGENTEAFF

SEQ ID NO: 92405 - protein, 14 aa, Homo sapiens
  CDR3 for alpha chain variable domain of TCR clone 46203 (TRAV12-2, TRAJ13)
CAVKKTGGYQKVTF

SEQ ID NO: 92406 - protein, 16 aa, Homo sapiens
  CDR3 for beta chain variable domain of TCR clone 46203 (TRBV29-1, TRBJ2-7)
CSVEDAEDGTAYEQYF

SEQ ID NO: 92407 - protein, 13 aa, Homo sapiens
  CDR3 for alpha chain variable domain of TCR clone 46204 (TRAV3, TRAJ20)
WAVRSLNDYKLSF

SEQ ID NO: 92408 - protein, 13 aa, Homo sapiens
  CDR3 for beta chain variable domain of TCR clone 46204 (TRBV7-3, TRBJ1-1)
CASSQDWGAEAFF

SEQ ID NO: 92409 - protein, 10 aa, Homo sapiens
  CDR3 for alpha chain variable domain of TCR clone 46205 (TRAV23/DV6, TRAJ57)
CAASSTLSQG

SEQ ID NO: 92410 - protein, 14 aa, Homo sapiens
  CDR3 for beta chain variable domain of TCR clone 46205 (TRBV25-1, TRBJ1-1)
CASTHRGGNTEAFF

SEQ ID NO: 92411 - protein, 12 aa, Homo sapiens
  CDR3 for alpha chain variable domain of TCR clone 46206 (TRAV13-2, TRAJ23)
CAERHRGGKLIF

SEQ ID NO: 92412 - protein, 13 aa, Homo sapiens
  CDR3 for beta chain variable domain of TCR clone 46206 (TRBV7-9, TRBJ2-3)
CASSPGSTDTQYF

SEQ ID NO: 92413 - protein, 12 aa, Homo sapiens
  CDR3 for alpha chain variable domain of TCR clone 46207 (TRAV8-3, TRAJ26)
CAGDNYGQNFVF

SEQ ID NO: 92414 - protein, 12 aa, Homo sapiens
  CDR3 for beta chain variable domain of TCR clone 46207 (TRBV11-2, TRBJ2-1)
CASSPGNNGQFF

SEQ ID NO: 92415 - protein, 13 aa, Homo sapiens
  CDR3 for alpha chain variable domain of TCR clone 46208 (TRAV13-1, TRAJ21)
CAASIYNSNKFYF

SEQ ID NO: 92416 - protein, 13 aa, Homo sapiens
  CDR3 for beta chain variable domain of TCR clone 46208 (TRBV27, TRBJ1-4)
CASSLMGDEKLFF

SEQ ID NO: 92417 - protein, 13 aa, Homo sapiens
  CDR3 for alpha chain variable domain of TCR clone 46209 (TRAV12-2, TRAJ37)
CAGGSGNTGKLIF

SEQ ID NO: 92418 - protein, 14 aa, Homo sapiens
  CDR3 for beta chain variable domain of TCR clone 46209 (TRBV6-1, TRBJ2-6)
CASQQGAGASVLTF

SEQ ID NO: 92419 - protein, 15 aa, Homo sapiens
  CDR3 for alpha chain variable domain of TCR clone 46210 (TRAV8-3, TRAJ11)
CAVGLLNSGYSTLTF

SEQ ID NO: 92420 - protein, 16 aa, Homo sapiens
  CDR3 for beta chain variable domain of TCR clone 46210 (TRBV7-9, TRBJ1-2)
CASSLGFSSREDGYTF

SEQ ID NO: 92421 - protein, 15 aa, Homo sapiens
  CDR3 for alpha chain variable domain of TCR clone 46211 (TRAV2, TRAJ15)
CAVEDRGQAGTALIF

SEQ ID NO: 92422 - protein, 15 aa, Homo sapiens
  CDR3 for beta chain variable domain of TCR clone 46211 (TRBV7-2, TRBJ2-3)
CASSLLVRGPDTQYF

SEQ ID NO: 92423 - protein, 14 aa, Homo sapiens
  CDR3 for alpha chain variable domain of TCR clone 46212 (TRAV8-3, TRAJ39)
CAVGANNAGNMLTF

SEQ ID NO: 92424 - protein, 16 aa, Homo sapiens
  CDR3 for beta chain variable domain of TCR clone 46212 (TRBV6-1, TRBJ2-5)
CASGETLDRGAETQYF

SEQ ID NO: 92425 - protein, 12 aa, Homo sapiens
  CDR3 for alpha chain variable domain of TCR clone 46213 (TRAV13-1, TRAJ9)
CASHTGVFKTIF

SEQ ID NO: 92426 - protein, 13 aa, Homo sapiens
  CDR3 for beta chain variable domain of TCR clone 46213 (TRBV12-4, TRBJ1-2)
CASSSGSKDGYTF

SEQ ID NO: 92427 - protein, 12 aa, Homo sapiens
  CDR3 for alpha chain variable domain of TCR clone 46214 (TRAV25, TRAJ11)
CAGASGYSTLTF

SEQ ID NO: 92428 - protein, 14 aa, Homo sapiens
  CDR3 for beta chain variable domain of TCR clone 46214 (TRBV10-2, TRBJ1-5)
CASSSTGRNQPQHF

SEQ ID NO: 92429 - protein, 11 aa, Homo sapiens
  CDR3 for alpha chain variable domain of TCR clone 46215 (TRAV35, TRAJ34)
CWARNTNKLIF

SEQ ID NO: 92430 - protein, 14 aa, Homo sapiens
  CDR3 for beta chain variable domain of TCR clone 46215 (TRBV5-1, TRBJ2-7)
CASSRGESLYEQYF

SEQ ID NO: 92431 - protein, 15 aa, Homo sapiens
  CDR3 for alpha chain variable domain of TCR clone 46216 (TRAV29/DV5, TRAJ24)
CAASGATDSWGKFQF

SEQ ID NO: 92432 - protein, 13 aa, Homo sapiens
  CDR3 for beta chain variable domain of TCR clone 46216 (TRBV7-3, TRBJ1-1)
CASSQDWGAEAFF

SEQ ID NO: 92433 - protein, 17 aa, Homo sapiens
  CDR3 for alpha chain variable domain of TCR clone 46217 (TRAV3, TRAJ24)
CAVRDKMTAGGNCSLEQ

SEQ ID NO: 92434 - protein, 14 aa, Homo sapiens
  CDR3 for beta chain variable domain of TCR clone 46217 (TRBV7-2, TRBJ2-3)
CASSQTGSSYTQYF

SEQ ID NO: 92435 - protein, 10 aa, Homo sapiens
  CDR3 for alpha chain variable domain of TCR clone 46218 (TRAV8-2, TRAJ29)
CTGGNTPLVF

SEQ ID NO: 92436 - protein, 17 aa, Homo sapiens
  CDR3 for beta chain variable domain of TCR clone 46218 (TRBV2, TRBJ2-7)
CASSHALTGWDSYEQYF

SEQ ID NO: 92437 - protein, 13 aa, Homo sapiens
  CDR3 for alpha chain variable domain of TCR clone 46219 (TRAV8-3, TRAJ48)
CAVVPFGNEKLTF

SEQ ID NO: 92438 - protein, 19 aa, Homo sapiens
  CDR3 for beta chain variable domain of TCR clone 46219 (TRBV25-1, TRBJ2-2)
CAILVYRVDRGCKTGELFF

SEQ ID NO: 92439 - protein, 14 aa, Homo sapiens
  CDR3 for alpha chain variable domain of TCR clone 46220 (TRAV38-1, TRAJ29)
CAFITPSGNTPLVF

SEQ ID NO: 92440 - protein, 14 aa, Homo sapiens
  CDR3 for beta chain variable domain of TCR clone 46220 (TRBV18, TRBJ2-7)
CANSPRGGAYEQYF

SEQ ID NO: 92441 - protein, 17 aa, Homo sapiens
  CDR3 for alpha chain variable domain of TCR clone 46221 (TRAV4, TRAJ13)
CLVGVQGSSGGYQKVTF

SEQ ID NO: 92442 - protein, 18 aa, Homo sapiens
  CDR3 for beta chain variable domain of TCR clone 46221 (TRBV15, TRBJ2-3)
CATSRDGARSWDTYTQYF

SEQ ID NO: 92443 - protein, 14 aa, Homo sapiens
  CDR3 for alpha chain variable domain of TCR clone 46222 (TRAV14/DV4, TRAJ15)
CAMRRGQAGTALIF

SEQ ID NO: 92444 - protein, 14 aa, Homo sapiens
  CDR3 for beta chain variable domain of TCR clone 46222 (TRBV28, TRBJ2-7)
CASRAAGLGYEQYF

SEQ ID NO: 92445 - protein, 13 aa, Homo sapiens
  CDR3 for alpha chain variable domain of TCR clone 46223 (TRAV21, TRAJ20)
CAVGLRVDYKLSF

SEQ ID NO: 92446 - protein, 20 aa, Homo sapiens
  CDR3 for beta chain variable domain of TCR clone 46223 (TRBV28, TRBJ2-1)
CASTPIGRSPGLAGGNEQFF

SEQ ID NO: 92447 - protein, 14 aa, Homo sapiens
  CDR3 for alpha chain variable domain of TCR clone 46224 (TRAV2, TRAJ12)
CAVDAMDSSYKLFF

SEQ ID NO: 92448 - protein, 13 aa, Homo sapiens
  CDR3 for beta chain variable domain of TCR clone 46224 (TRBV19, TRBJ2-1)
CASKVGAGGEQFF

SEQ ID NO: 92449 - protein, 12 aa, Homo sapiens
  CDR3 for alpha chain variable domain of TCR clone 46225 (TRAV21, TRAJ49)
CAVNDGGNQFYF

SEQ ID NO: 92450 - protein, 14 aa, Homo sapiens
  CDR3 for beta chain variable domain of TCR clone 46225 (TRBV18, TRBJ2-7)
CANSPRGGSYEQYF

SEQ ID NO: 92451 - protein, 15 aa, Homo sapiens
  CDR3 for alpha chain variable domain of TCR clone 46226 (TRAV12-3, TRAJ6)
CAMSATTGGSYIPTF

SEQ ID NO: 92452 - protein, 15 aa, Homo sapiens
  CDR3 for beta chain variable domain of TCR clone 46226 (TRBV5-1, TRBJ2-3)
CASSVTSGSTDTQYF

SEQ ID NO: 92453 - protein, 15 aa, Homo sapiens
  CDR3 for alpha chain variable domain of TCR clone 46227 (TRAV23/DV6, TRAJ58)
CAARLLRGETSGSRL

SEQ ID NO: 92454 - protein, 13 aa, Homo sapiens
  CDR3 for beta chain variable domain of TCR clone 46227 (TRBV6-4, TRBJ1-5)
CASSADLNQPQHF

SEQ ID NO: 92455 - protein, 11 aa, Homo sapiens
  CDR3 for alpha chain variable domain of TCR clone 46228 (TRAV17, TRAJ9)
CRFTGGFKTIF

SEQ ID NO: 92456 - protein, 14 aa, Homo sapiens
  CDR3 for beta chain variable domain of TCR clone 46228 (TRBV7-9, TRBJ2-2)
CASSLVQDTGELFF

SEQ ID NO: 92457 - protein, 13 aa, Homo sapiens
  CDR3 for alpha chain variable domain of TCR clone 46229 (TRAV12-3, TRAJ43)
CAMIRPNNNDMRF

SEQ ID NO: 92458 - protein, 12 aa, Homo sapiens
  CDR3 for beta chain variable domain of TCR clone 46229 (TRBV11-2, TRBJ2-5)
CANSLGQETQYF

SEQ ID NO: 92459 - protein, 13 aa, Homo sapiens
  CDR3 for alpha chain variable domain of TCR clone 46230 (TRAV8-6, TRAJ21)
CAVSPSSLNKFYF

SEQ ID NO: 92460 - protein, 14 aa, Homo sapiens
  CDR3 for beta chain variable domain of TCR clone 46230 (TRBV7-9, TRBJ2-5)
CASSLDAAQETQYF

SEQ ID NO: 92461 - protein, 16 aa, Homo sapiens
  CDR3 for alpha chain variable domain of TCR clone 46231 (TRAV30, TRAJ49)
SAAQRVGPNTGNQFYF

SEQ ID NO: 92462 - protein, 15 aa, Homo sapiens
  CDR3 for beta chain variable domain of TCR clone 46231 (TRBV2, TRBJ2-1)
CANSELAGSYNEQFF

SEQ ID NO: 92463 - protein, 10 aa, Homo sapiens
  CDR3 for alpha chain variable domain of TCR clone 46232 (TRAV5, TRAJ34)
CAEDTDKLIF

SEQ ID NO: 92464 - protein, 16 aa, Homo sapiens
  CDR3 for beta chain variable domain of TCR clone 46232 (TRBV5-1, TRBJ2-3)
CASSLTSGTSGGTRYF

SEQ ID NO: 92465 - protein, 14 aa, Homo sapiens
  CDR3 for alpha chain variable domain of TCR clone 46233 (TRAV38-1, TRAJ29)
CAFIIPSGNTPLVF

SEQ ID NO: 92466 - protein, 14 aa, Homo sapiens
  CDR3 for beta chain variable domain of TCR clone 46233 (TRBV18, TRBJ2-7)
CASSPRGGAYEQYF

SEQ ID NO: 92467 - protein, 15 aa, Homo sapiens
  CDR3 for alpha chain variable domain of TCR clone 46234 (TRAV26-1, TRAJ44)
CIVRIGTGTASKLTF

SEQ ID NO: 92468 - protein, 15 aa, Homo sapiens
  CDR3 for beta chain variable domain of TCR clone 46234 (TRBV7-6, TRBJ2-1)
CASSSLAGEGNEQSF

SEQ ID NO: 92469 - protein, 14 aa, Homo sapiens
  CDR3 for alpha chain variable domain of TCR clone 46235 (TRAV1-2, TRAJ16)
CAVNRFSDGQKLLF

SEQ ID NO: 92470 - protein, 15 aa, Homo sapiens
  CDR3 for beta chain variable domain of TCR clone 46235 (TRBV10-3, TRBJ2-1)
CAISDVQDRAYEQFF

SEQ ID NO: 92471 - protein, 14 aa, Homo sapiens
  CDR3 for alpha chain variable domain of TCR clone 46236 (TRAV1-2, TRAJ16)
CAVNRFSDGQKLLL

SEQ ID NO: 92472 - protein, 15 aa, Homo sapiens
  CDR3 for beta chain variable domain of TCR clone 46236 (TRBV9, TRBJ1-6)
CASSVAGTGDSPLHF

SEQ ID NO: 92473 - protein, 23 aa, Homo sapiens
  CDR3 for alpha chain variable domain of TCR clone 46237 (TRAV12-2, TRAJ43)
SLLIRDSQPSDSATYLYAFDMRF

SEQ ID NO: 92474 - protein, 18 aa, Homo sapiens
  CDR3 for beta chain variable domain of TCR clone 46237 (TRBV20-1, TRBJ2-3)
CSASGLAGGPGTTDTQYF

SEQ ID NO: 92475 - protein, 13 aa, Homo sapiens
  CDR3 for alpha chain variable domain of TCR clone 46238 (TRAV38-2/DV8, TRAJ34)
CAYGTWNTDKLIF

SEQ ID NO: 92476 - protein, 18 aa, Homo sapiens
  CDR3 for beta chain variable domain of TCR clone 46238 (TRBV6-6, TRBJ1-3)
RASSYSKWDSISGNTIYF

SEQ ID NO: 92477 - protein, 18 aa, Homo sapiens
  CDR3 for alpha chain variable domain of TCR clone 46239 (TRAV3, TRAJ32)
CAVRDIRGYGGATTKLIF

SEQ ID NO: 92478 - protein, 15 aa, Homo sapiens
  CDR3 for beta chain variable domain of TCR clone 46239 (TRBV12-4, TRBJ2-2)
CASSLGVRHTGELFF

SEQ ID NO: 92479 - protein, 18 aa, Homo sapiens
  CDR3 for alpha chain variable domain of TCR clone 46240 (TRAV21, TRAJ52)
CAVRPSPAGGTSYGKLTF

SEQ ID NO: 92480 - protein, 13 aa, Homo sapiens
  CDR3 for beta chain variable domain of TCR clone 46240 (TRBV7-3, TRBJ1-1)
CASSQDRGAEAFF

SEQ ID NO: 92481 - protein, 14 aa, Homo sapiens
  CDR3 for alpha chain variable domain of TCR clone 46241 (TRAV1-2, TRAJ8)
CAVREDTGFQKLVF

SEQ ID NO: 92482 - protein, 13 aa, Homo sapiens
  CDR3 for beta chain variable domain of TCR clone 46241 (TRBV7-2, TRBJ2-4)
CASSREHANIQYF

SEQ ID NO: 92483 - protein, 13 aa, Homo sapiens
  CDR3 for alpha chain variable domain of TCR clone 46242 (TRAV38-1, TRAJ42)
CARWGGSQGNLIF

SEQ ID NO: 92484 - protein, 17 aa, Homo sapiens
  CDR3 for beta chain variable domain of TCR clone 46242 (TRBV20-1, TRBJ2-1)
CSARDPLAGVWDNDQFF

SEQ ID NO: 92485 - protein, 13 aa, Homo sapiens
  CDR3 for alpha chain variable domain of TCR clone 46243 (TRAV35, TRAJ44)
CAGLSGTASKLTF

SEQ ID NO: 92486 - protein, 19 aa, Homo sapiens
  CDR3 for beta chain variable domain of TCR clone 46243 (TRBV28, TRBJ2-4)
CASSFQPGGPAHSKNIQYF

SEQ ID NO: 92487 - protein, 13 aa, Homo sapiens
  CDR3 for alpha chain variable domain of TCR clone 46244 (TRAV27, TRAJ45)
CRSSGGGADGLTF

SEQ ID NO: 92488 - protein, 17 aa, Homo sapiens
  CDR3 for beta chain variable domain of TCR clone 46244 (TRBV11-2, TRBJ2-1)
GASSLYPPGVEYNEQFF

SEQ ID NO: 92489 - protein, 14 aa, Homo sapiens
  CDR3 for alpha chain variable domain of TCR clone 46245 (TRAV17, TRAJ12)
CATDAKDSSYKLIF

SEQ ID NO: 92490 - protein, 16 aa, Homo sapiens
  CDR3 for beta chain variable domain of TCR clone 46245 (TRBV11-2, TRBJ2-1)
CASSPRLAGVYNEQFF

SEQ ID NO: 92491 - protein, 17 aa, Homo sapiens
  CDR3 for alpha chain variable domain of TCR clone 46246 (TRAV3, TRAJ28)
CAVREAYSGAGSYQLTF

SEQ ID NO: 92492 - protein, 18 aa, Homo sapiens
  CDR3 for beta chain variable domain of TCR clone 46246 (TRBV27, TRBJ2-1)
CASGNRAVEVGSKNEQFF

SEQ ID NO: 92493 - protein, 16 aa, Homo sapiens
  CDR3 for alpha chain variable domain of TCR clone 46247 (TRAV21, TRAJ52)
CAVTNAGGISYGKLTF

SEQ ID NO: 92494 - protein, 11 aa, Homo sapiens
  CDR3 for beta chain variable domain of TCR clone 46247 (TRBV2, TRBJ1-1)
CASREGTEAFF

SEQ ID NO: 92495 - protein, 15 aa, Homo sapiens
  CDR3 for alpha chain variable domain of TCR clone 46248 (TRAV8-4, TRAJ6)
CAVSAPSGGSYVPTF

SEQ ID NO: 92496 - protein, 15 aa, Homo sapiens
  CDR3 for beta chain variable domain of TCR clone 46248 (TRBV2, TRBJ2-1)
CASSEARSAYNEQFF

SEQ ID NO: 92497 - protein, 14 aa, Homo sapiens
  CDR3 for alpha chain variable domain of TCR clone 46249 (TRAV13-1, TRAJ35)
CAASKGGFGNVLHC

SEQ ID NO: 92498 - protein, 11 aa, Homo sapiens
  CDR3 for beta chain variable domain of TCR clone 46249 (TRBV2, TRBJ1-1)
CASREGTEAFF

SEQ ID NO: 92499 - protein, 15 aa, Homo sapiens
  CDR3 for alpha chain variable domain of TCR clone 46250 (TRAV23/DV6, TRAJ13)
CAAWPGGGGYQKVTF

SEQ ID NO: 92500 - protein, 13 aa, Homo sapiens
  CDR3 for beta chain variable domain of TCR clone 46250 (TRBV19, TRBJ1-2)
CASSVPGQDGYTF

SEQ ID NO: 92501 - protein, 18 aa, Homo sapiens
  CDR3 for alpha chain variable domain of TCR clone 46251 (TRAV12-2, )
CAVEDIQSPDPAVYQLRD

SEQ ID NO: 92502 - protein, 16 aa, Homo sapiens
  CDR3 for beta chain variable domain of TCR clone 46251 (TRBV6-1, TRBJ1-2)
CASSGAWQGRSHGYTF

SEQ ID NO: 92503 - protein, 13 aa, Homo sapiens
  CDR3 for alpha chain variable domain of TCR clone 46252 (TRAV21, TRAJ15)
CAVANQAGTALIF

SEQ ID NO: 92504 - protein, 13 aa, Homo sapiens
  CDR3 for beta chain variable domain of TCR clone 46252 (TRBV12-4, TRBJ2-7)
CASSPTETYEQYF

SEQ ID NO: 92505 - protein, 16 aa, Homo sapiens
  CDR3 for alpha chain variable domain of TCR clone 46253 (TRAV20, TRAJ53)
CAVQGNSGGSNYKLTF

SEQ ID NO: 92506 - protein, 15 aa, Homo sapiens
  CDR3 for beta chain variable domain of TCR clone 46253 (TRBV2, TRBJ2-7)
CASTLLGSGATEQYF

SEQ ID NO: 92507 - protein, 10 aa, Homo sapiens
  CDR3 for alpha chain variable domain of TCR clone 46254 (TRAV26-1, TRAJ40)
CIAGTYKYIF

SEQ ID NO: 92508 - protein, 15 aa, Homo sapiens
  CDR3 for beta chain variable domain of TCR clone 46254 (TRBV19, TRBJ2-1)
CASSSPGAPLDEQFF

SEQ ID NO: 92509 - protein, 17 aa, Homo sapiens
  CDR3 for alpha chain variable domain of TCR clone 46255 (TRAV2, TRAJ22)
ILQVREADATEQRQLTF

SEQ ID NO: 92510 - protein, 16 aa, Homo sapiens
  CDR3 for beta chain variable domain of TCR clone 46255 (TRBV2, TRBJ2-5)
CASSETQGVGEETQYF

SEQ ID NO: 92511 - protein, 15 aa, Homo sapiens
  CDR3 for alpha chain variable domain of TCR clone 46256 (TRAV12-2, TRAJ53)
CAVNGGGGSNYKLTF

SEQ ID NO: 92512 - protein, 14 aa, Homo sapiens
  CDR3 for beta chain variable domain of TCR clone 46256 (TRBV12-5, TRBJ2-5)
CASGSRKHQETQYF

SEQ ID NO: 92513 - protein, 16 aa, Homo sapiens
  CDR3 for alpha chain variable domain of TCR clone 46257 (TRAV12-2, TRAJ28)
CAVITDSGAGSYQLTF

SEQ ID NO: 92514 - protein, 14 aa, Homo sapiens
  CDR3 for beta chain variable domain of TCR clone 46257 (TRBV25-1, TRBJ1-1)
CASTLLGGNTEAFF

SEQ ID NO: 92515 - protein, 14 aa, Homo sapiens
  CDR3 for alpha chain variable domain of TCR clone 46258 (TRAV1-2, TRAJ16)
CAVNRFSDGQKLLF

SEQ ID NO: 92516 - protein, 13 aa, Homo sapiens
  CDR3 for beta chain variable domain of TCR clone 46258 (TRBV11-2, TRBJ2-1)
CASSSEAYNEQFF

SEQ ID NO: 92517 - protein, 14 aa, Homo sapiens
  CDR3 for alpha chain variable domain of TCR clone 46259 (TRAV38-1, TRAJ45)
CASHSGGGADRLTF

SEQ ID NO: 92518 - protein, 13 aa, Homo sapiens
  CDR3 for beta chain variable domain of TCR clone 46259 (TRBV10-3, TRBJ1-2)
CAISERDSYGYTF

SEQ ID NO: 92519 - protein, 15 aa, Homo sapiens
  CDR3 for alpha chain variable domain of TCR clone 46260 (TRAV13-1, TRAJ57)
QVPPLSQGGSEKLVF

SEQ ID NO: 92520 - protein, 17 aa, Homo sapiens
  CDR3 for beta chain variable domain of TCR clone 46260 (TRBV7-3, TRBJ2-3)
CASSLMKRMRGAGTQYF

SEQ ID NO: 92521 - protein, 12 aa, Homo sapiens
  CDR3 for alpha chain variable domain of TCR clone 46261 (TRAV12-3, TRAJ42)
CAPGGSQGNLIF

SEQ ID NO: 92522 - protein, 13 aa, Homo sapiens
  CDR3 for beta chain variable domain of TCR clone 46261 (TRBV5-7, TRBJ2-6)
CASTSSGANVLAF

SEQ ID NO: 92523 - protein, 15 aa, Homo sapiens
  CDR3 for alpha chain variable domain of TCR clone 46262 (TRAV34, TRAJ38)
CGADFTPGNNRKLIW

SEQ ID NO: 92524 - protein, 15 aa, Homo sapiens
  CDR3 for beta chain variable domain of TCR clone 46262 (TRBV19, TRBJ1-2)
CASSVGQVLNYGYTF

SEQ ID NO: 92525 - protein, 14 aa, Homo sapiens
  CDR3 for alpha chain variable domain of TCR clone 46263 (TRAV12-1, TRAJ17)
CVVDFKAAGNKLTF

SEQ ID NO: 92526 - protein, 17 aa, Homo sapiens
  CDR3 for beta chain variable domain of TCR clone 46263 (TRBV20-1, TRBJ2-1)
CSASASGLAGSYNEQFF

SEQ ID NO: 92527 - protein, 11 aa, Homo sapiens
  CDR3 for alpha chain variable domain of TCR clone 46264 (TRAV16, TRAJ31)
CALFNNAILMF

SEQ ID NO: 92528 - protein, 15 aa, Homo sapiens
  CDR3 for beta chain variable domain of TCR clone 46264 (TRBV18, TRBJ1-1)
CASSPRQGENTEAFF

SEQ ID NO: 92529 - protein, 13 aa, Homo sapiens
  CDR3 for alpha chain variable domain of TCR clone 46265 (TRAV30, TRAJ6)
CGFIEGGSYIPTF

SEQ ID NO: 92530 - protein, 13 aa, Homo sapiens
  CDR3 for beta chain variable domain of TCR clone 46265 (TRBV5-4, TRBJ2-5)
CASSPVSQETQYV

SEQ ID NO: 92531 - protein, 15 aa, Homo sapiens
  CDR3 for alpha chain variable domain of TCR clone 46266 (TRAV13-1, TRAJ32)
CAASIYGGATNNLIF

SEQ ID NO: 92532 - protein, 12 aa, Homo sapiens
  CDR3 for beta chain variable domain of TCR clone 46266 (TRBV7-6, TRBJ2-3)
CASSTGTDTQYF

SEQ ID NO: 92533 - protein, 11 aa, Homo sapiens
  CDR3 for alpha chain variable domain of TCR clone 46267 (TRAV12-1, TRAJ21)
CVVNNFNKFYF

SEQ ID NO: 92534 - protein, 17 aa, Homo sapiens
  CDR3 for beta chain variable domain of TCR clone 46267 (TRBV7-8, TRBJ2-1)
WASSPPTGTLAYNEQFF

SEQ ID NO: 92535 - protein, 16 aa, Homo sapiens
  CDR3 for alpha chain variable domain of TCR clone 46268 (TRAV12-3, TRAJ53)
CAMSPGSGGSNYKLTC

SEQ ID NO: 92536 - protein, 16 aa, Homo sapiens
  CDR3 for beta chain variable domain of TCR clone 46268 (TRBV4-2, TRBJ1-1)
CASSQAGFGMNTEAFF

SEQ ID NO: 92537 - protein, 17 aa, Homo sapiens
  CDR3 for alpha chain variable domain of TCR clone 46269 (TRAV3, TRAJ6)
CAVRDGPRAGGSYIPTF

SEQ ID NO: 92538 - protein, 20 aa, Homo sapiens
  CDR3 for beta chain variable domain of TCR clone 46269 (TRBV28, TRBJ2-1)
CASNPIGRSPGLAGGNEQFF

SEQ ID NO: 92539 - protein, 16 aa, Homo sapiens
  CDR3 for alpha chain variable domain of TCR clone 46270 (TRAV3, TRAJ10)
CAVRDMRAGGGNKLTF

SEQ ID NO: 92540 - protein, 19 aa, Homo sapiens
  CDR3 for beta chain variable domain of TCR clone 46270 (TRBV6-3, TRBJ1-2)
CASSYSKGRTGPPNYGDTF

SEQ ID NO: 92541 - protein, 15 aa, Homo sapiens
  CDR3 for alpha chain variable domain of TCR clone 46271 (TRAV26-1, TRAJ40)
CIVRVTTSGTYKYIF

SEQ ID NO: 92542 - protein, 12 aa, Homo sapiens
  CDR3 for beta chain variable domain of TCR clone 46271 (TRBV7-9, TRBJ1-4)
CASSTDRETLFF

SEQ ID NO: 92543 - protein, 13 aa, Homo sapiens
  CDR3 for alpha chain variable domain of TCR clone 46272 (TRAV20, TRAJ49)
CAVQARTGNQFYF

SEQ ID NO: 92544 - protein, 14 aa, Homo sapiens
  CDR3 for beta chain variable domain of TCR clone 46272 (TRBV5-1, TRBJ1-1)
CASSLQGARTEAFF

SEQ ID NO: 92545 - protein, 11 aa, Homo sapiens
  CDR3 for alpha chain variable domain of TCR clone 46273 (TRAV21, TRAJ34)
CAVTNTYKLIF

SEQ ID NO: 92546 - protein, 17 aa, Homo sapiens
  CDR3 for beta chain variable domain of TCR clone 46273 (TRBV20-1, TRBJ2-1)
CSARSPSGGPPTMSSSS

SEQ ID NO: 92547 - protein, 14 aa, Homo sapiens
  CDR3 for alpha chain variable domain of TCR clone 46274 (TRAV29/DV5, TRAJ36)
CAARRKTGAHNLFF

SEQ ID NO: 92548 - protein, 14 aa, Homo sapiens
  CDR3 for beta chain variable domain of TCR clone 46274 (TRBV12-5, TRBJ2-5)
CASGSRTHQETQYF

SEQ ID NO: 92549 - protein, 14 aa, Homo sapiens
  CDR3 for alpha chain variable domain of TCR clone 46275 (TRAV12-2, TRAJ13)
CAVKKTGGYQKVTF

SEQ ID NO: 92550 - protein, 14 aa, Homo sapiens
  CDR3 for beta chain variable domain of TCR clone 46275 (TRBV20-1, TRBJ2-3)
RTSGGPGTTDTQYF

SEQ ID NO: 92551 - protein, 15 aa, Homo sapiens
  CDR3 for alpha chain variable domain of TCR clone 46276 (TRAV27, TRAJ38)
CAARRNAGNNRKLIW

SEQ ID NO: 92552 - protein, 13 aa, Homo sapiens
  CDR3 for beta chain variable domain of TCR clone 46276 (TRBV7-9, TRBJ2-3)
CASSPGSTDTQYF

SEQ ID NO: 92553 - protein, 13 aa, Homo sapiens
  CDR3 for alpha chain variable domain of TCR clone 46277 (TRAV21, TRAJ15)
CAVANQAGTALIF

SEQ ID NO: 92554 - protein, 14 aa, Homo sapiens
  CDR3 for beta chain variable domain of TCR clone 46277 (TRBV27, TRBJ2-2)
CASSLGAATGELLF

SEQ ID NO: 92555 - protein, 14 aa, Homo sapiens
  CDR3 for alpha chain variable domain of TCR clone 46278 (TRAV17, TRAJ57)
CATDPQGGSEKLVF

SEQ ID NO: 92556 - protein, 14 aa, Homo sapiens
  CDR3 for beta chain variable domain of TCR clone 46278 (TRBV19, TRBJ1-2)
CASSVLGYNYGYTF

SEQ ID NO: 92557 - protein, 14 aa, Homo sapiens
  CDR3 for alpha chain variable domain of TCR clone 46279 (TRAV12-2, TRAJ40)
CAVKIPSGTYKYIF

SEQ ID NO: 92558 - protein, 16 aa, Homo sapiens
  CDR3 for beta chain variable domain of TCR clone 46279 (TRBV11-2, TRBJ2-7)
CASSPTTGGVSYEQYF

SEQ ID NO: 92559 - protein, 15 aa, Homo sapiens
  CDR3 for alpha chain variable domain of TCR clone 46280 (TRAV8-3, TRAJ45)
CASWYSGGGADGLTF

SEQ ID NO: 92560 - protein, 13 aa, Homo sapiens
  CDR3 for beta chain variable domain of TCR clone 46280 (TRBV10-3, TRBJ2-7)
CASKLAVNYEQYF

SEQ ID NO: 92561 - protein, 12 aa, Homo sapiens
  CDR3 for alpha chain variable domain of TCR clone 46281 (TRAV12-3, TRAJ17)
CAMTLTGNKLTF

SEQ ID NO: 92562 - protein, 12 aa, Homo sapiens
  CDR3 for beta chain variable domain of TCR clone 46281 (TRBV12-4, TRBJ2-3)
CASSTLPDAQYF

SEQ ID NO: 92563 - protein, 14 aa, Homo sapiens
  CDR3 for alpha chain variable domain of TCR clone 46282 (TRAV8-4, TRAJ48)
CAVSETFGNEKLTF

SEQ ID NO: 92564 - protein, 14 aa, Homo sapiens
  CDR3 for beta chain variable domain of TCR clone 46282 (TRBV7-2, TRBJ2-7)
CASSLWTGGYEQYF

SEQ ID NO: 92565 - protein, 20 aa, Homo sapiens
  CDR3 for alpha chain variable domain of TCR clone 46283 (TRAV1-1, TRAJ39)
CLLLLRCESSAYNAGNMLTF

SEQ ID NO: 92566 - protein, 13 aa, Homo sapiens
  CDR3 for beta chain variable domain of TCR clone 46283 (TRBV12-4, TRBJ1-5)
CASSPDMAQPQHF

SEQ ID NO: 92567 - protein, 13 aa, Homo sapiens
  CDR3 for alpha chain variable domain of TCR clone 46284 (TRAV21, TRAJ57)
CAVTQGGSEKLVF

SEQ ID NO: 92568 - protein, 16 aa, Homo sapiens
  CDR3 for beta chain variable domain of TCR clone 46284 (TRBV29-1, TRBJ2-7)
CSVEDAEDCTAYEQYF

SEQ ID NO: 92569 - protein, 14 aa, Homo sapiens
  CDR3 for alpha chain variable domain of TCR clone 46285 (TRAV1-2, TRAJ16)
CAVSRFSDGQKLLF

SEQ ID NO: 92570 - protein, 13 aa, Homo sapiens
  CDR3 for beta chain variable domain of TCR clone 46285 (TRBV12-4, TRBJ2-5)
CASSLGGSRTQYF

SEQ ID NO: 92571 - protein, 15 aa, Homo sapiens
  CDR3 for alpha chain variable domain of TCR clone 46286 (TRAV27, TRAJ38)
CAARRNAGNNRRLIW

SEQ ID NO: 92572 - protein, 13 aa, Homo sapiens
  CDR3 for beta chain variable domain of TCR clone 46286 (TRBV28, TRBJ2-5)
CAGVSRGEETQYF

SEQ ID NO: 92573 - protein, 15 aa, Homo sapiens
  CDR3 for alpha chain variable domain of TCR clone 46287 (TRAV25, TRAJ52)
CAGTSGGTSYGKLTF

SEQ ID NO: 92574 - protein, 11 aa, Homo sapiens
  CDR3 for beta chain variable domain of TCR clone 46287 (TRBV6-3, TRBJ2-3)
CATGQADTQYF

SEQ ID NO: 92575 - protein, 14 aa, Homo sapiens
  CDR3 for alpha chain variable domain of TCR clone 46288 (TRAV1-2, TRAJ16)
FAVNRFSDGQKLLF

SEQ ID NO: 92576 - protein, 13 aa, Homo sapiens
  CDR3 for beta chain variable domain of TCR clone 46288 (TRBV4-1, TRBJ2-1)
CASSQAGGDEQFF

SEQ ID NO: 92577 - protein, 17 aa, Homo sapiens
  CDR3 for alpha chain variable domain of TCR clone 46289 (TRAV3, TRAJ6)
CAVRDGPRAGGSYIPTF

SEQ ID NO: 92578 - protein, 14 aa, Homo sapiens
  CDR3 for beta chain variable domain of TCR clone 46289 (TRBV7-2, TRBJ2-7)
CATSPKTSFYEQYF

SEQ ID NO: 92579 - protein, 15 aa, Homo sapiens
  CDR3 for alpha chain variable domain of TCR clone 46290 (TRAV13-1, TRAJ9)
CAASTLNTGGFKTIF

SEQ ID NO: 92580 - protein, 16 aa, Homo sapiens
  CDR3 for beta chain variable domain of TCR clone 46290 (TRBV5-1, TRBJ1-1)
CASSSGGNSLNTEAFF

SEQ ID NO: 92581 - protein, 10 aa, Homo sapiens
  CDR3 for alpha chain variable domain of TCR clone 46291 (TRAV12-1, TRAJ23)
CVVSGGKLIF

SEQ ID NO: 92582 - protein, 14 aa, Homo sapiens
  CDR3 for beta chain variable domain of TCR clone 46291 (TRBV28, TRBJ1-1)
CASSSEQGYTEAFF

SEQ ID NO: 92583 - protein, 12 aa, Homo sapiens
  CDR3 for alpha chain variable domain of TCR clone 46292 (TRAV21, TRAJ13)
PGPSGGYQKVTF

SEQ ID NO: 92584 - protein, 13 aa, Homo sapiens
  CDR3 for beta chain variable domain of TCR clone 46292 (TRBV7-9, TRBJ1-2)
CASSVKQNYGYTF

SEQ ID NO: 92585 - protein, 14 aa, Homo sapiens
  CDR3 for alpha chain variable domain of TCR clone 46293 (TRAV12-2, TRAJ40)
CAVKIPSGTYKYIF

SEQ ID NO: 92586 - protein, 17 aa, Homo sapiens
  CDR3 for beta chain variable domain of TCR clone 46293 (TRBV4-1, TRBJ2-3)
CASSQGYVSGGTDTQYF

SEQ ID NO: 92587 - protein, 14 aa, Homo sapiens
  CDR3 for alpha chain variable domain of TCR clone 46294 (TRAV8-3, TRAJ9)
CAVVYNTGGFKTIF

SEQ ID NO: 92588 - protein, 15 aa, Homo sapiens
  CDR3 for beta chain variable domain of TCR clone 46294 (TRBV28, TRBJ2-5)
CASSPPWSYQETQYF

SEQ ID NO: 92589 - protein, 21 aa, Homo sapiens
  CDR3 for alpha chain variable domain of TCR clone 46295 (TRAV12-1, TRAJ32)
SSVIQPPTSMNYGGATNKLIF

SEQ ID NO: 92590 - protein, 10 aa, Homo sapiens
  CDR3 for beta chain variable domain of TCR clone 46295 (TRBV7-9, TRBJ2-2)
CASGPLDTFP

SEQ ID NO: 92591 - protein, 16 aa, Homo sapiens
  CDR3 for alpha chain variable domain of TCR clone 46296 (TRAV3, TRAJ5)
CAVRNLMDTGRRALTF

SEQ ID NO: 92592 - protein, 15 aa, Homo sapiens
  CDR3 for beta chain variable domain of TCR clone 46296 (TRBV27, TRBJ2-1)
CASSNGGGSSNEQFF

SEQ ID NO: 92593 - protein, 11 aa, Homo sapiens
  CDR3 for alpha chain variable domain of TCR clone 46297 (TRAV3, TRAJ21)
CAVGNFNIFYF

SEQ ID NO: 92594 - protein, 16 aa, Homo sapiens
  CDR3 for beta chain variable domain of TCR clone 46297 (TRBV19, TRBJ2-1)
CASSKAGPSSYNEQFF

SEQ ID NO: 92595 - protein, 13 aa, Homo sapiens
  CDR3 for alpha chain variable domain of TCR clone 46298 (TRAV38-1, TRAJ42)
CTRWGGSQGNLIF

SEQ ID NO: 92596 - protein, 17 aa, Homo sapiens
  CDR3 for beta chain variable domain of TCR clone 46298 (TRBV20-1, TRBJ2-1)
CSARDPLAGVWDNEQFF

SEQ ID NO: 92597 - protein, 15 aa, Homo sapiens
  CDR3 for alpha chain variable domain of TCR clone 46299 (TRAV26-1, TRAJ29)
CIVRVEGSGNTPLVF

SEQ ID NO: 92598 - protein, 14 aa, Homo sapiens
  CDR3 for beta chain variable domain of TCR clone 46299 (TRBV18, TRBJ2-5)
CASSPGVSQETQDF

SEQ ID NO: 92599 - protein, 15 aa, Homo sapiens
  CDR3 for alpha chain variable domain of TCR clone 46300 (TRAV12-2, TRAJ43)
CAFDMRFGAGTRLTV

SEQ ID NO: 92600 - protein, 15 aa, Homo sapiens
  CDR3 for beta chain variable domain of TCR clone 46300 (TRBV20-1, TRBJ2-7)
CSARKGLAESYEQYF

SEQ ID NO: 92601 - protein, 15 aa, Homo sapiens
  CDR3 for alpha chain variable domain of TCR clone 46301 (TRAV3, TRAJ42)
CAVRGGTGSQGNLIY

SEQ ID NO: 92602 - protein, 14 aa, Homo sapiens
  CDR3 for beta chain variable domain of TCR clone 46301 (TRBV19, TRBJ1-2)
CASSSLFARDVYTF

SEQ ID NO: 92603 - protein, 14 aa, Homo sapiens
  CDR3 for alpha chain variable domain of TCR clone 46302 (TRAV20, TRAJ29)
CAVQAWVGNTTLVF

SEQ ID NO: 92604 - protein, 15 aa, Homo sapiens
  CDR3 for beta chain variable domain of TCR clone 46302 (TRBV29-1, TRBJ2-7)
CSVEFFDRGSYEQYF

SEQ ID NO: 92605 - protein, 12 aa, Homo sapiens
  CDR3 for alpha chain variable domain of TCR clone 46303 (TRAV8-3, TRAJ43)
CAVGAGNNDMRL

SEQ ID NO: 92606 - protein, 14 aa, Homo sapiens
  CDR3 for beta chain variable domain of TCR clone 46303 (TRBV4-2, TRBJ1-5)
CASSRDRGNQPQHF

SEQ ID NO: 92607 - protein, 13 aa, Homo sapiens
  CDR3 for alpha chain variable domain of TCR clone 46304 (TRAV17, TRAJ9)
CATDYTGGFQTIF

SEQ ID NO: 92608 - protein, 14 aa, Homo sapiens
  CDR3 for beta chain variable domain of TCR clone 46304 (TRBV19, TRBJ2-5)
CASSMTGQQETQYF

SEQ ID NO: 92609 - protein, 12 aa, Homo sapiens
  CDR3 for alpha chain variable domain of TCR clone 46305 (TRAV21, TRAJ23)
CAAMLQGGKLIF

SEQ ID NO: 92610 - protein, 14 aa, Homo sapiens
  CDR3 for beta chain variable domain of TCR clone 46305 (TRBV7-9, TRBJ1-4)
CAITEGEANEKLFF

SEQ ID NO: 92611 - protein, 12 aa, Homo sapiens
  CDR3 for alpha chain variable domain of TCR clone 46306 (TRAV13-2, TRAJ23)
CAERHRGGKLIF

SEQ ID NO: 92612 - protein, 16 aa, Homo sapiens
  CDR3 for beta chain variable domain of TCR clone 46306 (TRBV20-1, TRBJ1-4)
CSAPGQGLLTNKKLFF

SEQ ID NO: 92613 - protein, 14 aa, Homo sapiens
  CDR3 for alpha chain variable domain of TCR clone 46307 (TRAV12-2, TRAJ24)
RAVTPADSWGKLQF

SEQ ID NO: 92614 - protein, 12 aa, Homo sapiens
  CDR3 for beta chain variable domain of TCR clone 46307 (TRBV3-1, TRBJ2-1)
CASSQGSSGQFF

SEQ ID NO: 92615 - protein, 16 aa, Homo sapiens
  CDR3 for alpha chain variable domain of TCR clone 46308 (TRAV14/DV4, TRAJ53)
CAMREGGGGSNYKLTF

SEQ ID NO: 92616 - protein, 14 aa, Homo sapiens
  CDR3 for beta chain variable domain of TCR clone 46308 (TRBV7-9, TRBJ2-1)
CASSPRDSLYEQFF

SEQ ID NO: 92617 - protein, 16 aa, Homo sapiens
  CDR3 for alpha chain variable domain of TCR clone 46309 (TRAV12-2, TRAJ6)
CAAPLAGSGGSYIPTF

SEQ ID NO: 92618 - protein, 16 aa, Homo sapiens
  CDR3 for beta chain variable domain of TCR clone 46309 (TRBV7-2, TRBJ2-3)
CASSLVALYSTDTQYF

SEQ ID NO: 92619 - protein, 16 aa, Homo sapiens
  CDR3 for alpha chain variable domain of TCR clone 46310 (TRAV30, TRAJ24)
CGTEIVDADSWGKFQF

SEQ ID NO: 92620 - protein, 14 aa, Homo sapiens
  CDR3 for beta chain variable domain of TCR clone 46310 (TRBV20-1, TRBJ2-5)
CSARDGRAGETQYF

SEQ ID NO: 92621 - protein, 14 aa, Homo sapiens
  CDR3 for alpha chain variable domain of TCR clone 46311 (TRAV2, TRAJ37)
CAVNFTSNTGKLIF

SEQ ID NO: 92622 - protein, 13 aa, Homo sapiens
  CDR3 for beta chain variable domain of TCR clone 46311 (TRBV4-1, TRBJ2-2)
CASSQENTGELFF

SEQ ID NO: 92623 - protein, 14 aa, Homo sapiens
  CDR3 for alpha chain variable domain of TCR clone 46312 (TRAV12-3, TRAJ21)
CAMFNNFNKFTLDL

SEQ ID NO: 92624 - protein, 16 aa, Homo sapiens
  CDR3 for beta chain variable domain of TCR clone 46312 (TRBV7-9, TRBJ1-2)
CASSLAPLRAAYGYTF

SEQ ID NO: 92625 - protein, 11 aa, Homo sapiens
  CDR3 for alpha chain variable domain of TCR clone 46313 (TRAV2, TRAJ13)
CASGGYQKVTF

SEQ ID NO: 92626 - protein, 13 aa, Homo sapiens
  CDR3 for beta chain variable domain of TCR clone 46313 (TRBV12-4, TRBJ2-7)
CASSPTETYEQYF

SEQ ID NO: 92627 - protein, 15 aa, Homo sapiens
  CDR3 for alpha chain variable domain of TCR clone 46314 (TRAV20, TRAJ43)
CAVLAGKSSNNDMRF

SEQ ID NO: 92628 - protein, 14 aa, Homo sapiens
  CDR3 for beta chain variable domain of TCR clone 46314 (TRBV27, TRBJ2-1)
CASRHLGGGKEQFF

SEQ ID NO: 92629 - protein, 14 aa, Homo sapiens
  CDR3 for alpha chain variable domain of TCR clone 46315 (TRAV12-3, TRAJ10)
SHLPLTGGGNKLTF

SEQ ID NO: 92630 - protein, 11 aa, Homo sapiens
  CDR3 for beta chain variable domain of TCR clone 46315 (TRBV11-2, TRBJ2-2)
CASSLPGELFL

SEQ ID NO: 92631 - protein, 14 aa, Homo sapiens
  CDR3 for alpha chain variable domain of TCR clone 46316 (TRAV35, TRAJ22)
CAGLRPGSARQLTF

SEQ ID NO: 92632 - protein, 13 aa, Homo sapiens
  CDR3 for beta chain variable domain of TCR clone 46316 (TRBV24-1, TRBJ2-2)
CATSDWSTGELFF

SEQ ID NO: 92633 - protein, 16 aa, Homo sapiens
  CDR3 for alpha chain variable domain of TCR clone 46317 (TRAV21, TRAJ37)
CAVRPRGSSNTGKLIF

SEQ ID NO: 92634 - protein, 13 aa, Homo sapiens
  CDR3 for beta chain variable domain of TCR clone 46317 (TRBV20-1, TRBJ2-2)
CSALSGGAGELSF

SEQ ID NO: 92635 - protein, 17 aa, Homo sapiens
  CDR3 for alpha chain variable domain of TCR clone 46318 (TRAV4, TRAJ42)
CLVGVMNYGGSQGNLIF

SEQ ID NO: 92636 - protein, 12 aa, Homo sapiens
  CDR3 for beta chain variable domain of TCR clone 46318 (TRBV20-1, TRBJ2-1)
CSAQYTYNEQFF

SEQ ID NO: 92637 - protein, 13 aa, Homo sapiens
  CDR3 for alpha chain variable domain of TCR clone 46319 (TRAV8-4, TRAJ48)
CAVSLFGNEKLTF

SEQ ID NO: 92638 - protein, 15 aa, Homo sapiens
  CDR3 for beta chain variable domain of TCR clone 46319 (TRBV20-1, TRBJ2-7)
CSARKGLAESYEQYL

SEQ ID NO: 92639 - protein, 12 aa, Homo sapiens
  CDR3 for alpha chain variable domain of TCR clone 46320 (TRAV12-2, TRAJ43)
CAVNVNNNDMRF

SEQ ID NO: 92640 - protein, 14 aa, Homo sapiens
  CDR3 for beta chain variable domain of TCR clone 46320 (TRBV7-2, TRBJ2-7)
CASSFLGRVFEQYF

SEQ ID NO: 92641 - protein, 14 aa, Homo sapiens
  CDR3 for alpha chain variable domain of TCR clone 46321 (TRAV35, TRAJ22)
CAGLRPGSARQLTF

SEQ ID NO: 92642 - protein, 15 aa, Homo sapiens
  CDR3 for beta chain variable domain of TCR clone 46321 (TRBV12-4, TRBJ2-5)
CASSPATGLQETQYF

SEQ ID NO: 92643 - protein, 14 aa, Homo sapiens
  CDR3 for alpha chain variable domain of TCR clone 46322 (TRAV8-4, TRAJ9)
CAVGINTGGFKTIF

SEQ ID NO: 92644 - protein, 15 aa, Homo sapiens
  CDR3 for beta chain variable domain of TCR clone 46322 (TRBV10-2, TRBJ2-6)
CASSEQGTGANVLAF

SEQ ID NO: 92645 - protein, 14 aa, Homo sapiens
  CDR3 for alpha chain variable domain of TCR clone 46323 (TRAV9-2, TRAJ39)
CALYIYNAGNMLTF

SEQ ID NO: 92646 - protein, 15 aa, Homo sapiens
  CDR3 for beta chain variable domain of TCR clone 46323 (TRBV11-2, TRBJ2-1)
CASSSPSTRYNEQFL

SEQ ID NO: 92647 - protein, 12 aa, Homo sapiens
  CDR3 for alpha chain variable domain of TCR clone 46324 (TRAV12-3, TRAJ17)
CAVTLTGNKLTF

SEQ ID NO: 92648 - protein, 13 aa, Homo sapiens
  CDR3 for beta chain variable domain of TCR clone 46324 (TRBV10-3, TRBJ2-7)
CAIRAGGPHEQYF

SEQ ID NO: 92649 - protein, 14 aa, Homo sapiens
  CDR3 for alpha chain variable domain of TCR clone 46325 (TRAV4, TRAJ26)
CLVGPHNYGQNFVF

SEQ ID NO: 92650 - protein, 17 aa, Homo sapiens
  CDR3 for beta chain variable domain of TCR clone 46325 (TRBV24-1, TRBJ2-1)
CATSDVSISGTYNEQFF

SEQ ID NO: 92651 - protein, 14 aa, Homo sapiens
  CDR3 for alpha chain variable domain of TCR clone 46326 (TRAV12-1, TRAJ12)
CVVTRMDSSNKLIF

SEQ ID NO: 92652 - protein, 13 aa, Homo sapiens
  CDR3 for beta chain variable domain of TCR clone 46326 (TRBV20-1, TRBJ1-1)
CSARGGGNTEAFF

SEQ ID NO: 92653 - protein, 14 aa, Homo sapiens
  CDR3 for alpha chain variable domain of TCR clone 46327 (TRAV8-4, TRAJ9)
CAVRINTGGFKTIF

SEQ ID NO: 92654 - protein, 15 aa, Homo sapiens
  CDR3 for beta chain variable domain of TCR clone 46327 (TRBV10-2, TRBJ2-6)
CARSEQGTGANVLTF

SEQ ID NO: 92655 - protein, 16 aa, Homo sapiens
  CDR3 for alpha chain variable domain of TCR clone 46328 (TRAV17, TRAJ36)
CATVSLNWGKQPLLWD

SEQ ID NO: 92656 - protein, 13 aa, Homo sapiens
  CDR3 for beta chain variable domain of TCR clone 46328 (TRBV4-1, TRBJ1-1)
CASSQLGTGDAFF

SEQ ID NO: 92657 - protein, 12 aa, Homo sapiens
  CDR3 for alpha chain variable domain of TCR clone 46329 (TRAV13-1, TRAJ27)
CAAHTNAGKSTF

SEQ ID NO: 92658 - protein, 14 aa, Homo sapiens
  CDR3 for beta chain variable domain of TCR clone 46329 (TRBV19, TRBJ2-2)
CASSGQGVAGELFF

SEQ ID NO: 92659 - protein, 14 aa, Homo sapiens
  CDR3 for alpha chain variable domain of TCR clone 46330 (TRAV13-1, TRAJ44)
CAAKATGTASKLTF

SEQ ID NO: 92660 - protein, 18 aa, Homo sapiens
  CDR3 for beta chain variable domain of TCR clone 46330 (TRBV11-2, TRBJ2-3)
CASSLGGASRGAPNTQYF

SEQ ID NO: 92661 - protein, 11 aa, Homo sapiens
  CDR3 for alpha chain variable domain of TCR clone 46331 (TRAV12-2, TRAJ21)
CAVEGFNKFYF

SEQ ID NO: 92662 - protein, 13 aa, Homo sapiens
  CDR3 for beta chain variable domain of TCR clone 46331 (TRBV2, TRBJ1-1)
CASSVSGYTEAFF

SEQ ID NO: 92663 - protein, 11 aa, Homo sapiens
  CDR3 for alpha chain variable domain of TCR clone 46332 (TRAV2, TRAJ21)
RAVFNFNKFYF

SEQ ID NO: 92664 - protein, 14 aa, Homo sapiens
  CDR3 for beta chain variable domain of TCR clone 46332 (TRBV15, TRBJ2-3)
CATRSGTSTDTQYF

SEQ ID NO: 92665 - protein, 14 aa, Homo sapiens
  CDR3 for alpha chain variable domain of TCR clone 46333 (TRAV1-1, TRAJ27)
CAVFYNTNAGKSTF

SEQ ID NO: 92666 - protein, 15 aa, Homo sapiens
  CDR3 for beta chain variable domain of TCR clone 46333 (TRBV7-2, TRBJ2-1)
CASSSGLAGGNEQFF

SEQ ID NO: 92667 - protein, 13 aa, Homo sapiens
  CDR3 for alpha chain variable domain of TCR clone 46334 (TRAV21, TRAJ57)
CAVTQGGSEKLVF

SEQ ID NO: 92668 - protein, 13 aa, Homo sapiens
  CDR3 for beta chain variable domain of TCR clone 46334 (TRBV10-3, TRBJ2-7)
CASKLAVNYEQYF

SEQ ID NO: 92669 - protein, 14 aa, Homo sapiens
  CDR3 for alpha chain variable domain of TCR clone 46335 (TRAV8-6, TRAJ13)
CAVSDREGYQKVTF

SEQ ID NO: 92670 - protein, 15 aa, Homo sapiens
  CDR3 for beta chain variable domain of TCR clone 46335 (TRBV10-2, TRBJ2-6)
CASSEQGTGANVLTF

SEQ ID NO: 92671 - protein, 16 aa, Homo sapiens
  CDR3 for alpha chain variable domain of TCR clone 46336 (TRAV3, TRAJ21)
CAVRDIERGNFNKFYF

SEQ ID NO: 92672 - protein, 13 aa, Homo sapiens
  CDR3 for beta chain variable domain of TCR clone 46336 (TRBV12-5, TRBJ2-3)
CASGDRQSDTQYF

SEQ ID NO: 92673 - protein, 13 aa, Homo sapiens
  CDR3 for alpha chain variable domain of TCR clone 46337 (TRAV21, TRAJ27)
CAARPSNAGKSTF

SEQ ID NO: 92674 - protein, 16 aa, Homo sapiens
  CDR3 for beta chain variable domain of TCR clone 46337 (TRBV20-1, TRBJ1-2)
CSASMGQGVANYGYTF

SEQ ID NO: 92675 - protein, 12 aa, Homo sapiens
  CDR3 for alpha chain variable domain of TCR clone 46338 (TRAV17, TRAJ30)
CATDARDDKIIF

SEQ ID NO: 92676 - protein, 16 aa, Homo sapiens
  CDR3 for beta chain variable domain of TCR clone 46338 (TRBV5-7, TRBJ2-7)
CTSSPTSGRELDEQYF

SEQ ID NO: 92677 - protein, 14 aa, Homo sapiens
  CDR3 for alpha chain variable domain of TCR clone 46339 (TRAV2, TRAJ22)
CAVGRGGSARQRTF

SEQ ID NO: 92678 - protein, 12 aa, Homo sapiens
  CDR3 for beta chain variable domain of TCR clone 46339 (TRBV19, TRBJ2-1)
CASSMQDTEQFF

SEQ ID NO: 92679 - protein, 15 aa, Homo sapiens
  CDR3 for alpha chain variable domain of TCR clone 46340 (TRAV12-1, TRAJ40)
RVVNRDTSGTYKYIF

SEQ ID NO: 92680 - protein, 13 aa, Homo sapiens
  CDR3 for beta chain variable domain of TCR clone 46340 (TRBV6-1, TRBJ2-1)
CASEGSSYNEQFF

SEQ ID NO: 92681 - protein, 15 aa, Homo sapiens
  CDR3 for alpha chain variable domain of TCR clone 46341 (TRAV17, TRAJ23)
FATDAEDNQGGKLIF

SEQ ID NO: 92682 - protein, 12 aa, Homo sapiens
  CDR3 for beta chain variable domain of TCR clone 46341 (TRBV2, TRBJ2-1)
CAKREGYNEQFF

SEQ ID NO: 92683 - protein, 14 aa, Homo sapiens
  CDR3 for alpha chain variable domain of TCR clone 46342 (TRAV20, TRAJ56)
CAVQFGGANSKLTV

SEQ ID NO: 92684 - protein, 14 aa, Homo sapiens
  CDR3 for beta chain variable domain of TCR clone 46342 (TRBV20-1, TRBJ2-7)
CSAKRGRSSYEQYF

SEQ ID NO: 92685 - protein, 12 aa, Homo sapiens
  CDR3 for alpha chain variable domain of TCR clone 46343 (TRAV17, TRAJ20)
CATDSNDCKLSF

SEQ ID NO: 92686 - protein, 16 aa, Homo sapiens
  CDR3 for beta chain variable domain of TCR clone 46343 (TRBV7-2, TRBJ1-2)
CASSSNQDRRGHGYTF

SEQ ID NO: 92687 - protein, 14 aa, Homo sapiens
  CDR3 for alpha chain variable domain of TCR clone 46344 (TRAV23/DV6, TRAJ4)
CAANLSGGYNKLIF

SEQ ID NO: 92688 - protein, 17 aa, Homo sapiens
  CDR3 for beta chain variable domain of TCR clone 46344 (TRBV4-1, TRBJ1-3)
CASSPQRGIRFGDTIYF

SEQ ID NO: 92689 - protein, 14 aa, Homo sapiens
  CDR3 for alpha chain variable domain of TCR clone 46345 (TRAV1-2, TRAJ16)
CAANRFSDGQKLLF

SEQ ID NO: 92690 - protein, 18 aa, Homo sapiens
  CDR3 for beta chain variable domain of TCR clone 46345 (TRBV20-1, TRBJ2-6)
CSAETTPTHGSGANVLTF

SEQ ID NO: 92691 - protein, 12 aa, Homo sapiens
  CDR3 for alpha chain variable domain of TCR clone 46346 (TRAV12-3, TRAJ17)
CAMTLTGNKLTF

SEQ ID NO: 92692 - protein, 17 aa, Homo sapiens
  CDR3 for beta chain variable domain of TCR clone 46346 (TRBV20-1, TRBJ2-1)
CSARDRRRASSYNEQFF

SEQ ID NO: 92693 - protein, 16 aa, Homo sapiens
  CDR3 for alpha chain variable domain of TCR clone 46347 (TRAV12-3, TRAJ53)
CAMGPGSGGSNYKLTF

SEQ ID NO: 92694 - protein, 12 aa, Homo sapiens
  CDR3 for beta chain variable domain of TCR clone 46347 (TRBV11-2, TRBJ2-2)
CASSLGGGELFF

SEQ ID NO: 92695 - protein, 15 aa, Homo sapiens
  CDR3 for alpha chain variable domain of TCR clone 46348 (TRAV1-2, TRAJ30)
CAVRPHGNRDDKIIF

SEQ ID NO: 92696 - protein, 13 aa, Homo sapiens
  CDR3 for beta chain variable domain of TCR clone 46348 (TRBV4-1, TRBJ2-7)
CASSQGQAHEQYF

SEQ ID NO: 92697 - protein, 15 aa, Homo sapiens
  CDR3 for alpha chain variable domain of TCR clone 46349 (TRAV26-1, TRAJ29)
CIVRVEGSGNTPLVF

SEQ ID NO: 92698 - protein, 20 aa, Homo sapiens
  CDR3 for beta chain variable domain of TCR clone 46349 (TRBV28, TRBJ2-1)
CASTPIGRSPGLAGGNEQFF

SEQ ID NO: 92699 - protein, 10 aa, Homo sapiens
  CDR3 for alpha chain variable domain of TCR clone 46350 (TRAV1-2, TRAJ20)
CACNDYKLSF

SEQ ID NO: 92700 - protein, 14 aa, Homo sapiens
  CDR3 for beta chain variable domain of TCR clone 46350 (TRBV20-1, TRBJ1-1)
CSAQTRIGSTEAFF

SEQ ID NO: 92701 - protein, 13 aa, Homo sapiens
  CDR3 for alpha chain variable domain of TCR clone 46351 (TRAV25, TRAJ10)
CAGRTGGGNKLTF

SEQ ID NO: 92702 - protein, 15 aa, Homo sapiens
  CDR3 for beta chain variable domain of TCR clone 46351 (TRBV19, TRBJ2-1)
CASSSPGVPPDEQFF

SEQ ID NO: 92703 - protein, 12 aa, Homo sapiens
  CDR3 for alpha chain variable domain of TCR clone 46352 (TRAV12-3, TRAJ17)
CAMTLTGNTLTF

SEQ ID NO: 92704 - protein, 15 aa, Homo sapiens
  CDR3 for beta chain variable domain of TCR clone 46352 (TRBV20-1, TRBJ2-7)
CSARDRVTGMDEHYF

SEQ ID NO: 92705 - protein, 18 aa, Homo sapiens
  CDR3 for alpha chain variable domain of TCR clone 46353 (TRAV1-2, TRAJ10)
CAVRALTPVTGGGNKLTF

SEQ ID NO: 92706 - protein, 14 aa, Homo sapiens
  CDR3 for beta chain variable domain of TCR clone 46353 (TRBV4-1, TRBJ1-1)
CASSQQGNGNGAFF

SEQ ID NO: 92707 - protein, 16 aa, Homo sapiens
  CDR3 for alpha chain variable domain of TCR clone 46354 (TRAV14/DV4, TRAJ53)
CAMREGGGGSNYKLTF

SEQ ID NO: 92708 - protein, 13 aa, Homo sapiens
  CDR3 for beta chain variable domain of TCR clone 46354 (TRBV10-3, TRBJ2-7)
CASKLAVNYEQYF

SEQ ID NO: 92709 - protein, 15 aa, Homo sapiens
  CDR3 for alpha chain variable domain of TCR clone 46355 (TRAV3, TRAJ5)
FAVRDRKTGRRALTF

SEQ ID NO: 92710 - protein, 15 aa, Homo sapiens
  CDR3 for beta chain variable domain of TCR clone 46355 (TRBV7-8, TRBJ2-1)
CASSLADSLYNEQFF

SEQ ID NO: 92711 - protein, 15 aa, Homo sapiens
  CDR3 for alpha chain variable domain of TCR clone 46356 (TRAV2, TRAJ9)
CAVEDRGTGGFKTIF

SEQ ID NO: 92712 - protein, 16 aa, Homo sapiens
  CDR3 for beta chain variable domain of TCR clone 46356 (TRBV24-1, TRBJ2-3)
CATIDPGTGATDTQYF

SEQ ID NO: 92713 - protein, 14 aa, Homo sapiens
  CDR3 for alpha chain variable domain of TCR clone 46357 (TRAV26-1, TRAJ52)
CIVRVVASYGKLTF

SEQ ID NO: 92714 - protein, 14 aa, Homo sapiens
  CDR3 for beta chain variable domain of TCR clone 46357 (TRBV7-6, TRBJ2-3)
CASSVAGGTDTQYF

SEQ ID NO: 92715 - protein, 11 aa, Homo sapiens
  CDR3 for alpha chain variable domain of TCR clone 46358 (TRAV12-1, TRAJ30)
CVVNGQDKIIF

SEQ ID NO: 92716 - protein, 15 aa, Homo sapiens
  CDR3 for beta chain variable domain of TCR clone 46358 (TRBV12-4, TRBJ2-1)
CASSLSTGVSNEQFF

SEQ ID NO: 92717 - protein, 15 aa, Homo sapiens
  CDR3 for alpha chain variable domain of TCR clone 46359 (TRAV3, TRAJ22)
CAVRDRGGSARQLAF

SEQ ID NO: 92718 - protein, 13 aa, Homo sapiens
  CDR3 for beta chain variable domain of TCR clone 46359 (TRBV2, TRBJ1-5)
CATAGPGNQPQHF

SEQ ID NO: 92719 - protein, 12 aa, Homo sapiens
  CDR3 for alpha chain variable domain of TCR clone 46360 (TRAV1-1, TRAJ8)
CAGGTGFQKLVF

SEQ ID NO: 92720 - protein, 15 aa, Homo sapiens
  CDR3 for beta chain variable domain of TCR clone 46360 (TRBV7-9, TRBJ1-4)
CASSRTGGFNKKLFF

SEQ ID NO: 92721 - protein, 14 aa, Homo sapiens
  CDR3 for alpha chain variable domain of TCR clone 46361 (TRAV1-2, TRAJ8)
CAVREDTGFQKLVF

SEQ ID NO: 92722 - protein, 12 aa, Homo sapiens
  CDR3 for beta chain variable domain of TCR clone 46361 (TRBV11-2, TRBJ2-2)
CASSLGGGEPFF

SEQ ID NO: 92723 - protein, 12 aa, Homo sapiens
  CDR3 for alpha chain variable domain of TCR clone 46362 (TRAV8-3, TRAJ26)
CAGDNYGQNFVF

SEQ ID NO: 92724 - protein, 17 aa, Homo sapiens
  CDR3 for beta chain variable domain of TCR clone 46362 (TRBV7-8, TRBJ2-6)
RASSAGTGGAGANVLTF

SEQ ID NO: 92725 - protein, 12 aa, Homo sapiens
  CDR3 for alpha chain variable domain of TCR clone 46363 (TRAV1-1, TRAJ43)
CAPRVSSNYMRF

SEQ ID NO: 92726 - protein, 15 aa, Homo sapiens
  CDR3 for beta chain variable domain of TCR clone 46363 (TRBV5-1, TRBJ2-7)
CASSLGDFTTYEQYF

SEQ ID NO: 92727 - protein, 12 aa, Homo sapiens
  CDR3 for alpha chain variable domain of TCR clone 46364 (TRAV8-3, TRAJ20)
CAVGANDYKLSF

SEQ ID NO: 92728 - protein, 16 aa, Homo sapiens
  CDR3 for beta chain variable domain of TCR clone 46364 (TRBV19, TRBJ2-2)
CASRSPGPGATGELFF

SEQ ID NO: 92729 - protein, 14 aa, Homo sapiens
  CDR3 for alpha chain variable domain of TCR clone 46365 (TRAV3, TRAJ9)
CAVRGNTGGFKTIF

SEQ ID NO: 92730 - protein, 14 aa, Homo sapiens
  CDR3 for beta chain variable domain of TCR clone 46365 (TRBV15, TRBJ2-1)
CATSGVEDYNDQFF

SEQ ID NO: 92731 - protein, 14 aa, Homo sapiens
  CDR3 for alpha chain variable domain of TCR clone 46366 (TRAV12-1, TRAJ10)
CVAILTGGGNKLAF

SEQ ID NO: 92732 - protein, 15 aa, Homo sapiens
  CDR3 for beta chain variable domain of TCR clone 46366 (TRBV20-1, TRBJ2-7)
CSARGFRPQTYEQYF

SEQ ID NO: 92733 - protein, 14 aa, Homo sapiens
  CDR3 for alpha chain variable domain of TCR clone 46367 (TRAV12-2, TRAJ24)
CAVTPADSWGKLQF

SEQ ID NO: 92734 - protein, 12 aa, Homo sapiens
  CDR3 for beta chain variable domain of TCR clone 46367 (TRBV3-1, TRBJ2-1)
CASSQGSSGHFF

SEQ ID NO: 92735 - protein, 16 aa, Homo sapiens
  CDR3 for alpha chain variable domain of TCR clone 46368 (TRAV1-2, TRAJ16)
CAVNRFQMARSCSLQG

SEQ ID NO: 92736 - protein, 14 aa, Homo sapiens
  CDR3 for beta chain variable domain of TCR clone 46368 (TRBV7-2, TRBJ2-7)
CASSPKTSFYEQYF

SEQ ID NO: 92737 - protein, 13 aa, Homo sapiens
  CDR3 for alpha chain variable domain of TCR clone 46369 (TRAV26-2, TRAJ43)
CILRAVNNKDMRF

SEQ ID NO: 92738 - protein, 15 aa, Homo sapiens
  CDR3 for beta chain variable domain of TCR clone 46369 (TRBV7-2, TRBJ2-1)
CASTHGTGIYNEQFF

SEQ ID NO: 92739 - protein, 14 aa, Homo sapiens
  CDR3 for alpha chain variable domain of TCR clone 46370 (TRAV1-2, TRAJ8)
CAVREDTGFQKLVF

SEQ ID NO: 92740 - protein, 16 aa, Homo sapiens
  CDR3 for beta chain variable domain of TCR clone 46370 (TRBV27, TRBJ2-2)
CDSSFRGLVRTGELFF

SEQ ID NO: 92741 - protein, 13 aa, Homo sapiens
  CDR3 for alpha chain variable domain of TCR clone 46371 (TRAV1-2, TRAJ9)
CAALNTGGFKTIF

SEQ ID NO: 92742 - protein, 15 aa, Homo sapiens
  CDR3 for beta chain variable domain of TCR clone 46371 (TRBV7-3, TRBJ2-1)
CASSPTGGGEVEQFF

SEQ ID NO: 92743 - protein, 14 aa, Homo sapiens
  CDR3 for alpha chain variable domain of TCR clone 46372 (TRAV12-3, TRAJ10)
SHLPLTGGGNKLTF

SEQ ID NO: 92744 - protein, 14 aa, Homo sapiens
  CDR3 for beta chain variable domain of TCR clone 46372 (TRBV6-1, TRBJ1-3)
CASVQGGGGNTTYF

SEQ ID NO: 92745 - protein, 11 aa, Homo sapiens
  CDR3 for alpha chain variable domain of TCR clone 46373 (TRAV12-3, TRAJ43)
CAMSVSNDMRF

SEQ ID NO: 92746 - protein, 13 aa, Homo sapiens
  CDR3 for beta chain variable domain of TCR clone 46373 (TRBV20-1, TRBJ1-1)
CSAPLGEGTEAFF

SEQ ID NO: 92747 - protein, 14 aa, Homo sapiens
  CDR3 for alpha chain variable domain of TCR clone 46374 (TRAV13-1, TRAJ44)
CAAKATGTASKLTF

SEQ ID NO: 92748 - protein, 17 aa, Homo sapiens
  CDR3 for beta chain variable domain of TCR clone 46374 (TRBV7-3, TRBJ2-3)
CASSLMKRMRGTDTQYF

SEQ ID NO: 92749 - protein, 15 aa, Homo sapiens
  CDR3 for alpha chain variable domain of TCR clone 46375 (TRAV12-3, TRAJ6)
CAMSATTGGSYIPTF

SEQ ID NO: 92750 - protein, 13 aa, Homo sapiens
  CDR3 for beta chain variable domain of TCR clone 46375 (TRBV7-7, TRBJ2-3)
CASSLSRADTQYF

SEQ ID NO: 92751 - protein, 16 aa, Homo sapiens
  CDR3 for alpha chain variable domain of TCR clone 46376 (TRAV3, TRAJ13)
CAVRDFESGGYQKVTF

SEQ ID NO: 92752 - protein, 16 aa, Homo sapiens
  CDR3 for beta chain variable domain of TCR clone 46376 (TRBV27, TRBJ2-5)
SASSYGPGGQKETQYF

SEQ ID NO: 92753 - protein, 15 aa, Homo sapiens
  CDR3 for alpha chain variable domain of TCR clone 46377 (TRAV8-3, TRAJ23)
CAVGDRYNQGGKLIF

SEQ ID NO: 92754 - protein, 22 aa, Homo sapiens
  CDR3 for beta chain variable domain of TCR clone 46377 (TRBV29-1, TRBJ2-5)
TVSNMSPEDSSIYLCSAGTHYF

SEQ ID NO: 92755 - protein, 14 aa, Homo sapiens
  CDR3 for alpha chain variable domain of TCR clone 46378 (TRAV35, TRAJ33)
CAGSSQDSSYQLIW

SEQ ID NO: 92756 - protein, 15 aa, Homo sapiens
  CDR3 for beta chain variable domain of TCR clone 46378 (TRBV5-1, TRBJ1-4)
FAPAAWKDGNEKLFF

SEQ ID NO: 92757 - protein, 14 aa, Homo sapiens
  CDR3 for alpha chain variable domain of TCR clone 46379 (TRAV21, TRAJ37)
CAVKGSSNTGKLIF

SEQ ID NO: 92758 - protein, 17 aa, Homo sapiens
  CDR3 for beta chain variable domain of TCR clone 46379 (TRBV5-5, TRBJ1-1)
CASSLRFRGLMNTEAFF

SEQ ID NO: 92759 - protein, 18 aa, Homo sapiens
  CDR3 for alpha chain variable domain of TCR clone 46380 (TRAV26-2, TRAJ54)
FILRDVEVGIQGAQKLVF

SEQ ID NO: 92760 - protein, 16 aa, Homo sapiens
  CDR3 for beta chain variable domain of TCR clone 46380 (TRBV6-1, TRBJ2-5)
CASSETLDRGAETQYF

SEQ ID NO: 92761 - protein, 14 aa, Homo sapiens
  CDR3 for alpha chain variable domain of TCR clone 46381 (TRAV26-1, TRAJ21)
CIVRVVYNFNEFYF

SEQ ID NO: 92762 - protein, 11 aa, Homo sapiens
  CDR3 for beta chain variable domain of TCR clone 46381 (TRBV5-6, TRBJ2-5)
CASSLERTQYF

SEQ ID NO: 92763 - protein, 14 aa, Homo sapiens
  CDR3 for alpha chain variable domain of TCR clone 46382 (TRAV12-2, TRAJ13)
CAVKKTGGYQKVTF

SEQ ID NO: 92764 - protein, 16 aa, Homo sapiens
  CDR3 for beta chain variable domain of TCR clone 46382 (TRBV4-2, TRBJ1-1)
CASSQAGFGMNTEAFF

SEQ ID NO: 92765 - protein, 16 aa, Homo sapiens
  CDR3 for alpha chain variable domain of TCR clone 46383 (TRAV26-1, TRAJ23)
CIVRPRFYNQGGKLIF

SEQ ID NO: 92766 - protein, 13 aa, Homo sapiens
  CDR3 for beta chain variable domain of TCR clone 46383 (TRBV20-1, TRBJ1-1)
CSARGGGNTGAFF

SEQ ID NO: 92767 - protein, 13 aa, Homo sapiens
  CDR3 for alpha chain variable domain of TCR clone 46384 (TRAV27, TRAJ8)
CAGGPTGFQKLVF

SEQ ID NO: 92768 - protein, 14 aa, Homo sapiens
  CDR3 for beta chain variable domain of TCR clone 46384 (TRBV25-1, TRBJ1-1)
CASTHLGGNTEAFF

SEQ ID NO: 92769 - protein, 15 aa, Homo sapiens
  CDR3 for alpha chain variable domain of TCR clone 46385 (TRAV27, TRAJ38)
CAARRNAGNNRKLIW

SEQ ID NO: 92770 - protein, 12 aa, Homo sapiens
  CDR3 for beta chain variable domain of TCR clone 46385 (TRBV27, TRBJ2-2)
CASKLFTGELFF

SEQ ID NO: 92771 - protein, 17 aa, Homo sapiens
  CDR3 for alpha chain variable domain of TCR clone 46386 (TRAV27, TRAJ18)
CAGLHRGRGSTMGRLYF

SEQ ID NO: 92772 - protein, 14 aa, Homo sapiens
  CDR3 for beta chain variable domain of TCR clone 46386 (TRBV20-1, TRBJ1-5)
CSARGRGSNQPQHF

SEQ ID NO: 92773 - protein, 14 aa, Homo sapiens
  CDR3 for alpha chain variable domain of TCR clone 46387 (TRAV26-1, TRAJ38)
CIADNAGNNRKLIW

SEQ ID NO: 92774 - protein, 13 aa, Homo sapiens
  CDR3 for beta chain variable domain of TCR clone 46387 (TRBV20-1, TRBJ1-1)
CSDRGGGNTEAFF

SEQ ID NO: 92775 - protein, 16 aa, Homo sapiens
  CDR3 for alpha chain variable domain of TCR clone 46388 (TRAV3, TRAJ10)
CAVRDMRAGGGNKLTF

SEQ ID NO: 92776 - protein, 18 aa, Homo sapiens
  CDR3 for beta chain variable domain of TCR clone 46388 (TRBV11-2, TRBJ2-3)
CASSLGGASRGAPNTQYF

SEQ ID NO: 92777 - protein, 14 aa, Homo sapiens
  CDR3 for alpha chain variable domain of TCR clone 46389 (TRAV16, TRAJ15)
CALSFNQAGTALIF

SEQ ID NO: 92778 - protein, 16 aa, Homo sapiens
  CDR3 for beta chain variable domain of TCR clone 46389 (TRBV9, TRBJ2-7)
CASIAGPDRSPYEQYF

SEQ ID NO: 92779 - protein, 12 aa, Homo sapiens
  CDR3 for alpha chain variable domain of TCR clone 46390 (TRAV12-3, TRAJ17)
CAMTLTGNKLTF

SEQ ID NO: 92780 - protein, 17 aa, Homo sapiens
  CDR3 for beta chain variable domain of TCR clone 46390 (TRBV5-1, TRBJ1-5)
CASSLVGREEGNQPQHF

SEQ ID NO: 92781 - protein, 13 aa, Homo sapiens
  CDR3 for alpha chain variable domain of TCR clone 46391 (TRAV20, TRAJ21)
CAVEGYNFNKFYF

SEQ ID NO: 92782 - protein, 14 aa, Homo sapiens
  CDR3 for beta chain variable domain of TCR clone 46391 (TRBV3-1, TRBJ2-5)
CASNQGPDQETQYF

SEQ ID NO: 92783 - protein, 14 aa, Homo sapiens
  CDR3 for alpha chain variable domain of TCR clone 46392 (TRAV1-2, TRAJ16)
CAVNRFSDGQKLLF

SEQ ID NO: 92784 - protein, 16 aa, Homo sapiens
  CDR3 for beta chain variable domain of TCR clone 46392 (TRBV5-8, TRBJ2-2)
CASSLINPGGAGELFF

SEQ ID NO: 92785 - protein, 11 aa, Homo sapiens
  CDR3 for alpha chain variable domain of TCR clone 46393 (TRAV20, TRAJ34)
CRTKGTDKLIF

SEQ ID NO: 92786 - protein, 14 aa, Homo sapiens
  CDR3 for beta chain variable domain of TCR clone 46393 (TRBV28, TRBJ2-2)
CASRIRSGTGELFF

SEQ ID NO: 92787 - protein, 15 aa, Homo sapiens
  CDR3 for alpha chain variable domain of TCR clone 46394 (TRAV3, TRAJ32)
CAVSSYGGATNKPIF

SEQ ID NO: 92788 - protein, 16 aa, Homo sapiens
  CDR3 for beta chain variable domain of TCR clone 46394 (TRBV5-1, TRBJ2-5)
CASSLSLAGAQETQYF

SEQ ID NO: 92789 - protein, 14 aa, Homo sapiens
  CDR3 for alpha chain variable domain of TCR clone 46395 (TRAV13-1, TRAJ44)
CAAKATGTASKLTF

SEQ ID NO: 92790 - protein, 17 aa, Homo sapiens
  CDR3 for beta chain variable domain of TCR clone 46395 (TRBV7-3, TRBJ2-3)
CASSLMKRMRGADTQCF

SEQ ID NO: 92791 - protein, 15 aa, Homo sapiens
  CDR3 for alpha chain variable domain of TCR clone 46396 (TRAV3, TRAJ22)
CAVRDRGGSARQLTF

SEQ ID NO: 92792 - protein, 14 aa, Homo sapiens
  CDR3 for beta chain variable domain of TCR clone 46396 (TRBV18, TRBJ2-5)
CASSPGVSQETQYF

SEQ ID NO: 92793 - protein, 17 aa, Homo sapiens
  CDR3 for alpha chain variable domain of TCR clone 46397 (TRAV26-1, TRAJ36)
CIVRPPGDQTGANNLFS

SEQ ID NO: 92794 - protein, 15 aa, Homo sapiens
  CDR3 for beta chain variable domain of TCR clone 46397 (TRBV10-3, TRBJ2-6)
CATPAAASGANVLTF

SEQ ID NO: 92795 - protein, 17 aa, Homo sapiens
  CDR3 for alpha chain variable domain of TCR clone 46398 (TRAV16, TRAJ42)
CSLSPKLYGGSQGNLIF

SEQ ID NO: 92796 - protein, 13 aa, Homo sapiens
  CDR3 for beta chain variable domain of TCR clone 46398 (TRBV19, TRBJ1-5)
CASSTRRDQPQHF

SEQ ID NO: 92797 - protein, 15 aa, Homo sapiens
  CDR3 for alpha chain variable domain of TCR clone 46399 (TRAV3, TRAJ20)
CAVRDIKLSDYKLSF

SEQ ID NO: 92798 - protein, 15 aa, Homo sapiens
  CDR3 for beta chain variable domain of TCR clone 46399 (TRBV7-9, TRBJ1-6)
CPSSSPGRGNSPLHF

SEQ ID NO: 92799 - protein, 17 aa, Homo sapiens
  CDR3 for alpha chain variable domain of TCR clone 46400 (TRAV23/DV6, TRAJ57)
CAASSTLSQGGSEKLVF

SEQ ID NO: 92800 - protein, 11 aa, Homo sapiens
  CDR3 for beta chain variable domain of TCR clone 46400 (TRBV11-2, TRBJ2-2)
CASSLPGELFF

SEQ ID NO: 92801 - protein, 12 aa, Homo sapiens
  CDR3 for alpha chain variable domain of TCR clone 46401 (TRAV8-3, TRAJ34)
WASGYNTAKLIF

SEQ ID NO: 92802 - protein, 13 aa, Homo sapiens
  CDR3 for beta chain variable domain of TCR clone 46401 (TRBV6-4, TRBJ2-3)
CASSVSWADTQYF

SEQ ID NO: 92803 - protein, 14 aa, Homo sapiens
  CDR3 for alpha chain variable domain of TCR clone 46402 (TRAV8-3, TRAJ4)
CAVGASGGYNKLIF

SEQ ID NO: 92804 - protein, 16 aa, Homo sapiens
  CDR3 for beta chain variable domain of TCR clone 46402 (TRBV4-3, TRBJ2-2)
CASSHLQGAGTGELFF

SEQ ID NO: 92805 - protein, 17 aa, Homo sapiens
  CDR3 for alpha chain variable domain of TCR clone 46403 (TRAV35, TRAJ28)
RAGLQVYSGAGSYQLTF

SEQ ID NO: 92806 - protein, 15 aa, Homo sapiens
  CDR3 for beta chain variable domain of TCR clone 46403 (TRBV2, TRBJ1-2)
CASSEIGGANYGYTF

SEQ ID NO: 92807 - protein, 15 aa, Homo sapiens
  CDR3 for alpha chain variable domain of TCR clone 46404 (TRAV12-1, TRAJ23)
CIVRVAGYQGGKLIF

SEQ ID NO: 92808 - protein, 18 aa, Homo sapiens
  CDR3 for beta chain variable domain of TCR clone 46404 (TRBV28, TRBJ2-1)
CASSSTSGRANSYNEQFF

SEQ ID NO: 92809 - protein, 14 aa, Homo sapiens
  CDR3 for alpha chain variable domain of TCR clone 46405 (TRAV21, TRAJ35)
CAVMPIGFGNVLHC

SEQ ID NO: 92810 - protein, 12 aa, Homo sapiens
  CDR3 for beta chain variable domain of TCR clone 46405 (TRBV7-9, TRBJ2-7)
CASSLEGYEQYF

SEQ ID NO: 92811 - protein, 12 aa, Homo sapiens
  CDR3 for alpha chain variable domain of TCR clone 46406 (TRAV13-2, TRAJ23)
CAERHRGGKLIF

SEQ ID NO: 92812 - protein, 13 aa, Homo sapiens
  CDR3 for beta chain variable domain of TCR clone 46406 (TRBV12-5, TRBJ2-3)
CASGDRQSDTQYF

SEQ ID NO: 92813 - protein, 14 aa, Homo sapiens
  CDR3 for alpha chain variable domain of TCR clone 46407 (TRAV12-3, TRAJ10)
SHLPLTGGGNKLTF

SEQ ID NO: 92814 - protein, 18 aa, Homo sapiens
  CDR3 for beta chain variable domain of TCR clone 46407 (TRBV20-1, TRBJ2-6)
CSAETTPTHGSGANVLTF

SEQ ID NO: 92815 - protein, 13 aa, Homo sapiens
  CDR3 for alpha chain variable domain of TCR clone 46408 (TRAV12-3, TRAJ40)
CAMSDSGTYKYTF

SEQ ID NO: 92816 - protein, 14 aa, Homo sapiens
  CDR3 for beta chain variable domain of TCR clone 46408 (TRBV7-2, TRBJ1-5)
CASSTQGAGQPQHF

SEQ ID NO: 92817 - protein, 16 aa, Homo sapiens
  CDR3 for alpha chain variable domain of TCR clone 46409 (TRAV30, TRAJ24)
CGTEIVDADSWGKFQF

SEQ ID NO: 92818 - protein, 14 aa, Homo sapiens
  CDR3 for beta chain variable domain of TCR clone 46409 (TRBV11-2, TRBJ2-1)
CASSLEVANNEQFF

SEQ ID NO: 92819 - protein, 11 aa, Homo sapiens
  CDR3 for alpha chain variable domain of TCR clone 46410 (TRAV21, TRAJ33)
CAVIRNYQLIW

SEQ ID NO: 92820 - protein, 15 aa, Homo sapiens
  CDR3 for beta chain variable domain of TCR clone 46410 (TRBV7-9, TRBJ1-4)
CASSRTGGFNEKLFF

SEQ ID NO: 92821 - protein, 14 aa, Homo sapiens
  CDR3 for alpha chain variable domain of TCR clone 46411 (TRAV17, TRAJ4)
CATAPLGGYNKLTF

SEQ ID NO: 92822 - protein, 13 aa, Homo sapiens
  CDR3 for beta chain variable domain of TCR clone 46411 (TRBV12-4, TRBJ1-3)
CASSLASGNTIYF

SEQ ID NO: 92823 - protein, 12 aa, Homo sapiens
  CDR3 for alpha chain variable domain of TCR clone 46412 (TRAV16, TRAJ10)
CSRTGGGNKLTF

SEQ ID NO: 92824 - protein, 17 aa, Homo sapiens
  CDR3 for beta chain variable domain of TCR clone 46412 (TRBV7-8, TRBJ2-6)
CASSAGTGGAGANVLTF

SEQ ID NO: 92825 - protein, 10 aa, Homo sapiens
  CDR3 for alpha chain variable domain of TCR clone 46413 (TRAV22, TRAJ58)
CAASGSRLTF

SEQ ID NO: 92826 - protein, 15 aa, Homo sapiens
  CDR3 for beta chain variable domain of TCR clone 46413 (TRBV7-9, TRBJ1-5)
CASSQGHQPNQPQHF

SEQ ID NO: 92827 - protein, 14 aa, Homo sapiens
  CDR3 for alpha chain variable domain of TCR clone 46414 (TRAV21, TRAJ28)
CAVGSGTGSYQLTF

SEQ ID NO: 92828 - protein, 14 aa, Homo sapiens
  CDR3 for beta chain variable domain of TCR clone 46414 (TRBV18, TRBJ1-4)
CASSPGPNGEKLFF

SEQ ID NO: 92829 - protein, 12 aa, Homo sapiens
  CDR3 for alpha chain variable domain of TCR clone 46415 (TRAV12-1, TRAJ34)
CVVAGATDKIIF

SEQ ID NO: 92830 - protein, 12 aa, Homo sapiens
  CDR3 for beta chain variable domain of TCR clone 46415 (TRBV7-9, TRBJ1-1)
CASSLVRGEAFF

SEQ ID NO: 92831 - protein, 13 aa, Homo sapiens
  CDR3 for alpha chain variable domain of TCR clone 46416 (TRAV12-1, TRAJ39)
CGDDNNAGNMLTF

SEQ ID NO: 92832 - protein, 16 aa, Homo sapiens
  CDR3 for beta chain variable domain of TCR clone 46416 (TRBV7-2, TRBJ1-2)
CASSLNQDRRGHGYTF

SEQ ID NO: 92833 - protein, 15 aa, Homo sapiens
  CDR3 for alpha chain variable domain of TCR clone 46417 (TRAV2, TRAJ9)
CAVEDRGTGGFKTIF

SEQ ID NO: 92834 - protein, 16 aa, Homo sapiens
  CDR3 for beta chain variable domain of TCR clone 46417 (TRBV24-1, TRBJ2-3)
CATSEPGTGATDTQYF

SEQ ID NO: 92835 - protein, 12 aa, Homo sapiens
  CDR3 for alpha chain variable domain of TCR clone 46418 (TRAV23/DV6, TRAJ53)
CAASKLGSGGSN

SEQ ID NO: 92836 - protein, 15 aa, Homo sapiens
  CDR3 for beta chain variable domain of TCR clone 46418 (TRBV6-6, TRBJ2-7)
CASSYSYGGSYEQYF

SEQ ID NO: 92837 - protein, 14 aa, Homo sapiens
  CDR3 for alpha chain variable domain of TCR clone 46419 (TRAV20, TRAJ13)
CAVQVSGGYQKVTF

SEQ ID NO: 92838 - protein, 16 aa, Homo sapiens
  CDR3 for beta chain variable domain of TCR clone 46419 (TRBV4-1, TRBJ2-1)
CASSQEAGQGSDEQFF

SEQ ID NO: 92839 - protein, 11 aa, Homo sapiens
  CDR3 for alpha chain variable domain of TCR clone 46420 (TRAV12-1, TRAJ21)
CVVYKFNKFYF

SEQ ID NO: 92840 - protein, 14 aa, Homo sapiens
  CDR3 for beta chain variable domain of TCR clone 46420 (TRBV19, TRBJ2-7)
CASSMGQGAIEQYF

SEQ ID NO: 92841 - protein, 16 aa, Homo sapiens
  CDR3 for alpha chain variable domain of TCR clone 46421 (TRAV17, TRAJ35)
CATAEGGIGFGNVLHC

SEQ ID NO: 92842 - protein, 16 aa, Homo sapiens
  CDR3 for beta chain variable domain of TCR clone 46421 (TRBV6-5, TRBJ2-7)
CAGSSDPTSGFYEQYF

SEQ ID NO: 92843 - protein, 15 aa, Homo sapiens
  CDR3 for alpha chain variable domain of TCR clone 46422 (TRAV34, TRAJ38)
CGADFTPGNNRKLIW

SEQ ID NO: 92844 - protein, 12 aa, Homo sapiens
  CDR3 for beta chain variable domain of TCR clone 46422 (TRBV29-1, TRBJ2-3)
CSVTGGADTQYF

SEQ ID NO: 92845 - protein, 14 aa, Homo sapiens
  CDR3 for alpha chain variable domain of TCR clone 46423 (TRAV16, TRAJ15)
CALSGPQAGTTLIF

SEQ ID NO: 92846 - protein, 12 aa, Homo sapiens
  CDR3 for beta chain variable domain of TCR clone 46423 (TRBV18, TRBJ2-5)
CASSPSKETQYF

SEQ ID NO: 92847 - protein, 12 aa, Homo sapiens
  CDR3 for alpha chain variable domain of TCR clone 46424 (TRAV17, TRAJ4)
CATDGGYNKLIF

SEQ ID NO: 92848 - protein, 13 aa, Homo sapiens
  CDR3 for beta chain variable domain of TCR clone 46424 (TRBV29-1, TRBJ2-2)
CSTTGGNTGELFF

SEQ ID NO: 92849 - protein, 14 aa, Homo sapiens
  CDR3 for alpha chain variable domain of TCR clone 46425 (TRAV1-2, TRAJ16)
CAVNRFSDGQTLLF

SEQ ID NO: 92850 - protein, 13 aa, Homo sapiens
  CDR3 for beta chain variable domain of TCR clone 46425 (TRBV19, TRBJ1-2)
CASSVPGQDGYTF

SEQ ID NO: 92851 - protein, 12 aa, Homo sapiens
  CDR3 for alpha chain variable domain of TCR clone 46426 (TRAV12-3, TRAJ40)
CAMSSGTYKYIF

SEQ ID NO: 92852 - protein, 15 aa, Homo sapiens
  CDR3 for beta chain variable domain of TCR clone 46426 (TRBV6-3, TRBJ2-7)
CASSSPGTVFYEQYF

SEQ ID NO: 92853 - protein, 13 aa, Homo sapiens
  CDR3 for alpha chain variable domain of TCR clone 46427 (TRAV3, TRAJ21)
CAVREQDFNKFYF

SEQ ID NO: 92854 - protein, 15 aa, Homo sapiens
  CDR3 for beta chain variable domain of TCR clone 46427 (TRBV2, TRBJ2-1)
CASSELAGGYNEQFF

SEQ ID NO: 92855 - protein, 16 aa, Homo sapiens
  CDR3 for alpha chain variable domain of TCR clone 46428 (TRAV3, TRAJ10)
CAVRDMRAGGGSKLTF

SEQ ID NO: 92856 - protein, 14 aa, Homo sapiens
  CDR3 for beta chain variable domain of TCR clone 46428 (TRBV11-2, TRBJ2-7)
CASSSTGEGYEQYF

SEQ ID NO: 92857 - protein, 14 aa, Homo sapiens
  CDR3 for alpha chain variable domain of TCR clone 46429 (TRAV12-3, TRAJ10)
GHLPLTGGGNKLTF

SEQ ID NO: 92858 - protein, 13 aa, Homo sapiens
  CDR3 for beta chain variable domain of TCR clone 46429 (TRBV7-9, TRBJ2-3)
CASSPGSTDTQYF

SEQ ID NO: 92859 - protein, 13 aa, Homo sapiens
  CDR3 for alpha chain variable domain of TCR clone 46430 (TRAV17, TRAJ9)
CATDYTGGFQTIF

SEQ ID NO: 92860 - protein, 16 aa, Homo sapiens
  CDR3 for beta chain variable domain of TCR clone 46430 (TRBV7-7, TRBJ2-1)
CASSLASGTSYNEQFF

SEQ ID NO: 92861 - protein, 23 aa, Homo sapiens
  CDR3 for alpha chain variable domain of TCR clone 46431 (TRAV26-1, TRAJ38)
CIADNAGNNHNQNPDPAVYQLRD

SEQ ID NO: 92862 - protein, 12 aa, Homo sapiens
  CDR3 for beta chain variable domain of TCR clone 46431 (TRBV11-2, TRBJ2-2)
CASSLGGGELFF

SEQ ID NO: 92863 - protein, 12 aa, Homo sapiens
  CDR3 for alpha chain variable domain of TCR clone 46432 (TRAV21, TRAJ33)
CAKMDSNYQLIW

SEQ ID NO: 92864 - protein, 14 aa, Homo sapiens
  CDR3 for beta chain variable domain of TCR clone 46432 (TRBV2, TRBJ2-7)
CASSLTSGGYEQFF

SEQ ID NO: 92865 - protein, 12 aa, Homo sapiens
  CDR3 for alpha chain variable domain of TCR clone 46433 (TRAV30, TRAJ43)
CGTEERGNDMRF

SEQ ID NO: 92866 - protein, 13 aa, Homo sapiens
  CDR3 for beta chain variable domain of TCR clone 46433 (TRBV27, TRBJ2-7)
CASSFSQGYEKYF

SEQ ID NO: 92867 - protein, 15 aa, Homo sapiens
  CDR3 for alpha chain variable domain of TCR clone 46434 (TRAV8-6, TRAJ48)
CAVSPTNFGNEKLTF

SEQ ID NO: 92868 - protein, 12 aa, Homo sapiens
  CDR3 for beta chain variable domain of TCR clone 46434 (TRBV11-2, TRBJ2-2)
CASSLPTGELFF

SEQ ID NO: 92869 - protein, 12 aa, Homo sapiens
  CDR3 for alpha chain variable domain of TCR clone 46435 (TRAV3, TRAJ20)
CAVRDPDYKLSF

SEQ ID NO: 92870 - protein, 11 aa, Homo sapiens
  CDR3 for beta chain variable domain of TCR clone 46435 (TRBV7-8, TRBJ2-7)
CASSLSLEQYF

SEQ ID NO: 92871 - protein, 15 aa, Homo sapiens
  CDR3 for alpha chain variable domain of TCR clone 46436 (TRAV13-2, TRAJ6)
CAENVGAGGSYIPTF

SEQ ID NO: 92872 - protein, 15 aa, Homo sapiens
  CDR3 for beta chain variable domain of TCR clone 46436 (TRBV7-2, TRBJ1-2)
CASSFTQGAKYGYTF

SEQ ID NO: 92873 - protein, 10 aa, Homo sapiens
  CDR3 for alpha chain variable domain of TCR clone 46437 (TRAV12-1, TRAJ34)
CVVNKGRAHL

SEQ ID NO: 92874 - protein, 12 aa, Homo sapiens
  CDR3 for beta chain variable domain of TCR clone 46437 (TRBV2, TRBJ2-1)
CAYGPPGNEQFF

SEQ ID NO: 92875 - protein, 14 aa, Homo sapiens
  CDR3 for alpha chain variable domain of TCR clone 46438 (TRAV21, TRAJ21)
CVVKGFGNFNKFYF

SEQ ID NO: 92876 - protein, 13 aa, Homo sapiens
  CDR3 for beta chain variable domain of TCR clone 46438 (TRBV18, TRBJ1-1)
CASSPETKPEAFF

SEQ ID NO: 92877 - protein, 11 aa, Homo sapiens
  CDR3 for alpha chain variable domain of TCR clone 46439 (TRAV2, TRAJ33)
CAVESNYQLIW

SEQ ID NO: 92878 - protein, 15 aa, Homo sapiens
  CDR3 for beta chain variable domain of TCR clone 46439 (TRBV10-3, TRBJ2-2)
CAISPGRTNTGELFF

SEQ ID NO: 92879 - protein, 14 aa, Homo sapiens
  CDR3 for alpha chain variable domain of TCR clone 46440 (TRAV12-2, TRAJ40)
CAVKIPSGTYIYIF

SEQ ID NO: 92880 - protein, 14 aa, Homo sapiens
  CDR3 for beta chain variable domain of TCR clone 46440 (TRBV20-1, TRBJ1-1)
CSAQTRIGGTEAFF

SEQ ID NO: 92881 - protein, 14 aa, Homo sapiens
  CDR3 for alpha chain variable domain of TCR clone 46441 (TRAV2, TRAJ9)
CAVEDRNGGFKTIF

SEQ ID NO: 92882 - protein, 12 aa, Homo sapiens
  CDR3 for beta chain variable domain of TCR clone 46441 (TRBV12-5, TRBJ2-5)
CASGQGVETQYF

SEQ ID NO: 92883 - protein, 11 aa, Homo sapiens
  CDR3 for alpha chain variable domain of TCR clone 46442 (TRAV3, TRAJ21)
CAVGNFNKFYF

SEQ ID NO: 92884 - protein, 13 aa, Homo sapiens
  CDR3 for beta chain variable domain of TCR clone 46442 (TRBV7-9, TRBJ1-2)
CSSSLKQNYGYTF

SEQ ID NO: 92885 - protein, 13 aa, Homo sapiens
  CDR3 for alpha chain variable domain of TCR clone 46443 (TRAV3, TRAJ21)
CAVREPDFNKFYF

SEQ ID NO: 92886 - protein, 17 aa, Homo sapiens
  CDR3 for beta chain variable domain of TCR clone 46443 (TRBV7-8, TRBJ2-6)
CASSAGTGGAGANVLSF

SEQ ID NO: 92887 - protein, 18 aa, Homo sapiens
  CDR3 for alpha chain variable domain of TCR clone 46444 (TRAV29/DV5, TRAJ52)
CASGFRGAGGTSYGKLTF

SEQ ID NO: 92888 - protein, 16 aa, Homo sapiens
  CDR3 for beta chain variable domain of TCR clone 46444 (TRBV7-3, TRBJ2-2)
CASSLKRGTLSGELFF

SEQ ID NO: 92889 - protein, 13 aa, Homo sapiens
  CDR3 for alpha chain variable domain of TCR clone 46445 (TRAV27, TRAJ41)
CAGEGNSGYALNF

SEQ ID NO: 92890 - protein, 14 aa, Homo sapiens
  CDR3 for beta chain variable domain of TCR clone 46445 (TRBV7-2, TRBJ1-1)
CASSFLTGTTEAFI

SEQ ID NO: 92891 - protein, 14 aa, Homo sapiens
  CDR3 for alpha chain variable domain of TCR clone 46446 (TRAV13-1, TRAJ40)
CAASMTSGTYKYIF

SEQ ID NO: 92892 - protein, 15 aa, Homo sapiens
  CDR3 for beta chain variable domain of TCR clone 46446 (TRBV7-3, TRBJ2-1)
CASSQTGGGEVEQFF

SEQ ID NO: 92893 - protein, 18 aa, Homo sapiens
  CDR3 for alpha chain variable domain of TCR clone 46447 (TRAV21, TRAJ52)
CAVRPSPAGGTSYGKLTF

SEQ ID NO: 92894 - protein, 11 aa, Homo sapiens
  CDR3 for beta chain variable domain of TCR clone 46447 (TRBV19, TRBJ1-1)
CASSIGSEAFF

SEQ ID NO: 92895 - protein, 11 aa, Homo sapiens
  CDR3 for alpha chain variable domain of TCR clone 46448 (TRAV13-1, TRAJ30)
CAAGRDDKIIF

SEQ ID NO: 92896 - protein, 15 aa, Homo sapiens
  CDR3 for beta chain variable domain of TCR clone 46448 (TRBV18, TRBJ1-1)
CASSPSSWVNTEAFF

SEQ ID NO: 92897 - protein, 13 aa, Homo sapiens
  CDR3 for alpha chain variable domain of TCR clone 46449 (TRAV1-2, TRAJ11)
CAVRREGYSTLTF

SEQ ID NO: 92898 - protein, 11 aa, Homo sapiens
  CDR3 for beta chain variable domain of TCR clone 46449 (TRBV12-4, TRBJ2-3)
CASTATDTQYF

SEQ ID NO: 92899 - protein, 15 aa, Homo sapiens
  CDR3 for alpha chain variable domain of TCR clone 46450 (TRAV12-3, TRAJ6)
CAMSATTGGSYIPTF

SEQ ID NO: 92900 - protein, 15 aa, Homo sapiens
  CDR3 for beta chain variable domain of TCR clone 46450 (TRBV11-3, TRBJ2-3)
CASLKDGREGDTQYF

SEQ ID NO: 92901 - protein, 12 aa, Homo sapiens
  CDR3 for alpha chain variable domain of TCR clone 46451 (TRAV3, TRAJ20)
CAVRDGDYKLSF

SEQ ID NO: 92902 - protein, 13 aa, Homo sapiens
  CDR3 for beta chain variable domain of TCR clone 46451 (TRBV2, TRBJ2-7)
CASSVVEAYEQYF

SEQ ID NO: 92903 - protein, 14 aa, Homo sapiens
  CDR3 for alpha chain variable domain of TCR clone 46452 (TRAV1-2, TRAJ8)
CAVREDTGLQKLVF

SEQ ID NO: 92904 - protein, 16 aa, Homo sapiens
  CDR3 for beta chain variable domain of TCR clone 46452 (TRBV5-1, TRBJ2-2)
CASSLWDTTNTGELFF

SEQ ID NO: 92905 - protein, 14 aa, Homo sapiens
  CDR3 for alpha chain variable domain of TCR clone 46453 (TRAV2, TRAJ9)
CAAEDRSGGFKTIF

SEQ ID NO: 92906 - protein, 14 aa, Homo sapiens
  CDR3 for beta chain variable domain of TCR clone 46453 (TRBV3-1, TRBJ2-5)
CASSQGPDQETQYF

SEQ ID NO: 92907 - protein, 13 aa, Homo sapiens
  CDR3 for alpha chain variable domain of TCR clone 46454 (TRAV2, TRAJ15)
CAVASQAGTALIF

SEQ ID NO: 92908 - protein, 15 aa, Homo sapiens
  CDR3 for beta chain variable domain of TCR clone 46454 (TRBV11-1, TRBJ2-7)
CASSLNYGASYEQYF

SEQ ID NO: 92909 - protein, 13 aa, Homo sapiens
  CDR3 for alpha chain variable domain of TCR clone 46455 (TRAV3, TRAJ20)
CAVRSLNDYKLSF

SEQ ID NO: 92910 - protein, 15 aa, Homo sapiens
  CDR3 for beta chain variable domain of TCR clone 46455 (TRBV28, TRBJ2-1)
CASSIIAGGRSEQFF

SEQ ID NO: 92911 - protein, 12 aa, Homo sapiens
  CDR3 for alpha chain variable domain of TCR clone 46456 (TRAV12-2, TRAJ43)
CAVNVNNNDTRF

SEQ ID NO: 92912 - protein, 14 aa, Homo sapiens
  CDR3 for beta chain variable domain of TCR clone 46456 (TRBV12-5, TRBJ2-5)
CASGSRTHQETQYF

SEQ ID NO: 92913 - protein, 12 aa, Homo sapiens
  CDR3 for alpha chain variable domain of TCR clone 46457 (TRAV16, TRAJ10)
CSRTGGGNKLTF

SEQ ID NO: 92914 - protein, 14 aa, Homo sapiens
  CDR3 for beta chain variable domain of TCR clone 46457 (TRBV2, TRBJ2-7)
CASSLTSGGYEQYF

SEQ ID NO: 92915 - protein, 14 aa, Homo sapiens
  CDR3 for alpha chain variable domain of TCR clone 46458 (TRAV8-4, TRAJ5)
CAVSTDTGRRALTF

SEQ ID NO: 92916 - protein, 16 aa, Homo sapiens
  CDR3 for beta chain variable domain of TCR clone 46458 (TRBV7-3, TRBJ2-2)
CASSLKRGTLSGELFF

SEQ ID NO: 92917 - protein, 15 aa, Homo sapiens
  CDR3 for alpha chain variable domain of TCR clone 46459 (TRAV26-1, TRAJ44)
CIVRIGTGTASKLTF

SEQ ID NO: 92918 - protein, 15 aa, Homo sapiens
  CDR3 for beta chain variable domain of TCR clone 46459 (TRBV7-6, TRBJ2-1)
CASGSLAGEGNEQFF

SEQ ID NO: 92919 - protein, 14 aa, Homo sapiens
  CDR3 for alpha chain variable domain of TCR clone 46460 (TRAV26-1, TRAJ21)
CIVRPPYNLNKFYF

SEQ ID NO: 92920 - protein, 14 aa, Homo sapiens
  CDR3 for beta chain variable domain of TCR clone 46460 (TRBV19, TRBJ2-1)
CASPTFVLSGEQFF

SEQ ID NO: 92921 - protein, 14 aa, Homo sapiens
  CDR3 for alpha chain variable domain of TCR clone 46461 (TRAV12-1, TRAJ17)
CVVNYKAAGNKLIF

SEQ ID NO: 92922 - protein, 17 aa, Homo sapiens
  CDR3 for beta chain variable domain of TCR clone 46461 (TRBV20-1, TRBJ2-1)
CSASSSGLAGSYNEQFF

SEQ ID NO: 92923 - protein, 17 aa, Homo sapiens
  CDR3 for alpha chain variable domain of TCR clone 46462 (TRAV26-1, TRAJ53)
CIVRVDDSGGSNYKLTF

SEQ ID NO: 92924 - protein, 17 aa, Homo sapiens
  CDR3 for beta chain variable domain of TCR clone 46462 (TRBV13, TRBJ2-3)
CASSLSRVAGGRNTQYF

SEQ ID NO: 92925 - protein, 16 aa, Homo sapiens
  CDR3 for alpha chain variable domain of TCR clone 46463 (TRAV3, TRAJ10)
CAVRDMRAGGGNKLTF

SEQ ID NO: 92926 - protein, 16 aa, Homo sapiens
  CDR3 for beta chain variable domain of TCR clone 46463 (TRBV12-4, TRBJ1-5)
CASSRPVGGSNQPQHL

SEQ ID NO: 92927 - protein, 13 aa, Homo sapiens
  CDR3 for alpha chain variable domain of TCR clone 46464 (TRAV3, TRAJ16)
CAVRDRNGQKLPF

SEQ ID NO: 92928 - protein, 15 aa, Homo sapiens
  CDR3 for beta chain variable domain of TCR clone 46464 (TRBV5-1, TRBJ2-1)
CASSPPRAPYNEQFF

SEQ ID NO: 92929 - protein, 17 aa, Homo sapiens
  CDR3 for alpha chain variable domain of TCR clone 46465 (TRAV3, TRAJ42)
CAVRDRDYGGSQGNLIF

SEQ ID NO: 92930 - protein, 14 aa, Homo sapiens
  CDR3 for beta chain variable domain of TCR clone 46465 (TRBV25-1, TRBJ1-1)
CASTHLGGNTEAFL

SEQ ID NO: 92931 - protein, 13 aa, Homo sapiens
  CDR3 for alpha chain variable domain of TCR clone 46466 (TRAV8-1, TRAJ39)
CAGLNNAGNMLTL

SEQ ID NO: 92932 - protein, 17 aa, Homo sapiens
  CDR3 for beta chain variable domain of TCR clone 46466 (TRBV19, TRBJ2-3)
CASSIDPAGGGTDTQYF

SEQ ID NO: 92933 - protein, 14 aa, Homo sapiens
  CDR3 for alpha chain variable domain of TCR clone 46467 (TRAV8-1, TRAJ4)
CAVKFSGGYNKLIF

SEQ ID NO: 92934 - protein, 22 aa, Homo sapiens
  CDR3 for beta chain variable domain of TCR clone 46467 (TRBV7-3, TRBJ2-5)
CASARNRVILRPRDPVLRARHA

SEQ ID NO: 92935 - protein, 11 aa, Homo sapiens
  CDR3 for alpha chain variable domain of TCR clone 46468 (TRAV21, TRAJ11)
YAVNGYSTLTF

SEQ ID NO: 92936 - protein, 11 aa, Homo sapiens
  CDR3 for beta chain variable domain of TCR clone 46468 (TRBV19, TRBJ1-1)
CASSIGSEAFF

SEQ ID NO: 92937 - protein, 12 aa, Homo sapiens
  CDR3 for alpha chain variable domain of TCR clone 46469 (TRAV21, TRAJ23)
CAVPNQGGRLIF

SEQ ID NO: 92938 - protein, 15 aa, Homo sapiens
  CDR3 for beta chain variable domain of TCR clone 46469 (TRBV27, TRBJ2-1)
CASSFGAGTGPEQFF

SEQ ID NO: 92939 - protein, 11 aa, Homo sapiens
  CDR3 for alpha chain variable domain of TCR clone 46470 (TRAV35, TRAJ30)
CAGLRDDKIIF

SEQ ID NO: 92940 - protein, 15 aa, Homo sapiens
  CDR3 for beta chain variable domain of TCR clone 46470 (TRBV27, TRBJ2-1)
CASSNGGGSSNEQFF

SEQ ID NO: 92941 - protein, 12 aa, Homo sapiens
  CDR3 for alpha chain variable domain of TCR clone 46471 (TRAV29/DV5, TRAJ49)
FAATDTGNQFYF

SEQ ID NO: 92942 - protein, 12 aa, Homo sapiens
  CDR3 for beta chain variable domain of TCR clone 46471 (TRBV12-4, TRBJ2-7)
CASSLGGYEQYF

SEQ ID NO: 92943 - protein, 13 aa, Homo sapiens
  CDR3 for alpha chain variable domain of TCR clone 46472 (TRAV1-2, TRAJ9)
CAALNTGGFKTIF

SEQ ID NO: 92944 - protein, 15 aa, Homo sapiens
  CDR3 for beta chain variable domain of TCR clone 46472 (TRBV4-3, TRBJ1-2)
CASSQNYGVMDGYTF

SEQ ID NO: 92945 - protein, 13 aa, Homo sapiens
  CDR3 for alpha chain variable domain of TCR clone 46473 (TRAV27, TRAJ49)
CAPRPYTGNQFYF

SEQ ID NO: 92946 - protein, 16 aa, Homo sapiens
  CDR3 for beta chain variable domain of TCR clone 46473 (TRBV4-1, TRBJ1-2)
CASCQDAGQVLYGYTF

SEQ ID NO: 92947 - protein, 15 aa, Homo sapiens
  CDR3 for alpha chain variable domain of TCR clone 46474 (TRAV1-2, TRAJ30)
CAVRPHGNRADKIIF

SEQ ID NO: 92948 - protein, 13 aa, Homo sapiens
  CDR3 for beta chain variable domain of TCR clone 46474 (TRBV4-1, TRBJ2-7)
CASSQGQAYEQYF

SEQ ID NO: 92949 - protein, 15 aa, Homo sapiens
  CDR3 for alpha chain variable domain of TCR clone 46475 (TRAV3, TRAJ3)
CAVRDRDSSASKIIF

SEQ ID NO: 92950 - protein, 18 aa, Homo sapiens
  CDR3 for beta chain variable domain of TCR clone 46475 (TRBV25-1, TRBJ1-2)
CTSSGLQNGQGLIFGYTF

SEQ ID NO: 92951 - protein, 11 aa, Homo sapiens
  CDR3 for alpha chain variable domain of TCR clone 46476 (TRAV35, TRAJ30)
CAPGGDDKIIF

SEQ ID NO: 92952 - protein, 17 aa, Homo sapiens
  CDR3 for beta chain variable domain of TCR clone 46476 (TRBV7-6, TRBJ2-1)
CIAGPAAWGGGADEQFF

SEQ ID NO: 92953 - protein, 14 aa, Homo sapiens
  CDR3 for alpha chain variable domain of TCR clone 46477 (TRAV29/DV5, TRAJ36)
CGARRKTGANNLFF

SEQ ID NO: 92954 - protein, 14 aa, Homo sapiens
  CDR3 for beta chain variable domain of TCR clone 46477 (TRBV12-5, TRBJ2-5)
CASGSRTHQETQYF

SEQ ID NO: 92955 - protein, 13 aa, Homo sapiens
  CDR3 for alpha chain variable domain of TCR clone 46478 (TRAV13-1, TRAJ20)
CAARVSNDYKLSF

SEQ ID NO: 92956 - protein, 14 aa, Homo sapiens
  CDR3 for beta chain variable domain of TCR clone 46478 (TRBV27, TRBJ2-7)
CASSFRDGPYEQYF

SEQ ID NO: 92957 - protein, 14 aa, Homo sapiens
  CDR3 for alpha chain variable domain of TCR clone 46479 (TRAV26-1, TRAJ54)
CIVRVPQGAQKLVF

SEQ ID NO: 92958 - protein, 17 aa, Homo sapiens
  CDR3 for beta chain variable domain of TCR clone 46479 (TRBV20-1, TRBJ2-1)
CSASSSGLAGSYNEQFF

SEQ ID NO: 92959 - protein, 16 aa, Homo sapiens
  CDR3 for alpha chain variable domain of TCR clone 46480 (TRAV27, TRAJ13)
CAGAKSDSGGYQKVTF

SEQ ID NO: 92960 - protein, 15 aa, Homo sapiens
  CDR3 for beta chain variable domain of TCR clone 46480 (TRBV29-1, TRBJ2-1)
CSVGRHALFYNEKFF

SEQ ID NO: 92961 - protein, 11 aa, Homo sapiens
  CDR3 for alpha chain variable domain of TCR clone 46481 (TRAV16, TRAJ33)
CALHSNYQLIW

SEQ ID NO: 92962 - protein, 16 aa, Homo sapiens
  CDR3 for beta chain variable domain of TCR clone 46481 (TRBV12-5, TRBJ2-5)
CASGPRTSGNQETQYF

SEQ ID NO: 92963 - protein, 21 aa, Homo sapiens
  CDR3 for alpha chain variable domain of TCR clone 46482 (TRAV8-2, TRAJ26)
CVVTLLLGSEFCLWSRNQIVR

SEQ ID NO: 92964 - protein, 15 aa, Homo sapiens
  CDR3 for beta chain variable domain of TCR clone 46482 (TRBV11-2, TRBJ2-2)
CASSSDRVNAGELFF

SEQ ID NO: 92965 - protein, 15 aa, Homo sapiens
  CDR3 for alpha chain variable domain of TCR clone 46483 (TRAV3, TRAJ3)
CAVRDRASSASKIIF

SEQ ID NO: 92966 - protein, 18 aa, Homo sapiens
  CDR3 for beta chain variable domain of TCR clone 46483 (TRBV25-1, TRBJ1-2)
CASSGLQNGQGLIFGYTF

SEQ ID NO: 92967 - protein, 16 aa, Homo sapiens
  CDR3 for alpha chain variable domain of TCR clone 46484 (TRAV23/DV6, TRAJ9)
CAASVGGNTGGFKTIF

SEQ ID NO: 92968 - protein, 14 aa, Homo sapiens
  CDR3 for beta chain variable domain of TCR clone 46484 (TRBV9, TRBJ2-7)
CASSVGVGSYEQYF

SEQ ID NO: 92969 - protein, 12 aa, Homo sapiens
  CDR3 for alpha chain variable domain of TCR clone 46485 (TRAV13-1, TRAJ21)
CAAKEGFNKFYF

SEQ ID NO: 92970 - protein, 17 aa, Homo sapiens
  CDR3 for beta chain variable domain of TCR clone 46485 (TRBV20-1, TRBJ2-1)
CSASSSGLAGSYNEQFF

SEQ ID NO: 92971 - protein, 14 aa, Homo sapiens
  CDR3 for alpha chain variable domain of TCR clone 46486 (TRAV12-1, TRAJ12)
CVVTRRDSSYKLIF

SEQ ID NO: 92972 - protein, 13 aa, Homo sapiens
  CDR3 for beta chain variable domain of TCR clone 46486 (TRBV20-1, TRBJ1-1)
CSARGGGNTEAFF

SEQ ID NO: 92973 - protein, 14 aa, Homo sapiens
  CDR3 for alpha chain variable domain of TCR clone 46487 (TRAV12-2, TRAJ36)
CAVKISTGANNLFF

SEQ ID NO: 92974 - protein, 14 aa, Homo sapiens
  CDR3 for beta chain variable domain of TCR clone 46487 (TRBV25-1, TRBJ1-2)
CASSDTTGVVSYTF

SEQ ID NO: 92975 - protein, 13 aa, Homo sapiens
  CDR3 for alpha chain variable domain of TCR clone 46488 (TRAV12-1, TRAJ17)
CVVNKAAGNKLTF

SEQ ID NO: 92976 - protein, 16 aa, Homo sapiens
  CDR3 for beta chain variable domain of TCR clone 46488 (TRBV11-2, TRBJ2-2)
CASSLRTGNLLGELFF

SEQ ID NO: 92977 - protein, 14 aa, Homo sapiens
  CDR3 for alpha chain variable domain of TCR clone 46489 (TRAV12-3, TRAJ10)
SHLPLTGGRNKLTF

SEQ ID NO: 92978 - protein, 11 aa, Homo sapiens
  CDR3 for beta chain variable domain of TCR clone 46489 (TRBV19, TRBJ1-1)
CASSIGSEAFF

SEQ ID NO: 92979 - protein, 14 aa, Homo sapiens
  CDR3 for alpha chain variable domain of TCR clone 46490 (TRAV13-2, TRAJ43)
CAEIPTYNNNDMRL

SEQ ID NO: 92980 - protein, 15 aa, Homo sapiens
  CDR3 for beta chain variable domain of TCR clone 46490 (TRBV7-9, TRBJ2-2)
CASGPLDTFPGELFF

SEQ ID NO: 92981 - protein, 15 aa, Homo sapiens
  CDR3 for alpha chain variable domain of TCR clone 46491 (TRAV1-2, TRAJ35)
CAVRDREGFGNVLHF

SEQ ID NO: 92982 - protein, 14 aa, Homo sapiens
  CDR3 for beta chain variable domain of TCR clone 46491 (TRBV28, TRBJ1-4)
CASSRTVGNEKLFF

SEQ ID NO: 92983 - protein, 14 aa, Homo sapiens
  CDR3 for alpha chain variable domain of TCR clone 46492 (TRAV13-1, TRAJ35)
CVASKGGFGNVLHC

SEQ ID NO: 92984 - protein, 13 aa, Homo sapiens
  CDR3 for beta chain variable domain of TCR clone 46492 (TRBV7-3, TRBJ1-1)
CASSQDWGAETFF

SEQ ID NO: 92985 - protein, 14 aa, Homo sapiens
  CDR3 for alpha chain variable domain of TCR clone 46493 (TRAV13-1, TRAJ57)
CAARSQGGSEKLVF

SEQ ID NO: 92986 - protein, 15 aa, Homo sapiens
  CDR3 for beta chain variable domain of TCR clone 46493 (TRBV28, TRBJ2-4)
CAAGSGTLLMGIQYF

SEQ ID NO: 92987 - protein, 15 aa, Homo sapiens
  CDR3 for alpha chain variable domain of TCR clone 46494 (TRAV26-1, TRAJ56)
CIVRVDNGANSKLTF

SEQ ID NO: 92988 - protein, 15 aa, Homo sapiens
  CDR3 for beta chain variable domain of TCR clone 46494 (TRBV20-1, TRBJ2-7)
CSAKDPTEVGHEQHF

SEQ ID NO: 92989 - protein, 14 aa, Homo sapiens
  CDR3 for alpha chain variable domain of TCR clone 46495 (TRAV12-1, TRAJ22)
CVAFSSGPARQLTF

SEQ ID NO: 92990 - protein, 21 aa, Homo sapiens
  CDR3 for beta chain variable domain of TCR clone 46495 (TRBV15, TRBJ2-1)
AWGTQPCTCVPPAEVDTARFF

SEQ ID NO: 92991 - protein, 18 aa, Homo sapiens
  CDR3 for alpha chain variable domain of TCR clone 46496 (TRAV21, TRAJ52)
CAVRSSTAGGTSYGKLTF

SEQ ID NO: 92992 - protein, 17 aa, Homo sapiens
  CDR3 for beta chain variable domain of TCR clone 46496 (TRBV13, TRBJ2-3)
CASSLSRVAGGRNTQYF

SEQ ID NO: 92993 - protein, 16 aa, Homo sapiens
  CDR3 for alpha chain variable domain of TCR clone 46497 (TRAV30, TRAJ24)
CGTEIVDADSWGKFQF

SEQ ID NO: 92994 - protein, 14 aa, Homo sapiens
  CDR3 for beta chain variable domain of TCR clone 46497 (TRBV12-5, TRBJ1-3)
CASGPAGSGNTIYF

SEQ ID NO: 92995 - protein, 14 aa, Homo sapiens
  CDR3 for alpha chain variable domain of TCR clone 46498 (TRAV2, TRAJ9)
CAVEDRSGGFKTIF

SEQ ID NO: 92996 - protein, 12 aa, Homo sapiens
  CDR3 for beta chain variable domain of TCR clone 46498 (TRBV7-9, TRBJ2-7)
CASSLEGYEQYS

SEQ ID NO: 92997 - protein, 11 aa, Homo sapiens
  CDR3 for alpha chain variable domain of TCR clone 46499 (TRAV3, TRAJ32)
CAVSPKGMVVL

SEQ ID NO: 92998 - protein, 13 aa, Homo sapiens
  CDR3 for beta chain variable domain of TCR clone 46499 (TRBV10-3, TRBJ2-7)
CASKLAVNYEQYF

SEQ ID NO: 92999 - protein, 12 aa, Homo sapiens
  CDR3 for alpha chain variable domain of TCR clone 46500 (TRAV12-2, TRAJ10)
WGVTGGGNKLTF

SEQ ID NO: 93000 - protein, 20 aa, Homo sapiens
  CDR3 for beta chain variable domain of TCR clone 46500 (TRBV19, TRBJ2-1)
CASSISRTVTSTRLNNEQSF

SEQ ID NO: 93001 - protein, 13 aa, Homo sapiens
  CDR3 for alpha chain variable domain of TCR clone 46501 (TRAV2, TRAJ24)
CAVSTDSWGKLQF

SEQ ID NO: 93002 - protein, 14 aa, Homo sapiens
  CDR3 for beta chain variable domain of TCR clone 46501 (TRBV13, TRBJ2-5)
CASSVGTAQETQYF

SEQ ID NO: 93003 - protein, 13 aa, Homo sapiens
  CDR3 for alpha chain variable domain of TCR clone 46502 (TRAV21, TRAJ27)
CAARPGNAGKSTF

SEQ ID NO: 93004 - protein, 13 aa, Homo sapiens
  CDR3 for beta chain variable domain of TCR clone 46502 (TRBV7-3, TRBJ2-7)
CASSQAGGYEHYF

SEQ ID NO: 93005 - protein, 13 aa, Homo sapiens
  CDR3 for alpha chain variable domain of TCR clone 46503 (TRAV16, TRAJ9)
FALSNTGGFKTIF

SEQ ID NO: 93006 - protein, 14 aa, Homo sapiens
  CDR3 for beta chain variable domain of TCR clone 46503 (TRBV5-1, TRBJ2-1)
CASSLEGPVYEQFF

SEQ ID NO: 93007 - protein, 13 aa, Homo sapiens
  CDR3 for alpha chain variable domain of TCR clone 46504 (TRAV30, TRAJ34)
CGTVGYNTDKLIF

SEQ ID NO: 93008 - protein, 16 aa, Homo sapiens
  CDR3 for beta chain variable domain of TCR clone 46504 (TRBV7-9, TRBJ1-2)
CASRLGFSSGEDGYTF

SEQ ID NO: 93009 - protein, 16 aa, Homo sapiens
  CDR3 for alpha chain variable domain of TCR clone 46505 (TRAV23/DV6, TRAJ9)
CAASIGGNTGGFKTIF

SEQ ID NO: 93010 - protein, 12 aa, Homo sapiens
  CDR3 for beta chain variable domain of TCR clone 46505 (TRBV11-2, TRBJ2-2)
CASSLPTGELFF

SEQ ID NO: 93011 - protein, 12 aa, Homo sapiens
  CDR3 for alpha chain variable domain of TCR clone 46506 (TRAV30, TRAJ43)
CGTGERGNDMRF

SEQ ID NO: 93012 - protein, 13 aa, Homo sapiens
  CDR3 for beta chain variable domain of TCR clone 46506 (TRBV7-9, TRBJ2-3)
CASSPGSTDTQYF

SEQ ID NO: 93013 - protein, 11 aa, Homo sapiens
  CDR3 for alpha chain variable domain of TCR clone 46507 (TRAV9-2, TRAJ43)
CALNNNNDIRF

SEQ ID NO: 93014 - protein, 13 aa, Homo sapiens
  CDR3 for beta chain variable domain of TCR clone 46507 (TRBV20-1, TRBJ2-1)
CSASTGTSNEQFF

SEQ ID NO: 93015 - protein, 17 aa, Homo sapiens
  CDR3 for alpha chain variable domain of TCR clone 46508 (TRAV12-3, TRAJ6)
CAMSARGGAGGSYIPTF

SEQ ID NO: 93016 - protein, 12 aa, Homo sapiens
  CDR3 for beta chain variable domain of TCR clone 46508 (TRBV12-4, TRBJ2-3)
CASSTRPDTQYF

SEQ ID NO: 93017 - protein, 15 aa, Homo sapiens
  CDR3 for alpha chain variable domain of TCR clone 46509 (TRAV25, TRAJ52)
CAGRPGGTSYGKLTF

SEQ ID NO: 93018 - protein, 15 aa, Homo sapiens
  CDR3 for beta chain variable domain of TCR clone 46509 (TRBV7-9, TRBJ1-6)
CASSSPGRGNSPLHF

SEQ ID NO: 93019 - protein, 11 aa, Homo sapiens
  CDR3 for alpha chain variable domain of TCR clone 46510 (TRAV21, TRAJ34)
CAHYNPDKLIF

SEQ ID NO: 93020 - protein, 13 aa, Homo sapiens
  CDR3 for beta chain variable domain of TCR clone 46510 (TRBV7-6, TRBJ1-2)
CASSLVADYGYTF

SEQ ID NO: 93021 - protein, 18 aa, Homo sapiens
  CDR3 for alpha chain variable domain of TCR clone 46511 (TRAV9-2, TRAJ52)
CALSRHNAGGTSYGKLTF

SEQ ID NO: 93022 - protein, 13 aa, Homo sapiens
  CDR3 for beta chain variable domain of TCR clone 46511 (TRBV11-2, TRBJ1-2)
CASSLDSPSGYTF

SEQ ID NO: 93023 - protein, 18 aa, Homo sapiens
  CDR3 for alpha chain variable domain of TCR clone 46512 (TRAV13-1, TRAJ52)
CAAKNPNAGGTSYGKLTF

SEQ ID NO: 93024 - protein, 15 aa, Homo sapiens
  CDR3 for beta chain variable domain of TCR clone 46512 (TRBV7-2, TRBJ1-2)
CASSPRAGWNYGYTF

SEQ ID NO: 93025 - protein, 11 aa, Homo sapiens
  CDR3 for alpha chain variable domain of TCR clone 46513 (TRAV21, TRAJ34)
CAHYNTDKLIF

SEQ ID NO: 93026 - protein, 13 aa, Homo sapiens
  CDR3 for beta chain variable domain of TCR clone 46513 (TRBV7-6, TRBJ1-2)
CASSLVEDYGYTF

SEQ ID NO: 93027 - protein, 16 aa, Homo sapiens
  CDR3 for alpha chain variable domain of TCR clone 46514 (TRAV16, TRAJ57)
CAPYLITQGGSEKLVF

SEQ ID NO: 93028 - protein, 17 aa, Homo sapiens
  CDR3 for beta chain variable domain of TCR clone 46514 (TRBV24-1, TRBJ2-4)
CATSDAEARGVRNNQYF

SEQ ID NO: 93029 - protein, 14 aa, Homo sapiens
  CDR3 for alpha chain variable domain of TCR clone 46515 (TRAV1-2, TRAJ16)
CAVNQFSDGQKLLF

SEQ ID NO: 93030 - protein, 16 aa, Homo sapiens
  CDR3 for beta chain variable domain of TCR clone 46515 (TRBV20-1, TRBJ1-2)
CSASMGQGVANYGYTF

SEQ ID NO: 93031 - protein, 11 aa, Homo sapiens
  CDR3 for alpha chain variable domain of TCR clone 46516 (TRAV3, TRAJ21)
CAVGNLNKFYF

SEQ ID NO: 93032 - protein, 12 aa, Homo sapiens
  CDR3 for beta chain variable domain of TCR clone 46516 (TRBV11-2, TRBJ2-2)
CASSLPTGELFF

SEQ ID NO: 93033 - protein, 12 aa, Homo sapiens
  CDR3 for alpha chain variable domain of TCR clone 46517 (TRAV12-3, TRAJ20)
CAMVRGDYKLSF

SEQ ID NO: 93034 - protein, 12 aa, Homo sapiens
  CDR3 for beta chain variable domain of TCR clone 46517 (TRBV28, TRBJ2-3)
CASSLYRDTQYF

SEQ ID NO: 93035 - protein, 16 aa, Homo sapiens
  CDR3 for alpha chain variable domain of TCR clone 46518 (TRAV3, TRAJ23)
CAVKIGIYNQGGNLIF

SEQ ID NO: 93036 - protein, 17 aa, Homo sapiens
  CDR3 for beta chain variable domain of TCR clone 46518 (TRBV10-3, TRBJ2-6)
CAISESTAPSGANVLTF

SEQ ID NO: 93037 - protein, 11 aa, Homo sapiens
  CDR3 for alpha chain variable domain of TCR clone 46519 (TRAV12-3, TRAJ27)
CAMANAGKSTF

SEQ ID NO: 93038 - protein, 14 aa, Homo sapiens
  CDR3 for beta chain variable domain of TCR clone 46519 (TRBV7-3, TRBJ2-2)
CASSSGGYTGELFF

SEQ ID NO: 93039 - protein, 12 aa, Homo sapiens
  CDR3 for alpha chain variable domain of TCR clone 46520 (TRAV8-4, TRAJ31)
CAASDSNARLMF

SEQ ID NO: 93040 - protein, 14 aa, Homo sapiens
  CDR3 for beta chain variable domain of TCR clone 46520 (TRBV20-1, TRBJ2-7)
CSAKRGRGSYEQYF

SEQ ID NO: 93041 - protein, 17 aa, Homo sapiens
  CDR3 for alpha chain variable domain of TCR clone 46521 (TRAV26-1, TRAJ58)
CIVRVGAEETSGPRLTF

SEQ ID NO: 93042 - protein, 18 aa, Homo sapiens
  CDR3 for beta chain variable domain of TCR clone 46521 (TRBV7-9, TRBJ2-7)
CASSLTTSGSRTWYEQYF

SEQ ID NO: 93043 - protein, 15 aa, Homo sapiens
  CDR3 for alpha chain variable domain of TCR clone 46522 (TRAV4, TRAJ39)
CLVGPNNNAGNMLTF

SEQ ID NO: 93044 - protein, 14 aa, Homo sapiens
  CDR3 for beta chain variable domain of TCR clone 46522 (TRBV25-1, TRBJ1-1)
CASTHLGGNTEAFF

SEQ ID NO: 93045 - protein, 16 aa, Homo sapiens
  CDR3 for alpha chain variable domain of TCR clone 46523 (TRAV21, TRAJ37)
CAVRTAGSSNTGKLIF

SEQ ID NO: 93046 - protein, 13 aa, Homo sapiens
  CDR3 for beta chain variable domain of TCR clone 46523 (TRBV7-9, TRBJ2-5)
CASLQSGRETQYF

SEQ ID NO: 93047 - protein, 16 aa, Homo sapiens
  CDR3 for alpha chain variable domain of TCR clone 46524 (TRAV27, TRAJ13)
CAGAKSGSGGYQKVTF

SEQ ID NO: 93048 - protein, 15 aa, Homo sapiens
  CDR3 for beta chain variable domain of TCR clone 46524 (TRBV29-1, TRBJ2-1)
CSVGRHALFYNEQFF

SEQ ID NO: 93049 - protein, 12 aa, Homo sapiens
  CDR3 for alpha chain variable domain of TCR clone 46525 (TRAV9-2, TRAJ36)
CALKKGANNLFF

SEQ ID NO: 93050 - protein, 13 aa, Homo sapiens
  CDR3 for beta chain variable domain of TCR clone 46525 (TRBV6-4, TRBJ1-5)
CASSADLNQPQHF

SEQ ID NO: 93051 - protein, 13 aa, Homo sapiens
  CDR3 for alpha chain variable domain of TCR clone 46526 (TRAV17, TRAJ9)
CATDYTGGFKTIF

SEQ ID NO: 93052 - protein, 16 aa, Homo sapiens
  CDR3 for beta chain variable domain of TCR clone 46526 (TRBV7-7, TRBJ2-1)
CASSLASGTSYNEQFV

SEQ ID NO: 93053 - protein, 10 aa, Homo sapiens
  CDR3 for alpha chain variable domain of TCR clone 46527 (TRAV23/DV6, TRAJ57)
CAASSTLSQG

SEQ ID NO: 93054 - protein, 14 aa, Homo sapiens
  CDR3 for beta chain variable domain of TCR clone 46527 (TRBV25-1, TRBJ1-1)
CASTHLRGNTEAFF

SEQ ID NO: 93055 - protein, 15 aa, Homo sapiens
  CDR3 for alpha chain variable domain of TCR clone 46528 (TRAV35, TRAJ40)
CAGQLGTSGTYKYIF

SEQ ID NO: 93056 - protein, 13 aa, Homo sapiens
  CDR3 for beta chain variable domain of TCR clone 46528 (TRBV7-3, TRBJ1-1)
CASSQDWGAKAFF

SEQ ID NO: 93057 - protein, 14 aa, Homo sapiens
  CDR3 for alpha chain variable domain of TCR clone 46529 (TRAV8-3, TRAJ16)
CAVDRFSDGQKLLF

SEQ ID NO: 93058 - protein, 15 aa, Homo sapiens
  CDR3 for beta chain variable domain of TCR clone 46529 (TRBV7-6, TRBJ2-1)
CASSPGQGPYNKQFF

SEQ ID NO: 93059 - protein, 14 aa, Homo sapiens
  CDR3 for alpha chain variable domain of TCR clone 46530 (TRAV12-3, TRAJ37)
CVSEGPSNTGKLIF

SEQ ID NO: 93060 - protein, 14 aa, Homo sapiens
  CDR3 for beta chain variable domain of TCR clone 46530 (TRBV20-1, TRBJ1-1)
CSAQTRIGGTEAFF

SEQ ID NO: 93061 - protein, 15 aa, Homo sapiens
  CDR3 for alpha chain variable domain of TCR clone 46531 (TRAV12-2, TRAJ22)
CAVNGASGSARQLAF

SEQ ID NO: 93062 - protein, 15 aa, Homo sapiens
  CDR3 for beta chain variable domain of TCR clone 46531 (TRBV18, TRBJ2-2)
CASSPPVGFTGELFF

SEQ ID NO: 93063 - protein, 12 aa, Homo sapiens
  CDR3 for alpha chain variable domain of TCR clone 46532 (TRAV16, TRAJ49)
CALNEGGNQFYF

SEQ ID NO: 93064 - protein, 14 aa, Homo sapiens
  CDR3 for beta chain variable domain of TCR clone 46532 (TRBV7-9, TRBJ2-1)
CAGRPTGLRNEQFF

SEQ ID NO: 93065 - protein, 18 aa, Homo sapiens
  CDR3 for alpha chain variable domain of TCR clone 46533 (TRAV13-1, TRAJ52)
CAASKRSAGGTSYGKLTF

SEQ ID NO: 93066 - protein, 13 aa, Homo sapiens
  CDR3 for beta chain variable domain of TCR clone 46533 (TRBV12-4, TRBJ1-2)
CASSLRQGTGYTF

SEQ ID NO: 93067 - protein, 14 aa, Homo sapiens
  CDR3 for alpha chain variable domain of TCR clone 46534 (TRAV1-2, TRAJ16)
CAVNRFSDGQKLLF

SEQ ID NO: 93068 - protein, 15 aa, Homo sapiens
  CDR3 for beta chain variable domain of TCR clone 46534 (TRBV5-1, TRBJ2-1)
CASSPPRAAYNEQFF

SEQ ID NO: 93069 - protein, 13 aa, Homo sapiens
  CDR3 for alpha chain variable domain of TCR clone 46535 (TRAV1-1, TRAJ9)
CAAKNTGGSKTIF

SEQ ID NO: 93070 - protein, 16 aa, Homo sapiens
  CDR3 for beta chain variable domain of TCR clone 46535 (TRBV12-5, TRBJ2-5)
CASGPRTSGNQETQYF

SEQ ID NO: 93071 - protein, 13 aa, Homo sapiens
  CDR3 for alpha chain variable domain of TCR clone 46536 (TRAV21, TRAJ57)
CAVSQGGSEKLVF

SEQ ID NO: 93072 - protein, 16 aa, Homo sapiens
  CDR3 for beta chain variable domain of TCR clone 46536 (TRBV29-1, TRBJ2-7)
CSVEDAEDGTAYEQYF

SEQ ID NO: 93073 - protein, 17 aa, Homo sapiens
  CDR3 for alpha chain variable domain of TCR clone 46537 (TRAV4, TRAJ13)
CLVGVQGSSGGYQKVTF

SEQ ID NO: 93074 - protein, 18 aa, Homo sapiens
  CDR3 for beta chain variable domain of TCR clone 46537 (TRBV15, TRBJ2-3)
CATSRDGVRSWDTDTQYF

SEQ ID NO: 93075 - protein, 16 aa, Homo sapiens
  CDR3 for alpha chain variable domain of TCR clone 46538 (TRAV26-1, TRAJ13)
CIVSPKDSGGYQKVTF

SEQ ID NO: 93076 - protein, 16 aa, Homo sapiens
  CDR3 for beta chain variable domain of TCR clone 46538 (TRBV19, TRBJ2-1)
CASSKAGPSSYNEQFF

SEQ ID NO: 93077 - protein, 13 aa, Homo sapiens
  CDR3 for alpha chain variable domain of TCR clone 46539 (TRAV20, TRAJ49)
CAVQARTGNQCYF

SEQ ID NO: 93078 - protein, 14 aa, Homo sapiens
  CDR3 for beta chain variable domain of TCR clone 46539 (TRBV5-1, TRBJ1-1)
CASSLQGASTEAFF

SEQ ID NO: 93079 - protein, 13 aa, Homo sapiens
  CDR3 for alpha chain variable domain of TCR clone 46540 (TRAV3, TRAJ21)
CAVREPDFNKFYF

SEQ ID NO: 93080 - protein, 17 aa, Homo sapiens
  CDR3 for beta chain variable domain of TCR clone 46540 (TRBV7-8, TRBJ2-6)
YASSAGTGGAGANVLTF

SEQ ID NO: 93081 - protein, 15 aa, Homo sapiens
  CDR3 for alpha chain variable domain of TCR clone 46541 (TRAV3, TRAJ22)
CAVRDRGGSARQLTF

SEQ ID NO: 93082 - protein, 16 aa, Homo sapiens
  CDR3 for beta chain variable domain of TCR clone 46541 (TRBV5-4, TRBJ2-3)
CASQQPGAGGADMQYF

SEQ ID NO: 93083 - protein, 16 aa, Homo sapiens
  CDR3 for alpha chain variable domain of TCR clone 46542 (TRAV30, TRAJ24)
CGTEIVDADSWGKFQV

SEQ ID NO: 93084 - protein, 14 aa, Homo sapiens
  CDR3 for beta chain variable domain of TCR clone 46542 (TRBV12-5, TRBJ2-5)
CASGSRTHQGTQYF

SEQ ID NO: 93085 - protein, 11 aa, Homo sapiens
  CDR3 for alpha chain variable domain of TCR clone 46543 (TRAV21, TRAJ23)
CAPQRRGKLIF

SEQ ID NO: 93086 - protein, 14 aa, Homo sapiens
  CDR3 for beta chain variable domain of TCR clone 46543 (TRBV12-4, TRBJ1-1)
CACTWTGHDTEAFF

SEQ ID NO: 93087 - protein, 14 aa, Homo sapiens
  CDR3 for alpha chain variable domain of TCR clone 46544 (TRAV1-2, TRAJ16)
CAVNRFSDGQKVLF

SEQ ID NO: 93088 - protein, 15 aa, Homo sapiens
  CDR3 for beta chain variable domain of TCR clone 46544 (TRBV9, TRBJ1-6)
CASSVAGTGDSPLHF

SEQ ID NO: 93089 - protein, 15 aa, Homo sapiens
  CDR3 for alpha chain variable domain of TCR clone 46545 (TRAV16, TRAJ10)
CALRELTGGGNKPTF

SEQ ID NO: 93090 - protein, 14 aa, Homo sapiens
  CDR3 for beta chain variable domain of TCR clone 46545 (TRBV5-5, TRBJ2-7)
CASSLGQGTYEQYF

SEQ ID NO: 93091 - protein, 14 aa, Homo sapiens
  CDR3 for alpha chain variable domain of TCR clone 46546 (TRAV3, TRAJ40)
CAVRYRRGTYKYIF

SEQ ID NO: 93092 - protein, 15 aa, Homo sapiens
  CDR3 for beta chain variable domain of TCR clone 46546 (TRBV11-1, TRBJ1-3)
CASTDPRAFGNTIYF

SEQ ID NO: 93093 - protein, 12 aa, Homo sapiens
  CDR3 for alpha chain variable domain of TCR clone 46547 (TRAV12-3, TRAJ17)
CAMTLTGNKLTF

SEQ ID NO: 93094 - protein, 14 aa, Homo sapiens
  CDR3 for beta chain variable domain of TCR clone 46547 (TRBV7-3, TRBJ2-3)
CASSFGASTDTQYF

SEQ ID NO: 93095 - protein, 16 aa, Homo sapiens
  CDR3 for alpha chain variable domain of TCR clone 46548 (TRAV12-3, TRAJ53)
CAMSPGSGASNYKLTF

SEQ ID NO: 93096 - protein, 11 aa, Homo sapiens
  CDR3 for beta chain variable domain of TCR clone 46548 (TRBV29-1, TRBJ2-5)
CSEDRTGTQYF

SEQ ID NO: 93097 - protein, 13 aa, Homo sapiens
  CDR3 for alpha chain variable domain of TCR clone 46549 (TRAV21, TRAJ57)
CAVTQGGSGRLVF

SEQ ID NO: 93098 - protein, 11 aa, Homo sapiens
  CDR3 for beta chain variable domain of TCR clone 46549 (TRBV11-2, TRBJ2-2)
CASSLPGELFF

SEQ ID NO: 93099 - protein, 18 aa, Homo sapiens
  CDR3 for alpha chain variable domain of TCR clone 46550 (TRAV13-1, TRAJ52)
CAASKRSAGGTSYGKLTF

SEQ ID NO: 93100 - protein, 13 aa, Homo sapiens
  CDR3 for beta chain variable domain of TCR clone 46550 (TRBV12-4, TRBJ1-2)
CARSLRQGKGYTF

SEQ ID NO: 93101 - protein, 14 aa, Homo sapiens
  CDR3 for alpha chain variable domain of TCR clone 46551 (TRAV16, TRAJ39)
CALSKNNAGNMLTF

SEQ ID NO: 93102 - protein, 16 aa, Homo sapiens
  CDR3 for beta chain variable domain of TCR clone 46551 (TRBV6-6, TRBJ2-1)
CASSSSFSGSYNEQFF

SEQ ID NO: 93103 - protein, 15 aa, Homo sapiens
  CDR3 for alpha chain variable domain of TCR clone 46552 (TRAV35, TRAJ58)
CAGRRQETSGARLTF

SEQ ID NO: 93104 - protein, 11 aa, Homo sapiens
  CDR3 for beta chain variable domain of TCR clone 46552 (TRBV11-2, TRBJ1-1)
CASSINTEAFF

SEQ ID NO: 93105 - protein, 16 aa, Homo sapiens
  CDR3 for alpha chain variable domain of TCR clone 46553 (TRAV16, TRAJ52)
CALSGVGGTSHGKLTF

SEQ ID NO: 93106 - protein, 14 aa, Homo sapiens
  CDR3 for beta chain variable domain of TCR clone 46553 (TRBV19, TRBJ1-2)
CASSLQGQAYGYTF

SEQ ID NO: 93107 - protein, 14 aa, Homo sapiens
  CDR3 for alpha chain variable domain of TCR clone 46554 (TRAV1-2, TRAJ8)
CAVREDTGFQKLVF

SEQ ID NO: 93108 - protein, 14 aa, Homo sapiens
  CDR3 for beta chain variable domain of TCR clone 46554 (TRBV6-1, TRBJ2-5)
CASSPRAAQGTQYF

SEQ ID NO: 93109 - protein, 11 aa, Homo sapiens
  CDR3 for alpha chain variable domain of TCR clone 46555 (TRAV23/DV6, TRAJ48)
CAPRGGEKLTF

SEQ ID NO: 93110 - protein, 13 aa, Homo sapiens
  CDR3 for beta chain variable domain of TCR clone 46555 (TRBV12-4, TRBJ2-5)
CASSPGTEETQYF

SEQ ID NO: 93111 - protein, 15 aa, Homo sapiens
  CDR3 for alpha chain variable domain of TCR clone 46556 (TRAV25, TRAJ52)
CAGTSGGTSYGKLTF

SEQ ID NO: 93112 - protein, 19 aa, Homo sapiens
  CDR3 for beta chain variable domain of TCR clone 46556 (TRBV7-2, TRBJ2-3)
CASSSQGGPRLAGADTQYF

SEQ ID NO: 93113 - protein, 12 aa, Homo sapiens
  CDR3 for alpha chain variable domain of TCR clone 46557 (TRAV12-3, TRAJ17)
CAMTLTGNKLTF

SEQ ID NO: 93114 - protein, 14 aa, Homo sapiens
  CDR3 for beta chain variable domain of TCR clone 46557 (TRBV20-1, TRBJ1-3)
CSASPTGAGNTMYF

SEQ ID NO: 93115 - protein, 14 aa, Homo sapiens
  CDR3 for alpha chain variable domain of TCR clone 46558 (TRAV1-2, TRAJ27)
CAPAEYTNAGKSTF

SEQ ID NO: 93116 - protein, 18 aa, Homo sapiens
  CDR3 for beta chain variable domain of TCR clone 46558 (TRBV28, TRBJ1-2)
CASRQQQGRRGSNYGYTF

SEQ ID NO: 93117 - protein, 15 aa, Homo sapiens
  CDR3 for alpha chain variable domain of TCR clone 46559 (TRAV13-1, TRAJ57)
CAASNTQGGSEKRVF

SEQ ID NO: 93118 - protein, 16 aa, Homo sapiens
  CDR3 for beta chain variable domain of TCR clone 46559 (TRBV19, TRBJ2-1)
CASSKAGPSSYNEQFF

SEQ ID NO: 93119 - protein, 13 aa, Homo sapiens
  CDR3 for alpha chain variable domain of TCR clone 46560 (TRAV29/DV5, TRAJ31)
CAASRNNNARLMF

SEQ ID NO: 93120 - protein, 12 aa, Homo sapiens
  CDR3 for beta chain variable domain of TCR clone 46560 (TRBV19, TRBJ2-1)
CASSMQDTEQFF

SEQ ID NO: 93121 - protein, 18 aa, Homo sapiens
  CDR3 for alpha chain variable domain of TCR clone 46561 (TRAV13-1, TRAJ52)
CAASKRSAGGTSYGKLTF

SEQ ID NO: 93122 - protein, 15 aa, Homo sapiens
  CDR3 for beta chain variable domain of TCR clone 46561 (TRBV2, TRBJ2-1)
CASRESGGAYNEQFF

SEQ ID NO: 93123 - protein, 12 aa, Homo sapiens
  CDR3 for alpha chain variable domain of TCR clone 46562 (TRAV21, TRAJ3)
CCFYSSASKIIF

SEQ ID NO: 93124 - protein, 14 aa, Homo sapiens
  CDR3 for beta chain variable domain of TCR clone 46562 (TRBV11-2, TRBJ2-5)
CASSRTGGIETQYF

SEQ ID NO: 93125 - protein, 13 aa, Homo sapiens
  CDR3 for alpha chain variable domain of TCR clone 46563 (TRAV8-3, TRAJ5)
CAVGPRGRRALTF

SEQ ID NO: 93126 - protein, 14 aa, Homo sapiens
  CDR3 for beta chain variable domain of TCR clone 46563 (TRBV6-6, TRBJ2-7)
CASSDSGAGYEQYF

SEQ ID NO: 93127 - protein, 13 aa, Homo sapiens
  CDR3 for alpha chain variable domain of TCR clone 46564 (TRAV12-2, TRAJ20)
CAVYPSNDYKLSF

SEQ ID NO: 93128 - protein, 14 aa, Homo sapiens
  CDR3 for beta chain variable domain of TCR clone 46564 (TRBV7-2, TRBJ2-7)
CASSPKTSFYEQYF

SEQ ID NO: 93129 - protein, 16 aa, Homo sapiens
  CDR3 for alpha chain variable domain of TCR clone 46565 (TRAV12-3, TRAJ53)
CAMSPGRGGSNYKLTF

SEQ ID NO: 93130 - protein, 20 aa, Homo sapiens
  CDR3 for beta chain variable domain of TCR clone 46565 (TRBV7-8, TRBJ2-2)
CASSHLFPGPTIHITGELFF

SEQ ID NO: 93131 - protein, 15 aa, Homo sapiens
  CDR3 for alpha chain variable domain of TCR clone 46566 (TRAV21, TRAJ37)
CAVRPTLSNTGTLIF

SEQ ID NO: 93132 - protein, 16 aa, Homo sapiens
  CDR3 for beta chain variable domain of TCR clone 46566 (TRBV24-1, TRBJ2-3)
CATSDRRQDLTDTQYF

SEQ ID NO: 93133 - protein, 14 aa, Homo sapiens
  CDR3 for alpha chain variable domain of TCR clone 46567 (TRAV2, TRAJ9)
YAVEDRSGGFKTIF

SEQ ID NO: 93134 - protein, 13 aa, Homo sapiens
  CDR3 for beta chain variable domain of TCR clone 46567 (TRBV7-3, TRBJ1-1)
CASSQDWGAEAFF

SEQ ID NO: 93135 - protein, 15 aa, Homo sapiens
  CDR3 for alpha chain variable domain of TCR clone 46568 (TRAV38-1, TRAJ37)
CAFIFGSGNTGKLIF

SEQ ID NO: 93136 - protein, 16 aa, Homo sapiens
  CDR3 for beta chain variable domain of TCR clone 46568 (TRBV6-1, TRBJ2-3)
CASSEVIGHGTDTQYF

SEQ ID NO: 93137 - protein, 18 aa, Homo sapiens
  CDR3 for alpha chain variable domain of TCR clone 46569 (TRAV9-2, TRAJ52)
CALSRHNASGTSYGKLTF

SEQ ID NO: 93138 - protein, 14 aa, Homo sapiens
  CDR3 for beta chain variable domain of TCR clone 46569 (TRBV4-2, TRBJ2-1)
CASGLDRAYNEQFF

SEQ ID NO: 93139 - protein, 14 aa, Homo sapiens
  CDR3 for alpha chain variable domain of TCR clone 46570 (TRAV13-1, TRAJ50)
CAARSKTSYDKVIF

SEQ ID NO: 93140 - protein, 17 aa, Homo sapiens
  CDR3 for beta chain variable domain of TCR clone 46570 (TRBV13, TRBJ2-3)
CASSLSRVAGGRSTQYF

SEQ ID NO: 93141 - protein, 15 aa, Homo sapiens
  CDR3 for alpha chain variable domain of TCR clone 46571 (TRAV1-2, TRAJ32)
CAVRGYGGATNKLIF

SEQ ID NO: 93142 - protein, 15 aa, Homo sapiens
  CDR3 for beta chain variable domain of TCR clone 46571 (TRBV25-1, TRBJ2-5)
RASSDTGTHQETQYF

SEQ ID NO: 93143 - protein, 13 aa, Homo sapiens
  CDR3 for alpha chain variable domain of TCR clone 46572 (TRAV13-2, TRAJ48)
CAEMDFGNEKLTF

SEQ ID NO: 93144 - protein, 13 aa, Homo sapiens
  CDR3 for beta chain variable domain of TCR clone 46572 (TRBV7-9, TRBJ1-2)
CASSLKQNYGYIF

SEQ ID NO: 93145 - protein, 12 aa, Homo sapiens
  CDR3 for alpha chain variable domain of TCR clone 46573 (TRAV3, TRAJ26)
CAVRDYGQNFVF

SEQ ID NO: 93146 - protein, 16 aa, Homo sapiens
  CDR3 for beta chain variable domain of TCR clone 46573 (TRBV7-6, TRBJ1-6)
CASSLSSRIGDSPLHF

SEQ ID NO: 93147 - protein, 13 aa, Homo sapiens
  CDR3 for alpha chain variable domain of TCR clone 46574 (TRAV1-2, TRAJ9)
CAALNTGGFKTIF

SEQ ID NO: 93148 - protein, 18 aa, Homo sapiens
  CDR3 for beta chain variable domain of TCR clone 46574 (TRBV7-9, TRBJ2-7)
CASSLTTSGSRTWYEQYF

SEQ ID NO: 93149 - protein, 14 aa, Homo sapiens
  CDR3 for alpha chain variable domain of TCR clone 46575 (TRAV23/DV6, TRAJ53)
CAARSGGSNYKLTF

SEQ ID NO: 93150 - protein, 12 aa, Homo sapiens
  CDR3 for beta chain variable domain of TCR clone 46575 (TRBV11-2, TRBJ2-2)
CASRLGGGELFF

SEQ ID NO: 93151 - protein, 14 aa, Homo sapiens
  CDR3 for alpha chain variable domain of TCR clone 46576 (TRAV1-2, TRAJ16)
CAVNRFSDGQKLLF

SEQ ID NO: 93152 - protein, 15 aa, Homo sapiens
  CDR3 for beta chain variable domain of TCR clone 46576 (TRBV9, TRBJ1-6)
CASSVAGTGGSPLRF

SEQ ID NO: 93153 - protein, 12 aa, Homo sapiens
  CDR3 for alpha chain variable domain of TCR clone 46577 (TRAV13-1, TRAJ21)
CAAKEGFNKFYF

SEQ ID NO: 93154 - protein, 14 aa, Homo sapiens
  CDR3 for beta chain variable domain of TCR clone 46577 (TRBV5-4, TRBJ1-1)
CASSLDSGRDEAFF

SEQ ID NO: 93155 - protein, 13 aa, Homo sapiens
  CDR3 for alpha chain variable domain of TCR clone 46578 (TRAV27, TRAJ8)
CAGGPTGFQELVF

SEQ ID NO: 93156 - protein, 15 aa, Homo sapiens
  CDR3 for beta chain variable domain of TCR clone 46578 (TRBV6-1, TRBJ2-7)
CASSESMGDFYEQYF

SEQ ID NO: 93157 - protein, 23 aa, Homo sapiens
  CDR3 for alpha chain variable domain of TCR clone 46579 (TRAV1-1, TRAJ4)
LTMELQMKDSASYFCTLYNKLIF

SEQ ID NO: 93158 - protein, 16 aa, Homo sapiens
  CDR3 for beta chain variable domain of TCR clone 46579 (TRBV7-3, TRBJ2-2)
CASSLKRGTLSGELFF

SEQ ID NO: 93159 - protein, 17 aa, Homo sapiens
  CDR3 for alpha chain variable domain of TCR clone 46580 (TRAV3, TRAJ38)
CAVRDCLNAGNNRKLIW

SEQ ID NO: 93160 - protein, 13 aa, Homo sapiens
  CDR3 for beta chain variable domain of TCR clone 46580 (TRBV23-1, TRBJ1-4)
CASRGKFNEKLSF

SEQ ID NO: 93161 - protein, 14 aa, Homo sapiens
  CDR3 for alpha chain variable domain of TCR clone 46581 (TRAV2, TRAJ9)
CAVEDRSGGFKTIF

SEQ ID NO: 93162 - protein, 15 aa, Homo sapiens
  CDR3 for beta chain variable domain of TCR clone 46581 (TRBV18, TRBJ1-5)
CASSPSDRSNQPQHF

SEQ ID NO: 93163 - protein, 12 aa, Homo sapiens
  CDR3 for alpha chain variable domain of TCR clone 46582 (TRAV27, TRAJ9)
CAGESGGFKTIF

SEQ ID NO: 93164 - protein, 15 aa, Homo sapiens
  CDR3 for beta chain variable domain of TCR clone 46582 (TRBV6-3, TRBJ2-7)
CASSSPGTVFYEQYF

SEQ ID NO: 93165 - protein, 16 aa, Homo sapiens
  CDR3 for alpha chain variable domain of TCR clone 46583 (TRAV3, TRAJ37)
CAVRGKGSGNTGKLIF

SEQ ID NO: 93166 - protein, 15 aa, Homo sapiens
  CDR3 for beta chain variable domain of TCR clone 46583 (TRBV19, TRBJ2-7)
CASSIASGGFYEQYF

SEQ ID NO: 93167 - protein, 15 aa, Homo sapiens
  CDR3 for alpha chain variable domain of TCR clone 46584 (TRAV23/DV6, TRAJ18)
CAARYRGSTLGRLYF

SEQ ID NO: 93168 - protein, 17 aa, Homo sapiens
  CDR3 for beta chain variable domain of TCR clone 46584 (TRBV7-8, TRBJ2-6)
CASSAGTGGAGANVLTF

SEQ ID NO: 93169 - protein, 14 aa, Homo sapiens
  CDR3 for alpha chain variable domain of TCR clone 46585 (TRAV1-2, TRAJ16)
CAVNRSSDGQKLLF

SEQ ID NO: 93170 - protein, 12 aa, Homo sapiens
  CDR3 for beta chain variable domain of TCR clone 46585 (TRBV2, TRBJ2-1)
CAYGPPGNEQFF

SEQ ID NO: 93171 - protein, 17 aa, Homo sapiens
  CDR3 for alpha chain variable domain of TCR clone 46586 (TRAV3, TRAJ42)
CAVRDRDYGGSQENLIF

SEQ ID NO: 93172 - protein, 15 aa, Homo sapiens
  CDR3 for beta chain variable domain of TCR clone 46586 (TRBV6-6, TRBJ2-7)
CASSYSYGGSYEQYF

SEQ ID NO: 93173 - protein, 14 aa, Homo sapiens
  CDR3 for alpha chain variable domain of TCR clone 46587 (TRAV8-1, TRAJ5)
CAVSMDTGRRALTF

SEQ ID NO: 93174 - protein, 16 aa, Homo sapiens
  CDR3 for beta chain variable domain of TCR clone 46587 (TRBV7-3, TRBJ2-2)
CASSLKRGTLSGELFF

SEQ ID NO: 93175 - protein, 19 aa, Homo sapiens
  CDR3 for alpha chain variable domain of TCR clone 46588 (TRAV2, TRAJ32)
TTVLSTPPRQGGATNKLIF

SEQ ID NO: 93176 - protein, 12 aa, Homo sapiens
  CDR3 for beta chain variable domain of TCR clone 46588 (TRBV20-1, TRBJ2-7)
CSAITPTKEQYF

SEQ ID NO: 93177 - protein, 15 aa, Homo sapiens
  CDR3 for alpha chain variable domain of TCR clone 46589 (TRAV12-2, TRAJ43)
CAFDMRFGAGTRLTV

SEQ ID NO: 93178 - protein, 18 aa, Homo sapiens
  CDR3 for beta chain variable domain of TCR clone 46589 (TRBV20-1, TRBJ2-3)
CSASGLAEGPGTTDTQYF

SEQ ID NO: 93179 - protein, 11 aa, Homo sapiens
  CDR3 for alpha chain variable domain of TCR clone 46590 (TRAV1-2, TRAJ20)
CAVSNDYKLIF

SEQ ID NO: 93180 - protein, 15 aa, Homo sapiens
  CDR3 for beta chain variable domain of TCR clone 46590 (TRBV5-1, TRBJ2-2)
CASSSQGGNTGELFF

SEQ ID NO: 93181 - protein, 13 aa, Homo sapiens
  CDR3 for alpha chain variable domain of TCR clone 46591 (TRAV35, TRAJ42)
CAGFPGSQGNLIF

SEQ ID NO: 93182 - protein, 13 aa, Homo sapiens
  CDR3 for beta chain variable domain of TCR clone 46591 (TRBV29-1, TRBJ2-1)
CSVAGGRVNEQFF

SEQ ID NO: 93183 - protein, 17 aa, Homo sapiens
  CDR3 for alpha chain variable domain of TCR clone 46592 (TRAV3, TRAJ28)
CAVREAYSGAGSYQPTF

SEQ ID NO: 93184 - protein, 18 aa, Homo sapiens
  CDR3 for beta chain variable domain of TCR clone 46592 (TRBV27, TRBJ2-1)
CASGNRAVGVGSKNEQFF

SEQ ID NO: 93185 - protein, 12 aa, Homo sapiens
  CDR3 for alpha chain variable domain of TCR clone 46593 (TRAV12-1, TRAJ40)
CVFNSGTYKYIF

SEQ ID NO: 93186 - protein, 18 aa, Homo sapiens
  CDR3 for beta chain variable domain of TCR clone 46593 (TRBV12-4, TRBJ2-2)
CASSLVAGTRGRTGELFF

SEQ ID NO: 93187 - protein, 16 aa, Homo sapiens
  CDR3 for alpha chain variable domain of TCR clone 46594 (TRAV3, TRAJ10)
CAVRDMRAGGGNKLTF

SEQ ID NO: 93188 - protein, 19 aa, Homo sapiens
  CDR3 for beta chain variable domain of TCR clone 46594 (TRBV6-3, TRBJ1-2)
CASSYSTGRTGPPNYGYTF

SEQ ID NO: 93189 - protein, 12 aa, Homo sapiens
  CDR3 for alpha chain variable domain of TCR clone 46595 (TRAV17, TRAJ12)
CATLRSSYKLIF

SEQ ID NO: 93190 - protein, 14 aa, Homo sapiens
  CDR3 for beta chain variable domain of TCR clone 46595 (TRBV11-2, TRBJ2-3)
CASSSIASTDTQYF

SEQ ID NO: 93191 - protein, 14 aa, Homo sapiens
  CDR3 for alpha chain variable domain of TCR clone 46596 (TRAV17, TRAJ40)
CATALTSGTYKYIF

SEQ ID NO: 93192 - protein, 14 aa, Homo sapiens
  CDR3 for beta chain variable domain of TCR clone 46596 (TRBV19, TRBJ2-1)
CASPTFVLSGEQFF

SEQ ID NO: 93193 - protein, 14 aa, Homo sapiens
  CDR3 for alpha chain variable domain of TCR clone 46597 (TRAV12-3, TRAJ10)
NHLPLTGGGNKLTF

SEQ ID NO: 93194 - protein, 15 aa, Homo sapiens
  CDR3 for beta chain variable domain of TCR clone 46597 (TRBV29-1, TRBJ2-7)
CSVEFFDRGSYEQYF

SEQ ID NO: 93195 - protein, 11 aa, Homo sapiens
  CDR3 for alpha chain variable domain of TCR clone 46598 (TRAV12-3, TRAJ43)
CAMSVSNDMRF

SEQ ID NO: 93196 - protein, 17 aa, Homo sapiens
  CDR3 for beta chain variable domain of TCR clone 46598 (TRBV13, TRBJ2-3)
CASSLSRVAGGRNTQYF

SEQ ID NO: 93197 - protein, 13 aa, Homo sapiens
  CDR3 for alpha chain variable domain of TCR clone 46599 (TRAV12-3, TRAJ13)
CAMTSGGYQKVTF

SEQ ID NO: 93198 - protein, 13 aa, Homo sapiens
  CDR3 for beta chain variable domain of TCR clone 46599 (TRBV20-1, TRBJ1-1)
CSARGGGNTEAFF

SEQ ID NO: 93199 - protein, 15 aa, Homo sapiens
  CDR3 for alpha chain variable domain of TCR clone 46600 (TRAV21, TRAJ53)
CATLNSGDSNYKLTF

SEQ ID NO: 93200 - protein, 16 aa, Homo sapiens
  CDR3 for beta chain variable domain of TCR clone 46600 (TRBV7-9, TRBJ2-1)
CASSDVAGGSYNEQFF

SEQ ID NO: 93201 - protein, 13 aa, Homo sapiens
  CDR3 for alpha chain variable domain of TCR clone 46601 (TRAV29/DV5, TRAJ47)
CAASAEYGNKLVF

SEQ ID NO: 93202 - protein, 15 aa, Homo sapiens
  CDR3 for beta chain variable domain of TCR clone 46601 (TRBV7-9, TRBJ1-4)
CAGSARTGGNEKLFF

SEQ ID NO: 93203 - protein, 16 aa, Homo sapiens
  CDR3 for alpha chain variable domain of TCR clone 46602 (TRAV12-3, TRAJ53)
CAMRPGSGGSNYKLTF

SEQ ID NO: 93204 - protein, 16 aa, Homo sapiens
  CDR3 for beta chain variable domain of TCR clone 46602 (TRBV4-2, TRBJ1-1)
CASSQAGFGMNTEAFF

SEQ ID NO: 93205 - protein, 12 aa, Homo sapiens
  CDR3 for alpha chain variable domain of TCR clone 46603 (TRAV16, TRAJ56)
CAPTGANSKLTF

SEQ ID NO: 93206 - protein, 17 aa, Homo sapiens
  CDR3 for beta chain variable domain of TCR clone 46603 (TRBV27, TRBJ2-6)
CASSLTGFASGADVLTF

SEQ ID NO: 93207 - protein, 14 aa, Homo sapiens
  CDR3 for alpha chain variable domain of TCR clone 46604 (TRAV1-2, TRAJ16)
CAVNRFSDGQKMLF

SEQ ID NO: 93208 - protein, 14 aa, Homo sapiens
  CDR3 for beta chain variable domain of TCR clone 46604 (TRBV7-9, TRBJ2-3)
CASSLEDGTDTQYF

SEQ ID NO: 93209 - protein, 13 aa, Homo sapiens
  CDR3 for alpha chain variable domain of TCR clone 46605 (TRAV13-1, TRAJ40)
CAASKEGTYKYIF

SEQ ID NO: 93210 - protein, 13 aa, Homo sapiens
  CDR3 for beta chain variable domain of TCR clone 46605 (TRBV7-6, TRBJ1-2)
CASSLVADYGYTF

SEQ ID NO: 93211 - protein, 12 aa, Homo sapiens
  CDR3 for alpha chain variable domain of TCR clone 46606 (TRAV8-3, TRAJ26)
CAGDNYGQNFVF

SEQ ID NO: 93212 - protein, 12 aa, Homo sapiens
  CDR3 for beta chain variable domain of TCR clone 46606 (TRBV29-1, TRBJ2-3)
CSVTGGADTQYF

SEQ ID NO: 93213 - protein, 12 aa, Homo sapiens
  CDR3 for alpha chain variable domain of TCR clone 46607 (TRAV17, TRAJ57)
CATYGGSEKLVF

SEQ ID NO: 93214 - protein, 12 aa, Homo sapiens
  CDR3 for beta chain variable domain of TCR clone 46607 (TRBV29-1, TRBJ2-2)
CSVDKYTGELFF

SEQ ID NO: 93215 - protein, 13 aa, Homo sapiens
  CDR3 for alpha chain variable domain of TCR clone 46608 (TRAV13-1, TRAJ10)
CAALEGGGNKLTF

SEQ ID NO: 93216 - protein, 17 aa, Homo sapiens
  CDR3 for beta chain variable domain of TCR clone 46608 (TRBV7-3, TRBJ2-2)
CASSLCGTSGGTGELFS

SEQ ID NO: 93217 - protein, 20 aa, Homo sapiens
  CDR3 for alpha chain variable domain of TCR clone 46609 (TRAV26-1, TRAJ42)
CCVLLHRHTYYGGSQGNLIF

SEQ ID NO: 93218 - protein, 16 aa, Homo sapiens
  CDR3 for beta chain variable domain of TCR clone 46609 (TRBV7-3, TRBJ2-2)
CASSLKRGTLSGELFF

SEQ ID NO: 93219 - protein, 11 aa, Homo sapiens
  CDR3 for alpha chain variable domain of TCR clone 46610 (TRAV13-1, TRAJ49)
CACVGGNQFYF

SEQ ID NO: 93220 - protein, 16 aa, Homo sapiens
  CDR3 for beta chain variable domain of TCR clone 46610 (TRBV27, TRBJ2-5)
CASSFGPGGTKETQYF

SEQ ID NO: 93221 - protein, 17 aa, Homo sapiens
  CDR3 for alpha chain variable domain of TCR clone 46611 (TRAV16, TRAJ58)
CITVLSNGKTSGSRLTF

SEQ ID NO: 93222 - protein, 13 aa, Homo sapiens
  CDR3 for beta chain variable domain of TCR clone 46611 (TRBV20-1, TRBJ2-2)
CSASAAGTGELFF

SEQ ID NO: 93223 - protein, 11 aa, Homo sapiens
  CDR3 for alpha chain variable domain of TCR clone 46612 (TRAV12-2, TRAJ49)
CAVTGGNQFYF

SEQ ID NO: 93224 - protein, 16 aa, Homo sapiens
  CDR3 for beta chain variable domain of TCR clone 46612 (TRBV19, TRBJ1-2)
CAGSIGSNRDGYGYTF

SEQ ID NO: 93225 - protein, 15 aa, Homo sapiens
  CDR3 for alpha chain variable domain of TCR clone 46613 (TRAV13-1, TRAJ36)
CAASIRQTGANNPFF

SEQ ID NO: 93226 - protein, 14 aa, Homo sapiens
  CDR3 for beta chain variable domain of TCR clone 46613 (TRBV6-1, TRBJ1-3)
CASVQGGGGNTIYF

SEQ ID NO: 93227 - protein, 14 aa, Homo sapiens
  CDR3 for alpha chain variable domain of TCR clone 46614 (TRAV26-1, TRAJ38)
CIADNAGNNRKLIW

SEQ ID NO: 93228 - protein, 16 aa, Homo sapiens
  CDR3 for beta chain variable domain of TCR clone 46614 (TRBV2, TRBJ2-3)
CASSTSVEGVTDTQYF

SEQ ID NO: 93229 - protein, 18 aa, Homo sapiens
  CDR3 for alpha chain variable domain of TCR clone 46615 (TRAV12-3, TRAJ52)
CAMSVGGAGGTSYGKLTF

SEQ ID NO: 93230 - protein, 15 aa, Homo sapiens
  CDR3 for beta chain variable domain of TCR clone 46615 (TRBV27, TRBJ1-6)
CASSFDSGLGSPLHF

SEQ ID NO: 93231 - protein, 13 aa, Homo sapiens
  CDR3 for alpha chain variable domain of TCR clone 46616 (TRAV13-1, TRAJ48)
CAAASFGNEELTF

SEQ ID NO: 93232 - protein, 14 aa, Homo sapiens
  CDR3 for beta chain variable domain of TCR clone 46616 (TRBV18, TRBJ2-1)
CASSPGTSETEQFF

SEQ ID NO: 93233 - protein, 10 aa, Homo sapiens
  CDR3 for alpha chain variable domain of TCR clone 46617 (TRAV36/DV7, TRAJ56)
CAGPAGELTF

SEQ ID NO: 93234 - protein, 13 aa, Homo sapiens
  CDR3 for beta chain variable domain of TCR clone 46617 (TRBV7-9, TRBJ2-7)
CASSFWSSYEQYF

SEQ ID NO: 93235 - protein, 17 aa, Homo sapiens
  CDR3 for alpha chain variable domain of TCR clone 46618 (TRAV26-1, TRAJ37)
CIVRVITVSSNTGKLIF

SEQ ID NO: 93236 - protein, 14 aa, Homo sapiens
  CDR3 for beta chain variable domain of TCR clone 46618 (TRBV7-6, TRBJ2-3)
CASSLGTVTDTQYF

SEQ ID NO: 93237 - protein, 13 aa, Homo sapiens
  CDR3 for alpha chain variable domain of TCR clone 46619 (TRAV36/DV7, TRAJ38)
CVANAGNNRKLLW

SEQ ID NO: 93238 - protein, 14 aa, Homo sapiens
  CDR3 for beta chain variable domain of TCR clone 46619 (TRBV7-2, TRBJ2-7)
CASSLRWEVNEQYF

SEQ ID NO: 93239 - protein, 11 aa, Homo sapiens
  CDR3 for alpha chain variable domain of TCR clone 46620 (TRAV23/DV6, TRAJ9)
CFHTGGFKTIF

SEQ ID NO: 93240 - protein, 15 aa, Homo sapiens
  CDR3 for beta chain variable domain of TCR clone 46620 (TRBV6-5, TRBJ2-1)
CASSYDAGAGNEQFF

SEQ ID NO: 93241 - protein, 13 aa, Homo sapiens
  CDR3 for alpha chain variable domain of TCR clone 46621 (TRAV39, TRAJ33)
CAANPDSNYQLIW

SEQ ID NO: 93242 - protein, 13 aa, Homo sapiens
  CDR3 for beta chain variable domain of TCR clone 46621 (TRBV18, TRBJ1-1)
RASSGGRNTEAFF

SEQ ID NO: 93243 - protein, 14 aa, Homo sapiens
  CDR3 for alpha chain variable domain of TCR clone 46622 (TRAV1-2, TRAJ16)
CAVNRFSDGQKLLF

SEQ ID NO: 93244 - protein, 15 aa, Homo sapiens
  CDR3 for beta chain variable domain of TCR clone 46622 (TRBV9, TRBJ1-6)
CASSVAGTGDSPLHI

SEQ ID NO: 93245 - protein, 14 aa, Homo sapiens
  CDR3 for alpha chain variable domain of TCR clone 46623 (TRAV35, TRAJ24)
CAGPIRDSWGKLQF

SEQ ID NO: 93246 - protein, 12 aa, Homo sapiens
  CDR3 for beta chain variable domain of TCR clone 46623 (TRBV12-4, TRBJ2-3)
CASSLGQDTQYF

SEQ ID NO: 93247 - protein, 12 aa, Homo sapiens
  CDR3 for alpha chain variable domain of TCR clone 46624 (TRAV23/DV6, TRAJ30)
CAASKGDDKIIF

SEQ ID NO: 93248 - protein, 16 aa, Homo sapiens
  CDR3 for beta chain variable domain of TCR clone 46624 (TRBV29-1, TRBJ2-7)
CSVEDAEDGTAYEQYF

SEQ ID NO: 93249 - protein, 15 aa, Homo sapiens
  CDR3 for alpha chain variable domain of TCR clone 46625 (TRAV13-1, TRAJ17)
CAASMERAAGNKLTF

SEQ ID NO: 93250 - protein, 14 aa, Homo sapiens
  CDR3 for beta chain variable domain of TCR clone 46625 (TRBV7-9, TRBJ2-1)
CASSPRDSLYEQFF

SEQ ID NO: 93251 - protein, 14 aa, Homo sapiens
  CDR3 for alpha chain variable domain of TCR clone 46626 (TRAV12-1, TRAJ54)
CVVNIYQGAQKLVF

SEQ ID NO: 93252 - protein, 18 aa, Homo sapiens
  CDR3 for beta chain variable domain of TCR clone 46626 (TRBV11-2, TRBJ2-3)
CASSLGGASRGAPNTQYF

SEQ ID NO: 93253 - protein, 15 aa, Homo sapiens
  CDR3 for alpha chain variable domain of TCR clone 46627 (TRAV17, TRAJ4)
CATGTWSGGYNKRIF

SEQ ID NO: 93254 - protein, 13 aa, Homo sapiens
  CDR3 for beta chain variable domain of TCR clone 46627 (TRBV6-6, TRBJ2-7)
CASSPKHLAEQYF

SEQ ID NO: 93255 - protein, 12 aa, Homo sapiens
  CDR3 for alpha chain variable domain of TCR clone 46628 (TRAV36/DV7, TRAJ37)
CACYGNTGKLIF

SEQ ID NO: 93256 - protein, 14 aa, Homo sapiens
  CDR3 for beta chain variable domain of TCR clone 46628 (TRBV27, TRBJ2-1)
CASSATGGYNEQFF

SEQ ID NO: 93257 - protein, 17 aa, Homo sapiens
  CDR3 for alpha chain variable domain of TCR clone 46629 (TRAV4, TRAJ18)
SLVGERSVGSTLGRLYF

SEQ ID NO: 93258 - protein, 16 aa, Homo sapiens
  CDR3 for beta chain variable domain of TCR clone 46629 (TRBV19, TRBJ2-1)
CASSKAGPSSYNEQFF

SEQ ID NO: 93259 - protein, 14 aa, Homo sapiens
  CDR3 for alpha chain variable domain of TCR clone 46630 (TRAV3, TRAJ5)
CCERQETGRRALTF

SEQ ID NO: 93260 - protein, 15 aa, Homo sapiens
  CDR3 for beta chain variable domain of TCR clone 46630 (TRBV7-8, TRBJ2-1)
CASSLADSLYNEQFF

SEQ ID NO: 93261 - protein, 11 aa, Homo sapiens
  CDR3 for alpha chain variable domain of TCR clone 46631 (TRAV1-1, TRAJ23)
CAVRQGGKLIF

SEQ ID NO: 93262 - protein, 11 aa, Homo sapiens
  CDR3 for beta chain variable domain of TCR clone 46631 (TRBV11-2, TRBJ2-2)
CASSLPGELFF

SEQ ID NO: 93263 - protein, 13 aa, Homo sapiens
  CDR3 for alpha chain variable domain of TCR clone 46632 (TRAV13-1, TRAJ6)
CAARRGGSYIPTF

SEQ ID NO: 93264 - protein, 11 aa, Homo sapiens
  CDR3 for beta chain variable domain of TCR clone 46632 (TRBV10-3, TRBJ2-7)
CAISEGLEQYF

SEQ ID NO: 93265 - protein, 11 aa, Homo sapiens
  CDR3 for alpha chain variable domain of TCR clone 46633 (TRAV23/DV6, TRAJ56)
CAAPANSKLPF

SEQ ID NO: 93266 - protein, 14 aa, Homo sapiens
  CDR3 for beta chain variable domain of TCR clone 46633 (TRBV27, TRBJ2-1)
CASSFGREANEQFF

SEQ ID NO: 93267 - protein, 10 aa, Homo sapiens
  CDR3 for alpha chain variable domain of TCR clone 46634 (TRAV12-1, TRAJ43)
CVVNPTALEQ

SEQ ID NO: 93268 - protein, 14 aa, Homo sapiens
  CDR3 for beta chain variable domain of TCR clone 46634 (TRBV7-2, TRBJ2-7)
CASRSQGAAYEQYF

SEQ ID NO: 93269 - protein, 14 aa, Homo sapiens
  CDR3 for alpha chain variable domain of TCR clone 46635 (TRAV1-2, TRAJ8)
CAVREDTGFQKLVF

SEQ ID NO: 93270 - protein, 13 aa, Homo sapiens
  CDR3 for beta chain variable domain of TCR clone 46635 (TRBV9, TRBJ2-7)
CASSVAEYYEQYF

SEQ ID NO: 93271 - protein, 10 aa, Homo sapiens
  CDR3 for alpha chain variable domain of TCR clone 46636 (TRAV25, TRAJ20)
CAVNDFKLSF

SEQ ID NO: 93272 - protein, 13 aa, Homo sapiens
  CDR3 for beta chain variable domain of TCR clone 46636 (TRBV6-3, TRBJ2-7)
CASSFSGGYEQYF

SEQ ID NO: 93273 - protein, 17 aa, Homo sapiens
  CDR3 for alpha chain variable domain of TCR clone 46637 (TRAV13-1, TRAJ28)
CATSPPYSGAGSYQLTF

SEQ ID NO: 93274 - protein, 14 aa, Homo sapiens
  CDR3 for beta chain variable domain of TCR clone 46637 (TRBV24-1, TRBJ1-1)
CATSIPRGDTEAFF

SEQ ID NO: 93275 - protein, 18 aa, Homo sapiens
  CDR3 for alpha chain variable domain of TCR clone 46638 (TRAV21, TRAJ52)
CAMRPSPAGGTSYGKLTF

SEQ ID NO: 93276 - protein, 17 aa, Homo sapiens
  CDR3 for beta chain variable domain of TCR clone 46638 (TRBV13, TRBJ2-3)
CASSLSRVVGGRNTQYF

SEQ ID NO: 93277 - protein, 17 aa, Homo sapiens
  CDR3 for alpha chain variable domain of TCR clone 46639 (TRAV26-1, TRAJ53)
CIVRVDDSGGSNYKLTF

SEQ ID NO: 93278 - protein, 14 aa, Homo sapiens
  CDR3 for beta chain variable domain of TCR clone 46639 (TRBV7-2, TRBJ1-1)
CASSFLTGTTEAFF

SEQ ID NO: 93279 - protein, 13 aa, Homo sapiens
  CDR3 for alpha chain variable domain of TCR clone 46640 (TRAV12-1, TRAJ39)
CVALNNAGNMLTF

SEQ ID NO: 93280 - protein, 15 aa, Homo sapiens
  CDR3 for beta chain variable domain of TCR clone 46640 (TRBV12-4, TRBJ2-5)
CASSPPTGLQETQYF

SEQ ID NO: 93281 - protein, 16 aa, Homo sapiens
  CDR3 for alpha chain variable domain of TCR clone 46641 (TRAV26-1, TRAJ32)
CIVRTNYGGSTNKLIF

SEQ ID NO: 93282 - protein, 14 aa, Homo sapiens
  CDR3 for beta chain variable domain of TCR clone 46641 (TRBV27, TRBJ1-1)
CASSLLSGLSEAFF

SEQ ID NO: 93283 - protein, 13 aa, Homo sapiens
  CDR3 for alpha chain variable domain of TCR clone 46642 (TRAV35, TRAJ57)
CAGSQGGSEKLVF

SEQ ID NO: 93284 - protein, 15 aa, Homo sapiens
  CDR3 for beta chain variable domain of TCR clone 46642 (TRBV12-4, TRBJ1-1)
CAIRRGLGPNTEAFF

SEQ ID NO: 93285 - protein, 16 aa, Homo sapiens
  CDR3 for alpha chain variable domain of TCR clone 46643 (TRAV17, TRAJ22)
CATGPISSGSARQLTF

SEQ ID NO: 93286 - protein, 13 aa, Homo sapiens
  CDR3 for beta chain variable domain of TCR clone 46643 (TRBV11-2, TRBJ2-1)
CAGSLGLAGGRFF

SEQ ID NO: 93287 - protein, 14 aa, Homo sapiens
  CDR3 for alpha chain variable domain of TCR clone 46644 (TRAV12-2, TRAJ44)
CAVNKAGTASKLTF

SEQ ID NO: 93288 - protein, 11 aa, Homo sapiens
  CDR3 for beta chain variable domain of TCR clone 46644 (TRBV24-1, TRBJ2-5)
CATSIGETQYF

SEQ ID NO: 93289 - protein, 15 aa, Homo sapiens
  CDR3 for alpha chain variable domain of TCR clone 46645 (TRAV3, TRAJ5)
CAVRDRKTGRRALTF

SEQ ID NO: 93290 - protein, 15 aa, Homo sapiens
  CDR3 for beta chain variable domain of TCR clone 46645 (TRBV7-8, TRBJ2-1)
CASSLADSLYKEQFF

SEQ ID NO: 93291 - protein, 11 aa, Homo sapiens
  CDR3 for alpha chain variable domain of TCR clone 46646 (TRAV12-2, TRAJ43)
CAACNNNDMRF

SEQ ID NO: 93292 - protein, 14 aa, Homo sapiens
  CDR3 for beta chain variable domain of TCR clone 46646 (TRBV7-8, TRBJ1-2)
CASSAGTAIYGYTF

SEQ ID NO: 93293 - protein, 13 aa, Homo sapiens
  CDR3 for alpha chain variable domain of TCR clone 46647 (TRAV20, TRAJ37)
CAGCSSNTGKLIF

SEQ ID NO: 93294 - protein, 16 aa, Homo sapiens
  CDR3 for beta chain variable domain of TCR clone 46647 (TRBV12-4, TRBJ2-5)
CASSFFVRGRQETQYF

SEQ ID NO: 93295 - protein, 12 aa, Homo sapiens
  CDR3 for alpha chain variable domain of TCR clone 46648 (TRAV8-3, TRAJ26)
CAGDNYGQNSVF

SEQ ID NO: 93296 - protein, 12 aa, Homo sapiens
  CDR3 for beta chain variable domain of TCR clone 46648 (TRBV11-2, TRBJ2-1)
CASSPGNNEQFF

SEQ ID NO: 93297 - protein, 17 aa, Homo sapiens
  CDR3 for alpha chain variable domain of TCR clone 46649 (TRAV8-1, TRAJ42)
CAVISMNYGGSQGNLIF

SEQ ID NO: 93298 - protein, 14 aa, Homo sapiens
  CDR3 for beta chain variable domain of TCR clone 46649 (TRBV19, TRBJ1-2)
CASSIGAGSYGYTF

SEQ ID NO: 93299 - protein, 14 aa, Homo sapiens
  CDR3 for alpha chain variable domain of TCR clone 46650 (TRAV12-2, TRAJ5)
CAVNRSTGRRALTF

SEQ ID NO: 93300 - protein, 16 aa, Homo sapiens
  CDR3 for beta chain variable domain of TCR clone 46650 (TRBV6-1, TRBJ2-5)
CASSETLDRGAETQYF

SEQ ID NO: 93301 - protein, 13 aa, Homo sapiens
  CDR3 for alpha chain variable domain of TCR clone 46651 (TRAV1-1, TRAJ5)
CAVRQAGRRALTF

SEQ ID NO: 93302 - protein, 12 aa, Homo sapiens
  CDR3 for beta chain variable domain of TCR clone 46651 (TRBV18, TRBJ2-1)
CASSSDEDEQFF

SEQ ID NO: 93303 - protein, 14 aa, Homo sapiens
  CDR3 for alpha chain variable domain of TCR clone 46652 (TRAV1-2, TRAJ16)
CAVNRSSDGQKLLF

SEQ ID NO: 93304 - protein, 14 aa, Homo sapiens
  CDR3 for beta chain variable domain of TCR clone 46652 (TRBV11-2, TRBJ2-3)
CASSRLARTDTQYF

SEQ ID NO: 93305 - protein, 15 aa, Homo sapiens
  CDR3 for alpha chain variable domain of TCR clone 46653 (TRAV17, TRAJ56)
CATEPFTGANSKLTF

SEQ ID NO: 93306 - protein, 15 aa, Homo sapiens
  CDR3 for beta chain variable domain of TCR clone 46653 (TRBV28, TRBJ1-5)
CASSRTGGYVQPQQF

SEQ ID NO: 93307 - protein, 14 aa, Homo sapiens
  CDR3 for alpha chain variable domain of TCR clone 46654 (TRAV1-2, TRAJ8)
CAVREDTGFQKLVF

SEQ ID NO: 93308 - protein, 15 aa, Homo sapiens
  CDR3 for beta chain variable domain of TCR clone 46654 (TRBV6-3, TRBJ2-7)
CASSSPGTVFNEQYF

SEQ ID NO: 93309 - protein, 14 aa, Homo sapiens
  CDR3 for alpha chain variable domain of TCR clone 46655 (TRAV12-2, TRAJ6)
CASKWGGGRYIPTF

SEQ ID NO: 93310 - protein, 13 aa, Homo sapiens
  CDR3 for beta chain variable domain of TCR clone 46655 (TRBV2, TRBJ1-1)
CASSEGGNTEAFF

SEQ ID NO: 93311 - protein, 15 aa, Homo sapiens
  CDR3 for alpha chain variable domain of TCR clone 46656 (TRAV13-2, TRAJ45)
CAESDPGGGADGLTF

SEQ ID NO: 93312 - protein, 17 aa, Homo sapiens
  CDR3 for beta chain variable domain of TCR clone 46656 (TRBV27, TRBJ1-6)
CASSLDQLSSYNSPLHF

SEQ ID NO: 93313 - protein, 14 aa, Homo sapiens
  CDR3 for alpha chain variable domain of TCR clone 46657 (TRAV23/DV6, TRAJ22)
CANISSGSARQLTF

SEQ ID NO: 93314 - protein, 16 aa, Homo sapiens
  CDR3 for beta chain variable domain of TCR clone 46657 (TRBV5-7, TRBJ2-5)
CASIRGQTGYQETQYF

SEQ ID NO: 93315 - protein, 13 aa, Homo sapiens
  CDR3 for alpha chain variable domain of TCR clone 46658 (TRAV13-1, TRAJ33)
CAASRAGNYQLIW

SEQ ID NO: 93316 - protein, 15 aa, Homo sapiens
  CDR3 for beta chain variable domain of TCR clone 46658 (TRBV2, TRBJ2-7)
EDSAMYCCASSEQYF

SEQ ID NO: 93317 - protein, 13 aa, Homo sapiens
  CDR3 for alpha chain variable domain of TCR clone 46659 (TRAV16, TRAJ31)
CALSAHNNARLMF

SEQ ID NO: 93318 - protein, 17 aa, Homo sapiens
  CDR3 for beta chain variable domain of TCR clone 46659 (TRBV12-4, TRBJ2-1)
CASSPGLTGGRINEQFF

SEQ ID NO: 93319 - protein, 14 aa, Homo sapiens
  CDR3 for alpha chain variable domain of TCR clone 46660 (TRAV1-2, TRAJ8)
CAVREDTGFQKLVF

SEQ ID NO: 93320 - protein, 15 aa, Homo sapiens
  CDR3 for beta chain variable domain of TCR clone 46660 (TRBV28, TRBJ1-1)
CASSLFGQGASEAFF

SEQ ID NO: 93321 - protein, 11 aa, Homo sapiens
  CDR3 for alpha chain variable domain of TCR clone 46661 (TRAV35, TRAJ34)
CWARNTDKLIF

SEQ ID NO: 93322 - protein, 16 aa, Homo sapiens
  CDR3 for beta chain variable domain of TCR clone 46661 (TRBV7-3, TRBJ2-2)
CASSLKRGTLSGELFF

SEQ ID NO: 93323 - protein, 13 aa, Homo sapiens
  CDR3 for alpha chain variable domain of TCR clone 46662 (TRAV3, TRAJ36)
CAVRDTGANNLFF

SEQ ID NO: 93324 - protein, 14 aa, Homo sapiens
  CDR3 for beta chain variable domain of TCR clone 46662 (TRBV24-1, TRBJ2-1)
CHQWIRGFYNEQFF

SEQ ID NO: 93325 - protein, 14 aa, Homo sapiens
  CDR3 for alpha chain variable domain of TCR clone 46663 (TRAV9-2, TRAJ39)
CALYIYNAGNMLTF

SEQ ID NO: 93326 - protein, 14 aa, Homo sapiens
  CDR3 for beta chain variable domain of TCR clone 46663 (TRBV7-8, TRBJ2-7)
CASSPRDRVYEQYF

SEQ ID NO: 93327 - protein, 17 aa, Homo sapiens
  CDR3 for alpha chain variable domain of TCR clone 46664 (TRAV1-1, TRAJ32)
CAVRVDELWWCYKQAHF

SEQ ID NO: 93328 - protein, 16 aa, Homo sapiens
  CDR3 for beta chain variable domain of TCR clone 46664 (TRBV5-4, TRBJ2-3)
CASQQPGAGGADTQYF

SEQ ID NO: 93329 - protein, 17 aa, Homo sapiens
  CDR3 for alpha chain variable domain of TCR clone 46665 (TRAV17, TRAJ7)
CATLGRLAFGKGNQVVV

SEQ ID NO: 93330 - protein, 13 aa, Homo sapiens
  CDR3 for beta chain variable domain of TCR clone 46665 (TRBV12-4, TRBJ2-7)
CASSLGRVREQYF

SEQ ID NO: 93331 - protein, 14 aa, Homo sapiens
  CDR3 for alpha chain variable domain of TCR clone 46666 (TRAV12-2, TRAJ45)
CAANIGGGADGLTF

SEQ ID NO: 93332 - protein, 17 aa, Homo sapiens
  CDR3 for beta chain variable domain of TCR clone 46666 (TRBV20-1, TRBJ2-2)
CSASGSGQGGLTGELFF

SEQ ID NO: 93333 - protein, 12 aa, Homo sapiens
  CDR3 for alpha chain variable domain of TCR clone 46667 (TRAV13-2, TRAJ8)
CAPWLGFQKLVF

SEQ ID NO: 93334 - protein, 14 aa, Homo sapiens
  CDR3 for beta chain variable domain of TCR clone 46667 (TRBV20-1, TRBJ1-1)
CSAMGGTANTEAFF

SEQ ID NO: 93335 - protein, 14 aa, Homo sapiens
  CDR3 for alpha chain variable domain of TCR clone 46668 (TRAV12-2, TRAJ6)
CAPKWGGGSYIPTF

SEQ ID NO: 93336 - protein, 13 aa, Homo sapiens
  CDR3 for beta chain variable domain of TCR clone 46668 (TRBV2, TRBJ1-1)
CASSEGGNTEAFF

SEQ ID NO: 93337 - protein, 11 aa, Homo sapiens
  CDR3 for alpha chain variable domain of TCR clone 46669 (TRAV13-1, TRAJ39)
CASHAGNMLTF

SEQ ID NO: 93338 - protein, 14 aa, Homo sapiens
  CDR3 for beta chain variable domain of TCR clone 46669 (TRBV13, TRBJ2-5)
CASSLERVGETQYF

SEQ ID NO: 93339 - protein, 16 aa, Homo sapiens
  CDR3 for alpha chain variable domain of TCR clone 46670 (TRAV26-2, TRAJ45)
CTTASPIGGGADGLTF

SEQ ID NO: 93340 - protein, 20 aa, Homo sapiens
  CDR3 for beta chain variable domain of TCR clone 46670 (TRBV28, TRBJ2-1)
CASTPIGRLPGLAGGNEQFF

SEQ ID NO: 93341 - protein, 16 aa, Homo sapiens
  CDR3 for alpha chain variable domain of TCR clone 46671 (TRAV19, TRAJ4)
CALSGPLVGGYNKLIF

SEQ ID NO: 93342 - protein, 16 aa, Homo sapiens
  CDR3 for beta chain variable domain of TCR clone 46671 (TRBV7-7, TRBJ2-1)
CASSLASGTSYNEQFF

SEQ ID NO: 93343 - protein, 14 aa, Homo sapiens
  CDR3 for alpha chain variable domain of TCR clone 46672 (TRAV1-2, TRAJ16)
CAVNRFSDGQKLLF

SEQ ID NO: 93344 - protein, 12 aa, Homo sapiens
  CDR3 for beta chain variable domain of TCR clone 46672 (TRBV20-1, TRBJ1-5)
CSTSQGNQPQHF

SEQ ID NO: 93345 - protein, 12 aa, Homo sapiens
  CDR3 for alpha chain variable domain of TCR clone 46673 (TRAV2, TRAJ5)
CALDTGRRALTF

SEQ ID NO: 93346 - protein, 13 aa, Homo sapiens
  CDR3 for beta chain variable domain of TCR clone 46673 (TRBV15, TRBJ1-6)
CATSGGLNSPPHF

SEQ ID NO: 93347 - protein, 13 aa, Homo sapiens
  CDR3 for alpha chain variable domain of TCR clone 46674 (TRAV12-3, TRAJ43)
CAMIRPNNNDMRF

SEQ ID NO: 93348 - protein, 12 aa, Homo sapiens
  CDR3 for beta chain variable domain of TCR clone 46674 (TRBV11-2, TRBJ2-5)
CASRLGQETQYF

SEQ ID NO: 93349 - protein, 13 aa, Homo sapiens
  CDR3 for alpha chain variable domain of TCR clone 46675 (TRAV1-2, TRAJ9)
CAALNTGGFKTIF

SEQ ID NO: 93350 - protein, 13 aa, Homo sapiens
  CDR3 for beta chain variable domain of TCR clone 46675 (TRBV7-2, TRBJ2-2)
CASSLAVTGELFF

SEQ ID NO: 93351 - protein, 16 aa, Homo sapiens
  CDR3 for alpha chain variable domain of TCR clone 46676 (TRAV16, TRAJ52)
CALSAAGGTSYGKLTF

SEQ ID NO: 93352 - protein, 12 aa, Homo sapiens
  CDR3 for beta chain variable domain of TCR clone 46676 (TRBV12-4, TRBJ1-3)
CASSFSGNTIYL

SEQ ID NO: 93353 - protein, 14 aa, Homo sapiens
  CDR3 for alpha chain variable domain of TCR clone 46677 (TRAV9-2, TRAJ39)
CALYIYSAGNMLTF

SEQ ID NO: 93354 - protein, 15 aa, Homo sapiens
  CDR3 for beta chain variable domain of TCR clone 46677 (TRBV9, TRBJ1-6)
CASSVAGTGDSPLHF

SEQ ID NO: 93355 - protein, 12 aa, Homo sapiens
  CDR3 for alpha chain variable domain of TCR clone 46678 (TRAV13-1, TRAJ5)
CAVDTGRRALTF

SEQ ID NO: 93356 - protein, 15 aa, Homo sapiens
  CDR3 for beta chain variable domain of TCR clone 46678 (TRBV5-1, TRBJ2-7)
CASSLNGGPAREQYF

SEQ ID NO: 93357 - protein, 14 aa, Homo sapiens
  CDR3 for alpha chain variable domain of TCR clone 46679 (TRAV13-1, TRAJ35)
CAASKGGFGNAQHC

SEQ ID NO: 93358 - protein, 13 aa, Homo sapiens
  CDR3 for beta chain variable domain of TCR clone 46679 (TRBV7-3, TRBJ1-1)
CASSQDWGAEAFF

SEQ ID NO: 93359 - protein, 18 aa, Homo sapiens
  CDR3 for alpha chain variable domain of TCR clone 46680 (TRAV26-1, TRAJ23)
CIVRVGLEVWNQGGKLIF

SEQ ID NO: 93360 - protein, 16 aa, Homo sapiens
  CDR3 for beta chain variable domain of TCR clone 46680 (TRBV12-4, TRBJ2-5)
CAGSFFVRGRQETQYF

SEQ ID NO: 93361 - protein, 13 aa, Homo sapiens
  CDR3 for alpha chain variable domain of TCR clone 46681 (TRAV26-1, TRAJ39)
CIVRGSRAGNMLT

SEQ ID NO: 93362 - protein, 15 aa, Homo sapiens
  CDR3 for beta chain variable domain of TCR clone 46681 (TRBV7-9, TRBJ1-5)
CASSQGHQPNQPQHF

SEQ ID NO: 93363 - protein, 18 aa, Homo sapiens
  CDR3 for alpha chain variable domain of TCR clone 46682 (TRAV12-3, TRAJ52)
CAMSRTNAGGTRYGKLTF

SEQ ID NO: 93364 - protein, 17 aa, Homo sapiens
  CDR3 for beta chain variable domain of TCR clone 46682 (TRBV7-3, TRBJ2-3)
CASSLMKRMRGADTQYF

SEQ ID NO: 93365 - protein, 16 aa, Homo sapiens
  CDR3 for alpha chain variable domain of TCR clone 46683 (TRAV30, TRAJ24)
CGTEIVDADSWGKFQF

SEQ ID NO: 93366 - protein, 15 aa, Homo sapiens
  CDR3 for beta chain variable domain of TCR clone 46683 (TRBV6-1, TRBJ2-3)
CASSERGGITDTQYF

SEQ ID NO: 93367 - protein, 13 aa, Homo sapiens
  CDR3 for alpha chain variable domain of TCR clone 46684 (TRAV13-1, TRAJ21)
CAASIYNFNKFYF

SEQ ID NO: 93368 - protein, 14 aa, Homo sapiens
  CDR3 for beta chain variable domain of TCR clone 46684 (TRBV7-7, TRBJ2-2)
CATRQDSDTGELFF

SEQ ID NO: 93369 - protein, 15 aa, Homo sapiens
  CDR3 for alpha chain variable domain of TCR clone 46685 (TRAV26-1, TRAJ29)
CIVRVERSGNTPLVF

SEQ ID NO: 93370 - protein, 14 aa, Homo sapiens
  CDR3 for beta chain variable domain of TCR clone 46685 (TRBV19, TRBJ2-1)
CASPTFVLSGEQFF

SEQ ID NO: 93371 - protein, 13 aa, Homo sapiens
  CDR3 for alpha chain variable domain of TCR clone 46686 (TRAV12-1, TRAJ43)
CVVSHHNNNDMRF

SEQ ID NO: 93372 - protein, 17 aa, Homo sapiens
  CDR3 for beta chain variable domain of TCR clone 46686 (TRBV7-3, TRBJ2-3)
CASSLMKRMRGADTQYF

SEQ ID NO: 93373 - protein, 14 aa, Homo sapiens
  CDR3 for alpha chain variable domain of TCR clone 46687 (TRAV38-1, TRAJ29)
CAFITPSGNTPLVF

SEQ ID NO: 93374 - protein, 16 aa, Homo sapiens
  CDR3 for beta chain variable domain of TCR clone 46687 (TRBV4-2, TRBJ1-1)
CASSQAGFGMNTEAFF

SEQ ID NO: 93375 - protein, 14 aa, Homo sapiens
  CDR3 for alpha chain variable domain of TCR clone 46688 (TRAV12-2, TRAJ11)
CAVNRESGYSTLTF

SEQ ID NO: 93376 - protein, 10 aa, Homo sapiens
  CDR3 for beta chain variable domain of TCR clone 46688 (TRBV20-1, TRBJ2-5)
CNARFETQYF

SEQ ID NO: 93377 - protein, 18 aa, Homo sapiens
  CDR3 for alpha chain variable domain of TCR clone 46689 (TRAV12-3, TRAJ52)
CAMSVGGAGGTSYGELTF

SEQ ID NO: 93378 - protein, 15 aa, Homo sapiens
  CDR3 for beta chain variable domain of TCR clone 46689 (TRBV27, TRBJ1-6)
CASSFDRGLGSPLHF

SEQ ID NO: 93379 - protein, 11 aa, Homo sapiens
  CDR3 for alpha chain variable domain of TCR clone 46690 (TRAV1-2, TRAJ20)
CAVSNDYKPSF

SEQ ID NO: 93380 - protein, 16 aa, Homo sapiens
  CDR3 for beta chain variable domain of TCR clone 46690 (TRBV29-1, TRBJ2-6)
CSVEDITYSGANVLTF

SEQ ID NO: 93381 - protein, 14 aa, Homo sapiens
  CDR3 for alpha chain variable domain of TCR clone 46691 (TRAV13-1, TRAJ10)
CAAKEPGGGNKLTF

SEQ ID NO: 93382 - protein, 14 aa, Homo sapiens
  CDR3 for beta chain variable domain of TCR clone 46691 (TRBV6-6, TRBJ2-7)
CASSDSGAGYGQYF

SEQ ID NO: 93383 - protein, 19 aa, Homo sapiens
  CDR3 for alpha chain variable domain of TCR clone 46692 (TRAV14/DV4, TRAJ32)
TTGGPSNVLPLTPTNKLIF

SEQ ID NO: 93384 - protein, 17 aa, Homo sapiens
  CDR3 for beta chain variable domain of TCR clone 46692 (TRBV20-1, TRBJ2-1)
CSASSSGLAGSYNEQFF

SEQ ID NO: 93385 - protein, 11 aa, Homo sapiens
  CDR3 for alpha chain variable domain of TCR clone 46693 (TRAV2, TRAJ13)
CASGGYQKVTF

SEQ ID NO: 93386 - protein, 13 aa, Homo sapiens
  CDR3 for beta chain variable domain of TCR clone 46693 (TRBV5-1, TRBJ2-5)
CASSWEGEETQYF

SEQ ID NO: 93387 - protein, 12 aa, Homo sapiens
  CDR3 for alpha chain variable domain of TCR clone 46694 (TRAV12-2, TRAJ47)
CAVAEYGNKLVF

SEQ ID NO: 93388 - protein, 14 aa, Homo sapiens
  CDR3 for beta chain variable domain of TCR clone 46694 (TRBV20-1, TRBJ1-1)
CSAMGGIANTEAFF

SEQ ID NO: 93389 - protein, 17 aa, Homo sapiens
  CDR3 for alpha chain variable domain of TCR clone 46695 (TRAV3, TRAJ6)
CAVRDGPRAGGSYIPTF

SEQ ID NO: 93390 - protein, 19 aa, Homo sapiens
  CDR3 for beta chain variable domain of TCR clone 46695 (TRBV19, TRBJ2-5)
CASSIGQVTDFFLGETQYF

SEQ ID NO: 93391 - protein, 12 aa, Homo sapiens
  CDR3 for alpha chain variable domain of TCR clone 46696 (TRAV12-3, TRAJ34)
CAMGYNTDKLIF

SEQ ID NO: 93392 - protein, 15 aa, Homo sapiens
  CDR3 for beta chain variable domain of TCR clone 46696 (TRBV28, TRBJ2-1)
CASSIIAGGRSEQLF

SEQ ID NO: 93393 - protein, 18 aa, Homo sapiens
  CDR3 for alpha chain variable domain of TCR clone 46697 (TRAV12-3, TRAJ52)
CAMSVGGAGGTSYGKLTF

SEQ ID NO: 93394 - protein, 14 aa, Homo sapiens
  CDR3 for beta chain variable domain of TCR clone 46697 (TRBV7-6, TRBJ2-3)
CASSLGTVTDTQYF

SEQ ID NO: 93395 - protein, 17 aa, Homo sapiens
  CDR3 for alpha chain variable domain of TCR clone 46698 (TRAV13-1, TRAJ52)
CAASSGAGGTSYGKLTF

SEQ ID NO: 93396 - protein, 14 aa, Homo sapiens
  CDR3 for beta chain variable domain of TCR clone 46698 (TRBV7-2, TRBJ2-2)
CASRGQGAAGELFF

SEQ ID NO: 93397 - protein, 12 aa, Homo sapiens
  CDR3 for alpha chain variable domain of TCR clone 46699 (TRAV1-2, TRAJ29)
CAVPSGNTPLVF

SEQ ID NO: 93398 - protein, 12 aa, Homo sapiens
  CDR3 for beta chain variable domain of TCR clone 46699 (TRBV7-9, TRBJ2-7)
CASSFGSHEQYF

SEQ ID NO: 93399 - protein, 14 aa, Homo sapiens
  CDR3 for alpha chain variable domain of TCR clone 46700 (TRAV8-1, TRAJ5)
CAVRTDTGRRELTF

SEQ ID NO: 93400 - protein, 14 aa, Homo sapiens
  CDR3 for beta chain variable domain of TCR clone 46700 (TRBV7-8, TRBJ2-3)
CASSFPDGQDTQYF

SEQ ID NO: 93401 - protein, 15 aa, Homo sapiens
  CDR3 for alpha chain variable domain of TCR clone 46701 (TRAV14/DV4, TRAJ10)
CAMRELTGGGNKRTF

SEQ ID NO: 93402 - protein, 18 aa, Homo sapiens
  CDR3 for beta chain variable domain of TCR clone 46701 (TRBV7-9, TRBJ2-7)
CASSLTTSGSRTWYEQYF

SEQ ID NO: 93403 - protein, 13 aa, Homo sapiens
  CDR3 for alpha chain variable domain of TCR clone 46702 (TRAV2, TRAJ40)
CAVLTSGTYKYIF

SEQ ID NO: 93404 - protein, 14 aa, Homo sapiens
  CDR3 for beta chain variable domain of TCR clone 46702 (TRBV19, TRBJ2-1)
CASPTFVLSGEQFF

SEQ ID NO: 93405 - protein, 14 aa, Homo sapiens
  CDR3 for alpha chain variable domain of TCR clone 46703 (TRAV35, TRAJ40)
CAGHPISGTYKYIF

SEQ ID NO: 93406 - protein, 15 aa, Homo sapiens
  CDR3 for beta chain variable domain of TCR clone 46703 (TRBV25-1, TRBJ1-4)
CTSSPGDSTNEKLFF

SEQ ID NO: 93407 - protein, 16 aa, Homo sapiens
  CDR3 for alpha chain variable domain of TCR clone 46704 (TRAV30, TRAJ24)
CGTEIVDADSWGKFQF

SEQ ID NO: 93408 - protein, 13 aa, Homo sapiens
  CDR3 for beta chain variable domain of TCR clone 46704 (TRBV7-9, TRBJ2-5)
CASLPSGRETQYF

SEQ ID NO: 93409 - protein, 14 aa, Homo sapiens
  CDR3 for alpha chain variable domain of TCR clone 46705 (TRAV8-2, TRAJ6)
CVVISAGGSYIPTF

SEQ ID NO: 93410 - protein, 16 aa, Homo sapiens
  CDR3 for beta chain variable domain of TCR clone 46705 (TRBV7-6, TRBJ2-6)
CASSLPGLSGANDLTF

SEQ ID NO: 93411 - protein, 14 aa, Homo sapiens
  CDR3 for alpha chain variable domain of TCR clone 46706 (TRAV12-3, TRAJ5)
CAMSADTGRRALTF

SEQ ID NO: 93412 - protein, 14 aa, Homo sapiens
  CDR3 for beta chain variable domain of TCR clone 46706 (TRBV7-9, TRBJ2-7)
CASTNGATIYEQYF

SEQ ID NO: 93413 - protein, 13 aa, Homo sapiens
  CDR3 for alpha chain variable domain of TCR clone 46707 (TRAV8-3, TRAJ48)
CCGCNFGNEELTF

SEQ ID NO: 93414 - protein, 12 aa, Homo sapiens
  CDR3 for beta chain variable domain of TCR clone 46707 (TRBV7-2, TRBJ2-5)
CASSQYQETQYF

SEQ ID NO: 93415 - protein, 13 aa, Homo sapiens
  CDR3 for alpha chain variable domain of TCR clone 46708 (TRAV2, TRAJ40)
CAVVTSGTYKYIF

SEQ ID NO: 93416 - protein, 13 aa, Homo sapiens
  CDR3 for beta chain variable domain of TCR clone 46708 (TRBV19, TRBJ1-1)
CASSIGPQAEAFF

SEQ ID NO: 93417 - protein, 15 aa, Homo sapiens
  CDR3 for alpha chain variable domain of TCR clone 46709 (TRAV12-3, TRAJ6)
CAMSAASGGSYIPTF

SEQ ID NO: 93418 - protein, 12 aa, Homo sapiens
  CDR3 for beta chain variable domain of TCR clone 46709 (TRBV28, TRBJ2-3)
CASSLYRDTQYF

SEQ ID NO: 93419 - protein, 15 aa, Homo sapiens
  CDR3 for alpha chain variable domain of TCR clone 46710 (TRAV26-1, TRAJ44)
CIVRANTGTASKLTF

SEQ ID NO: 93420 - protein, 13 aa, Homo sapiens
  CDR3 for beta chain variable domain of TCR clone 46710 (TRBV7-9, TRBJ2-3)
CASSPGSTDTQYF

SEQ ID NO: 93421 - protein, 13 aa, Homo sapiens
  CDR3 for alpha chain variable domain of TCR clone 46711 (TRAV12-3, TRAJ13)
CAMTSGGYQKVTF

SEQ ID NO: 93422 - protein, 13 aa, Homo sapiens
  CDR3 for beta chain variable domain of TCR clone 46711 (TRBV7-9, TRBJ1-2)
CASSLKQNYGYIF

SEQ ID NO: 93423 - protein, 14 aa, Homo sapiens
  CDR3 for alpha chain variable domain of TCR clone 46712 (TRAV8-6, TRAJ34)
CAVSDQGNTDKLIF

SEQ ID NO: 93424 - protein, 13 aa, Homo sapiens
  CDR3 for beta chain variable domain of TCR clone 46712 (TRBV11-2, TRBJ2-5)
CASSSTGEETQYF

SEQ ID NO: 93425 - protein, 15 aa, Homo sapiens
  CDR3 for alpha chain variable domain of TCR clone 46713 (TRAV17, TRAJ37)
CATDHGSSNTGKLIF

SEQ ID NO: 93426 - protein, 14 aa, Homo sapiens
  CDR3 for beta chain variable domain of TCR clone 46713 (TRBV7-2, TRBJ2-3)
CARSRTSGADTQYF

SEQ ID NO: 93427 - protein, 14 aa, Homo sapiens
  CDR3 for alpha chain variable domain of TCR clone 46714 (TRAV12-3, TRAJ10)
SHLPLTGGGNKLTF

SEQ ID NO: 93428 - protein, 14 aa, Homo sapiens
  CDR3 for beta chain variable domain of TCR clone 46714 (TRBV6-1, TRBJ1-3)
CGSVQGGGGNTIYF

SEQ ID NO: 93429 - protein, 11 aa, Homo sapiens
  CDR3 for alpha chain variable domain of TCR clone 46715 (TRAV12-1, TRAJ43)
CVEYDNNDMRF

SEQ ID NO: 93430 - protein, 13 aa, Homo sapiens
  CDR3 for beta chain variable domain of TCR clone 46715 (TRBV12-4, TRBJ1-2)
CASSLRQGKGYTF

SEQ ID NO: 93431 - protein, 14 aa, Homo sapiens
  CDR3 for alpha chain variable domain of TCR clone 46716 (TRAV1-1, TRAJ30)
CAVRSLNRDDKIIF

SEQ ID NO: 93432 - protein, 13 aa, Homo sapiens
  CDR3 for beta chain variable domain of TCR clone 46716 (TRBV7-9, TRBJ1-2)
CASSLKQNYGYTF

SEQ ID NO: 93433 - protein, 11 aa, Homo sapiens
  CDR3 for alpha chain variable domain of TCR clone 46717 (TRAV23/DV6, TRAJ54)
KELQGAQKLVF

SEQ ID NO: 93434 - protein, 12 aa, Homo sapiens
  CDR3 for beta chain variable domain of TCR clone 46717 (TRBV11-2, TRBJ2-2)
CASSLGGGELFF

SEQ ID NO: 93435 - protein, 14 aa, Homo sapiens
  CDR3 for alpha chain variable domain of TCR clone 46718 (TRAV8-1, TRAJ5)
CAGRTDTGRRALTF

SEQ ID NO: 93436 - protein, 14 aa, Homo sapiens
  CDR3 for beta chain variable domain of TCR clone 46718 (TRBV7-8, TRBJ2-3)
CASSFPDGQDTQYF

SEQ ID NO: 93437 - protein, 13 aa, Homo sapiens
  CDR3 for alpha chain variable domain of TCR clone 46719 (TRAV12-1, TRAJ29)
CVVNSIGNTPLVF

SEQ ID NO: 93438 - protein, 20 aa, Homo sapiens
  CDR3 for beta chain variable domain of TCR clone 46719 (TRBV7-8, TRBJ2-2)
CASSHLFPGPTIHITGELFF

SEQ ID NO: 93439 - protein, 13 aa, Homo sapiens
  CDR3 for alpha chain variable domain of TCR clone 46720 (TRAV13-1, TRAJ5)
CAARVTGRRALTF

SEQ ID NO: 93440 - protein, 15 aa, Homo sapiens
  CDR3 for beta chain variable domain of TCR clone 46720 (TRBV7-9, TRBJ2-7)
CASSPGSGLTYEQYF

SEQ ID NO: 93441 - protein, 14 aa, Homo sapiens
  CDR3 for alpha chain variable domain of TCR clone 46721 (TRAV16, TRAJ37)
CALDISGNTGKLIF

SEQ ID NO: 93442 - protein, 14 aa, Homo sapiens
  CDR3 for beta chain variable domain of TCR clone 46721 (TRBV7-6, TRBJ2-7)
CASSFRRGADEQYF

SEQ ID NO: 93443 - protein, 11 aa, Homo sapiens
  CDR3 for alpha chain variable domain of TCR clone 46722 (TRAV23/DV6, TRAJ56)
CAAPANSKLTF

SEQ ID NO: 93444 - protein, 16 aa, Homo sapiens
  CDR3 for beta chain variable domain of TCR clone 46722 (TRBV7-9, TRBJ1-2)
CASSLGFSSGEDGYTF

SEQ ID NO: 93445 - protein, 15 aa, Homo sapiens
  CDR3 for alpha chain variable domain of TCR clone 46723 (TRAV12-1, TRAJ6)
CVVNCPLRRKLHTYI

SEQ ID NO: 93446 - protein, 17 aa, Homo sapiens
  CDR3 for beta chain variable domain of TCR clone 46723 (TRBV20-1, TRBJ2-4)
CSARDWASGGRENIQYF

SEQ ID NO: 93447 - protein, 13 aa, Homo sapiens
  CDR3 for alpha chain variable domain of TCR clone 46724 (TRAV12-3, TRAJ15)
CAVANQAGTALIF

SEQ ID NO: 93448 - protein, 14 aa, Homo sapiens
  CDR3 for beta chain variable domain of TCR clone 46724 (TRBV27, TRBJ2-2)
CASSLGAATGELFF

SEQ ID NO: 93449 - protein, 15 aa, Homo sapiens
  CDR3 for alpha chain variable domain of TCR clone 46725 (TRAV8-1, TRAJ6)
CAVNTPPGGSYIPTL

SEQ ID NO: 93450 - protein, 14 aa, Homo sapiens
  CDR3 for beta chain variable domain of TCR clone 46725 (TRBV12-4, TRBJ2-1)
CASSLGQGASEQFF

SEQ ID NO: 93451 - protein, 17 aa, Homo sapiens
  CDR3 for alpha chain variable domain of TCR clone 46726 (TRAV23/DV6, TRAJ57)
CAASSTLSQGGSEKLVF

SEQ ID NO: 93452 - protein, 15 aa, Homo sapiens
  CDR3 for beta chain variable domain of TCR clone 46726 (TRBV28, TRBJ1-1)
CASRIKGGLNTEAFF

SEQ ID NO: 93453 - protein, 14 aa, Homo sapiens
  CDR3 for alpha chain variable domain of TCR clone 46727 (TRAV24, TRAJ42)
CAQNYGGSQGNLIF

SEQ ID NO: 93454 - protein, 15 aa, Homo sapiens
  CDR3 for beta chain variable domain of TCR clone 46727 (TRBV19, TRBJ1-5)
CASGIPGGAGQPQHF

SEQ ID NO: 93455 - protein, 16 aa, Homo sapiens
  CDR3 for alpha chain variable domain of TCR clone 46728 (TRAV3, TRAJ28)
CAVLPSSGAGSYQLTF

SEQ ID NO: 93456 - protein, 13 aa, Homo sapiens
  CDR3 for beta chain variable domain of TCR clone 46728 (TRBV12-4, TRBJ2-5)
CASRLAVQETQYF

SEQ ID NO: 93457 - protein, 14 aa, Homo sapiens
  CDR3 for alpha chain variable domain of TCR clone 46729 (TRAV26-1, TRAJ49)
CIFRLTNTGNQFYF

SEQ ID NO: 93458 - protein, 13 aa, Homo sapiens
  CDR3 for beta chain variable domain of TCR clone 46729 (TRBV4-1, TRBJ2-7)
CASSQGQAYEQYF

SEQ ID NO: 93459 - protein, 15 aa, Homo sapiens
  CDR3 for alpha chain variable domain of TCR clone 46730 (TRAV21, TRAJ53)
CATLNSGGSNYKLTF

SEQ ID NO: 93460 - protein, 16 aa, Homo sapiens
  CDR3 for beta chain variable domain of TCR clone 46730 (TRBV7-3, TRBJ2-1)
CASSLEGYRSYNEQFF

SEQ ID NO: 93461 - protein, 13 aa, Homo sapiens
  CDR3 for alpha chain variable domain of TCR clone 46731 (TRAV26-1, TRAJ29)
CIVRRSGNTPLFF

SEQ ID NO: 93462 - protein, 16 aa, Homo sapiens
  CDR3 for beta chain variable domain of TCR clone 46731 (TRBV11-2, TRBJ2-7)
CASSLAPTGVNYEQYF

SEQ ID NO: 93463 - protein, 14 aa, Homo sapiens
  CDR3 for alpha chain variable domain of TCR clone 46732 (TRAV12-3, TRAJ33)
CAMSVPGSNYQLIW

SEQ ID NO: 93464 - protein, 12 aa, Homo sapiens
  CDR3 for beta chain variable domain of TCR clone 46732 (TRBV7-8, TRBJ2-7)
CASSLGDRGQYF

SEQ ID NO: 93465 - protein, 12 aa, Homo sapiens
  CDR3 for alpha chain variable domain of TCR clone 46733 (TRAV1-1, TRAJ8)
CAGGTGFQKLVF

SEQ ID NO: 93466 - protein, 14 aa, Homo sapiens
  CDR3 for beta chain variable domain of TCR clone 46733 (TRBV7-6, TRBJ2-3)
CASSLGTVTDTQYF

SEQ ID NO: 93467 - protein, 14 aa, Homo sapiens
  CDR3 for alpha chain variable domain of TCR clone 46734 (TRAV26-1, TRAJ39)
CIVRGSRAGNMLTF

SEQ ID NO: 93468 - protein, 15 aa, Homo sapiens
  CDR3 for beta chain variable domain of TCR clone 46734 (TRBV28, TRBJ2-5)
CASSLGQGSIETQYF

SEQ ID NO: 93469 - protein, 16 aa, Homo sapiens
  CDR3 for alpha chain variable domain of TCR clone 46735 (TRAV30, TRAJ24)
SGTEIVDADSWGKFQF

SEQ ID NO: 93470 - protein, 14 aa, Homo sapiens
  CDR3 for beta chain variable domain of TCR clone 46735 (TRBV12-5, TRBJ2-5)
CASGSRTHQETQYF

SEQ ID NO: 93471 - protein, 14 aa, Homo sapiens
  CDR3 for alpha chain variable domain of TCR clone 46736 (TRAV12-1, TRAJ16)
CAVNRFSDGQKLLF

SEQ ID NO: 93472 - protein, 15 aa, Homo sapiens
  CDR3 for beta chain variable domain of TCR clone 46736 (TRBV9, TRBJ1-6)
CASSVAGTGDSPLHF

SEQ ID NO: 93473 - protein, 20 aa, Homo sapiens
  CDR3 for alpha chain variable domain of TCR clone 46737 (TRAV1-2, TRAJ34)
LLKELQMKDSASPNTDKLIF

SEQ ID NO: 93474 - protein, 11 aa, Homo sapiens
  CDR3 for beta chain variable domain of TCR clone 46737 (TRBV29-1, TRBJ2-5)
CSEDRTGTQYF

SEQ ID NO: 93475 - protein, 13 aa, Homo sapiens
  CDR3 for alpha chain variable domain of TCR clone 46738 (TRAV26-2, TRAJ57)
CILSRGGSEKLVF

SEQ ID NO: 93476 - protein, 17 aa, Homo sapiens
  CDR3 for beta chain variable domain of TCR clone 46738 (TRBV11-2, TRBJ2-1)
CASSLYPPGVEYNEQFF

SEQ ID NO: 93477 - protein, 14 aa, Homo sapiens
  CDR3 for alpha chain variable domain of TCR clone 46739 (TRAV36/DV7, TRAJ13)
WGSGENGGYQKVTF

SEQ ID NO: 93478 - protein, 15 aa, Homo sapiens
  CDR3 for beta chain variable domain of TCR clone 46739 (TRBV19, TRBJ2-1)
CASSTGASSYNEQFF

SEQ ID NO: 93479 - protein, 14 aa, Homo sapiens
  CDR3 for alpha chain variable domain of TCR clone 46740 (TRAV1-2, TRAJ16)
CAVNRFSDGQKLLF

SEQ ID NO: 93480 - protein, 13 aa, Homo sapiens
  CDR3 for beta chain variable domain of TCR clone 46740 (TRBV10-3, TRBJ2-7)
CASKLAVKYEQYF

SEQ ID NO: 93481 - protein, 10 aa, Homo sapiens
  CDR3 for alpha chain variable domain of TCR clone 46741 (TRAV23/DV6, TRAJ31)
CARGGARLTF

SEQ ID NO: 93482 - protein, 14 aa, Homo sapiens
  CDR3 for beta chain variable domain of TCR clone 46741 (TRBV7-8, TRBJ1-2)
CASSPDSLSYGYTF

SEQ ID NO: 93483 - protein, 15 aa, Homo sapiens
  CDR3 for alpha chain variable domain of TCR clone 46742 (TRAV8-3, TRAJ45)
CASSYSGGGADGLTF

SEQ ID NO: 93484 - protein, 17 aa, Homo sapiens
  CDR3 for beta chain variable domain of TCR clone 46742 (TRBV7-8, TRBJ1-2)
CASSLRPLQGHLYGYSF

SEQ ID NO: 93485 - protein, 13 aa, Homo sapiens
  CDR3 for alpha chain variable domain of TCR clone 46743 (TRAV26-1, TRAJ31)
CIVRVDGNARLMF

SEQ ID NO: 93486 - protein, 17 aa, Homo sapiens
  CDR3 for beta chain variable domain of TCR clone 46743 (TRBV11-2, TRBJ2-1)
CASSLYPPGVEYNEQSF

SEQ ID NO: 93487 - protein, 15 aa, Homo sapiens
  CDR3 for alpha chain variable domain of TCR clone 46744 (TRAV26-1, TRAJ22)
CVVRVSFWFCKATDL

SEQ ID NO: 93488 - protein, 13 aa, Homo sapiens
  CDR3 for beta chain variable domain of TCR clone 46744 (TRBV7-9, TRBJ1-2)
CASSLEQNYGYTF

SEQ ID NO: 93489 - protein, 14 aa, Homo sapiens
  CDR3 for alpha chain variable domain of TCR clone 46745 (TRAV3, TRAJ21)
CAVRDAHDFNKFYF

SEQ ID NO: 93490 - protein, 15 aa, Homo sapiens
  CDR3 for beta chain variable domain of TCR clone 46745 (TRBV6-5, TRBJ1-5)
CASSYSWDSNQPQHF

SEQ ID NO: 93491 - protein, 17 aa, Homo sapiens
  CDR3 for alpha chain variable domain of TCR clone 46746 (TRAV13-1, TRAJ31)
CAPRDRLMFGDGTQLVV

SEQ ID NO: 93492 - protein, 15 aa, Homo sapiens
  CDR3 for beta chain variable domain of TCR clone 46746 (TRBV20-1, TRBJ2-1)
CSASSAGSSYNEQFF

SEQ ID NO: 93493 - protein, 18 aa, Homo sapiens
  CDR3 for alpha chain variable domain of TCR clone 46747 (TRAV29/DV5, TRAJ52)
CAAGFRGAGGTSYGKLTF

SEQ ID NO: 93494 - protein, 14 aa, Homo sapiens
  CDR3 for beta chain variable domain of TCR clone 46747 (TRBV7-2, TRBJ2-7)
CASRSQGAAYEQYF

SEQ ID NO: 93495 - protein, 13 aa, Homo sapiens
  CDR3 for alpha chain variable domain of TCR clone 46748 (TRAV8-1, TRAJ28)
CAVSGAGSYQLTS

SEQ ID NO: 93496 - protein, 14 aa, Homo sapiens
  CDR3 for beta chain variable domain of TCR clone 46748 (TRBV7-2, TRBJ2-2)
CASRGQGAAGELFF

SEQ ID NO: 93497 - protein, 16 aa, Homo sapiens
  CDR3 for alpha chain variable domain of TCR clone 46749 (TRAV3, TRAJ21)
CAVRDIERGNFNKFYF

SEQ ID NO: 93498 - protein, 13 aa, Homo sapiens
  CDR3 for beta chain variable domain of TCR clone 46749 (TRBV27, TRBJ2-7)
CASSLTTRYEQYF

SEQ ID NO: 93499 - protein, 14 aa, Homo sapiens
  CDR3 for alpha chain variable domain of TCR clone 46750 (TRAV30, TRAJ33)
CGTVAPRSNYRLIW

SEQ ID NO: 93500 - protein, 16 aa, Homo sapiens
  CDR3 for beta chain variable domain of TCR clone 46750 (TRBV3-1, TRBJ2-5)
CASSPGQFNGFGTQYF

SEQ ID NO: 93501 - protein, 18 aa, Homo sapiens
  CDR3 for alpha chain variable domain of TCR clone 46751 (TRAV13-1, TRAJ52)
CAASKRSAGGTSYGKLTF

SEQ ID NO: 93502 - protein, 15 aa, Homo sapiens
  CDR3 for beta chain variable domain of TCR clone 46751 (TRBV27, TRBJ2-1)
CASSNGGGSSNEQFF

SEQ ID NO: 93503 - protein, 15 aa, Homo sapiens
  CDR3 for alpha chain variable domain of TCR clone 46752 (TRAV26-1, TRAJ44)
CIVRIGTGTASKLTF

SEQ ID NO: 93504 - protein, 14 aa, Homo sapiens
  CDR3 for beta chain variable domain of TCR clone 46752 (TRBV7-8, TRBJ2-5)
CASSATGGQETQYF

SEQ ID NO: 93505 - protein, 19 aa, Homo sapiens
  CDR3 for alpha chain variable domain of TCR clone 46753 (TRAV26-1, TRAJ52)
CIVRAHRNAGGTSYGKLTF

SEQ ID NO: 93506 - protein, 14 aa, Homo sapiens
  CDR3 for beta chain variable domain of TCR clone 46753 (TRBV7-2, TRBJ2-7)
CASRSQGAAYEQYF

SEQ ID NO: 93507 - protein, 14 aa, Homo sapiens
  CDR3 for alpha chain variable domain of TCR clone 46754 (TRAV13-1, TRAJ9)
FAASALTGGFKTIF

SEQ ID NO: 93508 - protein, 13 aa, Homo sapiens
  CDR3 for beta chain variable domain of TCR clone 46754 (TRBV20-1, TRBJ1-1)
CSAGTVGNTEAFF

SEQ ID NO: 93509 - protein, 16 aa, Homo sapiens
  CDR3 for alpha chain variable domain of TCR clone 46755 (TRAV26-1, TRAJ23)
CIVRVHPYNQGGKLIF

SEQ ID NO: 93510 - protein, 13 aa, Homo sapiens
  CDR3 for beta chain variable domain of TCR clone 46755 (TRBV20-1, TRBJ2-5)
RSARGDYQETQYF

SEQ ID NO: 93511 - protein, 15 aa, Homo sapiens
  CDR3 for alpha chain variable domain of TCR clone 46756 (TRAV21, TRAJ45)
CAVSHSGGGADGLTF

SEQ ID NO: 93512 - protein, 13 aa, Homo sapiens
  CDR3 for beta chain variable domain of TCR clone 46756 (TRBV20-1, TRBJ2-5)
CSAATELQETQYF

SEQ ID NO: 93513 - protein, 13 aa, Homo sapiens
  CDR3 for alpha chain variable domain of TCR clone 46757 (TRAV12-2, TRAJ24)
RAVSTDSWGKLQF

SEQ ID NO: 93514 - protein, 14 aa, Homo sapiens
  CDR3 for beta chain variable domain of TCR clone 46757 (TRBV25-1, TRBJ1-1)
CASTHLGGNTEAFF

SEQ ID NO: 93515 - protein, 14 aa, Homo sapiens
  CDR3 for alpha chain variable domain of TCR clone 46758 (TRAV12-3, TRAJ10)
SHLPLTGGGNKLTF

SEQ ID NO: 93516 - protein, 14 aa, Homo sapiens
  CDR3 for beta chain variable domain of TCR clone 46758 (TRBV11-2, TRBJ2-7)
CASSLGAGAYEQYF

SEQ ID NO: 93517 - protein, 14 aa, Homo sapiens
  CDR3 for alpha chain variable domain of TCR clone 46759 (TRAV12-1, TRAJ43)
CVVNGRSNNNDMRF

SEQ ID NO: 93518 - protein, 12 aa, Homo sapiens
  CDR3 for beta chain variable domain of TCR clone 46759 (TRBV29-1, TRBJ2-3)
CGVTGGADTQYF

SEQ ID NO: 93519 - protein, 12 aa, Homo sapiens
  CDR3 for alpha chain variable domain of TCR clone 46760 (TRAV12-3, TRAJ17)
CAMTLTGNKLTF

SEQ ID NO: 93520 - protein, 14 aa, Homo sapiens
  CDR3 for beta chain variable domain of TCR clone 46760 (TRBV27, TRBJ2-3)
CATWTSGRPWGQYF

SEQ ID NO: 93521 - protein, 15 aa, Homo sapiens
  CDR3 for alpha chain variable domain of TCR clone 46761 (TRAV21, TRAJ53)
CATLNSGGSNYKLAF

SEQ ID NO: 93522 - protein, 17 aa, Homo sapiens
  CDR3 for beta chain variable domain of TCR clone 46761 (TRBV7-8, TRBJ2-6)
CASSAGTGGAGANVLTF

SEQ ID NO: 93523 - protein, 14 aa, Homo sapiens
  CDR3 for alpha chain variable domain of TCR clone 46762 (TRAV17, TRAJ20)
CATLSGSNDYKPSF

SEQ ID NO: 93524 - protein, 17 aa, Homo sapiens
  CDR3 for beta chain variable domain of TCR clone 46762 (TRBV5-1, TRBJ2-2)
CASSPRTGGMNTGELFF

SEQ ID NO: 93525 - protein, 14 aa, Homo sapiens
  CDR3 for alpha chain variable domain of TCR clone 46763 (TRAV17, TRAJ35)
CATDRPGFGNVLHC

SEQ ID NO: 93526 - protein, 17 aa, Homo sapiens
  CDR3 for beta chain variable domain of TCR clone 46763 (TRBV20-1, TRBJ1-5)
CSASLSPGQGGNQPQHF

SEQ ID NO: 93527 - protein, 13 aa, Homo sapiens
  CDR3 for alpha chain variable domain of TCR clone 46764 (TRAV17, TRAJ9)
CATDYTAGFKTIF

SEQ ID NO: 93528 - protein, 16 aa, Homo sapiens
  CDR3 for beta chain variable domain of TCR clone 46764 (TRBV7-7, TRBJ2-1)
CASSLASGTSYNEQFF

SEQ ID NO: 93529 - protein, 11 aa, Homo sapiens
  CDR3 for alpha chain variable domain of TCR clone 46765 (TRAV35, TRAJ49)
LDTNTGNQFYF

SEQ ID NO: 93530 - protein, 13 aa, Homo sapiens
  CDR3 for beta chain variable domain of TCR clone 46765 (TRBV6-3, TRBJ2-5)
CASSWAGEETQYF

SEQ ID NO: 93531 - protein, 14 aa, Homo sapiens
  CDR3 for alpha chain variable domain of TCR clone 46766 (TRAV20, TRAJ29)
CAVQAWVGNTPIVF

SEQ ID NO: 93532 - protein, 15 aa, Homo sapiens
  CDR3 for beta chain variable domain of TCR clone 46766 (TRBV29-1, TRBJ2-7)
CSVEFFDRGSYEQYF

SEQ ID NO: 93533 - protein, 17 aa, Homo sapiens
  CDR3 for alpha chain variable domain of TCR clone 46767 (TRAV23/DV6, TRAJ57)
CAASYTLSQGGSEKLVF

SEQ ID NO: 93534 - protein, 14 aa, Homo sapiens
  CDR3 for beta chain variable domain of TCR clone 46767 (TRBV25-1, TRBJ1-1)
CASTHLGGNTEAFF

SEQ ID NO: 93535 - protein, 15 aa, Homo sapiens
  CDR3 for alpha chain variable domain of TCR clone 46768 (TRAV8-3, TRAJ45)
CASSYSGGGADGLTF

SEQ ID NO: 93536 - protein, 13 aa, Homo sapiens
  CDR3 for beta chain variable domain of TCR clone 46768 (TRBV10-3, TRBJ2-7)
CASQLAVNYEQYF

SEQ ID NO: 93537 - protein, 14 aa, Homo sapiens
  CDR3 for alpha chain variable domain of TCR clone 46769 (TRAV12-3, TRAJ10)
SHLPLTGGGNKLTF

SEQ ID NO: 93538 - protein, 15 aa, Homo sapiens
  CDR3 for beta chain variable domain of TCR clone 46769 (TRBV29-1, TRBJ2-7)
CSVEFFGRGSYEQYF

SEQ ID NO: 93539 - protein, 14 aa, Homo sapiens
  CDR3 for alpha chain variable domain of TCR clone 46770 (TRAV13-2, TRAJ9)
CAENSFTGGFKTIF

SEQ ID NO: 93540 - protein, 13 aa, Homo sapiens
  CDR3 for beta chain variable domain of TCR clone 46770 (TRBV19, TRBJ2-7)
CASSIDRTYDQYF

SEQ ID NO: 93541 - protein, 12 aa, Homo sapiens
  CDR3 for alpha chain variable domain of TCR clone 46771 (TRAV40, TRAJ20)
CLRGLNDYKLSF

SEQ ID NO: 93542 - protein, 14 aa, Homo sapiens
  CDR3 for beta chain variable domain of TCR clone 46771 (TRBV19, TRBJ2-1)
CASSSGRDYDEQFF

SEQ ID NO: 93543 - protein, 13 aa, Homo sapiens
  CDR3 for alpha chain variable domain of TCR clone 46772 (TRAV8-3, TRAJ36)
CAVGATGANNLFF

SEQ ID NO: 93544 - protein, 15 aa, Homo sapiens
  CDR3 for beta chain variable domain of TCR clone 46772 (TRBV7-8, TRBJ2-1)
CASSLADSLYNEQFF

SEQ ID NO: 93545 - protein, 13 aa, Homo sapiens
  CDR3 for alpha chain variable domain of TCR clone 46773 (TRAV3, TRAJ27)
WAVRPLGAGKSTF

SEQ ID NO: 93546 - protein, 13 aa, Homo sapiens
  CDR3 for beta chain variable domain of TCR clone 46773 (TRBV7-9, TRBJ2-3)
CASSPGSTDTQYF

SEQ ID NO: 93547 - protein, 13 aa, Homo sapiens
  CDR3 for alpha chain variable domain of TCR clone 46774 (TRAV12-1, TRAJ42)
CGGAGGSQGNLIF

SEQ ID NO: 93548 - protein, 15 aa, Homo sapiens
  CDR3 for beta chain variable domain of TCR clone 46774 (TRBV5-4, TRBJ1-4)
CASSSFGTGNEKLFF

SEQ ID NO: 93549 - protein, 13 aa, Homo sapiens
  CDR3 for alpha chain variable domain of TCR clone 46775 (TRAV1-1, TRAJ9)
CAAKNTGGFKTIF

SEQ ID NO: 93550 - protein, 15 aa, Homo sapiens
  CDR3 for beta chain variable domain of TCR clone 46775 (TRBV20-1, TRBJ2-7)
CSAESVTIGAYEQYF

SEQ ID NO: 93551 - protein, 14 aa, Homo sapiens
  CDR3 for alpha chain variable domain of TCR clone 46776 (TRAV12-1, TRAJ16)
CVALPLSDGQKLPF

SEQ ID NO: 93552 - protein, 13 aa, Homo sapiens
  CDR3 for beta chain variable domain of TCR clone 46776 (TRBV27, TRBJ2-3)
CACRETSTDTQYF

SEQ ID NO: 93553 - protein, 13 aa, Homo sapiens
  CDR3 for alpha chain variable domain of TCR clone 46777 (TRAV2, TRAJ15)
CAMASQAGTALIF

SEQ ID NO: 93554 - protein, 16 aa, Homo sapiens
  CDR3 for beta chain variable domain of TCR clone 46777 (TRBV5-1, TRBJ1-1)
CASSSGGNSLNTEAFF

SEQ ID NO: 93555 - protein, 13 aa, Homo sapiens
  CDR3 for alpha chain variable domain of TCR clone 46778 (TRAV27, TRAJ45)
CRSSGGGADGLTF

SEQ ID NO: 93556 - protein, 12 aa, Homo sapiens
  CDR3 for beta chain variable domain of TCR clone 46778 (TRBV11-2, TRBJ2-1)
CASSPGNNEQFF

SEQ ID NO: 93557 - protein, 15 aa, Homo sapiens
  CDR3 for alpha chain variable domain of TCR clone 46779 (TRAV2, TRAJ13)
CAVEPEFWGLPESYL

SEQ ID NO: 93558 - protein, 14 aa, Homo sapiens
  CDR3 for beta chain variable domain of TCR clone 46779 (TRBV28, TRBJ1-5)
CVSSGQALYQPQHF

SEQ ID NO: 93559 - protein, 14 aa, Homo sapiens
  CDR3 for alpha chain variable domain of TCR clone 46780 (TRAV12-2, TRAJ11)
CAVEGGSGYSTLTF

SEQ ID NO: 93560 - protein, 11 aa, Homo sapiens
  CDR3 for beta chain variable domain of TCR clone 46780 (TRBV23-1, TRBJ2-7)
SSSGTGLEQYF

SEQ ID NO: 93561 - protein, 13 aa, Homo sapiens
  CDR3 for alpha chain variable domain of TCR clone 46781 (TRAV13-2, TRAJ13)
CAERPGGYQKVTF

SEQ ID NO: 93562 - protein, 15 aa, Homo sapiens
  CDR3 for beta chain variable domain of TCR clone 46781 (TRBV12-4, TRBJ2-3)
CASSLGLASTDTQYF

SEQ ID NO: 93563 - protein, 14 aa, Homo sapiens
  CDR3 for alpha chain variable domain of TCR clone 46782 (TRAV1-2, TRAJ16)
CAVNRFSDGQRLLF

SEQ ID NO: 93564 - protein, 17 aa, Homo sapiens
  CDR3 for beta chain variable domain of TCR clone 46782 (TRBV7-8, TRBJ2-6)
CASSAGTGGAGANVLTF

SEQ ID NO: 93565 - protein, 12 aa, Homo sapiens
  CDR3 for alpha chain variable domain of TCR clone 46783 (TRAV1-1, TRAJ9)
CAVDTGGSKTIF

SEQ ID NO: 93566 - protein, 14 aa, Homo sapiens
  CDR3 for beta chain variable domain of TCR clone 46783 (TRBV7-8, TRBJ2-5)
CASSATGGQETQYF

SEQ ID NO: 93567 - protein, 18 aa, Homo sapiens
  CDR3 for alpha chain variable domain of TCR clone 46784 (TRAV13-2, TRAJ52)
RAETPLNAGGTSYGKLTF

SEQ ID NO: 93568 - protein, 15 aa, Homo sapiens
  CDR3 for beta chain variable domain of TCR clone 46784 (TRBV7-2, TRBJ2-7)
CASSLKGALTYEQYF

SEQ ID NO: 93569 - protein, 19 aa, Homo sapiens
  CDR3 for alpha chain variable domain of TCR clone 46785 (TRAV3, TRAJ6)
CAVRDRNPSRSGGSYIPIF

SEQ ID NO: 93570 - protein, 15 aa, Homo sapiens
  CDR3 for beta chain variable domain of TCR clone 46785 (TRBV18, TRBJ2-7)
CASSPTFMDSYEQYF

SEQ ID NO: 93571 - protein, 20 aa, Homo sapiens
  CDR3 for alpha chain variable domain of TCR clone 46786 (TRAV12-1, TRAJ40)
SSVIQPPTSVKGGSQGNLIF

SEQ ID NO: 93572 - protein, 18 aa, Homo sapiens
  CDR3 for beta chain variable domain of TCR clone 46786 (TRBV11-2, TRBJ2-3)
CASSLGGASRGAPNTQYF

SEQ ID NO: 93573 - protein, 17 aa, Homo sapiens
  CDR3 for alpha chain variable domain of TCR clone 46787 (TRAV26-2, TRAJ42)
CILRDVGYGGSQGTLIF

SEQ ID NO: 93574 - protein, 16 aa, Homo sapiens
  CDR3 for beta chain variable domain of TCR clone 46787 (TRBV12-4, TRBJ2-7)
CASSLIGGTGTYEQYF

SEQ ID NO: 93575 - protein, 15 aa, Homo sapiens
  CDR3 for alpha chain variable domain of TCR clone 46788 (TRAV3, TRAJ9)
CAVRVRNTGGFKTIF

SEQ ID NO: 93576 - protein, 12 aa, Homo sapiens
  CDR3 for beta chain variable domain of TCR clone 46788 (TRBV11-2, TRBJ2-7)
CASSLPTYEQYF

SEQ ID NO: 93577 - protein, 13 aa, Homo sapiens
  CDR3 for alpha chain variable domain of TCR clone 46789 (TRAV36/DV7, TRAJ7)
CAGTRYGNNRLAF

SEQ ID NO: 93578 - protein, 14 aa, Homo sapiens
  CDR3 for beta chain variable domain of TCR clone 46789 (TRBV19, TRBJ2-1)
CASSTFVLSGEQFF

SEQ ID NO: 93579 - protein, 11 aa, Homo sapiens
  CDR3 for alpha chain variable domain of TCR clone 46790 (TRAV12-3, TRAJ27)
CAMANAGKSAF

SEQ ID NO: 93580 - protein, 13 aa, Homo sapiens
  CDR3 for beta chain variable domain of TCR clone 46790 (TRBV20-1, TRBJ1-1)
CSARVGGNTEAFF

SEQ ID NO: 93581 - protein, 10 aa, Homo sapiens
  CDR3 for alpha chain variable domain of TCR clone 46791 (TRAV26-1, TRAJ40)
CIAGTYKNIF

SEQ ID NO: 93582 - protein, 15 aa, Homo sapiens
  CDR3 for beta chain variable domain of TCR clone 46791 (TRBV19, TRBJ2-1)
CASSSPGVPLDEQFF

SEQ ID NO: 93583 - protein, 12 aa, Homo sapiens
  CDR3 for alpha chain variable domain of TCR clone 46792 (TRAV26-2, TRAJ21)
CILKGTFNKFYF

SEQ ID NO: 93584 - protein, 14 aa, Homo sapiens
  CDR3 for beta chain variable domain of TCR clone 46792 (TRBV7-9, TRBJ1-1)
CASTPLQSYTEAFF

SEQ ID NO: 93585 - protein, 17 aa, Homo sapiens
  CDR3 for alpha chain variable domain of TCR clone 46793 (TRAV12-3, TRAJ26)
CAMSGGRWDNYGQNFVF

SEQ ID NO: 93586 - protein, 15 aa, Homo sapiens
  CDR3 for beta chain variable domain of TCR clone 46793 (TRBV5-1, TRBJ1-2)
CASSLAGGFNYGYTF

SEQ ID NO: 93587 - protein, 14 aa, Homo sapiens
  CDR3 for alpha chain variable domain of TCR clone 46794 (TRAV16, TRAJ15)
CALGGPQAGTALIF

SEQ ID NO: 93588 - protein, 12 aa, Homo sapiens
  CDR3 for beta chain variable domain of TCR clone 46794 (TRBV18, TRBJ2-5)
CASSPSKETQYF

SEQ ID NO: 93589 - protein, 15 aa, Homo sapiens
  CDR3 for alpha chain variable domain of TCR clone 46795 (TRAV2, TRAJ15)
CAVEDRNQAGTALIL

SEQ ID NO: 93590 - protein, 13 aa, Homo sapiens
  CDR3 for beta chain variable domain of TCR clone 46795 (TRBV10-2, TRBJ2-1)
CASGASGDAKQFF

SEQ ID NO: 93591 - protein, 15 aa, Homo sapiens
  CDR3 for alpha chain variable domain of TCR clone 46796 (TRAV27, TRAJ38)
CAARRNAGNNRKLIW

SEQ ID NO: 93592 - protein, 13 aa, Homo sapiens
  CDR3 for beta chain variable domain of TCR clone 46796 (TRBV12-5, TRBJ2-3)
CASGARQSDTQYF

SEQ ID NO: 93593 - protein, 14 aa, Homo sapiens
  CDR3 for alpha chain variable domain of TCR clone 46797 (TRAV1-2, TRAJ8)
CAVREDTGFQKLVF

SEQ ID NO: 93594 - protein, 15 aa, Homo sapiens
  CDR3 for beta chain variable domain of TCR clone 46797 (TRBV7-9, TRBJ2-7)
CASSLALAEAYEQYF

SEQ ID NO: 93595 - protein, 15 aa, Homo sapiens
  CDR3 for alpha chain variable domain of TCR clone 46798 (TRAV4, TRAJ10)
CLVVREGGGGNKLTF

SEQ ID NO: 93596 - protein, 15 aa, Homo sapiens
  CDR3 for beta chain variable domain of TCR clone 46798 (TRBV19, TRBJ2-7)
CASSPAGSGEALRYF

SEQ ID NO: 93597 - protein, 12 aa, Homo sapiens
  CDR3 for alpha chain variable domain of TCR clone 46799 (TRAV13-1, TRAJ21)
CAAKEDFNKFYF

SEQ ID NO: 93598 - protein, 18 aa, Homo sapiens
  CDR3 for beta chain variable domain of TCR clone 46799 (TRBV20-1, TRBJ2-6)
CSAETTPTHGSGANVLTF

SEQ ID NO: 93599 - protein, 13 aa, Homo sapiens
  CDR3 for alpha chain variable domain of TCR clone 46800 (TRAV21, TRAJ10)
CAVPTGGGNKLTF

SEQ ID NO: 93600 - protein, 14 aa, Homo sapiens
  CDR3 for beta chain variable domain of TCR clone 46800 (TRBV7-3, TRBJ2-1)
CASSLTGGANEQFF

SEQ ID NO: 93601 - protein, 15 aa, Homo sapiens
  CDR3 for alpha chain variable domain of TCR clone 46801 (TRAV21, TRAJ24)
CAARSSTDSWGQLQF

SEQ ID NO: 93602 - protein, 14 aa, Homo sapiens
  CDR3 for beta chain variable domain of TCR clone 46801 (TRBV11-2, TRBJ2-5)
CASSRTGGIETQYF

SEQ ID NO: 93603 - protein, 14 aa, Homo sapiens
  CDR3 for alpha chain variable domain of TCR clone 46802 (TRAV17, TRAJ31)
CATVLRNNNARLMF

SEQ ID NO: 93604 - protein, 14 aa, Homo sapiens
  CDR3 for beta chain variable domain of TCR clone 46802 (TRBV12-4, TRBJ2-5)
RASSLWQKQETQYF

SEQ ID NO: 93605 - protein, 13 aa, Homo sapiens
  CDR3 for alpha chain variable domain of TCR clone 46803 (TRAV21, TRAJ37)
SVPRASNTGKLIF

SEQ ID NO: 93606 - protein, 13 aa, Homo sapiens
  CDR3 for beta chain variable domain of TCR clone 46803 (TRBV7-9, TRBJ2-5)
CASLPSGRETQYF

SEQ ID NO: 93607 - protein, 12 aa, Homo sapiens
  CDR3 for alpha chain variable domain of TCR clone 46804 (TRAV17, TRAJ39)
CATGAAGKMLTF

SEQ ID NO: 93608 - protein, 14 aa, Homo sapiens
  CDR3 for beta chain variable domain of TCR clone 46804 (TRBV7-9, TRBJ1-2)
CASSRQGANYGYTF

SEQ ID NO: 93609 - protein, 12 aa, Homo sapiens
  CDR3 for alpha chain variable domain of TCR clone 46805 (TRAV12-3, TRAJ21)
CAMFNNFNKFYF

SEQ ID NO: 93610 - protein, 16 aa, Homo sapiens
  CDR3 for beta chain variable domain of TCR clone 46805 (TRBV7-9, TRBJ1-2)
CASSLAPLRAAHGYTF

SEQ ID NO: 93611 - protein, 13 aa, Homo sapiens
  CDR3 for alpha chain variable domain of TCR clone 46806 (TRAV13-1, TRAJ40)
CAARTSGTYKYIF

SEQ ID NO: 93612 - protein, 15 aa, Homo sapiens
  CDR3 for beta chain variable domain of TCR clone 46806 (TRBV12-4, TRBJ2-5)
CASSPPTGLQETQYF

SEQ ID NO: 93613 - protein, 15 aa, Homo sapiens
  CDR3 for alpha chain variable domain of TCR clone 46807 (TRAV12-3, TRAJ6)
CAMSATTGGSYIPTF

SEQ ID NO: 93614 - protein, 14 aa, Homo sapiens
  CDR3 for beta chain variable domain of TCR clone 46807 (TRBV20-1, TRBJ1-1)
CSAQTRIGGTEAFF

SEQ ID NO: 93615 - protein, 14 aa, Homo sapiens
  CDR3 for alpha chain variable domain of TCR clone 46808 (TRAV16, TRAJ3)
CALSQYSSASKIIF

SEQ ID NO: 93616 - protein, 14 aa, Homo sapiens
  CDR3 for beta chain variable domain of TCR clone 46808 (TRBV6-3, TRBJ2-1)
CASLHSAYYNERFF

SEQ ID NO: 93617 - protein, 16 aa, Homo sapiens
  CDR3 for alpha chain variable domain of TCR clone 46809 (TRAV8-4, TRAJ5)
CAVSPLMDTGRRALTF

SEQ ID NO: 93618 - protein, 14 aa, Homo sapiens
  CDR3 for beta chain variable domain of TCR clone 46809 (TRBV19, TRBJ1-6)
CASSTDGWNSPLHF

SEQ ID NO: 93619 - protein, 14 aa, Homo sapiens
  CDR3 for alpha chain variable domain of TCR clone 46810 (TRAV27, TRAJ22)
CAGLPSGSARQLTF

SEQ ID NO: 93620 - protein, 13 aa, Homo sapiens
  CDR3 for beta chain variable domain of TCR clone 46810 (TRBV20-1, TRBJ1-1)
CSAKGGGNTEAFF

SEQ ID NO: 93621 - protein, 14 aa, Homo sapiens
  CDR3 for alpha chain variable domain of TCR clone 46811 (TRAV12-1, TRAJ12)
CVVTRMNSSYKLIF

SEQ ID NO: 93622 - protein, 13 aa, Homo sapiens
  CDR3 for beta chain variable domain of TCR clone 46811 (TRBV20-1, TRBJ1-1)
CSARGGGNTETFF

SEQ ID NO: 93623 - protein, 13 aa, Homo sapiens
  CDR3 for alpha chain variable domain of TCR clone 46812 (TRAV2, TRAJ40)
CAVVTSGTYKYIF

SEQ ID NO: 93624 - protein, 16 aa, Homo sapiens
  CDR3 for beta chain variable domain of TCR clone 46812 (TRBV29-1, TRBJ1-2)
CGVEANRDIANYGYTF

SEQ ID NO: 93625 - protein, 14 aa, Homo sapiens
  CDR3 for alpha chain variable domain of TCR clone 46813 (TRAV12-3, TRAJ10)
SHLPLTGGGNKLTF

SEQ ID NO: 93626 - protein, 16 aa, Homo sapiens
  CDR3 for beta chain variable domain of TCR clone 46813 (TRBV19, TRBJ2-1)
RASSKAGPSSYNEQFF

SEQ ID NO: 93627 - protein, 13 aa, Homo sapiens
  CDR3 for alpha chain variable domain of TCR clone 46814 (TRAV36/DV7, TRAJ54)
CAVDIQGAQKLVF

SEQ ID NO: 93628 - protein, 14 aa, Homo sapiens
  CDR3 for beta chain variable domain of TCR clone 46814 (TRBV19, TRBJ2-1)
CASPTFVLSGEQSF

SEQ ID NO: 93629 - protein, 14 aa, Homo sapiens
  CDR3 for alpha chain variable domain of TCR clone 46815 (TRAV35, TRAJ33)
CAGSSQDSNYQLFW

SEQ ID NO: 93630 - protein, 15 aa, Homo sapiens
  CDR3 for beta chain variable domain of TCR clone 46815 (TRBV20-1, TRBJ2-7)
CSAESGTSGAYEQYF

SEQ ID NO: 93631 - protein, 11 aa, Homo sapiens
  CDR3 for alpha chain variable domain of TCR clone 46816 (TRAV35, TRAJ34)
CWARNTDKLIF

SEQ ID NO: 93632 - protein, 14 aa, Homo sapiens
  CDR3 for beta chain variable domain of TCR clone 46816 (TRBV13, TRBJ2-5)
CASSLGTAQETQYF

SEQ ID NO: 93633 - protein, 11 aa, Homo sapiens
  CDR3 for alpha chain variable domain of TCR clone 46817 (TRAV13-1, TRAJ40)
CAVSGTYKYIF

SEQ ID NO: 93634 - protein, 12 aa, Homo sapiens
  CDR3 for beta chain variable domain of TCR clone 46817 (TRBV7-8, TRBJ2-7)
CASSLGDREQYF

SEQ ID NO: 93635 - protein, 15 aa, Homo sapiens
  CDR3 for alpha chain variable domain of TCR clone 46818 (TRAV26-1, TRAJ23)
RIVRVAGYQGGKLIF

SEQ ID NO: 93636 - protein, 18 aa, Homo sapiens
  CDR3 for beta chain variable domain of TCR clone 46818 (TRBV28, TRBJ2-1)
CASSSTSGRANSYNEQFF

SEQ ID NO: 93637 - protein, 14 aa, Homo sapiens
  CDR3 for alpha chain variable domain of TCR clone 46819 (TRAV12-2, TRAJ13)
CAVKKTGGYQKVTF

SEQ ID NO: 93638 - protein, 15 aa, Homo sapiens
  CDR3 for beta chain variable domain of TCR clone 46819 (TRBV2, TRBJ2-2)
CASSRETVGTGELFF

SEQ ID NO: 93639 - protein, 13 aa, Homo sapiens
  CDR3 for alpha chain variable domain of TCR clone 46820 (TRAV38-2/DV8, TRAJ34)
CAYRNYNTDKLIF

SEQ ID NO: 93640 - protein, 15 aa, Homo sapiens
  CDR3 for beta chain variable domain of TCR clone 46820 (TRBV20-1, TRBJ2-5)
CSAEGIGGLQETQYF

SEQ ID NO: 93641 - protein, 15 aa, Homo sapiens
  CDR3 for alpha chain variable domain of TCR clone 46821 (TRAV12-1, TRAJ44)
CVVDEYTGTASKLTF

SEQ ID NO: 93642 - protein, 14 aa, Homo sapiens
  CDR3 for beta chain variable domain of TCR clone 46821 (TRBV5-1, TRBJ1-2)
CASSLEPVSYGYTF

SEQ ID NO: 93643 - protein, 13 aa, Homo sapiens
  CDR3 for alpha chain variable domain of TCR clone 46822 (TRAV12-1, TRAJ9)
CVVLNTGGFKTIF

SEQ ID NO: 93644 - protein, 13 aa, Homo sapiens
  CDR3 for beta chain variable domain of TCR clone 46822 (TRBV20-1, TRBJ1-1)
CSARGGGNNEAFF

SEQ ID NO: 93645 - protein, 11 aa, Homo sapiens
  CDR3 for alpha chain variable domain of TCR clone 46823 (TRAV12-3, TRAJ41)
CAMNAREALNF

SEQ ID NO: 93646 - protein, 16 aa, Homo sapiens
  CDR3 for beta chain variable domain of TCR clone 46823 (TRBV7-8, TRBJ2-3)
CACSTEGQRETDTQYF

SEQ ID NO: 93647 - protein, 16 aa, Homo sapiens
  CDR3 for alpha chain variable domain of TCR clone 46824 (TRAV12-3, TRAJ53)
CAMSPGSGGSNYKLTF

SEQ ID NO: 93648 - protein, 12 aa, Homo sapiens
  CDR3 for beta chain variable domain of TCR clone 46824 (TRBV28, TRBJ2-3)
CASSLYRDTQYF

SEQ ID NO: 93649 - protein, 17 aa, Homo sapiens
  CDR3 for alpha chain variable domain of TCR clone 46825 (TRAV3, TRAJ6)
SAVSRRTDTGGSYIPTF

SEQ ID NO: 93650 - protein, 18 aa, Homo sapiens
  CDR3 for beta chain variable domain of TCR clone 46825 (TRBV7-2, TRBJ2-3)
CASSLETSRGRKADTQYF

SEQ ID NO: 93651 - protein, 15 aa, Homo sapiens
  CDR3 for alpha chain variable domain of TCR clone 46826 (TRAV38-1, TRAJ37)
CAFIFGTGNTGKLIF

SEQ ID NO: 93652 - protein, 12 aa, Homo sapiens
  CDR3 for beta chain variable domain of TCR clone 46826 (TRBV7-9, TRBJ2-7)
CASSLEGYEQYF

SEQ ID NO: 93653 - protein, 14 aa, Homo sapiens
  CDR3 for alpha chain variable domain of TCR clone 46827 (TRAV17, TRAJ34)
CATDSLEGTDKLIF

SEQ ID NO: 93654 - protein, 15 aa, Homo sapiens
  CDR3 for beta chain variable domain of TCR clone 46827 (TRBV19, TRBJ1-1)
CASTSGQIQNTEAFF

SEQ ID NO: 93655 - protein, 14 aa, Homo sapiens
  CDR3 for alpha chain variable domain of TCR clone 46828 (TRAV23/DV6, TRAJ8)
CAASKATGFQKLGF

SEQ ID NO: 93656 - protein, 15 aa, Homo sapiens
  CDR3 for beta chain variable domain of TCR clone 46828 (TRBV28, TRBJ2-3)
CASSPDRQGANTQYF

SEQ ID NO: 93657 - protein, 13 aa, Homo sapiens
  CDR3 for alpha chain variable domain of TCR clone 46829 (TRAV14/DV4, TRAJ20)
CAMRESNDYKLSF

SEQ ID NO: 93658 - protein, 15 aa, Homo sapiens
  CDR3 for beta chain variable domain of TCR clone 46829 (TRBV7-9, TRBJ1-1)
CASSRPGTANTEAFY

SEQ ID NO: 93659 - protein, 12 aa, Homo sapiens
  CDR3 for alpha chain variable domain of TCR clone 46830 (TRAV21, TRAJ23)
CAVGPQGGKLIF

SEQ ID NO: 93660 - protein, 14 aa, Homo sapiens
  CDR3 for beta chain variable domain of TCR clone 46830 (TRBV19, TRBJ2-3)
CASSAPRGTDTQYF

SEQ ID NO: 93661 - protein, 15 aa, Homo sapiens
  CDR3 for alpha chain variable domain of TCR clone 46831 (TRAV12-2, TRAJ53)
CAVNWGGGSNYKLTF

SEQ ID NO: 93662 - protein, 17 aa, Homo sapiens
  CDR3 for beta chain variable domain of TCR clone 46831 (TRBV7-3, TRBJ2-3)
CASSLMKRMRGADTQYF

SEQ ID NO: 93663 - protein, 14 aa, Homo sapiens
  CDR3 for alpha chain variable domain of TCR clone 46832 (TRAV3, TRAJ21)
CAVESQANFNKFYF

SEQ ID NO: 93664 - protein, 16 aa, Homo sapiens
  CDR3 for beta chain variable domain of TCR clone 46832 (TRBV19, TRBJ2-1)
CASSKAGPSSYNEQFF

SEQ ID NO: 93665 - protein, 14 aa, Homo sapiens
  CDR3 for alpha chain variable domain of TCR clone 46833 (TRAV12-2, TRAJ13)
CAVKKKGGYQKVTF

SEQ ID NO: 93666 - protein, 15 aa, Homo sapiens
  CDR3 for beta chain variable domain of TCR clone 46833 (TRBV27, TRBJ2-1)
CASSNGGGSSNEQFF

SEQ ID NO: 93667 - protein, 12 aa, Homo sapiens
  CDR3 for alpha chain variable domain of TCR clone 46834 (TRAV13-2, TRAJ8)
CAPWLGFQKLVF

SEQ ID NO: 93668 - protein, 12 aa, Homo sapiens
  CDR3 for beta chain variable domain of TCR clone 46834 (TRBV7-9, TRBJ2-7)
CASSLEGYEQYF

SEQ ID NO: 93669 - protein, 14 aa, Homo sapiens
  CDR3 for alpha chain variable domain of TCR clone 46835 (TRAV38-1, TRAJ40)
CALRPTSGTYKYIY

SEQ ID NO: 93670 - protein, 14 aa, Homo sapiens
  CDR3 for beta chain variable domain of TCR clone 46835 (TRBV25-1, TRBJ1-1)
CASTHLGGNTEAFF

SEQ ID NO: 93671 - protein, 12 aa, Homo sapiens
  CDR3 for alpha chain variable domain of TCR clone 46836 (TRAV29/DV5, TRAJ43)
CAAPYSNNDMRF

SEQ ID NO: 93672 - protein, 17 aa, Homo sapiens
  CDR3 for beta chain variable domain of TCR clone 46836 (TRBV19, TRBJ2-6)
CASSTGQVFSGANVLTF

SEQ ID NO: 93673 - protein, 14 aa, Homo sapiens
  CDR3 for alpha chain variable domain of TCR clone 46837 (TRAV35, TRAJ22)
CAGLRPGSARQPTF

SEQ ID NO: 93674 - protein, 13 aa, Homo sapiens
  CDR3 for beta chain variable domain of TCR clone 46837 (TRBV20-1, TRBJ2-7)
CSATHTSGYEQYF

SEQ ID NO: 93675 - protein, 15 aa, Homo sapiens
  CDR3 for alpha chain variable domain of TCR clone 46838 (TRAV13-1, TRAJ5)
CAVYIRDTGRRALTF

SEQ ID NO: 93676 - protein, 16 aa, Homo sapiens
  CDR3 for beta chain variable domain of TCR clone 46838 (TRBV12-4, TRBJ2-1)
CASTEQGMDRSNEQFL

SEQ ID NO: 93677 - protein, 14 aa, Homo sapiens
  CDR3 for alpha chain variable domain of TCR clone 46839 (TRAV1-2, TRAJ15)
CAVRDRQAGTALIF

SEQ ID NO: 93678 - protein, 15 aa, Homo sapiens
  CDR3 for beta chain variable domain of TCR clone 46839 (TRBV19, TRBJ1-1)
CASTSGQIQNTEAFF

SEQ ID NO: 93679 - protein, 12 aa, Homo sapiens
  CDR3 for alpha chain variable domain of TCR clone 46840 (TRAV12-1, TRAJ40)
CVVYSGTYKYIF

SEQ ID NO: 93680 - protein, 15 aa, Homo sapiens
  CDR3 for beta chain variable domain of TCR clone 46840 (TRBV18, TRBJ2-1)
CASSPPSASYNEQFF

SEQ ID NO: 93681 - protein, 16 aa, Homo sapiens
  CDR3 for alpha chain variable domain of TCR clone 46841 (TRAV23/DV6, TRAJ12)
CAAIDLGAMDSSYKLI

SEQ ID NO: 93682 - protein, 15 aa, Homo sapiens
  CDR3 for beta chain variable domain of TCR clone 46841 (TRBV12-4, TRBJ2-5)
CASTLNSGRGETQYF

SEQ ID NO: 93683 - protein, 15 aa, Homo sapiens
  CDR3 for alpha chain variable domain of TCR clone 46842 (TRAV3, TRAJ29)
CAVRGLYSGNTPLVF

SEQ ID NO: 93684 - protein, 17 aa, Homo sapiens
  CDR3 for beta chain variable domain of TCR clone 46842 (TRBV20-1, TRBJ2-1)
CSARDPLAGVWDNEQFF

SEQ ID NO: 93685 - protein, 11 aa, Homo sapiens
  CDR3 for alpha chain variable domain of TCR clone 46843 (TRAV13-1, TRAJ39)
CASHAGNLLTF

SEQ ID NO: 93686 - protein, 14 aa, Homo sapiens
  CDR3 for beta chain variable domain of TCR clone 46843 (TRBV11-2, TRBJ1-5)
CASSLDRGRQPQHF

SEQ ID NO: 93687 - protein, 14 aa, Homo sapiens
  CDR3 for alpha chain variable domain of TCR clone 46844 (TRAV23/DV6, TRAJ8)
CAASKNTGFQKLVF

SEQ ID NO: 93688 - protein, 16 aa, Homo sapiens
  CDR3 for beta chain variable domain of TCR clone 46844 (TRBV4-1, TRBJ2-6)
CASSQVGGPEANVLTF

SEQ ID NO: 93689 - protein, 16 aa, Homo sapiens
  CDR3 for alpha chain variable domain of TCR clone 46845 (TRAV30, TRAJ24)
CGTEIVDADSWGKFQF

SEQ ID NO: 93690 - protein, 16 aa, Homo sapiens
  CDR3 for beta chain variable domain of TCR clone 46845 (TRBV19, TRBJ1-1)
CASRSPSWARNTEAFF

SEQ ID NO: 93691 - protein, 14 aa, Homo sapiens
  CDR3 for alpha chain variable domain of TCR clone 46846 (TRAV17, TRAJ32)
CATDPGGATNKLIF

SEQ ID NO: 93692 - protein, 13 aa, Homo sapiens
  CDR3 for beta chain variable domain of TCR clone 46846 (TRBV2, TRBJ1-5)
CSSENRGGQPQHF

SEQ ID NO: 93693 - protein, 14 aa, Homo sapiens
  CDR3 for alpha chain variable domain of TCR clone 46847 (TRAV12-3, TRAJ10)
SHLPLTGGGNKLTF

SEQ ID NO: 93694 - protein, 18 aa, Homo sapiens
  CDR3 for beta chain variable domain of TCR clone 46847 (TRBV7-3, TRBJ2-3)
CASSSTGTYPGSTDTQYF

SEQ ID NO: 93695 - protein, 13 aa, Homo sapiens
  CDR3 for alpha chain variable domain of TCR clone 46848 (TRAV13-2, TRAJ53)
CAENMGSNYKLTF

SEQ ID NO: 93696 - protein, 13 aa, Homo sapiens
  CDR3 for beta chain variable domain of TCR clone 46848 (TRBV4-1, TRBJ2-2)
CASSQENTGGLFF

SEQ ID NO: 93697 - protein, 14 aa, Homo sapiens
  CDR3 for alpha chain variable domain of TCR clone 46849 (TRAV12-2, TRAJ44)
CAVNPAGTASKLTF

SEQ ID NO: 93698 - protein, 16 aa, Homo sapiens
  CDR3 for beta chain variable domain of TCR clone 46849 (TRBV7-3, TRBJ2-2)
CASSLKRGTLSGELFF

SEQ ID NO: 93699 - protein, 14 aa, Homo sapiens
  CDR3 for alpha chain variable domain of TCR clone 46850 (TRAV26-1, TRAJ16)
CIAVPFSDGQKLLF

SEQ ID NO: 93700 - protein, 11 aa, Homo sapiens
  CDR3 for beta chain variable domain of TCR clone 46850 (TRBV4-2, TRBJ2-1)
CQVSAKNEQFF

SEQ ID NO: 93701 - protein, 14 aa, Homo sapiens
  CDR3 for alpha chain variable domain of TCR clone 46851 (TRAV8-4, TRAJ4)
CAVSPLGGYNKLIF

SEQ ID NO: 93702 - protein, 15 aa, Homo sapiens
  CDR3 for beta chain variable domain of TCR clone 46851 (TRBV19, TRBJ2-7)
CASSPAGSGEALRYF

SEQ ID NO: 93703 - protein, 11 aa, Homo sapiens
  CDR3 for alpha chain variable domain of TCR clone 46852 (TRAV12-2, TRAJ33)
CAVTSNYQLIW

SEQ ID NO: 93704 - protein, 14 aa, Homo sapiens
  CDR3 for beta chain variable domain of TCR clone 46852 (TRBV12-4, TRBJ2-2)
CASNQGANTGELFC

SEQ ID NO: 93705 - protein, 16 aa, Homo sapiens
  CDR3 for alpha chain variable domain of TCR clone 46853 (TRAV30, TRAJ24)
CGTEIVDADSWGKFQF

SEQ ID NO: 93706 - protein, 18 aa, Homo sapiens
  CDR3 for beta chain variable domain of TCR clone 46853 (TRBV25-1, TRBJ1-2)
CASSGLQNGQGLIFGYTF

SEQ ID NO: 93707 - protein, 20 aa, Homo sapiens
  CDR3 for alpha chain variable domain of TCR clone 46854 (TRAV12-3, TRAJ41)
SLFIRDSQPSDSATPEALNF

SEQ ID NO: 93708 - protein, 14 aa, Homo sapiens
  CDR3 for beta chain variable domain of TCR clone 46854 (TRBV7-9, TRBJ2-5)
CASSLDTAQETQYF

SEQ ID NO: 93709 - protein, 14 aa, Homo sapiens
  CDR3 for alpha chain variable domain of TCR clone 46855 (TRAV1-2, TRAJ8)
CAVREDTGFQKLVF

SEQ ID NO: 93710 - protein, 13 aa, Homo sapiens
  CDR3 for beta chain variable domain of TCR clone 46855 (TRBV20-1, TRBJ1-4)
CSARTPYNEKLFS

SEQ ID NO: 93711 - protein, 11 aa, Homo sapiens
  CDR3 for alpha chain variable domain of TCR clone 46856 (TRAV3, TRAJ21)
FAVGNFNKFYF

SEQ ID NO: 93712 - protein, 14 aa, Homo sapiens
  CDR3 for beta chain variable domain of TCR clone 46856 (TRBV29-1, TRBJ2-2)
CSGRGSGNTGELFF

SEQ ID NO: 93713 - protein, 13 aa, Homo sapiens
  CDR3 for alpha chain variable domain of TCR clone 46857 (TRAV21, TRAJ20)
CAVGLRVDYKLSF

SEQ ID NO: 93714 - protein, 19 aa, Homo sapiens
  CDR3 for beta chain variable domain of TCR clone 46857 (TRBV19, TRBJ2-5)
CASSIGQVTDFFLGETQYF

SEQ ID NO: 93715 - protein, 13 aa, Homo sapiens
  CDR3 for alpha chain variable domain of TCR clone 46858 (TRAV12-3, TRAJ33)
CAMSVNSNYQLVW

SEQ ID NO: 93716 - protein, 16 aa, Homo sapiens
  CDR3 for beta chain variable domain of TCR clone 46858 (TRBV13, TRBJ2-5)
CASSLRTGGSWETQYF

SEQ ID NO: 93717 - protein, 21 aa, Homo sapiens
  CDR3 for alpha chain variable domain of TCR clone 46859 (TRAV1-1, TRAJ6)
CLLLLRCERLERTGGSYIPTF

SEQ ID NO: 93718 - protein, 18 aa, Homo sapiens
  CDR3 for beta chain variable domain of TCR clone 46859 (TRBV25-1, TRBJ1-2)
CASSGLQNGQGLIFGYTF

SEQ ID NO: 93719 - protein, 10 aa, Homo sapiens
  CDR3 for alpha chain variable domain of TCR clone 46860 (TRAV23/DV6, TRAJ31)
CARGGARLMF

SEQ ID NO: 93720 - protein, 14 aa, Homo sapiens
  CDR3 for beta chain variable domain of TCR clone 46860 (TRBV7-8, TRBJ1-2)
CASSPDSLSYSYTF

SEQ ID NO: 93721 - protein, 13 aa, Homo sapiens
  CDR3 for alpha chain variable domain of TCR clone 46861 (TRAV21, TRAJ20)
CAVGLMVDYKLSF

SEQ ID NO: 93722 - protein, 13 aa, Homo sapiens
  CDR3 for beta chain variable domain of TCR clone 46861 (TRBV6-1, TRBJ1-1)
CASSRQGNTEAFF

SEQ ID NO: 93723 - protein, 14 aa, Homo sapiens
  CDR3 for alpha chain variable domain of TCR clone 46862 (TRAV12-2, TRAJ44)
CAVNKAGTASKLTF

SEQ ID NO: 93724 - protein, 14 aa, Homo sapiens
  CDR3 for beta chain variable domain of TCR clone 46862 (TRBV7-2, TRBJ2-2)
CASRGQGAAGELFF

SEQ ID NO: 93725 - protein, 14 aa, Homo sapiens
  CDR3 for alpha chain variable domain of TCR clone 46863 (TRAV10, TRAJ29)
CVVSANSRNTPLVF

SEQ ID NO: 93726 - protein, 16 aa, Homo sapiens
  CDR3 for beta chain variable domain of TCR clone 46863 (TRBV29-1, TRBJ2-7)
CSVEDAEDGTAYEQYF

SEQ ID NO: 93727 - protein, 12 aa, Homo sapiens
  CDR3 for alpha chain variable domain of TCR clone 46864 (TRAV13-2, TRAJ8)
CAPWLGFQKLVF

SEQ ID NO: 93728 - protein, 16 aa, Homo sapiens
  CDR3 for beta chain variable domain of TCR clone 46864 (TRBV5-1, TRBJ2-7)
CASSLGGLAGLYEQYF

SEQ ID NO: 93729 - protein, 16 aa, Homo sapiens
  CDR3 for alpha chain variable domain of TCR clone 46865 (TRAV3, TRAJ37)
CAVRGKGSGNKGKLIF

SEQ ID NO: 93730 - protein, 15 aa, Homo sapiens
  CDR3 for beta chain variable domain of TCR clone 46865 (TRBV7-9, TRBJ2-2)
CASGPLDTFPGELFF

SEQ ID NO: 93731 - protein, 13 aa, Homo sapiens
  CDR3 for alpha chain variable domain of TCR clone 46866 (TRAV36/DV7, TRAJ38)
CVANAGNNRKLIW

SEQ ID NO: 93732 - protein, 14 aa, Homo sapiens
  CDR3 for beta chain variable domain of TCR clone 46866 (TRBV7-2, TRBJ2-7)
CASSLRWEVDEKYF

SEQ ID NO: 93733 - protein, 13 aa, Homo sapiens
  CDR3 for alpha chain variable domain of TCR clone 46867 (TRAV1-2, TRAJ9)
CAALNTGGFKTIF

SEQ ID NO: 93734 - protein, 16 aa, Homo sapiens
  CDR3 for beta chain variable domain of TCR clone 46867 (TRBV6-1, TRBJ2-5)
CASSETLDRGAETQYF

SEQ ID NO: 93735 - protein, 13 aa, Homo sapiens
  CDR3 for alpha chain variable domain of TCR clone 46868 (TRAV16, TRAJ34)
CALTGYNTDKLIF

SEQ ID NO: 93736 - protein, 12 aa, Homo sapiens
  CDR3 for beta chain variable domain of TCR clone 46868 (TRBV6-1, TRBJ2-1)
CQQGGRGHEQFF

SEQ ID NO: 93737 - protein, 16 aa, Homo sapiens
  CDR3 for alpha chain variable domain of TCR clone 46869 (TRAV27, TRAJ52)
CAGAPAGGTSYGKLPF

SEQ ID NO: 93738 - protein, 12 aa, Homo sapiens
  CDR3 for beta chain variable domain of TCR clone 46869 (TRBV27, TRBJ2-1)
CASRGFYNEQFF

SEQ ID NO: 93739 - protein, 14 aa, Homo sapiens
  CDR3 for alpha chain variable domain of TCR clone 46870 (TRAV9-2, TRAJ39)
CALYIYNAGNMLTF

SEQ ID NO: 93740 - protein, 14 aa, Homo sapiens
  CDR3 for beta chain variable domain of TCR clone 46870 (TRBV4-1, TRBJ2-7)
CASSPVAGGDEQYF

SEQ ID NO: 93741 - protein, 15 aa, Homo sapiens
  CDR3 for alpha chain variable domain of TCR clone 46871 (TRAV38-1, TRAJ30)
CAFMTSYGGDDKIIF

SEQ ID NO: 93742 - protein, 16 aa, Homo sapiens
  CDR3 for beta chain variable domain of TCR clone 46871 (TRBV7-9, TRBJ2-7)
CASSFGLAGPSYEQYF

SEQ ID NO: 93743 - protein, 17 aa, Homo sapiens
  CDR3 for alpha chain variable domain of TCR clone 46872 (TRAV3, TRAJ6)
CAVRDGPRAGGSYIPTF

SEQ ID NO: 93744 - protein, 14 aa, Homo sapiens
  CDR3 for beta chain variable domain of TCR clone 46872 (TRBV7-2, TRBJ2-7)
CASCPKTSFYEQYF

SEQ ID NO: 93745 - protein, 16 aa, Homo sapiens
  CDR3 for alpha chain variable domain of TCR clone 46873 (TRAV8-3, TRAJ13)
CAVGAYPSGDYQKVTF

SEQ ID NO: 93746 - protein, 13 aa, Homo sapiens
  CDR3 for beta chain variable domain of TCR clone 46873 (TRBV7-9, TRBJ1-2)
CASSLKQNYGYTF

SEQ ID NO: 93747 - protein, 14 aa, Homo sapiens
  CDR3 for alpha chain variable domain of TCR clone 46874 (TRAV16, TRAJ15)
CALSGPQAGTALVF

SEQ ID NO: 93748 - protein, 12 aa, Homo sapiens
  CDR3 for beta chain variable domain of TCR clone 46874 (TRBV18, TRBJ2-5)
CASSPSKETQYF

SEQ ID NO: 93749 - protein, 13 aa, Homo sapiens
  CDR3 for alpha chain variable domain of TCR clone 46875 (TRAV30, TRAJ6)
CGFIEGGSYILTF

SEQ ID NO: 93750 - protein, 13 aa, Homo sapiens
  CDR3 for beta chain variable domain of TCR clone 46875 (TRBV5-4, TRBJ2-5)
CASSPVSQETQYF

SEQ ID NO: 93751 - protein, 13 aa, Homo sapiens
  CDR3 for alpha chain variable domain of TCR clone 46876 (TRAV12-2, TRAJ52)
CDVGGTSYGKLTF

SEQ ID NO: 93752 - protein, 14 aa, Homo sapiens
  CDR3 for beta chain variable domain of TCR clone 46876 (TRBV19, TRBJ2-1)
CASPTFVLSGEQFF

SEQ ID NO: 93753 - protein, 23 aa, Homo sapiens
  CDR3 for alpha chain variable domain of TCR clone 46877 (TRAV8-4, TRAJ38)
CARLNAGNNHIQNPDPAVYQLID

SEQ ID NO: 93754 - protein, 14 aa, Homo sapiens
  CDR3 for beta chain variable domain of TCR clone 46877 (TRBV7-8, TRBJ2-3)
CASSLEAGTDTQYF

SEQ ID NO: 93755 - protein, 12 aa, Homo sapiens
  CDR3 for alpha chain variable domain of TCR clone 46878 (TRAV30, TRAJ39)
CGRGNAGNMLTF

SEQ ID NO: 93756 - protein, 13 aa, Homo sapiens
  CDR3 for beta chain variable domain of TCR clone 46878 (TRBV10-3, TRBJ2-7)
CASKLAVNYEQYF

SEQ ID NO: 93757 - protein, 16 aa, Homo sapiens
  CDR3 for alpha chain variable domain of TCR clone 46879 (TRAV26-1, TRAJ32)
CIVRTNYGGATNKLIF

SEQ ID NO: 93758 - protein, 17 aa, Homo sapiens
  CDR3 for beta chain variable domain of TCR clone 46879 (TRBV7-8, TRBJ2-6)
CASSAGTGGAGANVLTF

SEQ ID NO: 93759 - protein, 13 aa, Homo sapiens
  CDR3 for alpha chain variable domain of TCR clone 46880 (TRAV1-1, TRAJ7)
CAVRDHGNNRLAF

SEQ ID NO: 93760 - protein, 20 aa, Homo sapiens
  CDR3 for beta chain variable domain of TCR clone 46880 (TRBV28, TRBJ2-3)
CASSLGVRSTSGWSTDTQYF

SEQ ID NO: 93761 - protein, 14 aa, Homo sapiens
  CDR3 for alpha chain variable domain of TCR clone 46881 (TRAV35, TRAJ13)
CAGSPSGGYQKVTF

SEQ ID NO: 93762 - protein, 13 aa, Homo sapiens
  CDR3 for beta chain variable domain of TCR clone 46881 (TRBV29-1, TRBJ1-1)
CSVVDSRNTEAFF

SEQ ID NO: 93763 - protein, 14 aa, Homo sapiens
  CDR3 for alpha chain variable domain of TCR clone 46882 (TRAV29/DV5, TRAJ36)
CAARRKTGANNLFF

SEQ ID NO: 93764 - protein, 14 aa, Homo sapiens
  CDR3 for beta chain variable domain of TCR clone 46882 (TRBV12-5, TRBJ2-5)
CASCSRTHQETQYF

SEQ ID NO: 93765 - protein, 14 aa, Homo sapiens
  CDR3 for alpha chain variable domain of TCR clone 46883 (TRAV12-1, TRAJ3)
CVVILYSSASKIIL

SEQ ID NO: 93766 - protein, 18 aa, Homo sapiens
  CDR3 for beta chain variable domain of TCR clone 46883 (TRBV12-4, TRBJ2-2)
CACSRSGGAIPNTGELFF

SEQ ID NO: 93767 - protein, 14 aa, Homo sapiens
  CDR3 for alpha chain variable domain of TCR clone 46884 (TRAV12-3, TRAJ15)
CAMIPPQAGTALIF

SEQ ID NO: 93768 - protein, 12 aa, Homo sapiens
  CDR3 for beta chain variable domain of TCR clone 46884 (TRBV11-2, TRBJ2-2)
CASSPGGGELFF

SEQ ID NO: 93769 - protein, 15 aa, Homo sapiens
  CDR3 for alpha chain variable domain of TCR clone 46885 (TRAV2, TRAJ9)
CAVAALNTGGFKTIF

SEQ ID NO: 93770 - protein, 16 aa, Homo sapiens
  CDR3 for beta chain variable domain of TCR clone 46885 (TRBV3-1, TRBJ2-3)
CISVPAAKGGGDTQYF

SEQ ID NO: 93771 - protein, 13 aa, Homo sapiens
  CDR3 for alpha chain variable domain of TCR clone 46886 (TRAV8-3, TRAJ48)
CAVVPFGNEKLTF

SEQ ID NO: 93772 - protein, 17 aa, Homo sapiens
  CDR3 for beta chain variable domain of TCR clone 46886 (TRBV11-2, TRBJ2-1)
CASSLYPPGVEYNEQFF

SEQ ID NO: 93773 - protein, 14 aa, Homo sapiens
  CDR3 for alpha chain variable domain of TCR clone 46887 (TRAV8-1, TRAJ24)
CAVNAADGWGKLQF

SEQ ID NO: 93774 - protein, 15 aa, Homo sapiens
  CDR3 for beta chain variable domain of TCR clone 46887 (TRBV20-1, TRBJ2-7)
CSARVPAAYFYEQYF

SEQ ID NO: 93775 - protein, 14 aa, Homo sapiens
  CDR3 for alpha chain variable domain of TCR clone 46888 (TRAV27, TRAJ15)
CAGFDNQAGAALIF

SEQ ID NO: 93776 - protein, 11 aa, Homo sapiens
  CDR3 for beta chain variable domain of TCR clone 46888 (TRBV29-1, TRBJ1-1)
CSVEVGTRTFF

SEQ ID NO: 93777 - protein, 20 aa, Homo sapiens
  CDR3 for alpha chain variable domain of TCR clone 46889 (TRAV1-1, TRAJ4)
CLSLLRCEGFLSGGYNKLIF

SEQ ID NO: 93778 - protein, 16 aa, Homo sapiens
  CDR3 for beta chain variable domain of TCR clone 46889 (TRBV28, TRBJ1-4)
CASSPPYRGRSEKLFL

SEQ ID NO: 93779 - protein, 14 aa, Homo sapiens
  CDR3 for alpha chain variable domain of TCR clone 46890 (TRAV12-3, TRAJ10)
SHLPMTGGGNKLTF

SEQ ID NO: 93780 - protein, 17 aa, Homo sapiens
  CDR3 for beta chain variable domain of TCR clone 46890 (TRBV28, TRBJ2-3)
CASSPTPAGGRVDTQYF

SEQ ID NO: 93781 - protein, 16 aa, Homo sapiens
  CDR3 for alpha chain variable domain of TCR clone 46891 (TRAV30, TRAJ24)
CGTEIVDADSWGKFQF

SEQ ID NO: 93782 - protein, 16 aa, Homo sapiens
  CDR3 for beta chain variable domain of TCR clone 46891 (TRBV6-3, TRBJ1-1)
CASTDLGTVPNTGAFF

SEQ ID NO: 93783 - protein, 14 aa, Homo sapiens
  CDR3 for alpha chain variable domain of TCR clone 46892 (TRAV1-2, TRAJ8)
CAVREDTGFQKLVF

SEQ ID NO: 93784 - protein, 15 aa, Homo sapiens
  CDR3 for beta chain variable domain of TCR clone 46892 (TRBV7-2, TRBJ2-3)
CASSSTGLETDTQYF

SEQ ID NO: 93785 - protein, 16 aa, Homo sapiens
  CDR3 for alpha chain variable domain of TCR clone 46893 (TRAV13-1, TRAJ17)
CAASKGVKAAGNKLTF

SEQ ID NO: 93786 - protein, 15 aa, Homo sapiens
  CDR3 for beta chain variable domain of TCR clone 46893 (TRBV20-1, TRBJ1-5)
CSAREGGYSNQPQHL

SEQ ID NO: 93787 - protein, 14 aa, Homo sapiens
  CDR3 for alpha chain variable domain of TCR clone 46894 (TRAV12-2, TRAJ17)
CAVNIKAAGTKLTF

SEQ ID NO: 93788 - protein, 16 aa, Homo sapiens
  CDR3 for beta chain variable domain of TCR clone 46894 (TRBV20-1, TRBJ2-6)
CSASSQGYDGANVLTF

SEQ ID NO: 93789 - protein, 14 aa, Homo sapiens
  CDR3 for alpha chain variable domain of TCR clone 46895 (TRAV1-2, TRAJ16)
CAVNRFSDGQKLLF

SEQ ID NO: 93790 - protein, 15 aa, Homo sapiens
  CDR3 for beta chain variable domain of TCR clone 46895 (TRBV7-2, TRBJ2-3)
CASSSTGLETDTQYF

SEQ ID NO: 93791 - protein, 15 aa, Homo sapiens
  CDR3 for alpha chain variable domain of TCR clone 46896 (TRAV4, TRAJ39)
CLVGPNNNAGNMLTF

SEQ ID NO: 93792 - protein, 15 aa, Homo sapiens
  CDR3 for beta chain variable domain of TCR clone 46896 (TRBV6-5, TRBJ2-5)
CASSTDGTQGETQYF

SEQ ID NO: 93793 - protein, 13 aa, Homo sapiens
  CDR3 for alpha chain variable domain of TCR clone 46897 (TRAV35, TRAJ36)
CSGPRIGANNLFF

SEQ ID NO: 93794 - protein, 15 aa, Homo sapiens
  CDR3 for beta chain variable domain of TCR clone 46897 (TRBV28, TRBJ2-5)
CASSPPWSYQETQYF

SEQ ID NO: 93795 - protein, 14 aa, Homo sapiens
  CDR3 for alpha chain variable domain of TCR clone 46898 (TRAV16, TRAJ16)
CALSVLSDGQKLLF

SEQ ID NO: 93796 - protein, 14 aa, Homo sapiens
  CDR3 for beta chain variable domain of TCR clone 46898 (TRBV19, TRBJ2-1)
CASPTFVLSGEQFF

SEQ ID NO: 93797 - protein, 16 aa, Homo sapiens
  CDR3 for alpha chain variable domain of TCR clone 46899 (TRAV21, TRAJ33)
CAVSPASMDSNYQLIW

SEQ ID NO: 93798 - protein, 17 aa, Homo sapiens
  CDR3 for beta chain variable domain of TCR clone 46899 (TRBV2, TRBJ1-4)
CASGKRELTQGEEKLFF

SEQ ID NO: 93799 - protein, 18 aa, Homo sapiens
  CDR3 for alpha chain variable domain of TCR clone 46900 (TRAV26-1, TRAJ52)
CIVRVEGAGGTSYGKLTF

SEQ ID NO: 93800 - protein, 14 aa, Homo sapiens
  CDR3 for beta chain variable domain of TCR clone 46900 (TRBV15, TRBJ2-1)
CATSGVEDYNEQFF

SEQ ID NO: 93801 - protein, 16 aa, Homo sapiens
  CDR3 for alpha chain variable domain of TCR clone 46901 (TRAV16, TRAJ4)
CALSRMFSGGYNKLIF

SEQ ID NO: 93802 - protein, 16 aa, Homo sapiens
  CDR3 for beta chain variable domain of TCR clone 46901 (TRBV24-1, TRBJ2-3)
CATSDPGTGATDTQYL

SEQ ID NO: 93803 - protein, 12 aa, Homo sapiens
  CDR3 for alpha chain variable domain of TCR clone 46902 (TRAV1-2, TRAJ29)
CAVPSGNTPLVF

SEQ ID NO: 93804 - protein, 16 aa, Homo sapiens
  CDR3 for beta chain variable domain of TCR clone 46902 (TRBV19, TRBJ2-2)
CASSAAGTGGTGELFF

SEQ ID NO: 93805 - protein, 14 aa, Homo sapiens
  CDR3 for alpha chain variable domain of TCR clone 46903 (TRAV1-2, TRAJ16)
CAVNRFSDGQKLLF

SEQ ID NO: 93806 - protein, 13 aa, Homo sapiens
  CDR3 for beta chain variable domain of TCR clone 46903 (TRBV19, TRBJ1-2)
CASSIPGQDGCTF

SEQ ID NO: 93807 - protein, 13 aa, Homo sapiens
  CDR3 for alpha chain variable domain of TCR clone 46904 (TRAV12-1, TRAJ16)
CVVNGPDGQKLLF

SEQ ID NO: 93808 - protein, 15 aa, Homo sapiens
  CDR3 for beta chain variable domain of TCR clone 46904 (TRBV6-3, TRBJ2-7)
CASSSLGTVFYEQYF

SEQ ID NO: 93809 - protein, 11 aa, Homo sapiens
  CDR3 for alpha chain variable domain of TCR clone 46905 (TRAV2, TRAJ13)
CASGGYQKVTF

SEQ ID NO: 93810 - protein, 15 aa, Homo sapiens
  CDR3 for beta chain variable domain of TCR clone 46905 (TRBV20-1, TRBJ2-7)
CSARDRVSGMDEQYL

SEQ ID NO: 93811 - protein, 14 aa, Homo sapiens
  CDR3 for alpha chain variable domain of TCR clone 46906 (TRAV38-1, TRAJ29)
CAFITPSGNTPLVF

SEQ ID NO: 93812 - protein, 16 aa, Homo sapiens
  CDR3 for beta chain variable domain of TCR clone 46906 (TRBV19, TRBJ2-1)
CASSKAGPSSYNKQFF

SEQ ID NO: 93813 - protein, 17 aa, Homo sapiens
  CDR3 for alpha chain variable domain of TCR clone 46907 (TRAV19, TRAJ18)
CALSEEWRGSTLGRLYF

SEQ ID NO: 93814 - protein, 15 aa, Homo sapiens
  CDR3 for beta chain variable domain of TCR clone 46907 (TRBV6-3, TRBJ2-3)
CASSWRDGDADTQYF

SEQ ID NO: 93815 - protein, 15 aa, Homo sapiens
  CDR3 for alpha chain variable domain of TCR clone 46908 (TRAV25, TRAJ52)
CAGRPGGTSCGELTF

SEQ ID NO: 93816 - protein, 17 aa, Homo sapiens
  CDR3 for beta chain variable domain of TCR clone 46908 (TRBV7-8, TRBJ2-6)
CASSAGTGGAGANVLTF

SEQ ID NO: 93817 - protein, 13 aa, Homo sapiens
  CDR3 for alpha chain variable domain of TCR clone 46909 (TRAV21, TRAJ27)
CAARPGNAGKSTF

SEQ ID NO: 93818 - protein, 13 aa, Homo sapiens
  CDR3 for beta chain variable domain of TCR clone 46909 (TRBV7-6, TRBJ2-1)
CASSLGGADEQFF

SEQ ID NO: 93819 - protein, 11 aa, Homo sapiens
  CDR3 for alpha chain variable domain of TCR clone 46910 (TRAV3, TRAJ32)
CAVSPKGMVVL

SEQ ID NO: 93820 - protein, 14 aa, Homo sapiens
  CDR3 for beta chain variable domain of TCR clone 46910 (TRBV18, TRBJ2-7)
CASSPRGGAYEQYF

SEQ ID NO: 93821 - protein, 13 aa, Homo sapiens
  CDR3 for alpha chain variable domain of TCR clone 46911 (TRAV13-2, TRAJ40)
CAEFTSGTYKHIF

SEQ ID NO: 93822 - protein, 14 aa, Homo sapiens
  CDR3 for beta chain variable domain of TCR clone 46911 (TRBV10-2, TRBJ1-5)
CASSSTGRNQPQHF

SEQ ID NO: 93823 - protein, 13 aa, Homo sapiens
  CDR3 for alpha chain variable domain of TCR clone 46912 (TRAV21, TRAJ37)
CAVSSGNTGKLIS

SEQ ID NO: 93824 - protein, 17 aa, Homo sapiens
  CDR3 for beta chain variable domain of TCR clone 46912 (TRBV5-1, TRBJ2-5)
CASSLLGLAANQETQYF

SEQ ID NO: 93825 - protein, 14 aa, Homo sapiens
  CDR3 for alpha chain variable domain of TCR clone 46913 (TRAV8-1, TRAJ13)
CAVKRSGGYQKVTF

SEQ ID NO: 93826 - protein, 17 aa, Homo sapiens
  CDR3 for beta chain variable domain of TCR clone 46913 (TRBV4-2, TRBJ1-1)
CASTQFGGGSGNTEAFF

SEQ ID NO: 93827 - protein, 15 aa, Homo sapiens
  CDR3 for alpha chain variable domain of TCR clone 46914 (TRAV17, TRAJ56)
CATDANTGANSKLTF

SEQ ID NO: 93828 - protein, 14 aa, Homo sapiens
  CDR3 for beta chain variable domain of TCR clone 46914 (TRBV19, TRBJ1-5)
CASSLGAGGQPQHF

SEQ ID NO: 93829 - protein, 14 aa, Homo sapiens
  CDR3 for alpha chain variable domain of TCR clone 46915 (TRAV12-3, TRAJ12)
CATSEVDSSYKLIF

SEQ ID NO: 93830 - protein, 12 aa, Homo sapiens
  CDR3 for beta chain variable domain of TCR clone 46915 (TRBV18, TRBJ1-4)
CASSPSREKLFF

SEQ ID NO: 93831 - protein, 14 aa, Homo sapiens
  CDR3 for alpha chain variable domain of TCR clone 46916 (TRAV8-2, TRAJ4)
CVVIPSGGYNKLIF

SEQ ID NO: 93832 - protein, 15 aa, Homo sapiens
  CDR3 for beta chain variable domain of TCR clone 46916 (TRBV6-6, TRBJ2-7)
CASSYSYGGSYEQYF

SEQ ID NO: 93833 - protein, 14 aa, Homo sapiens
  CDR3 for alpha chain variable domain of TCR clone 46917 (TRAV12-1, TRAJ12)
CVLNGRDSSYKLIF

SEQ ID NO: 93834 - protein, 13 aa, Homo sapiens
  CDR3 for beta chain variable domain of TCR clone 46917 (TRBV28, TRBJ2-2)
CASIRESTGELSF

SEQ ID NO: 93835 - protein, 15 aa, Homo sapiens
  CDR3 for alpha chain variable domain of TCR clone 46918 (TRAV12-3, TRAJ6)
CAMSATSGGSYITTF

SEQ ID NO: 93836 - protein, 11 aa, Homo sapiens
  CDR3 for beta chain variable domain of TCR clone 46918 (TRBV20-1, TRBJ1-5)
CSAQGDQPQHF

SEQ ID NO: 93837 - protein, 13 aa, Homo sapiens
  CDR3 for alpha chain variable domain of TCR clone 46919 (TRAV17, TRAJ9)
CATFLTGGFKTIF

SEQ ID NO: 93838 - protein, 16 aa, Homo sapiens
  CDR3 for beta chain variable domain of TCR clone 46919 (TRBV5-7, TRBJ1-4)
CASSPSGGLKMEKLFF

SEQ ID NO: 93839 - protein, 11 aa, Homo sapiens
  CDR3 for alpha chain variable domain of TCR clone 46920 (TRAV16, TRAJ31)
CALFDNARLMF

SEQ ID NO: 93840 - protein, 15 aa, Homo sapiens
  CDR3 for beta chain variable domain of TCR clone 46920 (TRBV18, TRBJ1-1)
CASSPRQGENTEAFF

SEQ ID NO: 93841 - protein, 12 aa, Homo sapiens
  CDR3 for alpha chain variable domain of TCR clone 46921 (TRAV13-1, TRAJ49)
CAAPNTGNQCYF

SEQ ID NO: 93842 - protein, 17 aa, Homo sapiens
  CDR3 for beta chain variable domain of TCR clone 46921 (TRBV25-1, TRBJ2-7)
CASSDARVVFSSYEQYF

SEQ ID NO: 93843 - protein, 23 aa, Homo sapiens
  CDR3 for alpha chain variable domain of TCR clone 46922 (TRAV12-2, TRAJ22)
CAVSFRVHPGPPIVSGSARQLTF

SEQ ID NO: 93844 - protein, 14 aa, Homo sapiens
  CDR3 for beta chain variable domain of TCR clone 46922 (TRBV5-4, TRBJ1-1)
CASSLDSRRDEAFF

SEQ ID NO: 93845 - protein, 23 aa, Homo sapiens
  CDR3 for alpha chain variable domain of TCR clone 46923 (TRAV26-1, TRAJ38)
CIADNAGNNHIQNPDPAGYQLRD

SEQ ID NO: 93846 - protein, 13 aa, Homo sapiens
  CDR3 for beta chain variable domain of TCR clone 46923 (TRBV10-3, TRBJ2-7)
CASKLAVNYEQYF

SEQ ID NO: 93847 - protein, 14 aa, Homo sapiens
  CDR3 for alpha chain variable domain of TCR clone 46924 (TRAV35, TRAJ24)
CAGPRRYSWGKLQF

SEQ ID NO: 93848 - protein, 12 aa, Homo sapiens
  CDR3 for beta chain variable domain of TCR clone 46924 (TRBV12-4, TRBJ2-3)
CASSLGQDTQYF

SEQ ID NO: 93849 - protein, 16 aa, Homo sapiens
  CDR3 for alpha chain variable domain of TCR clone 46925 (TRAV20, TRAJ28)
CAVRDPSGAGSYQLTF

SEQ ID NO: 93850 - protein, 14 aa, Homo sapiens
  CDR3 for beta chain variable domain of TCR clone 46925 (TRBV6-1, TRBJ1-3)
CASVQGGGGNTIYF

SEQ ID NO: 93851 - protein, 13 aa, Homo sapiens
  CDR3 for alpha chain variable domain of TCR clone 46926 (TRAV13-1, TRAJ21)
CAASIYNFNKFYF

SEQ ID NO: 93852 - protein, 13 aa, Homo sapiens
  CDR3 for beta chain variable domain of TCR clone 46926 (TRBV27, TRBJ1-4)
CASSLMRDEKLFF

SEQ ID NO: 93853 - protein, 13 aa, Homo sapiens
  CDR3 for alpha chain variable domain of TCR clone 46927 (TRAV13-1, TRAJ21)
CAASIYNFNKSYF

SEQ ID NO: 93854 - protein, 13 aa, Homo sapiens
  CDR3 for beta chain variable domain of TCR clone 46927 (TRBV27, TRBJ1-4)
CASSLMGDEKLFF

SEQ ID NO: 93855 - protein, 17 aa, Homo sapiens
  CDR3 for alpha chain variable domain of TCR clone 46928 (TRAV3, TRAJ42)
CAVRDRDYGGGQGNLIF

SEQ ID NO: 93856 - protein, 14 aa, Homo sapiens
  CDR3 for beta chain variable domain of TCR clone 46928 (TRBV19, TRBJ2-5)
CASSMTGQQETQYF

SEQ ID NO: 93857 - protein, 12 aa, Homo sapiens
  CDR3 for alpha chain variable domain of TCR clone 46929 (TRAV12-3, TRAJ4)
CAMTGAGTKLAV

SEQ ID NO: 93858 - protein, 14 aa, Homo sapiens
  CDR3 for beta chain variable domain of TCR clone 46929 (TRBV10-3, TRBJ1-1)
CAISDTDRGVEAFF

SEQ ID NO: 93859 - protein, 17 aa, Homo sapiens
  CDR3 for alpha chain variable domain of TCR clone 46930 (TRAV13-1, TRAJ31)
CAPRDRLLFGDGTQLVV

SEQ ID NO: 93860 - protein, 12 aa, Homo sapiens
  CDR3 for beta chain variable domain of TCR clone 46930 (TRBV7-9, TRBJ2-7)
CASSLEGYEQYF

SEQ ID NO: 93861 - protein, 17 aa, Homo sapiens
  CDR3 for alpha chain variable domain of TCR clone 46931 (TRAV26-2, TRAJ42)
CIPRDVGYGGSQGNLIF

SEQ ID NO: 93862 - protein, 16 aa, Homo sapiens
  CDR3 for beta chain variable domain of TCR clone 46931 (TRBV12-4, TRBJ2-7)
CASSLIGGTGTYEQYF

SEQ ID NO: 93863 - protein, 14 aa, Homo sapiens
  CDR3 for alpha chain variable domain of TCR clone 46932 (TRAV16, TRAJ33)
CALSSMDSNYQLIW

SEQ ID NO: 93864 - protein, 12 aa, Homo sapiens
  CDR3 for beta chain variable domain of TCR clone 46932 (TRBV5-1, TRBJ1-2)
CASSQDTYGYTF

SEQ ID NO: 93865 - protein, 12 aa, Homo sapiens
  CDR3 for alpha chain variable domain of TCR clone 46933 (TRAV17, TRAJ49)
CATVTTGNQLYF

SEQ ID NO: 93866 - protein, 18 aa, Homo sapiens
  CDR3 for beta chain variable domain of TCR clone 46933 (TRBV11-2, TRBJ2-6)
CASSLNPFLGTGANVLTF

SEQ ID NO: 93867 - protein, 18 aa, Homo sapiens
  CDR3 for alpha chain variable domain of TCR clone 46934 (TRAV21, TRAJ52)
CAVRPSPAGGTSYGKLTF

SEQ ID NO: 93868 - protein, 19 aa, Homo sapiens
  CDR3 for beta chain variable domain of TCR clone 46934 (TRBV7-2, TRBJ2-3)
CAGSFLSRNWGGGTDTQYF

SEQ ID NO: 93869 - protein, 16 aa, Homo sapiens
  CDR3 for alpha chain variable domain of TCR clone 46935 (TRAV21, TRAJ37)
CAVRTAGTSNTGKLIF

SEQ ID NO: 93870 - protein, 13 aa, Homo sapiens
  CDR3 for beta chain variable domain of TCR clone 46935 (TRBV7-9, TRBJ2-5)
CASLPSGRETQYF

SEQ ID NO: 93871 - protein, 14 aa, Homo sapiens
  CDR3 for alpha chain variable domain of TCR clone 46936 (TRAV17, TRAJ39)
CATDPVRAGNMLTF

SEQ ID NO: 93872 - protein, 15 aa, Homo sapiens
  CDR3 for beta chain variable domain of TCR clone 46936 (TRBV13, TRBJ1-5)
CASSFGQGGVQAQHF

SEQ ID NO: 93873 - protein, 14 aa, Homo sapiens
  CDR3 for alpha chain variable domain of TCR clone 46937 (TRAV2, TRAJ22)
CAVGRGGSARQLTF

SEQ ID NO: 93874 - protein, 12 aa, Homo sapiens
  CDR3 for beta chain variable domain of TCR clone 46937 (TRBV19, TRBJ2-1)
CASRMQDTEQFF

SEQ ID NO: 93875 - protein, 18 aa, Homo sapiens
  CDR3 for alpha chain variable domain of TCR clone 46938 (TRAV26-2, TRAJ54)
CILRGVEVGIQGAQKLVF

SEQ ID NO: 93876 - protein, 16 aa, Homo sapiens
  CDR3 for beta chain variable domain of TCR clone 46938 (TRBV6-1, TRBJ2-5)
CASSETLDRGAETQYF

SEQ ID NO: 93877 - protein, 13 aa, Homo sapiens
  CDR3 for alpha chain variable domain of TCR clone 46939 (TRAV27, TRAJ49)
CAPRPYIGNQFYF

SEQ ID NO: 93878 - protein, 18 aa, Homo sapiens
  CDR3 for beta chain variable domain of TCR clone 46939 (TRBV7-3, TRBJ2-5)
CASSLGGAAQGRWETQYF

SEQ ID NO: 93879 - protein, 14 aa, Homo sapiens
  CDR3 for alpha chain variable domain of TCR clone 46940 (TRAV12-2, TRAJ13)
CAVKKTGGYQKVTF

SEQ ID NO: 93880 - protein, 14 aa, Homo sapiens
  CDR3 for beta chain variable domain of TCR clone 46940 (TRBV28, TRBJ1-2)
CASRIQGANYGYTF

SEQ ID NO: 93881 - protein, 11 aa, Homo sapiens
  CDR3 for alpha chain variable domain of TCR clone 46941 (TRAV12-3, TRAJ43)
CAMSVSNDMRF

SEQ ID NO: 93882 - protein, 13 aa, Homo sapiens
  CDR3 for beta chain variable domain of TCR clone 46941 (TRBV24-1, TRBJ2-2)
CATSETNTGELFF

SEQ ID NO: 93883 - protein, 10 aa, Homo sapiens
  CDR3 for alpha chain variable domain of TCR clone 46942 (TRAV23/DV6, TRAJ57)
CAASPTLSQG

SEQ ID NO: 93884 - protein, 14 aa, Homo sapiens
  CDR3 for beta chain variable domain of TCR clone 46942 (TRBV7-8, TRBJ2-5)
CASSATGGQETQYF

SEQ ID NO: 93885 - protein, 16 aa, Homo sapiens
  CDR3 for alpha chain variable domain of TCR clone 46943 (TRAV12-2, TRAJ18)
RAVTTDRGSTLGRLYF

SEQ ID NO: 93886 - protein, 14 aa, Homo sapiens
  CDR3 for beta chain variable domain of TCR clone 46943 (TRBV4-2, TRBJ1-5)
CASSQDSINQPQHF

SEQ ID NO: 93887 - protein, 14 aa, Homo sapiens
  CDR3 for alpha chain variable domain of TCR clone 46944 (TRAV12-3, TRAJ10)
SHLPLTGGGNKLTF

SEQ ID NO: 93888 - protein, 15 aa, Homo sapiens
  CDR3 for beta chain variable domain of TCR clone 46944 (TRBV3-1, TRBJ2-2)
CASSQAVRETGELFF

SEQ ID NO: 93889 - protein, 14 aa, Homo sapiens
  CDR3 for alpha chain variable domain of TCR clone 46945 (TRAV2, TRAJ37)
CAVDFTSNTGKLIF

SEQ ID NO: 93890 - protein, 15 aa, Homo sapiens
  CDR3 for beta chain variable domain of TCR clone 46945 (TRBV20-1, TRBJ1-1)
CSACRGVTGNTEAFF

SEQ ID NO: 93891 - protein, 16 aa, Homo sapiens
  CDR3 for alpha chain variable domain of TCR clone 46946 (TRAV12-2, TRAJ40)
CAVIRGGTSGTYKYIF

SEQ ID NO: 93892 - protein, 14 aa, Homo sapiens
  CDR3 for beta chain variable domain of TCR clone 46946 (TRBV20-1, TRBJ2-5)
CSARNGRAGETQYF

SEQ ID NO: 93893 - protein, 16 aa, Homo sapiens
  CDR3 for alpha chain variable domain of TCR clone 46947 (TRAV13-1, TRAJ18)
CAASRMRGLTLGRLYF

SEQ ID NO: 93894 - protein, 16 aa, Homo sapiens
  CDR3 for beta chain variable domain of TCR clone 46947 (TRBV27, TRBJ1-1)
CASSSRGRTGYTEAFF

SEQ ID NO: 93895 - protein, 11 aa, Homo sapiens
  CDR3 for alpha chain variable domain of TCR clone 46948 (TRAV2, TRAJ13)
CASGGYQKVTF

SEQ ID NO: 93896 - protein, 16 aa, Homo sapiens
  CDR3 for beta chain variable domain of TCR clone 46948 (TRBV7-7, TRBJ2-1)
CASSLASGTSYNEQFF

SEQ ID NO: 93897 - protein, 14 aa, Homo sapiens
  CDR3 for alpha chain variable domain of TCR clone 46949 (TRAV12-2, TRAJ45)
CAVNKGGGADGLTF

SEQ ID NO: 93898 - protein, 15 aa, Homo sapiens
  CDR3 for beta chain variable domain of TCR clone 46949 (TRBV9, TRBJ1-6)
CASSVAGTGDSSLHF

SEQ ID NO: 93899 - protein, 14 aa, Homo sapiens
  CDR3 for alpha chain variable domain of TCR clone 46950 (TRAV12-2, TRAJ17)
CAVLFKAAGNKLTF

SEQ ID NO: 93900 - protein, 17 aa, Homo sapiens
  CDR3 for beta chain variable domain of TCR clone 46950 (TRBV20-1, TRBJ2-2)
CSANGSGQGGLTGELFF

SEQ ID NO: 93901 - protein, 13 aa, Homo sapiens
  CDR3 for alpha chain variable domain of TCR clone 46951 (TRAV26-2, TRAJ43)
CILRAVNNNDMRC

SEQ ID NO: 93902 - protein, 15 aa, Homo sapiens
  CDR3 for beta chain variable domain of TCR clone 46951 (TRBV7-2, TRBJ2-1)
CASTHGTGIYNEQFF

SEQ ID NO: 93903 - protein, 12 aa, Homo sapiens
  CDR3 for alpha chain variable domain of TCR clone 46952 (TRAV16, TRAJ10)
CSRTGGGNKLTF

SEQ ID NO: 93904 - protein, 13 aa, Homo sapiens
  CDR3 for beta chain variable domain of TCR clone 46952 (TRBV4-1, TRBJ1-1)
CASSRKMNTEAFF

SEQ ID NO: 93905 - protein, 13 aa, Homo sapiens
  CDR3 for alpha chain variable domain of TCR clone 46953 (TRAV35, TRAJ32)
CAGVGGATNKLIF

SEQ ID NO: 93906 - protein, 15 aa, Homo sapiens
  CDR3 for beta chain variable domain of TCR clone 46953 (TRBV20-1, TRBJ1-1)
CSASRGVTGNTEAFF

SEQ ID NO: 93907 - protein, 17 aa, Homo sapiens
  CDR3 for alpha chain variable domain of TCR clone 46954 (TRAV13-1, TRAJ28)
CAASPPILWGWELPTHF

SEQ ID NO: 93908 - protein, 12 aa, Homo sapiens
  CDR3 for beta chain variable domain of TCR clone 46954 (TRBV11-2, TRBJ2-2)
CASSLPTGELFF

SEQ ID NO: 93909 - protein, 12 aa, Homo sapiens
  CDR3 for alpha chain variable domain of TCR clone 46955 (TRAV21, TRAJ11)
CAATSGYSTLTF

SEQ ID NO: 93910 - protein, 15 aa, Homo sapiens
  CDR3 for beta chain variable domain of TCR clone 46955 (TRBV12-4, TRBJ2-5)
CASSPPTGLQETQYF

SEQ ID NO: 93911 - protein, 15 aa, Homo sapiens
  CDR3 for alpha chain variable domain of TCR clone 46956 (TRAV38-2/DV8, TRAJ48)
CAYRSPESGNEKLTF

SEQ ID NO: 93912 - protein, 17 aa, Homo sapiens
  CDR3 for beta chain variable domain of TCR clone 46956 (TRBV20-1, TRBJ2-1)
CSASSSGLAGSYSEQFF

SEQ ID NO: 93913 - protein, 12 aa, Homo sapiens
  CDR3 for alpha chain variable domain of TCR clone 46957 (TRAV12-2, TRAJ20)
CAVRPSDYKLSF

SEQ ID NO: 93914 - protein, 13 aa, Homo sapiens
  CDR3 for beta chain variable domain of TCR clone 46957 (TRBV20-1, TRBJ2-5)
CSASLTGRETQYF

SEQ ID NO: 93915 - protein, 12 aa, Homo sapiens
  CDR3 for alpha chain variable domain of TCR clone 46958 (TRAV16, TRAJ27)
CALNHQCRQINL

SEQ ID NO: 93916 - protein, 14 aa, Homo sapiens
  CDR3 for beta chain variable domain of TCR clone 46958 (TRBV11-2, TRBJ1-5)
CASSLDRGRQTQHF

SEQ ID NO: 93917 - protein, 17 aa, Homo sapiens
  CDR3 for alpha chain variable domain of TCR clone 46959 (TRAV26-1, TRAJ58)
CIVRVGAEETSGARLTF

SEQ ID NO: 93918 - protein, 13 aa, Homo sapiens
  CDR3 for beta chain variable domain of TCR clone 46959 (TRBV12-5, TRBJ1-2)
CASGVRTGNGYTF

SEQ ID NO: 93919 - protein, 10 aa, Homo sapiens
  CDR3 for alpha chain variable domain of TCR clone 46960 (TRAV12-3, TRAJ49)
CAMNDDQFYS

SEQ ID NO: 93920 - protein, 13 aa, Homo sapiens
  CDR3 for beta chain variable domain of TCR clone 46960 (TRBV12-4, TRBJ1-1)
CASSPGTGFEAFF

SEQ ID NO: 93921 - protein, 13 aa, Homo sapiens
  CDR3 for alpha chain variable domain of TCR clone 46961 (TRAV2, TRAJ9)
CAVESTGGFKTIF

SEQ ID NO: 93922 - protein, 15 aa, Homo sapiens
  CDR3 for beta chain variable domain of TCR clone 46961 (TRBV10-3, TRBJ2-1)
CAITFGGGTDNEQLF

SEQ ID NO: 93923 - protein, 15 aa, Homo sapiens
  CDR3 for alpha chain variable domain of TCR clone 46962 (TRAV8-4, TRAJ37)
CAVTYGSSNTGQLIF

SEQ ID NO: 93924 - protein, 13 aa, Homo sapiens
  CDR3 for beta chain variable domain of TCR clone 46962 (TRBV12-4, TRBJ2-5)
CASSLGGSRTQYF

SEQ ID NO: 93925 - protein, 17 aa, Homo sapiens
  CDR3 for alpha chain variable domain of TCR clone 46963 (TRAV12-2, TRAJ57)
CAASSTLSQGGSEKLVF

SEQ ID NO: 93926 - protein, 14 aa, Homo sapiens
  CDR3 for beta chain variable domain of TCR clone 46963 (TRBV25-1, TRBJ1-1)
CASTHLGGNTEAFF

SEQ ID NO: 93927 - protein, 12 aa, Homo sapiens
  CDR3 for alpha chain variable domain of TCR clone 46964 (TRAV13-2, TRAJ23)
CAERHRGGKLIF

SEQ ID NO: 93928 - protein, 15 aa, Homo sapiens
  CDR3 for beta chain variable domain of TCR clone 46964 (TRBV7-9, TRBJ1-6)
CASSSPGRGDSPLHF

SEQ ID NO: 93929 - protein, 14 aa, Homo sapiens
  CDR3 for alpha chain variable domain of TCR clone 46965 (TRAV3, TRAJ7)
CAVREEEREQQTRF

SEQ ID NO: 93930 - protein, 15 aa, Homo sapiens
  CDR3 for beta chain variable domain of TCR clone 46965 (TRBV5-7, TRBJ1-5)
CAGSYGKLWDQPQHF

SEQ ID NO: 93931 - protein, 21 aa, Homo sapiens
  CDR3 for alpha chain variable domain of TCR clone 46966 (TRAV1-1, TRAJ6)
CLLLLRCERLERTGGSYIPTF

SEQ ID NO: 93932 - protein, 17 aa, Homo sapiens
  CDR3 for beta chain variable domain of TCR clone 46966 (TRBV20-1, TRBJ2-3)
CSAGGTGGPTGTDTQYF

SEQ ID NO: 93933 - protein, 15 aa, Homo sapiens
  CDR3 for alpha chain variable domain of TCR clone 46967 (TRAV23/DV6, TRAJ33)
CAASNSGGGNYQLIW

SEQ ID NO: 93934 - protein, 15 aa, Homo sapiens
  CDR3 for beta chain variable domain of TCR clone 46967 (TRBV4-1, TRBJ1-4)
CASSDTGGTNEKLFF

SEQ ID NO: 93935 - protein, 14 aa, Homo sapiens
  CDR3 for alpha chain variable domain of TCR clone 46968 (TRAV13-1, TRAJ44)
CAAKATGTASKLTL

SEQ ID NO: 93936 - protein, 17 aa, Homo sapiens
  CDR3 for beta chain variable domain of TCR clone 46968 (TRBV7-3, TRBJ2-3)
RASSLMKRMRGADTQYF

SEQ ID NO: 93937 - protein, 19 aa, Homo sapiens
  CDR3 for alpha chain variable domain of TCR clone 46969 (TRAV26-1, TRAJ52)
CIVRVANNAGGTSYGKLTF

SEQ ID NO: 93938 - protein, 12 aa, Homo sapiens
  CDR3 for beta chain variable domain of TCR clone 46969 (TRBV11-2, TRBJ2-2)
CASSLGGGELFF

SEQ ID NO: 93939 - protein, 11 aa, Homo sapiens
  CDR3 for alpha chain variable domain of TCR clone 46970 (TRAV12-2, TRAJ39)
CAVNNMLTFGG

SEQ ID NO: 93940 - protein, 10 aa, Homo sapiens
  CDR3 for beta chain variable domain of TCR clone 46970 (TRBV7-9, TRBJ1-1)
CASSFTEAFF

SEQ ID NO: 93941 - protein, 14 aa, Homo sapiens
  CDR3 for alpha chain variable domain of TCR clone 46971 (TRAV2, TRAJ9)
CAVEDRSGGFKTIF

SEQ ID NO: 93942 - protein, 15 aa, Homo sapiens
  CDR3 for beta chain variable domain of TCR clone 46971 (TRBV5-1, TRBJ2-3)
CASSVTSGSTDTQYF

SEQ ID NO: 93943 - protein, 16 aa, Homo sapiens
  CDR3 for alpha chain variable domain of TCR clone 46972 (TRAV30, TRAJ24)
CGTEIVDADSRGKFQF

SEQ ID NO: 93944 - protein, 14 aa, Homo sapiens
  CDR3 for beta chain variable domain of TCR clone 46972 (TRBV12-5, TRBJ2-5)
CASGSRTHQENQYF

SEQ ID NO: 93945 - protein, 13 aa, Homo sapiens
  CDR3 for alpha chain variable domain of TCR clone 46973 (TRAV1-2, TRAJ9)
CAVLNTGGFKTIF

SEQ ID NO: 93946 - protein, 14 aa, Homo sapiens
  CDR3 for beta chain variable domain of TCR clone 46973 (TRBV7-2, TRBJ1-1)
CASSFLTGTTEAFF

SEQ ID NO: 93947 - protein, 14 aa, Homo sapiens
  CDR3 for alpha chain variable domain of TCR clone 46974 (TRAV9-2, TRAJ39)
CALYIYNAGNMLTF

SEQ ID NO: 93948 - protein, 14 aa, Homo sapiens
  CDR3 for beta chain variable domain of TCR clone 46974 (TRBV5-1, TRBJ2-7)
CASSRGESLYEQYF

SEQ ID NO: 93949 - protein, 17 aa, Homo sapiens
  CDR3 for alpha chain variable domain of TCR clone 46975 (TRAV23/DV6, TRAJ3)
CSNHFCFGWSSASKIIF

SEQ ID NO: 93950 - protein, 14 aa, Homo sapiens
  CDR3 for beta chain variable domain of TCR clone 46975 (TRBV6-1, TRBJ1-3)
CASVQGGGGNTIYF

SEQ ID NO: 93951 - protein, 15 aa, Homo sapiens
  CDR3 for alpha chain variable domain of TCR clone 46976 (TRAV17, TRAJ13)
CATDAGSVGYQKVTF

SEQ ID NO: 93952 - protein, 17 aa, Homo sapiens
  CDR3 for beta chain variable domain of TCR clone 46976 (TRBV11-2, TRBJ2-1)
CASSLYPPGVEYNEQFF

SEQ ID NO: 93953 - protein, 11 aa, Homo sapiens
  CDR3 for alpha chain variable domain of TCR clone 46977 (TRAV3, TRAJ21)
CAVGNFNKFCF

SEQ ID NO: 93954 - protein, 16 aa, Homo sapiens
  CDR3 for beta chain variable domain of TCR clone 46977 (TRBV19, TRBJ2-1)
CASSKAGPSSYNEQFF

SEQ ID NO: 93955 - protein, 14 aa, Homo sapiens
  CDR3 for alpha chain variable domain of TCR clone 46978 (TRAV1-2, TRAJ8)
CAVREDIGFQKLVF

SEQ ID NO: 93956 - protein, 20 aa, Homo sapiens
  CDR3 for beta chain variable domain of TCR clone 46978 (TRBV7-8, TRBJ2-2)
CASSHLFPGPTIHITGELFF

SEQ ID NO: 93957 - protein, 17 aa, Homo sapiens
  CDR3 for alpha chain variable domain of TCR clone 46979 (TRAV3, TRAJ42)
CAVRDRDYGGSQGNPIF

SEQ ID NO: 93958 - protein, 16 aa, Homo sapiens
  CDR3 for beta chain variable domain of TCR clone 46979 (TRBV9, TRBJ2-1)
CASSVGGGGNYNEQFF

SEQ ID NO: 93959 - protein, 14 aa, Homo sapiens
  CDR3 for alpha chain variable domain of TCR clone 46980 (TRAV12-3, TRAJ22)
CALSLFGSARQLTF

SEQ ID NO: 93960 - protein, 11 aa, Homo sapiens
  CDR3 for beta chain variable domain of TCR clone 46980 (TRBV12-4, TRBJ2-2)
CASSSAGELFF

SEQ ID NO: 93961 - protein, 13 aa, Homo sapiens
  CDR3 for alpha chain variable domain of TCR clone 46981 (TRAV12-3, TRAJ9)
CAMRDTGGFKTIF

SEQ ID NO: 93962 - protein, 14 aa, Homo sapiens
  CDR3 for beta chain variable domain of TCR clone 46981 (TRBV11-2, TRBJ2-7)
CASSSTGEGYEQYF

SEQ ID NO: 93963 - protein, 15 aa, Homo sapiens
  CDR3 for alpha chain variable domain of TCR clone 46982 (TRAV8-4, TRAJ3)
CAVTGENLVQQCFQD

SEQ ID NO: 93964 - protein, 16 aa, Homo sapiens
  CDR3 for beta chain variable domain of TCR clone 46982 (TRBV4-2, TRBJ1-1)
CASSQAGFGMDTEAFF

SEQ ID NO: 93965 - protein, 13 aa, Homo sapiens
  CDR3 for alpha chain variable domain of TCR clone 46983 (TRAV13-1, TRAJ39)
CAASICAGNMLTF

SEQ ID NO: 93966 - protein, 15 aa, Homo sapiens
  CDR3 for beta chain variable domain of TCR clone 46983 (TRBV7-9, TRBJ1-1)
CASSLLEQGGTEAFF

SEQ ID NO: 93967 - protein, 14 aa, Homo sapiens
  CDR3 for alpha chain variable domain of TCR clone 46984 (TRAV8-6, TRAJ29)
CAVSRASGNTPLVS

SEQ ID NO: 93968 - protein, 13 aa, Homo sapiens
  CDR3 for beta chain variable domain of TCR clone 46984 (TRBV19, TRBJ1-5)
CASSEGSNQPQHF

SEQ ID NO: 93969 - protein, 16 aa, Homo sapiens
  CDR3 for alpha chain variable domain of TCR clone 46985 (TRAV14/DV4, TRAJ53)
CAMREGCGGSNYKLTF

SEQ ID NO: 93970 - protein, 16 aa, Homo sapiens
  CDR3 for beta chain variable domain of TCR clone 46985 (TRBV20-1, TRBJ1-4)
CSAPGQGLLTNEKLFF

SEQ ID NO: 93971 - protein, 22 aa, Homo sapiens
  CDR3 for alpha chain variable domain of TCR clone 46986 (TRAV2, TRAJ10)
ILQVREADAAVYYTGGGNKLTF

SEQ ID NO: 93972 - protein, 16 aa, Homo sapiens
  CDR3 for beta chain variable domain of TCR clone 46986 (TRBV5-6, TRBJ1-2)
CASSRGVTGGSYGYTF

SEQ ID NO: 93973 - protein, 12 aa, Homo sapiens
  CDR3 for alpha chain variable domain of TCR clone 46987 (TRAV8-3, TRAJ26)
CAGDNYGQNFVF

SEQ ID NO: 93974 - protein, 17 aa, Homo sapiens
  CDR3 for beta chain variable domain of TCR clone 46987 (TRBV7-8, TRBJ2-6)
CASSAGTGGAGANDLTF

SEQ ID NO: 93975 - protein, 13 aa, Homo sapiens
  CDR3 for alpha chain variable domain of TCR clone 46988 (TRAV2, TRAJ40)
CAVVTSGTYKYIF

SEQ ID NO: 93976 - protein, 15 aa, Homo sapiens
  CDR3 for beta chain variable domain of TCR clone 46988 (TRBV7-2, TRBJ2-1)
CASSFDPGRRNEQFF

SEQ ID NO: 93977 - protein, 14 aa, Homo sapiens
  CDR3 for alpha chain variable domain of TCR clone 46989 (TRAV2, TRAJ8)
CAGRGNTGLQKLVF

SEQ ID NO: 93978 - protein, 14 aa, Homo sapiens
  CDR3 for beta chain variable domain of TCR clone 46989 (TRBV20-1, TRBJ1-1)
CSAQTRIGGTEAFF

SEQ ID NO: 93979 - protein, 12 aa, Homo sapiens
  CDR3 for alpha chain variable domain of TCR clone 46990 (TRAV1-1, TRAJ8)
CAGVTGFQKLVF

SEQ ID NO: 93980 - protein, 15 aa, Homo sapiens
  CDR3 for beta chain variable domain of TCR clone 46990 (TRBV7-9, TRBJ1-4)
CASSRTGGFNEKLFF

SEQ ID NO: 93981 - protein, 15 aa, Homo sapiens
  CDR3 for alpha chain variable domain of TCR clone 46991 (TRAV17, TRAJ57)
CATGPSQGGSENLVF

SEQ ID NO: 93982 - protein, 18 aa, Homo sapiens
  CDR3 for beta chain variable domain of TCR clone 46991 (TRBV7-9, TRBJ2-7)
CASSLTTSGSRTWYEQYF

SEQ ID NO: 93983 - protein, 12 aa, Homo sapiens
  CDR3 for alpha chain variable domain of TCR clone 46992 (TRAV13-2, TRAJ23)
CAERHRGGKLIF

SEQ ID NO: 93984 - protein, 16 aa, Homo sapiens
  CDR3 for beta chain variable domain of TCR clone 46992 (TRBV20-1, TRBJ1-4)
CSAPEQGLLTNEKLFF

SEQ ID NO: 93985 - protein, 16 aa, Homo sapiens
  CDR3 for alpha chain variable domain of TCR clone 46993 (TRAV23/DV6, TRAJ9)
CAASIGGNTGGFKTIF

SEQ ID NO: 93986 - protein, 16 aa, Homo sapiens
  CDR3 for beta chain variable domain of TCR clone 46993 (TRBV20-1, TRBJ1-4)
CSAPGQGLLTNEKLFF

SEQ ID NO: 93987 - protein, 14 aa, Homo sapiens
  CDR3 for alpha chain variable domain of TCR clone 46994 (TRAV1-1, TRAJ27)
CAVIYNTNAGKSTF

SEQ ID NO: 93988 - protein, 15 aa, Homo sapiens
  CDR3 for beta chain variable domain of TCR clone 46994 (TRBV7-2, TRBJ2-1)
CASSSGLAGVNEQFF

SEQ ID NO: 93989 - protein, 10 aa, Homo sapiens
  CDR3 for alpha chain variable domain of TCR clone 46995 (TRAV21, TRAJ31)
CAVDDARLMF

SEQ ID NO: 93990 - protein, 13 aa, Homo sapiens
  CDR3 for beta chain variable domain of TCR clone 46995 (TRBV4-1, TRBJ1-1)
CASSRKMNTEAFF

SEQ ID NO: 93991 - protein, 12 aa, Homo sapiens
  CDR3 for alpha chain variable domain of TCR clone 46996 (TRAV12-2, TRAJ8)
CAVNTGFQKLVF

SEQ ID NO: 93992 - protein, 15 aa, Homo sapiens
  CDR3 for beta chain variable domain of TCR clone 46996 (TRBV7-8, TRBJ1-5)
CACSLERRGLEPQHF

SEQ ID NO: 93993 - protein, 10 aa, Homo sapiens
  CDR3 for alpha chain variable domain of TCR clone 46997 (TRAV8-6, TRAJ42)
CAVRGRKLRK

SEQ ID NO: 93994 - protein, 13 aa, Homo sapiens
  CDR3 for beta chain variable domain of TCR clone 46997 (TRBV7-3, TRBJ1-1)
CASSQDWGAEAFF

SEQ ID NO: 93995 - protein, 13 aa, Homo sapiens
  CDR3 for alpha chain variable domain of TCR clone 46998 (TRAV17, TRAJ9)
CAMDYTGGFKTIF

SEQ ID NO: 93996 - protein, 14 aa, Homo sapiens
  CDR3 for beta chain variable domain of TCR clone 46998 (TRBV19, TRBJ2-5)
CASSMTGQQETQYF

SEQ ID NO: 93997 - protein, 12 aa, Homo sapiens
  CDR3 for alpha chain variable domain of TCR clone 46999 (TRAV12-3, TRAJ17)
CAMTLTGNKLTF

SEQ ID NO: 93998 - protein, 17 aa, Homo sapiens
  CDR3 for beta chain variable domain of TCR clone 46999 (TRBV15, TRBJ1-1)
CATSRVGGADGDTEAFF

SEQ ID NO: 93999 - protein, 13 aa, Homo sapiens
  CDR3 for alpha chain variable domain of TCR clone 47000 (TRAV2, TRAJ40)
CAVVTSGTYKYIF

SEQ ID NO: 94000 - protein, 13 aa, Homo sapiens
  CDR3 for beta chain variable domain of TCR clone 47000 (TRBV4-1, TRBJ2-1)
CASSQAGGDEQFF

SEQ ID NO: 94001 - protein, 14 aa, Homo sapiens
  CDR3 for alpha chain variable domain of TCR clone 47001 (TRAV1-2, TRAJ16)
CAVNRFSDGQKLLF

SEQ ID NO: 94002 - protein, 11 aa, Homo sapiens
  CDR3 for beta chain variable domain of TCR clone 47001 (TRBV20-1, TRBJ2-7)
CSARLSYEQYF

SEQ ID NO: 94003 - protein, 13 aa, Homo sapiens
  CDR3 for alpha chain variable domain of TCR clone 47002 (TRAV12-2, TRAJ39)
CAVNNNAGNMLTF

SEQ ID NO: 94004 - protein, 13 aa, Homo sapiens
  CDR3 for beta chain variable domain of TCR clone 47002 (TRBV2, TRBJ1-5)
CVTAGPGNQPQHF

SEQ ID NO: 94005 - protein, 16 aa, Homo sapiens
  CDR3 for alpha chain variable domain of TCR clone 47003 (TRAV17, TRAJ35)
RATAEGGIGFGNVLHC

SEQ ID NO: 94006 - protein, 16 aa, Homo sapiens
  CDR3 for beta chain variable domain of TCR clone 47003 (TRBV6-5, TRBJ2-7)
CASSSDPTSGFYEQYF

SEQ ID NO: 94007 - protein, 13 aa, Homo sapiens
  CDR3 for alpha chain variable domain of TCR clone 47004 (TRAV17, TRAJ9)
CATDYTGGFKTIF

SEQ ID NO: 94008 - protein, 14 aa, Homo sapiens
  CDR3 for beta chain variable domain of TCR clone 47004 (TRBV19, TRBJ2-5)
CANSMTGQQETQYF

SEQ ID NO: 94009 - protein, 11 aa, Homo sapiens
  CDR3 for alpha chain variable domain of TCR clone 47005 (TRAV21, TRAJ11)
CAVNGYSTLTF

SEQ ID NO: 94010 - protein, 20 aa, Homo sapiens
  CDR3 for beta chain variable domain of TCR clone 47005 (TRBV28, TRBJ2-7)
CASTPIGRSPGLAGGNEQFF

SEQ ID NO: 94011 - protein, 21 aa, Homo sapiens
  CDR3 for alpha chain variable domain of TCR clone 47006 (TRAV36/DV7, TRAJ39)
TATQTGDSAIYLPNAGNMLTF

SEQ ID NO: 94012 - protein, 13 aa, Homo sapiens
  CDR3 for beta chain variable domain of TCR clone 47006 (TRBV7-3, TRBJ1-1)
CASSQDWGAEAFF

SEQ ID NO: 94013 - protein, 14 aa, Homo sapiens
  CDR3 for alpha chain variable domain of TCR clone 47007 (TRAV1-2, TRAJ16)
CAVNRFSDGQKLLF

SEQ ID NO: 94014 - protein, 15 aa, Homo sapiens
  CDR3 for beta chain variable domain of TCR clone 47007 (TRBV9, TRBJ1-6)
CASSGAGTGDSPLHF

SEQ ID NO: 94015 - protein, 16 aa, Homo sapiens
  CDR3 for alpha chain variable domain of TCR clone 47008 (TRAV13-2, TRAJ37)
CAENIRGSSNTGKLIF

SEQ ID NO: 94016 - protein, 15 aa, Homo sapiens
  CDR3 for beta chain variable domain of TCR clone 47008 (TRBV4-1, TRBJ2-7)
CASSQQGQGFDEQYF

SEQ ID NO: 94017 - protein, 12 aa, Homo sapiens
  CDR3 for alpha chain variable domain of TCR clone 47009 (TRAV13-1, TRAJ36)
WRGGAGANNLFF

SEQ ID NO: 94018 - protein, 16 aa, Homo sapiens
  CDR3 for beta chain variable domain of TCR clone 47009 (TRBV7-9, TRBJ2-5)
CASRLGIGTRKETQYF

SEQ ID NO: 94019 - protein, 16 aa, Homo sapiens
  CDR3 for alpha chain variable domain of TCR clone 47010 (TRAV13-1, TRAJ48)
CAASIFGNFGNEKLTF

SEQ ID NO: 94020 - protein, 12 aa, Homo sapiens
  CDR3 for beta chain variable domain of TCR clone 47010 (TRBV14, TRBJ2-4)
CASRNLKSIQYF

SEQ ID NO: 94021 - protein, 14 aa, Homo sapiens
  CDR3 for alpha chain variable domain of TCR clone 47011 (TRAV16, TRAJ48)
CALTPGFGNEKLTF

SEQ ID NO: 94022 - protein, 14 aa, Homo sapiens
  CDR3 for beta chain variable domain of TCR clone 47011 (TRBV7-2, TRBJ2-7)
FASSSISGFSEQYF

SEQ ID NO: 94023 - protein, 15 aa, Homo sapiens
  CDR3 for alpha chain variable domain of TCR clone 47012 (TRAV14/DV4, TRAJ10)
CAMRELTGGGNKLNF

SEQ ID NO: 94024 - protein, 18 aa, Homo sapiens
  CDR3 for beta chain variable domain of TCR clone 47012 (TRBV7-9, TRBJ2-7)
CASSLTTSGSRTWYEQYF

SEQ ID NO: 94025 - protein, 15 aa, Homo sapiens
  CDR3 for alpha chain variable domain of TCR clone 47013 (TRAV26-1, TRAJ29)
CIVRVEGSGNTPLCF

SEQ ID NO: 94026 - protein, 15 aa, Homo sapiens
  CDR3 for beta chain variable domain of TCR clone 47013 (TRBV7-9, TRBJ1-5)
CASSQGHQPNQPQHF

SEQ ID NO: 94027 - protein, 11 aa, Homo sapiens
  CDR3 for alpha chain variable domain of TCR clone 47014 (TRAV21, TRAJ23)
CAPQRRGKLIF

SEQ ID NO: 94028 - protein, 14 aa, Homo sapiens
  CDR3 for beta chain variable domain of TCR clone 47014 (TRBV19, TRBJ2-1)
CASPTFVLSGEQFF

SEQ ID NO: 94029 - protein, 12 aa, Homo sapiens
  CDR3 for alpha chain variable domain of TCR clone 47015 (TRAV12-3, TRAJ34)
CAMGYNTDKLIF

SEQ ID NO: 94030 - protein, 14 aa, Homo sapiens
  CDR3 for beta chain variable domain of TCR clone 47015 (TRBV4-1, TRBJ2-2)
CASSQAVNTGELFL

SEQ ID NO: 94031 - protein, 14 aa, Homo sapiens
  CDR3 for alpha chain variable domain of TCR clone 47016 (TRAV8-4, TRAJ13)
CAVTFSGGYQKVTF

SEQ ID NO: 94032 - protein, 14 aa, Homo sapiens
  CDR3 for beta chain variable domain of TCR clone 47016 (TRBV7-2, TRBJ1-2)
CASSQTGSTYGYTF

SEQ ID NO: 94033 - protein, 17 aa, Homo sapiens
  CDR3 for alpha chain variable domain of TCR clone 47017 (TRAV8-6, TRAJ58)
CAVSSWVGETSGSRLTF

SEQ ID NO: 94034 - protein, 14 aa, Homo sapiens
  CDR3 for beta chain variable domain of TCR clone 47017 (TRBV4-2, TRBJ2-1)
CASGLDRAYNEHFF

SEQ ID NO: 94035 - protein, 13 aa, Homo sapiens
  CDR3 for alpha chain variable domain of TCR clone 47018 (TRAV35, TRAJ44)
CAGLSGTASKLTF

SEQ ID NO: 94036 - protein, 17 aa, Homo sapiens
  CDR3 for beta chain variable domain of TCR clone 47018 (TRBV7-8, TRBJ1-2)
CACSLRPLQGHLYGYTF

SEQ ID NO: 94037 - protein, 14 aa, Homo sapiens
  CDR3 for alpha chain variable domain of TCR clone 47019 (TRAV23/DV6, TRAJ40)
CAASLTSGTYKYIF

SEQ ID NO: 94038 - protein, 15 aa, Homo sapiens
  CDR3 for beta chain variable domain of TCR clone 47019 (TRBV7-8, TRBJ2-1)
CASSLADSLYNEQFF

SEQ ID NO: 94039 - protein, 13 aa, Homo sapiens
  CDR3 for alpha chain variable domain of TCR clone 47020 (TRAV13-2, TRAJ13)
CAERPGGYQKVTF

SEQ ID NO: 94040 - protein, 11 aa, Homo sapiens
  CDR3 for beta chain variable domain of TCR clone 47020 (TRBV11-2, TRBJ2-2)
CASSLPGELFF

SEQ ID NO: 94041 - protein, 13 aa, Homo sapiens
  CDR3 for alpha chain variable domain of TCR clone 47021 (TRAV2, TRAJ21)
CAVEDLNFNKFYF

SEQ ID NO: 94042 - protein, 15 aa, Homo sapiens
  CDR3 for beta chain variable domain of TCR clone 47021 (TRBV28, TRBJ2-5)
CASSPGQASIETQYF

SEQ ID NO: 94043 - protein, 13 aa, Homo sapiens
  CDR3 for alpha chain variable domain of TCR clone 47022 (TRAV20, TRAJ37)
CAGCSTNTGKLIF

SEQ ID NO: 94044 - protein, 11 aa, Homo sapiens
  CDR3 for beta chain variable domain of TCR clone 47022 (TRBV12-4, TRBJ2-3)
CASTATDTQYF

SEQ ID NO: 94045 - protein, 16 aa, Homo sapiens
  CDR3 for alpha chain variable domain of TCR clone 47023 (TRAV3, TRAJ4)
CAVRPSPSGGYIKLIF

SEQ ID NO: 94046 - protein, 12 aa, Homo sapiens
  CDR3 for beta chain variable domain of TCR clone 47023 (TRBV7-9, TRBJ2-7)
CASSQGVYEQYF

SEQ ID NO: 94047 - protein, 15 aa, Homo sapiens
  CDR3 for alpha chain variable domain of TCR clone 47024 (TRAV29/DV5, TRAJ24)
CAASGATDSWGKLQF

SEQ ID NO: 94048 - protein, 12 aa, Homo sapiens
  CDR3 for beta chain variable domain of TCR clone 47024 (TRBV11-2, TRBJ2-2)
CASSLPTGELFF

SEQ ID NO: 94049 - protein, 15 aa, Homo sapiens
  CDR3 for alpha chain variable domain of TCR clone 47025 (TRAV12-3, TRAJ42)
CAISGHGGSQGNLIF

SEQ ID NO: 94050 - protein, 13 aa, Homo sapiens
  CDR3 for beta chain variable domain of TCR clone 47025 (TRBV19, TRBJ2-5)
CVSSGRAGETQYF

SEQ ID NO: 94051 - protein, 12 aa, Homo sapiens
  CDR3 for alpha chain variable domain of TCR clone 47026 (TRAV26-1, TRAJ36)
CIVRVRADNLFF

SEQ ID NO: 94052 - protein, 20 aa, Homo sapiens
  CDR3 for beta chain variable domain of TCR clone 47026 (TRBV7-8, TRBJ2-2)
CASSHLFPGPTIHITGELFF

SEQ ID NO: 94053 - protein, 12 aa, Homo sapiens
  CDR3 for alpha chain variable domain of TCR clone 47027 (TRAV13-1, TRAJ53)
AASGGSNYKLTF

SEQ ID NO: 94054 - protein, 15 aa, Homo sapiens
  CDR3 for beta chain variable domain of TCR clone 47027 (TRBV5-1, TRBJ2-1)
CASSPPRALYNEQFF

SEQ ID NO: 94055 - protein, 14 aa, Homo sapiens
  CDR3 for alpha chain variable domain of TCR clone 47028 (TRAV13-1, TRAJ44)
CAAKATGTASKLTF

SEQ ID NO: 94056 - protein, 17 aa, Homo sapiens
  CDR3 for beta chain variable domain of TCR clone 47028 (TRBV7-3, TRBJ2-3)
RASSLMKRMRGADTQYY

SEQ ID NO: 94057 - protein, 15 aa, Homo sapiens
  CDR3 for alpha chain variable domain of TCR clone 47029 (TRAV8-4, TRAJ7)
CAVSGGNYGNNSLAF

SEQ ID NO: 94058 - protein, 11 aa, Homo sapiens
  CDR3 for beta chain variable domain of TCR clone 47029 (TRBV20-1, TRBJ2-1)
CSLSSGSEQFF

SEQ ID NO: 94059 - protein, 14 aa, Homo sapiens
  CDR3 for alpha chain variable domain of TCR clone 47030 (TRAV8-3, TRAJ39)
CAVGANNAGNMLTF

SEQ ID NO: 94060 - protein, 12 aa, Homo sapiens
  CDR3 for beta chain variable domain of TCR clone 47030 (TRBV11-1, TRBJ1-1)
CASSHRQGEAFF

SEQ ID NO: 94061 - protein, 14 aa, Homo sapiens
  CDR3 for alpha chain variable domain of TCR clone 47031 (TRAV2, TRAJ20)
CAVEDVVNDYKLSF

SEQ ID NO: 94062 - protein, 14 aa, Homo sapiens
  CDR3 for beta chain variable domain of TCR clone 47031 (TRBV19, TRBJ2-1)
CASPTFVLSGEQFF

SEQ ID NO: 94063 - protein, 11 aa, Homo sapiens
  CDR3 for alpha chain variable domain of TCR clone 47032 (TRAV2, TRAJ13)
CASRGYQKVTF

SEQ ID NO: 94064 - protein, 18 aa, Homo sapiens
  CDR3 for beta chain variable domain of TCR clone 47032 (TRBV11-2, TRBJ2-3)
CASSLGGASRGAPNTQYF

SEQ ID NO: 94065 - protein, 14 aa, Homo sapiens
  CDR3 for alpha chain variable domain of TCR clone 47033 (TRAV29/DV5, TRAJ36)
CAARRKTGANNLFF

SEQ ID NO: 94066 - protein, 14 aa, Homo sapiens
  CDR3 for beta chain variable domain of TCR clone 47033 (TRBV12-5, TRBJ2-5)
CASGSRTHQESQYF

SEQ ID NO: 94067 - protein, 13 aa, Homo sapiens
  CDR3 for alpha chain variable domain of TCR clone 47034 (TRAV8-3, TRAJ4)
WVLYSGGYNKLIF

SEQ ID NO: 94068 - protein, 14 aa, Homo sapiens
  CDR3 for beta chain variable domain of TCR clone 47034 (TRBV7-9, TRBJ2-3)
CASSLEDGTDTQYF

SEQ ID NO: 94069 - protein, 12 aa, Homo sapiens
  CDR3 for alpha chain variable domain of TCR clone 47035 (TRAV8-3, TRAJ26)
CAGDNYGQNFVF

SEQ ID NO: 94070 - protein, 11 aa, Homo sapiens
  CDR3 for beta chain variable domain of TCR clone 47035 (TRBV29-1, TRBJ2-5)
CSEDRTGTQYL

SEQ ID NO: 94071 - protein, 11 aa, Homo sapiens
  CDR3 for alpha chain variable domain of TCR clone 47036 (TRAV29/DV5, TRAJ31)
CAVSYRDRLMF

SEQ ID NO: 94072 - protein, 19 aa, Homo sapiens
  CDR3 for beta chain variable domain of TCR clone 47036 (TRBV19, TRBJ2-5)
CASSIGQVTDFFLGETQYF

SEQ ID NO: 94073 - protein, 10 aa, Homo sapiens
  CDR3 for alpha chain variable domain of TCR clone 47037 (TRAV12-3, TRAJ49)
CAMNDGQFYF

SEQ ID NO: 94074 - protein, 15 aa, Homo sapiens
  CDR3 for beta chain variable domain of TCR clone 47037 (TRBV20-1, TRBJ2-7)
CSARDRVSGMDEQYF

SEQ ID NO: 94075 - protein, 15 aa, Homo sapiens
  CDR3 for alpha chain variable domain of TCR clone 47038 (TRAV26-1, TRAJ12)
IASSELMDSSYKLVF

SEQ ID NO: 94076 - protein, 11 aa, Homo sapiens
  CDR3 for beta chain variable domain of TCR clone 47038 (TRBV7-9, TRBJ2-3)
CASSPPDTQYF

SEQ ID NO: 94077 - protein, 13 aa, Homo sapiens
  CDR3 for alpha chain variable domain of TCR clone 47039 (TRAV21, TRAJ36)
CAVIKTGANKLFF

SEQ ID NO: 94078 - protein, 13 aa, Homo sapiens
  CDR3 for beta chain variable domain of TCR clone 47039 (TRBV29-1, TRBJ2-3)
CSATRGGRDTQYF

SEQ ID NO: 94079 - protein, 13 aa, Homo sapiens
  CDR3 for alpha chain variable domain of TCR clone 47040 (TRAV21, TRAJ20)
CAVGLRVNYKLSF

SEQ ID NO: 94080 - protein, 13 aa, Homo sapiens
  CDR3 for beta chain variable domain of TCR clone 47040 (TRBV6-1, TRBJ1-1)
CASSRQGNTEAFF

SEQ ID NO: 94081 - protein, 15 aa, Homo sapiens
  CDR3 for alpha chain variable domain of TCR clone 47041 (TRAV2, TRAJ9)
CAVEDRGTGGFKTIF

SEQ ID NO: 94082 - protein, 12 aa, Homo sapiens
  CDR3 for beta chain variable domain of TCR clone 47041 (TRBV12-4, TRBJ1-3)
CASSFSGNTIYF

SEQ ID NO: 94083 - protein, 18 aa, Homo sapiens
  CDR3 for alpha chain variable domain of TCR clone 47042 (TRAV13-1, TRAJ52)
CAASKRSAGGTSYGKLTF

SEQ ID NO: 94084 - protein, 14 aa, Homo sapiens
  CDR3 for beta chain variable domain of TCR clone 47042 (TRBV12-5, TRBJ2-5)
CASGSRTHQETQYF

SEQ ID NO: 94085 - protein, 14 aa, Homo sapiens
  CDR3 for alpha chain variable domain of TCR clone 47043 (TRAV29/DV5, TRAJ45)
CEASFRGGADGLTF

SEQ ID NO: 94086 - protein, 11 aa, Homo sapiens
  CDR3 for beta chain variable domain of TCR clone 47043 (TRBV11-2, TRBJ2-2)
CASSLPGELFF

SEQ ID NO: 94087 - protein, 16 aa, Homo sapiens
  CDR3 for alpha chain variable domain of TCR clone 47044 (TRAV21, TRAJ37)
CAVRTAGSSYTGKLIF

SEQ ID NO: 94088 - protein, 13 aa, Homo sapiens
  CDR3 for beta chain variable domain of TCR clone 47044 (TRBV7-9, TRBJ2-5)
CASLPSGRETQYF

SEQ ID NO: 94089 - protein, 14 aa, Homo sapiens
  CDR3 for alpha chain variable domain of TCR clone 47045 (TRAV8-4, TRAJ54)
CAVSEVLGAQKLVF

SEQ ID NO: 94090 - protein, 16 aa, Homo sapiens
  CDR3 for beta chain variable domain of TCR clone 47045 (TRBV19, TRBJ2-1)
CASSKAGPSSYNEQFF

SEQ ID NO: 94091 - protein, 16 aa, Homo sapiens
  CDR3 for alpha chain variable domain of TCR clone 47046 (TRAV16, TRAJ4)
CALSRMFSGGYNNLIF

SEQ ID NO: 94092 - protein, 16 aa, Homo sapiens
  CDR3 for beta chain variable domain of TCR clone 47046 (TRBV24-1, TRBJ2-3)
CATSDPGTGATDTQYF

SEQ ID NO: 94093 - protein, 12 aa, Homo sapiens
  CDR3 for alpha chain variable domain of TCR clone 47047 (TRAV8-3, TRAJ26)
CAVGAGGQNFVF

SEQ ID NO: 94094 - protein, 14 aa, Homo sapiens
  CDR3 for beta chain variable domain of TCR clone 47047 (TRBV5-1, TRBJ1-5)
CASSLGQGAQPQNF

SEQ ID NO: 94095 - protein, 12 aa, Homo sapiens
  CDR3 for alpha chain variable domain of TCR clone 47048 (TRAV35, TRAJ39)
LAQNNAGNMLTF

SEQ ID NO: 94096 - protein, 16 aa, Homo sapiens
  CDR3 for beta chain variable domain of TCR clone 47048 (TRBV2, TRBJ2-3)
CASSTSVEGVTDTQYF

SEQ ID NO: 94097 - protein, 12 aa, Homo sapiens
  CDR3 for alpha chain variable domain of TCR clone 47049 (TRAV12-3, TRAJ17)
CAMTLTGNKLTF

SEQ ID NO: 94098 - protein, 16 aa, Homo sapiens
  CDR3 for beta chain variable domain of TCR clone 47049 (TRBV13, TRBJ2-2)
CASSTRTGEHTGELFF

SEQ ID NO: 94099 - protein, 13 aa, Homo sapiens
  CDR3 for alpha chain variable domain of TCR clone 47050 (TRAV27, TRAJ45)
CRSSGGGADGLTF

SEQ ID NO: 94100 - protein, 17 aa, Homo sapiens
  CDR3 for beta chain variable domain of TCR clone 47050 (TRBV11-2, TRBJ2-1)
CASSLYPPVVEYNEQFF

SEQ ID NO: 94101 - protein, 13 aa, Homo sapiens
  CDR3 for alpha chain variable domain of TCR clone 47051 (TRAV13-1, TRAJ37)
CAAVSGNTGTLIF

SEQ ID NO: 94102 - protein, 17 aa, Homo sapiens
  CDR3 for beta chain variable domain of TCR clone 47051 (TRBV10-2, TRBJ1-6)
CASSENRGSSYNSPLHF

SEQ ID NO: 94103 - protein, 10 aa, Homo sapiens
  CDR3 for alpha chain variable domain of TCR clone 47052 (TRAV23/DV6, TRAJ57)
CAASSTLSQG

SEQ ID NO: 94104 - protein, 14 aa, Homo sapiens
  CDR3 for beta chain variable domain of TCR clone 47052 (TRBV25-1, TRBJ1-1)
FASTHLGGNTEAFF

SEQ ID NO: 94105 - protein, 13 aa, Homo sapiens
  CDR3 for alpha chain variable domain of TCR clone 47053 (TRAV13-1, TRAJ39)
CSKYSDAGNMLTF

SEQ ID NO: 94106 - protein, 16 aa, Homo sapiens
  CDR3 for beta chain variable domain of TCR clone 47053 (TRBV20-1, TRBJ1-4)
CSAPGQGLLTNEKLFF

SEQ ID NO: 94107 - protein, 11 aa, Homo sapiens
  CDR3 for alpha chain variable domain of TCR clone 47054 (TRAV2, TRAJ13)
CASGGYQKVTF

SEQ ID NO: 94108 - protein, 13 aa, Homo sapiens
  CDR3 for beta chain variable domain of TCR clone 47054 (TRBV5-4, TRBJ2-5)
CASSPVSQETQYF

SEQ ID NO: 94109 - protein, 14 aa, Homo sapiens
  CDR3 for alpha chain variable domain of TCR clone 47055 (TRAV2, TRAJ9)
CAVEDRSGGFKTIF

SEQ ID NO: 94110 - protein, 16 aa, Homo sapiens
  CDR3 for beta chain variable domain of TCR clone 47055 (TRBV12-5, TRBJ2-5)
CAGGPRTSGNQETQYF

SEQ ID NO: 94111 - protein, 15 aa, Homo sapiens
  CDR3 for alpha chain variable domain of TCR clone 47056 (TRAV8-6, TRAJ23)
CAVRLIYNQGGKLTF

SEQ ID NO: 94112 - protein, 13 aa, Homo sapiens
  CDR3 for beta chain variable domain of TCR clone 47056 (TRBV7-2, TRBJ2-2)
CASSLAVTGELFF

SEQ ID NO: 94113 - protein, 16 aa, Homo sapiens
  CDR3 for alpha chain variable domain of TCR clone 47057 (TRAV12-1, TRAJ13)
CVVNLEVSGGYQKVTF

SEQ ID NO: 94114 - protein, 16 aa, Homo sapiens
  CDR3 for beta chain variable domain of TCR clone 47057 (TRBV24-1, TRBJ2-6)
CATSDRRAPGANVLTF

SEQ ID NO: 94115 - protein, 11 aa, Homo sapiens
  CDR3 for alpha chain variable domain of TCR clone 47058 (TRAV2, TRAJ13)
CASGGYQKVTF

SEQ ID NO: 94116 - protein, 15 aa, Homo sapiens
  CDR3 for beta chain variable domain of TCR clone 47058 (TRBV7-9, TRBJ1-2)
CASSLDREPNYGYTF

SEQ ID NO: 94117 - protein, 13 aa, Homo sapiens
  CDR3 for alpha chain variable domain of TCR clone 47059 (TRAV17, TRAJ5)
CAPMDTGRRALTF

SEQ ID NO: 94118 - protein, 14 aa, Homo sapiens
  CDR3 for beta chain variable domain of TCR clone 47059 (TRBV6-1, TRBJ1-3)
CASVQGGGGNTIYF

SEQ ID NO: 94119 - protein, 15 aa, Homo sapiens
  CDR3 for alpha chain variable domain of TCR clone 47060 (TRAV8-3, TRAJ21)
CAVGALPPRGYKFYF

SEQ ID NO: 94120 - protein, 13 aa, Homo sapiens
  CDR3 for beta chain variable domain of TCR clone 47060 (TRBV19, TRBJ1-3)
CASRLSLGNTIYF

SEQ ID NO: 94121 - protein, 11 aa, Homo sapiens
  CDR3 for alpha chain variable domain of TCR clone 47061 (TRAV12-1, TRAJ34)
CVVNKGRELIF

SEQ ID NO: 94122 - protein, 12 aa, Homo sapiens
  CDR3 for beta chain variable domain of TCR clone 47061 (TRBV2, TRBJ2-1)
CAYGRPGNEQFF

SEQ ID NO: 94123 - protein, 11 aa, Homo sapiens
  CDR3 for alpha chain variable domain of TCR clone 47062 (TRAV4, TRAJ31)
CLVGLNARLMF

SEQ ID NO: 94124 - protein, 16 aa, Homo sapiens
  CDR3 for beta chain variable domain of TCR clone 47062 (TRBV15, TRBJ2-6)
CATSVNGGFLTNVLTF

SEQ ID NO: 94125 - protein, 14 aa, Homo sapiens
  CDR3 for alpha chain variable domain of TCR clone 47063 (TRAV1-2, TRAJ16)
CAVNRFSDGQKLLF

SEQ ID NO: 94126 - protein, 13 aa, Homo sapiens
  CDR3 for beta chain variable domain of TCR clone 47063 (TRBV7-9, TRBJ1-2)
RASSLKQNYGYTF

SEQ ID NO: 94127 - protein, 16 aa, Homo sapiens
  CDR3 for alpha chain variable domain of TCR clone 47064 (TRAV35, TRAJ28)
CAGQRYSGAGSYQLTF

SEQ ID NO: 94128 - protein, 13 aa, Homo sapiens
  CDR3 for beta chain variable domain of TCR clone 47064 (TRBV19, TRBJ1-2)
CASSQGQVYGYAF

SEQ ID NO: 94129 - protein, 15 aa, Homo sapiens
  CDR3 for alpha chain variable domain of TCR clone 47065 (TRAV22, TRAJ37)
CAVALLVSNTGKLIF

SEQ ID NO: 94130 - protein, 12 aa, Homo sapiens
  CDR3 for beta chain variable domain of TCR clone 47065 (TRBV20-1, TRBJ2-1)
CSARLGTDEQFF

SEQ ID NO: 94131 - protein, 14 aa, Homo sapiens
  CDR3 for alpha chain variable domain of TCR clone 47066 (TRAV13-1, TRAJ44)
CAAKATGTASKLTF

SEQ ID NO: 94132 - protein, 16 aa, Homo sapiens
  CDR3 for beta chain variable domain of TCR clone 47066 (TRBV7-3, TRBJ2-1)
CASSLEGYRSYNEQFF

SEQ ID NO: 94133 - protein, 11 aa, Homo sapiens
  CDR3 for alpha chain variable domain of TCR clone 47067 (TRAV16, TRAJ10)
CAPAREEETNS

SEQ ID NO: 94134 - protein, 14 aa, Homo sapiens
  CDR3 for beta chain variable domain of TCR clone 47067 (TRBV7-2, TRBJ2-1)
CASSLGVGYNEQFF

SEQ ID NO: 94135 - protein, 14 aa, Homo sapiens
  CDR3 for alpha chain variable domain of TCR clone 47068 (TRAV30, TRAJ33)
CGTVAPRSNYQLIW

SEQ ID NO: 94136 - protein, 16 aa, Homo sapiens
  CDR3 for beta chain variable domain of TCR clone 47068 (TRBV3-1, TRBJ2-5)
CGSSPGQFNGFGTQYF

SEQ ID NO: 94137 - protein, 16 aa, Homo sapiens
  CDR3 for alpha chain variable domain of TCR clone 47069 (TRAV1-2, TRAJ10)
CAVRGVLTGGGNKLTF

SEQ ID NO: 94138 - protein, 14 aa, Homo sapiens
  CDR3 for beta chain variable domain of TCR clone 47069 (TRBV11-1, TRBJ2-7)
CAGSWTGTAYEQYF

SEQ ID NO: 94139 - protein, 15 aa, Homo sapiens
  CDR3 for alpha chain variable domain of TCR clone 47070 (TRAV2, TRAJ9)
CAVEDRGTGGFKTIF

SEQ ID NO: 94140 - protein, 13 aa, Homo sapiens
  CDR3 for beta chain variable domain of TCR clone 47070 (TRBV29-1, TRBJ2-5)
CSACSSRRETQYF

SEQ ID NO: 94141 - protein, 13 aa, Homo sapiens
  CDR3 for alpha chain variable domain of TCR clone 47071 (TRAV3, TRAJ21)
CAVREPDFKKFYF

SEQ ID NO: 94142 - protein, 13 aa, Homo sapiens
  CDR3 for beta chain variable domain of TCR clone 47071 (TRBV9, TRBJ2-1)
CASSPSGGNEQFF

SEQ ID NO: 94143 - protein, 13 aa, Homo sapiens
  CDR3 for alpha chain variable domain of TCR clone 47072 (TRAV13-2, TRAJ5)
CAVMDTGRRALTF

SEQ ID NO: 94144 - protein, 12 aa, Homo sapiens
  CDR3 for beta chain variable domain of TCR clone 47072 (TRBV28, TRBJ2-7)
CASSVSSYEQYF

SEQ ID NO: 94145 - protein, 14 aa, Homo sapiens
  CDR3 for alpha chain variable domain of TCR clone 47073 (TRAV38-1, TRAJ45)
CASHSGGGADGLTF

SEQ ID NO: 94146 - protein, 13 aa, Homo sapiens
  CDR3 for beta chain variable domain of TCR clone 47073 (TRBV10-3, TRBJ2-7)
CASKLAVNYEQYF

SEQ ID NO: 94147 - protein, 15 aa, Homo sapiens
  CDR3 for alpha chain variable domain of TCR clone 47074 (TRAV3, TRAJ17)
CSVRDTGAAGNKLTF

SEQ ID NO: 94148 - protein, 14 aa, Homo sapiens
  CDR3 for beta chain variable domain of TCR clone 47074 (TRBV6-3, TRBJ1-1)
CASSNLLPGAEAFF

SEQ ID NO: 94149 - protein, 12 aa, Homo sapiens
  CDR3 for alpha chain variable domain of TCR clone 47075 (TRAV27, TRAJ13)
CAGVRGYQKVTF

SEQ ID NO: 94150 - protein, 16 aa, Homo sapiens
  CDR3 for beta chain variable domain of TCR clone 47075 (TRBV28, TRBJ2-1)
CVSSSSYSGSLNEQFF

SEQ ID NO: 94151 - protein, 15 aa, Homo sapiens
  CDR3 for alpha chain variable domain of TCR clone 47076 (TRAV9-2, TRAJ49)
CALSPPDHTGIQFYF

SEQ ID NO: 94152 - protein, 14 aa, Homo sapiens
  CDR3 for beta chain variable domain of TCR clone 47076 (TRBV12-4, TRBJ1-1)
CASSLGTGGTEAFF

SEQ ID NO: 94153 - protein, 15 aa, Homo sapiens
  CDR3 for alpha chain variable domain of TCR clone 47077 (TRAV21, TRAJ53)
CATLNNGGSNYKLTF

SEQ ID NO: 94154 - protein, 16 aa, Homo sapiens
  CDR3 for beta chain variable domain of TCR clone 47077 (TRBV9, TRBJ2-1)
CASSVGGGGNYNEQFF

SEQ ID NO: 94155 - protein, 12 aa, Homo sapiens
  CDR3 for alpha chain variable domain of TCR clone 47078 (TRAV12-3, TRAJ17)
CAMTLTGNKLTF

SEQ ID NO: 94156 - protein, 17 aa, Homo sapiens
  CDR3 for beta chain variable domain of TCR clone 47078 (TRBV5-5, TRBJ1-2)
CASSLGSLDGQSEGYTF

SEQ ID NO: 94157 - protein, 11 aa, Homo sapiens
  CDR3 for alpha chain variable domain of TCR clone 47079 (TRAV12-1, TRAJ21)
CVVNNFNKFYF

SEQ ID NO: 94158 - protein, 14 aa, Homo sapiens
  CDR3 for beta chain variable domain of TCR clone 47079 (TRBV15, TRBJ1-5)
CATSREQSNQPQRF

SEQ ID NO: 94159 - protein, 15 aa, Homo sapiens
  CDR3 for alpha chain variable domain of TCR clone 47080 (TRAV13-1, TRAJ3)
CAASKLASSASKIIF

SEQ ID NO: 94160 - protein, 16 aa, Homo sapiens
  CDR3 for beta chain variable domain of TCR clone 47080 (TRBV25-1, TRBJ1-5)
CASGAPTVNSNQPQHL

SEQ ID NO: 94161 - protein, 16 aa, Homo sapiens
  CDR3 for alpha chain variable domain of TCR clone 47081 (TRAV26-1, TRAJ37)
CIVRWDGSGNTGKLIF

SEQ ID NO: 94162 - protein, 17 aa, Homo sapiens
  CDR3 for beta chain variable domain of TCR clone 47081 (TRBV4-1, TRBJ2-7)
CASSRDPLGVRGGEQYF

SEQ ID NO: 94163 - protein, 16 aa, Homo sapiens
  CDR3 for alpha chain variable domain of TCR clone 47082 (TRAV30, TRAJ24)
CGTEIVDADSWGKFQF

SEQ ID NO: 94164 - protein, 17 aa, Homo sapiens
  CDR3 for beta chain variable domain of TCR clone 47082 (TRBV20-1, TRBJ2-1)
CSAPPRLAGTRYNEQFL

SEQ ID NO: 94165 - protein, 15 aa, Homo sapiens
  CDR3 for alpha chain variable domain of TCR clone 47083 (TRAV3, TRAJ4)
CAVRDGTGGYNKLIF

SEQ ID NO: 94166 - protein, 16 aa, Homo sapiens
  CDR3 for beta chain variable domain of TCR clone 47083 (TRBV27, TRBJ2-2)
CASSSSGVSNTGELSF

SEQ ID NO: 94167 - protein, 17 aa, Homo sapiens
  CDR3 for alpha chain variable domain of TCR clone 47084 (TRAV3, TRAJ6)
CAVRDGPRAGGSYIPTF

SEQ ID NO: 94168 - protein, 17 aa, Homo sapiens
  CDR3 for beta chain variable domain of TCR clone 47084 (TRBV20-1, TRBJ2-1)
CSARDPLAGVWDNEQFF

SEQ ID NO: 94169 - protein, 12 aa, Homo sapiens
  CDR3 for alpha chain variable domain of TCR clone 47085 (TRAV16, TRAJ10)
CSRTGGGNKLTF

SEQ ID NO: 94170 - protein, 15 aa, Homo sapiens
  CDR3 for beta chain variable domain of TCR clone 47085 (TRBV6-3, TRBJ2-7)
CASSFPGTVFYEQYF

SEQ ID NO: 94171 - protein, 15 aa, Homo sapiens
  CDR3 for alpha chain variable domain of TCR clone 47086 (TRAV21, TRAJ40)
CAVRPQTSGTYKYIF

SEQ ID NO: 94172 - protein, 13 aa, Homo sapiens
  CDR3 for beta chain variable domain of TCR clone 47086 (TRBV7-2, TRBJ2-2)
CASSPVRAGELFF

SEQ ID NO: 94173 - protein, 14 aa, Homo sapiens
  CDR3 for alpha chain variable domain of TCR clone 47087 (TRAV12-3, TRAJ10)
SHLPLTGGGNKLTF

SEQ ID NO: 94174 - protein, 13 aa, Homo sapiens
  CDR3 for beta chain variable domain of TCR clone 47087 (TRBV9, TRBJ2-1)
CACSPSGGNEQFF

SEQ ID NO: 94175 - protein, 15 aa, Homo sapiens
  CDR3 for alpha chain variable domain of TCR clone 47088 (TRAV8-1, TRAJ6)
CAVNTPPGGSYIPTF

SEQ ID NO: 94176 - protein, 15 aa, Homo sapiens
  CDR3 for beta chain variable domain of TCR clone 47088 (TRBV11-2, TRBJ2-2)
CASSSDRVDAGELFF

SEQ ID NO: 94177 - protein, 18 aa, Homo sapiens
  CDR3 for alpha chain variable domain of TCR clone 47089 (TRAV12-3, TRAJ52)
CAMSVGGAGGTGYGKLTF

SEQ ID NO: 94178 - protein, 14 aa, Homo sapiens
  CDR3 for beta chain variable domain of TCR clone 47089 (TRBV7-2, TRBJ2-7)
CASRSQGAAYEQYF

SEQ ID NO: 94179 - protein, 12 aa, Homo sapiens
  CDR3 for alpha chain variable domain of TCR clone 47090 (TRAV29/DV5, TRAJ34)
CAASDNTDKLIF

SEQ ID NO: 94180 - protein, 13 aa, Homo sapiens
  CDR3 for beta chain variable domain of TCR clone 47090 (TRBV20-1, TRBJ2-7)
CSASPPSSYEQYF

SEQ ID NO: 94181 - protein, 13 aa, Homo sapiens
  CDR3 for alpha chain variable domain of TCR clone 47091 (TRAV2, TRAJ40)
CAVVTSGTYKHIF

SEQ ID NO: 94182 - protein, 14 aa, Homo sapiens
  CDR3 for beta chain variable domain of TCR clone 47091 (TRBV19, TRBJ2-3)
CASSAPRGTDTQYF

SEQ ID NO: 94183 - protein, 11 aa, Homo sapiens
  CDR3 for alpha chain variable domain of TCR clone 47092 (TRAV12-3, TRAJ27)
CSMANAGKSTF

SEQ ID NO: 94184 - protein, 13 aa, Homo sapiens
  CDR3 for beta chain variable domain of TCR clone 47092 (TRBV20-1, TRBJ1-1)
CSARVGGNTEAFF

SEQ ID NO: 94185 - protein, 14 aa, Homo sapiens
  CDR3 for alpha chain variable domain of TCR clone 47093 (TRAV13-1, TRAJ40)
CAARSTSGTYKYIF

SEQ ID NO: 94186 - protein, 12 aa, Homo sapiens
  CDR3 for beta chain variable domain of TCR clone 47093 (TRBV7-9, TRBJ2-7)
CASSIKREEQYF

SEQ ID NO: 94187 - protein, 14 aa, Homo sapiens
  CDR3 for alpha chain variable domain of TCR clone 47094 (TRAV2, TRAJ9)
CAVEDRSGGFKTIF

SEQ ID NO: 94188 - protein, 18 aa, Homo sapiens
  CDR3 for beta chain variable domain of TCR clone 47094 (TRBV11-2, TRBJ2-3)
CASSLGGAARGAPNTQYF

SEQ ID NO: 94189 - protein, 12 aa, Homo sapiens
  CDR3 for alpha chain variable domain of TCR clone 47095 (TRAV29/DV5, TRAJ49)
CAAPDTGNQFYF

SEQ ID NO: 94190 - protein, 12 aa, Homo sapiens
  CDR3 for beta chain variable domain of TCR clone 47095 (TRBV12-4, TRBJ2-7)
CASSLGGYEQYF

SEQ ID NO: 94191 - protein, 16 aa, Homo sapiens
  CDR3 for alpha chain variable domain of TCR clone 47096 (TRAV3, TRAJ3)
CAVRDRAKSSASKLIF

SEQ ID NO: 94192 - protein, 13 aa, Homo sapiens
  CDR3 for beta chain variable domain of TCR clone 47096 (TRBV10-3, TRBJ2-7)
CASKLAVNYEQYF

SEQ ID NO: 94193 - protein, 13 aa, Homo sapiens
  CDR3 for alpha chain variable domain of TCR clone 47097 (TRAV3, TRAJ27)
CAVRPLGAGKSTF

SEQ ID NO: 94194 - protein, 13 aa, Homo sapiens
  CDR3 for beta chain variable domain of TCR clone 47097 (TRBV7-9, TRBJ2-3)
CASSPGFTDTQYF

SEQ ID NO: 94195 - protein, 17 aa, Homo sapiens
  CDR3 for alpha chain variable domain of TCR clone 47098 (TRAV12-3, TRAJ4)
CAMTGAGTRPAVHPYIQ

SEQ ID NO: 94196 - protein, 14 aa, Homo sapiens
  CDR3 for beta chain variable domain of TCR clone 47098 (TRBV10-3, TRBJ1-1)
CAISDTDRGVEAFF

SEQ ID NO: 94197 - protein, 14 aa, Homo sapiens
  CDR3 for alpha chain variable domain of TCR clone 47099 (TRAV12-1, TRAJ13)
CVVIDSGGHQKVTF

SEQ ID NO: 94198 - protein, 17 aa, Homo sapiens
  CDR3 for beta chain variable domain of TCR clone 47099 (TRBV15, TRBJ1-5)
CATSRAPPGTRNQPQHL

SEQ ID NO: 94199 - protein, 11 aa, Homo sapiens
  CDR3 for alpha chain variable domain of TCR clone 47100 (TRAV3, TRAJ17)
PRGAAGNKLTF

SEQ ID NO: 94200 - protein, 16 aa, Homo sapiens
  CDR3 for beta chain variable domain of TCR clone 47100 (TRBV7-6, TRBJ2-1)
RASSAPGPSSYNEQFF

SEQ ID NO: 94201 - protein, 14 aa, Homo sapiens
  CDR3 for alpha chain variable domain of TCR clone 47101 (TRAV23/DV6, TRAJ49)
CAASKSFVGNQFYF

SEQ ID NO: 94202 - protein, 12 aa, Homo sapiens
  CDR3 for beta chain variable domain of TCR clone 47101 (TRBV12-4, TRBJ2-7)
CASSLGGYEQYF

SEQ ID NO: 94203 - protein, 13 aa, Homo sapiens
  CDR3 for alpha chain variable domain of TCR clone 47102 (TRAV20, TRAJ11)
CAVQARGYSTLTF

SEQ ID NO: 94204 - protein, 13 aa, Homo sapiens
  CDR3 for beta chain variable domain of TCR clone 47102 (TRBV7-9, TRBJ1-2)
CASSLKQNYGYTF

SEQ ID NO: 94205 - protein, 13 aa, Homo sapiens
  CDR3 for alpha chain variable domain of TCR clone 47103 (TRAV27, TRAJ49)
CAPRLYTGNQFYF

SEQ ID NO: 94206 - protein, 16 aa, Homo sapiens
  CDR3 for beta chain variable domain of TCR clone 47103 (TRBV4-1, TRBJ1-2)
CASSQDAGQVLYGYTF

SEQ ID NO: 94207 - protein, 13 aa, Homo sapiens
  CDR3 for alpha chain variable domain of TCR clone 47104 (TRAV13-1, TRAJ39)
CSKYSNAGTMLTF

SEQ ID NO: 94208 - protein, 16 aa, Homo sapiens
  CDR3 for beta chain variable domain of TCR clone 47104 (TRBV20-1, TRBJ1-4)
CSAPGQGLLTNEKLFF

SEQ ID NO: 94209 - protein, 13 aa, Homo sapiens
  CDR3 for alpha chain variable domain of TCR clone 47105 (TRAV21, TRAJ27)
CAARPGNAGKSTF

SEQ ID NO: 94210 - protein, 14 aa, Homo sapiens
  CDR3 for beta chain variable domain of TCR clone 47105 (TRBV20-1, TRBJ2-1)
CSAAGGGEYNEQFF

SEQ ID NO: 94211 - protein, 12 aa, Homo sapiens
  CDR3 for alpha chain variable domain of TCR clone 47106 (TRAV17, TRAJ4)
CATDGGYNKLIF

SEQ ID NO: 94212 - protein, 12 aa, Homo sapiens
  CDR3 for beta chain variable domain of TCR clone 47106 (TRBV11-2, TRBJ2-2)
CASSLGGGELFF

SEQ ID NO: 94213 - protein, 16 aa, Homo sapiens
  CDR3 for alpha chain variable domain of TCR clone 47107 (TRAV20, TRAJ22)
CAVQASSSGSARQLTF

SEQ ID NO: 94214 - protein, 13 aa, Homo sapiens
  CDR3 for beta chain variable domain of TCR clone 47107 (TRBV7-2, TRBJ2-5)
CAGSQTSVETQYF

SEQ ID NO: 94215 - protein, 10 aa, Homo sapiens
  CDR3 for alpha chain variable domain of TCR clone 47108 (TRAV12-3, TRAJ49)
CAMTDDQFYF

SEQ ID NO: 94216 - protein, 13 aa, Homo sapiens
  CDR3 for beta chain variable domain of TCR clone 47108 (TRBV12-4, TRBJ1-1)
CASSPGTGFEAFF

SEQ ID NO: 94217 - protein, 14 aa, Homo sapiens
  CDR3 for alpha chain variable domain of TCR clone 47109 (TRAV26-1, TRAJ38)
CIADNAGNNRKLMW

SEQ ID NO: 94218 - protein, 17 aa, Homo sapiens
  CDR3 for beta chain variable domain of TCR clone 47109 (TRBV7-9, TRBJ2-3)
CASSPTVAGDLTDTQYF

SEQ ID NO: 94219 - protein, 15 aa, Homo sapiens
  CDR3 for alpha chain variable domain of TCR clone 47110 (TRAV12-1, TRAJ4)
CVVNPFSGGYNKLIF

SEQ ID NO: 94220 - protein, 16 aa, Homo sapiens
  CDR3 for beta chain variable domain of TCR clone 47110 (TRBV5-1, TRBJ1-1)
CASSKTVTEVGTEAFF

SEQ ID NO: 94221 - protein, 13 aa, Homo sapiens
  CDR3 for alpha chain variable domain of TCR clone 47111 (TRAV2, TRAJ40)
CAVVTSGTYKYIF

SEQ ID NO: 94222 - protein, 14 aa, Homo sapiens
  CDR3 for beta chain variable domain of TCR clone 47111 (TRBV19, TRBJ2-1)
CASPKFVLSGEQFF

SEQ ID NO: 94223 - protein, 14 aa, Homo sapiens
  CDR3 for alpha chain variable domain of TCR clone 47112 (TRAV16, TRAJ29)
WALTRNSGNTPLVF

SEQ ID NO: 94224 - protein, 12 aa, Homo sapiens
  CDR3 for beta chain variable domain of TCR clone 47112 (TRBV2, TRBJ2-1)
CAKREGYNEQFF

SEQ ID NO: 94225 - protein, 15 aa, Homo sapiens
  CDR3 for alpha chain variable domain of TCR clone 47113 (TRAV3, TRAJ22)
CAVRDRGGSARQLTF

SEQ ID NO: 94226 - protein, 14 aa, Homo sapiens
  CDR3 for beta chain variable domain of TCR clone 47113 (TRBV13, TRBJ2-5)
CASSLGPRGETQYF

SEQ ID NO: 94227 - protein, 12 aa, Homo sapiens
  CDR3 for alpha chain variable domain of TCR clone 47114 (TRAV12-1, TRAJ40)
CVVSSGTYKYIF

SEQ ID NO: 94228 - protein, 14 aa, Homo sapiens
  CDR3 for beta chain variable domain of TCR clone 47114 (TRBV20-1, TRBJ2-2)
CSAPNTANTGELFF

SEQ ID NO: 94229 - protein, 15 aa, Homo sapiens
  CDR3 for alpha chain variable domain of TCR clone 47115 (TRAV8-3, TRAJ23)
CAVGDRYNQGGKLIF

SEQ ID NO: 94230 - protein, 22 aa, Homo sapiens
  CDR3 for beta chain variable domain of TCR clone 47115 (TRBV29-1, TRBJ2-5)
TVSNMSPEDSSTYLCSAGTQYF

SEQ ID NO: 94231 - protein, 13 aa, Homo sapiens
  CDR3 for alpha chain variable domain of TCR clone 47116 (TRAV21, TRAJ27)
CAALNTNAGKSTF

SEQ ID NO: 94232 - protein, 14 aa, Homo sapiens
  CDR3 for beta chain variable domain of TCR clone 47116 (TRBV12-4, TRBJ1-1)
CASSLLSGLSEAFF

SEQ ID NO: 94233 - protein, 14 aa, Homo sapiens
  CDR3 for alpha chain variable domain of TCR clone 47117 (TRAV1-2, TRAJ16)
CAVSRFSDGQKLLF

SEQ ID NO: 94234 - protein, 14 aa, Homo sapiens
  CDR3 for beta chain variable domain of TCR clone 47117 (TRBV19, TRBJ2-1)
CASPTFVLSGEQFF

SEQ ID NO: 94235 - protein, 14 aa, Homo sapiens
  CDR3 for alpha chain variable domain of TCR clone 47118 (TRAV23/DV6, TRAJ17)
CAARGRAADNKLTF

SEQ ID NO: 94236 - protein, 12 aa, Homo sapiens
  CDR3 for beta chain variable domain of TCR clone 47118 (TRBV7-9, TRBJ2-3)
CASSFITDTQYF

SEQ ID NO: 94237 - protein, 16 aa, Homo sapiens
  CDR3 for alpha chain variable domain of TCR clone 47119 (TRAV30, TRAJ24)
CGTEIVDDDSWGKFQF

SEQ ID NO: 94238 - protein, 15 aa, Homo sapiens
  CDR3 for beta chain variable domain of TCR clone 47119 (TRBV7-9, TRBJ1-4)
CASSARTGGNEKLFF

SEQ ID NO: 94239 - protein, 12 aa, Homo sapiens
  CDR3 for alpha chain variable domain of TCR clone 47120 (TRAV3, TRAJ43)
CAVRDPNNDMRF

SEQ ID NO: 94240 - protein, 15 aa, Homo sapiens
  CDR3 for beta chain variable domain of TCR clone 47120 (TRBV20-1, TRBJ2-7)
CSARDRVSGMDEQYF

SEQ ID NO: 94241 - protein, 15 aa, Homo sapiens
  CDR3 for alpha chain variable domain of TCR clone 47121 (TRAV17, TRAJ57)
FATGPSQGGSEKLVF

SEQ ID NO: 94242 - protein, 13 aa, Homo sapiens
  CDR3 for beta chain variable domain of TCR clone 47121 (TRBV27, TRBJ1-4)
CASSLMGDEKLFF

SEQ ID NO: 94243 - protein, 13 aa, Homo sapiens
  CDR3 for alpha chain variable domain of TCR clone 47122 (TRAV21, TRAJ37)
CAVSSGNTGKLIS

SEQ ID NO: 94244 - protein, 15 aa, Homo sapiens
  CDR3 for beta chain variable domain of TCR clone 47122 (TRBV12-4, TRBJ1-2)
CASSFVDRGNYGYTF

SEQ ID NO: 94245 - protein, 15 aa, Homo sapiens
  CDR3 for alpha chain variable domain of TCR clone 47123 (TRAV8-3, TRAJ45)
CASSYSGGGADGLTF

SEQ ID NO: 94246 - protein, 13 aa, Homo sapiens
  CDR3 for beta chain variable domain of TCR clone 47123 (TRBV10-3, TRBJ2-7)
CAFKLAVNYEQYF

SEQ ID NO: 94247 - protein, 17 aa, Homo sapiens
  CDR3 for alpha chain variable domain of TCR clone 47124 (TRAV13-1, TRAJ31)
CAPRDRLMFGDGTQLVV

SEQ ID NO: 94248 - protein, 12 aa, Homo sapiens
  CDR3 for beta chain variable domain of TCR clone 47124 (TRBV7-9, TRBJ2-7)
CASSLEGYEQFF

SEQ ID NO: 94249 - protein, 14 aa, Homo sapiens
  CDR3 for alpha chain variable domain of TCR clone 47125 (TRAV1-2, TRAJ8)
CAVREDTGFQKLVF

SEQ ID NO: 94250 - protein, 14 aa, Homo sapiens
  CDR3 for beta chain variable domain of TCR clone 47125 (TRBV11-2, TRBJ2-3)
CASSLGGGANTQYF

SEQ ID NO: 94251 - protein, 14 aa, Homo sapiens
  CDR3 for alpha chain variable domain of TCR clone 47126 (TRAV3, TRAJ22)
CAVRDHGSARQLTF

SEQ ID NO: 94252 - protein, 13 aa, Homo sapiens
  CDR3 for beta chain variable domain of TCR clone 47126 (TRBV11-2, TRBJ2-5)
CASGHGAKETQYF

SEQ ID NO: 94253 - protein, 13 aa, Homo sapiens
  CDR3 for alpha chain variable domain of TCR clone 47127 (TRAV21, TRAJ27)
CSALNTNAGKSTF

SEQ ID NO: 94254 - protein, 14 aa, Homo sapiens
  CDR3 for beta chain variable domain of TCR clone 47127 (TRBV27, TRBJ1-1)
CASSLLSGLSEAFF

SEQ ID NO: 94255 - protein, 15 aa, Homo sapiens
  CDR3 for alpha chain variable domain of TCR clone 47128 (TRAV4, TRAJ39)
CLVGPNNNAGNMLTF

SEQ ID NO: 94256 - protein, 12 aa, Homo sapiens
  CDR3 for beta chain variable domain of TCR clone 47128 (TRBV11-2, TRBJ2-1)
CASSPGNNEQFF

SEQ ID NO: 94257 - protein, 17 aa, Homo sapiens
  CDR3 for alpha chain variable domain of TCR clone 47129 (TRAV23/DV6, TRAJ57)
CAASSTLSQGGSEKLVF

SEQ ID NO: 94258 - protein, 14 aa, Homo sapiens
  CDR3 for beta chain variable domain of TCR clone 47129 (TRBV25-1, TRBJ1-1)
CASTHPGGNTEAFF

SEQ ID NO: 94259 - protein, 15 aa, Homo sapiens
  CDR3 for alpha chain variable domain of TCR clone 47130 (TRAV3, TRAJ20)
CAGRDIKLSDYKLSF

SEQ ID NO: 94260 - protein, 15 aa, Homo sapiens
  CDR3 for beta chain variable domain of TCR clone 47130 (TRBV7-9, TRBJ1-6)
CASSSPGRGNSPLHF

SEQ ID NO: 94261 - protein, 11 aa, Homo sapiens
  CDR3 for alpha chain variable domain of TCR clone 47131 (TRAV21, TRAJ4)
HVSGGYNKLIF

SEQ ID NO: 94262 - protein, 13 aa, Homo sapiens
  CDR3 for beta chain variable domain of TCR clone 47131 (TRBV7-3, TRBJ2-5)
CASSLNAGETQYF

SEQ ID NO: 94263 - protein, 13 aa, Homo sapiens
  CDR3 for alpha chain variable domain of TCR clone 47132 (TRAV4, TRAJ22)
CLGGSGSARQPTF

SEQ ID NO: 94264 - protein, 14 aa, Homo sapiens
  CDR3 for beta chain variable domain of TCR clone 47132 (TRBV13, TRBJ2-5)
CASSLERVGETQYF

SEQ ID NO: 94265 - protein, 16 aa, Homo sapiens
  CDR3 for alpha chain variable domain of TCR clone 47133 (TRAV8-3, TRAJ13)
CAVGAYLSGGYQKVTF

SEQ ID NO: 94266 - protein, 15 aa, Homo sapiens
  CDR3 for beta chain variable domain of TCR clone 47133 (TRBV19, TRBJ1-5)
CASSIVWADNQPQHF

SEQ ID NO: 94267 - protein, 12 aa, Homo sapiens
  CDR3 for alpha chain variable domain of TCR clone 47134 (TRAV3, TRAJ43)
CAVRDPNNDLRF

SEQ ID NO: 94268 - protein, 15 aa, Homo sapiens
  CDR3 for beta chain variable domain of TCR clone 47134 (TRBV27, TRBJ1-5)
CASSLGTGFDQPQHF

SEQ ID NO: 94269 - protein, 14 aa, Homo sapiens
  CDR3 for alpha chain variable domain of TCR clone 47135 (TRAV23/DV6, TRAJ4)
CAAPSPGGYNKLIF

SEQ ID NO: 94270 - protein, 16 aa, Homo sapiens
  CDR3 for beta chain variable domain of TCR clone 47135 (TRBV19, TRBJ1-1)
CASRFGGPVTGTEAFF

SEQ ID NO: 94271 - protein, 18 aa, Homo sapiens
  CDR3 for alpha chain variable domain of TCR clone 47136 (TRAV13-1, TRAJ52)
CAASKRGAGGTSYGKLTF

SEQ ID NO: 94272 - protein, 13 aa, Homo sapiens
  CDR3 for beta chain variable domain of TCR clone 47136 (TRBV10-3, TRBJ2-7)
CASKLAVNYEQYF

SEQ ID NO: 94273 - protein, 11 aa, Homo sapiens
  CDR3 for alpha chain variable domain of TCR clone 47137 (TRAV21, TRAJ34)
CAVTNTDKLIF

SEQ ID NO: 94274 - protein, 15 aa, Homo sapiens
  CDR3 for beta chain variable domain of TCR clone 47137 (TRBV20-1, TRBJ2-7)
CSARDRVSGMDEQYF

SEQ ID NO: 94275 - protein, 17 aa, Homo sapiens
  CDR3 for alpha chain variable domain of TCR clone 47138 (TRAV8-6, TRAJ58)
CAVSSWVGETSGSRLTF

SEQ ID NO: 94276 - protein, 14 aa, Homo sapiens
  CDR3 for beta chain variable domain of TCR clone 47138 (TRBV4-2, TRBJ2-1)
CASGRDRAYNEQFF

SEQ ID NO: 94277 - protein, 11 aa, Homo sapiens
  CDR3 for alpha chain variable domain of TCR clone 47139 (TRAV2, TRAJ13)
CASVGYQKVTF

SEQ ID NO: 94278 - protein, 14 aa, Homo sapiens
  CDR3 for beta chain variable domain of TCR clone 47139 (TRBV19, TRBJ2-1)
CASPTFVLSGEQFF

SEQ ID NO: 94279 - protein, 17 aa, Homo sapiens
  CDR3 for alpha chain variable domain of TCR clone 47140 (TRAV3, TRAJ6)
CAVRDGPRAGGNYIPTF

SEQ ID NO: 94280 - protein, 14 aa, Homo sapiens
  CDR3 for beta chain variable domain of TCR clone 47140 (TRBV7-2, TRBJ2-7)
CDSSPKTSFYEQYF

SEQ ID NO: 94281 - protein, 14 aa, Homo sapiens
  CDR3 for alpha chain variable domain of TCR clone 47141 (TRAV12-2, TRAJ40)
CAVKIPSGTYKYIF

SEQ ID NO: 94282 - protein, 17 aa, Homo sapiens
  CDR3 for beta chain variable domain of TCR clone 47141 (TRBV20-1, TRBJ2-1)
CSASSSGLAGSYNEQFF

SEQ ID NO: 94283 - protein, 14 aa, Homo sapiens
  CDR3 for alpha chain variable domain of TCR clone 47142 (TRAV12-3, TRAJ5)
CAMTWYTGRRALTF

SEQ ID NO: 94284 - protein, 14 aa, Homo sapiens
  CDR3 for beta chain variable domain of TCR clone 47142 (TRBV10-2, TRBJ1-5)
CASSSTGRNQPQHF

SEQ ID NO: 94285 - protein, 13 aa, Homo sapiens
  CDR3 for alpha chain variable domain of TCR clone 47143 (TRAV8-1, TRAJ30)
CAVNGRRDDEIIF

SEQ ID NO: 94286 - protein, 15 aa, Homo sapiens
  CDR3 for beta chain variable domain of TCR clone 47143 (TRBV5-7, TRBJ1-5)
CASSYGKLWDQPQHF

SEQ ID NO: 94287 - protein, 13 aa, Homo sapiens
  CDR3 for alpha chain variable domain of TCR clone 47144 (TRAV8-3, TRAJ21)
CAVGAYNFNKFYF

SEQ ID NO: 94288 - protein, 16 aa, Homo sapiens
  CDR3 for beta chain variable domain of TCR clone 47144 (TRBV19, TRBJ2-1)
CASIMGGGSSYNEQFF

SEQ ID NO: 94289 - protein, 14 aa, Homo sapiens
  CDR3 for alpha chain variable domain of TCR clone 47145 (TRAV3, TRAJ9)
CAVRLNTGGFKTIF

SEQ ID NO: 94290 - protein, 16 aa, Homo sapiens
  CDR3 for beta chain variable domain of TCR clone 47145 (TRBV12-5, TRBJ2-5)
CASGPRTSGNQETQHF

SEQ ID NO: 94291 - protein, 17 aa, Homo sapiens
  CDR3 for alpha chain variable domain of TCR clone 47146 (TRAV40, )
CLPIPDIQNPDPAVYQL

SEQ ID NO: 94292 - protein, 15 aa, Homo sapiens
  CDR3 for beta chain variable domain of TCR clone 47146 (TRBV2, TRBJ1-2)
CASSEIGGANYGYTF

SEQ ID NO: 94293 - protein, 12 aa, Homo sapiens
  CDR3 for alpha chain variable domain of TCR clone 47147 (TRAV12-3, TRAJ17)
CAMTLTGNKLTF

SEQ ID NO: 94294 - protein, 14 aa, Homo sapiens
  CDR3 for beta chain variable domain of TCR clone 47147 (TRBV4-1, TRBJ2-7)
CASSQDREHIEQYF

SEQ ID NO: 94295 - protein, 15 aa, Homo sapiens
  CDR3 for alpha chain variable domain of TCR clone 47148 (TRAV21, TRAJ21)
CAVRRRTSTNFTLDL

SEQ ID NO: 94296 - protein, 12 aa, Homo sapiens
  CDR3 for beta chain variable domain of TCR clone 47148 (TRBV11-2, TRBJ2-2)
CASSLGGGELFF

SEQ ID NO: 94297 - protein, 14 aa, Homo sapiens
  CDR3 for alpha chain variable domain of TCR clone 47149 (TRAV8-2, TRAJ4)
CVVSPSGGYNKLIF

SEQ ID NO: 94298 - protein, 13 aa, Homo sapiens
  CDR3 for beta chain variable domain of TCR clone 47149 (TRBV7-3, TRBJ1-1)
CASSQDWGAEAFF

SEQ ID NO: 94299 - protein, 14 aa, Homo sapiens
  CDR3 for alpha chain variable domain of TCR clone 47150 (TRAV13-1, TRAJ35)
CAASKGGFGNVLHC

SEQ ID NO: 94300 - protein, 15 aa, Homo sapiens
  CDR3 for beta chain variable domain of TCR clone 47150 (TRBV28, TRBJ2-1)
CASSGLAEVDSEQSF

SEQ ID NO: 94301 - protein, 14 aa, Homo sapiens
  CDR3 for alpha chain variable domain of TCR clone 47151 (TRAV26-1, TRAJ21)
CIVRPPYSFNKFYF

SEQ ID NO: 94302 - protein, 11 aa, Homo sapiens
  CDR3 for beta chain variable domain of TCR clone 47151 (TRBV10-3, TRBJ2-7)
CAISEGLEQYF

SEQ ID NO: 94303 - protein, 12 aa, Homo sapiens
  CDR3 for alpha chain variable domain of TCR clone 47152 (TRAV8-3, TRAJ26)
CAGDNYGQNFVF

SEQ ID NO: 94304 - protein, 15 aa, Homo sapiens
  CDR3 for beta chain variable domain of TCR clone 47152 (TRBV15, TRBJ1-4)
CATSRDMGSYEKLFF

SEQ ID NO: 94305 - protein, 13 aa, Homo sapiens
  CDR3 for alpha chain variable domain of TCR clone 47153 (TRAV8-4, TRAJ10)
CAAFTGGGNKLPF

SEQ ID NO: 94306 - protein, 15 aa, Homo sapiens
  CDR3 for beta chain variable domain of TCR clone 47153 (TRBV2, TRBJ2-3)
CASSDFEKATDTQYF

SEQ ID NO: 94307 - protein, 16 aa, Homo sapiens
  CDR3 for alpha chain variable domain of TCR clone 47154 (TRAV2, TRAJ4)
CAVEDRFSGGYNKLIF

SEQ ID NO: 94308 - protein, 13 aa, Homo sapiens
  CDR3 for beta chain variable domain of TCR clone 47154 (TRBV7-3, TRBJ1-1)
CASSQDWGAEAFF

SEQ ID NO: 94309 - protein, 14 aa, Homo sapiens
  CDR3 for alpha chain variable domain of TCR clone 47155 (TRAV8-3, TRAJ4)
CAVSAAGGYNKLIS

SEQ ID NO: 94310 - protein, 15 aa, Homo sapiens
  CDR3 for beta chain variable domain of TCR clone 47155 (TRBV6-5, TRBJ2-1)
CASSYDAGAGNEQFF

SEQ ID NO: 94311 - protein, 12 aa, Homo sapiens
  CDR3 for alpha chain variable domain of TCR clone 47156 (TRAV12-3, TRAJ20)
CAMVRGDYKLSF

SEQ ID NO: 94312 - protein, 12 aa, Homo sapiens
  CDR3 for beta chain variable domain of TCR clone 47156 (TRBV12-4, TRBJ2-7)
CASSLGGYEQYF

SEQ ID NO: 94313 - protein, 13 aa, Homo sapiens
  CDR3 for alpha chain variable domain of TCR clone 47157 (TRAV12-2, TRAJ6)
CAVNVSRKLHTYI

SEQ ID NO: 94314 - protein, 12 aa, Homo sapiens
  CDR3 for beta chain variable domain of TCR clone 47157 (TRBV29-1, TRBJ2-3)
CSVTGGADTQYC

SEQ ID NO: 94315 - protein, 14 aa, Homo sapiens
  CDR3 for alpha chain variable domain of TCR clone 47158 (TRAV16, TRAJ16)
CALSVLSDGQKLLF

SEQ ID NO: 94316 - protein, 12 aa, Homo sapiens
  CDR3 for beta chain variable domain of TCR clone 47158 (TRBV5-5, TRBJ1-2)
CAGSALNYGYTF

SEQ ID NO: 94317 - protein, 14 aa, Homo sapiens
  CDR3 for alpha chain variable domain of TCR clone 47159 (TRAV38-2/DV8, TRAJ42)
CAYPEGGSQGNPIF

SEQ ID NO: 94318 - protein, 15 aa, Homo sapiens
  CDR3 for beta chain variable domain of TCR clone 47159 (TRBV19, TRBJ2-1)
CASSTGTSSYNEQFF

SEQ ID NO: 94319 - protein, 14 aa, Homo sapiens
  CDR3 for alpha chain variable domain of TCR clone 47160 (TRAV35, TRAJ33)
CAGSSQDSNYQLIW

SEQ ID NO: 94320 - protein, 11 aa, Homo sapiens
  CDR3 for beta chain variable domain of TCR clone 47160 (TRBV5-1, TRBJ2-1)
CASSIGQEQFF

SEQ ID NO: 94321 - protein, 14 aa, Homo sapiens
  CDR3 for alpha chain variable domain of TCR clone 47161 (TRAV26-1, TRAJ38)
CIADNAGNNRKLIW

SEQ ID NO: 94322 - protein, 17 aa, Homo sapiens
  CDR3 for beta chain variable domain of TCR clone 47161 (TRBV7-9, TRBJ2-3)
CASSPAVAGDLTDTQYF

SEQ ID NO: 94323 - protein, 15 aa, Homo sapiens
  CDR3 for alpha chain variable domain of TCR clone 47162 (TRAV8-3, TRAJ27)
CAVGPSKTNAGKSTF

SEQ ID NO: 94324 - protein, 12 aa, Homo sapiens
  CDR3 for beta chain variable domain of TCR clone 47162 (TRBV28, TRBJ2-7)
CASTGNHYEQYF

SEQ ID NO: 94325 - protein, 14 aa, Homo sapiens
  CDR3 for alpha chain variable domain of TCR clone 47163 (TRAV1-2, TRAJ16)
CAVNRFSDGPKLLF

SEQ ID NO: 94326 - protein, 14 aa, Homo sapiens
  CDR3 for beta chain variable domain of TCR clone 47163 (TRBV19, TRBJ2-1)
CASPTFVLSGEQFF

SEQ ID NO: 94327 - protein, 14 aa, Homo sapiens
  CDR3 for alpha chain variable domain of TCR clone 47164 (TRAV16, TRAJ15)
RALRPNQAGTALIF

SEQ ID NO: 94328 - protein, 16 aa, Homo sapiens
  CDR3 for beta chain variable domain of TCR clone 47164 (TRBV6-5, TRBJ2-2)
CASSYGRVPDTGELFF

SEQ ID NO: 94329 - protein, 14 aa, Homo sapiens
  CDR3 for alpha chain variable domain of TCR clone 47165 (TRAV12-1, TRAJ8)
CVVNSNKGFQKLVF

SEQ ID NO: 94330 - protein, 16 aa, Homo sapiens
  CDR3 for beta chain variable domain of TCR clone 47165 (TRBV20-1, TRBJ2-2)
CSARDDRVGLTGELFF

SEQ ID NO: 94331 - protein, 14 aa, Homo sapiens
  CDR3 for alpha chain variable domain of TCR clone 47166 (TRAV20, TRAJ37)
CAVQAASNTGKLIF

SEQ ID NO: 94332 - protein, 17 aa, Homo sapiens
  CDR3 for beta chain variable domain of TCR clone 47166 (TRBV7-7, TRBJ1-4)
CASSLVGQGASNEKLFF

SEQ ID NO: 94333 - protein, 14 aa, Homo sapiens
  CDR3 for alpha chain variable domain of TCR clone 47167 (TRAV12-2, TRAJ13)
CAVKKTGGYQKVTF

SEQ ID NO: 94334 - protein, 13 aa, Homo sapiens
  CDR3 for beta chain variable domain of TCR clone 47167 (TRBV4-2, TRBJ1-1)
CVSSQAGNTEAFF

SEQ ID NO: 94335 - protein, 15 aa, Homo sapiens
  CDR3 for alpha chain variable domain of TCR clone 47168 (TRAV8-4, TRAJ3)
CAVSPGCSSASKIIF

SEQ ID NO: 94336 - protein, 13 aa, Homo sapiens
  CDR3 for beta chain variable domain of TCR clone 47168 (TRBV12-4, TRBJ1-1)
CASITGLNTEAFF

SEQ ID NO: 94337 - protein, 14 aa, Homo sapiens
  CDR3 for alpha chain variable domain of TCR clone 47169 (TRAV21, TRAJ37)
CAVKGSSNTGKLIF

SEQ ID NO: 94338 - protein, 17 aa, Homo sapiens
  CDR3 for beta chain variable domain of TCR clone 47169 (TRBV6-1, TRBJ1-1)
CASSPRGWGDGNTEAFF

SEQ ID NO: 94339 - protein, 15 aa, Homo sapiens
  CDR3 for alpha chain variable domain of TCR clone 47170 (TRAV3, TRAJ22)
CAVRDRGGSARQLTF

SEQ ID NO: 94340 - protein, 14 aa, Homo sapiens
  CDR3 for beta chain variable domain of TCR clone 47170 (TRBV7-9, TRBJ2-7)
CASSLSQGSYEQYF

SEQ ID NO: 94341 - protein, 13 aa, Homo sapiens
  CDR3 for alpha chain variable domain of TCR clone 47171 (TRAV2, TRAJ40)
CAVVISGTYKYIF

SEQ ID NO: 94342 - protein, 14 aa, Homo sapiens
  CDR3 for beta chain variable domain of TCR clone 47171 (TRBV19, TRBJ2-1)
CASPTFVLSCEQFF

SEQ ID NO: 94343 - protein, 16 aa, Homo sapiens
  CDR3 for alpha chain variable domain of TCR clone 47172 (TRAV4, TRAJ9)
CLVGDPNKPGGFKTIF

SEQ ID NO: 94344 - protein, 16 aa, Homo sapiens
  CDR3 for beta chain variable domain of TCR clone 47172 (TRBV28, TRBJ1-4)
CASSPPYRGRSEKLFF

SEQ ID NO: 94345 - protein, 13 aa, Homo sapiens
  CDR3 for alpha chain variable domain of TCR clone 47173 (TRAV5, TRAJ30)
CAEIANRDDKIIF

SEQ ID NO: 94346 - protein, 14 aa, Homo sapiens
  CDR3 for beta chain variable domain of TCR clone 47173 (TRBV19, TRBJ2-1)
CASPTFVLSGEQFF

SEQ ID NO: 94347 - protein, 12 aa, Homo sapiens
  CDR3 for alpha chain variable domain of TCR clone 47174 (TRAV36/DV7, TRAJ54)
CSVVRGAQKLVF

SEQ ID NO: 94348 - protein, 14 aa, Homo sapiens
  CDR3 for beta chain variable domain of TCR clone 47174 (TRBV7-3, TRBJ1-1)
CASSLKGGNTEAFF

SEQ ID NO: 94349 - protein, 12 aa, Homo sapiens
  CDR3 for alpha chain variable domain of TCR clone 47175 (TRAV3, TRAJ27)
CAVRDGAGKSTF

SEQ ID NO: 94350 - protein, 15 aa, Homo sapiens
  CDR3 for beta chain variable domain of TCR clone 47175 (TRBV13, TRBJ2-2)
CASGYRGCRTGELFF

SEQ ID NO: 94351 - protein, 11 aa, Homo sapiens
  CDR3 for alpha chain variable domain of TCR clone 47176 (TRAV12-3, TRAJ27)
CAMANAGKSTF

SEQ ID NO: 94352 - protein, 17 aa, Homo sapiens
  CDR3 for beta chain variable domain of TCR clone 47176 (TRBV24-1, TRBJ2-1)
CATSDVSTSGTYNEQFF

SEQ ID NO: 94353 - protein, 15 aa, Homo sapiens
  CDR3 for alpha chain variable domain of TCR clone 47177 (TRAV20, TRAJ40)
CAVQRGTSGTYKYIF

SEQ ID NO: 94354 - protein, 15 aa, Homo sapiens
  CDR3 for beta chain variable domain of TCR clone 47177 (TRBV25-1, TRBJ1-4)
CASSPGDSTDEKLFF

SEQ ID NO: 94355 - protein, 13 aa, Homo sapiens
  CDR3 for alpha chain variable domain of TCR clone 47178 (TRAV17, TRAJ9)
CAMDYTGGFKTIF

SEQ ID NO: 94356 - protein, 16 aa, Homo sapiens
  CDR3 for beta chain variable domain of TCR clone 47178 (TRBV7-7, TRBJ2-1)
CASSLASGTSYNEQFF

SEQ ID NO: 94357 - protein, 14 aa, Homo sapiens
  CDR3 for alpha chain variable domain of TCR clone 47179 (TRAV2, TRAJ37)
CAVDFTSITGKLIF

SEQ ID NO: 94358 - protein, 15 aa, Homo sapiens
  CDR3 for beta chain variable domain of TCR clone 47179 (TRBV20-1, TRBJ1-1)
CSASRGVTGNTEAFF

SEQ ID NO: 94359 - protein, 11 aa, Homo sapiens
  CDR3 for alpha chain variable domain of TCR clone 47180 (TRAV1-2, TRAJ20)
CAVSNDYKLSF

SEQ ID NO: 94360 - protein, 16 aa, Homo sapiens
  CDR3 for beta chain variable domain of TCR clone 47180 (TRBV29-1, TRBJ2-6)
CSVDDITYSGANVLTF

SEQ ID NO: 94361 - protein, 12 aa, Homo sapiens
  CDR3 for alpha chain variable domain of TCR clone 47181 (TRAV13-2, TRAJ23)
CAERHRGGKLIF

SEQ ID NO: 94362 - protein, 12 aa, Homo sapiens
  CDR3 for beta chain variable domain of TCR clone 47181 (TRBV7-9, TRBJ1-4)
CASSTDREKLFF

SEQ ID NO: 94363 - protein, 14 aa, Homo sapiens
  CDR3 for alpha chain variable domain of TCR clone 47182 (TRAV12-1, TRAJ26)
CVVKGSNYGQNFVF

SEQ ID NO: 94364 - protein, 17 aa, Homo sapiens
  CDR3 for beta chain variable domain of TCR clone 47182 (TRBV11-2, TRBJ2-6)
CASSQRDIFSGANDLTF

SEQ ID NO: 94365 - protein, 20 aa, Homo sapiens
  CDR3 for alpha chain variable domain of TCR clone 47183 (TRAV1-1, TRAJ4)
CLLLLRCEGFLSGGYNKLIF

SEQ ID NO: 94366 - protein, 18 aa, Homo sapiens
  CDR3 for beta chain variable domain of TCR clone 47183 (TRBV28, TRBJ1-4)
CASSPPYRGRSEKLFLAV

SEQ ID NO: 94367 - protein, 14 aa, Homo sapiens
  CDR3 for alpha chain variable domain of TCR clone 47184 (TRAV12-2, TRAJ40)
CAVKIPSGTYKYIF

SEQ ID NO: 94368 - protein, 14 aa, Homo sapiens
  CDR3 for beta chain variable domain of TCR clone 47184 (TRBV20-1, TRBJ1-1)
CSAQTRIGVTEAFF

SEQ ID NO: 94369 - protein, 15 aa, Homo sapiens
  CDR3 for alpha chain variable domain of TCR clone 47185 (TRAV14/DV4, TRAJ12)
CAMREGWDSSYKLIF

SEQ ID NO: 94370 - protein, 16 aa, Homo sapiens
  CDR3 for beta chain variable domain of TCR clone 47185 (TRBV2, TRBJ2-5)
CASSETQGVGEGTQYF

SEQ ID NO: 94371 - protein, 14 aa, Homo sapiens
  CDR3 for alpha chain variable domain of TCR clone 47186 (TRAV12-3, TRAJ7)
CAMSEIGGNNRLAF

SEQ ID NO: 94372 - protein, 13 aa, Homo sapiens
  CDR3 for beta chain variable domain of TCR clone 47186 (TRBV7-2, TRBJ2-2)
CASSSVRAGELFF

SEQ ID NO: 94373 - protein, 14 aa, Homo sapiens
  CDR3 for alpha chain variable domain of TCR clone 47187 (TRAV8-4, TRAJ9)
CAATFNTGGFKTIF

SEQ ID NO: 94374 - protein, 15 aa, Homo sapiens
  CDR3 for beta chain variable domain of TCR clone 47187 (TRBV7-9, TRBJ2-2)
CASSPETGAGGELFF

SEQ ID NO: 94375 - protein, 17 aa, Homo sapiens
  CDR3 for alpha chain variable domain of TCR clone 47188 (TRAV8-6, TRAJ58)
CAVSSWVGETSGSSLTF

SEQ ID NO: 94376 - protein, 15 aa, Homo sapiens
  CDR3 for beta chain variable domain of TCR clone 47188 (TRBV20-1, TRBJ2-7)
CSARDRVSGMDEQYF

SEQ ID NO: 94377 - protein, 11 aa, Homo sapiens
  CDR3 for alpha chain variable domain of TCR clone 47189 (TRAV23/DV6, TRAJ43)
CAASSGNDMRF

SEQ ID NO: 94378 - protein, 14 aa, Homo sapiens
  CDR3 for beta chain variable domain of TCR clone 47189 (TRBV4-1, TRBJ1-2)
CASSQDPLTYGYTF

SEQ ID NO: 94379 - protein, 11 aa, Homo sapiens
  CDR3 for alpha chain variable domain of TCR clone 47190 (TRAV35, TRAJ30)
CAPGGDDKIIF

SEQ ID NO: 94380 - protein, 11 aa, Homo sapiens
  CDR3 for beta chain variable domain of TCR clone 47190 (TRBV7-6, TRBJ2-1)
CASSLGGGQMS

SEQ ID NO: 94381 - protein, 13 aa, Homo sapiens
  CDR3 for alpha chain variable domain of TCR clone 47191 (TRAV1-2, TRAJ9)
CAALNTGGFKTIF

SEQ ID NO: 94382 - protein, 18 aa, Homo sapiens
  CDR3 for beta chain variable domain of TCR clone 47191 (TRBV20-1, TRBJ2-3)
CSASGLAGGPGTTDTQYF

SEQ ID NO: 94383 - protein, 13 aa, Homo sapiens
  CDR3 for alpha chain variable domain of TCR clone 47192 (TRAV8-6, TRAJ16)
CAVSRWVGQKLLF

SEQ ID NO: 94384 - protein, 15 aa, Homo sapiens
  CDR3 for beta chain variable domain of TCR clone 47192 (TRBV12-4, TRBJ2-1)
CASSLSTGVSNEQFL

SEQ ID NO: 94385 - protein, 15 aa, Homo sapiens
  CDR3 for alpha chain variable domain of TCR clone 47193 (TRAV3, TRAJ4)
CAVRDGTGGYNKLIF

SEQ ID NO: 94386 - protein, 16 aa, Homo sapiens
  CDR3 for beta chain variable domain of TCR clone 47193 (TRBV27, TRBJ2-2)
CASSSSGVSNTGKLFF

SEQ ID NO: 94387 - protein, 15 aa, Homo sapiens
  CDR3 for alpha chain variable domain of TCR clone 47194 (TRAV3, TRAJ13)
CAVRVYSGGYQKVTF

SEQ ID NO: 94388 - protein, 13 aa, Homo sapiens
  CDR3 for beta chain variable domain of TCR clone 47194 (TRBV7-9, TRBJ1-2)
CASSLKQNYGYTF

SEQ ID NO: 94389 - protein, 15 aa, Homo sapiens
  CDR3 for alpha chain variable domain of TCR clone 47195 (TRAV8-3, TRAJ32)
CAVGPYGGATNKLIF

SEQ ID NO: 94390 - protein, 15 aa, Homo sapiens
  CDR3 for beta chain variable domain of TCR clone 47195 (TRBV2, TRBJ2-1)
CASSELAGSYNEQFF

SEQ ID NO: 94391 - protein, 15 aa, Homo sapiens
  CDR3 for alpha chain variable domain of TCR clone 47196 (TRAV21, TRAJ53)
CATLNSGGSNHKLTF

SEQ ID NO: 94392 - protein, 15 aa, Homo sapiens
  CDR3 for beta chain variable domain of TCR clone 47196 (TRBV27, TRBJ2-1)
CASSNGGGSSNEQFF

SEQ ID NO: 94393 - protein, 14 aa, Homo sapiens
  CDR3 for alpha chain variable domain of TCR clone 47197 (TRAV20, TRAJ22)
CAVALGGSARQLTF

SEQ ID NO: 94394 - protein, 15 aa, Homo sapiens
  CDR3 for beta chain variable domain of TCR clone 47197 (TRBV7-2, TRBJ1-1)
CASSFAGDRDTEAVF

SEQ ID NO: 94395 - protein, 17 aa, Homo sapiens
  CDR3 for alpha chain variable domain of TCR clone 47198 (TRAV13-1, TRAJ28)
CAASPPYSGAGSYQLTF

SEQ ID NO: 94396 - protein, 12 aa, Homo sapiens
  CDR3 for beta chain variable domain of TCR clone 47198 (TRBV7-3, TRBJ2-1)
CASSFQSGPQFF

SEQ ID NO: 94397 - protein, 12 aa, Homo sapiens
  CDR3 for alpha chain variable domain of TCR clone 47199 (TRAV12-3, TRAJ17)
CAMTLTGNKLTF

SEQ ID NO: 94398 - protein, 15 aa, Homo sapiens
  CDR3 for beta chain variable domain of TCR clone 47199 (TRBV20-1, TRBJ2-7)
CSARGWVSGMDEQYF

SEQ ID NO: 94399 - protein, 14 aa, Homo sapiens
  CDR3 for alpha chain variable domain of TCR clone 47200 (TRAV12-3, TRAJ13)
CAMRNSGGYQKVTF

SEQ ID NO: 94400 - protein, 16 aa, Homo sapiens
  CDR3 for beta chain variable domain of TCR clone 47200 (TRBV6-1, TRBJ2-5)
CASSETLDRGAETQYF

SEQ ID NO: 94401 - protein, 16 aa, Homo sapiens
  CDR3 for alpha chain variable domain of TCR clone 47201 (TRAV21, TRAJ17)
CAVRPGGEAAGNKLTF

SEQ ID NO: 94402 - protein, 13 aa, Homo sapiens
  CDR3 for beta chain variable domain of TCR clone 47201 (TRBV11-2, TRBJ2-5)
CASSSTGEETQYF

SEQ ID NO: 94403 - protein, 18 aa, Homo sapiens
  CDR3 for alpha chain variable domain of TCR clone 47202 (TRAV21, TRAJ52)
CAVRPSPAGGTSYGKPTF

SEQ ID NO: 94404 - protein, 14 aa, Homo sapiens
  CDR3 for beta chain variable domain of TCR clone 47202 (TRBV6-1, TRBJ1-3)
CASVQGGGGNTIYF

SEQ ID NO: 94405 - protein, 14 aa, Homo sapiens
  CDR3 for alpha chain variable domain of TCR clone 47203 (TRAV20, TRAJ42)
CAVQAGGSQGNLIF

SEQ ID NO: 94406 - protein, 17 aa, Homo sapiens
  CDR3 for beta chain variable domain of TCR clone 47203 (TRBV28, TRBJ2-5)
CASSRQGGLAGAETQYF

SEQ ID NO: 94407 - protein, 16 aa, Homo sapiens
  CDR3 for alpha chain variable domain of TCR clone 47204 (TRAV21, TRAJ37)
FAVRTAGSSNTGKLIF

SEQ ID NO: 94408 - protein, 13 aa, Homo sapiens
  CDR3 for beta chain variable domain of TCR clone 47204 (TRBV7-9, TRBJ2-5)
CASLPSGRETQYF

SEQ ID NO: 94409 - protein, 15 aa, Homo sapiens
  CDR3 for alpha chain variable domain of TCR clone 47205 (TRAV12-3, TRAJ6)
CAMSATTGGSYIPTF

SEQ ID NO: 94410 - protein, 11 aa, Homo sapiens
  CDR3 for beta chain variable domain of TCR clone 47205 (TRBV19, TRBJ1-1)
CASSIGSEAFF

SEQ ID NO: 94411 - protein, 15 aa, Homo sapiens
  CDR3 for alpha chain variable domain of TCR clone 47206 (TRAV17, TRAJ42)
CATDHYGGSQGNLIF

SEQ ID NO: 94412 - protein, 14 aa, Homo sapiens
  CDR3 for beta chain variable domain of TCR clone 47206 (TRBV19, TRBJ2-5)
CDSSIEHSQETQYF

SEQ ID NO: 94413 - protein, 15 aa, Homo sapiens
  CDR3 for alpha chain variable domain of TCR clone 47207 (TRAV12-3, TRAJ10)
CASYILTGGGNKLTF

SEQ ID NO: 94414 - protein, 14 aa, Homo sapiens
  CDR3 for beta chain variable domain of TCR clone 47207 (TRBV4-1, TRBJ2-2)
CASSQAVNTGELFY

SEQ ID NO: 94415 - protein, 13 aa, Homo sapiens
  CDR3 for alpha chain variable domain of TCR clone 47208 (TRAV2, TRAJ40)
CAVVTSGTYKYIF

SEQ ID NO: 94416 - protein, 14 aa, Homo sapiens
  CDR3 for beta chain variable domain of TCR clone 47208 (TRBV19, TRBJ2-7)
CASPTFVLSGEQYF

SEQ ID NO: 94417 - protein, 14 aa, Homo sapiens
  CDR3 for alpha chain variable domain of TCR clone 47209 (TRAV13-1, TRAJ44)
CAAKATGTASKLTF

SEQ ID NO: 94418 - protein, 16 aa, Homo sapiens
  CDR3 for beta chain variable domain of TCR clone 47209 (TRBV7-3, TRBJ2-3)
CQQLNERMRGADTQYF

SEQ ID NO: 94419 - protein, 18 aa, Homo sapiens
  CDR3 for alpha chain variable domain of TCR clone 47210 (TRAV26-1, TRAJ52)
CIVRVEGAGGTSYGKLTF

SEQ ID NO: 94420 - protein, 13 aa, Homo sapiens
  CDR3 for beta chain variable domain of TCR clone 47210 (TRBV11-3, TRBJ2-3)
CASSHDTKDTQYF

SEQ ID NO: 94421 - protein, 14 aa, Homo sapiens
  CDR3 for alpha chain variable domain of TCR clone 47211 (TRAV12-3, TRAJ10)
SHLPLTGGGNKLTF

SEQ ID NO: 94422 - protein, 12 aa, Homo sapiens
  CDR3 for beta chain variable domain of TCR clone 47211 (TRBV5-1, TRBJ2-7)
CASSLDSYEQYF

SEQ ID NO: 94423 - protein, 14 aa, Homo sapiens
  CDR3 for alpha chain variable domain of TCR clone 47212 (TRAV3, TRAJ9)
CAARGNTGGFKTIF

SEQ ID NO: 94424 - protein, 14 aa, Homo sapiens
  CDR3 for beta chain variable domain of TCR clone 47212 (TRBV15, TRBJ2-1)
CATSGVEDYNEQFF

SEQ ID NO: 94425 - protein, 13 aa, Homo sapiens
  CDR3 for alpha chain variable domain of TCR clone 47213 (TRAV13-1, TRAJ56)
CSKSSGANSKLTF

SEQ ID NO: 94426 - protein, 13 aa, Homo sapiens
  CDR3 for beta chain variable domain of TCR clone 47213 (TRBV12-4, TRBJ1-2)
CASSSGPNYGCTF

SEQ ID NO: 94427 - protein, 17 aa, Homo sapiens
  CDR3 for alpha chain variable domain of TCR clone 47214 (TRAV13-1, TRAJ5)
CSSPSLSRDTGRRALTF

SEQ ID NO: 94428 - protein, 17 aa, Homo sapiens
  CDR3 for beta chain variable domain of TCR clone 47214 (TRBV24-1, TRBJ2-1)
CATSDVSTSGTYNEQFF

SEQ ID NO: 94429 - protein, 16 aa, Homo sapiens
  CDR3 for alpha chain variable domain of TCR clone 47215 (TRAV21, TRAJ37)
CAGRTAGSSNTGKLIF

SEQ ID NO: 94430 - protein, 13 aa, Homo sapiens
  CDR3 for beta chain variable domain of TCR clone 47215 (TRBV7-9, TRBJ2-5)
CASLPSGRETQYF

SEQ ID NO: 94431 - protein, 13 aa, Homo sapiens
  CDR3 for alpha chain variable domain of TCR clone 47216 (TRAV13-2, TRAJ40)
CAEFTSGTYKYIF

SEQ ID NO: 94432 - protein, 14 aa, Homo sapiens
  CDR3 for beta chain variable domain of TCR clone 47216 (TRBV10-2, TRBJ1-5)
CASSSTGGNQPQHF

SEQ ID NO: 94433 - protein, 15 aa, Homo sapiens
  CDR3 for alpha chain variable domain of TCR clone 47217 (TRAV8-4, TRAJ12)
CAVSDRVDSSYKLIF

SEQ ID NO: 94434 - protein, 15 aa, Homo sapiens
  CDR3 for beta chain variable domain of TCR clone 47217 (TRBV11-3, TRBJ2-1)
CASSLAGQTYNEKFF

SEQ ID NO: 94435 - protein, 13 aa, Homo sapiens
  CDR3 for alpha chain variable domain of TCR clone 47218 (TRAV29/DV5, TRAJ31)
CAASRNNNARLMF

SEQ ID NO: 94436 - protein, 12 aa, Homo sapiens
  CDR3 for beta chain variable domain of TCR clone 47218 (TRBV14, TRBJ2-7)
CAGSLYKDEQYF

SEQ ID NO: 94437 - protein, 14 aa, Homo sapiens
  CDR3 for alpha chain variable domain of TCR clone 47219 (TRAV3, TRAJ48)
CAVRLSFGNEKLTF

SEQ ID NO: 94438 - protein, 13 aa, Homo sapiens
  CDR3 for beta chain variable domain of TCR clone 47219 (TRBV10-3, TRBJ2-7)
CASQLAVNYEQYF

SEQ ID NO: 94439 - protein, 13 aa, Homo sapiens
  CDR3 for alpha chain variable domain of TCR clone 47220 (TRAV12-1, TRAJ35)
RVVRGGFGNVLHC

SEQ ID NO: 94440 - protein, 13 aa, Homo sapiens
  CDR3 for beta chain variable domain of TCR clone 47220 (TRBV19, TRBJ2-1)
CASTNSDVGEQFF

SEQ ID NO: 94441 - protein, 15 aa, Homo sapiens
  CDR3 for alpha chain variable domain of TCR clone 47221 (TRAV17, TRAJ20)
CATDGGGSNDYKLSF

SEQ ID NO: 94442 - protein, 15 aa, Homo sapiens
  CDR3 for beta chain variable domain of TCR clone 47221 (TRBV5-1, TRBJ2-1)
CASSPPRAPYNEQFF

SEQ ID NO: 94443 - protein, 14 aa, Homo sapiens
  CDR3 for alpha chain variable domain of TCR clone 47222 (TRAV20, TRAJ42)
CAVQAGGSQGNLIF

SEQ ID NO: 94444 - protein, 14 aa, Homo sapiens
  CDR3 for beta chain variable domain of TCR clone 47222 (TRBV28, TRBJ1-2)
CASRIQGANYSYTF

SEQ ID NO: 94445 - protein, 11 aa, Homo sapiens
  CDR3 for alpha chain variable domain of TCR clone 47223 (TRAV3, TRAJ21)
CAVGNFNKFYL

SEQ ID NO: 94446 - protein, 13 aa, Homo sapiens
  CDR3 for beta chain variable domain of TCR clone 47223 (TRBV20-1, TRBJ2-2)
CSASAAGTGELFF

SEQ ID NO: 94447 - protein, 14 aa, Homo sapiens
  CDR3 for alpha chain variable domain of TCR clone 47224 (TRAV1-2, TRAJ27)
CAVRSGANAGKSTF

SEQ ID NO: 94448 - protein, 14 aa, Homo sapiens
  CDR3 for beta chain variable domain of TCR clone 47224 (TRBV7-2, TRBJ2-7)
CASSPKTSFYEQYF

SEQ ID NO: 94449 - protein, 15 aa, Homo sapiens
  CDR3 for alpha chain variable domain of TCR clone 47225 (TRAV40, TRAJ45)
CLLGDLGGGADGLSF

SEQ ID NO: 94450 - protein, 13 aa, Homo sapiens
  CDR3 for beta chain variable domain of TCR clone 47225 (TRBV7-9, TRBJ1-2)
CASSLKQNYGYTF

SEQ ID NO: 94451 - protein, 15 aa, Homo sapiens
  CDR3 for alpha chain variable domain of TCR clone 47226 (TRAV8-1, TRAJ42)
CAVRSYGGSQGNLIF

SEQ ID NO: 94452 - protein, 13 aa, Homo sapiens
  CDR3 for beta chain variable domain of TCR clone 47226 (TRBV12-4, TRBJ2-7)
CASSPTETYEQYF

SEQ ID NO: 94453 - protein, 14 aa, Homo sapiens
  CDR3 for alpha chain variable domain of TCR clone 47227 (TRAV29/DV5, TRAJ34)
CAASASRETDKLIF

SEQ ID NO: 94454 - protein, 11 aa, Homo sapiens
  CDR3 for beta chain variable domain of TCR clone 47227 (TRBV11-2, TRBJ2-2)
CASSLPGELFF

SEQ ID NO: 94455 - protein, 16 aa, Homo sapiens
  CDR3 for alpha chain variable domain of TCR clone 47228 (TRAV23/DV6, TRAJ9)
CAASIGGNTGGLKTIF

SEQ ID NO: 94456 - protein, 12 aa, Homo sapiens
  CDR3 for beta chain variable domain of TCR clone 47228 (TRBV11-2, TRBJ2-1)
CASSVQREGQFF

SEQ ID NO: 94457 - protein, 13 aa, Homo sapiens
  CDR3 for alpha chain variable domain of TCR clone 47229 (TRAV13-1, TRAJ39)
CSKYSNAGNMLTF

SEQ ID NO: 94458 - protein, 16 aa, Homo sapiens
  CDR3 for beta chain variable domain of TCR clone 47229 (TRBV20-1, TRBJ1-4)
CSAPGQGLLTNEKLFS

SEQ ID NO: 94459 - protein, 14 aa, Homo sapiens
  CDR3 for alpha chain variable domain of TCR clone 47230 (TRAV1-2, TRAJ8)
CAVREDTGFQKLVF

SEQ ID NO: 94460 - protein, 16 aa, Homo sapiens
  CDR3 for beta chain variable domain of TCR clone 47230 (TRBV20-1, TRBJ1-4)
CSAPGRGLLTNEKLFF

SEQ ID NO: 94461 - protein, 15 aa, Homo sapiens
  CDR3 for alpha chain variable domain of TCR clone 47231 (TRAV12-1, TRAJ17)
CVVNKDKAAGNKLTF

SEQ ID NO: 94462 - protein, 12 aa, Homo sapiens
  CDR3 for beta chain variable domain of TCR clone 47231 (TRBV7-2, TRBJ1-6)
CASSLSSSPLHF

SEQ ID NO: 94463 - protein, 14 aa, Homo sapiens
  CDR3 for alpha chain variable domain of TCR clone 47232 (TRAV17, TRAJ45)
CATASGGGAGGLTF

SEQ ID NO: 94464 - protein, 15 aa, Homo sapiens
  CDR3 for beta chain variable domain of TCR clone 47232 (TRBV11-2, TRBJ2-1)
CASSRNRGLMYEQFF

SEQ ID NO: 94465 - protein, 12 aa, Homo sapiens
  CDR3 for alpha chain variable domain of TCR clone 47233 (TRAV6, TRAJ9)
CALHTGGFKTTF

SEQ ID NO: 94466 - protein, 14 aa, Homo sapiens
  CDR3 for beta chain variable domain of TCR clone 47233 (TRBV7-9, TRBJ2-1)
CASSQGQAEAEQFF

SEQ ID NO: 94467 - protein, 14 aa, Homo sapiens
  CDR3 for alpha chain variable domain of TCR clone 47234 (TRAV12-1, TRAJ17)
CEVNYKAAGNKLTF

SEQ ID NO: 94468 - protein, 17 aa, Homo sapiens
  CDR3 for beta chain variable domain of TCR clone 47234 (TRBV20-1, TRBJ2-1)
CSASSSGLAGSYNEQFF

SEQ ID NO: 94469 - protein, 11 aa, Homo sapiens
  CDR3 for alpha chain variable domain of TCR clone 47235 (TRAV1-2, TRAJ20)
CAVANDYKLSF

SEQ ID NO: 94470 - protein, 14 aa, Homo sapiens
  CDR3 for beta chain variable domain of TCR clone 47235 (TRBV19, TRBJ2-1)
CASPTFVLSGEQFF

SEQ ID NO: 94471 - protein, 13 aa, Homo sapiens
  CDR3 for alpha chain variable domain of TCR clone 47236 (TRAV1-1, TRAJ9)
CAAKNTGGFKTIF

SEQ ID NO: 94472 - protein, 14 aa, Homo sapiens
  CDR3 for beta chain variable domain of TCR clone 47236 (TRBV20-1, TRBJ2-1)
CSVQIGGSANEQFF

SEQ ID NO: 94473 - protein, 15 aa, Homo sapiens
  CDR3 for alpha chain variable domain of TCR clone 47237 (TRAV27, TRAJ38)
CAARRNAGNNRKLIW

SEQ ID NO: 94474 - protein, 13 aa, Homo sapiens
  CDR3 for beta chain variable domain of TCR clone 47237 (TRBV4-2, TRBJ1-1)
CASSQAGNTEAFF

SEQ ID NO: 94475 - protein, 11 aa, Homo sapiens
  CDR3 for alpha chain variable domain of TCR clone 47238 (TRAV8-3, TRAJ49)
CAVNTGNQFYF

SEQ ID NO: 94476 - protein, 12 aa, Homo sapiens
  CDR3 for beta chain variable domain of TCR clone 47238 (TRBV11-2, TRBJ2-7)
CASSPPAAEQYF

SEQ ID NO: 94477 - protein, 11 aa, Homo sapiens
  CDR3 for alpha chain variable domain of TCR clone 47239 (TRAV3, TRAJ13)
CAVTGYQKVTF

SEQ ID NO: 94478 - protein, 15 aa, Homo sapiens
  CDR3 for beta chain variable domain of TCR clone 47239 (TRBV7-9, TRBJ2-7)
CASSSSGLAVYEQYF

SEQ ID NO: 94479 - protein, 18 aa, Homo sapiens
  CDR3 for alpha chain variable domain of TCR clone 47240 (TRAV21, TRAJ52)
CAVRPSPAGGTSYGKLTF

SEQ ID NO: 94480 - protein, 14 aa, Homo sapiens
  CDR3 for beta chain variable domain of TCR clone 47240 (TRBV6-1, TRBJ1-3)
CARVQGGGGNTIYF

SEQ ID NO: 94481 - protein, 14 aa, Homo sapiens
  CDR3 for alpha chain variable domain of TCR clone 47241 (TRAV12-1, TRAJ3)
CVVNPGSSASKIIF

SEQ ID NO: 94482 - protein, 15 aa, Homo sapiens
  CDR3 for beta chain variable domain of TCR clone 47241 (TRBV5-6, TRBJ1-2)
CAGSSPGQGNYGYTF

SEQ ID NO: 94483 - protein, 11 aa, Homo sapiens
  CDR3 for alpha chain variable domain of TCR clone 47242 (TRAV21, TRAJ20)
CAVRDDYKLSF

SEQ ID NO: 94484 - protein, 14 aa, Homo sapiens
  CDR3 for beta chain variable domain of TCR clone 47242 (TRBV7-2, TRBJ2-7)
CASGPKTSFYEQYF

SEQ ID NO: 94485 - protein, 15 aa, Homo sapiens
  CDR3 for alpha chain variable domain of TCR clone 47243 (TRAV34, TRAJ38)
CGADFTPGNNRKLIW

SEQ ID NO: 94486 - protein, 13 aa, Homo sapiens
  CDR3 for beta chain variable domain of TCR clone 47243 (TRBV27, TRBJ2-1)
CASSSGSYNEQFF

SEQ ID NO: 94487 - protein, 12 aa, Homo sapiens
  CDR3 for alpha chain variable domain of TCR clone 47244 (TRAV3, TRAJ31)
CAVRDGNARLMF

SEQ ID NO: 94488 - protein, 12 aa, Homo sapiens
  CDR3 for beta chain variable domain of TCR clone 47244 (TRBV11-2, TRBJ2-2)
CASSLGGGELFF

SEQ ID NO: 94489 - protein, 23 aa, Homo sapiens
  CDR3 for alpha chain variable domain of TCR clone 47245 (TRAV30, TRAJ43)
CTLRPPSSVTQEPTSAALSDMRF

SEQ ID NO: 94490 - protein, 20 aa, Homo sapiens
  CDR3 for beta chain variable domain of TCR clone 47245 (TRBV28, TRBJ2-1)
CASTPIGRSPGLAGGNEQFF

SEQ ID NO: 94491 - protein, 14 aa, Homo sapiens
  CDR3 for alpha chain variable domain of TCR clone 47246 (TRAV12-3, TRAJ10)
SHLPLTGGGNKLTF

SEQ ID NO: 94492 - protein, 15 aa, Homo sapiens
  CDR3 for beta chain variable domain of TCR clone 47246 (TRBV27, TRBJ2-5)
CASSLYPRGGETQYF

SEQ ID NO: 94493 - protein, 15 aa, Homo sapiens
  CDR3 for alpha chain variable domain of TCR clone 47247 (TRAV3, TRAJ30)
CAVRDEYGRDDKIIF

SEQ ID NO: 94494 - protein, 16 aa, Homo sapiens
  CDR3 for beta chain variable domain of TCR clone 47247 (TRBV5-1, TRBJ2-5)
CASSLANHGGRETQYF

SEQ ID NO: 94495 - protein, 10 aa, Homo sapiens
  CDR3 for alpha chain variable domain of TCR clone 47248 (TRAV23/DV6, TRAJ57)
CAASSTLSQG

SEQ ID NO: 94496 - protein, 14 aa, Homo sapiens
  CDR3 for beta chain variable domain of TCR clone 47248 (TRBV13, TRBJ2-5)
CASSLGPRGETQYF

SEQ ID NO: 94497 - protein, 15 aa, Homo sapiens
  CDR3 for alpha chain variable domain of TCR clone 47249 (TRAV27, TRAJ38)
CAARRNAGNNRKLTW

SEQ ID NO: 94498 - protein, 13 aa, Homo sapiens
  CDR3 for beta chain variable domain of TCR clone 47249 (TRBV28, TRBJ2-5)
CAGVSRGEETQYF

SEQ ID NO: 94499 - protein, 14 aa, Homo sapiens
  CDR3 for alpha chain variable domain of TCR clone 47250 (TRAV3, TRAJ7)
CAVREEEREQQTRF

SEQ ID NO: 94500 - protein, 13 aa, Homo sapiens
  CDR3 for beta chain variable domain of TCR clone 47250 (TRBV15, TRBJ1-6)
CATSGGLNSPLHF

SEQ ID NO: 94501 - protein, 15 aa, Homo sapiens
  CDR3 for alpha chain variable domain of TCR clone 47251 (TRAV12-3, TRAJ5)
CAMSGLGTGRRALTF

SEQ ID NO: 94502 - protein, 14 aa, Homo sapiens
  CDR3 for beta chain variable domain of TCR clone 47251 (TRBV4-1, TRBJ2-2)
CASSQAVNTGELFF

SEQ ID NO: 94503 - protein, 11 aa, Homo sapiens
  CDR3 for alpha chain variable domain of TCR clone 47252 (TRAV21, TRAJ34)
CAVTNTDKLIF

SEQ ID NO: 94504 - protein, 11 aa, Homo sapiens
  CDR3 for beta chain variable domain of TCR clone 47252 (TRBV11-2, TRBJ2-2)
CASSLPGELFF

SEQ ID NO: 94505 - protein, 11 aa, Homo sapiens
  CDR3 for alpha chain variable domain of TCR clone 47253 (TRAV16, TRAJ33)
CALHSNYQLIW

SEQ ID NO: 94506 - protein, 16 aa, Homo sapiens
  CDR3 for beta chain variable domain of TCR clone 47253 (TRBV7-3, TRBJ2-2)
CASSLKRGTLSGELFF

SEQ ID NO: 94507 - protein, 12 aa, Homo sapiens
  CDR3 for alpha chain variable domain of TCR clone 47254 (TRAV27, TRAJ35)
CAGADFGNVLHC

SEQ ID NO: 94508 - protein, 13 aa, Homo sapiens
  CDR3 for beta chain variable domain of TCR clone 47254 (TRBV10-3, TRBJ2-7)
CASKLAVNYEQYF

SEQ ID NO: 94509 - protein, 15 aa, Homo sapiens
  CDR3 for alpha chain variable domain of TCR clone 47255 (TRAV25, TRAJ53)
CPTSNSGGSNYKLTF

SEQ ID NO: 94510 - protein, 14 aa, Homo sapiens
  CDR3 for beta chain variable domain of TCR clone 47255 (TRBV11-2, TRBJ2-3)
CASSRPARTDTQYF

SEQ ID NO: 94511 - protein, 15 aa, Homo sapiens
  CDR3 for alpha chain variable domain of TCR clone 47256 (TRAV26-1, TRAJ29)
CIVRIEGSGNTPLVF

SEQ ID NO: 94512 - protein, 14 aa, Homo sapiens
  CDR3 for beta chain variable domain of TCR clone 47256 (TRBV18, TRBJ2-5)
CASSPGVSQETQYF

SEQ ID NO: 94513 - protein, 13 aa, Homo sapiens
  CDR3 for alpha chain variable domain of TCR clone 47257 (TRAV2, TRAJ15)
CAVASQAGTALIF

SEQ ID NO: 94514 - protein, 13 aa, Homo sapiens
  CDR3 for beta chain variable domain of TCR clone 47257 (TRBV4-1, TRBJ2-7)
CASSQGQAYEQYF

SEQ ID NO: 94515 - protein, 15 aa, Homo sapiens
  CDR3 for alpha chain variable domain of TCR clone 47258 (TRAV12-3, TRAJ6)
CAMSATSGGSYIPTF

SEQ ID NO: 94516 - protein, 11 aa, Homo sapiens
  CDR3 for beta chain variable domain of TCR clone 47258 (TRBV20-1, TRBJ1-5)
CSAQGDQAQHF

SEQ ID NO: 94517 - protein, 15 aa, Homo sapiens
  CDR3 for alpha chain variable domain of TCR clone 47259 (TRAV8-3, TRAJ27)
CAVGPSKTNAGKSTF

SEQ ID NO: 94518 - protein, 16 aa, Homo sapiens
  CDR3 for beta chain variable domain of TCR clone 47259 (TRBV12-4, TRBJ1-5)
CASSRPVGGSNQPQHF

SEQ ID NO: 94519 - protein, 11 aa, Homo sapiens
  CDR3 for alpha chain variable domain of TCR clone 47260 (TRAV2, TRAJ33)
CAVESNYQLIW

SEQ ID NO: 94520 - protein, 13 aa, Homo sapiens
  CDR3 for beta chain variable domain of TCR clone 47260 (TRBV7-2, TRBJ2-2)
CASSSVRAGELFF

SEQ ID NO: 94521 - protein, 18 aa, Homo sapiens
  CDR3 for alpha chain variable domain of TCR clone 47261 (TRAV13-1, TRAJ52)
CAASKTSAGGTSYGKLTF

SEQ ID NO: 94522 - protein, 13 aa, Homo sapiens
  CDR3 for beta chain variable domain of TCR clone 47261 (TRBV12-4, TRBJ1-2)
CASSLRQGKGYTF

SEQ ID NO: 94523 - protein, 13 aa, Homo sapiens
  CDR3 for alpha chain variable domain of TCR clone 47262 (TRAV1-2, TRAJ9)
CAALNTGGFKTIF

SEQ ID NO: 94524 - protein, 15 aa, Homo sapiens
  CDR3 for beta chain variable domain of TCR clone 47262 (TRBV19, TRBJ1-1)
CASSRGGALNTEAFF

SEQ ID NO: 94525 - protein, 12 aa, Homo sapiens
  CDR3 for alpha chain variable domain of TCR clone 47263 (TRAV3, TRAJ43)
CAVRDPNNDTRF

SEQ ID NO: 94526 - protein, 13 aa, Homo sapiens
  CDR3 for beta chain variable domain of TCR clone 47263 (TRBV19, TRBJ1-2)
CASSVPGQDGYTF

SEQ ID NO: 94527 - protein, 17 aa, Homo sapiens
  CDR3 for alpha chain variable domain of TCR clone 47264 (TRAV29/DV5, TRAJ45)
CAADGPFSGGGADGPTF

SEQ ID NO: 94528 - protein, 13 aa, Homo sapiens
  CDR3 for beta chain variable domain of TCR clone 47264 (TRBV19, TRBJ1-5)
CASSMRGYQPQHF

SEQ ID NO: 94529 - protein, 16 aa, Homo sapiens
  CDR3 for alpha chain variable domain of TCR clone 47265 (TRAV38-2/DV8, TRAJ45)
CADRGNSGGGADGLTF

SEQ ID NO: 94530 - protein, 17 aa, Homo sapiens
  CDR3 for beta chain variable domain of TCR clone 47265 (TRBV11-3, TRBJ2-5)
CASSLPGVRGGKETQYF

SEQ ID NO: 94531 - protein, 13 aa, Homo sapiens
  CDR3 for alpha chain variable domain of TCR clone 47266 (TRAV12-1, TRAJ33)
CGDAPDSNYQLIW

SEQ ID NO: 94532 - protein, 14 aa, Homo sapiens
  CDR3 for beta chain variable domain of TCR clone 47266 (TRBV19, TRBJ2-1)
CASPTFVLSGEQFF

SEQ ID NO: 94533 - protein, 13 aa, Homo sapiens
  CDR3 for alpha chain variable domain of TCR clone 47267 (TRAV8-4, TRAJ10)
CAAFTGGGNKLTF

SEQ ID NO: 94534 - protein, 15 aa, Homo sapiens
  CDR3 for beta chain variable domain of TCR clone 47267 (TRBV2, TRBJ2-3)
CASSDFEKATDTQYV

SEQ ID NO: 94535 - protein, 12 aa, Homo sapiens
  CDR3 for alpha chain variable domain of TCR clone 47268 (TRAV13-1, TRAJ21)
CAAKEGFNKFYF

SEQ ID NO: 94536 - protein, 14 aa, Homo sapiens
  CDR3 for beta chain variable domain of TCR clone 47268 (TRBV7-8, TRBJ2-5)
CASSATGGQETQYF

SEQ ID NO: 94537 - protein, 15 aa, Homo sapiens
  CDR3 for alpha chain variable domain of TCR clone 47269 (TRAV8-6, TRAJ49)
CAVSEGPDTGNQFYF

SEQ ID NO: 94538 - protein, 12 aa, Homo sapiens
  CDR3 for beta chain variable domain of TCR clone 47269 (TRBV13, TRBJ1-2)
CASSLQWEGYTF

SEQ ID NO: 94539 - protein, 12 aa, Homo sapiens
  CDR3 for alpha chain variable domain of TCR clone 47270 (TRAV8-3, TRAJ20)
CAVDFNDYKLSF

SEQ ID NO: 94540 - protein, 14 aa, Homo sapiens
  CDR3 for beta chain variable domain of TCR clone 47270 (TRBV19, TRBJ2-1)
CASPTFVLSGEQFF

SEQ ID NO: 94541 - protein, 14 aa, Homo sapiens
  CDR3 for alpha chain variable domain of TCR clone 47271 (TRAV35, TRAJ22)
CAGLRPGSARQLTF

SEQ ID NO: 94542 - protein, 15 aa, Homo sapiens
  CDR3 for beta chain variable domain of TCR clone 47271 (TRBV12-4, TRBJ2-5)
CASSPPTGLQETQSF

SEQ ID NO: 94543 - protein, 12 aa, Homo sapiens
  CDR3 for alpha chain variable domain of TCR clone 47272 (TRAV35, TRAJ39)
LTPNNAGNMLTF

SEQ ID NO: 94544 - protein, 16 aa, Homo sapiens
  CDR3 for beta chain variable domain of TCR clone 47272 (TRBV2, TRBJ2-3)
CASSTSVEGVTDTQYF

SEQ ID NO: 94545 - protein, 16 aa, Homo sapiens
  CDR3 for alpha chain variable domain of TCR clone 47273 (TRAV30, TRAJ24)
CVTEIVDADSWGKFQF

SEQ ID NO: 94546 - protein, 14 aa, Homo sapiens
  CDR3 for beta chain variable domain of TCR clone 47273 (TRBV7-2, TRBJ2-7)
CASSPKTSFYEQYF

SEQ ID NO: 94547 - protein, 13 aa, Homo sapiens
  CDR3 for alpha chain variable domain of TCR clone 47274 (TRAV17, TRAJ26)
CATVDNYGQNFVF

SEQ ID NO: 94548 - protein, 12 aa, Homo sapiens
  CDR3 for beta chain variable domain of TCR clone 47274 (TRBV24-1, TRBJ1-1)
CATLYPDTEAFF

SEQ ID NO: 94549 - protein, 13 aa, Homo sapiens
  CDR3 for alpha chain variable domain of TCR clone 47275 (TRAV8-1, TRAJ9)
CAVNSVGGFKTIF

SEQ ID NO: 94550 - protein, 15 aa, Homo sapiens
  CDR3 for beta chain variable domain of TCR clone 47275 (TRBV11-2, TRBJ2-3)
CASSGRDGLTGTQYF

SEQ ID NO: 94551 - protein, 11 aa, Homo sapiens
  CDR3 for alpha chain variable domain of TCR clone 47276 (TRAV12-3, TRAJ43)
CATSVSNDMRF

SEQ ID NO: 94552 - protein, 16 aa, Homo sapiens
  CDR3 for beta chain variable domain of TCR clone 47276 (TRBV2, TRBJ2-3)
CASSTSVEGVTDTQYF

SEQ ID NO: 94553 - protein, 17 aa, Homo sapiens
  CDR3 for alpha chain variable domain of TCR clone 47277 (TRAV13-1, TRAJ28)
CAASPPYSGAGSYQLTF

SEQ ID NO: 94554 - protein, 16 aa, Homo sapiens
  CDR3 for beta chain variable domain of TCR clone 47277 (TRBV24-1, TRBJ2-3)
CATSDPGTGATDTQYF

SEQ ID NO: 94555 - protein, 14 aa, Homo sapiens
  CDR3 for alpha chain variable domain of TCR clone 47278 (TRAV17, TRAJ45)
CATASGGGADGLTF

SEQ ID NO: 94556 - protein, 14 aa, Homo sapiens
  CDR3 for beta chain variable domain of TCR clone 47278 (TRBV20-1, TRBJ1-5)
CSARDDRGNQPQHF

SEQ ID NO: 94557 - protein, 14 aa, Homo sapiens
  CDR3 for alpha chain variable domain of TCR clone 47279 (TRAV17, TRAJ5)
CATVALAGRRALTF

SEQ ID NO: 94558 - protein, 14 aa, Homo sapiens
  CDR3 for beta chain variable domain of TCR clone 47279 (TRBV28, TRBJ2-7)
CASSPYGMAYEQYF

SEQ ID NO: 94559 - protein, 18 aa, Homo sapiens
  CDR3 for alpha chain variable domain of TCR clone 47280 (TRAV26-1, TRAJ23)
CIVRVGLEVWNQGGKLIF

SEQ ID NO: 94560 - protein, 13 aa, Homo sapiens
  CDR3 for beta chain variable domain of TCR clone 47280 (TRBV12-4, TRBJ1-2)
CASSLRQGKGYTF

SEQ ID NO: 94561 - protein, 13 aa, Homo sapiens
  CDR3 for alpha chain variable domain of TCR clone 47281 (TRAV36/DV7, TRAJ37)
CAVFSSNTGKLIF

SEQ ID NO: 94562 - protein, 16 aa, Homo sapiens
  CDR3 for beta chain variable domain of TCR clone 47281 (TRBV3-1, TRBJ2-5)
CASSPGQFNGFGTLYF

SEQ ID NO: 94563 - protein, 14 aa, Homo sapiens
  CDR3 for alpha chain variable domain of TCR clone 47282 (TRAV29/DV5, TRAJ45)
CAASFRGGADGLTF

SEQ ID NO: 94564 - protein, 18 aa, Homo sapiens
  CDR3 for beta chain variable domain of TCR clone 47282 (TRBV20-1, TRBJ2-6)
CSAETTPTHGSGANVLTF

SEQ ID NO: 94565 - protein, 15 aa, Homo sapiens
  CDR3 for alpha chain variable domain of TCR clone 47283 (TRAV2, TRAJ44)
CAVEAYTGTASKLTL

SEQ ID NO: 94566 - protein, 14 aa, Homo sapiens
  CDR3 for beta chain variable domain of TCR clone 47283 (TRBV11-2, TRBJ2-1)
CASSPGSRDNEQFF

SEQ ID NO: 94567 - protein, 17 aa, Homo sapiens
  CDR3 for alpha chain variable domain of TCR clone 47284 (TRAV8-6, TRAJ52)
CAVSLQFGGTSYGKLTF

SEQ ID NO: 94568 - protein, 14 aa, Homo sapiens
  CDR3 for beta chain variable domain of TCR clone 47284 (TRBV7-2, TRBJ2-7)
CASSPKTSFYEQYF

SEQ ID NO: 94569 - protein, 10 aa, Homo sapiens
  CDR3 for alpha chain variable domain of TCR clone 47285 (TRAV2, TRAJ34)
CAVVNDKPIF

SEQ ID NO: 94570 - protein, 15 aa, Homo sapiens
  CDR3 for beta chain variable domain of TCR clone 47285 (TRBV3-1, TRBJ2-2)
CASSQDWTRAGELFF

SEQ ID NO: 94571 - protein, 13 aa, Homo sapiens
  CDR3 for alpha chain variable domain of TCR clone 47286 (TRAV17, TRAJ9)
CATDYTGGFETIF

SEQ ID NO: 94572 - protein, 14 aa, Homo sapiens
  CDR3 for beta chain variable domain of TCR clone 47286 (TRBV19, TRBJ2-5)
CASSMTGQQETQYF

SEQ ID NO: 94573 - protein, 17 aa, Homo sapiens
  CDR3 for alpha chain variable domain of TCR clone 47287 (TRAV8-3, TRAJ13)
CAVGAGLGVTRKLPLEL

SEQ ID NO: 94574 - protein, 14 aa, Homo sapiens
  CDR3 for beta chain variable domain of TCR clone 47287 (TRBV7-2, TRBJ2-7)
CASSLYPGRYEQYF

SEQ ID NO: 94575 - protein, 11 aa, Homo sapiens
  CDR3 for alpha chain variable domain of TCR clone 47288 (TRAV2, TRAJ33)
CAVDSNYQLIW

SEQ ID NO: 94576 - protein, 16 aa, Homo sapiens
  CDR3 for beta chain variable domain of TCR clone 47288 (TRBV6-1, TRBJ2-5)
CASSETLDRGAETQYF

SEQ ID NO: 94577 - protein, 13 aa, Homo sapiens
  CDR3 for alpha chain variable domain of TCR clone 47289 (TRAV35, TRAJ13)
CWAVPWGLPEVTF

SEQ ID NO: 94578 - protein, 14 aa, Homo sapiens
  CDR3 for beta chain variable domain of TCR clone 47289 (TRBV19, TRBJ2-2)
CASSMVGLSGELFF

SEQ ID NO: 94579 - protein, 11 aa, Homo sapiens
  CDR3 for alpha chain variable domain of TCR clone 47290 (TRAV1-2, TRAJ40)
CAVPGTYKYIF

SEQ ID NO: 94580 - protein, 13 aa, Homo sapiens
  CDR3 for beta chain variable domain of TCR clone 47290 (TRBV10-3, TRBJ2-7)
CASKLAVNYEQYF

SEQ ID NO: 94581 - protein, 11 aa, Homo sapiens
  CDR3 for alpha chain variable domain of TCR clone 47291 (TRAV3, TRAJ21)
CAVGNFNKFYF

SEQ ID NO: 94582 - protein, 15 aa, Homo sapiens
  CDR3 for beta chain variable domain of TCR clone 47291 (TRBV5-1, TRBJ2-1)
CASSPPRAPYNEQFF

SEQ ID NO: 94583 - protein, 13 aa, Homo sapiens
  CDR3 for alpha chain variable domain of TCR clone 47292 (TRAV3, TRAJ20)
CVVRDTGDYKLSF

SEQ ID NO: 94584 - protein, 12 aa, Homo sapiens
  CDR3 for beta chain variable domain of TCR clone 47292 (TRBV29-1, TRBJ2-3)
CSVTGGADTQYF

SEQ ID NO: 94585 - protein, 13 aa, Homo sapiens
  CDR3 for alpha chain variable domain of TCR clone 47293 (TRAV2, TRAJ24)
CAVTADSWGKLQF

SEQ ID NO: 94586 - protein, 14 aa, Homo sapiens
  CDR3 for beta chain variable domain of TCR clone 47293 (TRBV13, TRBJ2-5)
CASSLGRGQETQYF

SEQ ID NO: 94587 - protein, 14 aa, Homo sapiens
  CDR3 for alpha chain variable domain of TCR clone 47294 (TRAV12-2, TRAJ40)
CAVKIPSGTYKYIF

SEQ ID NO: 94588 - protein, 15 aa, Homo sapiens
  CDR3 for beta chain variable domain of TCR clone 47294 (TRBV7-9, TRBJ1-5)
CASSQGHQPNQPQHF

SEQ ID NO: 94589 - protein, 14 aa, Homo sapiens
  CDR3 for alpha chain variable domain of TCR clone 47295 (TRAV17, TRAJ53)
CATDAGGSNYKLTF

SEQ ID NO: 94590 - protein, 16 aa, Homo sapiens
  CDR3 for beta chain variable domain of TCR clone 47295 (TRBV4-1, TRBJ1-1)
CTSSQDAGMGNTEAFF

SEQ ID NO: 94591 - protein, 16 aa, Homo sapiens
  CDR3 for alpha chain variable domain of TCR clone 47296 (TRAV38-1, TRAJ32)
CAFMKGGGGATNNLIF

SEQ ID NO: 94592 - protein, 13 aa, Homo sapiens
  CDR3 for beta chain variable domain of TCR clone 47296 (TRBV20-1, TRBJ2-5)
CSAREAFQEAQYF

SEQ ID NO: 94593 - protein, 14 aa, Homo sapiens
  CDR3 for alpha chain variable domain of TCR clone 47297 (TRAV12-2, TRAJ45)
CAVNKGGGADGLPF

SEQ ID NO: 94594 - protein, 14 aa, Homo sapiens
  CDR3 for beta chain variable domain of TCR clone 47297 (TRBV20-1, TRBJ1-1)
CSAMGGTANTEAFF

SEQ ID NO: 94595 - protein, 14 aa, Homo sapiens
  CDR3 for alpha chain variable domain of TCR clone 47298 (TRAV12-3, TRAJ15)
CAMIPPQAGTALIF

SEQ ID NO: 94596 - protein, 12 aa, Homo sapiens
  CDR3 for beta chain variable domain of TCR clone 47298 (TRBV11-2, TRBJ2-2)
CASSFEGGELFF

SEQ ID NO: 94597 - protein, 15 aa, Homo sapiens
  CDR3 for alpha chain variable domain of TCR clone 47299 (TRAV2, TRAJ9)
CAVAALNTGGFKTIF

SEQ ID NO: 94598 - protein, 13 aa, Homo sapiens
  CDR3 for beta chain variable domain of TCR clone 47299 (TRBV7-2, TRBJ2-2)
CASSLAVTGELFF

SEQ ID NO: 94599 - protein, 15 aa, Homo sapiens
  CDR3 for alpha chain variable domain of TCR clone 47300 (TRAV21, TRAJ37)
CAVRPTLSNSGKLIF

SEQ ID NO: 94600 - protein, 16 aa, Homo sapiens
  CDR3 for beta chain variable domain of TCR clone 47300 (TRBV24-1, TRBJ2-3)
CATSDRRQDLTDTQYF

SEQ ID NO: 94601 - protein, 12 aa, Homo sapiens
  CDR3 for alpha chain variable domain of TCR clone 47301 (TRAV35, TRAJ16)
CAGPSDGQKLLF

SEQ ID NO: 94602 - protein, 11 aa, Homo sapiens
  CDR3 for beta chain variable domain of TCR clone 47301 (TRBV7-9, TRBJ2-3)
CASSFRDTQYF

SEQ ID NO: 94603 - protein, 12 aa, Homo sapiens
  CDR3 for alpha chain variable domain of TCR clone 47302 (TRAV16, TRAJ10)
CSRTGGGNKLTF

SEQ ID NO: 94604 - protein, 14 aa, Homo sapiens
  CDR3 for beta chain variable domain of TCR clone 47302 (TRBV7-6, TRBJ2-3)
CASSLGTVTDTQYF

SEQ ID NO: 94605 - protein, 15 aa, Homo sapiens
  CDR3 for alpha chain variable domain of TCR clone 47303 (TRAV8-4, TRAJ7)
CAVSGGNYGNNRLAF

SEQ ID NO: 94606 - protein, 11 aa, Homo sapiens
  CDR3 for beta chain variable domain of TCR clone 47303 (TRBV20-1, TRBJ2-1)
CSLSSGSVQFF

SEQ ID NO: 94607 - protein, 12 aa, Homo sapiens
  CDR3 for alpha chain variable domain of TCR clone 47304 (TRAV23/DV6, TRAJ33)
CAAEDSNYQLIW

SEQ ID NO: 94608 - protein, 14 aa, Homo sapiens
  CDR3 for beta chain variable domain of TCR clone 47304 (TRBV18, TRBJ1-5)
CASPRQQRNQPQHF

SEQ ID NO: 94609 - protein, 13 aa, Homo sapiens
  CDR3 for alpha chain variable domain of TCR clone 47305 (TRAV38-1, TRAJ42)
CARWGGSQGNLIF

SEQ ID NO: 94610 - protein, 17 aa, Homo sapiens
  CDR3 for beta chain variable domain of TCR clone 47305 (TRBV20-1, TRBJ2-1)
CSARDPLAGVWENEQFF

SEQ ID NO: 94611 - protein, 13 aa, Homo sapiens
  CDR3 for alpha chain variable domain of TCR clone 47306 (TRAV35, TRAJ44)
CAGLSGTASKLTF

SEQ ID NO: 94612 - protein, 17 aa, Homo sapiens
  CDR3 for beta chain variable domain of TCR clone 47306 (TRBV7-8, TRBJ1-2)
CASSLRPLQGQLYGYTF

SEQ ID NO: 94613 - protein, 12 aa, Homo sapiens
  CDR3 for alpha chain variable domain of TCR clone 47307 (TRAV12-3, TRAJ17)
CAMTLTGNKLTF

SEQ ID NO: 94614 - protein, 14 aa, Homo sapiens
  CDR3 for beta chain variable domain of TCR clone 47307 (TRBV7-2, TRBJ2-1)
CASSRGGARNEQFF

SEQ ID NO: 94615 - protein, 15 aa, Homo sapiens
  CDR3 for alpha chain variable domain of TCR clone 47308 (TRAV8-4, TRAJ37)
CAVTYGSSNTGKLIF

SEQ ID NO: 94616 - protein, 13 aa, Homo sapiens
  CDR3 for beta chain variable domain of TCR clone 47308 (TRBV12-4, TRBJ2-5)
CASSLGGSRNQYF

SEQ ID NO: 94617 - protein, 11 aa, Homo sapiens
  CDR3 for alpha chain variable domain of TCR clone 47309 (TRAV21, TRAJ34)
CAHYNTGKLIF

SEQ ID NO: 94618 - protein, 11 aa, Homo sapiens
  CDR3 for beta chain variable domain of TCR clone 47309 (TRBV29-1, TRBJ2-5)
CSEDRTGTQYF

SEQ ID NO: 94619 - protein, 14 aa, Homo sapiens
  CDR3 for alpha chain variable domain of TCR clone 47310 (TRAV20, TRAJ44)
CAVQDTGTASKLTF

SEQ ID NO: 94620 - protein, 13 aa, Homo sapiens
  CDR3 for beta chain variable domain of TCR clone 47310 (TRBV29-1, TRBJ1-3)
CSVGTGRGNTIYF

SEQ ID NO: 94621 - protein, 14 aa, Homo sapiens
  CDR3 for alpha chain variable domain of TCR clone 47311 (TRAV1-2, TRAJ16)
CAVNRFSDGQKLLF

SEQ ID NO: 94622 - protein, 13 aa, Homo sapiens
  CDR3 for beta chain variable domain of TCR clone 47311 (TRBV14, TRBJ1-1)
CASSQEAGTEAFF

SEQ ID NO: 94623 - protein, 18 aa, Homo sapiens
  CDR3 for alpha chain variable domain of TCR clone 47312 (TRAV26-1, TRAJ5)
CIVRVVPPRDTGRRALTF

SEQ ID NO: 94624 - protein, 15 aa, Homo sapiens
  CDR3 for beta chain variable domain of TCR clone 47312 (TRBV7-9, TRBJ2-7)
CASSSPMGQANEQYF

SEQ ID NO: 94625 - protein, 15 aa, Homo sapiens
  CDR3 for alpha chain variable domain of TCR clone 47313 (TRAV26-1, TRAJ29)
CSVRVEGSGNTPLVF

SEQ ID NO: 94626 - protein, 15 aa, Homo sapiens
  CDR3 for beta chain variable domain of TCR clone 47313 (TRBV7-9, TRBJ1-5)
CASSQGHQPNQPQHF

SEQ ID NO: 94627 - protein, 11 aa, Homo sapiens
  CDR3 for alpha chain variable domain of TCR clone 47314 (TRAV12-2, TRAJ33)
CVVTSNYQLIW

SEQ ID NO: 94628 - protein, 14 aa, Homo sapiens
  CDR3 for beta chain variable domain of TCR clone 47314 (TRBV12-4, TRBJ2-2)
CASNQGANTGELFF

SEQ ID NO: 94629 - protein, 18 aa, Homo sapiens
  CDR3 for alpha chain variable domain of TCR clone 47315 (TRAV9-2, TRAJ52)
CALSRHNACGTSYGKLTF

SEQ ID NO: 94630 - protein, 13 aa, Homo sapiens
  CDR3 for beta chain variable domain of TCR clone 47315 (TRBV7-9, TRBJ1-2)
CASSLKQNYGYTF

SEQ ID NO: 94631 - protein, 23 aa, Homo sapiens
  CDR3 for alpha chain variable domain of TCR clone 47316 (TRAV20, TRAJ32)
CAVDGMVVLQTSSSLELSLCLLS

SEQ ID NO: 94632 - protein, 16 aa, Homo sapiens
  CDR3 for beta chain variable domain of TCR clone 47316 (TRBV19, TRBJ2-2)
CASRSPGTGATGELFF

SEQ ID NO: 94633 - protein, 14 aa, Homo sapiens
  CDR3 for alpha chain variable domain of TCR clone 47317 (TRAV1-2, TRAJ6)
CAVSLSGGSYIPTF

SEQ ID NO: 94634 - protein, 14 aa, Homo sapiens
  CDR3 for beta chain variable domain of TCR clone 47317 (TRBV11-2, TRBJ2-3)
CASSLGGGANTQYF

SEQ ID NO: 94635 - protein, 13 aa, Homo sapiens
  CDR3 for alpha chain variable domain of TCR clone 47318 (TRAV1-1, TRAJ9)
CAAKNTGGFKTIF

SEQ ID NO: 94636 - protein, 14 aa, Homo sapiens
  CDR3 for beta chain variable domain of TCR clone 47318 (TRBV7-6, TRBJ2-3)
CASSLGTVTDTQYF

SEQ ID NO: 94637 - protein, 16 aa, Homo sapiens
  CDR3 for alpha chain variable domain of TCR clone 47319 (TRAV30, TRAJ24)
CGTEIVDADSWGKFQF

SEQ ID NO: 94638 - protein, 13 aa, Homo sapiens
  CDR3 for beta chain variable domain of TCR clone 47319 (TRBV11-2, TRBJ2-5)
CASSSTGEEAQYF

SEQ ID NO: 94639 - protein, 13 aa, Homo sapiens
  CDR3 for alpha chain variable domain of TCR clone 47320 (TRAV1-2, TRAJ7)
CAGPYYGNNRLAF

SEQ ID NO: 94640 - protein, 15 aa, Homo sapiens
  CDR3 for beta chain variable domain of TCR clone 47320 (TRBV19, TRBJ2-2)
CASSLNRGVTGELFF

SEQ ID NO: 94641 - protein, 17 aa, Homo sapiens
  CDR3 for alpha chain variable domain of TCR clone 47321 (TRAV12-3, TRAJ6)
CAMSARGGAGGSYIPTF

SEQ ID NO: 94642 - protein, 12 aa, Homo sapiens
  CDR3 for beta chain variable domain of TCR clone 47321 (TRBV12-4, TRBJ2-3)
CASSTLPDTLYF

SEQ ID NO: 94643 - protein, 10 aa, Homo sapiens
  CDR3 for alpha chain variable domain of TCR clone 47322 (TRAV21, TRAJ20)
CAVNVGRLQA

SEQ ID NO: 94644 - protein, 15 aa, Homo sapiens
  CDR3 for beta chain variable domain of TCR clone 47322 (TRBV6-1, TRBJ2-5)
CASSEFPLMGETQYL

SEQ ID NO: 94645 - protein, 13 aa, Homo sapiens
  CDR3 for alpha chain variable domain of TCR clone 47323 (TRAV12-1, TRAJ6)
CVVFPGGSHIPTF

SEQ ID NO: 94646 - protein, 12 aa, Homo sapiens
  CDR3 for beta chain variable domain of TCR clone 47323 (TRBV11-2, TRBJ2-2)
CASSLGGGELFF

SEQ ID NO: 94647 - protein, 16 aa, Homo sapiens
  CDR3 for alpha chain variable domain of TCR clone 47324 (TRAV30, TRAJ24)
CGTEIVDADSWGKFQF

SEQ ID NO: 94648 - protein, 14 aa, Homo sapiens
  CDR3 for beta chain variable domain of TCR clone 47324 (TRBV19, TRBJ2-1)
CARGARSFQWEQFF

SEQ ID NO: 94649 - protein, 14 aa, Homo sapiens
  CDR3 for alpha chain variable domain of TCR clone 47325 (TRAV26-1, TRAJ26)
CIVRATFLGQNFVS

SEQ ID NO: 94650 - protein, 16 aa, Homo sapiens
  CDR3 for beta chain variable domain of TCR clone 47325 (TRBV12-4, TRBJ2-7)
CASRSTGTGPSYEQYF

SEQ ID NO: 94651 - protein, 14 aa, Homo sapiens
  CDR3 for alpha chain variable domain of TCR clone 47326 (TRAV1-2, TRAJ16)
CAVNRFSDCQKLLF

SEQ ID NO: 94652 - protein, 11 aa, Homo sapiens
  CDR3 for beta chain variable domain of TCR clone 47326 (TRBV29-1, TRBJ2-5)
CSEDRTGTQYF

SEQ ID NO: 94653 - protein, 14 aa, Homo sapiens
  CDR3 for alpha chain variable domain of TCR clone 47327 (TRAV16, TRAJ33)
CALSAMDSNYQLIW

SEQ ID NO: 94654 - protein, 15 aa, Homo sapiens
  CDR3 for beta chain variable domain of TCR clone 47327 (TRBV28, TRBJ2-1)
CASSIIAGGRSEQFF

SEQ ID NO: 94655 - protein, 13 aa, Homo sapiens
  CDR3 for alpha chain variable domain of TCR clone 47328 (TRAV13-1, TRAJ20)
CAARVSNDYKLSF

SEQ ID NO: 94656 - protein, 12 aa, Homo sapiens
  CDR3 for beta chain variable domain of TCR clone 47328 (TRBV20-1, TRBJ2-1)
CSARRGTDEQFF

SEQ ID NO: 94657 - protein, 13 aa, Homo sapiens
  CDR3 for alpha chain variable domain of TCR clone 47329 (TRAV16, TRAJ31)
CALSAHNNARLMF

SEQ ID NO: 94658 - protein, 17 aa, Homo sapiens
  CDR3 for beta chain variable domain of TCR clone 47329 (TRBV12-4, TRBJ2-1)
CASSPGLAVGRINEQFF

SEQ ID NO: 94659 - protein, 15 aa, Homo sapiens
  CDR3 for alpha chain variable domain of TCR clone 47330 (TRAV14/DV4, TRAJ4)
CAMRAAGGGYNKLIF

SEQ ID NO: 94660 - protein, 16 aa, Homo sapiens
  CDR3 for beta chain variable domain of TCR clone 47330 (TRBV4-1, TRBJ1-3)
CASSQDELLAGNTIYF

SEQ ID NO: 94661 - protein, 14 aa, Homo sapiens
  CDR3 for alpha chain variable domain of TCR clone 47331 (TRAV12-3, TRAJ15)
CAMIPPQAGTALIF

SEQ ID NO: 94662 - protein, 14 aa, Homo sapiens
  CDR3 for beta chain variable domain of TCR clone 47331 (TRBV20-1, TRBJ2-2)
CSARKRLATGELLF

SEQ ID NO: 94663 - protein, 13 aa, Homo sapiens
  CDR3 for alpha chain variable domain of TCR clone 47332 (TRAV3, TRAJ15)
CAVRDQAGTALIF

SEQ ID NO: 94664 - protein, 15 aa, Homo sapiens
  CDR3 for beta chain variable domain of TCR clone 47332 (TRBV11-1, TRBJ2-7)
CASSLNYGATYEQYF

SEQ ID NO: 94665 - protein, 19 aa, Homo sapiens
  CDR3 for alpha chain variable domain of TCR clone 47333 (TRAV1-2, TRAJ18)
CLLPLCCERRGSTLGRLYF

SEQ ID NO: 94666 - protein, 15 aa, Homo sapiens
  CDR3 for beta chain variable domain of TCR clone 47333 (TRBV9, TRBJ1-6)
CASSVAGTGDSPLHF

SEQ ID NO: 94667 - protein, 16 aa, Homo sapiens
  CDR3 for alpha chain variable domain of TCR clone 47334 (TRAV13-1, TRAJ45)
CAARGARKGGADGLTF

SEQ ID NO: 94668 - protein, 13 aa, Homo sapiens
  CDR3 for beta chain variable domain of TCR clone 47334 (TRBV12-4, TRBJ2-5)
CASRKRGKETQYF

SEQ ID NO: 94669 - protein, 14 aa, Homo sapiens
  CDR3 for alpha chain variable domain of TCR clone 47335 (TRAV17, TRAJ40)
CATALTSGTYKYIF

SEQ ID NO: 94670 - protein, 15 aa, Homo sapiens
  CDR3 for beta chain variable domain of TCR clone 47335 (TRBV2, TRBJ2-1)
CASSELAGSYNEQFF

SEQ ID NO: 94671 - protein, 15 aa, Homo sapiens
  CDR3 for alpha chain variable domain of TCR clone 47336 (TRAV29/DV5, TRAJ24)
CAASGATDSWGKFQI

SEQ ID NO: 94672 - protein, 12 aa, Homo sapiens
  CDR3 for beta chain variable domain of TCR clone 47336 (TRBV11-2, TRBJ2-2)
CASSLPTGELFF

SEQ ID NO: 94673 - protein, 13 aa, Homo sapiens
  CDR3 for alpha chain variable domain of TCR clone 47337 (TRAV26-2, TRAJ37)
CIRGSSNTGKLIF

SEQ ID NO: 94674 - protein, 16 aa, Homo sapiens
  CDR3 for beta chain variable domain of TCR clone 47337 (TRBV7-2, TRBJ2-5)
RASSPGGARRGETQYF

SEQ ID NO: 94675 - protein, 12 aa, Homo sapiens
  CDR3 for alpha chain variable domain of TCR clone 47338 (TRAV8-6, TRAJ15)
CAASSRGAALIF

SEQ ID NO: 94676 - protein, 14 aa, Homo sapiens
  CDR3 for beta chain variable domain of TCR clone 47338 (TRBV27, TRBJ1-1)
CASSLLSGLSEAFF

SEQ ID NO: 94677 - protein, 15 aa, Homo sapiens
  CDR3 for alpha chain variable domain of TCR clone 47339 (TRAV8-4, TRAJ47)
CAVSDPEEYGNKLVF

SEQ ID NO: 94678 - protein, 15 aa, Homo sapiens
  CDR3 for beta chain variable domain of TCR clone 47339 (TRBV11-2, TRBJ2-1)
CASSLGPDSYNEQSF

SEQ ID NO: 94679 - protein, 10 aa, Homo sapiens
  CDR3 for alpha chain variable domain of TCR clone 47340 (TRAV26-1, TRAJ22)
RSGSARQLTF

SEQ ID NO: 94680 - protein, 14 aa, Homo sapiens
  CDR3 for beta chain variable domain of TCR clone 47340 (TRBV25-1, TRBJ1-1)
CASTHLGGNTEAFF

SEQ ID NO: 94681 - protein, 14 aa, Homo sapiens
  CDR3 for alpha chain variable domain of TCR clone 47341 (TRAV1-2, TRAJ16)
CAVNRFSDGQKLLF

SEQ ID NO: 94682 - protein, 15 aa, Homo sapiens
  CDR3 for beta chain variable domain of TCR clone 47341 (TRBV7-3, TRBJ2-2)
CASKANGANTGELFF

SEQ ID NO: 94683 - protein, 18 aa, Homo sapiens
  CDR3 for alpha chain variable domain of TCR clone 47342 (TRAV3, TRAJ32)
CAVRDIRGYGGATNKRIF

SEQ ID NO: 94684 - protein, 15 aa, Homo sapiens
  CDR3 for beta chain variable domain of TCR clone 47342 (TRBV12-4, TRBJ2-2)
CASSLGVRHTGELFF

SEQ ID NO: 94685 - protein, 13 aa, Homo sapiens
  CDR3 for alpha chain variable domain of TCR clone 47343 (TRAV12-2, TRAJ34)
CAVRGYNTAKLIF

SEQ ID NO: 94686 - protein, 15 aa, Homo sapiens
  CDR3 for beta chain variable domain of TCR clone 47343 (TRBV28, TRBJ2-1)
CASRTGAGVIARQFF

SEQ ID NO: 94687 - protein, 15 aa, Homo sapiens
  CDR3 for alpha chain variable domain of TCR clone 47344 (TRAV30, TRAJ32)
CGTEILGGATNKPIF

SEQ ID NO: 94688 - protein, 17 aa, Homo sapiens
  CDR3 for beta chain variable domain of TCR clone 47344 (TRBV5-4, TRBJ2-1)
CASSSAGGRGPYNEQFF

SEQ ID NO: 94689 - protein, 12 aa, Homo sapiens
  CDR3 for alpha chain variable domain of TCR clone 47345 (TRAV16, TRAJ27)
FALNHQCRQINL

SEQ ID NO: 94690 - protein, 14 aa, Homo sapiens
  CDR3 for beta chain variable domain of TCR clone 47345 (TRBV11-2, TRBJ1-5)
CASSLDRGRQPQHF

SEQ ID NO: 94691 - protein, 13 aa, Homo sapiens
  CDR3 for alpha chain variable domain of TCR clone 47346 (TRAV16, TRAJ26)
CITVLCLGQNFVF

SEQ ID NO: 94692 - protein, 12 aa, Homo sapiens
  CDR3 for beta chain variable domain of TCR clone 47346 (TRBV11-2, TRBJ2-1)
CASSPGNNEQLF

SEQ ID NO: 94693 - protein, 15 aa, Homo sapiens
  CDR3 for alpha chain variable domain of TCR clone 47347 (TRAV17, TRAJ16)
CATALRFSDGQKLLF

SEQ ID NO: 94694 - protein, 14 aa, Homo sapiens
  CDR3 for beta chain variable domain of TCR clone 47347 (TRBV2, TRBJ2-7)
CASSLTSGGYEQYF

SEQ ID NO: 94695 - protein, 10 aa, Homo sapiens
  CDR3 for alpha chain variable domain of TCR clone 47348 (TRAV21, TRAJ31)
CAVNNARLMF

SEQ ID NO: 94696 - protein, 13 aa, Homo sapiens
  CDR3 for beta chain variable domain of TCR clone 47348 (TRBV4-1, TRBJ1-1)
CASSRKMNTEAFF

SEQ ID NO: 94697 - protein, 14 aa, Homo sapiens
  CDR3 for alpha chain variable domain of TCR clone 47349 (TRAV1-2, TRAJ16)
CAVNRFSDGQKLLF

SEQ ID NO: 94698 - protein, 16 aa, Homo sapiens
  CDR3 for beta chain variable domain of TCR clone 47349 (TRBV6-5, TRBJ2-1)
CASSETLAGHYNEQFF

SEQ ID NO: 94699 - protein, 14 aa, Homo sapiens
  CDR3 for alpha chain variable domain of TCR clone 47350 (TRAV1-2, TRAJ8)
CAVREDTGFQKLVF

SEQ ID NO: 94700 - protein, 15 aa, Homo sapiens
  CDR3 for beta chain variable domain of TCR clone 47350 (TRBV10-2, TRBJ2-6)
CASSEQGTGANVLTS

SEQ ID NO: 94701 - protein, 12 aa, Homo sapiens
  CDR3 for alpha chain variable domain of TCR clone 47351 (TRAV12-3, TRAJ43)
CAISSNNNDIRF

SEQ ID NO: 94702 - protein, 15 aa, Homo sapiens
  CDR3 for beta chain variable domain of TCR clone 47351 (TRBV27, TRBJ1-4)
CASSPRHATNEKLFF

SEQ ID NO: 94703 - protein, 11 aa, Homo sapiens
  CDR3 for alpha chain variable domain of TCR clone 47352 (TRAV12-3, TRAJ43)
CAMSVSNDIRF

SEQ ID NO: 94704 - protein, 14 aa, Homo sapiens
  CDR3 for beta chain variable domain of TCR clone 47352 (TRBV12-5, TRBJ2-5)
CASGSRTHQETQYF

SEQ ID NO: 94705 - protein, 13 aa, Homo sapiens
  CDR3 for alpha chain variable domain of TCR clone 47353 (TRAV29/DV5, TRAJ49)
CAASTNTGNRFYF

SEQ ID NO: 94706 - protein, 13 aa, Homo sapiens
  CDR3 for beta chain variable domain of TCR clone 47353 (TRBV7-2, TRBJ1-4)
CASSLAGLEKLFF

SEQ ID NO: 94707 - protein, 12 aa, Homo sapiens
  CDR3 for alpha chain variable domain of TCR clone 47354 (TRAV13-1, TRAJ15)
CAASQAGTALIF

SEQ ID NO: 94708 - protein, 14 aa, Homo sapiens
  CDR3 for beta chain variable domain of TCR clone 47354 (TRBV19, TRBJ2-2)
CASSTLNRPGELFF

SEQ ID NO: 94709 - protein, 13 aa, Homo sapiens
  CDR3 for alpha chain variable domain of TCR clone 47355 (TRAV12-1, TRAJ16)
CVVNAPDGQKLLF

SEQ ID NO: 94710 - protein, 17 aa, Homo sapiens
  CDR3 for beta chain variable domain of TCR clone 47355 (TRBV13, TRBJ2-3)
CASSLSRVAGGRNTQYF

SEQ ID NO: 94711 - protein, 16 aa, Homo sapiens
  CDR3 for alpha chain variable domain of TCR clone 47356 (TRAV22, TRAJ45)
CAVKRGKRGGADGLTF

SEQ ID NO: 94712 - protein, 13 aa, Homo sapiens
  CDR3 for beta chain variable domain of TCR clone 47356 (TRBV27, TRBJ1-1)
CASSLSIGAEAFF

SEQ ID NO: 94713 - protein, 13 aa, Homo sapiens
  CDR3 for alpha chain variable domain of TCR clone 47357 (TRAV2, TRAJ40)
CAVVTSGTYKYIF

SEQ ID NO: 94714 - protein, 17 aa, Homo sapiens
  CDR3 for beta chain variable domain of TCR clone 47357 (TRBV7-9, TRBJ1-1)
CASSLGIAGAENTEAFF

SEQ ID NO: 94715 - protein, 13 aa, Homo sapiens
  CDR3 for alpha chain variable domain of TCR clone 47358 (TRAV3, TRAJ8)
CAVRFTGFQKLVF

SEQ ID NO: 94716 - protein, 12 aa, Homo sapiens
  CDR3 for beta chain variable domain of TCR clone 47358 (TRBV11-2, TRBJ2-2)
CASSLGGGELFF

SEQ ID NO: 94717 - protein, 11 aa, Homo sapiens
  CDR3 for alpha chain variable domain of TCR clone 47359 (TRAV21, TRAJ11)
CAVNVYSTLTF

SEQ ID NO: 94718 - protein, 11 aa, Homo sapiens
  CDR3 for beta chain variable domain of TCR clone 47359 (TRBV19, TRBJ1-1)
CASSIGSEAFF

SEQ ID NO: 94719 - protein, 15 aa, Homo sapiens
  CDR3 for alpha chain variable domain of TCR clone 47360 (TRAV27, TRAJ10)
PSRGILTGGGNKLTF

SEQ ID NO: 94720 - protein, 15 aa, Homo sapiens
  CDR3 for beta chain variable domain of TCR clone 47360 (TRBV9, TRBJ2-3)
CASSLEGGLTDTQYF

SEQ ID NO: 94721 - protein, 13 aa, Homo sapiens
  CDR3 for alpha chain variable domain of TCR clone 47361 (TRAV21, TRAJ15)
CAVDNQAGTALIF

SEQ ID NO: 94722 - protein, 14 aa, Homo sapiens
  CDR3 for beta chain variable domain of TCR clone 47361 (TRBV27, TRBJ2-2)
CASSLGAATGELFF

SEQ ID NO: 94723 - protein, 13 aa, Homo sapiens
  CDR3 for alpha chain variable domain of TCR clone 47362 (TRAV12-1, TRAJ9)
CVVLNTGGFKTIF

SEQ ID NO: 94724 - protein, 13 aa, Homo sapiens
  CDR3 for beta chain variable domain of TCR clone 47362 (TRBV20-1, TRBJ1-1)
CSARGDGNTEAFF

SEQ ID NO: 94725 - protein, 14 aa, Homo sapiens
  CDR3 for alpha chain variable domain of TCR clone 47363 (TRAV1-2, TRAJ8)
CAVREDRGFQKLVF

SEQ ID NO: 94726 - protein, 15 aa, Homo sapiens
  CDR3 for beta chain variable domain of TCR clone 47363 (TRBV6-3, TRBJ2-7)
CASSSPGTVFYEQYF

SEQ ID NO: 94727 - protein, 16 aa, Homo sapiens
  CDR3 for alpha chain variable domain of TCR clone 47364 (TRAV3, TRAJ21)
CAVRAIERGNFNKFYF

SEQ ID NO: 94728 - protein, 13 aa, Homo sapiens
  CDR3 for beta chain variable domain of TCR clone 47364 (TRBV27, TRBJ2-7)
CASSLTTGYEQYF

SEQ ID NO: 94729 - protein, 11 aa, Homo sapiens
  CDR3 for alpha chain variable domain of TCR clone 47365 (TRAV3, TRAJ21)
CAVGNFNKFYF

SEQ ID NO: 94730 - protein, 12 aa, Homo sapiens
  CDR3 for beta chain variable domain of TCR clone 47365 (TRBV12-4, TRBJ2-1)
CASSPGRNEQFF

SEQ ID NO: 94731 - protein, 11 aa, Homo sapiens
  CDR3 for alpha chain variable domain of TCR clone 47366 (TRAV35, TRAJ57)
GPQGGSGKLVF

SEQ ID NO: 94732 - protein, 16 aa, Homo sapiens
  CDR3 for beta chain variable domain of TCR clone 47366 (TRBV7-2, TRBJ1-5)
CASSWTGGPGNQPQHF

SEQ ID NO: 94733 - protein, 12 aa, Homo sapiens
  CDR3 for alpha chain variable domain of TCR clone 47367 (TRAV21, TRAJ33)
CAKMDSNYQLIW

SEQ ID NO: 94734 - protein, 15 aa, Homo sapiens
  CDR3 for beta chain variable domain of TCR clone 47367 (TRBV2, TRBJ2-1)
CASSELAGGYNEQFF

SEQ ID NO: 94735 - protein, 16 aa, Homo sapiens
  CDR3 for alpha chain variable domain of TCR clone 47368 (TRAV4, TRAJ6)
CLVGAYASGGSYIPTF

SEQ ID NO: 94736 - protein, 15 aa, Homo sapiens
  CDR3 for beta chain variable domain of TCR clone 47368 (TRBV14, TRBJ2-5)
CASSQGDRDQETQYF

SEQ ID NO: 94737 - protein, 12 aa, Homo sapiens
  CDR3 for alpha chain variable domain of TCR clone 47369 (TRAV3, TRAJ26)
CAVRDYGQNFVF

SEQ ID NO: 94738 - protein, 16 aa, Homo sapiens
  CDR3 for beta chain variable domain of TCR clone 47369 (TRBV12-5, TRBJ2-5)
CASGPRTSGNQETQYF

SEQ ID NO: 94739 - protein, 16 aa, Homo sapiens
  CDR3 for alpha chain variable domain of TCR clone 47370 (TRAV35, TRAJ37)
CWAFLRGSSNTGKLIF

SEQ ID NO: 94740 - protein, 17 aa, Homo sapiens
  CDR3 for beta chain variable domain of TCR clone 47370 (TRBV24-1, TRBJ2-3)
CATSDLPSGEDTDTQYF

SEQ ID NO: 94741 - protein, 14 aa, Homo sapiens
  CDR3 for alpha chain variable domain of TCR clone 47371 (TRAV38-1, TRAJ40)
CALRPTSGTYKYIF

SEQ ID NO: 94742 - protein, 17 aa, Homo sapiens
  CDR3 for beta chain variable domain of TCR clone 47371 (TRBV7-9, TRBJ2-7)
CASSFDGSRGGAYEQYF

SEQ ID NO: 94743 - protein, 14 aa, Homo sapiens
  CDR3 for alpha chain variable domain of TCR clone 47372 (TRAV29/DV5, TRAJ36)
CAARRKTGANNLFF

SEQ ID NO: 94744 - protein, 13 aa, Homo sapiens
  CDR3 for beta chain variable domain of TCR clone 47372 (TRBV7-9, TRBJ2-7)
CASSFAGAYEQYF

SEQ ID NO: 94745 - protein, 17 aa, Homo sapiens
  CDR3 for alpha chain variable domain of TCR clone 47373 (TRAV14/DV4, TRAJ4)
CAMREASGRGGYNKLIF

SEQ ID NO: 94746 - protein, 12 aa, Homo sapiens
  CDR3 for beta chain variable domain of TCR clone 47373 (TRBV12-4, TRBJ1-3)
CASSFSGNTIYF

SEQ ID NO: 94747 - protein, 15 aa, Homo sapiens
  CDR3 for alpha chain variable domain of TCR clone 47374 (TRAV35, TRAJ23)
CAGQRGYNQGGKLIF

SEQ ID NO: 94748 - protein, 17 aa, Homo sapiens
  CDR3 for beta chain variable domain of TCR clone 47374 (TRBV7-8, TRBJ2-6)
CASSAGTGGAGANVLTF

SEQ ID NO: 94749 - protein, 14 aa, Homo sapiens
  CDR3 for alpha chain variable domain of TCR clone 47375 (TRAV12-2, TRAJ45)
CAVNIGGGADGLTF

SEQ ID NO: 94750 - protein, 12 aa, Homo sapiens
  CDR3 for beta chain variable domain of TCR clone 47375 (TRBV11-2, TRBJ2-1)
CASSPGNNEQFF

SEQ ID NO: 94751 - protein, 12 aa, Homo sapiens
  CDR3 for alpha chain variable domain of TCR clone 47376 (TRAV9-2, TRAJ26)
CALRGHGQNFVF

SEQ ID NO: 94752 - protein, 12 aa, Homo sapiens
  CDR3 for beta chain variable domain of TCR clone 47376 (TRBV29-1, TRBJ2-3)
CSVTGGADTQYF

SEQ ID NO: 94753 - protein, 12 aa, Homo sapiens
  CDR3 for alpha chain variable domain of TCR clone 47377 (TRAV3, TRAJ31)
CAVRDGNARLRF

SEQ ID NO: 94754 - protein, 18 aa, Homo sapiens
  CDR3 for beta chain variable domain of TCR clone 47377 (TRBV7-2, TRBJ2-3)
CASSLKREGSGITDTQYF

SEQ ID NO: 94755 - protein, 14 aa, Homo sapiens
  CDR3 for alpha chain variable domain of TCR clone 47378 (TRAV2, TRAJ37)
CAVDFTSNTGKLIF

SEQ ID NO: 94756 - protein, 15 aa, Homo sapiens
  CDR3 for beta chain variable domain of TCR clone 47378 (TRBV19, TRBJ1-1)
CASTSGQIQNTEAFF

SEQ ID NO: 94757 - protein, 14 aa, Homo sapiens
  CDR3 for alpha chain variable domain of TCR clone 47379 (TRAV26-1, TRAJ39)
CIVFTNNAGNMLTF

SEQ ID NO: 94758 - protein, 15 aa, Homo sapiens
  CDR3 for beta chain variable domain of TCR clone 47379 (TRBV19, TRBJ2-4)
CASSLTGLTKSIQYF

SEQ ID NO: 94759 - protein, 12 aa, Homo sapiens
  CDR3 for alpha chain variable domain of TCR clone 47380 (TRAV21, TRAJ11)
CAATSGYSTLTF

SEQ ID NO: 94760 - protein, 15 aa, Homo sapiens
  CDR3 for beta chain variable domain of TCR clone 47380 (TRBV6-3, TRBJ2-7)
CASSSPGTVFYEQYF

SEQ ID NO: 94761 - protein, 13 aa, Homo sapiens
  CDR3 for alpha chain variable domain of TCR clone 47381 (TRAV12-3, TRAJ7)
CAMTPYGNNRLAF

SEQ ID NO: 94762 - protein, 15 aa, Homo sapiens
  CDR3 for beta chain variable domain of TCR clone 47381 (TRBV6-3, TRBJ2-7)
CASSSPGTVFYEQYF

SEQ ID NO: 94763 - protein, 14 aa, Homo sapiens
  CDR3 for alpha chain variable domain of TCR clone 47382 (TRAV38-1, TRAJ40)
CALRPTSGTYKYIF

SEQ ID NO: 94764 - protein, 16 aa, Homo sapiens
  CDR3 for beta chain variable domain of TCR clone 47382 (TRBV19, TRBJ1-1)
CASSPTRFWPGTEAFF

SEQ ID NO: 94765 - protein, 10 aa, Homo sapiens
  CDR3 for alpha chain variable domain of TCR clone 47383 (TRAV12-3, TRAJ49)
CAMNDDHFYF

SEQ ID NO: 94766 - protein, 13 aa, Homo sapiens
  CDR3 for beta chain variable domain of TCR clone 47383 (TRBV12-4, TRBJ1-1)
CASSPGTGFEAFF

SEQ ID NO: 94767 - protein, 16 aa, Homo sapiens
  CDR3 for alpha chain variable domain of TCR clone 47384 (TRAV1-1, TRAJ45)
CAVRAYSGGGADGLTF

SEQ ID NO: 94768 - protein, 13 aa, Homo sapiens
  CDR3 for beta chain variable domain of TCR clone 47384 (TRBV20-1, TRBJ1-2)
CSARGTADYGDTF

SEQ ID NO: 94769 - protein, 13 aa, Homo sapiens
  CDR3 for alpha chain variable domain of TCR clone 47385 (TRAV17, TRAJ5)
CAPMDTGRRALTF

SEQ ID NO: 94770 - protein, 13 aa, Homo sapiens
  CDR3 for beta chain variable domain of TCR clone 47385 (TRBV11-2, TRBJ2-5)
CASSRGPSETQYF

SEQ ID NO: 94771 - protein, 13 aa, Homo sapiens
  CDR3 for alpha chain variable domain of TCR clone 47386 (TRAV23/DV6, TRAJ27)
CAASKPMQANQPL

SEQ ID NO: 94772 - protein, 13 aa, Homo sapiens
  CDR3 for beta chain variable domain of TCR clone 47386 (TRBV7-9, TRBJ1-2)
CASSLKQNYGYTF

SEQ ID NO: 94773 - protein, 15 aa, Homo sapiens
  CDR3 for alpha chain variable domain of TCR clone 47387 (TRAV2, TRAJ15)
CAVEDRGHAGTALIF

SEQ ID NO: 94774 - protein, 13 aa, Homo sapiens
  CDR3 for beta chain variable domain of TCR clone 47387 (TRBV10-2, TRBJ2-7)
CASGASGGYEQYF

SEQ ID NO: 94775 - protein, 15 aa, Homo sapiens
  CDR3 for alpha chain variable domain of TCR clone 47388 (TRAV13-1, TRAJ32)
CAASIYGGATNKLIF

SEQ ID NO: 94776 - protein, 13 aa, Homo sapiens
  CDR3 for beta chain variable domain of TCR clone 47388 (TRBV4-2, TRBJ1-1)
CASSQAGNTEAFF

SEQ ID NO: 94777 - protein, 12 aa, Homo sapiens
  CDR3 for alpha chain variable domain of TCR clone 47389 (TRAV29/DV5, TRAJ15)
CASNQAGTALIF

SEQ ID NO: 94778 - protein, 15 aa, Homo sapiens
  CDR3 for beta chain variable domain of TCR clone 47389 (TRBV11-2, TRBJ2-2)
CASSSDRVNAGELSF

SEQ ID NO: 94779 - protein, 11 aa, Homo sapiens
  CDR3 for alpha chain variable domain of TCR clone 47390 (TRAV4, TRAJ23)
CLVAPGGKLIF

SEQ ID NO: 94780 - protein, 13 aa, Homo sapiens
  CDR3 for beta chain variable domain of TCR clone 47390 (TRBV7-9, TRBJ1-2)
CASSLKQNYGYAF

SEQ ID NO: 94781 - protein, 18 aa, Homo sapiens
  CDR3 for alpha chain variable domain of TCR clone 47391 (TRAV29/DV5, TRAJ26)
CSVLLCSKRKPEGQNFVF

SEQ ID NO: 94782 - protein, 17 aa, Homo sapiens
  CDR3 for beta chain variable domain of TCR clone 47391 (TRBV20-1, TRBJ2-2)
CSASRSGQGGLTGELFF

SEQ ID NO: 94783 - protein, 11 aa, Homo sapiens
  CDR3 for alpha chain variable domain of TCR clone 47392 (TRAV12-3, TRAJ43)
CAMSVSNDMRF

SEQ ID NO: 94784 - protein, 14 aa, Homo sapiens
  CDR3 for beta chain variable domain of TCR clone 47392 (TRBV7-6, TRBJ2-3)
CASSLGTVTDTQYF

SEQ ID NO: 94785 - protein, 15 aa, Homo sapiens
  CDR3 for alpha chain variable domain of TCR clone 47393 (TRAV21, TRAJ53)
CATLNSGGSNYKLTI

SEQ ID NO: 94786 - protein, 16 aa, Homo sapiens
  CDR3 for beta chain variable domain of TCR clone 47393 (TRBV9, TRBJ2-1)
CASSVGGGGNYNEQFF

SEQ ID NO: 94787 - protein, 11 aa, Homo sapiens
  CDR3 for alpha chain variable domain of TCR clone 47394 (TRAV13-1, TRAJ30)
CAASRDDKIIF

SEQ ID NO: 94788 - protein, 15 aa, Homo sapiens
  CDR3 for beta chain variable domain of TCR clone 47394 (TRBV18, TRBJ1-1)
CTSSPSSWVNTEAFF

SEQ ID NO: 94789 - protein, 13 aa, Homo sapiens
  CDR3 for alpha chain variable domain of TCR clone 47395 (TRAV2, TRAJ39)
CAVLNNAGNMLTF

SEQ ID NO: 94790 - protein, 14 aa, Homo sapiens
  CDR3 for beta chain variable domain of TCR clone 47395 (TRBV20-1, TRBJ2-3)
CSARGGTSTDTQYF

SEQ ID NO: 94791 - protein, 12 aa, Homo sapiens
  CDR3 for alpha chain variable domain of TCR clone 47396 (TRAV12-1, TRAJ40)
CVAYSGTYKYIF

SEQ ID NO: 94792 - protein, 14 aa, Homo sapiens
  CDR3 for beta chain variable domain of TCR clone 47396 (TRBV7-9, TRBJ2-5)
CASSLDTAQETQYF

SEQ ID NO: 94793 - protein, 12 aa, Homo sapiens
  CDR3 for alpha chain variable domain of TCR clone 47397 (TRAV27, TRAJ9)
CAGESGGFKTIF

SEQ ID NO: 94794 - protein, 13 aa, Homo sapiens
  CDR3 for beta chain variable domain of TCR clone 47397 (TRBV10-3, TRBJ2-7)
CASKLAVNYEQYF

SEQ ID NO: 94795 - protein, 14 aa, Homo sapiens
  CDR3 for alpha chain variable domain of TCR clone 47398 (TRAV1-2, TRAJ16)
CAVNRFSDGQKLLF

SEQ ID NO: 94796 - protein, 14 aa, Homo sapiens
  CDR3 for beta chain variable domain of TCR clone 47398 (TRBV7-2, TRBJ2-3)
CASSQTGSSYTQYF

SEQ ID NO: 94797 - protein, 15 aa, Homo sapiens
  CDR3 for alpha chain variable domain of TCR clone 47399 (TRAV27, TRAJ38)
CAARRNAGNNRKLIW

SEQ ID NO: 94798 - protein, 13 aa, Homo sapiens
  CDR3 for beta chain variable domain of TCR clone 47399 (TRBV27, TRBJ1-1)
CASSLSIGAEAFF

SEQ ID NO: 94799 - protein, 14 aa, Homo sapiens
  CDR3 for alpha chain variable domain of TCR clone 47400 (TRAV8-4, TRAJ23)
CAVSAPGSGGKLIF

SEQ ID NO: 94800 - protein, 17 aa, Homo sapiens
  CDR3 for beta chain variable domain of TCR clone 47400 (TRBV4-3, TRBJ2-3)
CASSHDPLAGAVDTQYF

SEQ ID NO: 94801 - protein, 18 aa, Homo sapiens
  CDR3 for alpha chain variable domain of TCR clone 47401 (TRAV26-1, TRAJ23)
YIVRVGLEVWNQGGKLIF

SEQ ID NO: 94802 - protein, 16 aa, Homo sapiens
  CDR3 for beta chain variable domain of TCR clone 47401 (TRBV12-4, TRBJ2-5)
CASSFFVRGRQETQYF

SEQ ID NO: 94803 - protein, 11 aa, Homo sapiens
  CDR3 for alpha chain variable domain of TCR clone 47402 (TRAV1-2, TRAJ20)
CAVSNDYKLSF

SEQ ID NO: 94804 - protein, 14 aa, Homo sapiens
  CDR3 for beta chain variable domain of TCR clone 47402 (TRBV18, TRBJ2-7)
CASSPRGGAYEQYF

SEQ ID NO: 94805 - protein, 13 aa, Homo sapiens
  CDR3 for alpha chain variable domain of TCR clone 47403 (TRAV21, TRAJ15)
CAVANQAGTALIF

SEQ ID NO: 94806 - protein, 14 aa, Homo sapiens
  CDR3 for beta chain variable domain of TCR clone 47403 (TRBV27, TRBJ2-2)
CASSLGAATEELFF

SEQ ID NO: 94807 - protein, 11 aa, Homo sapiens
  CDR3 for alpha chain variable domain of TCR clone 47404 (TRAV1-1, TRAJ23)
CALRQGGKLIF

SEQ ID NO: 94808 - protein, 13 aa, Homo sapiens
  CDR3 for beta chain variable domain of TCR clone 47404 (TRBV7-3, TRBJ1-1)
CASSQDWGAEAFF

SEQ ID NO: 94809 - protein, 11 aa, Homo sapiens
  CDR3 for alpha chain variable domain of TCR clone 47405 (TRAV35, TRAJ34)
CWARNTDKLIF

SEQ ID NO: 94810 - protein, 13 aa, Homo sapiens
  CDR3 for beta chain variable domain of TCR clone 47405 (TRBV19, TRBJ2-7)
CASSIGRTYEQYF

SEQ ID NO: 94811 - protein, 10 aa, Homo sapiens
  CDR3 for alpha chain variable domain of TCR clone 47406 (TRAV30, TRAJ32)
CGTEKDTVVL

SEQ ID NO: 94812 - protein, 13 aa, Homo sapiens
  CDR3 for beta chain variable domain of TCR clone 47406 (TRBV10-3, TRBJ2-7)
CASKLAVNYEQYF

SEQ ID NO: 94813 - protein, 13 aa, Homo sapiens
  CDR3 for alpha chain variable domain of TCR clone 47407 (TRAV36/DV7, TRAJ54)
CAVLIQGAQKLVF

SEQ ID NO: 94814 - protein, 13 aa, Homo sapiens
  CDR3 for beta chain variable domain of TCR clone 47407 (TRBV29-1, TRBJ2-4)
CSVGEGTKSIQYF

SEQ ID NO: 94815 - protein, 15 aa, Homo sapiens
  CDR3 for alpha chain variable domain of TCR clone 47408 (TRAV2, TRAJ15)
CAVEDREQAGTALIF

SEQ ID NO: 94816 - protein, 13 aa, Homo sapiens
  CDR3 for beta chain variable domain of TCR clone 47408 (TRBV10-2, TRBJ2-3)
CASSESGDHTQHF

SEQ ID NO: 94817 - protein, 17 aa, Homo sapiens
  CDR3 for alpha chain variable domain of TCR clone 47409 (TRAV8-6, TRAJ58)
CAVSPWVGETSSSRLTF

SEQ ID NO: 94818 - protein, 14 aa, Homo sapiens
  CDR3 for beta chain variable domain of TCR clone 47409 (TRBV4-2, TRBJ2-1)
CASGLDRAYNEQFF

SEQ ID NO: 94819 - protein, 16 aa, Homo sapiens
  CDR3 for alpha chain variable domain of TCR clone 47410 (TRAV35, TRAJ28)
CDGQRYSGAGSYQLTF

SEQ ID NO: 94820 - protein, 13 aa, Homo sapiens
  CDR3 for beta chain variable domain of TCR clone 47410 (TRBV19, TRBJ1-2)
CASSQGQVYGYTF

SEQ ID NO: 94821 - protein, 13 aa, Homo sapiens
  CDR3 for alpha chain variable domain of TCR clone 47411 (TRAV2, TRAJ40)
CAVVTSGTYEYIF

SEQ ID NO: 94822 - protein, 14 aa, Homo sapiens
  CDR3 for beta chain variable domain of TCR clone 47411 (TRBV19, TRBJ2-1)
CVSPTFVLSGEQFF

SEQ ID NO: 94823 - protein, 13 aa, Homo sapiens
  CDR3 for alpha chain variable domain of TCR clone 47412 (TRAV17, TRAJ5)
CAPMGTGRRALTF

SEQ ID NO: 94824 - protein, 13 aa, Homo sapiens
  CDR3 for beta chain variable domain of TCR clone 47412 (TRBV7-9, TRBJ1-2)
CASSLKQNYGYTF

SEQ ID NO: 94825 - protein, 12 aa, Homo sapiens
  CDR3 for alpha chain variable domain of TCR clone 47413 (TRAV16, TRAJ26)
RASKDGGQNFVF

SEQ ID NO: 94826 - protein, 13 aa, Homo sapiens
  CDR3 for beta chain variable domain of TCR clone 47413 (TRBV25-1, TRBJ1-1)
CASSDRGRAEAFF

SEQ ID NO: 94827 - protein, 14 aa, Homo sapiens
  CDR3 for alpha chain variable domain of TCR clone 47414 (TRAV13-1, TRAJ35)
CAASKGGFGNVLHC

SEQ ID NO: 94828 - protein, 16 aa, Homo sapiens
  CDR3 for beta chain variable domain of TCR clone 47414 (TRBV2, TRBJ1-4)
CAGNLLQGATNEKLFF

SEQ ID NO: 94829 - protein, 12 aa, Homo sapiens
  CDR3 for alpha chain variable domain of TCR clone 47415 (TRAV40, TRAJ20)
CLRGLNDYRLSF

SEQ ID NO: 94830 - protein, 14 aa, Homo sapiens
  CDR3 for beta chain variable domain of TCR clone 47415 (TRBV19, TRBJ2-1)
CASSSGRDYNEQFF

SEQ ID NO: 94831 - protein, 13 aa, Homo sapiens
  CDR3 for alpha chain variable domain of TCR clone 47416 (TRAV13-2, TRAJ13)
FAERPGGYQKVTF

SEQ ID NO: 94832 - protein, 15 aa, Homo sapiens
  CDR3 for beta chain variable domain of TCR clone 47416 (TRBV11-3, TRBJ2-7)
CASSPGPASSYEQYF

SEQ ID NO: 94833 - protein, 11 aa, Homo sapiens
  CDR3 for alpha chain variable domain of TCR clone 47417 (TRAV4, TRAJ31)
CPVGDNARLMF

SEQ ID NO: 94834 - protein, 15 aa, Homo sapiens
  CDR3 for beta chain variable domain of TCR clone 47417 (TRBV10-2, TRBJ2-6)
CASSEQGTGANVLTF

SEQ ID NO: 94835 - protein, 14 aa, Homo sapiens
  CDR3 for alpha chain variable domain of TCR clone 47418 (TRAV1-2, TRAJ16)
CAFNRFSDGQKLLF

SEQ ID NO: 94836 - protein, 14 aa, Homo sapiens
  CDR3 for beta chain variable domain of TCR clone 47418 (TRBV4-1, TRBJ2-2)
CASSQAVNTGELFF

SEQ ID NO: 94837 - protein, 15 aa, Homo sapiens
  CDR3 for alpha chain variable domain of TCR clone 47419 (TRAV21, TRAJ57)
CAVIITQGGSEKLAF

SEQ ID NO: 94838 - protein, 14 aa, Homo sapiens
  CDR3 for beta chain variable domain of TCR clone 47419 (TRBV5-1, TRBJ2-2)
CASSLIWIPGELFF

SEQ ID NO: 94839 - protein, 16 aa, Homo sapiens
  CDR3 for alpha chain variable domain of TCR clone 47420 (TRAV23/DV6, TRAJ9)
CAASIGGNTGGFKTIF

SEQ ID NO: 94840 - protein, 17 aa, Homo sapiens
  CDR3 for beta chain variable domain of TCR clone 47420 (TRBV4-2, TRBJ1-1)
CASTQFGGGSGNTEAFF

SEQ ID NO: 94841 - protein, 14 aa, Homo sapiens
  CDR3 for alpha chain variable domain of TCR clone 47421 (TRAV9-2, TRAJ39)
CALYIYNSGNMLTF

SEQ ID NO: 94842 - protein, 14 aa, Homo sapiens
  CDR3 for beta chain variable domain of TCR clone 47421 (TRBV6-1, TRBJ1-3)
CASVQGGGGNTIYF

SEQ ID NO: 94843 - protein, 14 aa, Homo sapiens
  CDR3 for alpha chain variable domain of TCR clone 47422 (TRAV8-4, TRAJ13)
CAVTLSGGYQKVTF

SEQ ID NO: 94844 - protein, 12 aa, Homo sapiens
  CDR3 for beta chain variable domain of TCR clone 47422 (TRBV2, TRBJ1-5)
VLTGLSNQPQHF

SEQ ID NO: 94845 - protein, 11 aa, Homo sapiens
  CDR3 for alpha chain variable domain of TCR clone 47423 (TRAV8-4, TRAJ30)
YAFYRDDKIIF

SEQ ID NO: 94846 - protein, 16 aa, Homo sapiens
  CDR3 for beta chain variable domain of TCR clone 47423 (TRBV20-1, TRBJ1-5)
CSAELPGQQTNQPQHF

SEQ ID NO: 94847 - protein, 12 aa, Homo sapiens
  CDR3 for alpha chain variable domain of TCR clone 47424 (TRAV4, TRAJ26)
CLVGDYGQNFVF

SEQ ID NO: 94848 - protein, 16 aa, Homo sapiens
  CDR3 for beta chain variable domain of TCR clone 47424 (TRBV7-2, TRBJ1-2)
CASSSNQDRRGHGHTF

SEQ ID NO: 94849 - protein, 13 aa, Homo sapiens
  CDR3 for alpha chain variable domain of TCR clone 47425 (TRAV12-2, TRAJ42)
CAVKRGSQGNLIF

SEQ ID NO: 94850 - protein, 12 aa, Homo sapiens
  CDR3 for beta chain variable domain of TCR clone 47425 (TRBV5-7, TRBJ1-2)
CASSLVQNGYAF

SEQ ID NO: 94851 - protein, 17 aa, Homo sapiens
  CDR3 for alpha chain variable domain of TCR clone 47426 (TRAV13-1, TRAJ52)
CAASSGAGGTSYGKLTF

SEQ ID NO: 94852 - protein, 15 aa, Homo sapiens
  CDR3 for beta chain variable domain of TCR clone 47426 (TRBV2, TRBJ2-1)
CASSDLAGSYNEQFF

SEQ ID NO: 94853 - protein, 15 aa, Homo sapiens
  CDR3 for alpha chain variable domain of TCR clone 47427 (TRAV8-3, TRAJ11)
CAVGLLNSGYSTLTF

SEQ ID NO: 94854 - protein, 15 aa, Homo sapiens
  CDR3 for beta chain variable domain of TCR clone 47427 (TRBV10-3, TRBJ2-3)
CAISLTSGGTDTQYF

SEQ ID NO: 94855 - protein, 13 aa, Homo sapiens
  CDR3 for alpha chain variable domain of TCR clone 47428 (TRAV8-3, TRAJ43)
WAVVPYNNNDMRF

SEQ ID NO: 94856 - protein, 16 aa, Homo sapiens
  CDR3 for beta chain variable domain of TCR clone 47428 (TRBV7-2, TRBJ2-5)
CASSPFPTGGEETQYF

SEQ ID NO: 94857 - protein, 14 aa, Homo sapiens
  CDR3 for alpha chain variable domain of TCR clone 47429 (TRAV26-1, TRAJ38)
CIANNAGNNRKLIW

SEQ ID NO: 94858 - protein, 15 aa, Homo sapiens
  CDR3 for beta chain variable domain of TCR clone 47429 (TRBV7-6, TRBJ1-4)
CASSLGAGAGEKLFF

SEQ ID NO: 94859 - protein, 17 aa, Homo sapiens
  CDR3 for alpha chain variable domain of TCR clone 47430 (TRAV3, TRAJ12)
CAVRDGRRMDSSYKLIF

SEQ ID NO: 94860 - protein, 14 aa, Homo sapiens
  CDR3 for beta chain variable domain of TCR clone 47430 (TRBV7-9, TRBJ1-2)
CASSRQGANYGYTF

SEQ ID NO: 94861 - protein, 14 aa, Homo sapiens
  CDR3 for alpha chain variable domain of TCR clone 47431 (TRAV23/DV6, TRAJ11)
CAASLESGYSTLTF

SEQ ID NO: 94862 - protein, 13 aa, Homo sapiens
  CDR3 for beta chain variable domain of TCR clone 47431 (TRBV4-1, TRBJ2-5)
CASSLTRGETQYS

SEQ ID NO: 94863 - protein, 11 aa, Homo sapiens
  CDR3 for alpha chain variable domain of TCR clone 47432 (TRAV2, TRAJ33)
CAVYSNYQLIW

SEQ ID NO: 94864 - protein, 14 aa, Homo sapiens
  CDR3 for beta chain variable domain of TCR clone 47432 (TRBV11-2, TRBJ2-3)
CASSRLARTDTQYF

SEQ ID NO: 94865 - protein, 22 aa, Homo sapiens
  CDR3 for alpha chain variable domain of TCR clone 47433 (TRAV13-1, TRAJ35)
CAASKGGFGNVLHCGSGPQVIF

SEQ ID NO: 94866 - protein, 13 aa, Homo sapiens
  CDR3 for beta chain variable domain of TCR clone 47433 (TRBV7-3, TRBJ1-1)
CASSQDWGAEAFF

SEQ ID NO: 94867 - protein, 15 aa, Homo sapiens
  CDR3 for alpha chain variable domain of TCR clone 47434 (TRAV20, TRAJ53)
CAVQARGGSNYKLTF

SEQ ID NO: 94868 - protein, 12 aa, Homo sapiens
  CDR3 for beta chain variable domain of TCR clone 47434 (TRBV7-6, TRBJ2-5)
CASSLSQETQYF

SEQ ID NO: 94869 - protein, 16 aa, Homo sapiens
  CDR3 for alpha chain variable domain of TCR clone 47435 (TRAV3, TRAJ37)
RAVRPHGSGNTGKLIF

SEQ ID NO: 94870 - protein, 17 aa, Homo sapiens
  CDR3 for beta chain variable domain of TCR clone 47435 (TRBV5-1, TRBJ2-5)
CASSPVALGQNQETQYF

SEQ ID NO: 94871 - protein, 11 aa, Homo sapiens
  CDR3 for alpha chain variable domain of TCR clone 47436 (TRAV2, TRAJ33)
CAVESNYQLIW

SEQ ID NO: 94872 - protein, 15 aa, Homo sapiens
  CDR3 for beta chain variable domain of TCR clone 47436 (TRBV4-1, TRBJ2-3)
CASSRGQGIPDTQYF

SEQ ID NO: 94873 - protein, 13 aa, Homo sapiens
  CDR3 for alpha chain variable domain of TCR clone 47437 (TRAV3, TRAJ41)
CAVSSNSGYALNF

SEQ ID NO: 94874 - protein, 13 aa, Homo sapiens
  CDR3 for beta chain variable domain of TCR clone 47437 (TRBV20-1, TRBJ2-2)
CSALSGGAGELLF

SEQ ID NO: 94875 - protein, 13 aa, Homo sapiens
  CDR3 for alpha chain variable domain of TCR clone 47438 (TRAV13-1, TRAJ11)
CAAVLAGYSTLTF

SEQ ID NO: 94876 - protein, 17 aa, Homo sapiens
  CDR3 for beta chain variable domain of TCR clone 47438 (TRBV25-1, TRBJ2-7)
CASSDARVVCSSYEQYF

SEQ ID NO: 94877 - protein, 13 aa, Homo sapiens
  CDR3 for alpha chain variable domain of TCR clone 47439 (TRAV21, TRAJ57)
CAVTQGGSEKLVF

SEQ ID NO: 94878 - protein, 15 aa, Homo sapiens
  CDR3 for beta chain variable domain of TCR clone 47439 (TRBV18, TRBJ2-1)
CASSPPSASYNEQFF

SEQ ID NO: 94879 - protein, 12 aa, Homo sapiens
  CDR3 for alpha chain variable domain of TCR clone 47440 (TRAV36/DV7, TRAJ54)
CAVVRGAQKLVF

SEQ ID NO: 94880 - protein, 16 aa, Homo sapiens
  CDR3 for beta chain variable domain of TCR clone 47440 (TRBV7-3, TRBJ2-2)
CASSLKRGTLSGELFF

SEQ ID NO: 94881 - protein, 13 aa, Homo sapiens
  CDR3 for alpha chain variable domain of TCR clone 47441 (TRAV2, TRAJ40)
CAVVTSGTYKYIF

SEQ ID NO: 94882 - protein, 12 aa, Homo sapiens
  CDR3 for beta chain variable domain of TCR clone 47441 (TRBV3-1, TRBJ2-1)
CASSQGSSGQFF

SEQ ID NO: 94883 - protein, 13 aa, Homo sapiens
  CDR3 for alpha chain variable domain of TCR clone 47442 (TRAV2, TRAJ47)
CAVDREYGNKLVF

SEQ ID NO: 94884 - protein, 17 aa, Homo sapiens
  CDR3 for beta chain variable domain of TCR clone 47442 (TRBV15, TRBJ1-5)
CATSRVKGIYSNQPQHS

SEQ ID NO: 94885 - protein, 14 aa, Homo sapiens
  CDR3 for alpha chain variable domain of TCR clone 47443 (TRAV36/DV7, TRAJ45)
CPLYSGGGADGLTF

SEQ ID NO: 94886 - protein, 16 aa, Homo sapiens
  CDR3 for beta chain variable domain of TCR clone 47443 (TRBV5-1, TRBJ2-2)
CASSLWDTTNTGELFF

SEQ ID NO: 94887 - protein, 16 aa, Homo sapiens
  CDR3 for alpha chain variable domain of TCR clone 47444 (TRAV12-2, TRAJ45)
CAVNRGSGGGADGLTF

SEQ ID NO: 94888 - protein, 16 aa, Homo sapiens
  CDR3 for beta chain variable domain of TCR clone 47444 (TRBV12-4, TRBJ2-7)
CASSLIGGTGTYEQYF

SEQ ID NO: 94889 - protein, 14 aa, Homo sapiens
  CDR3 for alpha chain variable domain of TCR clone 47445 (TRAV1-2, TRAJ8)
CAVREDTGFQKLVF

SEQ ID NO: 94890 - protein, 12 aa, Homo sapiens
  CDR3 for beta chain variable domain of TCR clone 47445 (TRBV5-1, TRBJ2-7)
CASSFRGYEQYF

SEQ ID NO: 94891 - protein, 12 aa, Homo sapiens
  CDR3 for alpha chain variable domain of TCR clone 47446 (TRAV12-3, TRAJ17)
CAIMLTGNKLTF

SEQ ID NO: 94892 - protein, 15 aa, Homo sapiens
  CDR3 for beta chain variable domain of TCR clone 47446 (TRBV20-1, TRBJ2-7)
CSARDRVSGMDEQYF

SEQ ID NO: 94893 - protein, 12 aa, Homo sapiens
  CDR3 for alpha chain variable domain of TCR clone 47447 (TRAV8-2, TRAJ49)
CVVSDTGNQFYF

SEQ ID NO: 94894 - protein, 14 aa, Homo sapiens
  CDR3 for beta chain variable domain of TCR clone 47447 (TRBV28, TRBJ1-2)
CASSDPDRVYGYTF

SEQ ID NO: 94895 - protein, 14 aa, Homo sapiens
  CDR3 for alpha chain variable domain of TCR clone 47448 (TRAV13-1, TRAJ44)
CAAKATGTASKLTF

SEQ ID NO: 94896 - protein, 13 aa, Homo sapiens
  CDR3 for beta chain variable domain of TCR clone 47448 (TRBV5-5, TRBJ1-2)
CAGSFWRGEDYTF

SEQ ID NO: 94897 - protein, 13 aa, Homo sapiens
  CDR3 for alpha chain variable domain of TCR clone 47449 (TRAV27, TRAJ41)
CAGEGNSGYALNF

SEQ ID NO: 94898 - protein, 14 aa, Homo sapiens
  CDR3 for beta chain variable domain of TCR clone 47449 (TRBV7-2, TRBJ1-1)
CASSFLTGTTEAFF

SEQ ID NO: 94899 - protein, 16 aa, Homo sapiens
  CDR3 for alpha chain variable domain of TCR clone 47450 (TRAV8-3, TRAJ8)
CAVPRDGKTGFQKLVF

SEQ ID NO: 94900 - protein, 14 aa, Homo sapiens
  CDR3 for beta chain variable domain of TCR clone 47450 (TRBV28, TRBJ1-1)
CASSESGRGTEAFF

SEQ ID NO: 94901 - protein, 11 aa, Homo sapiens
  CDR3 for alpha chain variable domain of TCR clone 47451 (TRAV2, TRAJ33)
CAVDSDYQLIW

SEQ ID NO: 94902 - protein, 13 aa, Homo sapiens
  CDR3 for beta chain variable domain of TCR clone 47451 (TRBV4-1, TRBJ2-2)
CASSQENTGELFF

SEQ ID NO: 94903 - protein, 11 aa, Homo sapiens
  CDR3 for alpha chain variable domain of TCR clone 47452 (TRAV2, TRAJ13)
CASGGYQKVTF

SEQ ID NO: 94904 - protein, 16 aa, Homo sapiens
  CDR3 for beta chain variable domain of TCR clone 47452 (TRBV6-1, TRBJ2-5)
CASSETLDRGAETQYY

SEQ ID NO: 94905 - protein, 15 aa, Homo sapiens
  CDR3 for alpha chain variable domain of TCR clone 47453 (TRAV26-1, TRAJ48)
CIARWLWFGNEKLTF

SEQ ID NO: 94906 - protein, 12 aa, Homo sapiens
  CDR3 for beta chain variable domain of TCR clone 47453 (TRBV19, TRBJ2-5)
CASSISEETQYF

SEQ ID NO: 94907 - protein, 13 aa, Homo sapiens
  CDR3 for alpha chain variable domain of TCR clone 47454 (TRAV27, TRAJ29)
CAGAHSGNTPLVF

SEQ ID NO: 94908 - protein, 15 aa, Homo sapiens
  CDR3 for beta chain variable domain of TCR clone 47454 (TRBV15, TRBJ1-4)
CATSRDVGSYEKLFF

SEQ ID NO: 94909 - protein, 15 aa, Homo sapiens
  CDR3 for alpha chain variable domain of TCR clone 47455 (TRAV13-1, TRAJ32)
CAAGIYGGATNKLIF

SEQ ID NO: 94910 - protein, 17 aa, Homo sapiens
  CDR3 for beta chain variable domain of TCR clone 47455 (TRBV7-3, TRBJ2-5)
CASSLGSGRSGSETQYF

SEQ ID NO: 94911 - protein, 14 aa, Homo sapiens
  CDR3 for alpha chain variable domain of TCR clone 47456 (TRAV17, TRAJ45)
CATASGGGADGLTF

SEQ ID NO: 94912 - protein, 11 aa, Homo sapiens
  CDR3 for beta chain variable domain of TCR clone 47456 (TRBV11-2, TRBJ1-1)
CASSINTEAFF

SEQ ID NO: 94913 - protein, 20 aa, Homo sapiens
  CDR3 for alpha chain variable domain of TCR clone 47457 (TRAV27, TRAJ3)
QPSLVIQASLRGSSASKIIF

SEQ ID NO: 94914 - protein, 15 aa, Homo sapiens
  CDR3 for beta chain variable domain of TCR clone 47457 (TRBV28, TRBJ1-3)
CASSMGWASGNTIYF

SEQ ID NO: 94915 - protein, 13 aa, Homo sapiens
  CDR3 for alpha chain variable domain of TCR clone 47458 (TRAV12-2, TRAJ6)
CAVNVSRKLHTYI

SEQ ID NO: 94916 - protein, 12 aa, Homo sapiens
  CDR3 for beta chain variable domain of TCR clone 47458 (TRBV29-1, TRBJ2-3)
CNVTGGADTQYF

SEQ ID NO: 94917 - protein, 13 aa, Homo sapiens
  CDR3 for alpha chain variable domain of TCR clone 47459 (TRAV12-3, TRAJ30)
CAMSAKWDDKIIF

SEQ ID NO: 94918 - protein, 13 aa, Homo sapiens
  CDR3 for beta chain variable domain of TCR clone 47459 (TRBV20-1, TRBJ1-1)
CSPRGGGNTEAFF

SEQ ID NO: 94919 - protein, 12 aa, Homo sapiens
  CDR3 for alpha chain variable domain of TCR clone 47460 (TRAV13-2, TRAJ23)
CAERHRGGQLIF

SEQ ID NO: 94920 - protein, 16 aa, Homo sapiens
  CDR3 for beta chain variable domain of TCR clone 47460 (TRBV20-1, TRBJ1-4)
CSAPGQGLLTNEKLFF

SEQ ID NO: 94921 - protein, 14 aa, Homo sapiens
  CDR3 for alpha chain variable domain of TCR clone 47461 (TRAV1-2, TRAJ16)
CAVNRFSDGQKLLF

SEQ ID NO: 94922 - protein, 12 aa, Homo sapiens
  CDR3 for beta chain variable domain of TCR clone 47461 (TRBV7-2, TRBJ2-5)
CASSQYQETRYF

SEQ ID NO: 94923 - protein, 20 aa, Homo sapiens
  CDR3 for alpha chain variable domain of TCR clone 47462 (TRAV12-3, TRAJ41)
SLFIRDSQPSDSATPEALNS

SEQ ID NO: 94924 - protein, 13 aa, Homo sapiens
  CDR3 for beta chain variable domain of TCR clone 47462 (TRBV10-3, TRBJ2-3)
CAIRDTGADTQYF

SEQ ID NO: 94925 - protein, 15 aa, Homo sapiens
  CDR3 for alpha chain variable domain of TCR clone 47463 (TRAV29/DV5, TRAJ29)
CAASERRSGNTPLVF

SEQ ID NO: 94926 - protein, 17 aa, Homo sapiens
  CDR3 for beta chain variable domain of TCR clone 47463 (TRBV4-1, TRBJ1-4)
CASSQEGPRGVEEKLFF

SEQ ID NO: 94927 - protein, 10 aa, Homo sapiens
  CDR3 for alpha chain variable domain of TCR clone 47464 (TRAV1-1, TRAJ26)
CAVNGQNFVF

SEQ ID NO: 94928 - protein, 15 aa, Homo sapiens
  CDR3 for beta chain variable domain of TCR clone 47464 (TRBV9, TRBJ1-6)
RASSVAGTGDSPLHF

SEQ ID NO: 94929 - protein, 14 aa, Homo sapiens
  CDR3 for alpha chain variable domain of TCR clone 47465 (TRAV38-1, TRAJ40)
CALGPTSGTYKYIF

SEQ ID NO: 94930 - protein, 14 aa, Homo sapiens
  CDR3 for beta chain variable domain of TCR clone 47465 (TRBV25-1, TRBJ1-1)
CASTHLGGNTEAFF

SEQ ID NO: 94931 - protein, 15 aa, Homo sapiens
  CDR3 for alpha chain variable domain of TCR clone 47466 (TRAV21, TRAJ24)
CAARSSTDSWGRLQF

SEQ ID NO: 94932 - protein, 14 aa, Homo sapiens
  CDR3 for beta chain variable domain of TCR clone 47466 (TRBV11-2, TRBJ2-5)
CASSRTGGIETQYF

SEQ ID NO: 94933 - protein, 13 aa, Homo sapiens
  CDR3 for alpha chain variable domain of TCR clone 47467 (TRAV23/DV6, TRAJ45)
CAARRGGADGLPF

SEQ ID NO: 94934 - protein, 14 aa, Homo sapiens
  CDR3 for beta chain variable domain of TCR clone 47467 (TRBV7-2, TRBJ2-3)
CASSLARGTDTQYF

SEQ ID NO: 94935 - protein, 12 aa, Homo sapiens
  CDR3 for alpha chain variable domain of TCR clone 47468 (TRAV13-1, TRAJ21)
CAAKEGFNKFYF

SEQ ID NO: 94936 - protein, 20 aa, Homo sapiens
  CDR3 for beta chain variable domain of TCR clone 47468 (TRBV28, TRBJ2-1)
CASTPIGRSPGLAGGNEQLF

SEQ ID NO: 94937 - protein, 16 aa, Homo sapiens
  CDR3 for alpha chain variable domain of TCR clone 47469 (TRAV3, TRAJ37)
CAVRFRGSGNTGKLIF

SEQ ID NO: 94938 - protein, 13 aa, Homo sapiens
  CDR3 for beta chain variable domain of TCR clone 47469 (TRBV14, TRBJ2-1)
CASSQDRRNEQFF

SEQ ID NO: 94939 - protein, 15 aa, Homo sapiens
  CDR3 for alpha chain variable domain of TCR clone 47470 (TRAV8-3, TRAJ45)
CASSYSGGGADVLTF

SEQ ID NO: 94940 - protein, 13 aa, Homo sapiens
  CDR3 for beta chain variable domain of TCR clone 47470 (TRBV10-3, TRBJ2-7)
CASKLAVSYEQYF

SEQ ID NO: 94941 - protein, 15 aa, Homo sapiens
  CDR3 for alpha chain variable domain of TCR clone 47471 (TRAV13-1, TRAJ45)
CAAPYSGGGADGLTF

SEQ ID NO: 94942 - protein, 17 aa, Homo sapiens
  CDR3 for beta chain variable domain of TCR clone 47471 (TRBV7-3, TRBJ2-3)
CASSLMKRMRGADTQYF

SEQ ID NO: 94943 - protein, 11 aa, Homo sapiens
  CDR3 for alpha chain variable domain of TCR clone 47472 (TRAV2, TRAJ13)
CASVGYQKVTF

SEQ ID NO: 94944 - protein, 15 aa, Homo sapiens
  CDR3 for beta chain variable domain of TCR clone 47472 (TRBV29-1, TRBJ2-1)
CSGRDRKSSYNEQFF

SEQ ID NO: 94945 - protein, 14 aa, Homo sapiens
  CDR3 for alpha chain variable domain of TCR clone 47473 (TRAV26-2, TRAJ38)
CILYNAGNNRKLIL

SEQ ID NO: 94946 - protein, 14 aa, Homo sapiens
  CDR3 for beta chain variable domain of TCR clone 47473 (TRBV19, TRBJ2-1)
CASPTFVLSGEQFF

SEQ ID NO: 94947 - protein, 12 aa, Homo sapiens
  CDR3 for alpha chain variable domain of TCR clone 47474 (TRAV4, TRAJ26)
CPVGDYGQNFVF

SEQ ID NO: 94948 - protein, 16 aa, Homo sapiens
  CDR3 for beta chain variable domain of TCR clone 47474 (TRBV7-2, TRBJ1-2)
CASSSNQDRRGHGYTF

SEQ ID NO: 94949 - protein, 14 aa, Homo sapiens
  CDR3 for alpha chain variable domain of TCR clone 47475 (TRAV30, TRAJ26)
CGTEIVSYGQNFVF

SEQ ID NO: 94950 - protein, 14 aa, Homo sapiens
  CDR3 for beta chain variable domain of TCR clone 47475 (TRBV12-5, TRBJ2-5)
CASGSRTHQETQYF

SEQ ID NO: 94951 - protein, 12 aa, Homo sapiens
  CDR3 for alpha chain variable domain of TCR clone 47476 (TRAV27, TRAJ13)
CAGVRGYQKVTF

SEQ ID NO: 94952 - protein, 16 aa, Homo sapiens
  CDR3 for beta chain variable domain of TCR clone 47476 (TRBV28, TRBJ2-1)
CASSSSYSGSLNEQLF

SEQ ID NO: 94953 - protein, 12 aa, Homo sapiens
  CDR3 for alpha chain variable domain of TCR clone 47477 (TRAV1-1, TRAJ8)
CAGGTGFQKLVF

SEQ ID NO: 94954 - protein, 20 aa, Homo sapiens
  CDR3 for beta chain variable domain of TCR clone 47477 (TRBV7-8, TRBJ2-2)
CASSHLFPGPTIHITGELFF

SEQ ID NO: 94955 - protein, 15 aa, Homo sapiens
  CDR3 for alpha chain variable domain of TCR clone 47478 (TRAV8-3, TRAJ41)
CAVGSNSNSGYALNS

SEQ ID NO: 94956 - protein, 17 aa, Homo sapiens
  CDR3 for beta chain variable domain of TCR clone 47478 (TRBV25-1, TRBJ2-1)
CASSAYGQGRGVYEQFF

SEQ ID NO: 94957 - protein, 13 aa, Homo sapiens
  CDR3 for alpha chain variable domain of TCR clone 47479 (TRAV12-1, TRAJ26)
CVVRRNYGQNFVF

SEQ ID NO: 94958 - protein, 14 aa, Homo sapiens
  CDR3 for beta chain variable domain of TCR clone 47479 (TRBV7-2, TRBJ2-7)
CASSPKTSFYEQYF

SEQ ID NO: 94959 - protein, 13 aa, Homo sapiens
  CDR3 for alpha chain variable domain of TCR clone 47480 (TRAV12-2, TRAJ40)
CREDPSGTYKYIF

SEQ ID NO: 94960 - protein, 16 aa, Homo sapiens
  CDR3 for beta chain variable domain of TCR clone 47480 (TRBV28, TRBJ2-5)
CASSFSPAGGWETQYF

SEQ ID NO: 94961 - protein, 14 aa, Homo sapiens
  CDR3 for alpha chain variable domain of TCR clone 47481 (TRAV2, TRAJ37)
CAVDFTSNTGKLIF

SEQ ID NO: 94962 - protein, 16 aa, Homo sapiens
  CDR3 for beta chain variable domain of TCR clone 47481 (TRBV7-3, TRBJ2-1)
CASSLEGYRSYNEQFF

SEQ ID NO: 94963 - protein, 15 aa, Homo sapiens
  CDR3 for alpha chain variable domain of TCR clone 47482 (TRAV38-1, TRAJ37)
CAFIFGSGNTGKLIF

SEQ ID NO: 94964 - protein, 13 aa, Homo sapiens
  CDR3 for beta chain variable domain of TCR clone 47482 (TRBV7-3, TRBJ1-1)
CASSQDWGAEAFF

SEQ ID NO: 94965 - protein, 16 aa, Homo sapiens
  CDR3 for alpha chain variable domain of TCR clone 47483 (TRAV3, TRAJ10)
CAVRDMRAGGGNKLTF

SEQ ID NO: 94966 - protein, 15 aa, Homo sapiens
  CDR3 for beta chain variable domain of TCR clone 47483 (TRBV20-1, TRBJ2-7)
CSAESGTSGAYEQYF

SEQ ID NO: 94967 - protein, 15 aa, Homo sapiens
  CDR3 for alpha chain variable domain of TCR clone 47484 (TRAV21, TRAJ53)
CATLNSGGNNYKLTF

SEQ ID NO: 94968 - protein, 16 aa, Homo sapiens
  CDR3 for beta chain variable domain of TCR clone 47484 (TRBV20-1, TRBJ1-2)
CSASMGQGVANYGYTF

SEQ ID NO: 94969 - protein, 15 aa, Homo sapiens
  CDR3 for alpha chain variable domain of TCR clone 47485 (TRAV3, TRAJ12)
CAVGDIRDSSYKLIF

SEQ ID NO: 94970 - protein, 15 aa, Homo sapiens
  CDR3 for beta chain variable domain of TCR clone 47485 (TRBV27, TRBJ2-7)
CASSLRNEQGYEQYF

SEQ ID NO: 94971 - protein, 14 aa, Homo sapiens
  CDR3 for alpha chain variable domain of TCR clone 47486 (TRAV1-2, TRAJ16)
CAINRFSDGQKLLF

SEQ ID NO: 94972 - protein, 18 aa, Homo sapiens
  CDR3 for beta chain variable domain of TCR clone 47486 (TRBV20-1, TRBJ2-6)
CSAETTPTHGSGANVLTF

SEQ ID NO: 94973 - protein, 10 aa, Homo sapiens
  CDR3 for alpha chain variable domain of TCR clone 47487 (TRAV38-2/DV8, TRAJ40)
CASGTYKYIF

SEQ ID NO: 94974 - protein, 14 aa, Homo sapiens
  CDR3 for beta chain variable domain of TCR clone 47487 (TRBV7-9, TRBJ2-1)
CAISPRDSLYEQFF

SEQ ID NO: 94975 - protein, 14 aa, Homo sapiens
  CDR3 for alpha chain variable domain of TCR clone 47488 (TRAV38-1, TRAJ45)
CAYYSGGGADGLTF

SEQ ID NO: 94976 - protein, 15 aa, Homo sapiens
  CDR3 for beta chain variable domain of TCR clone 47488 (TRBV2, TRBJ2-7)
CASSEGLARSYEQYF

SEQ ID NO: 94977 - protein, 15 aa, Homo sapiens
  CDR3 for alpha chain variable domain of TCR clone 47489 (TRAV17, TRAJ16)
CATALRFSDGQKLLF

SEQ ID NO: 94978 - protein, 14 aa, Homo sapiens
  CDR3 for beta chain variable domain of TCR clone 47489 (TRBV27, TRBJ2-2)
CASRPGVNTGELFF

SEQ ID NO: 94979 - protein, 14 aa, Homo sapiens
  CDR3 for alpha chain variable domain of TCR clone 47490 (TRAV12-1, TRAJ38)
CVVNGAGNNRKLIW

SEQ ID NO: 94980 - protein, 14 aa, Homo sapiens
  CDR3 for beta chain variable domain of TCR clone 47490 (TRBV19, TRBJ1-5)
CASSIVQGIQPQHF

SEQ ID NO: 94981 - protein, 12 aa, Homo sapiens
  CDR3 for alpha chain variable domain of TCR clone 47491 (TRAV3, TRAJ43)
CAVRDPNNDMRF

SEQ ID NO: 94982 - protein, 15 aa, Homo sapiens
  CDR3 for beta chain variable domain of TCR clone 47491 (TRBV27, TRBJ1-5)
CASSLGTWFDQPQHF

SEQ ID NO: 94983 - protein, 14 aa, Homo sapiens
  CDR3 for alpha chain variable domain of TCR clone 47492 (TRAV12-2, TRAJ9)
CAVSMEGGGFKTIF

SEQ ID NO: 94984 - protein, 14 aa, Homo sapiens
  CDR3 for beta chain variable domain of TCR clone 47492 (TRBV27, TRBJ2-3)
CASRKGGRTDTQYF

SEQ ID NO: 94985 - protein, 11 aa, Homo sapiens
  CDR3 for alpha chain variable domain of TCR clone 47493 (TRAV27, TRAJ43)
CVRYNNNDMRF

SEQ ID NO: 94986 - protein, 12 aa, Homo sapiens
  CDR3 for beta chain variable domain of TCR clone 47493 (TRBV11-2, TRBJ2-2)
CASSLGGGELFF

SEQ ID NO: 94987 - protein, 12 aa, Homo sapiens
  CDR3 for alpha chain variable domain of TCR clone 47494 (TRAV8-3, TRAJ27)
CAVGAEAGKSTF

SEQ ID NO: 94988 - protein, 14 aa, Homo sapiens
  CDR3 for beta chain variable domain of TCR clone 47494 (TRBV2, TRBJ2-1)
RASRLIVGHDEQFF

SEQ ID NO: 94989 - protein, 16 aa, Homo sapiens
  CDR3 for alpha chain variable domain of TCR clone 47495 (TRAV30, TRAJ24)
CGTEIVDADSWGRFQF

SEQ ID NO: 94990 - protein, 18 aa, Homo sapiens
  CDR3 for beta chain variable domain of TCR clone 47495 (TRBV7-9, TRBJ2-7)
CASSLTTSGSRTWYEQYF

SEQ ID NO: 94991 - protein, 16 aa, Homo sapiens
  CDR3 for alpha chain variable domain of TCR clone 47496 (TRAV12-3, TRAJ53)
CAMSPGSGGGNYKLTF

SEQ ID NO: 94992 - protein, 16 aa, Homo sapiens
  CDR3 for beta chain variable domain of TCR clone 47496 (TRBV7-9, TRBJ1-2)
CASSLGFSSGEDGYTF

SEQ ID NO: 94993 - protein, 11 aa, Homo sapiens
  CDR3 for alpha chain variable domain of TCR clone 47497 (TRAV21, TRAJ34)
CAHYNTDKRIF

SEQ ID NO: 94994 - protein, 13 aa, Homo sapiens
  CDR3 for beta chain variable domain of TCR clone 47497 (TRBV7-6, TRBJ1-2)
CASSLVADYGYTF

SEQ ID NO: 94995 - protein, 15 aa, Homo sapiens
  CDR3 for alpha chain variable domain of TCR clone 47498 (TRAV26-1, TRAJ29)
CIVRVEGSGNTPLVF

SEQ ID NO: 94996 - protein, 15 aa, Homo sapiens
  CDR3 for beta chain variable domain of TCR clone 47498 (TRBV7-9, TRBJ1-5)
CASSQGHQPNQPQDF

SEQ ID NO: 94997 - protein, 15 aa, Homo sapiens
  CDR3 for alpha chain variable domain of TCR clone 47499 (TRAV8-3, TRAJ45)
CASSYLGGGADGLTF

SEQ ID NO: 94998 - protein, 16 aa, Homo sapiens
  CDR3 for beta chain variable domain of TCR clone 47499 (TRBV7-9, TRBJ2-2)
CASSGFGGANTGELFF

SEQ ID NO: 94999 - protein, 14 aa, Homo sapiens
  CDR3 for alpha chain variable domain of TCR clone 47500 (TRAV1-1, TRAJ27)
CAVIYNTNAGKSTF

SEQ ID NO: 95000 - protein, 15 aa, Homo sapiens
  CDR3 for beta chain variable domain of TCR clone 47500 (TRBV7-2, TRBJ2-1)
CASSSGLAGGDEQFF

SEQ ID NO: 95001 - protein, 13 aa, Homo sapiens
  CDR3 for alpha chain variable domain of TCR clone 47501 (TRAV23/DV6, TRAJ22)
RAPYSGSARQLTF

SEQ ID NO: 95002 - protein, 15 aa, Homo sapiens
  CDR3 for beta chain variable domain of TCR clone 47501 (TRBV11-2, TRBJ1-6)
CASSLDPWAVSPLHF

SEQ ID NO: 95003 - protein, 16 aa, Homo sapiens
  CDR3 for alpha chain variable domain of TCR clone 47502 (TRAV13-2, TRAJ53)
CAENANSGGSNYKLKF

SEQ ID NO: 95004 - protein, 19 aa, Homo sapiens
  CDR3 for beta chain variable domain of TCR clone 47502 (TRBV28, TRBJ2-7)
CASSYSGTSRLGWVYEQYF

SEQ ID NO: 95005 - protein, 16 aa, Homo sapiens
  CDR3 for alpha chain variable domain of TCR clone 47503 (TRAV3, TRAJ10)
CAVRDMRAGGGNKLTF

SEQ ID NO: 95006 - protein, 15 aa, Homo sapiens
  CDR3 for beta chain variable domain of TCR clone 47503 (TRBV11-2, TRBJ1-6)
CASTGFGTAVSHLHF

SEQ ID NO: 95007 - protein, 13 aa, Homo sapiens
  CDR3 for alpha chain variable domain of TCR clone 47504 (TRAV21, TRAJ57)
CAVTQGGSEKLVF

SEQ ID NO: 95008 - protein, 15 aa, Homo sapiens
  CDR3 for beta chain variable domain of TCR clone 47504 (TRBV7-2, TRBJ2-1)
CASSSGLAGGNEQFF

SEQ ID NO: 95009 - protein, 14 aa, Homo sapiens
  CDR3 for alpha chain variable domain of TCR clone 47505 (TRAV12-2, TRAJ45)
CAVNIGGGADGLTF

SEQ ID NO: 95010 - protein, 15 aa, Homo sapiens
  CDR3 for beta chain variable domain of TCR clone 47505 (TRBV20-1, TRBJ2-7)
CSARDRVSGMDEQYF

SEQ ID NO: 95011 - protein, 17 aa, Homo sapiens
  CDR3 for alpha chain variable domain of TCR clone 47506 (TRAV12-2, TRAJ52)
CAVNPYAGGTSYGKLTF

SEQ ID NO: 95012 - protein, 16 aa, Homo sapiens
  CDR3 for beta chain variable domain of TCR clone 47506 (TRBV5-5, TRBJ2-2)
CASSGLREGATGELFF

SEQ ID NO: 95013 - protein, 15 aa, Homo sapiens
  CDR3 for alpha chain variable domain of TCR clone 47507 (TRAV3, TRAJ22)
CAVRDRGGSARQLTF

SEQ ID NO: 95014 - protein, 11 aa, Homo sapiens
  CDR3 for beta chain variable domain of TCR clone 47507 (TRBV12-4, TRBJ2-3)
CASTATDTQYF

SEQ ID NO: 95015 - protein, 14 aa, Homo sapiens
  CDR3 for alpha chain variable domain of TCR clone 47508 (TRAV17, TRAJ31)
CATVLRNNNARLMF

SEQ ID NO: 95016 - protein, 14 aa, Homo sapiens
  CDR3 for beta chain variable domain of TCR clone 47508 (TRBV12-4, TRBJ2-5)
CASSLWQKQETQYL

SEQ ID NO: 95017 - protein, 18 aa, Homo sapiens
  CDR3 for alpha chain variable domain of TCR clone 47509 (TRAV16, TRAJ26)
CALRLWSEFCPWSRNQIV

SEQ ID NO: 95018 - protein, 14 aa, Homo sapiens
  CDR3 for beta chain variable domain of TCR clone 47509 (TRBV7-2, TRBJ2-7)
CASRSQGAAYEQYF

SEQ ID NO: 95019 - protein, 14 aa, Homo sapiens
  CDR3 for alpha chain variable domain of TCR clone 47510 (TRAV12-1, TRAJ12)
CVVTRMDNSYKLIF

SEQ ID NO: 95020 - protein, 13 aa, Homo sapiens
  CDR3 for beta chain variable domain of TCR clone 47510 (TRBV20-1, TRBJ1-1)
CSARGGGNTETFF

SEQ ID NO: 95021 - protein, 16 aa, Homo sapiens
  CDR3 for alpha chain variable domain of TCR clone 47511 (TRAV30, TRAJ24)
CGTEIVDADSWGKFQL

SEQ ID NO: 95022 - protein, 14 aa, Homo sapiens
  CDR3 for beta chain variable domain of TCR clone 47511 (TRBV12-5, TRBJ2-5)
CASGSRTHQETQYL

SEQ ID NO: 95023 - protein, 10 aa, Homo sapiens
  CDR3 for alpha chain variable domain of TCR clone 47512 (TRAV16, TRAJ22)
SAMYLRQLTF

SEQ ID NO: 95024 - protein, 15 aa, Homo sapiens
  CDR3 for beta chain variable domain of TCR clone 47512 (TRBV7-9, TRBJ1-6)
SASSSPGRGNSPLHF

SEQ ID NO: 95025 - protein, 11 aa, Homo sapiens
  CDR3 for alpha chain variable domain of TCR clone 47513 (TRAV2, TRAJ21)
CAVFNCNKFYF

SEQ ID NO: 95026 - protein, 14 aa, Homo sapiens
  CDR3 for beta chain variable domain of TCR clone 47513 (TRBV15, TRBJ2-3)
CATRSGTSTDTQYF

SEQ ID NO: 95027 - protein, 15 aa, Homo sapiens
  CDR3 for alpha chain variable domain of TCR clone 47514 (TRAV26-1, TRAJ40)
CIDRYATSGTYKYIF

SEQ ID NO: 95028 - protein, 11 aa, Homo sapiens
  CDR3 for beta chain variable domain of TCR clone 47514 (TRBV7-9, TRBJ2-1)
CASSAQNEQFF

SEQ ID NO: 95029 - protein, 13 aa, Homo sapiens
  CDR3 for alpha chain variable domain of TCR clone 47515 (TRAV27, TRAJ41)
CAGEGNSGYALNF

SEQ ID NO: 95030 - protein, 14 aa, Homo sapiens
  CDR3 for beta chain variable domain of TCR clone 47515 (TRBV4-1, TRBJ1-4)
CASSQERKNEKLFF

SEQ ID NO: 95031 - protein, 13 aa, Homo sapiens
  CDR3 for alpha chain variable domain of TCR clone 47516 (TRAV8-6, TRAJ49)
CAVITNAGNQFYF

SEQ ID NO: 95032 - protein, 14 aa, Homo sapiens
  CDR3 for beta chain variable domain of TCR clone 47516 (TRBV5-1, TRBJ2-7)
CASSRGESLYEQYF

SEQ ID NO: 95033 - protein, 14 aa, Homo sapiens
  CDR3 for alpha chain variable domain of TCR clone 47517 (TRAV13-2, TRAJ43)
CAEIPTYNNNDMRF

SEQ ID NO: 95034 - protein, 16 aa, Homo sapiens
  CDR3 for beta chain variable domain of TCR clone 47517 (TRBV12-5, TRBJ2-5)
CASGPRTSGNQETQYF

SEQ ID NO: 95035 - protein, 14 aa, Homo sapiens
  CDR3 for alpha chain variable domain of TCR clone 47518 (TRAV13-1, TRAJ35)
CAASKGGFGNVLHC

SEQ ID NO: 95036 - protein, 13 aa, Homo sapiens
  CDR3 for beta chain variable domain of TCR clone 47518 (TRBV7-3, TRBJ1-1)
CASCQDWGAEAFF

SEQ ID NO: 95037 - protein, 16 aa, Homo sapiens
  CDR3 for alpha chain variable domain of TCR clone 47519 (TRAV16, TRAJ4)
CALSRMFSGGYNKLIF

SEQ ID NO: 95038 - protein, 16 aa, Homo sapiens
  CDR3 for beta chain variable domain of TCR clone 47519 (TRBV24-1, TRBJ2-3)
CATSDPRTGATDTQYF

SEQ ID NO: 95039 - protein, 14 aa, Homo sapiens
  CDR3 for alpha chain variable domain of TCR clone 47520 (TRAV4, TRAJ26)
CLVGPHNYGQNFVF

SEQ ID NO: 95040 - protein, 13 aa, Homo sapiens
  CDR3 for beta chain variable domain of TCR clone 47520 (TRBV7-9, TRBJ1-2)
CASSLKQNYGYTF

SEQ ID NO: 95041 - protein, 12 aa, Homo sapiens
  CDR3 for alpha chain variable domain of TCR clone 47521 (TRAV2, TRAJ10)
CASTGVGNKLTF

SEQ ID NO: 95042 - protein, 14 aa, Homo sapiens
  CDR3 for beta chain variable domain of TCR clone 47521 (TRBV7-2, TRBJ2-2)
CASRGQGAAGELFF

SEQ ID NO: 95043 - protein, 16 aa, Homo sapiens
  CDR3 for alpha chain variable domain of TCR clone 47522 (TRAV3, TRAJ18)
CAVRDGRGSTLGRLYF

SEQ ID NO: 95044 - protein, 15 aa, Homo sapiens
  CDR3 for beta chain variable domain of TCR clone 47522 (TRBV7-9, TRBJ1-6)
RASSSPGRGNSPLHF

SEQ ID NO: 95045 - protein, 14 aa, Homo sapiens
  CDR3 for alpha chain variable domain of TCR clone 47523 (TRAV12-3, TRAJ42)
CAINYGGSQGNLIF

SEQ ID NO: 95046 - protein, 15 aa, Homo sapiens
  CDR3 for beta chain variable domain of TCR clone 47523 (TRBV5-7, TRBJ1-5)
CASSYGKLWDQPQHF

SEQ ID NO: 95047 - protein, 14 aa, Homo sapiens
  CDR3 for alpha chain variable domain of TCR clone 47524 (TRAV1-2, TRAJ16)
CAVNRFSDGQKLLF

SEQ ID NO: 95048 - protein, 15 aa, Homo sapiens
  CDR3 for beta chain variable domain of TCR clone 47524 (TRBV2, TRBJ1-2)
CASRGVDGTNYGYTF

SEQ ID NO: 95049 - protein, 15 aa, Homo sapiens
  CDR3 for alpha chain variable domain of TCR clone 47525 (TRAV3, TRAJ5)
CAVRDMKTGRRALTF

SEQ ID NO: 95050 - protein, 15 aa, Homo sapiens
  CDR3 for beta chain variable domain of TCR clone 47525 (TRBV7-8, TRBJ2-1)
CASSLADSLYNEQFF

SEQ ID NO: 95051 - protein, 15 aa, Homo sapiens
  CDR3 for alpha chain variable domain of TCR clone 47526 (TRAV2, TRAJ15)
CAVEDRGQAGTALIF

SEQ ID NO: 95052 - protein, 16 aa, Homo sapiens
  CDR3 for beta chain variable domain of TCR clone 47526 (TRBV7-3, TRBJ2-2)
CASSLKRGTLSGELFF

SEQ ID NO: 95053 - protein, 15 aa, Homo sapiens
  CDR3 for alpha chain variable domain of TCR clone 47527 (TRAV21, TRAJ53)
CATLNSGGSNYKLTF

SEQ ID NO: 95054 - protein, 14 aa, Homo sapiens
  CDR3 for beta chain variable domain of TCR clone 47527 (TRBV15, TRBJ2-5)
CATSIGGLGENQYF

SEQ ID NO: 95055 - protein, 15 aa, Homo sapiens
  CDR3 for alpha chain variable domain of TCR clone 47528 (TRAV26-1, TRAJ39)
CIVRPGNNAGNMLTF

SEQ ID NO: 95056 - protein, 15 aa, Homo sapiens
  CDR3 for beta chain variable domain of TCR clone 47528 (TRBV20-1, TRBJ2-7)
CSARDRVSGMDEQYF

SEQ ID NO: 95057 - protein, 13 aa, Homo sapiens
  CDR3 for alpha chain variable domain of TCR clone 47529 (TRAV21, TRAJ20)
CAVGLRVDYKLSF

SEQ ID NO: 95058 - protein, 14 aa, Homo sapiens
  CDR3 for beta chain variable domain of TCR clone 47529 (TRBV10-2, TRBJ1-5)
CASSSTGRNQPQHF

SEQ ID NO: 95059 - protein, 15 aa, Homo sapiens
  CDR3 for alpha chain variable domain of TCR clone 47530 (TRAV8-3, TRAJ11)
CAVGLLNLGYSTLTF

SEQ ID NO: 95060 - protein, 13 aa, Homo sapiens
  CDR3 for beta chain variable domain of TCR clone 47530 (TRBV29-1, TRBJ1-3)
CSVEGGSGNTIYF

SEQ ID NO: 95061 - protein, 13 aa, Homo sapiens
  CDR3 for alpha chain variable domain of TCR clone 47531 (TRAV27, TRAJ45)
CRSSGGGAHGLTF

SEQ ID NO: 95062 - protein, 17 aa, Homo sapiens
  CDR3 for beta chain variable domain of TCR clone 47531 (TRBV11-2, TRBJ2-1)
CASSLYPPGVEYNEQFF

SEQ ID NO: 95063 - protein, 12 aa, Homo sapiens
  CDR3 for alpha chain variable domain of TCR clone 47532 (TRAV21, TRAJ29)
CAVTSGNTPLVF

SEQ ID NO: 95064 - protein, 13 aa, Homo sapiens
  CDR3 for beta chain variable domain of TCR clone 47532 (TRBV4-2, TRBJ1-1)
CASSQAGNTEALF

SEQ ID NO: 95065 - protein, 13 aa, Homo sapiens
  CDR3 for alpha chain variable domain of TCR clone 47533 (TRAV13-2, TRAJ40)
CAEFTSGTYKYVF

SEQ ID NO: 95066 - protein, 14 aa, Homo sapiens
  CDR3 for beta chain variable domain of TCR clone 47533 (TRBV10-2, TRBJ1-5)
CASSSTGRNQPQHF

SEQ ID NO: 95067 - protein, 13 aa, Homo sapiens
  CDR3 for alpha chain variable domain of TCR clone 47534 (TRAV21, TRAJ21)
CAVRTSTNFTLDL

SEQ ID NO: 95068 - protein, 16 aa, Homo sapiens
  CDR3 for beta chain variable domain of TCR clone 47534 (TRBV7-2, TRBJ2-7)
CASSFPLAGGPLEQYF

SEQ ID NO: 95069 - protein, 15 aa, Homo sapiens
  CDR3 for alpha chain variable domain of TCR clone 47535 (TRAV25, TRAJ53)
CAATGGGGSNYKLTF

SEQ ID NO: 95070 - protein, 14 aa, Homo sapiens
  CDR3 for beta chain variable domain of TCR clone 47535 (TRBV7-2, TRBJ1-1)
CASSFLTGTTEAFF

SEQ ID NO: 95071 - protein, 13 aa, Homo sapiens
  CDR3 for alpha chain variable domain of TCR clone 47536 (TRAV17, TRAJ22)
CAHHSGSARQLTF

SEQ ID NO: 95072 - protein, 14 aa, Homo sapiens
  CDR3 for beta chain variable domain of TCR clone 47536 (TRBV16, TRBJ1-1)
CASSQADPNTEAFF

SEQ ID NO: 95073 - protein, 15 aa, Homo sapiens
  CDR3 for alpha chain variable domain of TCR clone 47537 (TRAV26-1, TRAJ29)
CMVRVEGSGNTPLVF

SEQ ID NO: 95074 - protein, 15 aa, Homo sapiens
  CDR3 for beta chain variable domain of TCR clone 47537 (TRBV7-9, TRBJ1-5)
CASSQGHQPNQPQHF

SEQ ID NO: 95075 - protein, 15 aa, Homo sapiens
  CDR3 for alpha chain variable domain of TCR clone 47538 (TRAV26-1, TRAJ44)
CIVRANTGTASKLTF

SEQ ID NO: 95076 - protein, 16 aa, Homo sapiens
  CDR3 for beta chain variable domain of TCR clone 47538 (TRBV7-7, TRBJ2-1)
CASSLAGGTSYNEQFF

SEQ ID NO: 95077 - protein, 17 aa, Homo sapiens
  CDR3 for alpha chain variable domain of TCR clone 47539 (TRAV26-2, TRAJ42)
CILRDESYGGSQGNLIL

SEQ ID NO: 95078 - protein, 15 aa, Homo sapiens
  CDR3 for beta chain variable domain of TCR clone 47539 (TRBV6-6, TRBJ2-7)
CASSYSYGGSYEQYF

SEQ ID NO: 95079 - protein, 12 aa, Homo sapiens
  CDR3 for alpha chain variable domain of TCR clone 47540 (TRAV25, TRAJ11)
CAGYSGYSTLTL

SEQ ID NO: 95080 - protein, 13 aa, Homo sapiens
  CDR3 for beta chain variable domain of TCR clone 47540 (TRBV7-9, TRBJ1-2)
CASSLKQNYGYTF

SEQ ID NO: 95081 - protein, 14 aa, Homo sapiens
  CDR3 for alpha chain variable domain of TCR clone 47541 (TRAV8-1, TRAJ5)
CAVRTETGRRALTF

SEQ ID NO: 95082 - protein, 14 aa, Homo sapiens
  CDR3 for beta chain variable domain of TCR clone 47541 (TRBV5-5, TRBJ1-2)
CASSLDPYNYGYTF

SEQ ID NO: 95083 - protein, 12 aa, Homo sapiens
  CDR3 for alpha chain variable domain of TCR clone 47542 (TRAV22, TRAJ29)
CAPPSGNTPLVL

SEQ ID NO: 95084 - protein, 14 aa, Homo sapiens
  CDR3 for beta chain variable domain of TCR clone 47542 (TRBV11-2, TRBJ2-7)
CASSLGAGAYEQYF

SEQ ID NO: 95085 - protein, 16 aa, Homo sapiens
  CDR3 for alpha chain variable domain of TCR clone 47543 (TRAV12-3, TRAJ53)
CAMSPGSGGSNYKLTF

SEQ ID NO: 95086 - protein, 17 aa, Homo sapiens
  CDR3 for beta chain variable domain of TCR clone 47543 (TRBV7-3, TRBJ2-3)
CASSLMKRMRGADTQYF

SEQ ID NO: 95087 - protein, 10 aa, Homo sapiens
  CDR3 for alpha chain variable domain of TCR clone 47544 (TRAV5, TRAJ34)
CAEDTDKLIF

SEQ ID NO: 95088 - protein, 12 aa, Homo sapiens
  CDR3 for beta chain variable domain of TCR clone 47544 (TRBV11-2, TRBJ2-2)
CASSLGGGELSF

SEQ ID NO: 95089 - protein, 14 aa, Homo sapiens
  CDR3 for alpha chain variable domain of TCR clone 47545 (TRAV2, TRAJ9)
CAVEDRSGGFKTIF

SEQ ID NO: 95090 - protein, 13 aa, Homo sapiens
  CDR3 for beta chain variable domain of TCR clone 47545 (TRBV19, TRBJ1-2)
CASSVPGQDGYTS

SEQ ID NO: 95091 - protein, 15 aa, Homo sapiens
  CDR3 for alpha chain variable domain of TCR clone 47546 (TRAV8-3, TRAJ40)
CAAPSLGSGTYKYIF

SEQ ID NO: 95092 - protein, 16 aa, Homo sapiens
  CDR3 for beta chain variable domain of TCR clone 47546 (TRBV7-3, TRBJ2-3)
CASSLSGYRPEDAQYF

SEQ ID NO: 95093 - protein, 16 aa, Homo sapiens
  CDR3 for alpha chain variable domain of TCR clone 47547 (TRAV30, TRAJ24)
CGTEIVDADSWGKFQF

SEQ ID NO: 95094 - protein, 15 aa, Homo sapiens
  CDR3 for beta chain variable domain of TCR clone 47547 (TRBV20-1, TRBJ2-7)
CSARDRVSGMDEKYF

SEQ ID NO: 95095 - protein, 14 aa, Homo sapiens
  CDR3 for alpha chain variable domain of TCR clone 47548 (TRAV12-3, TRAJ9)
CAMSPNTVGFKTIF

SEQ ID NO: 95096 - protein, 12 aa, Homo sapiens
  CDR3 for beta chain variable domain of TCR clone 47548 (TRBV19, TRBJ1-5)
CASSIAQQPQHF

SEQ ID NO: 95097 - protein, 14 aa, Homo sapiens
  CDR3 for alpha chain variable domain of TCR clone 47549 (TRAV1-2, TRAJ8)
CAVREDTGFQKLVF

SEQ ID NO: 95098 - protein, 16 aa, Homo sapiens
  CDR3 for beta chain variable domain of TCR clone 47549 (TRBV20-1, TRBJ2-4)
CSARAILAGQGDSQYF

SEQ ID NO: 95099 - protein, 17 aa, Homo sapiens
  CDR3 for alpha chain variable domain of TCR clone 47550 (TRAV3, TRAJ42)
RAVRDRDYGGSQGNLIF

SEQ ID NO: 95100 - protein, 18 aa, Homo sapiens
  CDR3 for beta chain variable domain of TCR clone 47550 (TRBV20-1, TRBJ2-3)
CSASGLAGGPGTTDTQYF

SEQ ID NO: 95101 - protein, 12 aa, Homo sapiens
  CDR3 for alpha chain variable domain of TCR clone 47551 (TRAV29/DV5, TRAJ49)
CAATDTGNQFYF

SEQ ID NO: 95102 - protein, 12 aa, Homo sapiens
  CDR3 for beta chain variable domain of TCR clone 47551 (TRBV12-4, TRBJ2-7)
CASSLGGCEQYF

SEQ ID NO: 95103 - protein, 16 aa, Homo sapiens
  CDR3 for alpha chain variable domain of TCR clone 47552 (TRAV13-2, TRAJ34)
CAEPPSPLSNTDKLIF

SEQ ID NO: 95104 - protein, 14 aa, Homo sapiens
  CDR3 for beta chain variable domain of TCR clone 47552 (TRBV18, TRBJ2-7)
CASSPRGGAYEQYF

SEQ ID NO: 95105 - protein, 19 aa, Homo sapiens
  CDR3 for alpha chain variable domain of TCR clone 47553 (TRAV25, TRAJ43)
TATQTTGVGTYFCAVFMRF

SEQ ID NO: 95106 - protein, 13 aa, Homo sapiens
  CDR3 for beta chain variable domain of TCR clone 47553 (TRBV7-9, TRBJ1-2)
CASSLKQNYGYTF

SEQ ID NO: 95107 - protein, 15 aa, Homo sapiens
  CDR3 for alpha chain variable domain of TCR clone 47554 (TRAV1-2, TRAJ26)
CAVRDLITMVRILSL

SEQ ID NO: 95108 - protein, 11 aa, Homo sapiens
  CDR3 for beta chain variable domain of TCR clone 47554 (TRBV29-1, TRBJ2-5)
CSEDRTGTQYF

SEQ ID NO: 95109 - protein, 11 aa, Homo sapiens
  CDR3 for alpha chain variable domain of TCR clone 47555 (TRAV29/DV5, TRAJ33)
CAGVSNYQLIW

SEQ ID NO: 95110 - protein, 14 aa, Homo sapiens
  CDR3 for beta chain variable domain of TCR clone 47555 (TRBV19, TRBJ1-5)
CASRAPDSFLSQHF

SEQ ID NO: 95111 - protein, 13 aa, Homo sapiens
  CDR3 for alpha chain variable domain of TCR clone 47556 (TRAV38-1, TRAJ42)
CARWGGSQGNLIF

SEQ ID NO: 95112 - protein, 17 aa, Homo sapiens
  CDR3 for beta chain variable domain of TCR clone 47556 (TRBV20-1, TRBJ2-1)
CNARDPLAGVWDNEQFF

SEQ ID NO: 95113 - protein, 11 aa, Homo sapiens
  CDR3 for alpha chain variable domain of TCR clone 47557 (TRAV2, TRAJ33)
CAVESNYQLIW

SEQ ID NO: 95114 - protein, 13 aa, Homo sapiens
  CDR3 for beta chain variable domain of TCR clone 47557 (TRBV29-1, TRBJ1-1)
CSVVGQGGTEAFF

SEQ ID NO: 95115 - protein, 14 aa, Homo sapiens
  CDR3 for alpha chain variable domain of TCR clone 47558 (TRAV12-2, TRAJ17)
CAVLFKAAGNKLTC

SEQ ID NO: 95116 - protein, 17 aa, Homo sapiens
  CDR3 for beta chain variable domain of TCR clone 47558 (TRBV20-1, TRBJ2-2)
CSASGSGQGGLTGELFF

SEQ ID NO: 95117 - protein, 15 aa, Homo sapiens
  CDR3 for alpha chain variable domain of TCR clone 47559 (TRAV13-1, TRAJ57)
CAASNTQGGSAKLVF

SEQ ID NO: 95118 - protein, 16 aa, Homo sapiens
  CDR3 for beta chain variable domain of TCR clone 47559 (TRBV19, TRBJ2-1)
CASSKAGPSSYNEQFF

SEQ ID NO: 95119 - protein, 14 aa, Homo sapiens
  CDR3 for alpha chain variable domain of TCR clone 47560 (TRAV35, TRAJ50)
CAGHRKTSYDKVIF

SEQ ID NO: 95120 - protein, 13 aa, Homo sapiens
  CDR3 for beta chain variable domain of TCR clone 47560 (TRBV7-7, TRBJ2-3)
CASSLIRADTQDF

SEQ ID NO: 95121 - protein, 14 aa, Homo sapiens
  CDR3 for alpha chain variable domain of TCR clone 47561 (TRAV12-2, TRAJ13)
CAVKKTGGYQKVTF

SEQ ID NO: 95122 - protein, 12 aa, Homo sapiens
  CDR3 for beta chain variable domain of TCR clone 47561 (TRBV12-4, TRBJ1-2)
CASSFIWLNLRF

SEQ ID NO: 95123 - protein, 14 aa, Homo sapiens
  CDR3 for alpha chain variable domain of TCR clone 47562 (TRAV12-3, TRAJ12)
CAMSRMDSSYKLIF

SEQ ID NO: 95124 - protein, 14 aa, Homo sapiens
  CDR3 for beta chain variable domain of TCR clone 47562 (TRBV20-1, TRBJ1-4)
CSARSGQSNEKLFY

SEQ ID NO: 95125 - protein, 16 aa, Homo sapiens
  CDR3 for alpha chain variable domain of TCR clone 47563 (TRAV1-1, TRAJ28)
CAVRDDSGAGSYQLTF

SEQ ID NO: 95126 - protein, 12 aa, Homo sapiens
  CDR3 for beta chain variable domain of TCR clone 47563 (TRBV11-2, TRBJ2-5)
CASSLDTQTQYL

SEQ ID NO: 95127 - protein, 13 aa, Homo sapiens
  CDR3 for alpha chain variable domain of TCR clone 47564 (TRAV16, TRAJ28)
FALTGAGSYQLTF

SEQ ID NO: 95128 - protein, 16 aa, Homo sapiens
  CDR3 for beta chain variable domain of TCR clone 47564 (TRBV28, TRBJ1-5)
CASSLTGQGWNQPQHF

SEQ ID NO: 95129 - protein, 14 aa, Homo sapiens
  CDR3 for alpha chain variable domain of TCR clone 47565 (TRAV3, TRAJ21)
CAVESQANFNKFYF

SEQ ID NO: 95130 - protein, 18 aa, Homo sapiens
  CDR3 for beta chain variable domain of TCR clone 47565 (TRBV7-9, TRBJ2-1)
CASSLAVSGTSGRNKQFF

SEQ ID NO: 95131 - protein, 14 aa, Homo sapiens
  CDR3 for alpha chain variable domain of TCR clone 47566 (TRAV13-1, TRAJ48)
CAASRSFGNEKLTF

SEQ ID NO: 95132 - protein, 14 aa, Homo sapiens
  CDR3 for beta chain variable domain of TCR clone 47566 (TRBV19, TRBJ2-1)
CASPTFVLSGEQFF

SEQ ID NO: 95133 - protein, 16 aa, Homo sapiens
  CDR3 for alpha chain variable domain of TCR clone 47567 (TRAV30, TRAJ24)
CGTEIVDADSWGKFQF

SEQ ID NO: 95134 - protein, 15 aa, Homo sapiens
  CDR3 for beta chain variable domain of TCR clone 47567 (TRBV7-9, TRBJ1-1)
CASSLLEQGGTEAFF

SEQ ID NO: 95135 - protein, 14 aa, Homo sapiens
  CDR3 for alpha chain variable domain of TCR clone 47568 (TRAV35, TRAJ33)
CAGSSQDSNYQLIW

SEQ ID NO: 95136 - protein, 11 aa, Homo sapiens
  CDR3 for beta chain variable domain of TCR clone 47568 (TRBV11-2, TRBJ2-2)
CASSLPGELFF

SEQ ID NO: 95137 - protein, 14 aa, Homo sapiens
  CDR3 for alpha chain variable domain of TCR clone 47569 (TRAV12-2, TRAJ13)
CAVKKTGGYQKVTF

SEQ ID NO: 95138 - protein, 12 aa, Homo sapiens
  CDR3 for beta chain variable domain of TCR clone 47569 (TRBV12-4, TRBJ2-1)
CASSPGRNEQFF

SEQ ID NO: 95139 - protein, 14 aa, Homo sapiens
  CDR3 for alpha chain variable domain of TCR clone 47570 (TRAV13-1, TRAJ39)
CAASKNNAGNMLTF

SEQ ID NO: 95140 - protein, 15 aa, Homo sapiens
  CDR3 for beta chain variable domain of TCR clone 47570 (TRBV5-1, TRBJ1-1)
CASGLGEGENTEAFF

SEQ ID NO: 95141 - protein, 13 aa, Homo sapiens
  CDR3 for alpha chain variable domain of TCR clone 47571 (TRAV12-2, TRAJ20)
CAVYPSNDYKLSF

SEQ ID NO: 95142 - protein, 15 aa, Homo sapiens
  CDR3 for beta chain variable domain of TCR clone 47571 (TRBV27, TRBJ2-5)
CASSLYPRGGETQCF

SEQ ID NO: 95143 - protein, 14 aa, Homo sapiens
  CDR3 for alpha chain variable domain of TCR clone 47572 (TRAV8-2, TRAJ4)
CVVSPSGGYNQLIF

SEQ ID NO: 95144 - protein, 15 aa, Homo sapiens
  CDR3 for beta chain variable domain of TCR clone 47572 (TRBV4-1, TRBJ1-4)
CASSDTGGTNEKLFF

SEQ ID NO: 95145 - protein, 12 aa, Homo sapiens
  CDR3 for alpha chain variable domain of TCR clone 47573 (TRAV27, TRAJ35)
FAGADFGNVLHC

SEQ ID NO: 95146 - protein, 16 aa, Homo sapiens
  CDR3 for beta chain variable domain of TCR clone 47573 (TRBV6-1, TRBJ2-1)
CASILRQGSSYNEQFF

SEQ ID NO: 95147 - protein, 16 aa, Homo sapiens
  CDR3 for alpha chain variable domain of TCR clone 47574 (TRAV12-3, TRAJ53)
CAMSPASGGSNYKLTF

SEQ ID NO: 95148 - protein, 11 aa, Homo sapiens
  CDR3 for beta chain variable domain of TCR clone 47574 (TRBV29-1, TRBJ2-5)
CSEDRTGTQYF

SEQ ID NO: 95149 - protein, 14 aa, Homo sapiens
  CDR3 for alpha chain variable domain of TCR clone 47575 (TRAV13-1, TRAJ44)
CAAKATGTASKLTF

SEQ ID NO: 95150 - protein, 15 aa, Homo sapiens
  CDR3 for beta chain variable domain of TCR clone 47575 (TRBV5-1, TRBJ2-3)
CASSVTSGSTDTQYF

SEQ ID NO: 95151 - protein, 14 aa, Homo sapiens
  CDR3 for alpha chain variable domain of TCR clone 47576 (TRAV8-4, TRAJ54)
CAVSEVLGAQKLVF

SEQ ID NO: 95152 - protein, 13 aa, Homo sapiens
  CDR3 for beta chain variable domain of TCR clone 47576 (TRBV27, TRBJ2-7)
CASSVVSSYEQYF

SEQ ID NO: 95153 - protein, 14 aa, Homo sapiens
  CDR3 for alpha chain variable domain of TCR clone 47577 (TRAV8-3, TRAJ42)
CAVGAWGSQGNLIF

SEQ ID NO: 95154 - protein, 13 aa, Homo sapiens
  CDR3 for beta chain variable domain of TCR clone 47577 (TRBV19, TRBJ1-2)
CASSVPGQDGYTF

SEQ ID NO: 95155 - protein, 14 aa, Homo sapiens
  CDR3 for alpha chain variable domain of TCR clone 47578 (TRAV1-2, TRAJ16)
CAVNRFSDGQKLLF

SEQ ID NO: 95156 - protein, 11 aa, Homo sapiens
  CDR3 for beta chain variable domain of TCR clone 47578 (TRBV11-2, TRBJ2-2)
CASRLPGELFF

SEQ ID NO: 95157 - protein, 14 aa, Homo sapiens
  CDR3 for alpha chain variable domain of TCR clone 47579 (TRAV23/DV6, TRAJ8)
CAASKNTGFQKLVF

SEQ ID NO: 95158 - protein, 16 aa, Homo sapiens
  CDR3 for beta chain variable domain of TCR clone 47579 (TRBV11-2, TRBJ2-7)
CASSPTTGGVSYEQYF

SEQ ID NO: 95159 - protein, 13 aa, Homo sapiens
  CDR3 for alpha chain variable domain of TCR clone 47580 (TRAV3, TRAJ27)
CAVRPLGAGKSTF

SEQ ID NO: 95160 - protein, 16 aa, Homo sapiens
  CDR3 for beta chain variable domain of TCR clone 47580 (TRBV5-1, TRBJ2-3)
CASSSIGAGSTDTQYF

SEQ ID NO: 95161 - protein, 15 aa, Homo sapiens
  CDR3 for alpha chain variable domain of TCR clone 47581 (TRAV4, TRAJ18)
CVLLIGGSTLGRLYF

SEQ ID NO: 95162 - protein, 12 aa, Homo sapiens
  CDR3 for beta chain variable domain of TCR clone 47581 (TRBV6-3, TRBJ2-7)
CASSLTPYEQYF

SEQ ID NO: 95163 - protein, 14 aa, Homo sapiens
  CDR3 for alpha chain variable domain of TCR clone 47582 (TRAV1-2, TRAJ16)
CAVNRFSDGQKLLF

SEQ ID NO: 95164 - protein, 17 aa, Homo sapiens
  CDR3 for beta chain variable domain of TCR clone 47582 (TRBV15, TRBJ1-1)
CATSRVGGADGDTEAFF

SEQ ID NO: 95165 - protein, 13 aa, Homo sapiens
  CDR3 for alpha chain variable domain of TCR clone 47583 (TRAV27, TRAJ41)
CAGEGNSGYALNF

SEQ ID NO: 95166 - protein, 13 aa, Homo sapiens
  CDR3 for beta chain variable domain of TCR clone 47583 (TRBV7-3, TRBJ1-1)
CASSQDWGAEAFF

SEQ ID NO: 95167 - protein, 12 aa, Homo sapiens
  CDR3 for alpha chain variable domain of TCR clone 47584 (TRAV1-1, TRAJ39)
CAVPVVGNMLTF

SEQ ID NO: 95168 - protein, 15 aa, Homo sapiens
  CDR3 for beta chain variable domain of TCR clone 47584 (TRBV19, TRBJ1-6)
YASSTQGAVGSPLHF

SEQ ID NO: 95169 - protein, 12 aa, Homo sapiens
  CDR3 for alpha chain variable domain of TCR clone 47585 (TRAV12-1, TRAJ40)
CVVYSGTYKYVF

SEQ ID NO: 95170 - protein, 15 aa, Homo sapiens
  CDR3 for beta chain variable domain of TCR clone 47585 (TRBV7-9, TRBJ1-6)
CASSSPGRGNSPLHF

SEQ ID NO: 95171 - protein, 13 aa, Homo sapiens
  CDR3 for alpha chain variable domain of TCR clone 47586 (TRAV13-1, TRAJ45)
WVNSGGGADGLTF

SEQ ID NO: 95172 - protein, 14 aa, Homo sapiens
  CDR3 for beta chain variable domain of TCR clone 47586 (TRBV7-2, TRBJ1-2)
CASSQTGSTYGYTF

SEQ ID NO: 95173 - protein, 16 aa, Homo sapiens
  CDR3 for alpha chain variable domain of TCR clone 47587 (TRAV30, TRAJ24)
CGTEIVDADSWGKFQF

SEQ ID NO: 95174 - protein, 17 aa, Homo sapiens
  CDR3 for beta chain variable domain of TCR clone 47587 (TRBV5-4, TRBJ2-1)
CASSSAGGRGPYNEQFF

SEQ ID NO: 95175 - protein, 13 aa, Homo sapiens
  CDR3 for alpha chain variable domain of TCR clone 47588 (TRAV12-3, TRAJ13)
CAMGTGGYQKVTF

SEQ ID NO: 95176 - protein, 14 aa, Homo sapiens
  CDR3 for beta chain variable domain of TCR clone 47588 (TRBV7-2, TRBJ2-5)
CASSTEGELKTQYF

SEQ ID NO: 95177 - protein, 12 aa, Homo sapiens
  CDR3 for alpha chain variable domain of TCR clone 47589 (TRAV12-3, TRAJ48)
CAMRIGNEKLIF

SEQ ID NO: 95178 - protein, 12 aa, Homo sapiens
  CDR3 for beta chain variable domain of TCR clone 47589 (TRBV13, TRBJ2-7)
CASSLQAYEQYF

SEQ ID NO: 95179 - protein, 13 aa, Homo sapiens
  CDR3 for alpha chain variable domain of TCR clone 47590 (TRAV21, TRAJ57)
CAVTQGGSEKLVF

SEQ ID NO: 95180 - protein, 16 aa, Homo sapiens
  CDR3 for beta chain variable domain of TCR clone 47590 (TRBV29-1, TRBJ2-7)
CSVEDAEDGTAYEQYI

SEQ ID NO: 95181 - protein, 14 aa, Homo sapiens
  CDR3 for alpha chain variable domain of TCR clone 47591 (TRAV17, TRAJ15)
CATDRGQAGTALIF

SEQ ID NO: 95182 - protein, 17 aa, Homo sapiens
  CDR3 for beta chain variable domain of TCR clone 47591 (TRBV29-1, TRBJ2-1)
CSVVGVAGAYSYNEQFF

SEQ ID NO: 95183 - protein, 10 aa, Homo sapiens
  CDR3 for alpha chain variable domain of TCR clone 47592 (TRAV8-4, TRAJ43)
CAVSADDMRF

SEQ ID NO: 95184 - protein, 11 aa, Homo sapiens
  CDR3 for beta chain variable domain of TCR clone 47592 (TRBV19, TRBJ1-1)
CASSIGSEAFF

SEQ ID NO: 95185 - protein, 15 aa, Homo sapiens
  CDR3 for alpha chain variable domain of TCR clone 47593 (TRAV17, TRAJ16)
CATALRFSDGQKLLF

SEQ ID NO: 95186 - protein, 12 aa, Homo sapiens
  CDR3 for beta chain variable domain of TCR clone 47593 (TRBV2, TRBJ2-7)
CASSGPDYEQYF

SEQ ID NO: 95187 - protein, 16 aa, Homo sapiens
  CDR3 for alpha chain variable domain of TCR clone 47594 (TRAV4, TRAJ9)
CPVGDPNRPGGFKTIF

SEQ ID NO: 95188 - protein, 16 aa, Homo sapiens
  CDR3 for beta chain variable domain of TCR clone 47594 (TRBV28, TRBJ1-4)
CASSPPYRGRSEKLFF

SEQ ID NO: 95189 - protein, 15 aa, Homo sapiens
  CDR3 for alpha chain variable domain of TCR clone 47595 (TRAV2, TRAJ15)
CAVEDRGQAGTALIF

SEQ ID NO: 95190 - protein, 15 aa, Homo sapiens
  CDR3 for beta chain variable domain of TCR clone 47595 (TRBV10-2, TRBJ2-7)
CASGASGATSSTSGR

SEQ ID NO: 95191 - protein, 13 aa, Homo sapiens
  CDR3 for alpha chain variable domain of TCR clone 47596 (TRAV17, TRAJ4)
CATKSGGYNKLIF

SEQ ID NO: 95192 - protein, 14 aa, Homo sapiens
  CDR3 for beta chain variable domain of TCR clone 47596 (TRBV20-1, TRBJ1-5)
CSARGDRGNQPQHF

SEQ ID NO: 95193 - protein, 17 aa, Homo sapiens
  CDR3 for alpha chain variable domain of TCR clone 47597 (TRAV3, TRAJ6)
CAVRDGPRAGGSYIPTF

SEQ ID NO: 95194 - protein, 14 aa, Homo sapiens
  CDR3 for beta chain variable domain of TCR clone 47597 (TRBV19, TRBJ2-5)
CASSMTGQQETQYF

SEQ ID NO: 95195 - protein, 16 aa, Homo sapiens
  CDR3 for alpha chain variable domain of TCR clone 47598 (TRAV3, TRAJ37)
CAVREKGSGNTGKLIF

SEQ ID NO: 95196 - protein, 16 aa, Homo sapiens
  CDR3 for beta chain variable domain of TCR clone 47598 (TRBV12-4, TRBJ1-5)
CASSRPVGGSNQPQHF

SEQ ID NO: 95197 - protein, 17 aa, Homo sapiens
  CDR3 for alpha chain variable domain of TCR clone 47599 (TRAV12-2, TRAJ48)
CASNEKLTSGTGTRLTI

SEQ ID NO: 95198 - protein, 16 aa, Homo sapiens
  CDR3 for beta chain variable domain of TCR clone 47599 (TRBV7-3, TRBJ2-2)
CASSLKRGTLSGELFF

SEQ ID NO: 95199 - protein, 15 aa, Homo sapiens
  CDR3 for alpha chain variable domain of TCR clone 47600 (TRAV23/DV6, TRAJ18)
CAARYRGSNLGRLYF

SEQ ID NO: 95200 - protein, 13 aa, Homo sapiens
  CDR3 for beta chain variable domain of TCR clone 47600 (TRBV7-2, TRBJ2-7)
CASSSPSGSEQYF

SEQ ID NO: 95201 - protein, 13 aa, Homo sapiens
  CDR3 for alpha chain variable domain of TCR clone 47601 (TRAV8-6, TRAJ21)
CAVSPSPLNKFYF

SEQ ID NO: 95202 - protein, 14 aa, Homo sapiens
  CDR3 for beta chain variable domain of TCR clone 47601 (TRBV7-9, TRBJ2-5)
CASSLDTAQETQYF

SEQ ID NO: 95203 - protein, 13 aa, Homo sapiens
  CDR3 for alpha chain variable domain of TCR clone 47602 (TRAV3, TRAJ21)
CAVREPDFNKFYF

SEQ ID NO: 95204 - protein, 15 aa, Homo sapiens
  CDR3 for beta chain variable domain of TCR clone 47602 (TRBV25-1, TRBJ1-4)
CASSKRIATNEKLFF

SEQ ID NO: 95205 - protein, 12 aa, Homo sapiens
  CDR3 for alpha chain variable domain of TCR clone 47603 (TRAV17, TRAJ57)
CATDGGSEKLFF

SEQ ID NO: 95206 - protein, 13 aa, Homo sapiens
  CDR3 for beta chain variable domain of TCR clone 47603 (TRBV7-9, TRBJ2-7)
CASSFAGAYEQYF

SEQ ID NO: 95207 - protein, 14 aa, Homo sapiens
  CDR3 for alpha chain variable domain of TCR clone 47604 (TRAV1-2, TRAJ16)
CAVNRFSDGQRLLF

SEQ ID NO: 95208 - protein, 15 aa, Homo sapiens
  CDR3 for beta chain variable domain of TCR clone 47604 (TRBV29-1, TRBJ2-7)
CSVEFFDRGSYEQYF

SEQ ID NO: 95209 - protein, 15 aa, Homo sapiens
  CDR3 for alpha chain variable domain of TCR clone 47605 (TRAV27, TRAJ38)
CAARRNAGNNRKRIW

SEQ ID NO: 95210 - protein, 15 aa, Homo sapiens
  CDR3 for beta chain variable domain of TCR clone 47605 (TRBV5-1, TRBJ2-1)
CASSPPRAPYNEQFF

SEQ ID NO: 95211 - protein, 12 aa, Homo sapiens
  CDR3 for alpha chain variable domain of TCR clone 47606 (TRAV13-1, TRAJ21)
CAAKEGFNKFYF

SEQ ID NO: 95212 - protein, 15 aa, Homo sapiens
  CDR3 for beta chain variable domain of TCR clone 47606 (TRBV5-1, TRBJ2-7)
CASSLNGGPAREQYF

SEQ ID NO: 95213 - protein, 14 aa, Homo sapiens
  CDR3 for alpha chain variable domain of TCR clone 47607 (TRAV3, TRAJ33)
CAVRDTGSNYQLIW

SEQ ID NO: 95214 - protein, 17 aa, Homo sapiens
  CDR3 for beta chain variable domain of TCR clone 47607 (TRBV19, TRBJ2-1)
CASSIWSAQPTHNEQFF

SEQ ID NO: 95215 - protein, 13 aa, Homo sapiens
  CDR3 for alpha chain variable domain of TCR clone 47608 (TRAV39, TRAJ33)
CAANPDSNYQLIW

SEQ ID NO: 95216 - protein, 13 aa, Homo sapiens
  CDR3 for beta chain variable domain of TCR clone 47608 (TRBV18, TRBJ1-1)
CASSGGRNTEAYF

SEQ ID NO: 95217 - protein, 15 aa, Homo sapiens
  CDR3 for alpha chain variable domain of TCR clone 47609 (TRAV3, TRAJ29)
CAVRAPLSGNTPLVF

SEQ ID NO: 95218 - protein, 15 aa, Homo sapiens
  CDR3 for beta chain variable domain of TCR clone 47609 (TRBV10-2, TRBJ2-7)
CASWNRGQATYEQYF

SEQ ID NO: 95219 - protein, 14 aa, Homo sapiens
  CDR3 for alpha chain variable domain of TCR clone 47610 (TRAV1-1, TRAJ33)
CAVRPKDSNYQLIW

SEQ ID NO: 95220 - protein, 15 aa, Homo sapiens
  CDR3 for beta chain variable domain of TCR clone 47610 (TRBV20-1, TRBJ2-1)
CSARSPGGPGNEQFF

SEQ ID NO: 95221 - protein, 18 aa, Homo sapiens
  CDR3 for alpha chain variable domain of TCR clone 47611 (TRAV26-2, TRAJ45)
CILRLRGYSGGGADGLTF

SEQ ID NO: 95222 - protein, 17 aa, Homo sapiens
  CDR3 for beta chain variable domain of TCR clone 47611 (TRBV28, TRBJ2-3)
CASSPTPAGGRVDTQYF

SEQ ID NO: 95223 - protein, 16 aa, Homo sapiens
  CDR3 for alpha chain variable domain of TCR clone 47612 (TRAV3, TRAJ10)
CAVRDMRAGGGNKLTF

SEQ ID NO: 95224 - protein, 19 aa, Homo sapiens
  CDR3 for beta chain variable domain of TCR clone 47612 (TRBV6-3, TRBJ1-2)
CASSYSKGRTGPPDYGYTF

SEQ ID NO: 95225 - protein, 14 aa, Homo sapiens
  CDR3 for alpha chain variable domain of TCR clone 47613 (TRAV16, TRAJ48)
CALTSGFGNEKLTF

SEQ ID NO: 95226 - protein, 14 aa, Homo sapiens
  CDR3 for beta chain variable domain of TCR clone 47613 (TRBV7-2, TRBJ2-7)
CASSSISGFSEQYF

SEQ ID NO: 95227 - protein, 15 aa, Homo sapiens
  CDR3 for alpha chain variable domain of TCR clone 47614 (TRAV21, TRAJ53)
CATLNSGGSNYKLTF

SEQ ID NO: 95228 - protein, 16 aa, Homo sapiens
  CDR3 for beta chain variable domain of TCR clone 47614 (TRBV20-1, TRBJ1-4)
CGAPGQGLLTNEKLFF

SEQ ID NO: 95229 - protein, 17 aa, Homo sapiens
  CDR3 for alpha chain variable domain of TCR clone 47615 (TRAV3, TRAJ12)
CAVRDGGRMDSSYKLIF

SEQ ID NO: 95230 - protein, 13 aa, Homo sapiens
  CDR3 for beta chain variable domain of TCR clone 47615 (TRBV20-1, TRBJ2-2)
CSASAAGTGELFF

SEQ ID NO: 95231 - protein, 17 aa, Homo sapiens
  CDR3 for alpha chain variable domain of TCR clone 47616 (TRAV13-1, TRAJ31)
CAPRDRLMFGEGTQLVV

SEQ ID NO: 95232 - protein, 12 aa, Homo sapiens
  CDR3 for beta chain variable domain of TCR clone 47616 (TRBV7-9, TRBJ2-7)
CASSLEGYEQYF

SEQ ID NO: 95233 - protein, 15 aa, Homo sapiens
  CDR3 for alpha chain variable domain of TCR clone 47617 (TRAV27, TRAJ50)
CAGVGRGTSYDKAIF

SEQ ID NO: 95234 - protein, 14 aa, Homo sapiens
  CDR3 for beta chain variable domain of TCR clone 47617 (TRBV7-2, TRBJ1-1)
CASSFYDLNTEAFF

SEQ ID NO: 95235 - protein, 15 aa, Homo sapiens
  CDR3 for alpha chain variable domain of TCR clone 47618 (TRAV12-3, TRAJ6)
CAMSATSGGSYKPTF

SEQ ID NO: 95236 - protein, 11 aa, Homo sapiens
  CDR3 for beta chain variable domain of TCR clone 47618 (TRBV20-1, TRBJ1-5)
CSAQGDQPQHF

SEQ ID NO: 95237 - protein, 11 aa, Homo sapiens
  CDR3 for alpha chain variable domain of TCR clone 47619 (TRAV20, TRAJ23)
CACNQGGKLIF

SEQ ID NO: 95238 - protein, 16 aa, Homo sapiens
  CDR3 for beta chain variable domain of TCR clone 47619 (TRBV7-8, TRBJ2-5)
CASSLGGQPAQETQYF

SEQ ID NO: 95239 - protein, 13 aa, Homo sapiens
  CDR3 for alpha chain variable domain of TCR clone 47620 (TRAV17, TRAJ5)
CAPMDTGRRALTF

SEQ ID NO: 95240 - protein, 13 aa, Homo sapiens
  CDR3 for beta chain variable domain of TCR clone 47620 (TRBV28, TRBJ2-1)
CASNLLSVDEQFF

SEQ ID NO: 95241 - protein, 14 aa, Homo sapiens
  CDR3 for alpha chain variable domain of TCR clone 47621 (TRAV17, TRAJ54)
CATDANQGARKLVF

SEQ ID NO: 95242 - protein, 12 aa, Homo sapiens
  CDR3 for beta chain variable domain of TCR clone 47621 (TRBV7-9, TRBJ2-7)
CASSIKREEQYF

SEQ ID NO: 95243 - protein, 17 aa, Homo sapiens
  CDR3 for alpha chain variable domain of TCR clone 47622 (TRAV13-1, TRAJ52)
CAAGRNAGGTSYGKLTF

SEQ ID NO: 95244 - protein, 16 aa, Homo sapiens
  CDR3 for beta chain variable domain of TCR clone 47622 (TRBV12-4, TRBJ1-5)
CASSRPVGGSNQPQHF

SEQ ID NO: 95245 - protein, 15 aa, Homo sapiens
  CDR3 for alpha chain variable domain of TCR clone 47623 (TRAV27, TRAJ45)
CAPVDSGGGADGLTF

SEQ ID NO: 95246 - protein, 23 aa, Homo sapiens
  CDR3 for beta chain variable domain of TCR clone 47623 (TRBV23-1, TRBJ1-5)
TVSLRQQSIEGTGLGGLYQPQHF

SEQ ID NO: 95247 - protein, 17 aa, Homo sapiens
  CDR3 for alpha chain variable domain of TCR clone 47624 (TRAV38-2/DV8, TRAJ28)
CAYRFAYSGAGSYQLTF

SEQ ID NO: 95248 - protein, 15 aa, Homo sapiens
  CDR3 for beta chain variable domain of TCR clone 47624 (TRBV20-1, TRBJ2-7)
CSARDRVSGMDEQYF

SEQ ID NO: 95249 - protein, 14 aa, Homo sapiens
  CDR3 for alpha chain variable domain of TCR clone 47625 (TRAV13-2, TRAJ29)
CAENIEPGNTPLVF

SEQ ID NO: 95250 - protein, 14 aa, Homo sapiens
  CDR3 for beta chain variable domain of TCR clone 47625 (TRBV19, TRBJ2-2)
CATTGHADTGELFF

SEQ ID NO: 95251 - protein, 17 aa, Homo sapiens
  CDR3 for alpha chain variable domain of TCR clone 47626 (TRAV12-2, TRAJ6)
CAPQGPPRAGGSYIPTF

SEQ ID NO: 95252 - protein, 16 aa, Homo sapiens
  CDR3 for beta chain variable domain of TCR clone 47626 (TRBV19, TRBJ2-2)
CASSTARASDTGELFF

SEQ ID NO: 95253 - protein, 12 aa, Homo sapiens
  CDR3 for alpha chain variable domain of TCR clone 47627 (TRAV12-3, TRAJ40)
CAMSSGTYKYIF

SEQ ID NO: 95254 - protein, 15 aa, Homo sapiens
  CDR3 for beta chain variable domain of TCR clone 47627 (TRBV7-3, TRBJ2-2)
CAGSETGQGTGELFF

SEQ ID NO: 95255 - protein, 14 aa, Homo sapiens
  CDR3 for alpha chain variable domain of TCR clone 47628 (TRAV9-2, TRAJ39)
CALYIYNAGNMLTF

SEQ ID NO: 95256 - protein, 14 aa, Homo sapiens
  CDR3 for beta chain variable domain of TCR clone 47628 (TRBV12-4, TRBJ1-6)
CASSPGQGNSPLHF

SEQ ID NO: 95257 - protein, 14 aa, Homo sapiens
  CDR3 for alpha chain variable domain of TCR clone 47629 (TRAV17, TRAJ16)
CATADFSDGQKRLF

SEQ ID NO: 95258 - protein, 15 aa, Homo sapiens
  CDR3 for beta chain variable domain of TCR clone 47629 (TRBV18, TRBJ2-1)
CASSPPSASYNEQFF

SEQ ID NO: 95259 - protein, 12 aa, Homo sapiens
  CDR3 for alpha chain variable domain of TCR clone 47630 (TRAV17, TRAJ39)
CATGAAGNMLTF

SEQ ID NO: 95260 - protein, 14 aa, Homo sapiens
  CDR3 for beta chain variable domain of TCR clone 47630 (TRBV7-9, TRBJ1-2)
CSSSRQGANYGYTF

SEQ ID NO: 95261 - protein, 12 aa, Homo sapiens
  CDR3 for alpha chain variable domain of TCR clone 47631 (TRAV13-1, TRAJ21)
CAAKEGFNKFYF

SEQ ID NO: 95262 - protein, 15 aa, Homo sapiens
  CDR3 for beta chain variable domain of TCR clone 47631 (TRBV27, TRBJ2-1)
CASSNGGGSSNEQFL

SEQ ID NO: 95263 - protein, 17 aa, Homo sapiens
  CDR3 for alpha chain variable domain of TCR clone 47632 (TRAV3, TRAJ42)
CAVRDRDYGGSQGNLIF

SEQ ID NO: 95264 - protein, 15 aa, Homo sapiens
  CDR3 for beta chain variable domain of TCR clone 47632 (TRBV6-6, TRBJ2-7)
CASSYSYGGSYGQYF

SEQ ID NO: 95265 - protein, 23 aa, Homo sapiens
  CDR3 for alpha chain variable domain of TCR clone 47633 (TRAV26-1, TRAJ38)
CIADNAGNNHIQNPDPAVYQLRD

SEQ ID NO: 95266 - protein, 15 aa, Homo sapiens
  CDR3 for beta chain variable domain of TCR clone 47633 (TRBV6-3, TRBJ2-7)
CASSSPGTVFYEQYF

SEQ ID NO: 95267 - protein, 11 aa, Homo sapiens
  CDR3 for alpha chain variable domain of TCR clone 47634 (TRAV16, TRAJ49)
CALRSGNQFYF

SEQ ID NO: 95268 - protein, 16 aa, Homo sapiens
  CDR3 for beta chain variable domain of TCR clone 47634 (TRBV7-9, TRBJ1-2)
CASSLGFSSGEDGYTF

SEQ ID NO: 95269 - protein, 13 aa, Homo sapiens
  CDR3 for alpha chain variable domain of TCR clone 47635 (TRAV1-2, TRAJ9)
CAALNTGGFKTIF

SEQ ID NO: 95270 - protein, 12 aa, Homo sapiens
  CDR3 for beta chain variable domain of TCR clone 47635 (TRBV7-2, TRBJ1-2)
CASRDSIYGYTF

SEQ ID NO: 95271 - protein, 12 aa, Homo sapiens
  CDR3 for alpha chain variable domain of TCR clone 47636 (TRAV8-3, TRAJ20)
CAVGANDYKLSF

SEQ ID NO: 95272 - protein, 20 aa, Homo sapiens
  CDR3 for beta chain variable domain of TCR clone 47636 (TRBV28, TRBJ2-1)
CASTPIGRSPGLAGGNEQFF

SEQ ID NO: 95273 - protein, 15 aa, Homo sapiens
  CDR3 for alpha chain variable domain of TCR clone 47637 (TRAV8-4, TRAJ37)
CAVSRGSGNTGKLIF

SEQ ID NO: 95274 - protein, 15 aa, Homo sapiens
  CDR3 for beta chain variable domain of TCR clone 47637 (TRBV5-1, TRBJ2-7)
CASSLDLTSPYEQYF

SEQ ID NO: 95275 - protein, 12 aa, Homo sapiens
  CDR3 for alpha chain variable domain of TCR clone 47638 (TRAV20, TRAJ36)
CAQVTGANNLFF

SEQ ID NO: 95276 - protein, 14 aa, Homo sapiens
  CDR3 for beta chain variable domain of TCR clone 47638 (TRBV6-1, TRBJ2-2)
CASSQRQATGELLF

SEQ ID NO: 95277 - protein, 14 aa, Homo sapiens
  CDR3 for alpha chain variable domain of TCR clone 47639 (TRAV12-3, TRAJ10)
SHLPLMGGGNKLTF

SEQ ID NO: 95278 - protein, 13 aa, Homo sapiens
  CDR3 for beta chain variable domain of TCR clone 47639 (TRBV7-9, TRBJ2-3)
CASSPGSTDTQYF

SEQ ID NO: 95279 - protein, 13 aa, Homo sapiens
  CDR3 for alpha chain variable domain of TCR clone 47640 (TRAV13-1, TRAJ39)
CSKYSNAVNMLTF

SEQ ID NO: 95280 - protein, 16 aa, Homo sapiens
  CDR3 for beta chain variable domain of TCR clone 47640 (TRBV20-1, TRBJ1-4)
CSAPGQGLLTNEKLFF

SEQ ID NO: 95281 - protein, 16 aa, Homo sapiens
  CDR3 for alpha chain variable domain of TCR clone 47641 (TRAV14/DV4, TRAJ53)
CAMREGGGGSNYKLTF

SEQ ID NO: 95282 - protein, 12 aa, Homo sapiens
  CDR3 for beta chain variable domain of TCR clone 47641 (TRBV11-2, TRBJ2-2)
CASSLGGGELFF

SEQ ID NO: 95283 - protein, 19 aa, Homo sapiens
  CDR3 for alpha chain variable domain of TCR clone 47642 (TRAV26-1, TRAJ52)
CIVRVANNAGGTSYGKLTF

SEQ ID NO: 95284 - protein, 11 aa, Homo sapiens
  CDR3 for beta chain variable domain of TCR clone 47642 (TRBV19, TRBJ1-1)
CASSIGSEAFF

SEQ ID NO: 95285 - protein, 14 aa, Homo sapiens
  CDR3 for alpha chain variable domain of TCR clone 47643 (TRAV12-2, TRAJ26)
CAVNDDNYGQNFVF

SEQ ID NO: 95286 - protein, 14 aa, Homo sapiens
  CDR3 for beta chain variable domain of TCR clone 47643 (TRBV25-1, TRBJ1-1)
CASTHLGGNTEAFF

SEQ ID NO: 95287 - protein, 17 aa, Homo sapiens
  CDR3 for alpha chain variable domain of TCR clone 47644 (TRAV8-6, TRAJ58)
CAVSSWVGETSGSGLTF

SEQ ID NO: 95288 - protein, 14 aa, Homo sapiens
  CDR3 for beta chain variable domain of TCR clone 47644 (TRBV4-2, TRBJ2-1)
CASGLDRAYNEQFF

SEQ ID NO: 95289 - protein, 15 aa, Homo sapiens
  CDR3 for alpha chain variable domain of TCR clone 47645 (TRAV3, TRAJ22)
CALRDRGGSARQLTF

SEQ ID NO: 95290 - protein, 16 aa, Homo sapiens
  CDR3 for beta chain variable domain of TCR clone 47645 (TRBV5-4, TRBJ2-3)
CASQQPGAGGADTQYF

SEQ ID NO: 95291 - protein, 15 aa, Homo sapiens
  CDR3 for alpha chain variable domain of TCR clone 47646 (TRAV3, TRAJ3)
CAVRYRDSSASKIIF

SEQ ID NO: 95292 - protein, 18 aa, Homo sapiens
  CDR3 for beta chain variable domain of TCR clone 47646 (TRBV25-1, TRBJ1-2)
CASSGLQNGQGLIFGYTF

SEQ ID NO: 95293 - protein, 13 aa, Homo sapiens
  CDR3 for alpha chain variable domain of TCR clone 47647 (TRAV8-3, TRAJ28)
CAVGAVGSYQLTF

SEQ ID NO: 95294 - protein, 14 aa, Homo sapiens
  CDR3 for beta chain variable domain of TCR clone 47647 (TRBV19, TRBJ2-1)
CASGKSTQYNEQFF

SEQ ID NO: 95295 - protein, 14 aa, Homo sapiens
  CDR3 for alpha chain variable domain of TCR clone 47648 (TRAV38-1, TRAJ40)
CALRPTSGTYKYIF

SEQ ID NO: 95296 - protein, 10 aa, Homo sapiens
  CDR3 for beta chain variable domain of TCR clone 47648 (TRBV25-1, TRBJ1-1)
PTWGNTEAFF

SEQ ID NO: 95297 - protein, 16 aa, Homo sapiens
  CDR3 for alpha chain variable domain of TCR clone 47649 (TRAV30, TRAJ24)
CGTEIVDADSWGKFQF

SEQ ID NO: 95298 - protein, 14 aa, Homo sapiens
  CDR3 for beta chain variable domain of TCR clone 47649 (TRBV7-8, TRBJ2-3)
CASSLEAGTDAQYF

SEQ ID NO: 95299 - protein, 13 aa, Homo sapiens
  CDR3 for alpha chain variable domain of TCR clone 47650 (TRAV2, TRAJ15)
CAVASQAGTALIF

SEQ ID NO: 95300 - protein, 16 aa, Homo sapiens
  CDR3 for beta chain variable domain of TCR clone 47650 (TRBV11-3, TRBJ1-1)
CASSLRQGGEHSKAFF

SEQ ID NO: 95301 - protein, 12 aa, Homo sapiens
  CDR3 for alpha chain variable domain of TCR clone 47651 (TRAV6, TRAJ36)
CALQTGAKNLFF

SEQ ID NO: 95302 - protein, 16 aa, Homo sapiens
  CDR3 for beta chain variable domain of TCR clone 47651 (TRBV11-3, TRBJ2-3)
CASSLGTRGSTDTQYF

SEQ ID NO: 95303 - protein, 16 aa, Homo sapiens
  CDR3 for alpha chain variable domain of TCR clone 47652 (TRAV8-3, TRAJ13)
CAVGAYPSGGYQKVTF

SEQ ID NO: 95304 - protein, 14 aa, Homo sapiens
  CDR3 for beta chain variable domain of TCR clone 47652 (TRBV19, TRBJ2-1)
CASGKSTQYNEQFF

SEQ ID NO: 95305 - protein, 12 aa, Homo sapiens
  CDR3 for alpha chain variable domain of TCR clone 47653 (TRAV29/DV5, TRAJ34)
CAARHNTDKLIF

SEQ ID NO: 95306 - protein, 15 aa, Homo sapiens
  CDR3 for beta chain variable domain of TCR clone 47653 (TRBV19, TRBJ2-7)
CASSPAGSGEALKYF

SEQ ID NO: 95307 - protein, 13 aa, Homo sapiens
  CDR3 for alpha chain variable domain of TCR clone 47654 (TRAV8-6, TRAJ49)
CAVITNTGNQFYF

SEQ ID NO: 95308 - protein, 14 aa, Homo sapiens
  CDR3 for beta chain variable domain of TCR clone 47654 (TRBV5-1, TRBJ2-7)
CASSRGEALYEQYF

SEQ ID NO: 95309 - protein, 12 aa, Homo sapiens
  CDR3 for alpha chain variable domain of TCR clone 47655 (TRAV12-3, TRAJ17)
CAMTLTGNKLTF

SEQ ID NO: 95310 - protein, 15 aa, Homo sapiens
  CDR3 for beta chain variable domain of TCR clone 47655 (TRBV20-1, TRBJ2-7)
RSARDWVSGMDEQYF

SEQ ID NO: 95311 - protein, 23 aa, Homo sapiens
  CDR3 for alpha chain variable domain of TCR clone 47656 (TRAV26-1, TRAJ38)
CIADNAGNNHIQNPDPAVYQLRA

SEQ ID NO: 95312 - protein, 13 aa, Homo sapiens
  CDR3 for beta chain variable domain of TCR clone 47656 (TRBV20-1, TRBJ1-1)
CSARGGGNTEAFF

SEQ ID NO: 95313 - protein, 14 aa, Homo sapiens
  CDR3 for alpha chain variable domain of TCR clone 47657 (TRAV27, TRAJ49)
CAGRPEGTGNQFYF

SEQ ID NO: 95314 - protein, 14 aa, Homo sapiens
  CDR3 for beta chain variable domain of TCR clone 47657 (TRBV7-8, TRBJ2-3)
CASSLEAGTDTQYF

SEQ ID NO: 95315 - protein, 16 aa, Homo sapiens
  CDR3 for alpha chain variable domain of TCR clone 47658 (TRAV20, TRAJ28)
CAVRDPSGAGSYQLTF

SEQ ID NO: 95316 - protein, 15 aa, Homo sapiens
  CDR3 for beta chain variable domain of TCR clone 47658 (TRBV20-1, TRBJ2-7)
CSARDWVSGMDEQYF

SEQ ID NO: 95317 - protein, 15 aa, Homo sapiens
  CDR3 for alpha chain variable domain of TCR clone 47659 (TRAV8-2, TRAJ36)
CVVSENWGKQPLLWD

SEQ ID NO: 95318 - protein, 15 aa, Homo sapiens
  CDR3 for beta chain variable domain of TCR clone 47659 (TRBV20-1, TRBJ2-5)
CSAEGTGGLQETQYL

SEQ ID NO: 95319 - protein, 14 aa, Homo sapiens
  CDR3 for alpha chain variable domain of TCR clone 47660 (TRAV1-2, TRAJ8)
CAVREDTGFQKLVF

SEQ ID NO: 95320 - protein, 15 aa, Homo sapiens
  CDR3 for beta chain variable domain of TCR clone 47660 (TRBV4-1, TRBJ2-5)
CASSQWDLYQETQYF

SEQ ID NO: 95321 - protein, 15 aa, Homo sapiens
  CDR3 for alpha chain variable domain of TCR clone 47661 (TRAV14/DV4, TRAJ10)
CAMRELTGGGNKLTF

SEQ ID NO: 95322 - protein, 16 aa, Homo sapiens
  CDR3 for beta chain variable domain of TCR clone 47661 (TRBV12-5, TRBJ2-5)
CASGPRTSGNQETQYF

SEQ ID NO: 95323 - protein, 15 aa, Homo sapiens
  CDR3 for alpha chain variable domain of TCR clone 47662 (TRAV2, TRAJ24)
CAVVRLKNSWGKLQF

SEQ ID NO: 95324 - protein, 14 aa, Homo sapiens
  CDR3 for beta chain variable domain of TCR clone 47662 (TRBV2, TRBJ2-7)
CASSLTSGGYEQYF

SEQ ID NO: 95325 - protein, 11 aa, Homo sapiens
  CDR3 for alpha chain variable domain of TCR clone 47663 (TRAV26-1, TRAJ37)
CIVRVGRKLIF

SEQ ID NO: 95326 - protein, 14 aa, Homo sapiens
  CDR3 for beta chain variable domain of TCR clone 47663 (TRBV7-9, TRBJ2-1)
CASSPRDSLYEQFF

SEQ ID NO: 95327 - protein, 13 aa, Homo sapiens
  CDR3 for alpha chain variable domain of TCR clone 47664 (TRAV13-1, TRAJ21)
CAASIYNFNKFYF

SEQ ID NO: 95328 - protein, 15 aa, Homo sapiens
  CDR3 for beta chain variable domain of TCR clone 47664 (TRBV27, TRBJ2-1)
CASSNGGGSSNEQFL

SEQ ID NO: 95329 - protein, 13 aa, Homo sapiens
  CDR3 for alpha chain variable domain of TCR clone 47665 (TRAV2, TRAJ40)
CAVVTSGTYKYIF

SEQ ID NO: 95330 - protein, 11 aa, Homo sapiens
  CDR3 for beta chain variable domain of TCR clone 47665 (TRBV19, TRBJ2-2)
CASRYSGELFF

SEQ ID NO: 95331 - protein, 14 aa, Homo sapiens
  CDR3 for alpha chain variable domain of TCR clone 47666 (TRAV26-1, TRAJ38)
CIADNAGNNRKLIW

SEQ ID NO: 95332 - protein, 13 aa, Homo sapiens
  CDR3 for beta chain variable domain of TCR clone 47666 (TRBV20-1, TRBJ1-1)
CCARGGGNTEAFF

SEQ ID NO: 95333 - protein, 17 aa, Homo sapiens
  CDR3 for alpha chain variable domain of TCR clone 47667 (TRAV3, TRAJ42)
CAVRDRDYGGSQGNLIF

SEQ ID NO: 95334 - protein, 14 aa, Homo sapiens
  CDR3 for beta chain variable domain of TCR clone 47667 (TRBV18, TRBJ2-5)
CASSPGVSQETQYF

SEQ ID NO: 95335 - protein, 17 aa, Homo sapiens
  CDR3 for alpha chain variable domain of TCR clone 47668 (TRAV12-2, TRAJ4)
CAVNVRPVSGGYNKLIL

SEQ ID NO: 95336 - protein, 17 aa, Homo sapiens
  CDR3 for beta chain variable domain of TCR clone 47668 (TRBV6-3, TRBJ2-1)
CASSYSSGTRGLDEQFF

SEQ ID NO: 95337 - protein, 13 aa, Homo sapiens
  CDR3 for alpha chain variable domain of TCR clone 47669 (TRAV26-1, TRAJ29)
CIVRRSGNTPLVI

SEQ ID NO: 95338 - protein, 16 aa, Homo sapiens
  CDR3 for beta chain variable domain of TCR clone 47669 (TRBV11-2, TRBJ2-7)
CASSLAPTGVNYEQYF

SEQ ID NO: 95339 - protein, 12 aa, Homo sapiens
  CDR3 for alpha chain variable domain of TCR clone 47670 (TRAV12-3, TRAJ17)
CAMTLTGNKLTF

SEQ ID NO: 95340 - protein, 16 aa, Homo sapiens
  CDR3 for beta chain variable domain of TCR clone 47670 (TRBV13, TRBJ2-2)
CASSPRTGEHTGELFS

SEQ ID NO: 95341 - protein, 16 aa, Homo sapiens
  CDR3 for alpha chain variable domain of TCR clone 47671 (TRAV1-2, TRAJ10)
CAVRGVLTGGGNKPTF

SEQ ID NO: 95342 - protein, 13 aa, Homo sapiens
  CDR3 for beta chain variable domain of TCR clone 47671 (TRBV20-1, TRBJ1-1)
CSAGTVGNTEAFF

SEQ ID NO: 95343 - protein, 14 aa, Homo sapiens
  CDR3 for alpha chain variable domain of TCR clone 47672 (TRAV1-2, TRAJ8)
CAVREDTGFQKLVF

SEQ ID NO: 95344 - protein, 15 aa, Homo sapiens
  CDR3 for beta chain variable domain of TCR clone 47672 (TRBV4-1, TRBJ2-7)
CASSQNTGCLYEQYF

SEQ ID NO: 95345 - protein, 12 aa, Homo sapiens
  CDR3 for alpha chain variable domain of TCR clone 47673 (TRAV2, TRAJ9)
CAVGAGGFKTIF

SEQ ID NO: 95346 - protein, 16 aa, Homo sapiens
  CDR3 for beta chain variable domain of TCR clone 47673 (TRBV13, TRBJ2-2)
CASSRRTGEHTGELFF

SEQ ID NO: 95347 - protein, 15 aa, Homo sapiens
  CDR3 for alpha chain variable domain of TCR clone 47674 (TRAV12-2, TRAJ43)
CAFDMRFGAGTRLTV

SEQ ID NO: 95348 - protein, 18 aa, Homo sapiens
  CDR3 for beta chain variable domain of TCR clone 47674 (TRBV20-1, TRBJ2-3)
CGASGLAGGPGTTDTQYF

SEQ ID NO: 95349 - protein, 14 aa, Homo sapiens
  CDR3 for alpha chain variable domain of TCR clone 47675 (TRAV3, TRAJ21)
CAVRDAYNFNKFYF

SEQ ID NO: 95350 - protein, 17 aa, Homo sapiens
  CDR3 for beta chain variable domain of TCR clone 47675 (TRBV20-1, TRBJ1-6)
CSARGGYTFSYNSPLHF

SEQ ID NO: 95351 - protein, 13 aa, Homo sapiens
  CDR3 for alpha chain variable domain of TCR clone 47676 (TRAV27, TRAJ56)
CAGKPGANSKLTL

SEQ ID NO: 95352 - protein, 18 aa, Homo sapiens
  CDR3 for beta chain variable domain of TCR clone 47676 (TRBV11-2, TRBJ2-3)
CASSLGGASRGAPNTQYF

SEQ ID NO: 95353 - protein, 14 aa, Homo sapiens
  CDR3 for alpha chain variable domain of TCR clone 47677 (TRAV1-2, TRAJ16)
CAVNRFSDGQKLLS

SEQ ID NO: 95354 - protein, 13 aa, Homo sapiens
  CDR3 for beta chain variable domain of TCR clone 47677 (TRBV7-3, TRBJ1-1)
CASSQDWGAEAFF

SEQ ID NO: 95355 - protein, 13 aa, Homo sapiens
  CDR3 for alpha chain variable domain of TCR clone 47678 (TRAV27, TRAJ45)
CRSSGGGADGLTF

SEQ ID NO: 95356 - protein, 17 aa, Homo sapiens
  CDR3 for beta chain variable domain of TCR clone 47678 (TRBV11-2, TRBJ2-1)
CASSLYPPGVEYNEHFF

SEQ ID NO: 95357 - protein, 14 aa, Homo sapiens
  CDR3 for alpha chain variable domain of TCR clone 47679 (TRAV8-3, TRAJ4)
CAVGAAGGYNKLIF

SEQ ID NO: 95358 - protein, 15 aa, Homo sapiens
  CDR3 for beta chain variable domain of TCR clone 47679 (TRBV6-5, TRBJ2-1)
CASSYDAGAGKEQFF

SEQ ID NO: 95359 - protein, 13 aa, Homo sapiens
  CDR3 for alpha chain variable domain of TCR clone 47680 (TRAV12-3, TRAJ21)
CAPGHHNFNKFYF

SEQ ID NO: 95360 - protein, 15 aa, Homo sapiens
  CDR3 for beta chain variable domain of TCR clone 47680 (TRBV9, TRBJ1-6)
CASSVAGTGDSPLHF

SEQ ID NO: 95361 - protein, 16 aa, Homo sapiens
  CDR3 for alpha chain variable domain of TCR clone 47681 (TRAV3, TRAJ37)
CAVRPHGSGNTGKLIF

SEQ ID NO: 95362 - protein, 14 aa, Homo sapiens
  CDR3 for beta chain variable domain of TCR clone 47681 (TRBV11-2, TRBJ2-5)
CASRPLAGRETQYF

SEQ ID NO: 95363 - protein, 16 aa, Homo sapiens
  CDR3 for alpha chain variable domain of TCR clone 47682 (TRAV26-1, TRAJ48)
CIVRGPPNFGNEKLTF

SEQ ID NO: 95364 - protein, 12 aa, Homo sapiens
  CDR3 for beta chain variable domain of TCR clone 47682 (TRBV19, TRBJ2-1)
CASSRQGAEQFF

SEQ ID NO: 95365 - protein, 18 aa, Homo sapiens
  CDR3 for alpha chain variable domain of TCR clone 47683 (TRAV12-3, TRAJ52)
CAMSVGGAGGTSYGKLTF

SEQ ID NO: 95366 - protein, 13 aa, Homo sapiens
  CDR3 for beta chain variable domain of TCR clone 47683 (TRBV28, TRBJ2-2)
CASIRESTGELFF

SEQ ID NO: 95367 - protein, 15 aa, Homo sapiens
  CDR3 for alpha chain variable domain of TCR clone 47684 (TRAV13-2, TRAJ40)
CAENRSRQGTYKYIF

SEQ ID NO: 95368 - protein, 16 aa, Homo sapiens
  CDR3 for beta chain variable domain of TCR clone 47684 (TRBV7-2, TRBJ2-1)
CASSLGRTSGDNEQFL

SEQ ID NO: 95369 - protein, 13 aa, Homo sapiens
  CDR3 for alpha chain variable domain of TCR clone 47685 (TRAV12-3, TRAJ9)
CAMRNTGAFKTIF

SEQ ID NO: 95370 - protein, 14 aa, Homo sapiens
  CDR3 for beta chain variable domain of TCR clone 47685 (TRBV11-2, TRBJ2-7)
CASSSTGEGYEQYF

SEQ ID NO: 95371 - protein, 12 aa, Homo sapiens
  CDR3 for alpha chain variable domain of TCR clone 47686 (TRAV21, TRAJ33)
CAKMDSNYQLIW

SEQ ID NO: 95372 - protein, 14 aa, Homo sapiens
  CDR3 for beta chain variable domain of TCR clone 47686 (TRBV2, TRBJ2-7)
CASILTSGGYEQYF

SEQ ID NO: 95373 - protein, 13 aa, Homo sapiens
  CDR3 for alpha chain variable domain of TCR clone 47687 (TRAV12-1, TRAJ40)
CVVNSSGTYKYMF

SEQ ID NO: 95374 - protein, 14 aa, Homo sapiens
  CDR3 for beta chain variable domain of TCR clone 47687 (TRBV2, TRBJ1-6)
CASEVSSYNSPLHF

SEQ ID NO: 95375 - protein, 11 aa, Homo sapiens
  CDR3 for alpha chain variable domain of TCR clone 47688 (TRAV12-1, TRAJ40)
CVVPGTYKYIF

SEQ ID NO: 95376 - protein, 15 aa, Homo sapiens
  CDR3 for beta chain variable domain of TCR clone 47688 (TRBV28, TRBJ2-1)
CASSIIAGGRSEQFF

SEQ ID NO: 95377 - protein, 20 aa, Homo sapiens
  CDR3 for alpha chain variable domain of TCR clone 47689 (TRAV1-1, TRAJ4)
CLLLLRCEGFLSGGYNKLIF

SEQ ID NO: 95378 - protein, 16 aa, Homo sapiens
  CDR3 for beta chain variable domain of TCR clone 47689 (TRBV28, TRBJ1-4)
CASSPPYRGRSDKLFF

SEQ ID NO: 95379 - protein, 15 aa, Homo sapiens
  CDR3 for alpha chain variable domain of TCR clone 47690 (TRAV17, TRAJ57)
CATGPTQGGSEKLVF

SEQ ID NO: 95380 - protein, 16 aa, Homo sapiens
  CDR3 for beta chain variable domain of TCR clone 47690 (TRBV12-4, TRBJ1-5)
CASSRPVGGSNQPQHF

SEQ ID NO: 95381 - protein, 14 aa, Homo sapiens
  CDR3 for alpha chain variable domain of TCR clone 47691 (TRAV1-2, TRAJ8)
CAVREDTGFEKLVF

SEQ ID NO: 95382 - protein, 12 aa, Homo sapiens
  CDR3 for beta chain variable domain of TCR clone 47691 (TRBV29-1, TRBJ2-3)
CSVTGGADTQYF

SEQ ID NO: 95383 - protein, 16 aa, Homo sapiens
  CDR3 for alpha chain variable domain of TCR clone 47692 (TRAV1-2, TRAJ10)
CAVRGVLTGGGNKLTF

SEQ ID NO: 95384 - protein, 17 aa, Homo sapiens
  CDR3 for beta chain variable domain of TCR clone 47692 (TRBV28, TRBJ2-7)
CASSPLHRASGVYEQYF

SEQ ID NO: 95385 - protein, 14 aa, Homo sapiens
  CDR3 for alpha chain variable domain of TCR clone 47693 (TRAV26-1, TRAJ26)
FIVRATFLGQNFVF

SEQ ID NO: 95386 - protein, 16 aa, Homo sapiens
  CDR3 for beta chain variable domain of TCR clone 47693 (TRBV12-4, TRBJ2-7)
CASRSTGTGPSYEQYF

SEQ ID NO: 95387 - protein, 16 aa, Homo sapiens
  CDR3 for alpha chain variable domain of TCR clone 47694 (TRAV8-3, TRAJ13)
CAVGAYPFGGYQKVTF

SEQ ID NO: 95388 - protein, 15 aa, Homo sapiens
  CDR3 for beta chain variable domain of TCR clone 47694 (TRBV19, TRBJ1-5)
CASSIVWADNQPQHF

SEQ ID NO: 95389 - protein, 19 aa, Homo sapiens
  CDR3 for alpha chain variable domain of TCR clone 47695 (TRAV16, TRAJ40)
CITVLSMSPTTSGTYKYIF

SEQ ID NO: 95390 - protein, 12 aa, Homo sapiens
  CDR3 for beta chain variable domain of TCR clone 47695 (TRBV7-3, TRBJ2-3)
CASSSLTDTQYF

SEQ ID NO: 95391 - protein, 16 aa, Homo sapiens
  CDR3 for alpha chain variable domain of TCR clone 47696 (TRAV1-2, TRAJ10)
CAVRGVLTGGGNKLTF

SEQ ID NO: 95392 - protein, 14 aa, Homo sapiens
  CDR3 for beta chain variable domain of TCR clone 47696 (TRBV7-8, TRBJ2-7)
CASSPKTSFYEQYF

SEQ ID NO: 95393 - protein, 14 aa, Homo sapiens
  CDR3 for alpha chain variable domain of TCR clone 47697 (TRAV14/DV4, TRAJ57)
CAMREEGGSEKLVF

SEQ ID NO: 95394 - protein, 17 aa, Homo sapiens
  CDR3 for beta chain variable domain of TCR clone 47697 (TRBV10-3, TRBJ1-2)
SAISETRDRGLEYGYTF

SEQ ID NO: 95395 - protein, 14 aa, Homo sapiens
  CDR3 for alpha chain variable domain of TCR clone 47698 (TRAV2, TRAJ37)
CAVDFTSNTGKLIF

SEQ ID NO: 95396 - protein, 15 aa, Homo sapiens
  CDR3 for beta chain variable domain of TCR clone 47698 (TRBV20-1, TRBJ1-1)
CSASRVVTGNTEAFF

SEQ ID NO: 95397 - protein, 14 aa, Homo sapiens
  CDR3 for alpha chain variable domain of TCR clone 47699 (TRAV1-2, TRAJ16)
CAVNRFSDGQKLLF

SEQ ID NO: 95398 - protein, 17 aa, Homo sapiens
  CDR3 for beta chain variable domain of TCR clone 47699 (TRBV7-9, TRBJ1-6)
CASSSPGRGNSPSTLGT

SEQ ID NO: 95399 - protein, 13 aa, Homo sapiens
  CDR3 for alpha chain variable domain of TCR clone 47700 (TRAV27, TRAJ3)
ASLRGSSASKIIF

SEQ ID NO: 95400 - protein, 15 aa, Homo sapiens
  CDR3 for beta chain variable domain of TCR clone 47700 (TRBV28, TRBJ1-3)
CASSMGWDSGNTIYF

SEQ ID NO: 95401 - protein, 13 aa, Homo sapiens
  CDR3 for alpha chain variable domain of TCR clone 47701 (TRAV27, TRAJ3)
ASLRGSSASKIIF

SEQ ID NO: 95402 - protein, 16 aa, Homo sapiens
  CDR3 for beta chain variable domain of TCR clone 47701 (TRBV12-4, TRBJ1-3)
CASSPRTGRSGNTIYF

SEQ ID NO: 95403 - protein, 11 aa, Homo sapiens
  CDR3 for alpha chain variable domain of TCR clone 47702 (TRAV3, TRAJ21)
CAVGNFNKFYF

SEQ ID NO: 95404 - protein, 15 aa, Homo sapiens
  CDR3 for beta chain variable domain of TCR clone 47702 (TRBV29-1, TRBJ2-1)
CSVEGGPASYNEQTF

SEQ ID NO: 95405 - protein, 13 aa, Homo sapiens
  CDR3 for alpha chain variable domain of TCR clone 47703 (TRAV20, TRAJ40)
CAVPFSGTYKYIF

SEQ ID NO: 95406 - protein, 13 aa, Homo sapiens
  CDR3 for beta chain variable domain of TCR clone 47703 (TRBV15, TRBJ2-5)
CASSQIGEETQYF

SEQ ID NO: 95407 - protein, 13 aa, Homo sapiens
  CDR3 for alpha chain variable domain of TCR clone 47704 (TRAV13-1, TRAJ6)
CAARRGGSYIPTF

SEQ ID NO: 95408 - protein, 16 aa, Homo sapiens
  CDR3 for beta chain variable domain of TCR clone 47704 (TRBV7-9, TRBJ2-2)
CASILATGVGTGELFF

SEQ ID NO: 95409 - protein, 15 aa, Homo sapiens
  CDR3 for alpha chain variable domain of TCR clone 47705 (TRAV27, TRAJ38)
CASRRNAGNNRKLIW

SEQ ID NO: 95410 - protein, 13 aa, Homo sapiens
  CDR3 for beta chain variable domain of TCR clone 47705 (TRBV20-1, TRBJ1-1)
CSARAGGNTEAFF

SEQ ID NO: 95411 - protein, 18 aa, Homo sapiens
  CDR3 for alpha chain variable domain of TCR clone 47706 (TRAV26-1, TRAJ52)
CIVRVAGAGGTSYGKLTF

SEQ ID NO: 95412 - protein, 13 aa, Homo sapiens
  CDR3 for beta chain variable domain of TCR clone 47706 (TRBV7-8, TRBJ1-2)
CASGAQSYYGYTL

SEQ ID NO: 95413 - protein, 17 aa, Homo sapiens
  CDR3 for alpha chain variable domain of TCR clone 47707 (TRAV26-1, TRAJ58)
CIVRVGAEETSGSRLTV

SEQ ID NO: 95414 - protein, 18 aa, Homo sapiens
  CDR3 for beta chain variable domain of TCR clone 47707 (TRBV7-9, TRBJ2-7)
CASSLTTSGSRTWYEQYF

SEQ ID NO: 95415 - protein, 12 aa, Homo sapiens
  CDR3 for alpha chain variable domain of TCR clone 47708 (TRAV21, TRAJ11)
CAATSGYSTLTF

SEQ ID NO: 95416 - protein, 17 aa, Homo sapiens
  CDR3 for beta chain variable domain of TCR clone 47708 (TRBV25-1, TRBJ2-7)
CASSDARVVFSSYEQYF

SEQ ID NO: 95417 - protein, 15 aa, Homo sapiens
  CDR3 for alpha chain variable domain of TCR clone 47709 (TRAV17, TRAJ23)
CATDAEDNQGGKIIF

SEQ ID NO: 95418 - protein, 12 aa, Homo sapiens
  CDR3 for beta chain variable domain of TCR clone 47709 (TRBV2, TRBJ2-1)
CAKREGYNEQFF

SEQ ID NO: 95419 - protein, 14 aa, Homo sapiens
  CDR3 for alpha chain variable domain of TCR clone 47710 (TRAV6, TRAJ37)
CALGSQGNTGQLIF

SEQ ID NO: 95420 - protein, 15 aa, Homo sapiens
  CDR3 for beta chain variable domain of TCR clone 47710 (TRBV2, TRBJ2-1)
CASSEEREGDNEQFF

SEQ ID NO: 95421 - protein, 14 aa, Homo sapiens
  CDR3 for alpha chain variable domain of TCR clone 47711 (TRAV38-1, TRAJ40)
CALRPTSGTYKYIF

SEQ ID NO: 95422 - protein, 16 aa, Homo sapiens
  CDR3 for beta chain variable domain of TCR clone 47711 (TRBV6-1, TRBJ1-2)
CASSGAWKGRSHGYTF

SEQ ID NO: 95423 - protein, 12 aa, Homo sapiens
  CDR3 for alpha chain variable domain of TCR clone 47712 (TRAV12-3, TRAJ17)
CAMTLTGNKLTF

SEQ ID NO: 95424 - protein, 13 aa, Homo sapiens
  CDR3 for beta chain variable domain of TCR clone 47712 (TRBV27, TRBJ2-1)
CASRTPGVGEQFF

SEQ ID NO: 95425 - protein, 15 aa, Homo sapiens
  CDR3 for alpha chain variable domain of TCR clone 47713 (TRAV26-1, TRAJ40)
CIVRVTTSGSYKYIF

SEQ ID NO: 95426 - protein, 12 aa, Homo sapiens
  CDR3 for beta chain variable domain of TCR clone 47713 (TRBV7-9, TRBJ1-4)
CASSTDREKLFF

SEQ ID NO: 95427 - protein, 13 aa, Homo sapiens
  CDR3 for alpha chain variable domain of TCR clone 47714 (TRAV27, TRAJ6)
CAGGTRGSYIPTF

SEQ ID NO: 95428 - protein, 14 aa, Homo sapiens
  CDR3 for beta chain variable domain of TCR clone 47714 (TRBV7-6, TRBJ2-3)
CASSLGTVTDTQYF

SEQ ID NO: 95429 - protein, 18 aa, Homo sapiens
  CDR3 for alpha chain variable domain of TCR clone 47715 (TRAV21, TRAJ52)
CAVRPSPAGGTSYGKLTF

SEQ ID NO: 95430 - protein, 14 aa, Homo sapiens
  CDR3 for beta chain variable domain of TCR clone 47715 (TRBV4-2, TRBJ2-1)
CASGLDRAYNEQFL

SEQ ID NO: 95431 - protein, 16 aa, Homo sapiens
  CDR3 for alpha chain variable domain of TCR clone 47716 (TRAV12-2, TRAJ50)
CAVGTATKTSYDKVLF

SEQ ID NO: 95432 - protein, 12 aa, Homo sapiens
  CDR3 for beta chain variable domain of TCR clone 47716 (TRBV12-4, TRBJ1-5)
CASSLGRQPQHF

SEQ ID NO: 95433 - protein, 18 aa, Homo sapiens
  CDR3 for alpha chain variable domain of TCR clone 47717 (TRAV9-2, TRAJ52)
CALSRHNAGGTSYGKLTF

SEQ ID NO: 95434 - protein, 15 aa, Homo sapiens
  CDR3 for beta chain variable domain of TCR clone 47717 (TRBV11-3, TRBJ2-3)
CASLKDGREGDTQYF

SEQ ID NO: 95435 - protein, 12 aa, Homo sapiens
  CDR3 for alpha chain variable domain of TCR clone 47718 (TRAV13-1, TRAJ21)
CAAREGFNKFYF

SEQ ID NO: 95436 - protein, 15 aa, Homo sapiens
  CDR3 for beta chain variable domain of TCR clone 47718 (TRBV7-7, TRBJ2-5)
CASSQLERAEETQYF

SEQ ID NO: 95437 - protein, 16 aa, Homo sapiens
  CDR3 for alpha chain variable domain of TCR clone 47719 (TRAV3, TRAJ37)
CAVRGNGSGNTGKLIF

SEQ ID NO: 95438 - protein, 13 aa, Homo sapiens
  CDR3 for beta chain variable domain of TCR clone 47719 (TRBV14, TRBJ2-7)
CASSQDRRYEQYF

SEQ ID NO: 95439 - protein, 10 aa, Homo sapiens
  CDR3 for alpha chain variable domain of TCR clone 47720 (TRAV8-4, TRAJ43)
GAMKINDMRF

SEQ ID NO: 95440 - protein, 16 aa, Homo sapiens
  CDR3 for beta chain variable domain of TCR clone 47720 (TRBV5-7, TRBJ2-7)
CASSSPGGRTPYEQYF

SEQ ID NO: 95441 - protein, 13 aa, Homo sapiens
  CDR3 for alpha chain variable domain of TCR clone 47721 (TRAV17, TRAJ5)
CALRGTGRRALTF

SEQ ID NO: 95442 - protein, 17 aa, Homo sapiens
  CDR3 for beta chain variable domain of TCR clone 47721 (TRBV13, TRBJ2-3)
CASSLSRVAGGRNTQYF

SEQ ID NO: 95443 - protein, 13 aa, Homo sapiens
  CDR3 for alpha chain variable domain of TCR clone 47722 (TRAV17, TRAJ9)
CATGYTGGFKTIF

SEQ ID NO: 95444 - protein, 14 aa, Homo sapiens
  CDR3 for beta chain variable domain of TCR clone 47722 (TRBV19, TRBJ2-5)
CARSMTGQQETQYF

SEQ ID NO: 95445 - protein, 12 aa, Homo sapiens
  CDR3 for alpha chain variable domain of TCR clone 47723 (TRAV21, TRAJ56)
CAVGVNRSKLTF

SEQ ID NO: 95446 - protein, 14 aa, Homo sapiens
  CDR3 for beta chain variable domain of TCR clone 47723 (TRBV7-2, TRBJ2-7)
CASSPKTSFYEQYF

SEQ ID NO: 95447 - protein, 16 aa, Homo sapiens
  CDR3 for alpha chain variable domain of TCR clone 47724 (TRAV26-1, TRAJ45)
CIVEKYSGGGADGLTF

SEQ ID NO: 95448 - protein, 13 aa, Homo sapiens
  CDR3 for beta chain variable domain of TCR clone 47724 (TRBV12-4, TRBJ1-2)
CASSLRQGKGYTF

SEQ ID NO: 95449 - protein, 11 aa, Homo sapiens
  CDR3 for alpha chain variable domain of TCR clone 47725 (TRAV2, TRAJ33)
CAVDSNYQLIW

SEQ ID NO: 95450 - protein, 15 aa, Homo sapiens
  CDR3 for beta chain variable domain of TCR clone 47725 (TRBV7-9, TRBJ2-2)
CASGPLDTFPGELFF

SEQ ID NO: 95451 - protein, 14 aa, Homo sapiens
  CDR3 for alpha chain variable domain of TCR clone 47726 (TRAV2, TRAJ40)
CALRPTSGTYKYIF

SEQ ID NO: 95452 - protein, 14 aa, Homo sapiens
  CDR3 for beta chain variable domain of TCR clone 47726 (TRBV25-1, TRBJ1-1)
CASTPLGGNTEAFF

SEQ ID NO: 95453 - protein, 18 aa, Homo sapiens
  CDR3 for alpha chain variable domain of TCR clone 47727 (TRAV21, TRAJ53)
CAVKGGENRGGSNYKLTF

SEQ ID NO: 95454 - protein, 13 aa, Homo sapiens
  CDR3 for beta chain variable domain of TCR clone 47727 (TRBV9, TRBJ2-1)
CASSPSGGSEQFF

SEQ ID NO: 95455 - protein, 16 aa, Homo sapiens
  CDR3 for alpha chain variable domain of TCR clone 47728 (TRAV20, TRAJ22)
CAVQASSSGSARQLTF

SEQ ID NO: 95456 - protein, 16 aa, Homo sapiens
  CDR3 for beta chain variable domain of TCR clone 47728 (TRBV20-1, TRBJ1-5)
CSVSRGTGYSNQPQHF

SEQ ID NO: 95457 - protein, 14 aa, Homo sapiens
  CDR3 for alpha chain variable domain of TCR clone 47729 (TRAV38-1, TRAJ45)
CAYYSGGGADGLTF

SEQ ID NO: 95458 - protein, 14 aa, Homo sapiens
  CDR3 for beta chain variable domain of TCR clone 47729 (TRBV20-1, TRBJ1-1)
CSAQTRIGGTEAFF

SEQ ID NO: 95459 - protein, 12 aa, Homo sapiens
  CDR3 for alpha chain variable domain of TCR clone 47730 (TRAV21, TRAJ31)
CAVWGNNARLMF

SEQ ID NO: 95460 - protein, 14 aa, Homo sapiens
  CDR3 for beta chain variable domain of TCR clone 47730 (TRBV11-2, TRBJ2-5)
CASSRTGGIETQYF

SEQ ID NO: 95461 - protein, 15 aa, Homo sapiens
  CDR3 for alpha chain variable domain of TCR clone 47731 (TRAV3, TRAJ5)
CAVRDRTTGRRALTF

SEQ ID NO: 95462 - protein, 15 aa, Homo sapiens
  CDR3 for beta chain variable domain of TCR clone 47731 (TRBV7-8, TRBJ2-1)
CASSLADSLYNEQFF

SEQ ID NO: 95463 - protein, 13 aa, Homo sapiens
  CDR3 for alpha chain variable domain of TCR clone 47732 (TRAV2, TRAJ24)
CAVTTDSWAKLQF

SEQ ID NO: 95464 - protein, 14 aa, Homo sapiens
  CDR3 for beta chain variable domain of TCR clone 47732 (TRBV13, TRBJ2-5)
CASSLGRGQETQYF

SEQ ID NO: 95465 - protein, 14 aa, Homo sapiens
  CDR3 for alpha chain variable domain of TCR clone 47733 (TRAV1-2, TRAJ8)
CAVREDTGFQKLVF

SEQ ID NO: 95466 - protein, 14 aa, Homo sapiens
  CDR3 for beta chain variable domain of TCR clone 47733 (TRBV29-1, TRBJ2-3)
CRAGAGVGADTQYF

SEQ ID NO: 95467 - protein, 15 aa, Homo sapiens
  CDR3 for alpha chain variable domain of TCR clone 47734 (TRAV3, TRAJ5)
CAVIDRKTGRRALTF

SEQ ID NO: 95468 - protein, 15 aa, Homo sapiens
  CDR3 for beta chain variable domain of TCR clone 47734 (TRBV7-9, TRBJ2-2)
CASGPLDTFPGELFF

SEQ ID NO: 95469 - protein, 13 aa, Homo sapiens
  CDR3 for alpha chain variable domain of TCR clone 47735 (TRAV1-2, TRAJ34)
CAVRDRDTDKLIF

SEQ ID NO: 95470 - protein, 13 aa, Homo sapiens
  CDR3 for beta chain variable domain of TCR clone 47735 (TRBV29-1, TRBJ2-1)
CSVEGERVNEQFF

SEQ ID NO: 95471 - protein, 16 aa, Homo sapiens
  CDR3 for alpha chain variable domain of TCR clone 47736 (TRAV3, TRAJ10)
CAVRDMRAGGGNKLTF

SEQ ID NO: 95472 - protein, 15 aa, Homo sapiens
  CDR3 for beta chain variable domain of TCR clone 47736 (TRBV7-3, TRBJ2-1)
CASSPTGGGEVEQFF

SEQ ID NO: 95473 - protein, 14 aa, Homo sapiens
  CDR3 for alpha chain variable domain of TCR clone 47737 (TRAV12-2, TRAJ13)
CAVKKTGGYQKVTF

SEQ ID NO: 95474 - protein, 15 aa, Homo sapiens
  CDR3 for beta chain variable domain of TCR clone 47737 (TRBV27, TRBJ2-1)
CASSNGGESSNEQFL

SEQ ID NO: 95475 - protein, 13 aa, Homo sapiens
  CDR3 for alpha chain variable domain of TCR clone 47738 (TRAV21, TRAJ27)
CAARPGNAGKSTF

SEQ ID NO: 95476 - protein, 15 aa, Homo sapiens
  CDR3 for beta chain variable domain of TCR clone 47738 (TRBV6-3, TRBJ2-7)
CASSSPGTVFYEQYS

SEQ ID NO: 95477 - protein, 12 aa, Homo sapiens
  CDR3 for alpha chain variable domain of TCR clone 47739 (TRAV12-1, TRAJ6)
SVVSERSYIPTF

SEQ ID NO: 95478 - protein, 21 aa, Homo sapiens
  CDR3 for beta chain variable domain of TCR clone 47739 (TRBV7-3, TRBJ2-1)
GGTQPCISVPAAYGLAGAQFF

SEQ ID NO: 95479 - protein, 13 aa, Homo sapiens
  CDR3 for alpha chain variable domain of TCR clone 47740 (TRAV12-1, TRAJ9)
CVVLNTGGFKTIF

SEQ ID NO: 95480 - protein, 17 aa, Homo sapiens
  CDR3 for beta chain variable domain of TCR clone 47740 (TRBV13, TRBJ2-3)
CASSLSRVAGGRNTQYF

SEQ ID NO: 95481 - protein, 19 aa, Homo sapiens
  CDR3 for alpha chain variable domain of TCR clone 47741 (TRAV1-2, TRAJ26)
CLLPLCCERPDNYGQNFVF

SEQ ID NO: 95482 - protein, 16 aa, Homo sapiens
  CDR3 for beta chain variable domain of TCR clone 47741 (TRBV12-5, TRBJ2-5)
CASGPRTSGNQETQYF

SEQ ID NO: 95483 - protein, 14 aa, Homo sapiens
  CDR3 for alpha chain variable domain of TCR clone 47742 (TRAV12-3, TRAJ10)
SHLPLTGGGNKLTF

SEQ ID NO: 95484 - protein, 13 aa, Homo sapiens
  CDR3 for beta chain variable domain of TCR clone 47742 (TRBV19, TRBJ1-2)
CASSQGQVYGYTF

SEQ ID NO: 95485 - protein, 14 aa, Homo sapiens
  CDR3 for alpha chain variable domain of TCR clone 47743 (TRAV12-3, TRAJ10)
SHLPLTGGGNKLTF

SEQ ID NO: 95486 - protein, 18 aa, Homo sapiens
  CDR3 for beta chain variable domain of TCR clone 47743 (TRBV28, TRBJ2-1)
CASSSTSGRANSYNEQFF

SEQ ID NO: 95487 - protein, 11 aa, Homo sapiens
  CDR3 for alpha chain variable domain of TCR clone 47744 (TRAV3, TRAJ13)
CAATSYQKVTF

SEQ ID NO: 95488 - protein, 15 aa, Homo sapiens
  CDR3 for beta chain variable domain of TCR clone 47744 (TRBV7-9, TRBJ2-7)
CASSSSGLAVYEQYF

SEQ ID NO: 95489 - protein, 14 aa, Homo sapiens
  CDR3 for alpha chain variable domain of TCR clone 47745 (TRAV29/DV5, TRAJ32)
CAAAYGGATNKPIF

SEQ ID NO: 95490 - protein, 11 aa, Homo sapiens
  CDR3 for beta chain variable domain of TCR clone 47745 (TRBV11-2, TRBJ2-2)
CASSLPGELFF

SEQ ID NO: 95491 - protein, 15 aa, Homo sapiens
  CDR3 for alpha chain variable domain of TCR clone 47746 (TRAV25, TRAJ53)
CAATGGGGSNYKLTF

SEQ ID NO: 95492 - protein, 19 aa, Homo sapiens
  CDR3 for beta chain variable domain of TCR clone 47746 (TRBV7-2, TRBJ2-3)
CASSCLSRNWGGGTDTQYF

SEQ ID NO: 95493 - protein, 16 aa, Homo sapiens
  CDR3 for alpha chain variable domain of TCR clone 47747 (TRAV12-2, TRAJ10)
CAVNRVLTGGGNKLTF

SEQ ID NO: 95494 - protein, 15 aa, Homo sapiens
  CDR3 for beta chain variable domain of TCR clone 47747 (TRBV4-1, TRBJ2-7)
CASSQQGQGFDEQYF

SEQ ID NO: 95495 - protein, 14 aa, Homo sapiens
  CDR3 for alpha chain variable domain of TCR clone 47748 (TRAV12-2, TRAJ13)
CAVQKTGGYQKVTF

SEQ ID NO: 95496 - protein, 13 aa, Homo sapiens
  CDR3 for beta chain variable domain of TCR clone 47748 (TRBV10-3, TRBJ2-7)
CASKLAVNYEQYF

SEQ ID NO: 95497 - protein, 14 aa, Homo sapiens
  CDR3 for alpha chain variable domain of TCR clone 47749 (TRAV13-1, TRAJ53)
CATSTGGSNYKLTL

SEQ ID NO: 95498 - protein, 14 aa, Homo sapiens
  CDR3 for beta chain variable domain of TCR clone 47749 (TRBV5-4, TRBJ1-4)
CASSFSGGAEKLFF

SEQ ID NO: 95499 - protein, 12 aa, Homo sapiens
  CDR3 for alpha chain variable domain of TCR clone 47750 (TRAV13-1, TRAJ21)
CAAKDGFNKFYF

SEQ ID NO: 95500 - protein, 15 aa, Homo sapiens
  CDR3 for beta chain variable domain of TCR clone 47750 (TRBV25-1, TRBJ1-4)
CASSPGDSTNEKLFF

SEQ ID NO: 95501 - protein, 17 aa, Homo sapiens
  CDR3 for alpha chain variable domain of TCR clone 47751 (TRAV36/DV7, TRAJ52)
CAVAQRAGSTSYGKLTF

SEQ ID NO: 95502 - protein, 17 aa, Homo sapiens
  CDR3 for beta chain variable domain of TCR clone 47751 (TRBV13, TRBJ2-3)
CASSLSRVAGGRNTQYF

SEQ ID NO: 95503 - protein, 12 aa, Homo sapiens
  CDR3 for alpha chain variable domain of TCR clone 47752 (TRAV3, TRAJ31)
CAVRDGNARLMF

SEQ ID NO: 95504 - protein, 14 aa, Homo sapiens
  CDR3 for beta chain variable domain of TCR clone 47752 (TRBV6-3, TRBJ1-1)
CASSYGGQHIEAFF

SEQ ID NO: 95505 - protein, 12 aa, Homo sapiens
  CDR3 for alpha chain variable domain of TCR clone 47753 (TRAV12-2, TRAJ20)
CAVRPSDYKLSF

SEQ ID NO: 95506 - protein, 18 aa, Homo sapiens
  CDR3 for beta chain variable domain of TCR clone 47753 (TRBV4-2, TRBJ2-7)
CASSPGLAGRSLSYEQYF

SEQ ID NO: 95507 - protein, 16 aa, Homo sapiens
  CDR3 for alpha chain variable domain of TCR clone 47754 (TRAV17, TRAJ28)
CANASVSGAGSYQLTF

SEQ ID NO: 95508 - protein, 11 aa, Homo sapiens
  CDR3 for beta chain variable domain of TCR clone 47754 (TRBV7-9, TRBJ2-5)
CASSLGETQYF

SEQ ID NO: 95509 - protein, 14 aa, Homo sapiens
  CDR3 for alpha chain variable domain of TCR clone 47755 (TRAV29/DV5, TRAJ45)
CAASFRGGADGLTF

SEQ ID NO: 95510 - protein, 11 aa, Homo sapiens
  CDR3 for beta chain variable domain of TCR clone 47755 (TRBV11-2, TRBJ1-1)
CASSINTEAFF

SEQ ID NO: 95511 - protein, 11 aa, Homo sapiens
  CDR3 for alpha chain variable domain of TCR clone 47756 (TRAV35, TRAJ34)
CWARNTDKLIF

SEQ ID NO: 95512 - protein, 13 aa, Homo sapiens
  CDR3 for beta chain variable domain of TCR clone 47756 (TRBV4-2, TRBJ1-1)
CASSQAGNTEAFF

SEQ ID NO: 95513 - protein, 13 aa, Homo sapiens
  CDR3 for alpha chain variable domain of TCR clone 47757 (TRAV27, TRAJ45)
CRSSGGGADGLTF

SEQ ID NO: 95514 - protein, 17 aa, Homo sapiens
  CDR3 for beta chain variable domain of TCR clone 47757 (TRBV11-2, TRBJ2-1)
CASSLYPPGVEYNEQYF

SEQ ID NO: 95515 - protein, 15 aa, Homo sapiens
  CDR3 for alpha chain variable domain of TCR clone 47758 (TRAV34, TRAJ38)
CGEDFTPGNNRKLIW

SEQ ID NO: 95516 - protein, 16 aa, Homo sapiens
  CDR3 for beta chain variable domain of TCR clone 47758 (TRBV12-5, TRBJ2-5)
CASGPRTSGNQETQYF

SEQ ID NO: 95517 - protein, 11 aa, Homo sapiens
  CDR3 for alpha chain variable domain of TCR clone 47759 (TRAV12-2, TRAJ33)
CAVESNYQLIW

SEQ ID NO: 95518 - protein, 14 aa, Homo sapiens
  CDR3 for beta chain variable domain of TCR clone 47759 (TRBV6-1, TRBJ2-2)
CASVEHIESGELFF

SEQ ID NO: 95519 - protein, 12 aa, Homo sapiens
  CDR3 for alpha chain variable domain of TCR clone 47760 (TRAV20, TRAJ39)
CAVGNAGNMLTF

SEQ ID NO: 95520 - protein, 13 aa, Homo sapiens
  CDR3 for beta chain variable domain of TCR clone 47760 (TRBV7-9, TRBJ1-2)
CASSLKQNYGYTF

SEQ ID NO: 95521 - protein, 12 aa, Homo sapiens
  CDR3 for alpha chain variable domain of TCR clone 47761 (TRAV16, TRAJ9)
CALRAGGSKTIF

SEQ ID NO: 95522 - protein, 13 aa, Homo sapiens
  CDR3 for beta chain variable domain of TCR clone 47761 (TRBV4-3, TRBJ1-1)
CASSQVEGSMAFF

SEQ ID NO: 95523 - protein, 14 aa, Homo sapiens
  CDR3 for alpha chain variable domain of TCR clone 47762 (TRAV17, TRAJ11)
CATDTSRGYSTLTF

SEQ ID NO: 95524 - protein, 13 aa, Homo sapiens
  CDR3 for beta chain variable domain of TCR clone 47762 (TRBV19, TRBJ2-5)
CASRDSRRENQYF

SEQ ID NO: 95525 - protein, 14 aa, Homo sapiens
  CDR3 for alpha chain variable domain of TCR clone 47763 (TRAV12-3, TRAJ12)
CAMSEVDSSYKLIF

SEQ ID NO: 95526 - protein, 13 aa, Homo sapiens
  CDR3 for beta chain variable domain of TCR clone 47763 (TRBV6-6, TRBJ1-5)
CASRAYQDQPQHF

SEQ ID NO: 95527 - protein, 13 aa, Homo sapiens
  CDR3 for alpha chain variable domain of TCR clone 47764 (TRAV8-3, TRAJ43)
CAVGPGNNNDMRF

SEQ ID NO: 95528 - protein, 12 aa, Homo sapiens
  CDR3 for beta chain variable domain of TCR clone 47764 (TRBV7-2, TRBJ1-6)
CASSLSSSPLHF

SEQ ID NO: 95529 - protein, 13 aa, Homo sapiens
  CDR3 for alpha chain variable domain of TCR clone 47765 (TRAV12-1, TRAJ26)
CVVSRNYGQNFVF

SEQ ID NO: 95530 - protein, 15 aa, Homo sapiens
  CDR3 for beta chain variable domain of TCR clone 47765 (TRBV28, TRBJ2-1)
CASSIIAGGRSEQFF

SEQ ID NO: 95531 - protein, 14 aa, Homo sapiens
  CDR3 for alpha chain variable domain of TCR clone 47766 (TRAV8-2, TRAJ4)
CVVSPSGGYNKLIF

SEQ ID NO: 95532 - protein, 15 aa, Homo sapiens
  CDR3 for beta chain variable domain of TCR clone 47766 (TRBV6-1, TRBJ2-3)
CASSERGGITDTQYF

SEQ ID NO: 95533 - protein, 14 aa, Homo sapiens
  CDR3 for alpha chain variable domain of TCR clone 47767 (TRAV8-3, TRAJ30)
CAVGGMNRDDKIIF

SEQ ID NO: 95534 - protein, 17 aa, Homo sapiens
  CDR3 for beta chain variable domain of TCR clone 47767 (TRBV19, TRBJ2-2)
CASSRNPGGFGTGELFF

SEQ ID NO: 95535 - protein, 14 aa, Homo sapiens
  CDR3 for alpha chain variable domain of TCR clone 47768 (TRAV17, TRAJ37)
CATDGSSNTGKLIF

SEQ ID NO: 95536 - protein, 14 aa, Homo sapiens
  CDR3 for beta chain variable domain of TCR clone 47768 (TRBV25-1, TRBJ1-1)
CASTHLGGNTEAFF

SEQ ID NO: 95537 - protein, 15 aa, Homo sapiens
  CDR3 for alpha chain variable domain of TCR clone 47769 (TRAV8-4, TRAJ6)
CAVTHASGGSYIPTS

SEQ ID NO: 95538 - protein, 15 aa, Homo sapiens
  CDR3 for beta chain variable domain of TCR clone 47769 (TRBV7-2, TRBJ2-3)
CASSLNGGGTDTQYF

SEQ ID NO: 95539 - protein, 12 aa, Homo sapiens
  CDR3 for alpha chain variable domain of TCR clone 47770 (TRAV21, TRAJ23)
CAVMLQGGKLIF

SEQ ID NO: 95540 - protein, 14 aa, Homo sapiens
  CDR3 for beta chain variable domain of TCR clone 47770 (TRBV7-9, TRBJ1-4)
CAITEGGANEKLFF

SEQ ID NO: 95541 - protein, 16 aa, Homo sapiens
  CDR3 for alpha chain variable domain of TCR clone 47771 (TRAV3, TRAJ5)
CAVRNLMDTGRSALTF

SEQ ID NO: 95542 - protein, 16 aa, Homo sapiens
  CDR3 for beta chain variable domain of TCR clone 47771 (TRBV4-2, TRBJ2-7)
CASSQEGLANSYEQYF

SEQ ID NO: 95543 - protein, 18 aa, Homo sapiens
  CDR3 for alpha chain variable domain of TCR clone 47772 (TRAV1-2, TRAJ18)
CAVRDMGDRGSTLGRLYF

SEQ ID NO: 95544 - protein, 13 aa, Homo sapiens
  CDR3 for beta chain variable domain of TCR clone 47772 (TRBV7-9, TRBJ2-3)
CASSPGSTDTQYF

SEQ ID NO: 95545 - protein, 16 aa, Homo sapiens
  CDR3 for alpha chain variable domain of TCR clone 47773 (TRAV4, TRAJ22)
CLVGDLSSGSARQLTF

SEQ ID NO: 95546 - protein, 16 aa, Homo sapiens
  CDR3 for beta chain variable domain of TCR clone 47773 (TRBV7-9, TRBJ2-1)
CASSDVAGGSYNEQFF

SEQ ID NO: 95547 - protein, 17 aa, Homo sapiens
  CDR3 for alpha chain variable domain of TCR clone 47774 (TRAV3, TRAJ28)
CAVREAYSGAGSYQLTF

SEQ ID NO: 95548 - protein, 16 aa, Homo sapiens
  CDR3 for beta chain variable domain of TCR clone 47774 (TRBV19, TRBJ2-1)
CASSKAGPSSYNEQFF

SEQ ID NO: 95549 - protein, 12 aa, Homo sapiens
  CDR3 for alpha chain variable domain of TCR clone 47775 (TRAV17, TRAJ53)
CATEGSNYKLTF

SEQ ID NO: 95550 - protein, 19 aa, Homo sapiens
  CDR3 for beta chain variable domain of TCR clone 47775 (TRBV5-1, TRBJ2-3)
CASGLWTSGGITTPDTQYF

SEQ ID NO: 95551 - protein, 15 aa, Homo sapiens
  CDR3 for alpha chain variable domain of TCR clone 47776 (TRAV1-2, TRAJ26)
CAVSDLITMVRILSL

SEQ ID NO: 95552 - protein, 15 aa, Homo sapiens
  CDR3 for beta chain variable domain of TCR clone 47776 (TRBV9, TRBJ1-6)
CAGSVAGTGDSPLHF

SEQ ID NO: 95553 - protein, 14 aa, Homo sapiens
  CDR3 for alpha chain variable domain of TCR clone 47777 (TRAV9-2, TRAJ39)
CALYIYNAGNMLTF

SEQ ID NO: 95554 - protein, 15 aa, Homo sapiens
  CDR3 for beta chain variable domain of TCR clone 47777 (TRBV15, TRBJ1-4)
CATSRDMGSYEKLFF

SEQ ID NO: 95555 - protein, 20 aa, Homo sapiens
  CDR3 for alpha chain variable domain of TCR clone 47778 (TRAV14/DV4, TRAJ22)
CAMREVITLISSGSARQLTF

SEQ ID NO: 95556 - protein, 15 aa, Homo sapiens
  CDR3 for beta chain variable domain of TCR clone 47778 (TRBV9, TRBJ1-5)
CASSVAGGANQPQHF

SEQ ID NO: 95557 - protein, 13 aa, Homo sapiens
  CDR3 for alpha chain variable domain of TCR clone 47779 (TRAV8-3, TRAJ28)
CAVGAVGSYQLTF

SEQ ID NO: 95558 - protein, 14 aa, Homo sapiens
  CDR3 for beta chain variable domain of TCR clone 47779 (TRBV7-2, TRBJ2-7)
CASRSQGAAYEQNF

SEQ ID NO: 95559 - protein, 14 aa, Homo sapiens
  CDR3 for alpha chain variable domain of TCR clone 47780 (TRAV13-2, TRAJ43)
CAEVPTYNNNDMRF

SEQ ID NO: 95560 - protein, 15 aa, Homo sapiens
  CDR3 for beta chain variable domain of TCR clone 47780 (TRBV7-9, TRBJ2-2)
CACGPLDTFPGELFF

SEQ ID NO: 95561 - protein, 16 aa, Homo sapiens
  CDR3 for alpha chain variable domain of TCR clone 47781 (TRAV3, TRAJ23)
CAVEPLIYNQGGKLIF

SEQ ID NO: 95562 - protein, 14 aa, Homo sapiens
  CDR3 for beta chain variable domain of TCR clone 47781 (TRBV7-2, TRBJ2-7)
CASRSQGAAYEQYF

SEQ ID NO: 95563 - protein, 12 aa, Homo sapiens
  CDR3 for alpha chain variable domain of TCR clone 47782 (TRAV2, TRAJ34)
CAVERDTDKLIF

SEQ ID NO: 95564 - protein, 14 aa, Homo sapiens
  CDR3 for beta chain variable domain of TCR clone 47782 (TRBV7-9, TRBJ2-1)
CASSDNSGYNEQFF

SEQ ID NO: 95565 - protein, 14 aa, Homo sapiens
  CDR3 for alpha chain variable domain of TCR clone 47783 (TRAV12-3, TRAJ9)
CAMSPNTGGFKTIF

SEQ ID NO: 95566 - protein, 12 aa, Homo sapiens
  CDR3 for beta chain variable domain of TCR clone 47783 (TRBV19, TRBJ1-5)
CASSRAQQPQHF

SEQ ID NO: 95567 - protein, 15 aa, Homo sapiens
  CDR3 for alpha chain variable domain of TCR clone 47784 (TRAV12-1, TRAJ41)
CVVNSRTGSGYALNF

SEQ ID NO: 95568 - protein, 11 aa, Homo sapiens
  CDR3 for beta chain variable domain of TCR clone 47784 (TRBV6-4, TRBJ2-1)
CASSDSYARFF

SEQ ID NO: 95569 - protein, 12 aa, Homo sapiens
  CDR3 for alpha chain variable domain of TCR clone 47785 (TRAV29/DV5, TRAJ15)
CASNQAGTALIF

SEQ ID NO: 95570 - protein, 15 aa, Homo sapiens
  CDR3 for beta chain variable domain of TCR clone 47785 (TRBV11-2, TRBJ2-2)
CASSSDRVNAGEPFF

SEQ ID NO: 95571 - protein, 16 aa, Homo sapiens
  CDR3 for alpha chain variable domain of TCR clone 47786 (TRAV26-1, TRAJ37)
CIYARHGSSNTGKLIF

SEQ ID NO: 95572 - protein, 15 aa, Homo sapiens
  CDR3 for beta chain variable domain of TCR clone 47786 (TRBV29-1, TRBJ2-1)
CSGRDRKSSYNEQFF

SEQ ID NO: 95573 - protein, 12 aa, Homo sapiens
  CDR3 for alpha chain variable domain of TCR clone 47787 (TRAV13-2, TRAJ23)
CAERHRGGKLIF

SEQ ID NO: 95574 - protein, 13 aa, Homo sapiens
  CDR3 for beta chain variable domain of TCR clone 47787 (TRBV19, TRBJ1-3)
CASRLSLGNTIYF

SEQ ID NO: 95575 - protein, 14 aa, Homo sapiens
  CDR3 for alpha chain variable domain of TCR clone 47788 (TRAV12-2, TRAJ13)
CAVKKAGGYQKVTF

SEQ ID NO: 95576 - protein, 14 aa, Homo sapiens
  CDR3 for beta chain variable domain of TCR clone 47788 (TRBV5-1, TRBJ2-5)
CASSLAGKQETQYF

SEQ ID NO: 95577 - protein, 13 aa, Homo sapiens
  CDR3 for alpha chain variable domain of TCR clone 47789 (TRAV6, TRAJ45)
SPFSGGGADGLTF

SEQ ID NO: 95578 - protein, 14 aa, Homo sapiens
  CDR3 for beta chain variable domain of TCR clone 47789 (TRBV7-2, TRBJ2-7)
CASSPKTSFYEQYF

SEQ ID NO: 95579 - protein, 14 aa, Homo sapiens
  CDR3 for alpha chain variable domain of TCR clone 47790 (TRAV3, TRAJ17)
CAVRDAAAGNKLNF

SEQ ID NO: 95580 - protein, 13 aa, Homo sapiens
  CDR3 for beta chain variable domain of TCR clone 47790 (TRBV2, TRBJ1-1)
CASSVSGYTEAFF

SEQ ID NO: 95581 - protein, 14 aa, Homo sapiens
  CDR3 for alpha chain variable domain of TCR clone 47791 (TRAV26-1, TRAJ49)
CIVRLTNTGNQFYF

SEQ ID NO: 95582 - protein, 13 aa, Homo sapiens
  CDR3 for beta chain variable domain of TCR clone 47791 (TRBV4-1, TRBJ2-7)
CASSQGQDYEQYF

SEQ ID NO: 95583 - protein, 12 aa, Homo sapiens
  CDR3 for alpha chain variable domain of TCR clone 47792 (TRAV12-3, TRAJ17)
CAMTLTGNKLTF

SEQ ID NO: 95584 - protein, 15 aa, Homo sapiens
  CDR3 for beta chain variable domain of TCR clone 47792 (TRBV27, TRBJ2-5)
CASSLYPRGGETQYF

SEQ ID NO: 95585 - protein, 15 aa, Homo sapiens
  CDR3 for alpha chain variable domain of TCR clone 47793 (TRAV8-3, TRAJ11)
CAVGLLNSGYSTLTF

SEQ ID NO: 95586 - protein, 11 aa, Homo sapiens
  CDR3 for beta chain variable domain of TCR clone 47793 (TRBV11-2, TRBJ2-2)
CASSLPGELFF

SEQ ID NO: 95587 - protein, 14 aa, Homo sapiens
  CDR3 for alpha chain variable domain of TCR clone 47794 (TRAV1-2, TRAJ16)
CAVNRFSDGQKLLF

SEQ ID NO: 95588 - protein, 15 aa, Homo sapiens
  CDR3 for beta chain variable domain of TCR clone 47794 (TRBV11-1, TRBJ2-7)
CASSLNYGASYEQYF

SEQ ID NO: 95589 - protein, 14 aa, Homo sapiens
  CDR3 for alpha chain variable domain of TCR clone 47795 (TRAV2, TRAJ37)
CAVDFTSNTDKLIF

SEQ ID NO: 95590 - protein, 13 aa, Homo sapiens
  CDR3 for beta chain variable domain of TCR clone 47795 (TRBV20-1, TRBJ1-1)
CSAPLGGGTEAFF

SEQ ID NO: 95591 - protein, 17 aa, Homo sapiens
  CDR3 for alpha chain variable domain of TCR clone 47796 (TRAV3, TRAJ12)
CAVRDGGGMDSSYKLIF

SEQ ID NO: 95592 - protein, 16 aa, Homo sapiens
  CDR3 for beta chain variable domain of TCR clone 47796 (TRBV9, TRBJ2-2)
CASSAMGKGNTGELFF

SEQ ID NO: 95593 - protein, 23 aa, Homo sapiens
  CDR3 for alpha chain variable domain of TCR clone 47797 (TRAV8-3, TRAJ6)
CAVGAEHQEEATYLHLEEEPALF

SEQ ID NO: 95594 - protein, 14 aa, Homo sapiens
  CDR3 for beta chain variable domain of TCR clone 47797 (TRBV6-6, TRBJ2-7)
CASSDSGAGYEQYF

SEQ ID NO: 95595 - protein, 16 aa, Homo sapiens
  CDR3 for alpha chain variable domain of TCR clone 47798 (TRAV30, TRAJ24)
CGTEIVDADSWGKFQL

SEQ ID NO: 95596 - protein, 15 aa, Homo sapiens
  CDR3 for beta chain variable domain of TCR clone 47798 (TRBV28, TRBJ2-1)
CASSIIAGGRSEQFF

SEQ ID NO: 95597 - protein, 16 aa, Homo sapiens
  CDR3 for alpha chain variable domain of TCR clone 47799 (TRAV4, TRAJ18)
CCVLLIGGSTLGRLYF

SEQ ID NO: 95598 - protein, 15 aa, Homo sapiens
  CDR3 for beta chain variable domain of TCR clone 47799 (TRBV19, TRBJ2-7)
CASSPAGSGEALRYF

SEQ ID NO: 95599 - protein, 13 aa, Homo sapiens
  CDR3 for alpha chain variable domain of TCR clone 47800 (TRAV4, TRAJ42)
CLVGGGSQGNLIF

SEQ ID NO: 95600 - protein, 13 aa, Homo sapiens
  CDR3 for beta chain variable domain of TCR clone 47800 (TRBV7-2, TRBJ1-1)
CASNLKGAKVAFF

SEQ ID NO: 95601 - protein, 14 aa, Homo sapiens
  CDR3 for alpha chain variable domain of TCR clone 47801 (TRAV13-2, TRAJ17)
CSENSKAAGNKLTF

SEQ ID NO: 95602 - protein, 11 aa, Homo sapiens
  CDR3 for beta chain variable domain of TCR clone 47801 (TRBV6-3, TRBJ2-3)
CATGQADTQYF

SEQ ID NO: 95603 - protein, 14 aa, Homo sapiens
  CDR3 for alpha chain variable domain of TCR clone 47802 (TRAV26-1, TRAJ21)
CIVRPPYNFNKFYF

SEQ ID NO: 95604 - protein, 15 aa, Homo sapiens
  CDR3 for beta chain variable domain of TCR clone 47802 (TRBV7-2, TRBJ2-1)
CASTHGTGIYNEQFF

SEQ ID NO: 95605 - protein, 14 aa, Homo sapiens
  CDR3 for alpha chain variable domain of TCR clone 47803 (TRAV12-3, TRAJ54)
CAMRGIQGAQKLVF

SEQ ID NO: 95606 - protein, 20 aa, Homo sapiens
  CDR3 for beta chain variable domain of TCR clone 47803 (TRBV4-3, TRBJ2-4)
CASSQGRWTGGLRSLNIQYF

SEQ ID NO: 95607 - protein, 14 aa, Homo sapiens
  CDR3 for alpha chain variable domain of TCR clone 47804 (TRAV27, TRAJ38)
CAGDRAGNNRKLIW

SEQ ID NO: 95608 - protein, 12 aa, Homo sapiens
  CDR3 for beta chain variable domain of TCR clone 47804 (TRBV2, TRBJ2-7)
CASSDPDYEQYF

SEQ ID NO: 95609 - protein, 11 aa, Homo sapiens
  CDR3 for alpha chain variable domain of TCR clone 47805 (TRAV23/DV6, TRAJ43)
CAASWNNDMHF

SEQ ID NO: 95610 - protein, 14 aa, Homo sapiens
  CDR3 for beta chain variable domain of TCR clone 47805 (TRBV11-2, TRBJ1-2)
CASSLGTANYGYTF

SEQ ID NO: 95611 - protein, 16 aa, Homo sapiens
  CDR3 for alpha chain variable domain of TCR clone 47806 (TRAV3, TRAJ10)
RAVRDMRAGGGNKLTF

SEQ ID NO: 95612 - protein, 17 aa, Homo sapiens
  CDR3 for beta chain variable domain of TCR clone 47806 (TRBV28, TRBJ2-5)
CASSTPEGDALQETQYF

SEQ ID NO: 95613 - protein, 14 aa, Homo sapiens
  CDR3 for alpha chain variable domain of TCR clone 47807 (TRAV12-2, TRAJ17)
CAVLFKAAGNKLTF

SEQ ID NO: 95614 - protein, 16 aa, Homo sapiens
  CDR3 for beta chain variable domain of TCR clone 47807 (TRBV7-9, TRBJ2-5)
CASSPSGQGVKGTQYF

SEQ ID NO: 95615 - protein, 12 aa, Homo sapiens
  CDR3 for alpha chain variable domain of TCR clone 47808 (TRAV12-3, TRAJ17)
CAMTLTGNKLTF

SEQ ID NO: 95616 - protein, 13 aa, Homo sapiens
  CDR3 for beta chain variable domain of TCR clone 47808 (TRBV7-3, TRBJ1-1)
CASSQDWGAEAVF

SEQ ID NO: 95617 - protein, 14 aa, Homo sapiens
  CDR3 for alpha chain variable domain of TCR clone 47809 (TRAV26-1, TRAJ22)
CIVSVYGSARQLTF

SEQ ID NO: 95618 - protein, 17 aa, Homo sapiens
  CDR3 for beta chain variable domain of TCR clone 47809 (TRBV7-3, TRBJ2-3)
CASSPGGLAGFGDTQYF

SEQ ID NO: 95619 - protein, 12 aa, Homo sapiens
  CDR3 for alpha chain variable domain of TCR clone 47810 (TRAV29/DV5, TRAJ49)
CAATDTGNQFYF

SEQ ID NO: 95620 - protein, 12 aa, Homo sapiens
  CDR3 for beta chain variable domain of TCR clone 47810 (TRBV12-4, TRBJ2-7)
CANSLGGYEQYF

SEQ ID NO: 95621 - protein, 13 aa, Homo sapiens
  CDR3 for alpha chain variable domain of TCR clone 47811 (TRAV8-3, TRAJ44)
CAVVPGTASKLTF

SEQ ID NO: 95622 - protein, 14 aa, Homo sapiens
  CDR3 for beta chain variable domain of TCR clone 47811 (TRBV11-2, TRBJ2-3)
CASSRLARADTQYF

SEQ ID NO: 95623 - protein, 14 aa, Homo sapiens
  CDR3 for alpha chain variable domain of TCR clone 47812 (TRAV17, TRAJ22)
GATSPSGSARQLTF

SEQ ID NO: 95624 - protein, 15 aa, Homo sapiens
  CDR3 for beta chain variable domain of TCR clone 47812 (TRBV4-1, TRBJ2-5)
CASSQWDLYQETQYF

SEQ ID NO: 95625 - protein, 14 aa, Homo sapiens
  CDR3 for alpha chain variable domain of TCR clone 47813 (TRAV13-1, TRAJ44)
CAAKATGTASKLTL

SEQ ID NO: 95626 - protein, 17 aa, Homo sapiens
  CDR3 for beta chain variable domain of TCR clone 47813 (TRBV7-3, TRBJ2-3)
CASSLMKRMRGADTQYF

SEQ ID NO: 95627 - protein, 16 aa, Homo sapiens
  CDR3 for alpha chain variable domain of TCR clone 47814 (TRAV16, TRAJ4)
CALSRMFSGGYNKLIF

SEQ ID NO: 95628 - protein, 16 aa, Homo sapiens
  CDR3 for beta chain variable domain of TCR clone 47814 (TRBV24-1, TRBJ2-3)
CATSDPGTEATDTQYF

SEQ ID NO: 95629 - protein, 15 aa, Homo sapiens
  CDR3 for alpha chain variable domain of TCR clone 47815 (TRAV12-2, TRAJ43)
CAFDMRFGAGTRLTV

SEQ ID NO: 95630 - protein, 18 aa, Homo sapiens
  CDR3 for beta chain variable domain of TCR clone 47815 (TRBV20-1, TRBJ2-3)
RSASGLAGGPGTTDTQYF

SEQ ID NO: 95631 - protein, 14 aa, Homo sapiens
  CDR3 for alpha chain variable domain of TCR clone 47816 (TRAV1-2, TRAJ16)
CAVNRFSDGQKLLF

SEQ ID NO: 95632 - protein, 15 aa, Homo sapiens
  CDR3 for beta chain variable domain of TCR clone 47816 (TRBV4-1, TRBJ2-1)
CASSQAAGGNNEQFF

SEQ ID NO: 95633 - protein, 17 aa, Homo sapiens
  CDR3 for alpha chain variable domain of TCR clone 47817 (TRAV8-3, TRAJ42)
CAVGKGNYGGSQGNLIF

SEQ ID NO: 95634 - protein, 12 aa, Homo sapiens
  CDR3 for beta chain variable domain of TCR clone 47817 (TRBV7-9, TRBJ1-1)
CASSLEGTEAFF

SEQ ID NO: 95635 - protein, 16 aa, Homo sapiens
  CDR3 for alpha chain variable domain of TCR clone 47818 (TRAV12-3, TRAJ53)
CAMSPGSGGSNYKLTF

SEQ ID NO: 95636 - protein, 15 aa, Homo sapiens
  CDR3 for beta chain variable domain of TCR clone 47818 (TRBV10-2, TRBJ2-6)
CASSEQGTGANVLTF

SEQ ID NO: 95637 - protein, 14 aa, Homo sapiens
  CDR3 for alpha chain variable domain of TCR clone 47819 (TRAV25, TRAJ23)
CAGQGDNQGGKLIL

SEQ ID NO: 95638 - protein, 12 aa, Homo sapiens
  CDR3 for beta chain variable domain of TCR clone 47819 (TRBV7-9, TRBJ1-1)
CASSLVRGEAFF

SEQ ID NO: 95639 - protein, 12 aa, Homo sapiens
  CDR3 for alpha chain variable domain of TCR clone 47820 (TRAV21, TRAJ31)
CAVSPARGRIMF

SEQ ID NO: 95640 - protein, 14 aa, Homo sapiens
  CDR3 for beta chain variable domain of TCR clone 47820 (TRBV28, TRBJ2-7)
CASSLLRISYEQYF

SEQ ID NO: 95641 - protein, 13 aa, Homo sapiens
  CDR3 for alpha chain variable domain of TCR clone 47821 (TRAV3, TRAJ15)
CAVRDQAGTALIF

SEQ ID NO: 95642 - protein, 15 aa, Homo sapiens
  CDR3 for beta chain variable domain of TCR clone 47821 (TRBV11-1, TRBJ2-7)
CASSLNYRASYEQYF

SEQ ID NO: 95643 - protein, 17 aa, Homo sapiens
  CDR3 for alpha chain variable domain of TCR clone 47822 (TRAV13-1, TRAJ52)
CAASSGAGGTSYGKLTF

SEQ ID NO: 95644 - protein, 15 aa, Homo sapiens
  CDR3 for beta chain variable domain of TCR clone 47822 (TRBV2, TRBJ2-1)
CASSELAGSHNEQFF

SEQ ID NO: 95645 - protein, 14 aa, Homo sapiens
  CDR3 for alpha chain variable domain of TCR clone 47823 (TRAV8-3, TRAJ15)
CAVGRHQAGTALIF

SEQ ID NO: 95646 - protein, 13 aa, Homo sapiens
  CDR3 for beta chain variable domain of TCR clone 47823 (TRBV9, TRBJ2-7)
CASSASDYYEQYF

SEQ ID NO: 95647 - protein, 12 aa, Homo sapiens
  CDR3 for alpha chain variable domain of TCR clone 47824 (TRAV9-2, TRAJ36)
CALKKGANNLFF

SEQ ID NO: 95648 - protein, 17 aa, Homo sapiens
  CDR3 for beta chain variable domain of TCR clone 47824 (TRBV20-1, TRBJ1-5)
CSAREIPQCVGNQPQHF

SEQ ID NO: 95649 - protein, 23 aa, Homo sapiens
  CDR3 for alpha chain variable domain of TCR clone 47825 (TRAV12-2, TRAJ36)
SLLIRDSQPSDSATLERANNLFF

SEQ ID NO: 95650 - protein, 13 aa, Homo sapiens
  CDR3 for beta chain variable domain of TCR clone 47825 (TRBV7-9, TRBJ1-2)
CASSLKQNYGYTF

SEQ ID NO: 95651 - protein, 14 aa, Homo sapiens
  CDR3 for alpha chain variable domain of TCR clone 47826 (TRAV26-2, TRAJ27)
CILRDISDAGKSTL

SEQ ID NO: 95652 - protein, 15 aa, Homo sapiens
  CDR3 for beta chain variable domain of TCR clone 47826 (TRBV10-3, TRBJ2-7)
CATREQGLRSYEQYF

SEQ ID NO: 95653 - protein, 13 aa, Homo sapiens
  CDR3 for alpha chain variable domain of TCR clone 47827 (TRAV21, TRAJ27)
CAARPGNAGKSTF

SEQ ID NO: 95654 - protein, 14 aa, Homo sapiens
  CDR3 for beta chain variable domain of TCR clone 47827 (TRBV7-6, TRBJ2-3)
CASSFGTVTDTQYF

SEQ ID NO: 95655 - protein, 13 aa, Homo sapiens
  CDR3 for alpha chain variable domain of TCR clone 47828 (TRAV1-2, TRAJ39)
CAVKDNAGNMLTF

SEQ ID NO: 95656 - protein, 15 aa, Homo sapiens
  CDR3 for beta chain variable domain of TCR clone 47828 (TRBV4-1, TRBJ2-5)
CASSQWDLYQETQYF

SEQ ID NO: 95657 - protein, 14 aa, Homo sapiens
  CDR3 for alpha chain variable domain of TCR clone 47829 (TRAV41, TRAJ48)
CAVRPHFGNEKLTF

SEQ ID NO: 95658 - protein, 13 aa, Homo sapiens
  CDR3 for beta chain variable domain of TCR clone 47829 (TRBV7-9, TRBJ1-2)
CASSLKQNYGYTF

SEQ ID NO: 95659 - protein, 12 aa, Homo sapiens
  CDR3 for alpha chain variable domain of TCR clone 47830 (TRAV2, TRAJ33)
CAFMDSNYQLIW

SEQ ID NO: 95660 - protein, 16 aa, Homo sapiens
  CDR3 for beta chain variable domain of TCR clone 47830 (TRBV2, TRBJ2-7)
CASSEPRTGPSYEQYF

SEQ ID NO: 95661 - protein, 12 aa, Homo sapiens
  CDR3 for alpha chain variable domain of TCR clone 47831 (TRAV12-3, TRAJ20)
CAMVRGDYKLSF

SEQ ID NO: 95662 - protein, 15 aa, Homo sapiens
  CDR3 for beta chain variable domain of TCR clone 47831 (TRBV19, TRBJ1-5)
CASSIVWADNQPQHF

SEQ ID NO: 95663 - protein, 16 aa, Homo sapiens
  CDR3 for alpha chain variable domain of TCR clone 47832 (TRAV30, TRAJ24)
CGTEIVDADSWGKFQF

SEQ ID NO: 95664 - protein, 14 aa, Homo sapiens
  CDR3 for beta chain variable domain of TCR clone 47832 (TRBV7-8, TRBJ1-2)
CASSPDSLSYGYTF

SEQ ID NO: 95665 - protein, 12 aa, Homo sapiens
  CDR3 for alpha chain variable domain of TCR clone 47833 (TRAV12-3, TRAJ20)
CAMVRGDYKRSF

SEQ ID NO: 95666 - protein, 14 aa, Homo sapiens
  CDR3 for beta chain variable domain of TCR clone 47833 (TRBV5-5, TRBJ1-5)
CASSGQGVDQPQHF

SEQ ID NO: 95667 - protein, 18 aa, Homo sapiens
  CDR3 for alpha chain variable domain of TCR clone 47834 (TRAV21, TRAJ52)
CAVRPSPAGGTSYGKLTF

SEQ ID NO: 95668 - protein, 16 aa, Homo sapiens
  CDR3 for beta chain variable domain of TCR clone 47834 (TRBV13, TRBJ2-3)
CSSLSRVAGGRNTQYF

SEQ ID NO: 95669 - protein, 13 aa, Homo sapiens
  CDR3 for alpha chain variable domain of TCR clone 47835 (TRAV35, TRAJ22)
CAGLSGSARQLTF

SEQ ID NO: 95670 - protein, 16 aa, Homo sapiens
  CDR3 for beta chain variable domain of TCR clone 47835 (TRBV7-9, TRBJ2-1)
CASSLVLTGLGNEQFF

SEQ ID NO: 95671 - protein, 12 aa, Homo sapiens
  CDR3 for alpha chain variable domain of TCR clone 47836 (TRAV13-1, TRAJ9)
CASHTGGFKTVF

SEQ ID NO: 95672 - protein, 18 aa, Homo sapiens
  CDR3 for beta chain variable domain of TCR clone 47836 (TRBV11-2, TRBJ2-3)
CASSLGGASRGAPNTQYF

SEQ ID NO: 95673 - protein, 12 aa, Homo sapiens
  CDR3 for alpha chain variable domain of TCR clone 47837 (TRAV35, TRAJ49)
CAGWNTGNQFYF

SEQ ID NO: 95674 - protein, 16 aa, Homo sapiens
  CDR3 for beta chain variable domain of TCR clone 47837 (TRBV5-1, TRBJ2-2)
CASSLWDTTNTGEQFF

SEQ ID NO: 95675 - protein, 14 aa, Homo sapiens
  CDR3 for alpha chain variable domain of TCR clone 47838 (TRAV38-2/DV8, TRAJ29)
CAYRSRSGKTPLVF

SEQ ID NO: 95676 - protein, 17 aa, Homo sapiens
  CDR3 for beta chain variable domain of TCR clone 47838 (TRBV6-1, TRBJ1-2)
CASSGTHSQRGNYGYTF

SEQ ID NO: 95677 - protein, 20 aa, Homo sapiens
  CDR3 for alpha chain variable domain of TCR clone 47839 (TRAV27, TRAJ30)
CAGEGEMTRSSLEKGHDFIF

SEQ ID NO: 95678 - protein, 14 aa, Homo sapiens
  CDR3 for beta chain variable domain of TCR clone 47839 (TRBV11-2, TRBJ2-1)
CASSLDGRDNEQFF

SEQ ID NO: 95679 - protein, 16 aa, Homo sapiens
  CDR3 for alpha chain variable domain of TCR clone 47840 (TRAV3, TRAJ37)
CAVRGKGSCNTGKLIF

SEQ ID NO: 95680 - protein, 13 aa, Homo sapiens
  CDR3 for beta chain variable domain of TCR clone 47840 (TRBV14, TRBJ2-7)
CASSQDRRYEQYF

SEQ ID NO: 95681 - protein, 10 aa, Homo sapiens
  CDR3 for alpha chain variable domain of TCR clone 47841 (TRAV26-1, TRAJ40)
CIAGTYKYIF

SEQ ID NO: 95682 - protein, 15 aa, Homo sapiens
  CDR3 for beta chain variable domain of TCR clone 47841 (TRBV19, TRBJ2-1)
CASSSPGVHLDEQFF

SEQ ID NO: 95683 - protein, 12 aa, Homo sapiens
  CDR3 for alpha chain variable domain of TCR clone 47842 (TRAV12-2, TRAJ10)
WGVTGGGTKLTF

SEQ ID NO: 95684 - protein, 16 aa, Homo sapiens
  CDR3 for beta chain variable domain of TCR clone 47842 (TRBV6-4, TRBJ1-2)
CASSEAVGDPNYGYTF

SEQ ID NO: 95685 - protein, 14 aa, Homo sapiens
  CDR3 for alpha chain variable domain of TCR clone 47843 (TRAV8-3, TRAJ10)
CAMGNAGGGNKLTF

SEQ ID NO: 95686 - protein, 17 aa, Homo sapiens
  CDR3 for beta chain variable domain of TCR clone 47843 (TRBV27, TRBJ2-7)
CASSTKRPGTGPYEQYF

SEQ ID NO: 95687 - protein, 19 aa, Homo sapiens
  CDR3 for alpha chain variable domain of TCR clone 47844 (TRAV2, TRAJ20)
ILQVREADAAVYRDCKLSF

SEQ ID NO: 95688 - protein, 15 aa, Homo sapiens
  CDR3 for beta chain variable domain of TCR clone 47844 (TRBV6-3, TRBJ2-7)
CASSSPGTVFYEQYF

SEQ ID NO: 95689 - protein, 17 aa, Homo sapiens
  CDR3 for alpha chain variable domain of TCR clone 47845 (TRAV8-1, TRAJ43)
CAVTNDMRFGAGTRLTV

SEQ ID NO: 95690 - protein, 12 aa, Homo sapiens
  CDR3 for beta chain variable domain of TCR clone 47845 (TRBV12-4, TRBJ2-1)
CASTYVLNEQFF

SEQ ID NO: 95691 - protein, 15 aa, Homo sapiens
  CDR3 for alpha chain variable domain of TCR clone 47846 (TRAV26-1, TRAJ44)
CIVRANTGTASKLTF

SEQ ID NO: 95692 - protein, 16 aa, Homo sapiens
  CDR3 for beta chain variable domain of TCR clone 47846 (TRBV7-7, TRBJ2-1)
CASSLASGTFYNEQFF

SEQ ID NO: 95693 - protein, 15 aa, Homo sapiens
  CDR3 for alpha chain variable domain of TCR clone 47847 (TRAV17, TRAJ6)
CATDLPSGGSYIPTF

SEQ ID NO: 95694 - protein, 16 aa, Homo sapiens
  CDR3 for beta chain variable domain of TCR clone 47847 (TRBV4-1, TRBJ2-7)
CASSQDPTGYSYEQYF

SEQ ID NO: 95695 - protein, 11 aa, Homo sapiens
  CDR3 for alpha chain variable domain of TCR clone 47848 (TRAV21, TRAJ11)
CAVNGYSTLTF

SEQ ID NO: 95696 - protein, 13 aa, Homo sapiens
  CDR3 for beta chain variable domain of TCR clone 47848 (TRBV19, TRBJ1-1)
CASSIGSEAFLDK

SEQ ID NO: 95697 - protein, 18 aa, Homo sapiens
  CDR3 for alpha chain variable domain of TCR clone 47849 (TRAV29/DV5, TRAJ23)
CAAGFRGAGGTSYGKLIF

SEQ ID NO: 95698 - protein, 16 aa, Homo sapiens
  CDR3 for beta chain variable domain of TCR clone 47849 (TRBV20-1, TRBJ1-4)
CSAPGQGLLTNEKLFF

SEQ ID NO: 95699 - protein, 14 aa, Homo sapiens
  CDR3 for alpha chain variable domain of TCR clone 47850 (TRAV8-3, TRAJ4)
CAVGAAGGYNKLIF

SEQ ID NO: 95700 - protein, 15 aa, Homo sapiens
  CDR3 for beta chain variable domain of TCR clone 47850 (TRBV6-5, TRBJ2-1)
CDSSYDAGAGNEQFF

SEQ ID NO: 95701 - protein, 15 aa, Homo sapiens
  CDR3 for alpha chain variable domain of TCR clone 47851 (TRAV26-1, TRAJ29)
CIVRVEGSGNTPLVF

SEQ ID NO: 95702 - protein, 15 aa, Homo sapiens
  CDR3 for beta chain variable domain of TCR clone 47851 (TRBV7-9, TRBJ2-7)
CASSLALAEAYEQYF

SEQ ID NO: 95703 - protein, 13 aa, Homo sapiens
  CDR3 for alpha chain variable domain of TCR clone 47852 (TRAV17, TRAJ39)
CAISTNAGNMLTF

SEQ ID NO: 95704 - protein, 12 aa, Homo sapiens
  CDR3 for beta chain variable domain of TCR clone 47852 (TRBV14, TRBJ2-7)
CASSSLKGEQYF

SEQ ID NO: 95705 - protein, 12 aa, Homo sapiens
  CDR3 for alpha chain variable domain of TCR clone 47853 (TRAV13-2, TRAJ23)
CAERHRGGKLIF

SEQ ID NO: 95706 - protein, 16 aa, Homo sapiens
  CDR3 for beta chain variable domain of TCR clone 47853 (TRBV20-1, TRBJ1-4)
CSAPGQGLLTNEKRFF

SEQ ID NO: 95707 - protein, 15 aa, Homo sapiens
  CDR3 for alpha chain variable domain of TCR clone 47854 (TRAV3, TRAJ3)
CAVRDGHSSASKIIF

SEQ ID NO: 95708 - protein, 14 aa, Homo sapiens
  CDR3 for beta chain variable domain of TCR clone 47854 (TRBV28, TRBJ1-4)
CASSFGTLDEKLFF

SEQ ID NO: 95709 - protein, 14 aa, Homo sapiens
  CDR3 for alpha chain variable domain of TCR clone 47855 (TRAV35, TRAJ33)
CAGSSQDSNYQLIW

SEQ ID NO: 95710 - protein, 15 aa, Homo sapiens
  CDR3 for beta chain variable domain of TCR clone 47855 (TRBV20-1, TRBJ2-7)
CSAVSGTSGAYEQYF

SEQ ID NO: 95711 - protein, 14 aa, Homo sapiens
  CDR3 for alpha chain variable domain of TCR clone 47856 (TRAV35, TRAJ13)
CAGSPSGGYQKVTF

SEQ ID NO: 95712 - protein, 17 aa, Homo sapiens
  CDR3 for beta chain variable domain of TCR clone 47856 (TRBV7-6, TRBJ2-5)
CASGPGLADPWGETQYF

SEQ ID NO: 95713 - protein, 14 aa, Homo sapiens
  CDR3 for alpha chain variable domain of TCR clone 47857 (TRAV13-1, TRAJ44)
CAAKATGTASKLTF

SEQ ID NO: 95714 - protein, 17 aa, Homo sapiens
  CDR3 for beta chain variable domain of TCR clone 47857 (TRBV7-3, TRBJ2-3)
RASSLMKRRRGADTQYF

SEQ ID NO: 95715 - protein, 16 aa, Homo sapiens
  CDR3 for alpha chain variable domain of TCR clone 47858 (TRAV30, TRAJ24)
CGTAIVDADSWGKFQF

SEQ ID NO: 95716 - protein, 17 aa, Homo sapiens
  CDR3 for beta chain variable domain of TCR clone 47858 (TRBV20-1, TRBJ2-2)
CSASGSGQGGLTGELFF

SEQ ID NO: 95717 - protein, 12 aa, Homo sapiens
  CDR3 for alpha chain variable domain of TCR clone 47859 (TRAV17, TRAJ57)
CATDGGSERLVF

SEQ ID NO: 95718 - protein, 12 aa, Homo sapiens
  CDR3 for beta chain variable domain of TCR clone 47859 (TRBV29-1, TRBJ2-2)
CSVDKYTGELFF

SEQ ID NO: 95719 - protein, 13 aa, Homo sapiens
  CDR3 for alpha chain variable domain of TCR clone 47860 (TRAV8-3, TRAJ43)
CAVVPYNNNDMRF

SEQ ID NO: 95720 - protein, 17 aa, Homo sapiens
  CDR3 for beta chain variable domain of TCR clone 47860 (TRBV7-7, TRBJ1-1)
CASIGDRPNLGVTEAFS

SEQ ID NO: 95721 - protein, 11 aa, Homo sapiens
  CDR3 for alpha chain variable domain of TCR clone 47861 (TRAV2, TRAJ21)
CAVFNFNKFYF

SEQ ID NO: 95722 - protein, 14 aa, Homo sapiens
  CDR3 for beta chain variable domain of TCR clone 47861 (TRBV15, TRBJ2-3)
CATRSGTSTDTQYS

SEQ ID NO: 95723 - protein, 14 aa, Homo sapiens
  CDR3 for alpha chain variable domain of TCR clone 47862 (TRAV29/DV5, TRAJ36)
CAARRKTGANNLFF

SEQ ID NO: 95724 - protein, 15 aa, Homo sapiens
  CDR3 for beta chain variable domain of TCR clone 47862 (TRBV20-1, TRBJ2-4)
CSARDLTGGPNIQYF

SEQ ID NO: 95725 - protein, 13 aa, Homo sapiens
  CDR3 for alpha chain variable domain of TCR clone 47863 (TRAV17, TRAJ33)
CATDADSNYQLIW

SEQ ID NO: 95726 - protein, 17 aa, Homo sapiens
  CDR3 for beta chain variable domain of TCR clone 47863 (TRBV20-1, TRBJ2-3)
CSAVSTGLAGGQDTQYF

SEQ ID NO: 95727 - protein, 11 aa, Homo sapiens
  CDR3 for alpha chain variable domain of TCR clone 47864 (TRAV21, TRAJ31)
CAVRNNARLMF

SEQ ID NO: 95728 - protein, 15 aa, Homo sapiens
  CDR3 for beta chain variable domain of TCR clone 47864 (TRBV20-1, TRBJ2-7)
CSARDRVSGMDEPYF

SEQ ID NO: 95729 - protein, 14 aa, Homo sapiens
  CDR3 for alpha chain variable domain of TCR clone 47865 (TRAV8-6, TRAJ29)
CAVSRASGNTPLVF

SEQ ID NO: 95730 - protein, 13 aa, Homo sapiens
  CDR3 for beta chain variable domain of TCR clone 47865 (TRBV19, TRBJ1-5)
CASSEGSNQTQHF

SEQ ID NO: 95731 - protein, 14 aa, Homo sapiens
  CDR3 for alpha chain variable domain of TCR clone 47866 (TRAV26-1, TRAJ38)
CIADNAGNNRKLIL

SEQ ID NO: 95732 - protein, 17 aa, Homo sapiens
  CDR3 for beta chain variable domain of TCR clone 47866 (TRBV15, TRBJ1-1)
CATSRVGGADGDTEAFF

SEQ ID NO: 95733 - protein, 10 aa, Homo sapiens
  CDR3 for alpha chain variable domain of TCR clone 47867 (TRAV30, TRAJ48)
CGIGNAKLTF

SEQ ID NO: 95734 - protein, 14 aa, Homo sapiens
  CDR3 for beta chain variable domain of TCR clone 47867 (TRBV7-6, TRBJ2-3)
CASSVAGGTDTQYF

SEQ ID NO: 95735 - protein, 11 aa, Homo sapiens
  CDR3 for alpha chain variable domain of TCR clone 47868 (TRAV12-3, TRAJ43)
CAMSVSNDMRF

SEQ ID NO: 95736 - protein, 17 aa, Homo sapiens
  CDR3 for beta chain variable domain of TCR clone 47868 (TRBV11-2, TRBJ2-1)
CASSLYPPGVEYNEQFF

SEQ ID NO: 95737 - protein, 13 aa, Homo sapiens
  CDR3 for alpha chain variable domain of TCR clone 47869 (TRAV8-3, TRAJ28)
CAVGAVGSYQLTF

SEQ ID NO: 95738 - protein, 13 aa, Homo sapiens
  CDR3 for beta chain variable domain of TCR clone 47869 (TRBV4-1, TRBJ2-2)
CASSQENTGELFF

SEQ ID NO: 95739 - protein, 13 aa, Homo sapiens
  CDR3 for alpha chain variable domain of TCR clone 47870 (TRAV12-2, TRAJ7)
CAVNLYGNDRLAF

SEQ ID NO: 95740 - protein, 14 aa, Homo sapiens
  CDR3 for beta chain variable domain of TCR clone 47870 (TRBV25-1, TRBJ1-2)
CASSEATGPYGYTF

SEQ ID NO: 95741 - protein, 12 aa, Homo sapiens
  CDR3 for alpha chain variable domain of TCR clone 47871 (TRAV27, TRAJ37)
CADSGSTGKLIF

SEQ ID NO: 95742 - protein, 13 aa, Homo sapiens
  CDR3 for beta chain variable domain of TCR clone 47871 (TRBV4-1, TRBJ2-1)
CASSQEVQYEQFF

SEQ ID NO: 95743 - protein, 13 aa, Homo sapiens
  CDR3 for alpha chain variable domain of TCR clone 47872 (TRAV3, TRAJ21)
CAVREPDFNKFYF

SEQ ID NO: 95744 - protein, 18 aa, Homo sapiens
  CDR3 for beta chain variable domain of TCR clone 47872 (TRBV11-2, TRBJ2-3)
CASSLGGASRGAPNTQYF

SEQ ID NO: 95745 - protein, 15 aa, Homo sapiens
  CDR3 for alpha chain variable domain of TCR clone 47873 (TRAV1-2, TRAJ30)
CAVRPHGNRNDKIIF

SEQ ID NO: 95746 - protein, 13 aa, Homo sapiens
  CDR3 for beta chain variable domain of TCR clone 47873 (TRBV4-1, TRBJ2-7)
CASSQGQAYEQYF

SEQ ID NO: 95747 - protein, 11 aa, Homo sapiens
  CDR3 for alpha chain variable domain of TCR clone 47874 (TRAV3, TRAJ13)
CAVTSYQKATF

SEQ ID NO: 95748 - protein, 15 aa, Homo sapiens
  CDR3 for beta chain variable domain of TCR clone 47874 (TRBV7-9, TRBJ2-7)
CASSSSGLAVYEQYF

SEQ ID NO: 95749 - protein, 11 aa, Homo sapiens
  CDR3 for alpha chain variable domain of TCR clone 47875 (TRAV8-3, TRAJ20)
CCGANDYKLSF

SEQ ID NO: 95750 - protein, 17 aa, Homo sapiens
  CDR3 for beta chain variable domain of TCR clone 47875 (TRBV13, TRBJ2-3)
CASSLSRVAGGRNTQYF

SEQ ID NO: 95751 - protein, 11 aa, Homo sapiens
  CDR3 for alpha chain variable domain of TCR clone 47876 (TRAV1-1, TRAJ23)
CAVRQGGKLIF

SEQ ID NO: 95752 - protein, 14 aa, Homo sapiens
  CDR3 for beta chain variable domain of TCR clone 47876 (TRBV4-1, TRBJ2-2)
CASSQAVNTGELFF

SEQ ID NO: 95753 - protein, 11 aa, Homo sapiens
  CDR3 for alpha chain variable domain of TCR clone 47877 (TRAV12-3, TRAJ16)
LTGGDGQKLLF

SEQ ID NO: 95754 - protein, 13 aa, Homo sapiens
  CDR3 for beta chain variable domain of TCR clone 47877 (TRBV12-4, TRBJ1-4)
CASAMGHNEKPFF

SEQ ID NO: 95755 - protein, 13 aa, Homo sapiens
  CDR3 for alpha chain variable domain of TCR clone 47878 (TRAV12-1, TRAJ9)
CVVLNTGGFKIIF

SEQ ID NO: 95756 - protein, 13 aa, Homo sapiens
  CDR3 for beta chain variable domain of TCR clone 47878 (TRBV20-1, TRBJ1-1)
CSARGGGNTEAFF

SEQ ID NO: 95757 - protein, 19 aa, Homo sapiens
  CDR3 for alpha chain variable domain of TCR clone 47879 (TRAV26-1, TRAJ29)
CCVLLHRQSRGIGNTPLVF

SEQ ID NO: 95758 - protein, 14 aa, Homo sapiens
  CDR3 for beta chain variable domain of TCR clone 47879 (TRBV18, TRBJ2-5)
CASSPGVSQETQYF

SEQ ID NO: 95759 - protein, 17 aa, Homo sapiens
  CDR3 for alpha chain variable domain of TCR clone 47880 (TRAV26-1, TRAJ37)
CIVRVIAVSSNTGKLIF

SEQ ID NO: 95760 - protein, 14 aa, Homo sapiens
  CDR3 for beta chain variable domain of TCR clone 47880 (TRBV7-7, TRBJ2-2)
CATRQDSDTGELFF

SEQ ID NO: 95761 - protein, 13 aa, Homo sapiens
  CDR3 for alpha chain variable domain of TCR clone 47881 (TRAV30, TRAJ39)
CGTEKNAGNMLTF

SEQ ID NO: 95762 - protein, 12 aa, Homo sapiens
  CDR3 for beta chain variable domain of TCR clone 47881 (TRBV12-4, TRBJ2-5)
CASRSAQETQYF

SEQ ID NO: 95763 - protein, 13 aa, Homo sapiens
  CDR3 for alpha chain variable domain of TCR clone 47882 (TRAV2, TRAJ40)
CAVVTSGTYKYIF

SEQ ID NO: 95764 - protein, 15 aa, Homo sapiens
  CDR3 for beta chain variable domain of TCR clone 47882 (TRBV4-1, TRBJ2-7)
CASSQNTGRLYEQYF

SEQ ID NO: 95765 - protein, 12 aa, Homo sapiens
  CDR3 for alpha chain variable domain of TCR clone 47883 (TRAV12-2, TRAJ10)
WGVTGGGNKLTF

SEQ ID NO: 95766 - protein, 12 aa, Homo sapiens
  CDR3 for beta chain variable domain of TCR clone 47883 (TRBV11-2, TRBJ2-2)
CASSLGGGELFF

SEQ ID NO: 95767 - protein, 16 aa, Homo sapiens
  CDR3 for alpha chain variable domain of TCR clone 47884 (TRAV16, TRAJ42)
CALSGLIGGSQGNLIF

SEQ ID NO: 95768 - protein, 15 aa, Homo sapiens
  CDR3 for beta chain variable domain of TCR clone 47884 (TRBV5-1, TRBJ2-1)
CASSPGGLAGNEQFF

SEQ ID NO: 95769 - protein, 15 aa, Homo sapiens
  CDR3 for alpha chain variable domain of TCR clone 47885 (TRAV17, TRAJ35)
CATAFVIGFGNVLHC

SEQ ID NO: 95770 - protein, 14 aa, Homo sapiens
  CDR3 for beta chain variable domain of TCR clone 47885 (TRBV12-5, TRBJ2-5)
CASGSRTHQETQYF

SEQ ID NO: 95771 - protein, 14 aa, Homo sapiens
  CDR3 for alpha chain variable domain of TCR clone 47886 (TRAV29/DV5, TRAJ45)
CAVSFRGGADGLTF

SEQ ID NO: 95772 - protein, 11 aa, Homo sapiens
  CDR3 for beta chain variable domain of TCR clone 47886 (TRBV11-2, TRBJ2-2)
CASSLPGELFF

SEQ ID NO: 95773 - protein, 13 aa, Homo sapiens
  CDR3 for alpha chain variable domain of TCR clone 47887 (TRAV30, TRAJ49)
CGTESQPVTSSIL

SEQ ID NO: 95774 - protein, 13 aa, Homo sapiens
  CDR3 for beta chain variable domain of TCR clone 47887 (TRBV7-2, TRBJ2-2)
CASRLAVTGELFF

SEQ ID NO: 95775 - protein, 13 aa, Homo sapiens
  CDR3 for alpha chain variable domain of TCR clone 47888 (TRAV2, TRAJ15)
CAVASQAGTALIF

SEQ ID NO: 95776 - protein, 14 aa, Homo sapiens
  CDR3 for beta chain variable domain of TCR clone 47888 (TRBV25-1, TRBJ1-1)
CVSTHLGGNTEAFF

SEQ ID NO: 95777 - protein, 13 aa, Homo sapiens
  CDR3 for alpha chain variable domain of TCR clone 47889 (TRAV17, TRAJ39)
CAISTNAGNMLTF

SEQ ID NO: 95778 - protein, 13 aa, Homo sapiens
  CDR3 for beta chain variable domain of TCR clone 47889 (TRBV15, TRBJ1-6)
CATSGGLNSPLHF

SEQ ID NO: 95779 - protein, 15 aa, Homo sapiens
  CDR3 for alpha chain variable domain of TCR clone 47890 (TRAV30, TRAJ32)
CGTEILGGATNKLIS

SEQ ID NO: 95780 - protein, 17 aa, Homo sapiens
  CDR3 for beta chain variable domain of TCR clone 47890 (TRBV5-4, TRBJ2-1)
CASSSAGGRGPYNEQFF

SEQ ID NO: 95781 - protein, 16 aa, Homo sapiens
  CDR3 for alpha chain variable domain of TCR clone 47891 (TRAV23/DV6, TRAJ9)
CAASIGGNTGGFKTIF

SEQ ID NO: 95782 - protein, 14 aa, Homo sapiens
  CDR3 for beta chain variable domain of TCR clone 47891 (TRBV25-1, TRBJ1-1)
CASTHLGGNTEAFF

SEQ ID NO: 95783 - protein, 15 aa, Homo sapiens
  CDR3 for alpha chain variable domain of TCR clone 47892 (TRAV21, TRAJ13)
CAVRPTSGGYQKVTF

SEQ ID NO: 95784 - protein, 18 aa, Homo sapiens
  CDR3 for beta chain variable domain of TCR clone 47892 (TRBV11-3, TRBJ2-1)
CASSSSPGGRDSYNEQFF

SEQ ID NO: 95785 - protein, 13 aa, Homo sapiens
  CDR3 for alpha chain variable domain of TCR clone 47893 (TRAV21, TRAJ20)
CSVGLRVDYKLSF

SEQ ID NO: 95786 - protein, 13 aa, Homo sapiens
  CDR3 for beta chain variable domain of TCR clone 47893 (TRBV6-1, TRBJ1-1)
CASSRQGNTEAFF

SEQ ID NO: 95787 - protein, 12 aa, Homo sapiens
  CDR3 for alpha chain variable domain of TCR clone 47894 (TRAV12-3, TRAJ17)
CAMTLTGNKLTF

SEQ ID NO: 95788 - protein, 15 aa, Homo sapiens
  CDR3 for beta chain variable domain of TCR clone 47894 (TRBV5-1, TRBJ2-7)
CASSLNGGPAREQYF

SEQ ID NO: 95789 - protein, 13 aa, Homo sapiens
  CDR3 for alpha chain variable domain of TCR clone 47895 (TRAV3, TRAJ21)
CDVREPDFNKFYF

SEQ ID NO: 95790 - protein, 13 aa, Homo sapiens
  CDR3 for beta chain variable domain of TCR clone 47895 (TRBV9, TRBJ2-1)
CASSPSGGNEQFF

SEQ ID NO: 95791 - protein, 15 aa, Homo sapiens
  CDR3 for alpha chain variable domain of TCR clone 47896 (TRAV26-1, TRAJ29)
CIVRVEGSGNTPLVF

SEQ ID NO: 95792 - protein, 15 aa, Homo sapiens
  CDR3 for beta chain variable domain of TCR clone 47896 (TRBV20-1, TRBJ2-7)
CSARGRGPSSYEQYF

SEQ ID NO: 95793 - protein, 14 aa, Homo sapiens
  CDR3 for alpha chain variable domain of TCR clone 47897 (TRAV1-2, TRAJ8)
CAVREGTGFQKLVF

SEQ ID NO: 95794 - protein, 17 aa, Homo sapiens
  CDR3 for beta chain variable domain of TCR clone 47897 (TRBV11-3, TRBJ2-3)
CASSPGSSGGRTDTQYF

SEQ ID NO: 95795 - protein, 13 aa, Homo sapiens
  CDR3 for alpha chain variable domain of TCR clone 47898 (TRAV12-3, TRAJ40)
CAMSDPGTYKYIF

SEQ ID NO: 95796 - protein, 14 aa, Homo sapiens
  CDR3 for beta chain variable domain of TCR clone 47898 (TRBV7-2, TRBJ1-5)
CASSTQGAGQPQHF

SEQ ID NO: 95797 - protein, 12 aa, Homo sapiens
  CDR3 for alpha chain variable domain of TCR clone 47899 (TRAV8-3, TRAJ27)
CAGGAEAGKSTF

SEQ ID NO: 95798 - protein, 14 aa, Homo sapiens
  CDR3 for beta chain variable domain of TCR clone 47899 (TRBV2, TRBJ2-1)
CASRLIVGHDEQFF

SEQ ID NO: 95799 - protein, 12 aa, Homo sapiens
  CDR3 for alpha chain variable domain of TCR clone 47900 (TRAV20, TRAJ54)
CAVQEGAQKLVF

SEQ ID NO: 95800 - protein, 17 aa, Homo sapiens
  CDR3 for beta chain variable domain of TCR clone 47900 (TRBV13, TRBJ2-3)
CASSLSRVAWGRNTQYF

SEQ ID NO: 95801 - protein, 13 aa, Homo sapiens
  CDR3 for alpha chain variable domain of TCR clone 47901 (TRAV12-2, TRAJ20)
CAVYPSNDHKLSF

SEQ ID NO: 95802 - protein, 15 aa, Homo sapiens
  CDR3 for beta chain variable domain of TCR clone 47901 (TRBV18, TRBJ1-2)
CASSPGNGLGYGYTF

SEQ ID NO: 95803 - protein, 14 aa, Homo sapiens
  CDR3 for alpha chain variable domain of TCR clone 47902 (TRAV35, TRAJ13)
FAGSPSGGYQKVTF

SEQ ID NO: 95804 - protein, 13 aa, Homo sapiens
  CDR3 for beta chain variable domain of TCR clone 47902 (TRBV29-1, TRBJ1-1)
CSVGDSRNTEAFF

SEQ ID NO: 95805 - protein, 14 aa, Homo sapiens
  CDR3 for alpha chain variable domain of TCR clone 47903 (TRAV17, TRAJ6)
CATDERRGGYIPTF

SEQ ID NO: 95806 - protein, 13 aa, Homo sapiens
  CDR3 for beta chain variable domain of TCR clone 47903 (TRBV27, TRBJ2-1)
CASSLGRIWGQFF

SEQ ID NO: 95807 - protein, 17 aa, Homo sapiens
  CDR3 for alpha chain variable domain of TCR clone 47904 (TRAV3, TRAJ6)
CAVRDGPRAGGSYIPTF

SEQ ID NO: 95808 - protein, 16 aa, Homo sapiens
  CDR3 for beta chain variable domain of TCR clone 47904 (TRBV4-3, TRBJ2-1)
CASSPALDRGVNEQFF

SEQ ID NO: 95809 - protein, 15 aa, Homo sapiens
  CDR3 for alpha chain variable domain of TCR clone 47905 (TRAV12-1, TRAJ44)
CVVFVNTGTASKLTF

SEQ ID NO: 95810 - protein, 17 aa, Homo sapiens
  CDR3 for beta chain variable domain of TCR clone 47905 (TRBV7-8, TRBJ2-6)
CASSAGTGGAGANVRTF

SEQ ID NO: 95811 - protein, 14 aa, Homo sapiens
  CDR3 for alpha chain variable domain of TCR clone 47906 (TRAV26-1, TRAJ34)
CIVRVAYNTDKLIF

SEQ ID NO: 95812 - protein, 15 aa, Homo sapiens
  CDR3 for beta chain variable domain of TCR clone 47906 (TRBV9, TRBJ1-6)
CASSVAGTGDSPLHF

SEQ ID NO: 95813 - protein, 18 aa, Homo sapiens
  CDR3 for alpha chain variable domain of TCR clone 47907 (TRAV8-6, TRAJ52)
CAVSRANAGGTSYGKLTF

SEQ ID NO: 95814 - protein, 12 aa, Homo sapiens
  CDR3 for beta chain variable domain of TCR clone 47907 (TRBV14, TRBJ2-7)
CASSRLKGERYF

SEQ ID NO: 95815 - protein, 12 aa, Homo sapiens
  CDR3 for alpha chain variable domain of TCR clone 47908 (TRAV20, TRAJ39)
CAVGNAGNMLTF

SEQ ID NO: 95816 - protein, 13 aa, Homo sapiens
  CDR3 for beta chain variable domain of TCR clone 47908 (TRBV2, TRBJ1-1)
CASNLLRNTEAFF

SEQ ID NO: 95817 - protein, 11 aa, Homo sapiens
  CDR3 for alpha chain variable domain of TCR clone 47909 (TRAV16, TRAJ20)
CALREGFKAAL

SEQ ID NO: 95818 - protein, 13 aa, Homo sapiens
  CDR3 for beta chain variable domain of TCR clone 47909 (TRBV7-3, TRBJ2-1)
CASSLDSYNEQFF

SEQ ID NO: 95819 - protein, 12 aa, Homo sapiens
  CDR3 for alpha chain variable domain of TCR clone 47910 (TRAV12-1, TRAJ40)
CLFYSGTYKYIF

SEQ ID NO: 95820 - protein, 18 aa, Homo sapiens
  CDR3 for beta chain variable domain of TCR clone 47910 (TRBV12-4, TRBJ2-2)
CASSLVAGTRGRTGELFF

SEQ ID NO: 95821 - protein, 13 aa, Homo sapiens
  CDR3 for alpha chain variable domain of TCR clone 47911 (TRAV8-2, TRAJ9)
CIVFNTGGFKTIF

SEQ ID NO: 95822 - protein, 16 aa, Homo sapiens
  CDR3 for beta chain variable domain of TCR clone 47911 (TRBV20-1, TRBJ2-2)
CSAILLGAGDTGELFF

SEQ ID NO: 95823 - protein, 11 aa, Homo sapiens
  CDR3 for alpha chain variable domain of TCR clone 47912 (TRAV2, TRAJ4)
CAAGGYNKLIF

SEQ ID NO: 95824 - protein, 13 aa, Homo sapiens
  CDR3 for beta chain variable domain of TCR clone 47912 (TRBV20-1, TRBJ1-1)
CSARAGGNTEAFF

SEQ ID NO: 95825 - protein, 19 aa, Homo sapiens
  CDR3 for alpha chain variable domain of TCR clone 47913 (TRAV26-1, TRAJ52)
CIVRAHRNAGGPSYGKLTF

SEQ ID NO: 95826 - protein, 15 aa, Homo sapiens
  CDR3 for beta chain variable domain of TCR clone 47913 (TRBV12-4, TRBJ2-5)
CASSPPTGLQETQYF

SEQ ID NO: 95827 - protein, 14 aa, Homo sapiens
  CDR3 for alpha chain variable domain of TCR clone 47914 (TRAV38-1, TRAJ45)
CAYYSGGGADGLTF

SEQ ID NO: 95828 - protein, 20 aa, Homo sapiens
  CDR3 for beta chain variable domain of TCR clone 47914 (TRBV28, TRBJ2-1)
CASTPIGRSPGVAGGNEQFF

SEQ ID NO: 95829 - protein, 10 aa, Homo sapiens
  CDR3 for alpha chain variable domain of TCR clone 47915 (TRAV5, TRAJ34)
CAEDTDKLIF

SEQ ID NO: 95830 - protein, 14 aa, Homo sapiens
  CDR3 for beta chain variable domain of TCR clone 47915 (TRBV6-1, TRBJ1-3)
CASVQGGGGNTIYF

SEQ ID NO: 95831 - protein, 14 aa, Homo sapiens
  CDR3 for alpha chain variable domain of TCR clone 47916 (TRAV35, TRAJ33)
CAGSSQDSNYQLIW

SEQ ID NO: 95832 - protein, 15 aa, Homo sapiens
  CDR3 for beta chain variable domain of TCR clone 47916 (TRBV5-1, TRBJ2-7)
FAPAAGGESLYEQYF

SEQ ID NO: 95833 - protein, 16 aa, Homo sapiens
  CDR3 for alpha chain variable domain of TCR clone 47917 (TRAV8-3, TRAJ8)
CAVPRDGNTGFQTLVF

SEQ ID NO: 95834 - protein, 15 aa, Homo sapiens
  CDR3 for beta chain variable domain of TCR clone 47917 (TRBV6-1, TRBJ2-6)
CASSSRPSGANVLTF

SEQ ID NO: 95835 - protein, 14 aa, Homo sapiens
  CDR3 for alpha chain variable domain of TCR clone 47918 (TRAV36/DV7, TRAJ48)
CAQRRDFGNEKLTF

SEQ ID NO: 95836 - protein, 14 aa, Homo sapiens
  CDR3 for beta chain variable domain of TCR clone 47918 (TRBV28, TRBJ2-4)
CASTQVTGVNSQYF

SEQ ID NO: 95837 - protein, 15 aa, Homo sapiens
  CDR3 for alpha chain variable domain of TCR clone 47919 (TRAV21, TRAJ53)
CATLNSGGSNYKLTF

SEQ ID NO: 95838 - protein, 14 aa, Homo sapiens
  CDR3 for beta chain variable domain of TCR clone 47919 (TRBV15, TRBJ2-3)
CATRSGTSTDTQYF

SEQ ID NO: 95839 - protein, 11 aa, Homo sapiens
  CDR3 for alpha chain variable domain of TCR clone 47920 (TRAV13-1, TRAJ33)
CAANSNYQLIW

SEQ ID NO: 95840 - protein, 14 aa, Homo sapiens
  CDR3 for beta chain variable domain of TCR clone 47920 (TRBV20-1, TRBJ2-1)
CSAQIGGSANEQSF

SEQ ID NO: 95841 - protein, 12 aa, Homo sapiens
  CDR3 for alpha chain variable domain of TCR clone 47921 (TRAV17, TRAJ12)
FATLRSSYKLIF

SEQ ID NO: 95842 - protein, 16 aa, Homo sapiens
  CDR3 for beta chain variable domain of TCR clone 47921 (TRBV28, TRBJ2-7)
CASSLFFETGGPEQYF

SEQ ID NO: 95843 - protein, 14 aa, Homo sapiens
  CDR3 for alpha chain variable domain of TCR clone 47922 (TRAV12-1, TRAJ10)
CVVNLAGGGNKLTF

SEQ ID NO: 95844 - protein, 14 aa, Homo sapiens
  CDR3 for beta chain variable domain of TCR clone 47922 (TRBV12-4, TRBJ1-1)
RASSLGTGGTEAFF

SEQ ID NO: 95845 - protein, 15 aa, Homo sapiens
  CDR3 for alpha chain variable domain of TCR clone 47923 (TRAV2, TRAJ9)
CAVEDRGTGGFKTIF

SEQ ID NO: 95846 - protein, 15 aa, Homo sapiens
  CDR3 for beta chain variable domain of TCR clone 47923 (TRBV5-1, TRBJ2-1)
CASSPPRAPYNEQFF

SEQ ID NO: 95847 - protein, 23 aa, Homo sapiens
  CDR3 for alpha chain variable domain of TCR clone 47924 (TRAV26-1, )
CIADNAGTNHIQNPDPAVYQLRD

SEQ ID NO: 95848 - protein, 13 aa, Homo sapiens
  CDR3 for beta chain variable domain of TCR clone 47924 (TRBV20-1, TRBJ1-1)
CSARGGGNTEAFF

SEQ ID NO: 95849 - protein, 12 aa, Homo sapiens
  CDR3 for alpha chain variable domain of TCR clone 47925 (TRAV1-2, TRAJ33)
CAALDSNYQLIW

SEQ ID NO: 95850 - protein, 15 aa, Homo sapiens
  CDR3 for beta chain variable domain of TCR clone 47925 (TRBV10-2, TRBJ2-6)
CASSEQGTGANVLTF

SEQ ID NO: 95851 - protein, 13 aa, Homo sapiens
  CDR3 for alpha chain variable domain of TCR clone 47926 (TRAV13-2, TRAJ48)
CAEMDFGNEKLTF

SEQ ID NO: 95852 - protein, 15 aa, Homo sapiens
  CDR3 for beta chain variable domain of TCR clone 47926 (TRBV7-9, TRBJ1-6)
CASSSPGRVNSPLHF

SEQ ID NO: 95853 - protein, 14 aa, Homo sapiens
  CDR3 for alpha chain variable domain of TCR clone 47927 (TRAV16, TRAJ33)
FSLSAMDSNYQLIW

SEQ ID NO: 95854 - protein, 12 aa, Homo sapiens
  CDR3 for beta chain variable domain of TCR clone 47927 (TRBV5-1, TRBJ1-2)
CASSQDTYGYTF

SEQ ID NO: 95855 - protein, 14 aa, Homo sapiens
  CDR3 for alpha chain variable domain of TCR clone 47928 (TRAV23/DV6, TRAJ24)
CAASLSDSWGTLQF

SEQ ID NO: 95856 - protein, 16 aa, Homo sapiens
  CDR3 for beta chain variable domain of TCR clone 47928 (TRBV7-9, TRBJ2-6)
CASSLKGPLRANVLTF

SEQ ID NO: 95857 - protein, 13 aa, Homo sapiens
  CDR3 for alpha chain variable domain of TCR clone 47929 (TRAV26-1, TRAJ29)
CIVRRSGNTTLVF

SEQ ID NO: 95858 - protein, 16 aa, Homo sapiens
  CDR3 for beta chain variable domain of TCR clone 47929 (TRBV11-2, TRBJ2-7)
CASSLAPTGVNYEQYF

SEQ ID NO: 95859 - protein, 14 aa, Homo sapiens
  CDR3 for alpha chain variable domain of TCR clone 47930 (TRAV16, TRAJ54)
CALSLIQGAQKLVS

SEQ ID NO: 95860 - protein, 17 aa, Homo sapiens
  CDR3 for beta chain variable domain of TCR clone 47930 (TRBV11-2, TRBJ2-4)
CASSSVGPGGHRKIQYF

SEQ ID NO: 95861 - protein, 14 aa, Homo sapiens
  CDR3 for alpha chain variable domain of TCR clone 47931 (TRAV12-2, TRAJ13)
CAVKKTGGYQKVTF

SEQ ID NO: 95862 - protein, 13 aa, Homo sapiens
  CDR3 for beta chain variable domain of TCR clone 47931 (TRBV11-2, TRBJ2-2)
CASGRDREEELFF

SEQ ID NO: 95863 - protein, 18 aa, Homo sapiens
  CDR3 for alpha chain variable domain of TCR clone 47932 (TRAV13-1, TRAJ52)
CAAKNPNAGGTSYGKRTF

SEQ ID NO: 95864 - protein, 15 aa, Homo sapiens
  CDR3 for beta chain variable domain of TCR clone 47932 (TRBV6-1, TRBJ2-3)
CASSERGGITDTQYF

SEQ ID NO: 95865 - protein, 19 aa, Homo sapiens
  CDR3 for alpha chain variable domain of TCR clone 47933 (TRAV26-1, TRAJ10)
CIVRAGRRKQTHLWDRHSA

SEQ ID NO: 95866 - protein, 14 aa, Homo sapiens
  CDR3 for beta chain variable domain of TCR clone 47933 (TRBV6-6, TRBJ2-7)
CASSDNGAGYEQYF

SEQ ID NO: 95867 - protein, 11 aa, Homo sapiens
  CDR3 for alpha chain variable domain of TCR clone 47934 (TRAV35, TRAJ30)
CAGPGDDKIIF

SEQ ID NO: 95868 - protein, 14 aa, Homo sapiens
  CDR3 for beta chain variable domain of TCR clone 47934 (TRBV7-6, TRBJ1-6)
RASSQAGGGSPLHF

SEQ ID NO: 95869 - protein, 14 aa, Homo sapiens
  CDR3 for alpha chain variable domain of TCR clone 47935 (TRAV20, TRAJ29)
CAVQAWVGNTPLVF

SEQ ID NO: 95870 - protein, 15 aa, Homo sapiens
  CDR3 for beta chain variable domain of TCR clone 47935 (TRBV29-1, TRBJ2-7)
CSVECFDRGSYEQYF

SEQ ID NO: 95871 - protein, 18 aa, Homo sapiens
  CDR3 for alpha chain variable domain of TCR clone 47936 (TRAV26-2, TRAJ54)
CILRDVEVGIQGAQKLVF

SEQ ID NO: 95872 - protein, 17 aa, Homo sapiens
  CDR3 for beta chain variable domain of TCR clone 47936 (TRBV20-1, TRBJ1-5)
CSASLSPGQGGNQTQHF

SEQ ID NO: 95873 - protein, 14 aa, Homo sapiens
  CDR3 for alpha chain variable domain of TCR clone 47937 (TRAV1-2, TRAJ29)
CAVRELTSATPLVF

SEQ ID NO: 95874 - protein, 14 aa, Homo sapiens
  CDR3 for beta chain variable domain of TCR clone 47937 (TRBV3-1, TRBJ2-5)
CASSQGPDQETHYF

SEQ ID NO: 95875 - protein, 14 aa, Homo sapiens
  CDR3 for alpha chain variable domain of TCR clone 47938 (TRAV1-2, TRAJ16)
CAVNRFSDGKKLLF

SEQ ID NO: 95876 - protein, 13 aa, Homo sapiens
  CDR3 for beta chain variable domain of TCR clone 47938 (TRBV7-3, TRBJ1-1)
CASSQDWGAEAFF

SEQ ID NO: 95877 - protein, 15 aa, Homo sapiens
  CDR3 for alpha chain variable domain of TCR clone 47939 (TRAV12-3, TRAJ6)
CAMSATTGGSYIPTF

SEQ ID NO: 95878 - protein, 15 aa, Homo sapiens
  CDR3 for beta chain variable domain of TCR clone 47939 (TRBV7-2, TRBJ2-1)
CASSSGLAGGNEQFF

SEQ ID NO: 95879 - protein, 16 aa, Homo sapiens
  CDR3 for alpha chain variable domain of TCR clone 47940 (TRAV27, TRAJ52)
CAGDPAGGTSYGKLTF

SEQ ID NO: 95880 - protein, 12 aa, Homo sapiens
  CDR3 for beta chain variable domain of TCR clone 47940 (TRBV27, TRBJ2-1)
CASRGFYNEQFF

SEQ ID NO: 95881 - protein, 14 aa, Homo sapiens
  CDR3 for alpha chain variable domain of TCR clone 47941 (TRAV12-2, TRAJ13)
CAVKKTGGYQKVTF

SEQ ID NO: 95882 - protein, 14 aa, Homo sapiens
  CDR3 for beta chain variable domain of TCR clone 47941 (TRBV7-6, TRBJ2-3)
CASNSGGDANTQYF

SEQ ID NO: 95883 - protein, 14 aa, Homo sapiens
  CDR3 for alpha chain variable domain of TCR clone 47942 (TRAV17, TRAJ57)
CATDPQGGSEKLVF

SEQ ID NO: 95884 - protein, 15 aa, Homo sapiens
  CDR3 for beta chain variable domain of TCR clone 47942 (TRBV27, TRBJ2-5)
CASSLYPRGGETQYF

SEQ ID NO: 95885 - protein, 13 aa, Homo sapiens
  CDR3 for alpha chain variable domain of TCR clone 47943 (TRAV27, TRAJ6)
CAGGTRGSYIPTF

SEQ ID NO: 95886 - protein, 19 aa, Homo sapiens
  CDR3 for beta chain variable domain of TCR clone 47943 (TRBV25-1, TRBJ2-2)
CAILVYRVDRGRKTGELFF

SEQ ID NO: 95887 - protein, 11 aa, Homo sapiens
  CDR3 for alpha chain variable domain of TCR clone 47944 (TRAV12-1, TRAJ21)
CVVNNFNKFYF

SEQ ID NO: 95888 - protein, 17 aa, Homo sapiens
  CDR3 for beta chain variable domain of TCR clone 47944 (TRBV7-8, TRBJ2-1)
CASSPPTGTLAHNEQFF

SEQ ID NO: 95889 - protein, 13 aa, Homo sapiens
  CDR3 for alpha chain variable domain of TCR clone 47945 (TRAV2, TRAJ40)
CAVVTSGTYKYIF

SEQ ID NO: 95890 - protein, 15 aa, Homo sapiens
  CDR3 for beta chain variable domain of TCR clone 47945 (TRBV6-6, TRBJ2-7)
CASSYSYGGSYEQYF

SEQ ID NO: 95891 - protein, 12 aa, Homo sapiens
  CDR3 for alpha chain variable domain of TCR clone 47946 (TRAV1-1, TRAJ24)
CAATDSWGKLQF

SEQ ID NO: 95892 - protein, 12 aa, Homo sapiens
  CDR3 for beta chain variable domain of TCR clone 47946 (TRBV11-2, TRBJ2-2)
CASSLGGGELFF

SEQ ID NO: 95893 - protein, 13 aa, Homo sapiens
  CDR3 for alpha chain variable domain of TCR clone 47947 (TRAV1-1, TRAJ38)
CASNAGNNRKLIR

SEQ ID NO: 95894 - protein, 14 aa, Homo sapiens
  CDR3 for beta chain variable domain of TCR clone 47947 (TRBV15, TRBJ2-1)
CATSGVEDYNEQFF

SEQ ID NO: 95895 - protein, 16 aa, Homo sapiens
  CDR3 for alpha chain variable domain of TCR clone 47948 (TRAV12-2, TRAJ40)
CAVIRGGTSGTYEYIF

SEQ ID NO: 95896 - protein, 14 aa, Homo sapiens
  CDR3 for beta chain variable domain of TCR clone 47948 (TRBV20-1, TRBJ2-5)
CSARDGRAGETQYF

SEQ ID NO: 95897 - protein, 14 aa, Homo sapiens
  CDR3 for alpha chain variable domain of TCR clone 47949 (TRAV2, TRAJ37)
CAVDFTSNTGKLIF

SEQ ID NO: 95898 - protein, 12 aa, Homo sapiens
  CDR3 for beta chain variable domain of TCR clone 47949 (TRBV12-4, TRBJ2-3)
CASSTLPDTQYF

SEQ ID NO: 95899 - protein, 13 aa, Homo sapiens
  CDR3 for alpha chain variable domain of TCR clone 47950 (TRAV27, TRAJ45)
CRSSGGGADGLTF

SEQ ID NO: 95900 - protein, 14 aa, Homo sapiens
  CDR3 for beta chain variable domain of TCR clone 47950 (TRBV7-6, TRBJ2-3)
CASSLGTVTDTQYF

SEQ ID NO: 95901 - protein, 15 aa, Homo sapiens
  CDR3 for alpha chain variable domain of TCR clone 47951 (TRAV29/DV5, TRAJ42)
CAAKTDGGSQGNLIF

SEQ ID NO: 95902 - protein, 15 aa, Homo sapiens
  CDR3 for beta chain variable domain of TCR clone 47951 (TRBV20-1, TRBJ2-7)
CSARDRVSGMDEQYF

SEQ ID NO: 95903 - protein, 13 aa, Homo sapiens
  CDR3 for alpha chain variable domain of TCR clone 47952 (TRAV27, TRAJ45)
CRSSGGGADGLTF

SEQ ID NO: 95904 - protein, 17 aa, Homo sapiens
  CDR3 for beta chain variable domain of TCR clone 47952 (TRBV11-2, TRBJ2-1)
CASSLYPPGVKYNEQFF

SEQ ID NO: 95905 - protein, 14 aa, Homo sapiens
  CDR3 for alpha chain variable domain of TCR clone 47953 (TRAV1-2, TRAJ8)
CAVREDTGFQKLVF

SEQ ID NO: 95906 - protein, 17 aa, Homo sapiens
  CDR3 for beta chain variable domain of TCR clone 47953 (TRBV20-1, TRBJ2-1)
CSARDPLAGVWDNEQFF

SEQ ID NO: 95907 - protein, 14 aa, Homo sapiens
  CDR3 for alpha chain variable domain of TCR clone 47954 (TRAV17, TRAJ12)
CAILPMDSSYKLIF

SEQ ID NO: 95908 - protein, 12 aa, Homo sapiens
  CDR3 for beta chain variable domain of TCR clone 47954 (TRBV7-8, TRBJ2-1)
CASSLGHNEQFF

SEQ ID NO: 95909 - protein, 13 aa, Homo sapiens
  CDR3 for alpha chain variable domain of TCR clone 47955 (TRAV27, TRAJ57)
CRSAQVGSEKLVF

SEQ ID NO: 95910 - protein, 11 aa, Homo sapiens
  CDR3 for beta chain variable domain of TCR clone 47955 (TRBV11-2, TRBJ1-1)
CASSINTEAFF

SEQ ID NO: 95911 - protein, 14 aa, Homo sapiens
  CDR3 for alpha chain variable domain of TCR clone 47956 (TRAV23/DV6, TRAJ40)
CSASLTSGTYKYIF

SEQ ID NO: 95912 - protein, 14 aa, Homo sapiens
  CDR3 for beta chain variable domain of TCR clone 47956 (TRBV5-1, TRBJ2-3)
CASSRGQGGGTQYF

SEQ ID NO: 95913 - protein, 14 aa, Homo sapiens
  CDR3 for alpha chain variable domain of TCR clone 47957 (TRAV1-2, TRAJ8)
CAVREDKGFQKLVL

SEQ ID NO: 95914 - protein, 15 aa, Homo sapiens
  CDR3 for beta chain variable domain of TCR clone 47957 (TRBV6-3, TRBJ2-7)
CASSSPGTVFYEQYF

SEQ ID NO: 95915 - protein, 13 aa, Homo sapiens
  CDR3 for alpha chain variable domain of TCR clone 47958 (TRAV2, TRAJ15)
CAVASQAGTALIF

SEQ ID NO: 95916 - protein, 12 aa, Homo sapiens
  CDR3 for beta chain variable domain of TCR clone 47958 (TRBV18, TRBJ2-5)
CASSPSKETQYF

SEQ ID NO: 95917 - protein, 13 aa, Homo sapiens
  CDR3 for alpha chain variable domain of TCR clone 47959 (TRAV8-3, TRAJ36)
CAVGATGANNLFF

SEQ ID NO: 95918 - protein, 14 aa, Homo sapiens
  CDR3 for beta chain variable domain of TCR clone 47959 (TRBV7-8, TRBJ2-3)
CASSLEAGTDTQYF

SEQ ID NO: 95919 - protein, 16 aa, Homo sapiens
  CDR3 for alpha chain variable domain of TCR clone 47960 (TRAV21, TRAJ52)
CAATNAGGTSYGKLTF

SEQ ID NO: 95920 - protein, 11 aa, Homo sapiens
  CDR3 for beta chain variable domain of TCR clone 47960 (TRBV2, TRBJ1-1)
CASREGTEAFF

SEQ ID NO: 95921 - protein, 12 aa, Homo sapiens
  CDR3 for alpha chain variable domain of TCR clone 47961 (TRAV12-1, TRAJ40)
CVVYSGTYKYIF

SEQ ID NO: 95922 - protein, 17 aa, Homo sapiens
  CDR3 for beta chain variable domain of TCR clone 47961 (TRBV11-3, TRBJ1-5)
CAGSPLTGLRGNQPQHF

SEQ ID NO: 95923 - protein, 13 aa, Homo sapiens
  CDR3 for alpha chain variable domain of TCR clone 47962 (TRAV16, TRAJ31)
CALSAHNNARPMF

SEQ ID NO: 95924 - protein, 17 aa, Homo sapiens
  CDR3 for beta chain variable domain of TCR clone 47962 (TRBV12-4, TRBJ2-1)
CASSPGLAGGRINEQFF

SEQ ID NO: 95925 - protein, 11 aa, Homo sapiens
  CDR3 for alpha chain variable domain of TCR clone 47963 (TRAV21, TRAJ34)
CAVTNTDKPIF

SEQ ID NO: 95926 - protein, 17 aa, Homo sapiens
  CDR3 for beta chain variable domain of TCR clone 47963 (TRBV20-1, TRBJ2-1)
CSARSPSGGPPTMSSSS

SEQ ID NO: 95927 - protein, 13 aa, Homo sapiens
  CDR3 for alpha chain variable domain of TCR clone 47964 (TRAV8-3, TRAJ30)
CAAGGWRDDKIIF

SEQ ID NO: 95928 - protein, 15 aa, Homo sapiens
  CDR3 for beta chain variable domain of TCR clone 47964 (TRBV12-4, TRBJ2-5)
CASSPPTGLQETQYF

SEQ ID NO: 95929 - protein, 14 aa, Homo sapiens
  CDR3 for alpha chain variable domain of TCR clone 47965 (TRAV9-2, TRAJ39)
CALYIYNAGNMLTF

SEQ ID NO: 95930 - protein, 15 aa, Homo sapiens
  CDR3 for beta chain variable domain of TCR clone 47965 (TRBV9, TRBJ2-1)
CASSLAGSSYNEQFF

SEQ ID NO: 95931 - protein, 14 aa, Homo sapiens
  CDR3 for alpha chain variable domain of TCR clone 47966 (TRAV1-2, TRAJ16)
CAVSRFSDGQKLLF

SEQ ID NO: 95932 - protein, 15 aa, Homo sapiens
  CDR3 for beta chain variable domain of TCR clone 47966 (TRBV2, TRBJ2-1)
CASSEEREGDNEQFF

SEQ ID NO: 95933 - protein, 15 aa, Homo sapiens
  CDR3 for alpha chain variable domain of TCR clone 47967 (TRAV8-3, TRAJ45)
CALSYSGGGADGLTF

SEQ ID NO: 95934 - protein, 13 aa, Homo sapiens
  CDR3 for beta chain variable domain of TCR clone 47967 (TRBV20-1, TRBJ2-2)
CSASAAGTGELFF

SEQ ID NO: 95935 - protein, 15 aa, Homo sapiens
  CDR3 for alpha chain variable domain of TCR clone 47968 (TRAV26-1, TRAJ44)
CIARVPFGPASKLTF

SEQ ID NO: 95936 - protein, 17 aa, Homo sapiens
  CDR3 for beta chain variable domain of TCR clone 47968 (TRBV24-1, TRBJ2-4)
CATSDAEARGVRNIQYF

SEQ ID NO: 95937 - protein, 15 aa, Homo sapiens
  CDR3 for alpha chain variable domain of TCR clone 47969 (TRAV21, TRAJ24)
CAARSSTDSWGKLQV

SEQ ID NO: 95938 - protein, 11 aa, Homo sapiens
  CDR3 for beta chain variable domain of TCR clone 47969 (TRBV11-2, TRBJ2-2)
CASSLPGELFF

SEQ ID NO: 95939 - protein, 14 aa, Homo sapiens
  CDR3 for alpha chain variable domain of TCR clone 47970 (TRAV17, TRAJ57)
CATDPQGGSEKLVF

SEQ ID NO: 95940 - protein, 16 aa, Homo sapiens
  CDR3 for beta chain variable domain of TCR clone 47970 (TRBV4-1, TRBJ2-3)
CASSQSTSGAEDTQYF

SEQ ID NO: 95941 - protein, 12 aa, Homo sapiens
  CDR3 for alpha chain variable domain of TCR clone 47971 (TRAV30, TRAJ43)
CGTEERGNDMRF

SEQ ID NO: 95942 - protein, 16 aa, Homo sapiens
  CDR3 for beta chain variable domain of TCR clone 47971 (TRBV18, TRBJ1-1)
CASSPGVGGRGGEAFF

SEQ ID NO: 95943 - protein, 14 aa, Homo sapiens
  CDR3 for alpha chain variable domain of TCR clone 47972 (TRAV12-3, TRAJ10)
SHLPLTGGGNKLTF

SEQ ID NO: 95944 - protein, 13 aa, Homo sapiens
  CDR3 for beta chain variable domain of TCR clone 47972 (TRBV7-6, TRBJ1-2)
CASSLGQGRGYTF

SEQ ID NO: 95945 - protein, 14 aa, Homo sapiens
  CDR3 for alpha chain variable domain of TCR clone 47973 (TRAV38-1, TRAJ40)
CALRPTSGTYKYIF

SEQ ID NO: 95946 - protein, 14 aa, Homo sapiens
  CDR3 for beta chain variable domain of TCR clone 47973 (TRBV25-1, TRBJ1-1)
CASTHLGGNTETFF

SEQ ID NO: 95947 - protein, 12 aa, Homo sapiens
  CDR3 for alpha chain variable domain of TCR clone 47974 (TRAV17, TRAJ20)
CATDSNDYKLSF

SEQ ID NO: 95948 - protein, 16 aa, Homo sapiens
  CDR3 for beta chain variable domain of TCR clone 47974 (TRBV7-2, TRBJ1-2)
CASSSNQGRRGHGYTF

SEQ ID NO: 95949 - protein, 16 aa, Homo sapiens
  CDR3 for alpha chain variable domain of TCR clone 47975 (TRAV12-2, TRAJ32)
CAVNLGQGGATNKLTF

SEQ ID NO: 95950 - protein, 15 aa, Homo sapiens
  CDR3 for beta chain variable domain of TCR clone 47975 (TRBV20-1, TRBJ2-7)
CSARGPLAGGREQYF

SEQ ID NO: 95951 - protein, 14 aa, Homo sapiens
  CDR3 for alpha chain variable domain of TCR clone 47976 (TRAV29/DV5, TRAJ36)
CAARRKTGANNLFF

SEQ ID NO: 95952 - protein, 14 aa, Homo sapiens
  CDR3 for beta chain variable domain of TCR clone 47976 (TRBV12-5, TRBJ2-5)
CASGPRTHQETQYF

SEQ ID NO: 95953 - protein, 15 aa, Homo sapiens
  CDR3 for alpha chain variable domain of TCR clone 47977 (TRAV25, TRAJ52)
CAGRPGGTSYGKLTF

SEQ ID NO: 95954 - protein, 19 aa, Homo sapiens
  CDR3 for beta chain variable domain of TCR clone 47977 (TRBV7-2, TRBJ2-3)
CASSFLSRNWGGGTDTQYF

SEQ ID NO: 95955 - protein, 11 aa, Homo sapiens
  CDR3 for alpha chain variable domain of TCR clone 47978 (TRAV2, TRAJ33)
CAVESNYQLIW

SEQ ID NO: 95956 - protein, 15 aa, Homo sapiens
  CDR3 for beta chain variable domain of TCR clone 47978 (TRBV19, TRBJ1-1)
CASNSGQIQNTEAFF

SEQ ID NO: 95957 - protein, 12 aa, Homo sapiens
  CDR3 for alpha chain variable domain of TCR clone 47979 (TRAV21, TRAJ3)
CCFYSSAPKIIF

SEQ ID NO: 95958 - protein, 16 aa, Homo sapiens
  CDR3 for beta chain variable domain of TCR clone 47979 (TRBV19, TRBJ2-1)
CASSKAGPSSYNEQFF

SEQ ID NO: 95959 - protein, 18 aa, Homo sapiens
  CDR3 for alpha chain variable domain of TCR clone 47980 (TRAV12-3, TRAJ52)
CAMSRTNAGGNSYGKLTF

SEQ ID NO: 95960 - protein, 17 aa, Homo sapiens
  CDR3 for beta chain variable domain of TCR clone 47980 (TRBV7-3, TRBJ2-3)
CASSLMKRMRGADTQYF

SEQ ID NO: 95961 - protein, 12 aa, Homo sapiens
  CDR3 for alpha chain variable domain of TCR clone 47981 (TRAV10, TRAJ43)
CVVVRVGNDMRF

SEQ ID NO: 95962 - protein, 15 aa, Homo sapiens
  CDR3 for beta chain variable domain of TCR clone 47981 (TRBV25-1, TRBJ1-4)
CASSKRIATNEKLFF

SEQ ID NO: 95963 - protein, 12 aa, Homo sapiens
  CDR3 for alpha chain variable domain of TCR clone 47982 (TRAV8-3, TRAJ37)
CAVVGNTGKLIF

SEQ ID NO: 95964 - protein, 17 aa, Homo sapiens
  CDR3 for beta chain variable domain of TCR clone 47982 (TRBV12-4, TRBJ2-3)
CASSSGLAGRHFDTQYF

SEQ ID NO: 95965 - protein, 14 aa, Homo sapiens
  CDR3 for alpha chain variable domain of TCR clone 47983 (TRAV1-2, TRAJ16)
CAVNRFSDGQKLLF

SEQ ID NO: 95966 - protein, 14 aa, Homo sapiens
  CDR3 for beta chain variable domain of TCR clone 47983 (TRBV13, TRBJ2-5)
CASSVGRGQETQYF

SEQ ID NO: 95967 - protein, 15 aa, Homo sapiens
  CDR3 for alpha chain variable domain of TCR clone 47984 (TRAV19, TRAJ23)
CALSEVGNQGGKLIF

SEQ ID NO: 95968 - protein, 17 aa, Homo sapiens
  CDR3 for beta chain variable domain of TCR clone 47984 (TRBV20-1, TRBJ2-1)
CSAPPRLAGTRYNEQFF

SEQ ID NO: 95969 - protein, 12 aa, Homo sapiens
  CDR3 for alpha chain variable domain of TCR clone 47985 (TRAV35, TRAJ30)
YAGLNRDDKIIF

SEQ ID NO: 95970 - protein, 15 aa, Homo sapiens
  CDR3 for beta chain variable domain of TCR clone 47985 (TRBV9, TRBJ1-6)
CASSVAGTGDSPLHF

SEQ ID NO: 95971 - protein, 11 aa, Homo sapiens
  CDR3 for alpha chain variable domain of TCR clone 47986 (TRAV12-2, TRAJ43)
CVAYNNNDMRF

SEQ ID NO: 95972 - protein, 14 aa, Homo sapiens
  CDR3 for beta chain variable domain of TCR clone 47986 (TRBV7-8, TRBJ1-2)
CASSAGTAIYGYTF

SEQ ID NO: 95973 - protein, 13 aa, Homo sapiens
  CDR3 for alpha chain variable domain of TCR clone 47987 (TRAV23/DV6, TRAJ34)
CAAIENNTDKLIF

SEQ ID NO: 95974 - protein, 14 aa, Homo sapiens
  CDR3 for beta chain variable domain of TCR clone 47987 (TRBV2, TRBJ1-5)
CASSENRGGQPQHF

SEQ ID NO: 95975 - protein, 12 aa, Homo sapiens
  CDR3 for alpha chain variable domain of TCR clone 47988 (TRAV13-1, TRAJ21)
CAAKEGFNKFYF

SEQ ID NO: 95976 - protein, 17 aa, Homo sapiens
  CDR3 for beta chain variable domain of TCR clone 47988 (TRBV19, TRBJ2-7)
CASSISIYDSYPYEQYF

SEQ ID NO: 95977 - protein, 14 aa, Homo sapiens
  CDR3 for alpha chain variable domain of TCR clone 47989 (TRAV26-1, TRAJ21)
CIVRPPYNFNKFYF

SEQ ID NO: 95978 - protein, 14 aa, Homo sapiens
  CDR3 for beta chain variable domain of TCR clone 47989 (TRBV11-3, TRBJ2-1)
CASSATTSGSNQFF

SEQ ID NO: 95979 - protein, 13 aa, Homo sapiens
  CDR3 for alpha chain variable domain of TCR clone 47990 (TRAV35, TRAJ44)
CAGLSGTASKLTF

SEQ ID NO: 95980 - protein, 16 aa, Homo sapiens
  CDR3 for beta chain variable domain of TCR clone 47990 (TRBV19, TRBJ2-1)
CASSMGGGSSYNEQFF

SEQ ID NO: 95981 - protein, 11 aa, Homo sapiens
  CDR3 for alpha chain variable domain of TCR clone 47991 (TRAV21, TRAJ48)
CAVYGNEKLTF

SEQ ID NO: 95982 - protein, 16 aa, Homo sapiens
  CDR3 for beta chain variable domain of TCR clone 47991 (TRBV12-4, TRBJ1-5)
CASSSGPRGSNQPQHF

SEQ ID NO: 95983 - protein, 11 aa, Homo sapiens
  CDR3 for alpha chain variable domain of TCR clone 47992 (TRAV1-1, TRAJ23)
CAVRQGGKLIF

SEQ ID NO: 95984 - protein, 13 aa, Homo sapiens
  CDR3 for beta chain variable domain of TCR clone 47992 (TRBV7-9, TRBJ2-3)
CASSPGSTDTQYF

SEQ ID NO: 95985 - protein, 12 aa, Homo sapiens
  CDR3 for alpha chain variable domain of TCR clone 47993 (TRAV12-3, TRAJ32)
CAGGGATNKLIF

SEQ ID NO: 95986 - protein, 12 aa, Homo sapiens
  CDR3 for beta chain variable domain of TCR clone 47993 (TRBV11-2, TRBJ2-2)
CASSLGGGELFF

SEQ ID NO: 95987 - protein, 14 aa, Homo sapiens
  CDR3 for alpha chain variable domain of TCR clone 47994 (TRAV1-2, TRAJ16)
CAVNRFSDGQKLLF

SEQ ID NO: 95988 - protein, 14 aa, Homo sapiens
  CDR3 for beta chain variable domain of TCR clone 47994 (TRBV19, TRBJ1-5)
CASGTEVYNQPQHF

SEQ ID NO: 95989 - protein, 11 aa, Homo sapiens
  CDR3 for alpha chain variable domain of TCR clone 47995 (TRAV1-2, TRAJ40)
CAVPGTYKYIF

SEQ ID NO: 95990 - protein, 16 aa, Homo sapiens
  CDR3 for beta chain variable domain of TCR clone 47995 (TRBV29-1, TRBJ2-7)
CIVEVVGTSGSYEQYF

SEQ ID NO: 95991 - protein, 19 aa, Homo sapiens
  CDR3 for alpha chain variable domain of TCR clone 47996 (TRAV26-1, TRAJ52)
CIIRAHRNAGGTSYGKLTF

SEQ ID NO: 95992 - protein, 13 aa, Homo sapiens
  CDR3 for beta chain variable domain of TCR clone 47996 (TRBV20-1, TRBJ1-6)
CSAPLGVGSPLHF

SEQ ID NO: 95993 - protein, 12 aa, Homo sapiens
  CDR3 for alpha chain variable domain of TCR clone 47997 (TRAV12-3, TRAJ20)
CAMVRGDHKLSF

SEQ ID NO: 95994 - protein, 14 aa, Homo sapiens
  CDR3 for beta chain variable domain of TCR clone 47997 (TRBV5-5, TRBJ1-5)
CASSGQGVDQPQHF

SEQ ID NO: 95995 - protein, 13 aa, Homo sapiens
  CDR3 for alpha chain variable domain of TCR clone 47998 (TRAV16, TRAJ54)
CALMVQGAQRLVF

SEQ ID NO: 95996 - protein, 12 aa, Homo sapiens
  CDR3 for beta chain variable domain of TCR clone 47998 (TRBV18, TRBJ2-7)
CASSTAMGEQYF

SEQ ID NO: 95997 - protein, 14 aa, Homo sapiens
  CDR3 for alpha chain variable domain of TCR clone 47999 (TRAV13-1, TRAJ35)
CAASKGGFGNVLHC

SEQ ID NO: 95998 - protein, 13 aa, Homo sapiens
  CDR3 for beta chain variable domain of TCR clone 47999 (TRBV2, TRBJ2-7)
CASSVGGSGEQYF

SEQ ID NO: 95999 - protein, 15 aa, Homo sapiens
  CDR3 for alpha chain variable domain of TCR clone 48000 (TRAV8-3, TRAJ11)
CAVGLLNSGYSTLTF

SEQ ID NO: 96000 - protein, 15 aa, Homo sapiens
  CDR3 for beta chain variable domain of TCR clone 48000 (TRBV7-3, TRBJ2-2)
CASSETGQGTGELFF

SEQ ID NO: 96001 - protein, 13 aa, Homo sapiens
  CDR3 for alpha chain variable domain of TCR clone 48001 (TRAV12-2, TRAJ30)
RAVNLNRDDKIIF

SEQ ID NO: 96002 - protein, 16 aa, Homo sapiens
  CDR3 for beta chain variable domain of TCR clone 48001 (TRBV27, TRBJ2-2)
CASSLRPGGAPGELFF

SEQ ID NO: 96003 - protein, 12 aa, Homo sapiens
  CDR3 for alpha chain variable domain of TCR clone 48002 (TRAV38-1, TRAJ32)
CAPFGATNKLIF

SEQ ID NO: 96004 - protein, 14 aa, Homo sapiens
  CDR3 for beta chain variable domain of TCR clone 48002 (TRBV29-1, TRBJ2-5)
CSVETSGSGETQYF

SEQ ID NO: 96005 - protein, 13 aa, Homo sapiens
  CDR3 for alpha chain variable domain of TCR clone 48003 (TRAV13-2, TRAJ15)
CAESNQAGTALIF

SEQ ID NO: 96006 - protein, 15 aa, Homo sapiens
  CDR3 for beta chain variable domain of TCR clone 48003 (TRBV5-5, TRBJ2-2)
CASSRQASGAGELFF

SEQ ID NO: 96007 - protein, 19 aa, Homo sapiens
  CDR3 for alpha chain variable domain of TCR clone 48004 (TRAV26-1, TRAJ52)
CIVRAHRNAGGTSYGKLTF

SEQ ID NO: 96008 - protein, 15 aa, Homo sapiens
  CDR3 for beta chain variable domain of TCR clone 48004 (TRBV12-4, TRBJ2-5)
RASSPPTGLQETQYF

SEQ ID NO: 96009 - protein, 14 aa, Homo sapiens
  CDR3 for alpha chain variable domain of TCR clone 48005 (TRAV17, TRAJ6)
CATDASGGSYIPTF

SEQ ID NO: 96010 - protein, 19 aa, Homo sapiens
  CDR3 for beta chain variable domain of TCR clone 48005 (TRBV4-3, TRBJ2-7)
CASSQEFIGWQVTPHEQYF

SEQ ID NO: 96011 - protein, 12 aa, Homo sapiens
  CDR3 for alpha chain variable domain of TCR clone 48006 (TRAV13-1, TRAJ21)
CAAKEGFNKFYF

SEQ ID NO: 96012 - protein, 16 aa, Homo sapiens
  CDR3 for beta chain variable domain of TCR clone 48006 (TRBV2, TRBJ1-4)
CASNLLQGATNEKLFF

SEQ ID NO: 96013 - protein, 10 aa, Homo sapiens
  CDR3 for alpha chain variable domain of TCR clone 48007 (TRAV23/DV6, TRAJ45)
TGGGADGLTF

SEQ ID NO: 96014 - protein, 15 aa, Homo sapiens
  CDR3 for beta chain variable domain of TCR clone 48007 (TRBV27, TRBJ2-1)
CASSNGGGSPNEQFF

SEQ ID NO: 96015 - protein, 14 aa, Homo sapiens
  CDR3 for alpha chain variable domain of TCR clone 48008 (TRAV17, TRAJ6)
CATDASGGSYIPTF

SEQ ID NO: 96016 - protein, 15 aa, Homo sapiens
  CDR3 for beta chain variable domain of TCR clone 48008 (TRBV9, TRBJ1-6)
CASSVAGTGDSPLHF

SEQ ID NO: 96017 - protein, 12 aa, Homo sapiens
  CDR3 for alpha chain variable domain of TCR clone 48009 (TRAV13-1, TRAJ52)
NAGGTSYGKLTF

SEQ ID NO: 96018 - protein, 11 aa, Homo sapiens
  CDR3 for beta chain variable domain of TCR clone 48009 (TRBV12-4, TRBJ2-2)
CASSSAGELFF

SEQ ID NO: 96019 - protein, 15 aa, Homo sapiens
  CDR3 for alpha chain variable domain of TCR clone 48010 (TRAV35, TRAJ33)
CAGQPPRYSNYQLIW

SEQ ID NO: 96020 - protein, 12 aa, Homo sapiens
  CDR3 for beta chain variable domain of TCR clone 48010 (TRBV12-4, TRBJ2-1)
CASSPGRNEQFF

SEQ ID NO: 96021 - protein, 13 aa, Homo sapiens
  CDR3 for alpha chain variable domain of TCR clone 48011 (TRAV3, TRAJ21)
CAVREPDFNKFYF

SEQ ID NO: 96022 - protein, 15 aa, Homo sapiens
  CDR3 for beta chain variable domain of TCR clone 48011 (TRBV11-2, TRBJ2-1)
CASSLGTSGLNEQFF

SEQ ID NO: 96023 - protein, 13 aa, Homo sapiens
  CDR3 for alpha chain variable domain of TCR clone 48012 (TRAV13-1, TRAJ5)
CAAEHTGRRALTF

SEQ ID NO: 96024 - protein, 16 aa, Homo sapiens
  CDR3 for beta chain variable domain of TCR clone 48012 (TRBV4-2, TRBJ2-3)
CASSQELAGDTDTQYF

SEQ ID NO: 96025 - protein, 13 aa, Homo sapiens
  CDR3 for alpha chain variable domain of TCR clone 48013 (TRAV3, TRAJ20)
CAVRSLNDYKLSF

SEQ ID NO: 96026 - protein, 15 aa, Homo sapiens
  CDR3 for beta chain variable domain of TCR clone 48013 (TRBV7-2, TRBJ1-2)
CASSPRAGWNYGYTF

SEQ ID NO: 96027 - protein, 16 aa, Homo sapiens
  CDR3 for alpha chain variable domain of TCR clone 48014 (TRAV21, TRAJ37)
CAVRPRGSSNTGKLIF

SEQ ID NO: 96028 - protein, 17 aa, Homo sapiens
  CDR3 for beta chain variable domain of TCR clone 48014 (TRBV20-1, TRBJ2-2)
CSASGSGQGGLTGELFF

SEQ ID NO: 96029 - protein, 16 aa, Homo sapiens
  CDR3 for alpha chain variable domain of TCR clone 48015 (TRAV8-3, TRAJ10)
CAVGPILTGGGNKLTF

SEQ ID NO: 96030 - protein, 16 aa, Homo sapiens
  CDR3 for beta chain variable domain of TCR clone 48015 (TRBV7-2, TRBJ2-5)
YASSSKWLSGQETQYF

SEQ ID NO: 96031 - protein, 14 aa, Homo sapiens
  CDR3 for alpha chain variable domain of TCR clone 48016 (TRAV35, TRAJ22)
CAGLRPGSARQLTF

SEQ ID NO: 96032 - protein, 14 aa, Homo sapiens
  CDR3 for beta chain variable domain of TCR clone 48016 (TRBV19, TRBJ2-1)
CASSRLASINEQFF

SEQ ID NO: 96033 - protein, 12 aa, Homo sapiens
  CDR3 for alpha chain variable domain of TCR clone 48017 (TRAV8-3, TRAJ20)
CAVGANDYKLSF

SEQ ID NO: 96034 - protein, 16 aa, Homo sapiens
  CDR3 for beta chain variable domain of TCR clone 48017 (TRBV19, TRBJ2-2)
CASRSPGTGATGKLFF

SEQ ID NO: 96035 - protein, 11 aa, Homo sapiens
  CDR3 for alpha chain variable domain of TCR clone 48018 (TRAV27, TRAJ45)
CAGAQEEVLTD

SEQ ID NO: 96036 - protein, 17 aa, Homo sapiens
  CDR3 for beta chain variable domain of TCR clone 48018 (TRBV11-3, TRBJ2-1)
CASSLYPPGVEYNEQFF

SEQ ID NO: 96037 - protein, 13 aa, Homo sapiens
  CDR3 for alpha chain variable domain of TCR clone 48019 (TRAV17, TRAJ9)
CATDYTGGSKTIF

SEQ ID NO: 96038 - protein, 16 aa, Homo sapiens
  CDR3 for beta chain variable domain of TCR clone 48019 (TRBV7-7, TRBJ2-1)
CASSLASGTSYNEQFF

SEQ ID NO: 96039 - protein, 14 aa, Homo sapiens
  CDR3 for alpha chain variable domain of TCR clone 48020 (TRAV8-3, TRAJ37)
CAVGSSGNTGKLIF

SEQ ID NO: 96040 - protein, 15 aa, Homo sapiens
  CDR3 for beta chain variable domain of TCR clone 48020 (TRBV11-2, TRBJ1-3)
CASSLSPLVRDTMYF

SEQ ID NO: 96041 - protein, 16 aa, Homo sapiens
  CDR3 for alpha chain variable domain of TCR clone 48021 (TRAV21, TRAJ45)
CAVSWGSGGGADGLTF

SEQ ID NO: 96042 - protein, 14 aa, Homo sapiens
  CDR3 for beta chain variable domain of TCR clone 48021 (TRBV4-2, TRBJ1-2)
CASSPGGSNYGYTL

SEQ ID NO: 96043 - protein, 14 aa, Homo sapiens
  CDR3 for alpha chain variable domain of TCR clone 48022 (TRAV22, TRAJ6)
CAGVGPGGSYIPTF

SEQ ID NO: 96044 - protein, 17 aa, Homo sapiens
  CDR3 for beta chain variable domain of TCR clone 48022 (TRBV24-1, TRBJ2-1)
CATSDVSTSGTYNEQFF

SEQ ID NO: 96045 - protein, 14 aa, Homo sapiens
  CDR3 for alpha chain variable domain of TCR clone 48023 (TRAV12-2, TRAJ17)
CAVNIKAAGNKLTF

SEQ ID NO: 96046 - protein, 16 aa, Homo sapiens
  CDR3 for beta chain variable domain of TCR clone 48023 (TRBV20-1, TRBJ2-6)
CSASSQGYGGANVLTF

SEQ ID NO: 96047 - protein, 11 aa, Homo sapiens
  CDR3 for alpha chain variable domain of TCR clone 48024 (TRAV12-2, TRAJ31)
CAVTRCARLMF

SEQ ID NO: 96048 - protein, 15 aa, Homo sapiens
  CDR3 for beta chain variable domain of TCR clone 48024 (TRBV19, TRBJ2-7)
CASSIGGGLVNEQYF

SEQ ID NO: 96049 - protein, 11 aa, Homo sapiens
  CDR3 for alpha chain variable domain of TCR clone 48025 (TRAV21, TRAJ20)
CAVRDDYKLRF

SEQ ID NO: 96050 - protein, 14 aa, Homo sapiens
  CDR3 for beta chain variable domain of TCR clone 48025 (TRBV12-4, TRBJ1-1)
CASSFSQMNTEAFF

SEQ ID NO: 96051 - protein, 17 aa, Homo sapiens
  CDR3 for alpha chain variable domain of TCR clone 48026 (TRAV3, TRAJ28)
CAVREAYSGAGSYQLTF

SEQ ID NO: 96052 - protein, 13 aa, Homo sapiens
  CDR3 for beta chain variable domain of TCR clone 48026 (TRBV7-9, TRBJ1-2)
CASSLKQNYGYTF

SEQ ID NO: 96053 - protein, 15 aa, Homo sapiens
  CDR3 for alpha chain variable domain of TCR clone 48027 (TRAV12-3, TRAJ6)
CAMSAASGGGYIPTF

SEQ ID NO: 96054 - protein, 13 aa, Homo sapiens
  CDR3 for beta chain variable domain of TCR clone 48027 (TRBV20-1, TRBJ1-2)
CSASTERIYGYTF

SEQ ID NO: 96055 - protein, 13 aa, Homo sapiens
  CDR3 for alpha chain variable domain of TCR clone 48028 (TRAV17, TRAJ9)
CATDYTGGFTTIF

SEQ ID NO: 96056 - protein, 14 aa, Homo sapiens
  CDR3 for beta chain variable domain of TCR clone 48028 (TRBV19, TRBJ2-5)
CASSMTGQQETQYF

SEQ ID NO: 96057 - protein, 14 aa, Homo sapiens
  CDR3 for alpha chain variable domain of TCR clone 48029 (TRAV17, TRAJ35)
CATDRPGFGNVLHC

SEQ ID NO: 96058 - protein, 19 aa, Homo sapiens
  CDR3 for beta chain variable domain of TCR clone 48029 (TRBV11-3, TRBJ2-2)
CASSTRPGTKTTNTGELFF

SEQ ID NO: 96059 - protein, 17 aa, Homo sapiens
  CDR3 for alpha chain variable domain of TCR clone 48030 (TRAV13-1, TRAJ42)
CAASELWRKPRKSHLWK

SEQ ID NO: 96060 - protein, 15 aa, Homo sapiens
  CDR3 for beta chain variable domain of TCR clone 48030 (TRBV20-1, TRBJ2-1)
CSASSAGSSYNEQFF

SEQ ID NO: 96061 - protein, 15 aa, Homo sapiens
  CDR3 for alpha chain variable domain of TCR clone 48031 (TRAV8-3, TRAJ27)
CAVGPSKTNAGKSTF

SEQ ID NO: 96062 - protein, 16 aa, Homo sapiens
  CDR3 for beta chain variable domain of TCR clone 48031 (TRBV19, TRBJ2-1)
CASSKAGPSSYNEQFF

SEQ ID NO: 96063 - protein, 13 aa, Homo sapiens
  CDR3 for alpha chain variable domain of TCR clone 48032 (TRAV27, TRAJ29)
CAGAHSGNTPLVF

SEQ ID NO: 96064 - protein, 14 aa, Homo sapiens
  CDR3 for beta chain variable domain of TCR clone 48032 (TRBV7-9, TRBJ2-7)
CASSIGQGAGEQYV

SEQ ID NO: 96065 - protein, 17 aa, Homo sapiens
  CDR3 for alpha chain variable domain of TCR clone 48033 (TRAV12-2, TRAJ48)
CASNEKLTFGTGTRLTL

SEQ ID NO: 96066 - protein, 14 aa, Homo sapiens
  CDR3 for beta chain variable domain of TCR clone 48033 (TRBV5-1, TRBJ2-5)
CASSLAGKQETQYF

SEQ ID NO: 96067 - protein, 15 aa, Homo sapiens
  CDR3 for alpha chain variable domain of TCR clone 48034 (TRAV23/DV6, TRAJ4)
CAASPLRGGYNKMIF

SEQ ID NO: 96068 - protein, 15 aa, Homo sapiens
  CDR3 for beta chain variable domain of TCR clone 48034 (TRBV7-9, TRBJ1-6)
CASSSPGRGNSPLHF

SEQ ID NO: 96069 - protein, 14 aa, Homo sapiens
  CDR3 for alpha chain variable domain of TCR clone 48035 (TRAV13-1, TRAJ13)
CAASRVGGYQKVTF

SEQ ID NO: 96070 - protein, 17 aa, Homo sapiens
  CDR3 for beta chain variable domain of TCR clone 48035 (TRBV15, TRBJ1-5)
CATSRAPPGTRKQPQHF

SEQ ID NO: 96071 - protein, 16 aa, Homo sapiens
  CDR3 for alpha chain variable domain of TCR clone 48036 (TRAV14/DV4, TRAJ53)
CAMREGGGGSNYKLTF

SEQ ID NO: 96072 - protein, 14 aa, Homo sapiens
  CDR3 for beta chain variable domain of TCR clone 48036 (TRBV5-8, TRBJ2-3)
CASSLGQGTDTQYF

SEQ ID NO: 96073 - protein, 14 aa, Homo sapiens
  CDR3 for alpha chain variable domain of TCR clone 48037 (TRAV3, TRAJ40)
CAVRDRRGTYKYIF

SEQ ID NO: 96074 - protein, 19 aa, Homo sapiens
  CDR3 for beta chain variable domain of TCR clone 48037 (TRBV25-1, TRBJ2-2)
CAILVYRVDRGRKTGELFF

SEQ ID NO: 96075 - protein, 12 aa, Homo sapiens
  CDR3 for alpha chain variable domain of TCR clone 48038 (TRAV2, TRAJ33)
CAVMDSNYQLIW

SEQ ID NO: 96076 - protein, 16 aa, Homo sapiens
  CDR3 for beta chain variable domain of TCR clone 48038 (TRBV2, TRBJ2-7)
CASSEPWTGPSYEQYF

SEQ ID NO: 96077 - protein, 13 aa, Homo sapiens
  CDR3 for alpha chain variable domain of TCR clone 48039 (TRAV8-3, TRAJ37)
CAVPSSNTGKLIF

SEQ ID NO: 96078 - protein, 12 aa, Homo sapiens
  CDR3 for beta chain variable domain of TCR clone 48039 (TRBV11-2, TRBJ2-1)
RASSPGNNEQFF

SEQ ID NO: 96079 - protein, 12 aa, Homo sapiens
  CDR3 for alpha chain variable domain of TCR clone 48040 (TRAV13-2, TRAJ23)
CAECHRGGKLIF

SEQ ID NO: 96080 - protein, 16 aa, Homo sapiens
  CDR3 for beta chain variable domain of TCR clone 48040 (TRBV20-1, TRBJ1-4)
CGAPGQGLLTNEKLFF

SEQ ID NO: 96081 - protein, 11 aa, Homo sapiens
  CDR3 for alpha chain variable domain of TCR clone 48041 (TRAV1-1, TRAJ16)
CAAGDGQKLLF

SEQ ID NO: 96082 - protein, 15 aa, Homo sapiens
  CDR3 for beta chain variable domain of TCR clone 48041 (TRBV28, TRBJ1-2)
CASIPQGTDDYGYTF

SEQ ID NO: 96083 - protein, 12 aa, Homo sapiens
  CDR3 for alpha chain variable domain of TCR clone 48042 (TRAV13-1, TRAJ21)
CAAKEGFNKFYF

SEQ ID NO: 96084 - protein, 13 aa, Homo sapiens
  CDR3 for beta chain variable domain of TCR clone 48042 (TRBV7-3, TRBJ1-1)
CASNQDWGAEAFF

SEQ ID NO: 96085 - protein, 14 aa, Homo sapiens
  CDR3 for alpha chain variable domain of TCR clone 48043 (TRAV1-2, TRAJ33)
CAVRAPDSNYQLIW

SEQ ID NO: 96086 - protein, 14 aa, Homo sapiens
  CDR3 for beta chain variable domain of TCR clone 48043 (TRBV11-3, TRBJ1-6)
CASSFSGGDSHLHF

SEQ ID NO: 96087 - protein, 14 aa, Homo sapiens
  CDR3 for alpha chain variable domain of TCR clone 48044 (TRAV27, TRAJ22)
RAGVSVLGKRQLTF

SEQ ID NO: 96088 - protein, 17 aa, Homo sapiens
  CDR3 for beta chain variable domain of TCR clone 48044 (TRBV14, TRBJ2-1)
CASSQDRRVTSYNEQFF

SEQ ID NO: 96089 - protein, 12 aa, Homo sapiens
  CDR3 for alpha chain variable domain of TCR clone 48045 (TRAV19, TRAJ31)
CALTLPNARLMF

SEQ ID NO: 96090 - protein, 15 aa, Homo sapiens
  CDR3 for beta chain variable domain of TCR clone 48045 (TRBV24-1, TRBJ2-1)
CATSEPGQGYNEQFF

SEQ ID NO: 96091 - protein, 12 aa, Homo sapiens
  CDR3 for alpha chain variable domain of TCR clone 48046 (TRAV12-3, TRAJ20)
CAMVRGDYKLSF

SEQ ID NO: 96092 - protein, 13 aa, Homo sapiens
  CDR3 for beta chain variable domain of TCR clone 48046 (TRBV23-1, TRBJ1-4)
CASGGKFNEKLFF

SEQ ID NO: 96093 - protein, 13 aa, Homo sapiens
  CDR3 for alpha chain variable domain of TCR clone 48047 (TRAV36/DV7, TRAJ50)
CAVSKTSYDKVIF

SEQ ID NO: 96094 - protein, 13 aa, Homo sapiens
  CDR3 for beta chain variable domain of TCR clone 48047 (TRBV18, TRBJ2-7)
CASSPGRKYEQYF

SEQ ID NO: 96095 - protein, 14 aa, Homo sapiens
  CDR3 for alpha chain variable domain of TCR clone 48048 (TRAV12-1, TRAJ30)
CVPTGKNRDDKIIF

SEQ ID NO: 96096 - protein, 11 aa, Homo sapiens
  CDR3 for beta chain variable domain of TCR clone 48048 (TRBV4-1, TRBJ2-2)
CASEHTGELFF

SEQ ID NO: 96097 - protein, 14 aa, Homo sapiens
  CDR3 for alpha chain variable domain of TCR clone 48049 (TRAV12-2, TRAJ17)
CAVLFKAAGNKLTF

SEQ ID NO: 96098 - protein, 14 aa, Homo sapiens
  CDR3 for beta chain variable domain of TCR clone 48049 (TRBV4-1, TRBJ2-2)
CASSQAVSTGELFF

SEQ ID NO: 96099 - protein, 16 aa, Homo sapiens
  CDR3 for alpha chain variable domain of TCR clone 48050 (TRAV3, TRAJ6)
CAVRDGMGRRKLHTYI

SEQ ID NO: 96100 - protein, 15 aa, Homo sapiens
  CDR3 for beta chain variable domain of TCR clone 48050 (TRBV9, TRBJ2-1)
CASSLAGSAYNEQFF

SEQ ID NO: 96101 - protein, 11 aa, Homo sapiens
  CDR3 for alpha chain variable domain of TCR clone 48051 (TRAV12-3, TRAJ43)
CAMSVSNDMRF

SEQ ID NO: 96102 - protein, 15 aa, Homo sapiens
  CDR3 for beta chain variable domain of TCR clone 48051 (TRBV27, TRBJ2-1)
CASSNGGGSSNEQFF

SEQ ID NO: 96103 - protein, 12 aa, Homo sapiens
  CDR3 for alpha chain variable domain of TCR clone 48052 (TRAV17, TRAJ39)
CATEEAGNMLTF

SEQ ID NO: 96104 - protein, 15 aa, Homo sapiens
  CDR3 for beta chain variable domain of TCR clone 48052 (TRBV12-4, TRBJ2-1)
CASSLLATGNNEQFF

SEQ ID NO: 96105 - protein, 13 aa, Homo sapiens
  CDR3 for alpha chain variable domain of TCR clone 48053 (TRAV8-3, TRAJ48)
CAVVPFGKEKLTF

SEQ ID NO: 96106 - protein, 15 aa, Homo sapiens
  CDR3 for beta chain variable domain of TCR clone 48053 (TRBV11-2, TRBJ2-1)
CASSSPSTRYNEQFF

SEQ ID NO: 96107 - protein, 13 aa, Homo sapiens
  CDR3 for alpha chain variable domain of TCR clone 48054 (TRAV8-6, TRAJ49)
CAVITNTGNQFYF

SEQ ID NO: 96108 - protein, 12 aa, Homo sapiens
  CDR3 for beta chain variable domain of TCR clone 48054 (TRBV14, TRBJ1-1)
CASSQLKGLAFF

SEQ ID NO: 96109 - protein, 15 aa, Homo sapiens
  CDR3 for alpha chain variable domain of TCR clone 48055 (TRAV3, TRAJ3)
CAVRDRDSSASKIIF

SEQ ID NO: 96110 - protein, 15 aa, Homo sapiens
  CDR3 for beta chain variable domain of TCR clone 48055 (TRBV29-1, TRBJ2-7)
CSVEFLDRGSYEQYF

SEQ ID NO: 96111 - protein, 16 aa, Homo sapiens
  CDR3 for alpha chain variable domain of TCR clone 48056 (TRAV16, TRAJ52)
CALSAAGGTSYGKMTF

SEQ ID NO: 96112 - protein, 12 aa, Homo sapiens
  CDR3 for beta chain variable domain of TCR clone 48056 (TRBV12-4, TRBJ1-3)
CASSFSGNTIYF

SEQ ID NO: 96113 - protein, 14 aa, Homo sapiens
  CDR3 for alpha chain variable domain of TCR clone 48057 (TRAV12-1, TRAJ17)
CVVNYKAAGNKLTF

SEQ ID NO: 96114 - protein, 15 aa, Homo sapiens
  CDR3 for beta chain variable domain of TCR clone 48057 (TRBV7-2, TRBJ2-1)
CASTHGTGIYNDQFF

SEQ ID NO: 96115 - protein, 11 aa, Homo sapiens
  CDR3 for alpha chain variable domain of TCR clone 48058 (TRAV4, TRAJ23)
CLVAPGGKLIF

SEQ ID NO: 96116 - protein, 13 aa, Homo sapiens
  CDR3 for beta chain variable domain of TCR clone 48058 (TRBV11-3, TRBJ1-1)
CATEEGLNTEAFF

SEQ ID NO: 96117 - protein, 13 aa, Homo sapiens
  CDR3 for alpha chain variable domain of TCR clone 48059 (TRAV2, TRAJ21)
CAVEDPNFNKFYF

SEQ ID NO: 96118 - protein, 15 aa, Homo sapiens
  CDR3 for beta chain variable domain of TCR clone 48059 (TRBV28, TRBJ2-5)
CASSPGQGSIETQYF

SEQ ID NO: 96119 - protein, 14 aa, Homo sapiens
  CDR3 for alpha chain variable domain of TCR clone 48060 (TRAV1-2, TRAJ16)
CAVNRFSDGQKLLF

SEQ ID NO: 96120 - protein, 15 aa, Homo sapiens
  CDR3 for beta chain variable domain of TCR clone 48060 (TRBV4-1, TRBJ2-1)
CASSQVLAGGDEQFF

SEQ ID NO: 96121 - protein, 13 aa, Homo sapiens
  CDR3 for alpha chain variable domain of TCR clone 48061 (TRAV1-2, TRAJ9)
CAALNTVGFKTIF

SEQ ID NO: 96122 - protein, 13 aa, Homo sapiens
  CDR3 for beta chain variable domain of TCR clone 48061 (TRBV7-9, TRBJ1-2)
CASSLKQNYGYTF

SEQ ID NO: 96123 - protein, 14 aa, Homo sapiens
  CDR3 for alpha chain variable domain of TCR clone 48062 (TRAV12-3, TRAJ10)
SHLPLTGGGNKLTF

SEQ ID NO: 96124 - protein, 11 aa, Homo sapiens
  CDR3 for beta chain variable domain of TCR clone 48062 (TRBV6-1, TRBJ1-3)
CKGGGGNTIYF

SEQ ID NO: 96125 - protein, 15 aa, Homo sapiens
  CDR3 for alpha chain variable domain of TCR clone 48063 (TRAV21, TRAJ53)
CATLNSGGSNYKLTF

SEQ ID NO: 96126 - protein, 16 aa, Homo sapiens
  CDR3 for beta chain variable domain of TCR clone 48063 (TRBV9, TRBJ2-1)
CASSVGGGVNYNEQFF

SEQ ID NO: 96127 - protein, 13 aa, Homo sapiens
  CDR3 for alpha chain variable domain of TCR clone 48064 (TRAV16, TRAJ27)
CALRRTNAGKSTF

SEQ ID NO: 96128 - protein, 15 aa, Homo sapiens
  CDR3 for beta chain variable domain of TCR clone 48064 (TRBV18, TRBJ2-1)
CASSPPRASYNEQFF

SEQ ID NO: 96129 - protein, 15 aa, Homo sapiens
  CDR3 for alpha chain variable domain of TCR clone 48065 (TRAV8-3, TRAJ6)
CAVGSAGGGSYIPTF

SEQ ID NO: 96130 - protein, 13 aa, Homo sapiens
  CDR3 for beta chain variable domain of TCR clone 48065 (TRBV12-4, TRBJ1-2)
CASSLRQGKGYTF

SEQ ID NO: 96131 - protein, 14 aa, Homo sapiens
  CDR3 for alpha chain variable domain of TCR clone 48066 (TRAV1-2, TRAJ16)
CAVNRFSDGQKLLF

SEQ ID NO: 96132 - protein, 14 aa, Homo sapiens
  CDR3 for beta chain variable domain of TCR clone 48066 (TRBV7-9, TRBJ2-5)
CASSLDTAQETQYF

SEQ ID NO: 96133 - protein, 13 aa, Homo sapiens
  CDR3 for alpha chain variable domain of TCR clone 48067 (TRAV8-3, TRAJ37)
CSVPSSNTGKLIF

SEQ ID NO: 96134 - protein, 12 aa, Homo sapiens
  CDR3 for beta chain variable domain of TCR clone 48067 (TRBV11-2, TRBJ2-1)
CASSPGNNEQFF

SEQ ID NO: 96135 - protein, 17 aa, Homo sapiens
  CDR3 for alpha chain variable domain of TCR clone 48068 (TRAV3, TRAJ42)
CAVRDRDYGGSQGNLIY

SEQ ID NO: 96136 - protein, 15 aa, Homo sapiens
  CDR3 for beta chain variable domain of TCR clone 48068 (TRBV6-6, TRBJ2-7)
CASSYSYGGSYEQYF

SEQ ID NO: 96137 - protein, 13 aa, Homo sapiens
  CDR3 for alpha chain variable domain of TCR clone 48069 (TRAV20, TRAJ37)
CAGCSSNTGKLIF

SEQ ID NO: 96138 - protein, 13 aa, Homo sapiens
  CDR3 for beta chain variable domain of TCR clone 48069 (TRBV12-4, TRBJ2-7)
CASSFVRGYEQYF

SEQ ID NO: 96139 - protein, 12 aa, Homo sapiens
  CDR3 for alpha chain variable domain of TCR clone 48070 (TRAV16, TRAJ10)
CSRTGGGDKLTF

SEQ ID NO: 96140 - protein, 12 aa, Homo sapiens
  CDR3 for beta chain variable domain of TCR clone 48070 (TRBV11-3, TRBJ1-1)
CASSHRQGEAFF

SEQ ID NO: 96141 - protein, 14 aa, Homo sapiens
  CDR3 for alpha chain variable domain of TCR clone 48071 (TRAV9-2, TRAJ9)
CALSENTGGFKTIF

SEQ ID NO: 96142 - protein, 16 aa, Homo sapiens
  CDR3 for beta chain variable domain of TCR clone 48071 (TRBV4-1, TRBJ1-1)
CASSQDAGMGNTEAFF

SEQ ID NO: 96143 - protein, 14 aa, Homo sapiens
  CDR3 for alpha chain variable domain of TCR clone 48072 (TRAV1-2, TRAJ16)
CAVNRFSDGQKLLF

SEQ ID NO: 96144 - protein, 14 aa, Homo sapiens
  CDR3 for beta chain variable domain of TCR clone 48072 (TRBV16, TRBJ1-1)
CASSQAGPNTEAFF

SEQ ID NO: 96145 - protein, 12 aa, Homo sapiens
  CDR3 for alpha chain variable domain of TCR clone 48073 (TRAV1-1, TRAJ23)
RAVTNQGGKLIF

SEQ ID NO: 96146 - protein, 15 aa, Homo sapiens
  CDR3 for beta chain variable domain of TCR clone 48073 (TRBV6-6, TRBJ2-7)
CASSYSYGGSYEQYF

SEQ ID NO: 96147 - protein, 13 aa, Homo sapiens
  CDR3 for alpha chain variable domain of TCR clone 48074 (TRAV3, TRAJ36)
CAVRDTGANNLFF

SEQ ID NO: 96148 - protein, 15 aa, Homo sapiens
  CDR3 for beta chain variable domain of TCR clone 48074 (TRBV24-1, TRBJ2-1)
CATSGSGGFYKEQFF

SEQ ID NO: 96149 - protein, 10 aa, Homo sapiens
  CDR3 for alpha chain variable domain of TCR clone 48075 (TRAV1-2, TRAJ23)
CAGQGGKLIF

SEQ ID NO: 96150 - protein, 16 aa, Homo sapiens
  CDR3 for beta chain variable domain of TCR clone 48075 (TRBV11-2, TRBJ1-1)
CASSLRQGGEHLKAFF

SEQ ID NO: 96151 - protein, 18 aa, Homo sapiens
  CDR3 for alpha chain variable domain of TCR clone 48076 (TRAV21, TRAJ52)
CAVRPSPAGGTSYGKLTF

SEQ ID NO: 96152 - protein, 14 aa, Homo sapiens
  CDR3 for beta chain variable domain of TCR clone 48076 (TRBV6-1, TRBJ1-3)
CASVQGGGGNTMYF

SEQ ID NO: 96153 - protein, 13 aa, Homo sapiens
  CDR3 for alpha chain variable domain of TCR clone 48077 (TRAV20, TRAJ49)
CAVQARTGNQFYF

SEQ ID NO: 96154 - protein, 14 aa, Homo sapiens
  CDR3 for beta chain variable domain of TCR clone 48077 (TRBV7-2, TRBJ2-7)
CASSTKTSFYEQYF

SEQ ID NO: 96155 - protein, 17 aa, Homo sapiens
  CDR3 for alpha chain variable domain of TCR clone 48078 (TRAV26-1, TRAJ22)
CVVRVPSHSGSARQLTF

SEQ ID NO: 96156 - protein, 16 aa, Homo sapiens
  CDR3 for beta chain variable domain of TCR clone 48078 (TRBV28, TRBJ2-1)
CASRRSGRVVGNEQFF

SEQ ID NO: 96157 - protein, 16 aa, Homo sapiens
  CDR3 for alpha chain variable domain of TCR clone 48079 (TRAV3, TRAJ10)
CAVRDMRAGGGNKLTF

SEQ ID NO: 96158 - protein, 15 aa, Homo sapiens
  CDR3 for beta chain variable domain of TCR clone 48079 (TRBV11-2, TRBJ1-6)
CAGTGFGTAVSPLHF

SEQ ID NO: 96159 - protein, 16 aa, Homo sapiens
  CDR3 for alpha chain variable domain of TCR clone 48080 (TRAV3, TRAJ37)
CAVRGNGSGNTGKLIF

SEQ ID NO: 96160 - protein, 15 aa, Homo sapiens
  CDR3 for beta chain variable domain of TCR clone 48080 (TRBV7-9, TRBJ1-6)
CASSSPGRGNSPLHF

SEQ ID NO: 96161 - protein, 15 aa, Homo sapiens
  CDR3 for alpha chain variable domain of TCR clone 48081 (TRAV26-1, TRAJ12)
IASSELMDSSYKLIF

SEQ ID NO: 96162 - protein, 11 aa, Homo sapiens
  CDR3 for beta chain variable domain of TCR clone 48081 (TRBV7-9, TRBJ2-3)
CASSPPGTQYF

SEQ ID NO: 96163 - protein, 12 aa, Homo sapiens
  CDR3 for alpha chain variable domain of TCR clone 48082 (TRAV13-2, TRAJ23)
CAERHRGGKLIF

SEQ ID NO: 96164 - protein, 16 aa, Homo sapiens
  CDR3 for beta chain variable domain of TCR clone 48082 (TRBV20-1, TRBJ2-7)
CSASTSGRLSSHEQYF

SEQ ID NO: 96165 - protein, 13 aa, Homo sapiens
  CDR3 for alpha chain variable domain of TCR clone 48083 (TRAV38-1, TRAJ42)
CARWGGSQGNLIF

SEQ ID NO: 96166 - protein, 17 aa, Homo sapiens
  CDR3 for beta chain variable domain of TCR clone 48083 (TRBV20-1, TRBJ2-1)
FSARDPLAGVWDNEQFF

SEQ ID NO: 96167 - protein, 16 aa, Homo sapiens
  CDR3 for alpha chain variable domain of TCR clone 48084 (TRAV30, TRAJ24)
CGTEIVDADSWGKFHF

SEQ ID NO: 96168 - protein, 12 aa, Homo sapiens
  CDR3 for beta chain variable domain of TCR clone 48084 (TRBV11-2, TRBJ2-2)
CASSLPTGELFF

SEQ ID NO: 96169 - protein, 12 aa, Homo sapiens
  CDR3 for alpha chain variable domain of TCR clone 48085 (TRAV17, TRAJ53)
CATEGSNYKLTF

SEQ ID NO: 96170 - protein, 16 aa, Homo sapiens
  CDR3 for beta chain variable domain of TCR clone 48085 (TRBV7-3, TRBJ2-2)
CASSLKRGTLSGELFF

SEQ ID NO: 96171 - protein, 15 aa, Homo sapiens
  CDR3 for alpha chain variable domain of TCR clone 48086 (TRAV17, TRAJ22)
CATVAPSGSARQLTS

SEQ ID NO: 96172 - protein, 16 aa, Homo sapiens
  CDR3 for beta chain variable domain of TCR clone 48086 (TRBV10-3, TRBJ2-7)
CAISADFADRPYEQYF

SEQ ID NO: 96173 - protein, 13 aa, Homo sapiens
  CDR3 for alpha chain variable domain of TCR clone 48087 (TRAV12-3, TRAJ33)
CAMSLNSNYKLIW

SEQ ID NO: 96174 - protein, 13 aa, Homo sapiens
  CDR3 for beta chain variable domain of TCR clone 48087 (TRBV7-2, TRBJ2-2)
CASSLAVTGELFF

SEQ ID NO: 96175 - protein, 14 aa, Homo sapiens
  CDR3 for alpha chain variable domain of TCR clone 48088 (TRAV4, TRAJ26)
CLVGPHNYGQNFAF

SEQ ID NO: 96176 - protein, 17 aa, Homo sapiens
  CDR3 for beta chain variable domain of TCR clone 48088 (TRBV24-1, TRBJ2-1)
CATSDVSTSGTYNEQFF

SEQ ID NO: 96177 - protein, 18 aa, Homo sapiens
  CDR3 for alpha chain variable domain of TCR clone 48089 (TRAV21, TRAJ53)
CAVKGGENSGGSNYKLTF

SEQ ID NO: 96178 - protein, 13 aa, Homo sapiens
  CDR3 for beta chain variable domain of TCR clone 48089 (TRBV12-4, TRBJ2-2)
CASSITGSGELFF

SEQ ID NO: 96179 - protein, 17 aa, Homo sapiens
  CDR3 for alpha chain variable domain of TCR clone 48090 (TRAV3, TRAJ38)
GAVRDCLNAGNNRKLIW

SEQ ID NO: 96180 - protein, 14 aa, Homo sapiens
  CDR3 for beta chain variable domain of TCR clone 48090 (TRBV5-5, TRBJ1-5)
CASSGQGVDQPQHF

SEQ ID NO: 96181 - protein, 14 aa, Homo sapiens
  CDR3 for alpha chain variable domain of TCR clone 48091 (TRAV14/DV4, TRAJ41)
RARGGPDSGYALNF

SEQ ID NO: 96182 - protein, 15 aa, Homo sapiens
  CDR3 for beta chain variable domain of TCR clone 48091 (TRBV19, TRBJ2-1)
CASSIQATSYNEQFF

SEQ ID NO: 96183 - protein, 12 aa, Homo sapiens
  CDR3 for alpha chain variable domain of TCR clone 48092 (TRAV12-1, TRAJ34)
CVVAGATDKLIF

SEQ ID NO: 96184 - protein, 16 aa, Homo sapiens
  CDR3 for beta chain variable domain of TCR clone 48092 (TRBV7-2, TRBJ1-2)
CSSSSNQDRRGHGYTF

SEQ ID NO: 96185 - protein, 13 aa, Homo sapiens
  CDR3 for alpha chain variable domain of TCR clone 48093 (TRAV17, TRAJ26)
CATVDNYGQNFVF

SEQ ID NO: 96186 - protein, 16 aa, Homo sapiens
  CDR3 for beta chain variable domain of TCR clone 48093 (TRBV6-1, TRBJ1-3)
CASVQGGVETPYILER

SEQ ID NO: 96187 - protein, 11 aa, Homo sapiens
  CDR3 for alpha chain variable domain of TCR clone 48094 (TRAV21, TRAJ31)
CAMRNNARLMF

SEQ ID NO: 96188 - protein, 15 aa, Homo sapiens
  CDR3 for beta chain variable domain of TCR clone 48094 (TRBV20-1, TRBJ2-7)
CSARDRVSGMDEQYF

SEQ ID NO: 96189 - protein, 11 aa, Homo sapiens
  CDR3 for alpha chain variable domain of TCR clone 48095 (TRAV12-2, TRAJ43)
CAAYNNNDMRF

SEQ ID NO: 96190 - protein, 12 aa, Homo sapiens
  CDR3 for beta chain variable domain of TCR clone 48095 (TRBV19, TRBJ1-5)
CASSIAQQPQHF

SEQ ID NO: 96191 - protein, 15 aa, Homo sapiens
  CDR3 for alpha chain variable domain of TCR clone 48096 (TRAV17, TRAJ52)
CATEAGGTSYGKLTF

SEQ ID NO: 96192 - protein, 14 aa, Homo sapiens
  CDR3 for beta chain variable domain of TCR clone 48096 (TRBV28, TRBJ1-5)
CASSLGVLVKPQNF

SEQ ID NO: 96193 - protein, 14 aa, Homo sapiens
  CDR3 for alpha chain variable domain of TCR clone 48097 (TRAV1-2, TRAJ15)
CAVRDRQAGTALIF

SEQ ID NO: 96194 - protein, 15 aa, Homo sapiens
  CDR3 for beta chain variable domain of TCR clone 48097 (TRBV7-9, TRBJ1-6)
CASSSPGRGNSPLHF

SEQ ID NO: 96195 - protein, 13 aa, Homo sapiens
  CDR3 for alpha chain variable domain of TCR clone 48098 (TRAV12-2, TRAJ20)
CAVYPSNDYKLSF

SEQ ID NO: 96196 - protein, 12 aa, Homo sapiens
  CDR3 for beta chain variable domain of TCR clone 48098 (TRBV11-2, TRBJ2-2)
CASSLGGGELFF

SEQ ID NO: 96197 - protein, 12 aa, Homo sapiens
  CDR3 for alpha chain variable domain of TCR clone 48099 (TRAV2, TRAJ24)
CAATDSWGKFQF

SEQ ID NO: 96198 - protein, 13 aa, Homo sapiens
  CDR3 for beta chain variable domain of TCR clone 48099 (TRBV5-8, TRBJ1-1)
CASSLGGGTEASF

SEQ ID NO: 96199 - protein, 13 aa, Homo sapiens
  CDR3 for alpha chain variable domain of TCR clone 48100 (TRAV17, TRAJ26)
CVTVDNYGQNFVF

SEQ ID NO: 96200 - protein, 16 aa, Homo sapiens
  CDR3 for beta chain variable domain of TCR clone 48100 (TRBV2, TRBJ2-1)
CASSVGGSLSYNEQFF

SEQ ID NO: 96201 - protein, 16 aa, Homo sapiens
  CDR3 for alpha chain variable domain of TCR clone 48101 (TRAV13-2, TRAJ32)
CAENMNYGGATNKLIF

SEQ ID NO: 96202 - protein, 14 aa, Homo sapiens
  CDR3 for beta chain variable domain of TCR clone 48101 (TRBV15, TRBJ2-5)
CTTSSTGYQETQYF

SEQ ID NO: 96203 - protein, 13 aa, Homo sapiens
  CDR3 for alpha chain variable domain of TCR clone 48102 (TRAV27, TRAJ53)
CVGQGGSNYKLTF

SEQ ID NO: 96204 - protein, 13 aa, Homo sapiens
  CDR3 for beta chain variable domain of TCR clone 48102 (TRBV29-1, TRBJ1-1)
CSVESGFGTEAFF

SEQ ID NO: 96205 - protein, 14 aa, Homo sapiens
  CDR3 for alpha chain variable domain of TCR clone 48103 (TRAV12-2, TRAJ17)
CAVLFKAAGNKLTF

SEQ ID NO: 96206 - protein, 14 aa, Homo sapiens
  CDR3 for beta chain variable domain of TCR clone 48103 (TRBV5-1, TRBJ2-7)
CASSRGESLYEQYF

SEQ ID NO: 96207 - protein, 13 aa, Homo sapiens
  CDR3 for alpha chain variable domain of TCR clone 48104 (TRAV12-1, TRAJ6)
CVVFPGGSYIPTF

SEQ ID NO: 96208 - protein, 13 aa, Homo sapiens
  CDR3 for beta chain variable domain of TCR clone 48104 (TRBV7-9, TRBJ1-2)
CASSLKQDYGYTF

SEQ ID NO: 96209 - protein, 11 aa, Homo sapiens
  CDR3 for alpha chain variable domain of TCR clone 48105 (TRAV21, TRAJ39)
LLVNAGNMLTF

SEQ ID NO: 96210 - protein, 15 aa, Homo sapiens
  CDR3 for beta chain variable domain of TCR clone 48105 (TRBV29-1, TRBJ2-1)
CSGRDRKVSYNEQFF

SEQ ID NO: 96211 - protein, 16 aa, Homo sapiens
  CDR3 for alpha chain variable domain of TCR clone 48106 (TRAV4, TRAJ9)
CLVGDPNRPGCFKTIF

SEQ ID NO: 96212 - protein, 16 aa, Homo sapiens
  CDR3 for beta chain variable domain of TCR clone 48106 (TRBV28, TRBJ1-4)
CASSPPYRGRSEKLFF

SEQ ID NO: 96213 - protein, 13 aa, Homo sapiens
  CDR3 for alpha chain variable domain of TCR clone 48107 (TRAV36/DV7, TRAJ37)
CAVFSSNTGKLIF

SEQ ID NO: 96214 - protein, 13 aa, Homo sapiens
  CDR3 for beta chain variable domain of TCR clone 48107 (TRBV2, TRBJ1-1)
CASSEGGNTGAFF

SEQ ID NO: 96215 - protein, 10 aa, Homo sapiens
  CDR3 for alpha chain variable domain of TCR clone 48108 (TRAV8-2, TRAJ31)
CVVVNARLMF

SEQ ID NO: 96216 - protein, 15 aa, Homo sapiens
  CDR3 for beta chain variable domain of TCR clone 48108 (TRBV7-9, TRBJ1-4)
CASSRTGGFNEKLFF

SEQ ID NO: 96217 - protein, 15 aa, Homo sapiens
  CDR3 for alpha chain variable domain of TCR clone 48109 (TRAV13-1, TRAJ44)
CAASRGGVTASKLTF

SEQ ID NO: 96218 - protein, 14 aa, Homo sapiens
  CDR3 for beta chain variable domain of TCR clone 48109 (TRBV7-2, TRBJ2-5)
CASSPRGSSETQYF

SEQ ID NO: 96219 - protein, 17 aa, Homo sapiens
  CDR3 for alpha chain variable domain of TCR clone 48110 (TRAV38-2/DV8, TRAJ56)
CAYRSEVGTGANSKLTF

SEQ ID NO: 96220 - protein, 14 aa, Homo sapiens
  CDR3 for beta chain variable domain of TCR clone 48110 (TRBV11-1, TRBJ1-1)
CASSLEHPNTEALF

SEQ ID NO: 96221 - protein, 15 aa, Homo sapiens
  CDR3 for alpha chain variable domain of TCR clone 48111 (TRAV25, TRAJ52)
CAGRPGGTSYGKLTF

SEQ ID NO: 96222 - protein, 17 aa, Homo sapiens
  CDR3 for beta chain variable domain of TCR clone 48111 (TRBV7-8, TRBJ2-6)
CASSAGTWGAGANVLTF

SEQ ID NO: 96223 - protein, 12 aa, Homo sapiens
  CDR3 for alpha chain variable domain of TCR clone 48112 (TRAV20, TRAJ56)
CAVTGANSKLTF

SEQ ID NO: 96224 - protein, 14 aa, Homo sapiens
  CDR3 for beta chain variable domain of TCR clone 48112 (TRBV20-1, TRBJ2-5)
CSALVPGYQETQYL

SEQ ID NO: 96225 - protein, 13 aa, Homo sapiens
  CDR3 for alpha chain variable domain of TCR clone 48113 (TRAV36/DV7, TRAJ38)
CVANAGNNRKLIW

SEQ ID NO: 96226 - protein, 14 aa, Homo sapiens
  CDR3 for beta chain variable domain of TCR clone 48113 (TRBV7-2, TRBJ2-7)
CANSLRWEVNEQYF

SEQ ID NO: 96227 - protein, 13 aa, Homo sapiens
  CDR3 for alpha chain variable domain of TCR clone 48114 (TRAV13-2, TRAJ48)
CAEMDFGNEKLTF

SEQ ID NO: 96228 - protein, 16 aa, Homo sapiens
  CDR3 for beta chain variable domain of TCR clone 48114 (TRBV7-3, TRBJ2-2)
CASSLKRGTLSGELFF

SEQ ID NO: 96229 - protein, 15 aa, Homo sapiens
  CDR3 for alpha chain variable domain of TCR clone 48115 (TRAV12-1, TRAJ48)
CVVNKVNFGNEKLTF

SEQ ID NO: 96230 - protein, 22 aa, Homo sapiens
  CDR3 for beta chain variable domain of TCR clone 48115 (TRBV7-3, TRBJ2-2)
GGTQPCISVPAAQEDTPGSCFF

SEQ ID NO: 96231 - protein, 16 aa, Homo sapiens
  CDR3 for alpha chain variable domain of TCR clone 48116 (TRAV26-1, TRAJ53)
CIVRVAMGGSNYRLTF

SEQ ID NO: 96232 - protein, 12 aa, Homo sapiens
  CDR3 for beta chain variable domain of TCR clone 48116 (TRBV7-9, TRBJ1-5)
CASSPQGQPQHF

SEQ ID NO: 96233 - protein, 13 aa, Homo sapiens
  CDR3 for alpha chain variable domain of TCR clone 48117 (TRAV20, TRAJ20)
CAVQAGSGYKLSF

SEQ ID NO: 96234 - protein, 14 aa, Homo sapiens
  CDR3 for beta chain variable domain of TCR clone 48117 (TRBV6-1, TRBJ1-3)
CASVQGGGGNTIYF

SEQ ID NO: 96235 - protein, 14 aa, Homo sapiens
  CDR3 for alpha chain variable domain of TCR clone 48118 (TRAV13-1, TRAJ35)
CGASKGGFGNVLHC

SEQ ID NO: 96236 - protein, 13 aa, Homo sapiens
  CDR3 for beta chain variable domain of TCR clone 48118 (TRBV7-3, TRBJ1-1)
CASSQDWGAEAFF

SEQ ID NO: 96237 - protein, 12 aa, Homo sapiens
  CDR3 for alpha chain variable domain of TCR clone 48119 (TRAV17, TRAJ12)
CAGGDSSYKLIF

SEQ ID NO: 96238 - protein, 12 aa, Homo sapiens
  CDR3 for beta chain variable domain of TCR clone 48119 (TRBV29-1, TRBJ1-1)
CSESDGNTAAFF

SEQ ID NO: 96239 - protein, 14 aa, Homo sapiens
  CDR3 for alpha chain variable domain of TCR clone 48120 (TRAV1-2, TRAJ16)
CAVNRFSDGQKLLF

SEQ ID NO: 96240 - protein, 14 aa, Homo sapiens
  CDR3 for beta chain variable domain of TCR clone 48120 (TRBV4-1, TRBJ1-1)
CASSRSGQSFEAFF

SEQ ID NO: 96241 - protein, 15 aa, Homo sapiens
  CDR3 for alpha chain variable domain of TCR clone 48121 (TRAV8-3, TRAJ45)
CASSYSGGGADGLTF

SEQ ID NO: 96242 - protein, 18 aa, Homo sapiens
  CDR3 for beta chain variable domain of TCR clone 48121 (TRBV2, TRBJ2-1)
CASRGLAGGPRTYNEQFF

SEQ ID NO: 96243 - protein, 14 aa, Homo sapiens
  CDR3 for alpha chain variable domain of TCR clone 48122 (TRAV13-2, TRAJ17)
CAENSKAAGNKLTF

SEQ ID NO: 96244 - protein, 15 aa, Homo sapiens
  CDR3 for beta chain variable domain of TCR clone 48122 (TRBV10-2, TRBJ2-6)
CASSEQGTGANVLTF

SEQ ID NO: 96245 - protein, 17 aa, Homo sapiens
  CDR3 for alpha chain variable domain of TCR clone 48123 (TRAV2, TRAJ22)
ILQVREADAAEQRQLTF

SEQ ID NO: 96246 - protein, 16 aa, Homo sapiens
  CDR3 for beta chain variable domain of TCR clone 48123 (TRBV2, TRBJ2-5)
CASSEPQGVGEETQYF

SEQ ID NO: 96247 - protein, 12 aa, Homo sapiens
  CDR3 for alpha chain variable domain of TCR clone 48124 (TRAV8-1, TRAJ6)
CASSGGRYIPTF

SEQ ID NO: 96248 - protein, 12 aa, Homo sapiens
  CDR3 for beta chain variable domain of TCR clone 48124 (TRBV19, TRBJ1-1)
CASMNRYTEAFF

SEQ ID NO: 96249 - protein, 21 aa, Homo sapiens
  CDR3 for alpha chain variable domain of TCR clone 48125 (TRAV1-1, TRAJ27)
CLLLLRCEREGGENRDDKIIF

SEQ ID NO: 96250 - protein, 17 aa, Homo sapiens
  CDR3 for beta chain variable domain of TCR clone 48125 (TRBV28, TRBJ2-5)
CASSTPEGDALQETQYF

SEQ ID NO: 96251 - protein, 10 aa, Homo sapiens
  CDR3 for alpha chain variable domain of TCR clone 48126 (TRAV21, TRAJ31)
CAVDNARLMF

SEQ ID NO: 96252 - protein, 13 aa, Homo sapiens
  CDR3 for beta chain variable domain of TCR clone 48126 (TRBV4-1, TRBJ1-1)
CACSRKMNTEAFF

SEQ ID NO: 96253 - protein, 14 aa, Homo sapiens
  CDR3 for alpha chain variable domain of TCR clone 48127 (TRAV1-2, TRAJ8)
CAVRKDTGFQKLVF

SEQ ID NO: 96254 - protein, 14 aa, Homo sapiens
  CDR3 for beta chain variable domain of TCR clone 48127 (TRBV15, TRBJ2-3)
CATRSGTSTDTQYF

SEQ ID NO: 96255 - protein, 16 aa, Homo sapiens
  CDR3 for alpha chain variable domain of TCR clone 48128 (TRAV3, TRAJ37)
CAVRPHGSGNTCKLIF

SEQ ID NO: 96256 - protein, 16 aa, Homo sapiens
  CDR3 for beta chain variable domain of TCR clone 48128 (TRBV9, TRBJ1-2)
CASSVEEKVSPYGYTF

SEQ ID NO: 96257 - protein, 12 aa, Homo sapiens
  CDR3 for alpha chain variable domain of TCR clone 48129 (TRAV12-3, TRAJ34)
CATGYNTDKLIF

SEQ ID NO: 96258 - protein, 14 aa, Homo sapiens
  CDR3 for beta chain variable domain of TCR clone 48129 (TRBV4-1, TRBJ2-2)
CASSQAVNTGELFF

SEQ ID NO: 96259 - protein, 18 aa, Homo sapiens
  CDR3 for alpha chain variable domain of TCR clone 48130 (TRAV21, TRAJ52)
CAVRPSPAGGTRYGKLTF

SEQ ID NO: 96260 - protein, 13 aa, Homo sapiens
  CDR3 for beta chain variable domain of TCR clone 48130 (TRBV29-1, TRBJ2-2)
CSVYREDTGELFF

SEQ ID NO: 96261 - protein, 12 aa, Homo sapiens
  CDR3 for alpha chain variable domain of TCR clone 48131 (TRAV41, TRAJ34)
CAVVYNTDKLIF

SEQ ID NO: 96262 - protein, 15 aa, Homo sapiens
  CDR3 for beta chain variable domain of TCR clone 48131 (TRBV4-1, TRBJ1-4)
CASSDTGGTNEKLFF

SEQ ID NO: 96263 - protein, 14 aa, Homo sapiens
  CDR3 for alpha chain variable domain of TCR clone 48132 (TRAV38-1, TRAJ43)
CAFMKHNNNNDMRF

SEQ ID NO: 96264 - protein, 17 aa, Homo sapiens
  CDR3 for beta chain variable domain of TCR clone 48132 (TRBV7-7, TRBJ1-4)
CASSLVGQGASNEELFF

SEQ ID NO: 96265 - protein, 11 aa, Homo sapiens
  CDR3 for alpha chain variable domain of TCR clone 48133 (TRAV2, TRAJ33)
CAVESNYQLLW

SEQ ID NO: 96266 - protein, 15 aa, Homo sapiens
  CDR3 for beta chain variable domain of TCR clone 48133 (TRBV19, TRBJ1-1)
CASTSGQIQNTEAFF

SEQ ID NO: 96267 - protein, 15 aa, Homo sapiens
  CDR3 for alpha chain variable domain of TCR clone 48134 (TRAV12-2, TRAJ53)
CAVNGGGGSNYKLTF

SEQ ID NO: 96268 - protein, 13 aa, Homo sapiens
  CDR3 for beta chain variable domain of TCR clone 48134 (TRBV20-1, TRBJ2-5)
CSAATELQETQYF

SEQ ID NO: 96269 - protein, 13 aa, Homo sapiens
  CDR3 for alpha chain variable domain of TCR clone 48135 (TRAV17, TRAJ40)
CAGALGGTHKYIF

SEQ ID NO: 96270 - protein, 16 aa, Homo sapiens
  CDR3 for beta chain variable domain of TCR clone 48135 (TRBV7-2, TRBJ1-4)
CASSLAPGRRDEKLFF

SEQ ID NO: 96271 - protein, 13 aa, Homo sapiens
  CDR3 for alpha chain variable domain of TCR clone 48136 (TRAV27, TRAJ41)
CAGEGNSGYALDF

SEQ ID NO: 96272 - protein, 14 aa, Homo sapiens
  CDR3 for beta chain variable domain of TCR clone 48136 (TRBV7-2, TRBJ1-1)
CASSFLTGTTEAFF

SEQ ID NO: 96273 - protein, 12 aa, Homo sapiens
  CDR3 for alpha chain variable domain of TCR clone 48137 (TRAV27, TRAJ11)
CAGASGYSTLTF

SEQ ID NO: 96274 - protein, 16 aa, Homo sapiens
  CDR3 for beta chain variable domain of TCR clone 48137 (TRBV12-5, TRBJ2-5)
CASGPRTSGNQETQYF

SEQ ID NO: 96275 - protein, 12 aa, Homo sapiens
  CDR3 for alpha chain variable domain of TCR clone 48138 (TRAV2, TRAJ34)
CAVERNTDKLIF

SEQ ID NO: 96276 - protein, 23 aa, Homo sapiens
  CDR3 for beta chain variable domain of TCR clone 48138 (TRBV7-2, TRBJ2-5)
RRTRPCISVPAASLGGGEETQYF

SEQ ID NO: 96277 - protein, 13 aa, Homo sapiens
  CDR3 for alpha chain variable domain of TCR clone 48139 (TRAV12-1, TRAJ22)
CVVYSGSARQLTF

SEQ ID NO: 96278 - protein, 16 aa, Homo sapiens
  CDR3 for beta chain variable domain of TCR clone 48139 (TRBV5-1, TRBJ2-1)
CASSLADIGSCNEQFF

SEQ ID NO: 96279 - protein, 16 aa, Homo sapiens
  CDR3 for alpha chain variable domain of TCR clone 48140 (TRAV23/DV6, TRAJ9)
CAASIGGNTGGFKTLF

SEQ ID NO: 96280 - protein, 15 aa, Homo sapiens
  CDR3 for beta chain variable domain of TCR clone 48140 (TRBV6-3, TRBJ2-7)
CASSSPGTVLYEQYF

SEQ ID NO: 96281 - protein, 13 aa, Homo sapiens
  CDR3 for alpha chain variable domain of TCR clone 48141 (TRAV1-1, TRAJ15)
CAVVDQAGTALLF

SEQ ID NO: 96282 - protein, 14 aa, Homo sapiens
  CDR3 for beta chain variable domain of TCR clone 48141 (TRBV5-4, TRBJ1-6)
CASSLWSDNSPLHF

SEQ ID NO: 96283 - protein, 15 aa, Homo sapiens
  CDR3 for alpha chain variable domain of TCR clone 48142 (TRAV23/DV6, TRAJ9)
CSKHRGNTGGFKTIF

SEQ ID NO: 96284 - protein, 14 aa, Homo sapiens
  CDR3 for beta chain variable domain of TCR clone 48142 (TRBV9, TRBJ2-7)
CASSVGVGSYEQYF

SEQ ID NO: 96285 - protein, 13 aa, Homo sapiens
  CDR3 for alpha chain variable domain of TCR clone 48143 (TRAV12-1, TRAJ31)
CVVIPNNNARLMF

SEQ ID NO: 96286 - protein, 13 aa, Homo sapiens
  CDR3 for beta chain variable domain of TCR clone 48143 (TRBV7-3, TRBJ1-1)
CASSQDWGAEAFF

SEQ ID NO: 96287 - protein, 11 aa, Homo sapiens
  CDR3 for alpha chain variable domain of TCR clone 48144 (TRAV21, TRAJ34)
CAVTNTDNPIF

SEQ ID NO: 96288 - protein, 17 aa, Homo sapiens
  CDR3 for beta chain variable domain of TCR clone 48144 (TRBV20-1, TRBJ2-1)
CSARSPSGGPPTMSSSS

SEQ ID NO: 96289 - protein, 15 aa, Homo sapiens
  CDR3 for alpha chain variable domain of TCR clone 48145 (TRAV21, TRAJ13)
CAVRPTSGGYQKGTF

SEQ ID NO: 96290 - protein, 18 aa, Homo sapiens
  CDR3 for beta chain variable domain of TCR clone 48145 (TRBV11-3, TRBJ2-1)
CASSSYPGGRDSYNEQFF

SEQ ID NO: 96291 - protein, 11 aa, Homo sapiens
  CDR3 for alpha chain variable domain of TCR clone 48146 (TRAV21, TRAJ33)
CAVLSNYQLIW

SEQ ID NO: 96292 - protein, 15 aa, Homo sapiens
  CDR3 for beta chain variable domain of TCR clone 48146 (TRBV11-2, TRBJ2-7)
CASSLMVGGSYEQYV

SEQ ID NO: 96293 - protein, 11 aa, Homo sapiens
  CDR3 for alpha chain variable domain of TCR clone 48147 (TRAV13-1, TRAJ43)
CAAHNNNDMRF

SEQ ID NO: 96294 - protein, 15 aa, Homo sapiens
  CDR3 for beta chain variable domain of TCR clone 48147 (TRBV6-1, TRBJ2-2)
CASSRLRGGTGELFF

SEQ ID NO: 96295 - protein, 15 aa, Homo sapiens
  CDR3 for alpha chain variable domain of TCR clone 48148 (TRAV13-1, TRAJ8)
CAASIPNTGFQKLVF

SEQ ID NO: 96296 - protein, 15 aa, Homo sapiens
  CDR3 for beta chain variable domain of TCR clone 48148 (TRBV9, TRBJ1-6)
CASSVAGTGDSPLHF

SEQ ID NO: 96297 - protein, 14 aa, Homo sapiens
  CDR3 for alpha chain variable domain of TCR clone 48149 (TRAV8-6, TRAJ49)
CAVSDPGTGNQFYF

SEQ ID NO: 96298 - protein, 16 aa, Homo sapiens
  CDR3 for beta chain variable domain of TCR clone 48149 (TRBV24-1, TRBJ2-1)
CATSGVAGANYNGQFF

SEQ ID NO: 96299 - protein, 14 aa, Homo sapiens
  CDR3 for alpha chain variable domain of TCR clone 48150 (TRAV17, TRAJ31)
CATVLRNNNARLMF

SEQ ID NO: 96300 - protein, 14 aa, Homo sapiens
  CDR3 for beta chain variable domain of TCR clone 48150 (TRBV12-4, TRBJ2-5)
CANSLWQKQETQYF

SEQ ID NO: 96301 - protein, 11 aa, Homo sapiens
  CDR3 for alpha chain variable domain of TCR clone 48151 (TRAV2, TRAJ23)
CAVETRGKLIF

SEQ ID NO: 96302 - protein, 14 aa, Homo sapiens
  CDR3 for beta chain variable domain of TCR clone 48151 (TRBV2, TRBJ2-3)
CASSEGQNADTQYF

SEQ ID NO: 96303 - protein, 13 aa, Homo sapiens
  CDR3 for alpha chain variable domain of TCR clone 48152 (TRAV12-3, TRAJ13)
CAMGTGGYQKVTF

SEQ ID NO: 96304 - protein, 14 aa, Homo sapiens
  CDR3 for beta chain variable domain of TCR clone 48152 (TRBV7-2, TRBJ2-5)
CASSTGGELKTQFF

SEQ ID NO: 96305 - protein, 17 aa, Homo sapiens
  CDR3 for alpha chain variable domain of TCR clone 48153 (TRAV38-2/DV8, TRAJ38)
CAYRSARGAVNNRKLIW

SEQ ID NO: 96306 - protein, 13 aa, Homo sapiens
  CDR3 for beta chain variable domain of TCR clone 48153 (TRBV6-5, TRBJ2-1)
CASRGRVGNEQFF

SEQ ID NO: 96307 - protein, 13 aa, Homo sapiens
  CDR3 for alpha chain variable domain of TCR clone 48154 (TRAV13-2, TRAJ20)
FVQRISADYKLSF

SEQ ID NO: 96308 - protein, 13 aa, Homo sapiens
  CDR3 for beta chain variable domain of TCR clone 48154 (TRBV6-6, TRBJ2-1)
CASSLHQGDEQFF

SEQ ID NO: 96309 - protein, 16 aa, Homo sapiens
  CDR3 for alpha chain variable domain of TCR clone 48155 (TRAV30, TRAJ24)
CGTEIVDADSWGKFQF

SEQ ID NO: 96310 - protein, 20 aa, Homo sapiens
  CDR3 for beta chain variable domain of TCR clone 48155 (TRBV18, TRBJ2-5)
CASSPSASDSSSGCKRPSTS

SEQ ID NO: 96311 - protein, 23 aa, Homo sapiens
  CDR3 for alpha chain variable domain of TCR clone 48156 (TRAV8-6, TRAJ38)
CAVRNAGNNHIQNPDPAVYQLTD

SEQ ID NO: 96312 - protein, 15 aa, Homo sapiens
  CDR3 for beta chain variable domain of TCR clone 48156 (TRBV4-1, TRBJ2-2)
CASSEGQGITGELFF

SEQ ID NO: 96313 - protein, 16 aa, Homo sapiens
  CDR3 for alpha chain variable domain of TCR clone 48157 (TRAV3, TRAJ37)
CAVRGKGSGNTGKLTF

SEQ ID NO: 96314 - protein, 16 aa, Homo sapiens
  CDR3 for beta chain variable domain of TCR clone 48157 (TRBV28, TRBJ1-5)
CASSFRGGYSNQPQHF

SEQ ID NO: 96315 - protein, 14 aa, Homo sapiens
  CDR3 for alpha chain variable domain of TCR clone 48158 (TRAV1-2, TRAJ16)
CAVSRFPDGQKLLF

SEQ ID NO: 96316 - protein, 13 aa, Homo sapiens
  CDR3 for beta chain variable domain of TCR clone 48158 (TRBV10-3, TRBJ2-7)
CASKLAVNYEQYF

SEQ ID NO: 96317 - protein, 11 aa, Homo sapiens
  CDR3 for alpha chain variable domain of TCR clone 48159 (TRAV1-2, TRAJ20)
CAVANDYKLSF

SEQ ID NO: 96318 - protein, 16 aa, Homo sapiens
  CDR3 for beta chain variable domain of TCR clone 48159 (TRBV19, TRBJ2-1)
CASSKAGPSSYNEQFF

SEQ ID NO: 96319 - protein, 11 aa, Homo sapiens
  CDR3 for alpha chain variable domain of TCR clone 48160 (TRAV1-1, TRAJ23)
CAVRQGGKLTF

SEQ ID NO: 96320 - protein, 13 aa, Homo sapiens
  CDR3 for beta chain variable domain of TCR clone 48160 (TRBV7-3, TRBJ1-1)
CASSQDWGAEAFF

SEQ ID NO: 96321 - protein, 14 aa, Homo sapiens
  CDR3 for alpha chain variable domain of TCR clone 48161 (TRAV8-3, TRAJ4)
CAVGAAGGYNKLIF

SEQ ID NO: 96322 - protein, 12 aa, Homo sapiens
  CDR3 for beta chain variable domain of TCR clone 48161 (TRBV12-4, TRBJ2-7)
CASSLGGYEQYF

SEQ ID NO: 96323 - protein, 11 aa, Homo sapiens
  CDR3 for alpha chain variable domain of TCR clone 48162 (TRAV12-3, TRAJ49)
CAANTGNQFYF

SEQ ID NO: 96324 - protein, 12 aa, Homo sapiens
  CDR3 for beta chain variable domain of TCR clone 48162 (TRBV6-3, TRBJ2-7)
CASSGPGFEQYF

SEQ ID NO: 96325 - protein, 14 aa, Homo sapiens
  CDR3 for alpha chain variable domain of TCR clone 48163 (TRAV23/DV6, TRAJ4)
CAAPSSGGYNTLIF

SEQ ID NO: 96326 - protein, 16 aa, Homo sapiens
  CDR3 for beta chain variable domain of TCR clone 48163 (TRBV19, TRBJ1-1)
CASRFGGPVTGTEAFF

SEQ ID NO: 96327 - protein, 12 aa, Homo sapiens
  CDR3 for alpha chain variable domain of TCR clone 48164 (TRAV26-1, )
CIDIQNPDPAVY

SEQ ID NO: 96328 - protein, 19 aa, Homo sapiens
  CDR3 for beta chain variable domain of TCR clone 48164 (TRBV19, TRBJ2-5)
CASSIGQVTDFFLGETQYF

SEQ ID NO: 96329 - protein, 11 aa, Homo sapiens
  CDR3 for alpha chain variable domain of TCR clone 48165 (TRAV2, TRAJ13)
CASGGYQKVTF

SEQ ID NO: 96330 - protein, 15 aa, Homo sapiens
  CDR3 for beta chain variable domain of TCR clone 48165 (TRBV29-1, TRBJ2-1)
CSGRDRKSSYSEQFF

SEQ ID NO: 96331 - protein, 16 aa, Homo sapiens
  CDR3 for alpha chain variable domain of TCR clone 48166 (TRAV38-2/DV8, TRAJ33)
CAYRTGLFDSNYQLTW

SEQ ID NO: 96332 - protein, 13 aa, Homo sapiens
  CDR3 for beta chain variable domain of TCR clone 48166 (TRBV27, TRBJ1-4)
CASSLMGDEKLFF

SEQ ID NO: 96333 - protein, 14 aa, Homo sapiens
  CDR3 for alpha chain variable domain of TCR clone 48167 (TRAV13-1, TRAJ44)
CAAKATGTAGKLTF

SEQ ID NO: 96334 - protein, 14 aa, Homo sapiens
  CDR3 for beta chain variable domain of TCR clone 48167 (TRBV25-1, TRBJ1-1)
CASTHLGGNTEAFF

SEQ ID NO: 96335 - protein, 14 aa, Homo sapiens
  CDR3 for alpha chain variable domain of TCR clone 48168 (TRAV38-1, TRAJ29)
CAFITPSGNTPLVF

SEQ ID NO: 96336 - protein, 12 aa, Homo sapiens
  CDR3 for beta chain variable domain of TCR clone 48168 (TRBV27, TRBJ2-5)
CASSPTGETQYF

SEQ ID NO: 96337 - protein, 11 aa, Homo sapiens
  CDR3 for alpha chain variable domain of TCR clone 48169 (TRAV21, TRAJ33)
CAVLSNYQLIW

SEQ ID NO: 96338 - protein, 15 aa, Homo sapiens
  CDR3 for beta chain variable domain of TCR clone 48169 (TRBV11-2, TRBJ2-7)
CASSSMVGGSYEQYF

SEQ ID NO: 96339 - protein, 14 aa, Homo sapiens
  CDR3 for alpha chain variable domain of TCR clone 48170 (TRAV21, TRAJ52)
CGRAGGTSYGKLTF

SEQ ID NO: 96340 - protein, 14 aa, Homo sapiens
  CDR3 for beta chain variable domain of TCR clone 48170 (TRBV19, TRBJ1-2)
RASSVLGYNYGYTF

SEQ ID NO: 96341 - protein, 14 aa, Homo sapiens
  CDR3 for alpha chain variable domain of TCR clone 48171 (TRAV12-3, TRAJ10)
SHLPLTGGGNKLTF

SEQ ID NO: 96342 - protein, 16 aa, Homo sapiens
  CDR3 for beta chain variable domain of TCR clone 48171 (TRBV28, TRBJ1-2)
CASSLYGQEANYGYTF

SEQ ID NO: 96343 - protein, 19 aa, Homo sapiens
  CDR3 for alpha chain variable domain of TCR clone 48172 (TRAV29/DV5, TRAJ49)
CSVLLCSKLTVDTGNQLYF

SEQ ID NO: 96344 - protein, 17 aa, Homo sapiens
  CDR3 for beta chain variable domain of TCR clone 48172 (TRBV13, TRBJ2-3)
CASSLSRVAGGRNTQYF

SEQ ID NO: 96345 - protein, 13 aa, Homo sapiens
  CDR3 for alpha chain variable domain of TCR clone 48173 (TRAV2, TRAJ40)
CAVVTSGTYKYIS

SEQ ID NO: 96346 - protein, 16 aa, Homo sapiens
  CDR3 for beta chain variable domain of TCR clone 48173 (TRBV2, TRBJ2-1)
CASSVGGSLSYNEQFF

SEQ ID NO: 96347 - protein, 16 aa, Homo sapiens
  CDR3 for alpha chain variable domain of TCR clone 48174 (TRAV36/DV7, TRAJ30)
CAVETYGLDRDDKIIF

SEQ ID NO: 96348 - protein, 15 aa, Homo sapiens
  CDR3 for beta chain variable domain of TCR clone 48174 (TRBV4-1, TRBJ1-4)
CASSDTGGTNEKLFF

SEQ ID NO: 96349 - protein, 14 aa, Homo sapiens
  CDR3 for alpha chain variable domain of TCR clone 48175 (TRAV8-1, TRAJ34)
CAVSPSYNTDKLIF

SEQ ID NO: 96350 - protein, 16 aa, Homo sapiens
  CDR3 for beta chain variable domain of TCR clone 48175 (TRBV7-2, TRBJ2-6)
CASSLAGRSGANVLTF

SEQ ID NO: 96351 - protein, 14 aa, Homo sapiens
  CDR3 for alpha chain variable domain of TCR clone 48176 (TRAV12-2, TRAJ40)
CAVKIPSGTYKYIF

SEQ ID NO: 96352 - protein, 15 aa, Homo sapiens
  CDR3 for beta chain variable domain of TCR clone 48176 (TRBV4-1, TRBJ2-7)
CASSQQGQGFDEQYF

SEQ ID NO: 96353 - protein, 15 aa, Homo sapiens
  CDR3 for alpha chain variable domain of TCR clone 48177 (TRAV12-2, TRAJ43)
CAFDMRFGAGTRLTV

SEQ ID NO: 96354 - protein, 18 aa, Homo sapiens
  CDR3 for beta chain variable domain of TCR clone 48177 (TRBV20-1, TRBJ2-3)
CSASGLAGGPGTADTQYF

SEQ ID NO: 96355 - protein, 13 aa, Homo sapiens
  CDR3 for alpha chain variable domain of TCR clone 48178 (TRAV8-6, TRAJ49)
CVVITNTGNQFYF

SEQ ID NO: 96356 - protein, 14 aa, Homo sapiens
  CDR3 for beta chain variable domain of TCR clone 48178 (TRBV5-1, TRBJ2-7)
CASSRGESLYEQYF

SEQ ID NO: 96357 - protein, 12 aa, Homo sapiens
  CDR3 for alpha chain variable domain of TCR clone 48179 (TRAV30, TRAJ43)
CGTEERGNDMRF

SEQ ID NO: 96358 - protein, 13 aa, Homo sapiens
  CDR3 for beta chain variable domain of TCR clone 48179 (TRBV27, TRBJ2-7)
CASSFSQGYEQYL

SEQ ID NO: 96359 - protein, 14 aa, Homo sapiens
  CDR3 for alpha chain variable domain of TCR clone 48180 (TRAV21, TRAJ45)
CAVSSGGGADGLTF

SEQ ID NO: 96360 - protein, 18 aa, Homo sapiens
  CDR3 for beta chain variable domain of TCR clone 48180 (TRBV18, TRBJ1-3)
CASSPRGGAGPSGNTIYF

SEQ ID NO: 96361 - protein, 11 aa, Homo sapiens
  CDR3 for alpha chain variable domain of TCR clone 48181 (TRAV12-1, TRAJ34)
CVVNKGRELIF

SEQ ID NO: 96362 - protein, 12 aa, Homo sapiens
  CDR3 for beta chain variable domain of TCR clone 48181 (TRBV2, TRBJ2-1)
CAYGPPGNKQFF

SEQ ID NO: 96363 - protein, 13 aa, Homo sapiens
  CDR3 for alpha chain variable domain of TCR clone 48182 (TRAV8-6, TRAJ42)
CAVRGRKPRNLIF

SEQ ID NO: 96364 - protein, 13 aa, Homo sapiens
  CDR3 for beta chain variable domain of TCR clone 48182 (TRBV7-3, TRBJ1-1)
CASSQDWGAEAFF

SEQ ID NO: 96365 - protein, 18 aa, Homo sapiens
  CDR3 for alpha chain variable domain of TCR clone 48183 (TRAV21, TRAJ52)
CAVRPSPAGGTSYGKPTF

SEQ ID NO: 96366 - protein, 13 aa, Homo sapiens
  CDR3 for beta chain variable domain of TCR clone 48183 (TRBV19, TRBJ1-2)
CASSVPGQDGYTF

SEQ ID NO: 96367 - protein, 13 aa, Homo sapiens
  CDR3 for alpha chain variable domain of TCR clone 48184 (TRAV1-2, TRAJ9)
CAALNTGGFKTIF

SEQ ID NO: 96368 - protein, 15 aa, Homo sapiens
  CDR3 for beta chain variable domain of TCR clone 48184 (TRBV5-1, TRBJ2-2)
CASSSQGGNTGELFF

SEQ ID NO: 96369 - protein, 16 aa, Homo sapiens
  CDR3 for alpha chain variable domain of TCR clone 48185 (TRAV16, TRAJ52)
CALSGVGGTSDGKLTF

SEQ ID NO: 96370 - protein, 14 aa, Homo sapiens
  CDR3 for beta chain variable domain of TCR clone 48185 (TRBV19, TRBJ1-2)
CASSLQGQAYGYTF

SEQ ID NO: 96371 - protein, 14 aa, Homo sapiens
  CDR3 for alpha chain variable domain of TCR clone 48186 (TRAV38-1, TRAJ40)
CALRPTSGTYKYIL

SEQ ID NO: 96372 - protein, 15 aa, Homo sapiens
  CDR3 for beta chain variable domain of TCR clone 48186 (TRBV20-1, TRBJ2-7)
CSARDRVSGMDEQYF

SEQ ID NO: 96373 - protein, 14 aa, Homo sapiens
  CDR3 for alpha chain variable domain of TCR clone 48187 (TRAV26-1, TRAJ39)
CIVRGSRACNMLTF

SEQ ID NO: 96374 - protein, 15 aa, Homo sapiens
  CDR3 for beta chain variable domain of TCR clone 48187 (TRBV7-9, TRBJ1-5)
CASSQGHQPNQPQHF

SEQ ID NO: 96375 - protein, 15 aa, Homo sapiens
  CDR3 for alpha chain variable domain of TCR clone 48188 (TRAV8-3, TRAJ6)
CAVGPLGGGSYTPTF

SEQ ID NO: 96376 - protein, 14 aa, Homo sapiens
  CDR3 for beta chain variable domain of TCR clone 48188 (TRBV19, TRBJ2-2)
CASSTGQGAGELFF

SEQ ID NO: 96377 - protein, 14 aa, Homo sapiens
  CDR3 for alpha chain variable domain of TCR clone 48189 (TRAV26-1, TRAJ38)
CIADNAGNNRKPIW

SEQ ID NO: 96378 - protein, 14 aa, Homo sapiens
  CDR3 for beta chain variable domain of TCR clone 48189 (TRBV4-1, TRBJ2-2)
CASSQAVNTGELFF

SEQ ID NO: 96379 - protein, 15 aa, Homo sapiens
  CDR3 for alpha chain variable domain of TCR clone 48190 (TRAV12-1, TRAJ44)
CVVFVNTGTASKLTF

SEQ ID NO: 96380 - protein, 12 aa, Homo sapiens
  CDR3 for beta chain variable domain of TCR clone 48190 (TRBV7-8, TRBJ2-7)
CASSLGDREQYF

SEQ ID NO: 96381 - protein, 15 aa, Homo sapiens
  CDR3 for alpha chain variable domain of TCR clone 48191 (TRAV8-6, TRAJ10)
CAVSDQAGGGNKLTF

SEQ ID NO: 96382 - protein, 16 aa, Homo sapiens
  CDR3 for beta chain variable domain of TCR clone 48191 (TRBV27, TRBJ2-7)
CSSSSERRDSAYEQYF

SEQ ID NO: 96383 - protein, 15 aa, Homo sapiens
  CDR3 for alpha chain variable domain of TCR clone 48192 (TRAV26-1, TRAJ29)
CIVRVEGSGNTPLVF

SEQ ID NO: 96384 - protein, 19 aa, Homo sapiens
  CDR3 for beta chain variable domain of TCR clone 48192 (TRBV25-1, TRBJ2-2)
CAILVYRVDRGRKTGELFF

SEQ ID NO: 96385 - protein, 12 aa, Homo sapiens
  CDR3 for alpha chain variable domain of TCR clone 48193 (TRAV13-1, TRAJ9)
CASHTGGFKTIF

SEQ ID NO: 96386 - protein, 13 aa, Homo sapiens
  CDR3 for beta chain variable domain of TCR clone 48193 (TRBV12-4, TRBJ1-2)
CASSSGSKDGYIF

SEQ ID NO: 96387 - protein, 12 aa, Homo sapiens
  CDR3 for alpha chain variable domain of TCR clone 48194 (TRAV9-2, TRAJ4)
CAPRGGYNKLIF

SEQ ID NO: 96388 - protein, 15 aa, Homo sapiens
  CDR3 for beta chain variable domain of TCR clone 48194 (TRBV11-3, TRBJ2-5)
CASSDTSGGIETQYF

SEQ ID NO: 96389 - protein, 15 aa, Homo sapiens
  CDR3 for alpha chain variable domain of TCR clone 48195 (TRAV8-3, TRAJ40)
CTAPSLGSGTYKYIF

SEQ ID NO: 96390 - protein, 16 aa, Homo sapiens
  CDR3 for beta chain variable domain of TCR clone 48195 (TRBV7-3, TRBJ2-3)
CASSLSGYRPEDTQYF

SEQ ID NO: 96391 - protein, 14 aa, Homo sapiens
  CDR3 for alpha chain variable domain of TCR clone 48196 (TRAV4, TRAJ9)
CLVGSGTGDFKTIF

SEQ ID NO: 96392 - protein, 15 aa, Homo sapiens
  CDR3 for beta chain variable domain of TCR clone 48196 (TRBV7-2, TRBJ2-1)
CASSLASGRVNEQFF

SEQ ID NO: 96393 - protein, 11 aa, Homo sapiens
  CDR3 for alpha chain variable domain of TCR clone 48197 (TRAV1-2, TRAJ40)
CAVPGTYKYIL

SEQ ID NO: 96394 - protein, 15 aa, Homo sapiens
  CDR3 for beta chain variable domain of TCR clone 48197 (TRBV25-1, TRBJ1-4)
CASSPGDSTNEKLFF

SEQ ID NO: 96395 - protein, 11 aa, Homo sapiens
  CDR3 for alpha chain variable domain of TCR clone 48198 (TRAV13-2, TRAJ20)
CADSNDYKLSF

SEQ ID NO: 96396 - protein, 11 aa, Homo sapiens
  CDR3 for beta chain variable domain of TCR clone 48198 (TRBV20-1, TRBJ2-7)
CSARTSYEQYF

SEQ ID NO: 96397 - protein, 16 aa, Homo sapiens
  CDR3 for alpha chain variable domain of TCR clone 48199 (TRAV3, TRAJ37)
CAVRGKGSGNTGKLIF

SEQ ID NO: 96398 - protein, 15 aa, Homo sapiens
  CDR3 for beta chain variable domain of TCR clone 48199 (TRBV10-3, TRBJ2-3)
CAISLTSGGTDTQYF

SEQ ID NO: 96399 - protein, 14 aa, Homo sapiens
  CDR3 for alpha chain variable domain of TCR clone 48200 (TRAV20, TRAJ22)
CAVALGGSARQLTF

SEQ ID NO: 96400 - protein, 11 aa, Homo sapiens
  CDR3 for beta chain variable domain of TCR clone 48200 (TRBV29-1, TRBJ2-5)
CSEDRTGTQYF

SEQ ID NO: 96401 - protein, 14 aa, Homo sapiens
  CDR3 for alpha chain variable domain of TCR clone 48201 (TRAV17, TRAJ54)
CATDANQGAQKLVF

SEQ ID NO: 96402 - protein, 14 aa, Homo sapiens
  CDR3 for beta chain variable domain of TCR clone 48201 (TRBV7-2, TRBJ2-7)
CASRSQGAAYEQYF

SEQ ID NO: 96403 - protein, 13 aa, Homo sapiens
  CDR3 for alpha chain variable domain of TCR clone 48202 (TRAV12-1, TRAJ34)
CVVTGYNNDKLIF

SEQ ID NO: 96404 - protein, 13 aa, Homo sapiens
  CDR3 for beta chain variable domain of TCR clone 48202 (TRBV28, TRBJ2-7)
CASKAGGVYEQYF

SEQ ID NO: 96405 - protein, 13 aa, Homo sapiens
  CDR3 for alpha chain variable domain of TCR clone 48203 (TRAV13-2, TRAJ48)
CAEMDFGNEKLTF

SEQ ID NO: 96406 - protein, 16 aa, Homo sapiens
  CDR3 for beta chain variable domain of TCR clone 48203 (TRBV7-9, TRBJ2-1)
CASSDVAGGSYNGQFF

SEQ ID NO: 96407 - protein, 23 aa, Homo sapiens
  CDR3 for alpha chain variable domain of TCR clone 48204 (TRAV26-1, )
CIADNAGNNDIQNPDPAVYQLRD

SEQ ID NO: 96408 - protein, 12 aa, Homo sapiens
  CDR3 for beta chain variable domain of TCR clone 48204 (TRBV11-2, TRBJ2-2)
CASSLGGGELFF

SEQ ID NO: 96409 - protein, 14 aa, Homo sapiens
  CDR3 for alpha chain variable domain of TCR clone 48205 (TRAV12-3, TRAJ22)
CAISLFGSARQLTF

SEQ ID NO: 96410 - protein, 11 aa, Homo sapiens
  CDR3 for beta chain variable domain of TCR clone 48205 (TRBV12-4, TRBJ2-2)
CASSSAGELFF

SEQ ID NO: 96411 - protein, 15 aa, Homo sapiens
  CDR3 for alpha chain variable domain of TCR clone 48206 (TRAV25, TRAJ53)
CAATGGGGSNYKLTF

SEQ ID NO: 96412 - protein, 19 aa, Homo sapiens
  CDR3 for beta chain variable domain of TCR clone 48206 (TRBV7-2, TRBJ2-3)
CASSFLSRNWGGGADTQYF

SEQ ID NO: 96413 - protein, 11 aa, Homo sapiens
  CDR3 for alpha chain variable domain of TCR clone 48207 (TRAV21, TRAJ48)
CAVDGNEKLIF

SEQ ID NO: 96414 - protein, 16 aa, Homo sapiens
  CDR3 for beta chain variable domain of TCR clone 48207 (TRBV12-4, TRBJ1-5)
CASSSGPRGSNQPQHF

SEQ ID NO: 96415 - protein, 11 aa, Homo sapiens
  CDR3 for alpha chain variable domain of TCR clone 48208 (TRAV3, TRAJ21)
CAVGNFNKSYF

SEQ ID NO: 96416 - protein, 17 aa, Homo sapiens
  CDR3 for beta chain variable domain of TCR clone 48208 (TRBV13, TRBJ2-3)
CASSLSRVAGGRNTQYF

SEQ ID NO: 96417 - protein, 12 aa, Homo sapiens
  CDR3 for alpha chain variable domain of TCR clone 48209 (TRAV21, TRAJ31)
CAVWANNARLMF

SEQ ID NO: 96418 - protein, 16 aa, Homo sapiens
  CDR3 for beta chain variable domain of TCR clone 48209 (TRBV27, TRBJ2-5)
CASSYGPGGQKETQYF

SEQ ID NO: 96419 - protein, 14 aa, Homo sapiens
  CDR3 for alpha chain variable domain of TCR clone 48210 (TRAV12-2, TRAJ13)
CAVKRTGGYQKVTF

SEQ ID NO: 96420 - protein, 12 aa, Homo sapiens
  CDR3 for beta chain variable domain of TCR clone 48210 (TRBV12-4, TRBJ1-2)
CASSFIWLHLRF

SEQ ID NO: 96421 - protein, 14 aa, Homo sapiens
  CDR3 for alpha chain variable domain of TCR clone 48211 (TRAV13-1, TRAJ40)
CAASMTSGTYKYIF

SEQ ID NO: 96422 - protein, 14 aa, Homo sapiens
  CDR3 for beta chain variable domain of TCR clone 48211 (TRBV4-1, TRBJ2-2)
CASSQAVNTGELFF

SEQ ID NO: 96423 - protein, 12 aa, Homo sapiens
  CDR3 for alpha chain variable domain of TCR clone 48212 (TRAV13-1, TRAJ48)
CAANFGNEKLTF

SEQ ID NO: 96424 - protein, 13 aa, Homo sapiens
  CDR3 for beta chain variable domain of TCR clone 48212 (TRBV7-3, TRBJ1-1)
CASSQDWGAEDFF

SEQ ID NO: 96425 - protein, 14 aa, Homo sapiens
  CDR3 for alpha chain variable domain of TCR clone 48213 (TRAV8-1, TRAJ5)
CAVRTDTGRRALTF

SEQ ID NO: 96426 - protein, 14 aa, Homo sapiens
  CDR3 for beta chain variable domain of TCR clone 48213 (TRBV7-8, TRBJ2-3)
CASSFPDGQGTQYF

SEQ ID NO: 96427 - protein, 12 aa, Homo sapiens
  CDR3 for alpha chain variable domain of TCR clone 48214 (TRAV21, TRAJ11)
CAATSGYSTLTF

SEQ ID NO: 96428 - protein, 16 aa, Homo sapiens
  CDR3 for beta chain variable domain of TCR clone 48214 (TRBV28, TRBJ2-2)
CASSLEGGSNTGEPFF

SEQ ID NO: 96429 - protein, 13 aa, Homo sapiens
  CDR3 for alpha chain variable domain of TCR clone 48215 (TRAV35, TRAJ36)
CVGPRIGANNLFF

SEQ ID NO: 96430 - protein, 15 aa, Homo sapiens
  CDR3 for beta chain variable domain of TCR clone 48215 (TRBV28, TRBJ2-5)
CASSPPWSYQETQYF

SEQ ID NO: 96431 - protein, 13 aa, Homo sapiens
  CDR3 for alpha chain variable domain of TCR clone 48216 (TRAV3, TRAJ27)
YAVRPLGAGKSTF

SEQ ID NO: 96432 - protein, 15 aa, Homo sapiens
  CDR3 for beta chain variable domain of TCR clone 48216 (TRBV7-9, TRBJ2-7)
CASSLRTSGSYEQYF

SEQ ID NO: 96433 - protein, 11 aa, Homo sapiens
  CDR3 for alpha chain variable domain of TCR clone 48217 (TRAV21, TRAJ9)
CAAPGGFKTIF

SEQ ID NO: 96434 - protein, 12 aa, Homo sapiens
  CDR3 for beta chain variable domain of TCR clone 48217 (TRBV20-1, TRBJ2-3)
CSARVGTDTQYF

SEQ ID NO: 96435 - protein, 14 aa, Homo sapiens
  CDR3 for alpha chain variable domain of TCR clone 48218 (TRAV26-1, TRAJ49)
CIVRLTNTGDQFYF

SEQ ID NO: 96436 - protein, 13 aa, Homo sapiens
  CDR3 for beta chain variable domain of TCR clone 48218 (TRBV4-1, TRBJ2-7)
CASSQGQAYEQYF

SEQ ID NO: 96437 - protein, 12 aa, Homo sapiens
  CDR3 for alpha chain variable domain of TCR clone 48219 (TRAV13-1, TRAJ49)
CAASIRSNQFYF

SEQ ID NO: 96438 - protein, 14 aa, Homo sapiens
  CDR3 for beta chain variable domain of TCR clone 48219 (TRBV7-2, TRBJ2-1)
CASSPGLAGNGQFF

SEQ ID NO: 96439 - protein, 14 aa, Homo sapiens
  CDR3 for alpha chain variable domain of TCR clone 48220 (TRAV3, TRAJ9)
CAVGLNTGGFKTIF

SEQ ID NO: 96440 - protein, 15 aa, Homo sapiens
  CDR3 for beta chain variable domain of TCR clone 48220 (TRBV7-2, TRBJ2-1)
CASSLASGRVNEQFF

SEQ ID NO: 96441 - protein, 11 aa, Homo sapiens
  CDR3 for alpha chain variable domain of TCR clone 48221 (TRAV2, TRAJ13)
CASGGYQKVTF

SEQ ID NO: 96442 - protein, 16 aa, Homo sapiens
  CDR3 for beta chain variable domain of TCR clone 48221 (TRBV15, TRBJ1-2)
CATSRGPRTGGGGYTF

SEQ ID NO: 96443 - protein, 15 aa, Homo sapiens
  CDR3 for alpha chain variable domain of TCR clone 48222 (TRAV8-3, TRAJ45)
CASSYSGVGADGLTF

SEQ ID NO: 96444 - protein, 17 aa, Homo sapiens
  CDR3 for beta chain variable domain of TCR clone 48222 (TRBV7-8, TRBJ1-2)
CASSLRPLQGHLYGYTF

SEQ ID NO: 96445 - protein, 14 aa, Homo sapiens
  CDR3 for alpha chain variable domain of TCR clone 48223 (TRAV23/DV6, TRAJ37)
CAASTSSNTGKLIF

SEQ ID NO: 96446 - protein, 15 aa, Homo sapiens
  CDR3 for beta chain variable domain of TCR clone 48223 (TRBV7-9, TRBJ1-5)
CASSQGHQPNQPQHF

SEQ ID NO: 96447 - protein, 14 aa, Homo sapiens
  CDR3 for alpha chain variable domain of TCR clone 48224 (TRAV8-3, TRAJ30)
CAVGDMNRDDKIIF

SEQ ID NO: 96448 - protein, 10 aa, Homo sapiens
  CDR3 for beta chain variable domain of TCR clone 48224 (TRBV19, TRBJ2-2)
CASSRNPGGL

SEQ ID NO: 96449 - protein, 14 aa, Homo sapiens
  CDR3 for alpha chain variable domain of TCR clone 48225 (TRAV8-3, TRAJ4)
CAVGASGGYNKLIF

SEQ ID NO: 96450 - protein, 16 aa, Homo sapiens
  CDR3 for beta chain variable domain of TCR clone 48225 (TRBV4-3, TRBJ2-2)
CASSHLKGSGTGELFF

SEQ ID NO: 96451 - protein, 14 aa, Homo sapiens
  CDR3 for alpha chain variable domain of TCR clone 48226 (TRAV1-2, TRAJ8)
CAVRKDTGFQKLVF

SEQ ID NO: 96452 - protein, 14 aa, Homo sapiens
  CDR3 for beta chain variable domain of TCR clone 48226 (TRBV5-4, TRBJ1-1)
CASSLDSRRDEAFF

SEQ ID NO: 96453 - protein, 14 aa, Homo sapiens
  CDR3 for alpha chain variable domain of TCR clone 48227 (TRAV1-2, TRAJ54)
CAVSEVLGAQKLVS

SEQ ID NO: 96454 - protein, 13 aa, Homo sapiens
  CDR3 for beta chain variable domain of TCR clone 48227 (TRBV27, TRBJ2-7)
CASSFVSSYEQYF

SEQ ID NO: 96455 - protein, 13 aa, Homo sapiens
  CDR3 for alpha chain variable domain of TCR clone 48228 (TRAV29/DV5, TRAJ31)
CAASRNNNARLMS

SEQ ID NO: 96456 - protein, 12 aa, Homo sapiens
  CDR3 for beta chain variable domain of TCR clone 48228 (TRBV14, TRBJ1-1)
CASSQLKGLAFF

SEQ ID NO: 96457 - protein, 14 aa, Homo sapiens
  CDR3 for alpha chain variable domain of TCR clone 48229 (TRAV27, TRAJ13)
CRSSNSGGYQKVTF

SEQ ID NO: 96458 - protein, 16 aa, Homo sapiens
  CDR3 for beta chain variable domain of TCR clone 48229 (TRBV7-6, TRBJ2-1)
CIAAPAAWGGADEQFF

SEQ ID NO: 96459 - protein, 14 aa, Homo sapiens
  CDR3 for alpha chain variable domain of TCR clone 48230 (TRAV13-1, TRAJ40)
CAARSTSGTYKYIF

SEQ ID NO: 96460 - protein, 15 aa, Homo sapiens
  CDR3 for beta chain variable domain of TCR clone 48230 (TRBV18, TRBJ1-5)
CASSDTGGNNQPQHF

SEQ ID NO: 96461 - protein, 14 aa, Homo sapiens
  CDR3 for alpha chain variable domain of TCR clone 48231 (TRAV16, TRAJ29)
CALTRNSGNTPLVF

SEQ ID NO: 96462 - protein, 12 aa, Homo sapiens
  CDR3 for beta chain variable domain of TCR clone 48231 (TRBV2, TRBJ2-1)
CAKREGYNEQFL

SEQ ID NO: 96463 - protein, 13 aa, Homo sapiens
  CDR3 for alpha chain variable domain of TCR clone 48232 (TRAV2, TRAJ40)
CAVFTPGTYKYIF

SEQ ID NO: 96464 - protein, 14 aa, Homo sapiens
  CDR3 for beta chain variable domain of TCR clone 48232 (TRBV19, TRBJ2-1)
CASPTFVLSGEQFF

SEQ ID NO: 96465 - protein, 13 aa, Homo sapiens
  CDR3 for alpha chain variable domain of TCR clone 48233 (TRAV1-2, TRAJ9)
CAVLNTGAFKTIF

SEQ ID NO: 96466 - protein, 14 aa, Homo sapiens
  CDR3 for beta chain variable domain of TCR clone 48233 (TRBV20-1, TRBJ2-3)
CSARGGTSTDTQYF

SEQ ID NO: 96467 - protein, 11 aa, Homo sapiens
  CDR3 for alpha chain variable domain of TCR clone 48234 (TRAV21, TRAJ11)
CAVNGYSTLTF

SEQ ID NO: 96468 - protein, 13 aa, Homo sapiens
  CDR3 for beta chain variable domain of TCR clone 48234 (TRBV28, TRBJ2-7)
CASKAGGVYEQYF

SEQ ID NO: 96469 - protein, 15 aa, Homo sapiens
  CDR3 for alpha chain variable domain of TCR clone 48235 (TRAV8-3, TRAJ23)
RAVGDRYNQGGKLIF

SEQ ID NO: 96470 - protein, 22 aa, Homo sapiens
  CDR3 for beta chain variable domain of TCR clone 48235 (TRBV29-1, TRBJ2-5)
TVSNMSPEDSSIYLCSAGTQYF

SEQ ID NO: 96471 - protein, 15 aa, Homo sapiens
  CDR3 for alpha chain variable domain of TCR clone 48236 (TRAV8-3, TRAJ40)
CAAPSLGPGTYKYIF

SEQ ID NO: 96472 - protein, 16 aa, Homo sapiens
  CDR3 for beta chain variable domain of TCR clone 48236 (TRBV7-3, TRBJ2-3)
CASSLSGYRPEDTQYF

SEQ ID NO: 96473 - protein, 14 aa, Homo sapiens
  CDR3 for alpha chain variable domain of TCR clone 48237 (TRAV8-6, TRAJ5)
CAVSVDTGRRALTF

SEQ ID NO: 96474 - protein, 11 aa, Homo sapiens
  CDR3 for beta chain variable domain of TCR clone 48237 (TRBV7-3, TRBJ2-5)
CASRLSETQYF

SEQ ID NO: 96475 - protein, 15 aa, Homo sapiens
  CDR3 for alpha chain variable domain of TCR clone 48238 (TRAV8-3, TRAJ45)
CASSYSGGGADGLTF

SEQ ID NO: 96476 - protein, 14 aa, Homo sapiens
  CDR3 for beta chain variable domain of TCR clone 48238 (TRBV7-3, TRBJ1-1)
CASSLKGGNTEAFF

SEQ ID NO: 96477 - protein, 14 aa, Homo sapiens
  CDR3 for alpha chain variable domain of TCR clone 48239 (TRAV12-1, TRAJ30)
CVVNIGGRDDKIIF

SEQ ID NO: 96478 - protein, 15 aa, Homo sapiens
  CDR3 for beta chain variable domain of TCR clone 48239 (TRBV18, TRBJ1-2)
CASSPSNTPNYGHTF

SEQ ID NO: 96479 - protein, 16 aa, Homo sapiens
  CDR3 for alpha chain variable domain of TCR clone 48240 (TRAV4, TRAJ18)
CCVLLIGGSTLGRLYF

SEQ ID NO: 96480 - protein, 14 aa, Homo sapiens
  CDR3 for beta chain variable domain of TCR clone 48240 (TRBV7-2, TRBJ2-7)
CASSPKTSFYEQYF

SEQ ID NO: 96481 - protein, 16 aa, Homo sapiens
  CDR3 for alpha chain variable domain of TCR clone 48241 (TRAV3, TRAJ12)
CAVSPRRMDSSYKLIF

SEQ ID NO: 96482 - protein, 13 aa, Homo sapiens
  CDR3 for beta chain variable domain of TCR clone 48241 (TRBV7-3, TRBJ2-5)
CASSLGGEYTQYF

SEQ ID NO: 96483 - protein, 15 aa, Homo sapiens
  CDR3 for alpha chain variable domain of TCR clone 48242 (TRAV8-3, TRAJ11)
CAVGLLNSGYSTLTF

SEQ ID NO: 96484 - protein, 16 aa, Homo sapiens
  CDR3 for beta chain variable domain of TCR clone 48242 (TRBV7-9, TRBJ1-2)
CASSLGFSSGEYGYTF

SEQ ID NO: 96485 - protein, 13 aa, Homo sapiens
  CDR3 for alpha chain variable domain of TCR clone 48243 (TRAV2, TRAJ15)
CAVGGQAGTALIF

SEQ ID NO: 96486 - protein, 16 aa, Homo sapiens
  CDR3 for beta chain variable domain of TCR clone 48243 (TRBV6-4, TRBJ2-3)
CASSDRGESSTDTQYF

SEQ ID NO: 96487 - protein, 14 aa, Homo sapiens
  CDR3 for alpha chain variable domain of TCR clone 48244 (TRAV21, TRAJ17)
CAVLFKAAGNKLTF

SEQ ID NO: 96488 - protein, 14 aa, Homo sapiens
  CDR3 for beta chain variable domain of TCR clone 48244 (TRBV15, TRBJ1-2)
CATSRDFDRVGYTF

SEQ ID NO: 96489 - protein, 13 aa, Homo sapiens
  CDR3 for alpha chain variable domain of TCR clone 48245 (TRAV13-2, TRAJ48)
WAEMDFGNEKLTF

SEQ ID NO: 96490 - protein, 15 aa, Homo sapiens
  CDR3 for beta chain variable domain of TCR clone 48245 (TRBV7-9, TRBJ1-6)
CASSSPGRGNSPLHF

SEQ ID NO: 96491 - protein, 10 aa, Homo sapiens
  CDR3 for alpha chain variable domain of TCR clone 48246 (TRAV16, TRAJ20)
CALKRLQAQL

SEQ ID NO: 96492 - protein, 13 aa, Homo sapiens
  CDR3 for beta chain variable domain of TCR clone 48246 (TRBV7-3, TRBJ1-1)
CQQLKGGNTEAFF

SEQ ID NO: 96493 - protein, 12 aa, Homo sapiens
  CDR3 for alpha chain variable domain of TCR clone 48247 (TRAV36/DV7, TRAJ37)
CACYGNTGKLIF

SEQ ID NO: 96494 - protein, 13 aa, Homo sapiens
  CDR3 for beta chain variable domain of TCR clone 48247 (TRBV10-3, TRBJ2-7)
CASKLAVNYEQCF

SEQ ID NO: 96495 - protein, 14 aa, Homo sapiens
  CDR3 for alpha chain variable domain of TCR clone 48248 (TRAV38-1, TRAJ29)
CAFITPSGNTPLVF

SEQ ID NO: 96496 - protein, 12 aa, Homo sapiens
  CDR3 for beta chain variable domain of TCR clone 48248 (TRBV7-8, TRBJ2-7)
CASSLGDREQYF

SEQ ID NO: 96497 - protein, 15 aa, Homo sapiens
  CDR3 for alpha chain variable domain of TCR clone 48249 (TRAV16, TRAJ10)
CALRELTGGGNKLTF

SEQ ID NO: 96498 - protein, 14 aa, Homo sapiens
  CDR3 for beta chain variable domain of TCR clone 48249 (TRBV5-5, TRBJ2-7)
CASSLGQGTYERYF

SEQ ID NO: 96499 - protein, 12 aa, Homo sapiens
  CDR3 for alpha chain variable domain of TCR clone 48250 (TRAV3, TRAJ20)
CAVRDGDYKLSF

SEQ ID NO: 96500 - protein, 12 aa, Homo sapiens
  CDR3 for beta chain variable domain of TCR clone 48250 (TRBV11-2, TRBJ2-2)
CASSLGGGELFF

SEQ ID NO: 96501 - protein, 11 aa, Homo sapiens
  CDR3 for alpha chain variable domain of TCR clone 48251 (TRAV12-3, TRAJ27)
CAMANAGKSTF

SEQ ID NO: 96502 - protein, 15 aa, Homo sapiens
  CDR3 for beta chain variable domain of TCR clone 48251 (TRBV2, TRBJ2-3)
CASSDFEKATDTQYF

SEQ ID NO: 96503 - protein, 17 aa, Homo sapiens
  CDR3 for alpha chain variable domain of TCR clone 48252 (TRAV26-2, TRAJ32)
EGCCCVGYGGATNKLIF

SEQ ID NO: 96504 - protein, 14 aa, Homo sapiens
  CDR3 for beta chain variable domain of TCR clone 48252 (TRBV4-2, TRBJ2-1)
CASGLDRAYNEQFF

SEQ ID NO: 96505 - protein, 15 aa, Homo sapiens
  CDR3 for alpha chain variable domain of TCR clone 48253 (TRAV12-2, TRAJ53)
CAVNGGGGSNYKLAF

SEQ ID NO: 96506 - protein, 17 aa, Homo sapiens
  CDR3 for beta chain variable domain of TCR clone 48253 (TRBV7-3, TRBJ2-3)
CASSLMKRMRGADTQYF

SEQ ID NO: 96507 - protein, 13 aa, Homo sapiens
  CDR3 for alpha chain variable domain of TCR clone 48254 (TRAV21, TRAJ47)
CAVSGLYGNKLVF

SEQ ID NO: 96508 - protein, 15 aa, Homo sapiens
  CDR3 for beta chain variable domain of TCR clone 48254 (TRBV7-2, TRBJ1-5)
CASSLDRGQDQPQHF

SEQ ID NO: 96509 - protein, 14 aa, Homo sapiens
  CDR3 for alpha chain variable domain of TCR clone 48255 (TRAV1-2, TRAJ8)
CAVREDTGLQKLVF

SEQ ID NO: 96510 - protein, 13 aa, Homo sapiens
  CDR3 for beta chain variable domain of TCR clone 48255 (TRBV7-3, TRBJ2-1)
CASSLDSYNEQFF

SEQ ID NO: 96511 - protein, 13 aa, Homo sapiens
  CDR3 for alpha chain variable domain of TCR clone 48256 (TRAV17, TRAJ5)
CAPMGTGRRALTF

SEQ ID NO: 96512 - protein, 14 aa, Homo sapiens
  CDR3 for beta chain variable domain of TCR clone 48256 (TRBV7-3, TRBJ2-1)
CASSLAGGTNEQFF

SEQ ID NO: 96513 - protein, 16 aa, Homo sapiens
  CDR3 for alpha chain variable domain of TCR clone 48257 (TRAV16, TRAJ52)
CALSAAGGTSYGKLTF

SEQ ID NO: 96514 - protein, 12 aa, Homo sapiens
  CDR3 for beta chain variable domain of TCR clone 48257 (TRBV3-1, TRBJ2-5)
CASSQRGETQYF

SEQ ID NO: 96515 - protein, 17 aa, Homo sapiens
  CDR3 for alpha chain variable domain of TCR clone 48258 (TRAV3, TRAJ42)
CAVRDRDYGGSQGNLIF

SEQ ID NO: 96516 - protein, 14 aa, Homo sapiens
  CDR3 for beta chain variable domain of TCR clone 48258 (TRBV7-9, TRBJ1-2)
CASSRQGANYGYTF

SEQ ID NO: 96517 - protein, 14 aa, Homo sapiens
  CDR3 for alpha chain variable domain of TCR clone 48259 (TRAV38-1, TRAJ29)
CAFITPSGNTSLVF

SEQ ID NO: 96518 - protein, 14 aa, Homo sapiens
  CDR3 for beta chain variable domain of TCR clone 48259 (TRBV18, TRBJ2-7)
CASSPRGGAYEQYF

SEQ ID NO: 96519 - protein, 13 aa, Homo sapiens
  CDR3 for alpha chain variable domain of TCR clone 48260 (TRAV38-1, TRAJ42)
CARWGGSQGNLIF

SEQ ID NO: 96520 - protein, 14 aa, Homo sapiens
  CDR3 for beta chain variable domain of TCR clone 48260 (TRBV20-1, TRBJ2-5)
CSAHRQGLWETQYF

SEQ ID NO: 96521 - protein, 14 aa, Homo sapiens
  CDR3 for alpha chain variable domain of TCR clone 48261 (TRAV1-2, TRAJ16)
CAVNRFSDGQKLLF

SEQ ID NO: 96522 - protein, 16 aa, Homo sapiens
  CDR3 for beta chain variable domain of TCR clone 48261 (TRBV11-3, TRBJ1-2)
CASSLDTGGADYGYTF

SEQ ID NO: 96523 - protein, 16 aa, Homo sapiens
  CDR3 for alpha chain variable domain of TCR clone 48262 (TRAV8-3, TRAJ18)
CAVALDRGSTLGRRYF

SEQ ID NO: 96524 - protein, 11 aa, Homo sapiens
  CDR3 for beta chain variable domain of TCR clone 48262 (TRBV29-1, TRBJ1-1)
CSVEILTEAFF

SEQ ID NO: 96525 - protein, 19 aa, Homo sapiens
  CDR3 for alpha chain variable domain of TCR clone 48263 (TRAV9-2, )
CALIQIGDIQNPDPAVYQL

SEQ ID NO: 96526 - protein, 17 aa, Homo sapiens
  CDR3 for beta chain variable domain of TCR clone 48263 (TRBV7-8, TRBJ2-6)
CASSAGTGGAGANVLTF

SEQ ID NO: 96527 - protein, 14 aa, Homo sapiens
  CDR3 for alpha chain variable domain of TCR clone 48264 (TRAV1-2, TRAJ8)
CAVREDTGFQKLVF

SEQ ID NO: 96528 - protein, 14 aa, Homo sapiens
  CDR3 for beta chain variable domain of TCR clone 48264 (TRBV12-5, TRBJ2-7)
CASGQTGNYYEQYF

SEQ ID NO: 96529 - protein, 13 aa, Homo sapiens
  CDR3 for alpha chain variable domain of TCR clone 48265 (TRAV35, TRAJ42)
CAGFPGSQGNLIF

SEQ ID NO: 96530 - protein, 14 aa, Homo sapiens
  CDR3 for beta chain variable domain of TCR clone 48265 (TRBV19, TRBJ2-1)
CASPTFVLSGEQLF

SEQ ID NO: 96531 - protein, 18 aa, Homo sapiens
  CDR3 for alpha chain variable domain of TCR clone 48266 (TRAV12-3, TRAJ52)
CAMSVGGAGGTSYGKLTF

SEQ ID NO: 96532 - protein, 13 aa, Homo sapiens
  CDR3 for beta chain variable domain of TCR clone 48266 (TRBV20-1, TRBJ1-1)
CSAPLGGGTEAFF

SEQ ID NO: 96533 - protein, 14 aa, Homo sapiens
  CDR3 for alpha chain variable domain of TCR clone 48267 (TRAV12-1, TRAJ17)
CVVNYKAAGNRLTF

SEQ ID NO: 96534 - protein, 16 aa, Homo sapiens
  CDR3 for beta chain variable domain of TCR clone 48267 (TRBV12-4, TRBJ1-5)
CAGSRPVGGSNQPQHF

SEQ ID NO: 96535 - protein, 15 aa, Homo sapiens
  CDR3 for alpha chain variable domain of TCR clone 48268 (TRAV3, TRAJ47)
CAVRDIGEYGNKLVF

SEQ ID NO: 96536 - protein, 14 aa, Homo sapiens
  CDR3 for beta chain variable domain of TCR clone 48268 (TRBV13, TRBJ2-5)
CASSLERVGETQHF

SEQ ID NO: 96537 - protein, 15 aa, Homo sapiens
  CDR3 for alpha chain variable domain of TCR clone 48269 (TRAV8-3, TRAJ15)
CAVGAPNQAGTALIV

SEQ ID NO: 96538 - protein, 14 aa, Homo sapiens
  CDR3 for beta chain variable domain of TCR clone 48269 (TRBV20-1, TRBJ2-1)
CSPNDEASYNEQFF

SEQ ID NO: 96539 - protein, 15 aa, Homo sapiens
  CDR3 for alpha chain variable domain of TCR clone 48270 (TRAV17, TRAJ57)
CATGPSQGGSEKLVF

SEQ ID NO: 96540 - protein, 15 aa, Homo sapiens
  CDR3 for beta chain variable domain of TCR clone 48270 (TRBV27, TRBJ2-1)
CASSNGGGSSNEQFF

SEQ ID NO: 96541 - protein, 13 aa, Homo sapiens
  CDR3 for alpha chain variable domain of TCR clone 48271 (TRAV20, TRAJ37)
CAGCSSNTGKLIF

SEQ ID NO: 96542 - protein, 20 aa, Homo sapiens
  CDR3 for beta chain variable domain of TCR clone 48271 (TRBV28, TRBJ2-1)
CASTPIGRSPGLAGGNEQFF

SEQ ID NO: 96543 - protein, 13 aa, Homo sapiens
  CDR3 for alpha chain variable domain of TCR clone 48272 (TRAV29/DV5, TRAJ31)
CAASRNNNARLMF

SEQ ID NO: 96544 - protein, 17 aa, Homo sapiens
  CDR3 for beta chain variable domain of TCR clone 48272 (TRBV7-8, TRBJ2-6)
CASSAGTGGAGANVLTF

SEQ ID NO: 96545 - protein, 14 aa, Homo sapiens
  CDR3 for alpha chain variable domain of TCR clone 48273 (TRAV12-3, TRAJ10)
SHLPLTGGGNKLTF

SEQ ID NO: 96546 - protein, 15 aa, Homo sapiens
  CDR3 for beta chain variable domain of TCR clone 48273 (TRBV6-6, TRBJ2-5)
CASSPGGGLEETQYF

SEQ ID NO: 96547 - protein, 13 aa, Homo sapiens
  CDR3 for alpha chain variable domain of TCR clone 48274 (TRAV12-2, TRAJ20)
CAVNRFDDYKLSF

SEQ ID NO: 96548 - protein, 17 aa, Homo sapiens
  CDR3 for beta chain variable domain of TCR clone 48274 (TRBV13, TRBJ2-3)
CASSLSRVAGGRNTQYF

SEQ ID NO: 96549 - protein, 17 aa, Homo sapiens
  CDR3 for alpha chain variable domain of TCR clone 48275 (TRAV3, TRAJ6)
CAVRDGPRAGGSYIPTF

SEQ ID NO: 96550 - protein, 13 aa, Homo sapiens
  CDR3 for beta chain variable domain of TCR clone 48275 (TRBV15, TRBJ2-7)
CATSTTGRYEQYF

SEQ ID NO: 96551 - protein, 12 aa, Homo sapiens
  CDR3 for alpha chain variable domain of TCR clone 48276 (TRAV13-1, TRAJ21)
CAAFFNFNKFYF

SEQ ID NO: 96552 - protein, 15 aa, Homo sapiens
  CDR3 for beta chain variable domain of TCR clone 48276 (TRBV4-1, TRBJ2-7)
CASSQQGQGFDEQYF

SEQ ID NO: 96553 - protein, 14 aa, Homo sapiens
  CDR3 for alpha chain variable domain of TCR clone 48277 (TRAV12-2, TRAJ12)
CAVINRDSSYKLIF

SEQ ID NO: 96554 - protein, 15 aa, Homo sapiens
  CDR3 for beta chain variable domain of TCR clone 48277 (TRBV29-1, TRBJ2-7)
CSVEFFDRGSYEQYF

SEQ ID NO: 96555 - protein, 15 aa, Homo sapiens
  CDR3 for alpha chain variable domain of TCR clone 48278 (TRAV2, TRAJ28)
CAAPYSGAGSYQLTF

SEQ ID NO: 96556 - protein, 17 aa, Homo sapiens
  CDR3 for beta chain variable domain of TCR clone 48278 (TRBV20-1, TRBJ2-4)
CSARDWASGGRENIQYF

SEQ ID NO: 96557 - protein, 14 aa, Homo sapiens
  CDR3 for alpha chain variable domain of TCR clone 48279 (TRAV12-2, TRAJ3)
CAVSLYSCASKIIF

SEQ ID NO: 96558 - protein, 14 aa, Homo sapiens
  CDR3 for beta chain variable domain of TCR clone 48279 (TRBV27, TRBJ2-1)
CAGSIAETYNEQFF

SEQ ID NO: 96559 - protein, 14 aa, Homo sapiens
  CDR3 for alpha chain variable domain of TCR clone 48280 (TRAV35, TRAJ10)
CAGILTGGGNKLTF

SEQ ID NO: 96560 - protein, 17 aa, Homo sapiens
  CDR3 for beta chain variable domain of TCR clone 48280 (TRBV11-2, TRBJ2-1)
CASSLYPPGVEYNEQFF

SEQ ID NO: 96561 - protein, 14 aa, Homo sapiens
  CDR3 for alpha chain variable domain of TCR clone 48281 (TRAV2, TRAJ37)
CAVDFTSNTGKLLF

SEQ ID NO: 96562 - protein, 13 aa, Homo sapiens
  CDR3 for beta chain variable domain of TCR clone 48281 (TRBV20-1, TRBJ1-1)
CSAPLGGGTEAFF

SEQ ID NO: 96563 - protein, 11 aa, Homo sapiens
  CDR3 for alpha chain variable domain of TCR clone 48282 (TRAV12-2, TRAJ29)
CAVTLRSHLVF

SEQ ID NO: 96564 - protein, 16 aa, Homo sapiens
  CDR3 for beta chain variable domain of TCR clone 48282 (TRBV19, TRBJ1-5)
CASSIDRGGPRQPQHF

SEQ ID NO: 96565 - protein, 23 aa, Homo sapiens
  CDR3 for alpha chain variable domain of TCR clone 48283 (TRAV2, TRAJ9)
CAVEDRGTGGFKTILEQEQDYLL

SEQ ID NO: 96566 - protein, 16 aa, Homo sapiens
  CDR3 for beta chain variable domain of TCR clone 48283 (TRBV24-1, TRBJ2-3)
CATSDPGTGATDTQYF

SEQ ID NO: 96567 - protein, 14 aa, Homo sapiens
  CDR3 for alpha chain variable domain of TCR clone 48284 (TRAV12-2, TRAJ45)
CALPERGGSDGLTF

SEQ ID NO: 96568 - protein, 14 aa, Homo sapiens
  CDR3 for beta chain variable domain of TCR clone 48284 (TRBV18, TRBJ1-5)
CASSPGNSNQPQHF

SEQ ID NO: 96569 - protein, 15 aa, Homo sapiens
  CDR3 for alpha chain variable domain of TCR clone 48285 (TRAV34, TRAJ38)
CGADFTPGNNRKLIW

SEQ ID NO: 96570 - protein, 16 aa, Homo sapiens
  CDR3 for beta chain variable domain of TCR clone 48285 (TRBV12-5, TRBJ2-5)
CAGGPRTNGNQETQYF

SEQ ID NO: 96571 - protein, 16 aa, Homo sapiens
  CDR3 for alpha chain variable domain of TCR clone 48286 (TRAV4, TRAJ22)
CLVGDLYSGSARQLTF

SEQ ID NO: 96572 - protein, 13 aa, Homo sapiens
  CDR3 for beta chain variable domain of TCR clone 48286 (TRBV18, TRBJ1-1)
CASSPETKPEAFF

SEQ ID NO: 96573 - protein, 23 aa, Homo sapiens
  CDR3 for alpha chain variable domain of TCR clone 48287 (TRAV21, TRAJ39)
AASQPGDSAAYPLLVNAGNMLTF

SEQ ID NO: 96574 - protein, 18 aa, Homo sapiens
  CDR3 for beta chain variable domain of TCR clone 48287 (TRBV7-2, TRBJ2-7)
CASSLSGRGLAGGYEQYF

SEQ ID NO: 96575 - protein, 14 aa, Homo sapiens
  CDR3 for alpha chain variable domain of TCR clone 48288 (TRAV12-1, TRAJ23)
CVVIVYNKGGKLIF

SEQ ID NO: 96576 - protein, 15 aa, Homo sapiens
  CDR3 for beta chain variable domain of TCR clone 48288 (TRBV20-1, TRBJ1-5)
CSAKPPGQGPQPQHF

SEQ ID NO: 96577 - protein, 16 aa, Homo sapiens
  CDR3 for alpha chain variable domain of TCR clone 48289 (TRAV12-1, TRAJ48)
CVVNMVSNFGNEKLIF

SEQ ID NO: 96578 - protein, 18 aa, Homo sapiens
  CDR3 for beta chain variable domain of TCR clone 48289 (TRBV11-2, TRBJ2-6)
CASSLNPFLGTGANVLTF

SEQ ID NO: 96579 - protein, 12 aa, Homo sapiens
  CDR3 for alpha chain variable domain of TCR clone 48290 (TRAV2, TRAJ31)
CAVEDNNARLMF

SEQ ID NO: 96580 - protein, 16 aa, Homo sapiens
  CDR3 for beta chain variable domain of TCR clone 48290 (TRBV7-9, TRBJ1-2)
CASSLGFSSGEDGYTF

SEQ ID NO: 96581 - protein, 12 aa, Homo sapiens
  CDR3 for alpha chain variable domain of TCR clone 48291 (TRAV13-1, TRAJ21)
CAAFINFNKFYF

SEQ ID NO: 96582 - protein, 14 aa, Homo sapiens
  CDR3 for beta chain variable domain of TCR clone 48291 (TRBV4-1, TRBJ2-7)
CASRLTSGSYEQYF

SEQ ID NO: 96583 - protein, 14 aa, Homo sapiens
  CDR3 for alpha chain variable domain of TCR clone 48292 (TRAV22, TRAJ28)
CAVYSGAGSYQLTF

SEQ ID NO: 96584 - protein, 16 aa, Homo sapiens
  CDR3 for beta chain variable domain of TCR clone 48292 (TRBV24-1, TRBJ2-3)
CATSDPGTGATDTQYS

SEQ ID NO: 96585 - protein, 16 aa, Homo sapiens
  CDR3 for alpha chain variable domain of TCR clone 48293 (TRAV13-1, TRAJ13)
CTAFFLGVTRKLPLEL

SEQ ID NO: 96586 - protein, 15 aa, Homo sapiens
  CDR3 for beta chain variable domain of TCR clone 48293 (TRBV7-8, TRBJ2-1)
CASSLADSLYNEQFL

SEQ ID NO: 96587 - protein, 14 aa, Homo sapiens
  CDR3 for alpha chain variable domain of TCR clone 48294 (TRAV17, TRAJ22)
CATVLSGSARQLTF

SEQ ID NO: 96588 - protein, 14 aa, Homo sapiens
  CDR3 for beta chain variable domain of TCR clone 48294 (TRBV12-4, TRBJ2-5)
CASSFGGRGETQYF

SEQ ID NO: 96589 - protein, 12 aa, Homo sapiens
  CDR3 for alpha chain variable domain of TCR clone 48295 (TRAV21, TRAJ39)
CAADNAGNMLTF

SEQ ID NO: 96590 - protein, 14 aa, Homo sapiens
  CDR3 for beta chain variable domain of TCR clone 48295 (TRBV11-2, TRBJ2-5)
CASSRTGGIETQYF

SEQ ID NO: 96591 - protein, 15 aa, Homo sapiens
  CDR3 for alpha chain variable domain of TCR clone 48296 (TRAV8-6, TRAJ10)
CAVSDQAGGGNKLTF

SEQ ID NO: 96592 - protein, 13 aa, Homo sapiens
  CDR3 for beta chain variable domain of TCR clone 48296 (TRBV5-7, TRBJ2-3)
CASSLGRTDTQYF

SEQ ID NO: 96593 - protein, 13 aa, Homo sapiens
  CDR3 for alpha chain variable domain of TCR clone 48297 (TRAV20, TRAJ45)
CAVKKRRRRRTHL

SEQ ID NO: 96594 - protein, 14 aa, Homo sapiens
  CDR3 for beta chain variable domain of TCR clone 48297 (TRBV15, TRBJ2-5)
CATSIGGLGETQYF

SEQ ID NO: 96595 - protein, 14 aa, Homo sapiens
  CDR3 for alpha chain variable domain of TCR clone 48298 (TRAV1-2, TRAJ8)
CAVREDTGFQKLVF

SEQ ID NO: 96596 - protein, 15 aa, Homo sapiens
  CDR3 for beta chain variable domain of TCR clone 48298 (TRBV12-4, TRBJ1-5)
CQQPTGRGSNQPQHF

SEQ ID NO: 96597 - protein, 11 aa, Homo sapiens
  CDR3 for alpha chain variable domain of TCR clone 48299 (TRAV16, TRAJ33)
CALHGNYQLIW

SEQ ID NO: 96598 - protein, 15 aa, Homo sapiens
  CDR3 for beta chain variable domain of TCR clone 48299 (TRBV4-1, TRBJ2-7)
CASSQQGQGFDEQYF

SEQ ID NO: 96599 - protein, 13 aa, Homo sapiens
  CDR3 for alpha chain variable domain of TCR clone 48300 (TRAV12-2, TRAJ49)
CAVNMRIGNQFYF

SEQ ID NO: 96600 - protein, 11 aa, Homo sapiens
  CDR3 for beta chain variable domain of TCR clone 48300 (TRBV5-5, TRBJ1-1)
CASSLGVEAFF

SEQ ID NO: 96601 - protein, 14 aa, Homo sapiens
  CDR3 for alpha chain variable domain of TCR clone 48301 (TRAV16, TRAJ33)
CALSAMDSNYQLIW

SEQ ID NO: 96602 - protein, 12 aa, Homo sapiens
  CDR3 for beta chain variable domain of TCR clone 48301 (TRBV5-1, TRBJ1-2)
CASSQDPYGYTF

SEQ ID NO: 96603 - protein, 12 aa, Homo sapiens
  CDR3 for alpha chain variable domain of TCR clone 48302 (TRAV13-1, TRAJ21)
CAAKEGFNKSYF

SEQ ID NO: 96604 - protein, 13 aa, Homo sapiens
  CDR3 for beta chain variable domain of TCR clone 48302 (TRBV19, TRBJ1-2)
CASSVPGQDGYTF

SEQ ID NO: 96605 - protein, 14 aa, Homo sapiens
  CDR3 for alpha chain variable domain of TCR clone 48303 (TRAV1-2, TRAJ16)
CAANRFSDGQKLLF

SEQ ID NO: 96606 - protein, 13 aa, Homo sapiens
  CDR3 for beta chain variable domain of TCR clone 48303 (TRBV19, TRBJ2-7)
CASRKAGGSEQYF

SEQ ID NO: 96607 - protein, 13 aa, Homo sapiens
  CDR3 for alpha chain variable domain of TCR clone 48304 (TRAV20, TRAJ21)
CAVEGYNFNKFYF

SEQ ID NO: 96608 - protein, 14 aa, Homo sapiens
  CDR3 for beta chain variable domain of TCR clone 48304 (TRBV3-1, TRBJ2-5)
CASSQGQDQETQYF

SEQ ID NO: 96609 - protein, 14 aa, Homo sapiens
  CDR3 for alpha chain variable domain of TCR clone 48305 (TRAV13-1, TRAJ9)
CAASALTGGFKTIF

SEQ ID NO: 96610 - protein, 13 aa, Homo sapiens
  CDR3 for beta chain variable domain of TCR clone 48305 (TRBV20-1, TRBJ1-1)
CSAGTVGNTEDFF

SEQ ID NO: 96611 - protein, 12 aa, Homo sapiens
  CDR3 for alpha chain variable domain of TCR clone 48306 (TRAV12-3, TRAJ34)
CAMGYNTDKLIL

SEQ ID NO: 96612 - protein, 15 aa, Homo sapiens
  CDR3 for beta chain variable domain of TCR clone 48306 (TRBV28, TRBJ2-1)
CASSIIAGGRSEQFF

SEQ ID NO: 96613 - protein, 18 aa, Homo sapiens
  CDR3 for alpha chain variable domain of TCR clone 48307 (TRAV26-1, TRAJ23)
CIVRVGLEVWNQGGKLIF

SEQ ID NO: 96614 - protein, 15 aa, Homo sapiens
  CDR3 for beta chain variable domain of TCR clone 48307 (TRBV12-4, TRBJ2-5)
CQQFFCQGRQETQYF

SEQ ID NO: 96615 - protein, 12 aa, Homo sapiens
  CDR3 for alpha chain variable domain of TCR clone 48308 (TRAV23/DV6, TRAJ24)
CAANDSWGKLQF

SEQ ID NO: 96616 - protein, 16 aa, Homo sapiens
  CDR3 for beta chain variable domain of TCR clone 48308 (TRBV12-4, TRBJ2-5)
CACSLSTSGGKETQYF

SEQ ID NO: 96617 - protein, 13 aa, Homo sapiens
  CDR3 for alpha chain variable domain of TCR clone 48309 (TRAV2, TRAJ40)
CPVVTSGTYKYIF

SEQ ID NO: 96618 - protein, 14 aa, Homo sapiens
  CDR3 for beta chain variable domain of TCR clone 48309 (TRBV19, TRBJ2-1)
CASPTFVLSGEQFF

SEQ ID NO: 96619 - protein, 11 aa, Homo sapiens
  CDR3 for alpha chain variable domain of TCR clone 48310 (TRAV2, TRAJ20)
CAVSDDYKLGF

SEQ ID NO: 96620 - protein, 20 aa, Homo sapiens
  CDR3 for beta chain variable domain of TCR clone 48310 (TRBV19, TRBJ2-1)
CASSISRTVTSTRLNNEQFF

SEQ ID NO: 96621 - protein, 15 aa, Homo sapiens
  CDR3 for alpha chain variable domain of TCR clone 48311 (TRAV14/DV4, TRAJ12)
CAMREERDSSYKLIF

SEQ ID NO: 96622 - protein, 12 aa, Homo sapiens
  CDR3 for beta chain variable domain of TCR clone 48311 (TRBV11-2, TRBJ2-1)
CASSPGNNEQFF

SEQ ID NO: 96623 - protein, 11 aa, Homo sapiens
  CDR3 for alpha chain variable domain of TCR clone 48312 (TRAV13-1, TRAJ40)
RAVSGTYKYIF

SEQ ID NO: 96624 - protein, 16 aa, Homo sapiens
  CDR3 for beta chain variable domain of TCR clone 48312 (TRBV10-3, TRBJ2-3)
CAISVSRLALTDTQYF

SEQ ID NO: 96625 - protein, 14 aa, Homo sapiens
  CDR3 for alpha chain variable domain of TCR clone 48313 (TRAV1-2, TRAJ8)
CAVREDTGFQKLVF

SEQ ID NO: 96626 - protein, 13 aa, Homo sapiens
  CDR3 for beta chain variable domain of TCR clone 48313 (TRBV18, TRBJ2-7)
CASSRSGSYEQYF

SEQ ID NO: 96627 - protein, 13 aa, Homo sapiens
  CDR3 for alpha chain variable domain of TCR clone 48314 (TRAV21, TRAJ20)
CAVSRLGDHKLSF

SEQ ID NO: 96628 - protein, 13 aa, Homo sapiens
  CDR3 for beta chain variable domain of TCR clone 48314 (TRBV7-3, TRBJ1-1)
CASSPAGGLEAFF

SEQ ID NO: 96629 - protein, 14 aa, Homo sapiens
  CDR3 for alpha chain variable domain of TCR clone 48315 (TRAV27, TRAJ49)
CTGRPEGTGNQFYF

SEQ ID NO: 96630 - protein, 14 aa, Homo sapiens
  CDR3 for beta chain variable domain of TCR clone 48315 (TRBV18, TRBJ2-5)
CASSPGVSQETQYF

SEQ ID NO: 96631 - protein, 12 aa, Homo sapiens
  CDR3 for alpha chain variable domain of TCR clone 48316 (TRAV13-1, TRAJ21)
CAAFFNFNKFYF

SEQ ID NO: 96632 - protein, 15 aa, Homo sapiens
  CDR3 for beta chain variable domain of TCR clone 48316 (TRBV6-1, TRBJ2-1)
CASSELRGQYNEQFF

SEQ ID NO: 96633 - protein, 15 aa, Homo sapiens
  CDR3 for alpha chain variable domain of TCR clone 48317 (TRAV17, TRAJ23)
CATDAEDNHGGKLIF

SEQ ID NO: 96634 - protein, 12 aa, Homo sapiens
  CDR3 for beta chain variable domain of TCR clone 48317 (TRBV2, TRBJ2-1)
CAKREGYNEQFF

SEQ ID NO: 96635 - protein, 12 aa, Homo sapiens
  CDR3 for alpha chain variable domain of TCR clone 48318 (TRAV12-3, TRAJ41)
CAMSYSGYELNF

SEQ ID NO: 96636 - protein, 13 aa, Homo sapiens
  CDR3 for beta chain variable domain of TCR clone 48318 (TRBV7-3, TRBJ2-1)
CASSLDSYNEQFF

SEQ ID NO: 96637 - protein, 12 aa, Homo sapiens
  CDR3 for alpha chain variable domain of TCR clone 48319 (TRAV12-3, TRAJ17)
CAMTLTGNKLTF

SEQ ID NO: 96638 - protein, 14 aa, Homo sapiens
  CDR3 for beta chain variable domain of TCR clone 48319 (TRBV19, TRBJ2-1)
CASKDPGLANEQFF

SEQ ID NO: 96639 - protein, 13 aa, Homo sapiens
  CDR3 for alpha chain variable domain of TCR clone 48320 (TRAV12-1, TRAJ6)
CVVFPGGSYIPTF

SEQ ID NO: 96640 - protein, 14 aa, Homo sapiens
  CDR3 for beta chain variable domain of TCR clone 48320 (TRBV20-1, TRBJ1-3)
CSASPTGAGNTISF

SEQ ID NO: 96641 - protein, 13 aa, Homo sapiens
  CDR3 for alpha chain variable domain of TCR clone 48321 (TRAV8-3, TRAJ28)
CAVGAVGSYQLTF

SEQ ID NO: 96642 - protein, 14 aa, Homo sapiens
  CDR3 for beta chain variable domain of TCR clone 48321 (TRBV7-9, TRBJ1-5)
CQQPRSPAQSAQHF

SEQ ID NO: 96643 - protein, 15 aa, Homo sapiens
  CDR3 for alpha chain variable domain of TCR clone 48322 (TRAV25, TRAJ53)
CAATGGGGSTYKLTF

SEQ ID NO: 96644 - protein, 19 aa, Homo sapiens
  CDR3 for beta chain variable domain of TCR clone 48322 (TRBV7-2, TRBJ2-3)
CASSFLSRNWGGGTDTQYF

SEQ ID NO: 96645 - protein, 12 aa, Homo sapiens
  CDR3 for alpha chain variable domain of TCR clone 48323 (TRAV26-2, TRAJ48)
CILRKGNEKLTF

SEQ ID NO: 96646 - protein, 14 aa, Homo sapiens
  CDR3 for beta chain variable domain of TCR clone 48323 (TRBV28, TRBJ2-7)
CASSTLRGRCEQYF

SEQ ID NO: 96647 - protein, 16 aa, Homo sapiens
  CDR3 for alpha chain variable domain of TCR clone 48324 (TRAV3, TRAJ37)
CDVRGKGSGNTGKLIF

SEQ ID NO: 96648 - protein, 21 aa, Homo sapiens
  CDR3 for beta chain variable domain of TCR clone 48324 (TRBV15, TRBJ2-1)
AWGTQPCTCVPPAEVDTARFF

SEQ ID NO: 96649 - protein, 13 aa, Homo sapiens
  CDR3 for alpha chain variable domain of TCR clone 48325 (TRAV3, TRAJ21)
CAVREPDFKKFYF

SEQ ID NO: 96650 - protein, 13 aa, Homo sapiens
  CDR3 for beta chain variable domain of TCR clone 48325 (TRBV20-1, TRBJ1-1)
CSARGGGNTEAFF

SEQ ID NO: 96651 - protein, 14 aa, Homo sapiens
  CDR3 for alpha chain variable domain of TCR clone 48326 (TRAV1-2, TRAJ16)
CAVNRFSDGPKLLF

SEQ ID NO: 96652 - protein, 16 aa, Homo sapiens
  CDR3 for beta chain variable domain of TCR clone 48326 (TRBV20-1, TRBJ1-4)
CSAPGQGLLTNEKLFF

SEQ ID NO: 96653 - protein, 16 aa, Homo sapiens
  CDR3 for alpha chain variable domain of TCR clone 48327 (TRAV8-3, TRAJ13)
CAVGAYPSGGYQKVTF

SEQ ID NO: 96654 - protein, 12 aa, Homo sapiens
  CDR3 for beta chain variable domain of TCR clone 48327 (TRBV12-4, TRBJ2-7)
CASSLGGYEQYF

SEQ ID NO: 96655 - protein, 15 aa, Homo sapiens
  CDR3 for alpha chain variable domain of TCR clone 48328 (TRAV3, TRAJ4)
CAVRDGTGGYNKLIF

SEQ ID NO: 96656 - protein, 14 aa, Homo sapiens
  CDR3 for beta chain variable domain of TCR clone 48328 (TRBV12-5, TRBJ2-5)
CASGSRTHQETQYF

SEQ ID NO: 96657 - protein, 14 aa, Homo sapiens
  CDR3 for alpha chain variable domain of TCR clone 48329 (TRAV1-2, TRAJ16)
CAVNRFSDGQKLLF

SEQ ID NO: 96658 - protein, 12 aa, Homo sapiens
  CDR3 for beta chain variable domain of TCR clone 48329 (TRBV11-2, TRBJ2-2)
CASSLGGGELSF

SEQ ID NO: 96659 - protein, 15 aa, Homo sapiens
  CDR3 for alpha chain variable domain of TCR clone 48330 (TRAV8-6, TRAJ10)
CAVSDQAGGGNKLTL

SEQ ID NO: 96660 - protein, 13 aa, Homo sapiens
  CDR3 for beta chain variable domain of TCR clone 48330 (TRBV12-4, TRBJ2-7)
CASSPTETYEQYF

SEQ ID NO: 96661 - protein, 13 aa, Homo sapiens
  CDR3 for alpha chain variable domain of TCR clone 48331 (TRAV1-2, TRAJ9)
CATLNTGGFKTIF

SEQ ID NO: 96662 - protein, 13 aa, Homo sapiens
  CDR3 for beta chain variable domain of TCR clone 48331 (TRBV7-9, TRBJ1-2)
CASSLKQNYGYTF

SEQ ID NO: 96663 - protein, 16 aa, Homo sapiens
  CDR3 for alpha chain variable domain of TCR clone 48332 (TRAV30, TRAJ24)
CGTEIVDADSWGKFQF

SEQ ID NO: 96664 - protein, 15 aa, Homo sapiens
  CDR3 for beta chain variable domain of TCR clone 48332 (TRBV7-2, TRBJ2-1)
CASSFQADEYNEQFF

SEQ ID NO: 96665 - protein, 13 aa, Homo sapiens
  CDR3 for alpha chain variable domain of TCR clone 48333 (TRAV12-2, TRAJ15)
CAVFNQAGTALIF

SEQ ID NO: 96666 - protein, 14 aa, Homo sapiens
  CDR3 for beta chain variable domain of TCR clone 48333 (TRBV7-8, TRBJ1-5)
PAAGGGGADQPQHF

SEQ ID NO: 96667 - protein, 13 aa, Homo sapiens
  CDR3 for alpha chain variable domain of TCR clone 48334 (TRAV13-1, TRAJ32)
QVTDGGATNKLIF

SEQ ID NO: 96668 - protein, 15 aa, Homo sapiens
  CDR3 for beta chain variable domain of TCR clone 48334 (TRBV20-1, TRBJ1-2)
CSAIRTGAFNYGYTF

SEQ ID NO: 96669 - protein, 14 aa, Homo sapiens
  CDR3 for alpha chain variable domain of TCR clone 48335 (TRAV26-1, TRAJ46)
CIVRVGKEKQRRQA

SEQ ID NO: 96670 - protein, 13 aa, Homo sapiens
  CDR3 for beta chain variable domain of TCR clone 48335 (TRBV12-5, TRBJ2-3)
CASGDRQSDTQYF

SEQ ID NO: 96671 - protein, 13 aa, Homo sapiens
  CDR3 for alpha chain variable domain of TCR clone 48336 (TRAV12-1, TRAJ39)
CVVPQRAGNMLTF

SEQ ID NO: 96672 - protein, 13 aa, Homo sapiens
  CDR3 for beta chain variable domain of TCR clone 48336 (TRBV12-4, TRBJ1-5)
CASSPDRAQPQHF

SEQ ID NO: 96673 - protein, 23 aa, Homo sapiens
  CDR3 for alpha chain variable domain of TCR clone 48337 (TRAV12-2, TRAJ43)
SLLIRDSQPSDSATYLCDFDMRF

SEQ ID NO: 96674 - protein, 18 aa, Homo sapiens
  CDR3 for beta chain variable domain of TCR clone 48337 (TRBV20-1, TRBJ2-3)
CSASGLAGGPGTTDTQYF

SEQ ID NO: 96675 - protein, 17 aa, Homo sapiens
  CDR3 for alpha chain variable domain of TCR clone 48338 (TRAV3, TRAJ42)
CAVRDRDYGGSQGNLIF

SEQ ID NO: 96676 - protein, 16 aa, Homo sapiens
  CDR3 for beta chain variable domain of TCR clone 48338 (TRBV2, TRBJ2-3)
CASSTSVEGVTDTQYF

SEQ ID NO: 96677 - protein, 13 aa, Homo sapiens
  CDR3 for alpha chain variable domain of TCR clone 48339 (TRAV8-3, TRAJ28)
CTVGAVGSYQLTF

SEQ ID NO: 96678 - protein, 15 aa, Homo sapiens
  CDR3 for beta chain variable domain of TCR clone 48339 (TRBV7-9, TRBJ1-5)
CASSQGHQPNQPQHF

SEQ ID NO: 96679 - protein, 14 aa, Homo sapiens
  CDR3 for alpha chain variable domain of TCR clone 48340 (TRAV1-2, TRAJ16)
CAVNRFPDGQKLLF

SEQ ID NO: 96680 - protein, 13 aa, Homo sapiens
  CDR3 for beta chain variable domain of TCR clone 48340 (TRBV7-3, TRBJ1-1)
CASSQDWGAEAFF

SEQ ID NO: 96681 - protein, 17 aa, Homo sapiens
  CDR3 for alpha chain variable domain of TCR clone 48341 (TRAV3, TRAJ42)
CAVRDRVYGGSQGNLIF

SEQ ID NO: 96682 - protein, 15 aa, Homo sapiens
  CDR3 for beta chain variable domain of TCR clone 48341 (TRBV6-6, TRBJ2-7)
CASSYSYGGSYEQYF

SEQ ID NO: 96683 - protein, 13 aa, Homo sapiens
  CDR3 for alpha chain variable domain of TCR clone 48342 (TRAV25, TRAJ17)
CAGLRAAGNKLTF

SEQ ID NO: 96684 - protein, 16 aa, Homo sapiens
  CDR3 for beta chain variable domain of TCR clone 48342 (TRBV7-3, TRBJ2-2)
CASSLKRGTLSGELFF

SEQ ID NO: 96685 - protein, 16 aa, Homo sapiens
  CDR3 for alpha chain variable domain of TCR clone 48343 (TRAV30, TRAJ24)
CGTEIVDADSWGKFQF

SEQ ID NO: 96686 - protein, 14 aa, Homo sapiens
  CDR3 for beta chain variable domain of TCR clone 48343 (TRBV12-5, TRBJ2-5)
RASGSRTHQEAQYF

SEQ ID NO: 96687 - protein, 13 aa, Homo sapiens
  CDR3 for alpha chain variable domain of TCR clone 48344 (TRAV29/DV5, TRAJ31)
CAASRNNNARLMF

SEQ ID NO: 96688 - protein, 15 aa, Homo sapiens
  CDR3 for beta chain variable domain of TCR clone 48344 (TRBV7-2, TRBJ2-1)
CASTHGTGIYNEQFF

SEQ ID NO: 96689 - protein, 12 aa, Homo sapiens
  CDR3 for alpha chain variable domain of TCR clone 48345 (TRAV12-3, TRAJ17)
CAMTLTGNKLTL

SEQ ID NO: 96690 - protein, 15 aa, Homo sapiens
  CDR3 for beta chain variable domain of TCR clone 48345 (TRBV20-1, TRBJ2-7)
CSARDRVSGMDERYF

SEQ ID NO: 96691 - protein, 13 aa, Homo sapiens
  CDR3 for alpha chain variable domain of TCR clone 48346 (TRAV12-2, TRAJ10)
CAVPTGGGNKLIF

SEQ ID NO: 96692 - protein, 11 aa, Homo sapiens
  CDR3 for beta chain variable domain of TCR clone 48346 (TRBV6-1, TRBJ2-1)
CASISSNEQFF

SEQ ID NO: 96693 - protein, 14 aa, Homo sapiens
  CDR3 for alpha chain variable domain of TCR clone 48347 (TRAV12-2, TRAJ40)
CAVKIPSGTYNYTF

SEQ ID NO: 96694 - protein, 14 aa, Homo sapiens
  CDR3 for beta chain variable domain of TCR clone 48347 (TRBV20-1, TRBJ1-1)
CSAQTRIGGTEAFF

SEQ ID NO: 96695 - protein, 14 aa, Homo sapiens
  CDR3 for alpha chain variable domain of TCR clone 48348 (TRAV8-2, TRAJ4)
CVVSPSGGYIKLIF

SEQ ID NO: 96696 - protein, 15 aa, Homo sapiens
  CDR3 for beta chain variable domain of TCR clone 48348 (TRBV4-1, TRBJ1-4)
CASSDTGGTNEKLFF

SEQ ID NO: 96697 - protein, 15 aa, Homo sapiens
  CDR3 for alpha chain variable domain of TCR clone 48349 (TRAV21, TRAJ53)
CATLNSGSSNYKLTF

SEQ ID NO: 96698 - protein, 14 aa, Homo sapiens
  CDR3 for beta chain variable domain of TCR clone 48349 (TRBV20-1, TRBJ2-1)
CSAQIGGSANEQFF

SEQ ID NO: 96699 - protein, 16 aa, Homo sapiens
  CDR3 for alpha chain variable domain of TCR clone 48350 (TRAV26-1, )
CIDIQNPDPAVYQLRD

SEQ ID NO: 96700 - protein, 19 aa, Homo sapiens
  CDR3 for beta chain variable domain of TCR clone 48350 (TRBV19, TRBJ2-5)
CASSIGQVTDFFLGETQHF

SEQ ID NO: 96701 - protein, 11 aa, Homo sapiens
  CDR3 for alpha chain variable domain of TCR clone 48351 (TRAV16, TRAJ29)
WAPSGNTTLVF

SEQ ID NO: 96702 - protein, 15 aa, Homo sapiens
  CDR3 for beta chain variable domain of TCR clone 48351 (TRBV5-7, TRBJ2-7)
CASSPYFEGSYEQYF

SEQ ID NO: 96703 - protein, 14 aa, Homo sapiens
  CDR3 for alpha chain variable domain of TCR clone 48352 (TRAV12-2, TRAJ13)
CAVKKTGGYQKVTF

SEQ ID NO: 96704 - protein, 16 aa, Homo sapiens
  CDR3 for beta chain variable domain of TCR clone 48352 (TRBV29-1, TRBJ2-7)
CSVEVVGTSGSYEQYF

SEQ ID NO: 96705 - protein, 12 aa, Homo sapiens
  CDR3 for alpha chain variable domain of TCR clone 48353 (TRAV21, TRAJ11)
CAATSGYITLTF

SEQ ID NO: 96706 - protein, 14 aa, Homo sapiens
  CDR3 for beta chain variable domain of TCR clone 48353 (TRBV20-1, TRBJ2-7)
CSAPELAGVGEQYF

SEQ ID NO: 96707 - protein, 14 aa, Homo sapiens
  CDR3 for alpha chain variable domain of TCR clone 48354 (TRAV13-1, TRAJ9)
CAASALTGGFKTIF

SEQ ID NO: 96708 - protein, 13 aa, Homo sapiens
  CDR3 for beta chain variable domain of TCR clone 48354 (TRBV20-1, TRBJ1-1)
CSAGTVGNTEAFC

SEQ ID NO: 96709 - protein, 11 aa, Homo sapiens
  CDR3 for alpha chain variable domain of TCR clone 48355 (TRAV17, TRAJ9)
CDTTGGFKTIF

SEQ ID NO: 96710 - protein, 11 aa, Homo sapiens
  CDR3 for beta chain variable domain of TCR clone 48355 (TRBV29-1, TRBJ2-5)
CSEDRTGTQYF

SEQ ID NO: 96711 - protein, 17 aa, Homo sapiens
  CDR3 for alpha chain variable domain of TCR clone 48356 (TRAV26-1, TRAJ58)
CIVRVGAEGTSGSRLTF

SEQ ID NO: 96712 - protein, 13 aa, Homo sapiens
  CDR3 for beta chain variable domain of TCR clone 48356 (TRBV12-5, TRBJ1-2)
CASGVRTGNGYTF

SEQ ID NO: 96713 - protein, 10 aa, Homo sapiens
  CDR3 for alpha chain variable domain of TCR clone 48357 (TRAV30, TRAJ32)
CGTEKDMVVL

SEQ ID NO: 96714 - protein, 13 aa, Homo sapiens
  CDR3 for beta chain variable domain of TCR clone 48357 (TRBV10-3, TRBJ2-7)
CASKRAVNYEQYF

SEQ ID NO: 96715 - protein, 13 aa, Homo sapiens
  CDR3 for alpha chain variable domain of TCR clone 48358 (TRAV17, TRAJ9)
CATDYTGGFKTIF

SEQ ID NO: 96716 - protein, 12 aa, Homo sapiens
  CDR3 for beta chain variable domain of TCR clone 48358 (TRBV5-1, TRBJ1-1)
CASSLTGAEAFF

SEQ ID NO: 96717 - protein, 12 aa, Homo sapiens
  CDR3 for alpha chain variable domain of TCR clone 48359 (TRAV13-1, TRAJ53)
AASGGSNYKLTF

SEQ ID NO: 96718 - protein, 13 aa, Homo sapiens
  CDR3 for beta chain variable domain of TCR clone 48359 (TRBV7-9, TRBJ1-2)
CASSLKQNYGYTF

SEQ ID NO: 96719 - protein, 14 aa, Homo sapiens
  CDR3 for alpha chain variable domain of TCR clone 48360 (TRAV1-1, TRAJ27)
CAVIYNTNAGKSTF

SEQ ID NO: 96720 - protein, 13 aa, Homo sapiens
  CDR3 for beta chain variable domain of TCR clone 48360 (TRBV7-3, TRBJ1-1)
CASSQDWGAEAFF

SEQ ID NO: 96721 - protein, 11 aa, Homo sapiens
  CDR3 for alpha chain variable domain of TCR clone 48361 (TRAV21, TRAJ34)
CAPYNTDKLIF

SEQ ID NO: 96722 - protein, 13 aa, Homo sapiens
  CDR3 for beta chain variable domain of TCR clone 48361 (TRBV7-6, TRBJ1-2)
CASSLVADYGYTF

SEQ ID NO: 96723 - protein, 16 aa, Homo sapiens
  CDR3 for alpha chain variable domain of TCR clone 48362 (TRAV3, TRAJ10)
CAVRDMRAGGGNKLTS

SEQ ID NO: 96724 - protein, 13 aa, Homo sapiens
  CDR3 for beta chain variable domain of TCR clone 48362 (TRBV6-1, TRBJ1-1)
CASSRQGNTEAFF

SEQ ID NO: 96725 - protein, 11 aa, Homo sapiens
  CDR3 for alpha chain variable domain of TCR clone 48363 (TRAV21, TRAJ34)
CAHYNTDKLIF

SEQ ID NO: 96726 - protein, 15 aa, Homo sapiens
  CDR3 for beta chain variable domain of TCR clone 48363 (TRBV12-4, TRBJ2-5)
CASSPPTGLQETQYF

SEQ ID NO: 96727 - protein, 13 aa, Homo sapiens
  CDR3 for alpha chain variable domain of TCR clone 48364 (TRAV8-3, TRAJ44)
CAVVPDTASKLTF

SEQ ID NO: 96728 - protein, 14 aa, Homo sapiens
  CDR3 for beta chain variable domain of TCR clone 48364 (TRBV11-2, TRBJ2-3)
CASSRLARTDTQYF

SEQ ID NO: 96729 - protein, 11 aa, Homo sapiens
  CDR3 for alpha chain variable domain of TCR clone 48365 (TRAV12-3, TRAJ43)
CAMSVSNDMRF

SEQ ID NO: 96730 - protein, 14 aa, Homo sapiens
  CDR3 for beta chain variable domain of TCR clone 48365 (TRBV6-1, TRBJ1-3)
CASVQGGGGNTIYF

SEQ ID NO: 96731 - protein, 12 aa, Homo sapiens
  CDR3 for alpha chain variable domain of TCR clone 48366 (TRAV21, TRAJ31)
CDVWGNNARLMF

SEQ ID NO: 96732 - protein, 16 aa, Homo sapiens
  CDR3 for beta chain variable domain of TCR clone 48366 (TRBV27, TRBJ2-5)
CASSYGPGGQKETQYF

SEQ ID NO: 96733 - protein, 14 aa, Homo sapiens
  CDR3 for alpha chain variable domain of TCR clone 48367 (TRAV8-4, TRAJ13)
CAVNLSGGYQKVTF

SEQ ID NO: 96734 - protein, 14 aa, Homo sapiens
  CDR3 for beta chain variable domain of TCR clone 48367 (TRBV7-2, TRBJ1-2)
CASSQTGSTYGYTF

SEQ ID NO: 96735 - protein, 12 aa, Homo sapiens
  CDR3 for alpha chain variable domain of TCR clone 48368 (TRAV1-1, TRAJ8)
CAGGTGFQKLVF

SEQ ID NO: 96736 - protein, 16 aa, Homo sapiens
  CDR3 for beta chain variable domain of TCR clone 48368 (TRBV19, TRBJ2-1)
CASSKAGPSSYNEQFF

SEQ ID NO: 96737 - protein, 14 aa, Homo sapiens
  CDR3 for alpha chain variable domain of TCR clone 48369 (TRAV12-2, TRAJ36)
CAVNPPTGANNLFF

SEQ ID NO: 96738 - protein, 13 aa, Homo sapiens
  CDR3 for beta chain variable domain of TCR clone 48369 (TRBV20-1, TRBJ1-6)
CSAPTGLGSHLHF

SEQ ID NO: 96739 - protein, 13 aa, Homo sapiens
  CDR3 for alpha chain variable domain of TCR clone 48370 (TRAV12-3, TRAJ40)
CAMSARGTYKYIF

SEQ ID NO: 96740 - protein, 16 aa, Homo sapiens
  CDR3 for beta chain variable domain of TCR clone 48370 (TRBV7-3, TRBJ2-2)
CASSLKRGTLSGELFF

SEQ ID NO: 96741 - protein, 15 aa, Homo sapiens
  CDR3 for alpha chain variable domain of TCR clone 48371 (TRAV38-1, TRAJ37)
CAFIFGYGNTGKLIF

SEQ ID NO: 96742 - protein, 12 aa, Homo sapiens
  CDR3 for beta chain variable domain of TCR clone 48371 (TRBV7-9, TRBJ2-7)
CASSLEGYEQYF

SEQ ID NO: 96743 - protein, 18 aa, Homo sapiens
  CDR3 for alpha chain variable domain of TCR clone 48372 (TRAV13-1, TRAJ52)
CAAKNPNAGGTSYGKLTF

SEQ ID NO: 96744 - protein, 15 aa, Homo sapiens
  CDR3 for beta chain variable domain of TCR clone 48372 (TRBV19, TRBJ1-1)
CASTSGQIQNTEAFF

SEQ ID NO: 96745 - protein, 12 aa, Homo sapiens
  CDR3 for alpha chain variable domain of TCR clone 48373 (TRAV12-3, TRAJ17)
CAMTLTGNKLTF

SEQ ID NO: 96746 - protein, 12 aa, Homo sapiens
  CDR3 for beta chain variable domain of TCR clone 48373 (TRBV12-4, TRBJ2-7)
CASSLGGYEQHF

SEQ ID NO: 96747 - protein, 14 aa, Homo sapiens
  CDR3 for alpha chain variable domain of TCR clone 48374 (TRAV23/DV6, TRAJ11)
CAALIGGGYRTLTF

SEQ ID NO: 96748 - protein, 13 aa, Homo sapiens
  CDR3 for beta chain variable domain of TCR clone 48374 (TRBV11-3, TRBJ1-1)
CASSLGGNTEAFF

SEQ ID NO: 96749 - protein, 14 aa, Homo sapiens
  CDR3 for alpha chain variable domain of TCR clone 48375 (TRAV26-1, TRAJ45)
CIVRVVGGSDGLTF

SEQ ID NO: 96750 - protein, 16 aa, Homo sapiens
  CDR3 for beta chain variable domain of TCR clone 48375 (TRBV7-9, TRBJ1-1)
CASSLTQVRSNTEAFF

SEQ ID NO: 96751 - protein, 17 aa, Homo sapiens
  CDR3 for alpha chain variable domain of TCR clone 48376 (TRAV13-1, TRAJ52)
CAAGRNAGGTSYEKLTF

SEQ ID NO: 96752 - protein, 13 aa, Homo sapiens
  CDR3 for beta chain variable domain of TCR clone 48376 (TRBV7-2, TRBJ1-1)
CASNLKGAKVAFF

SEQ ID NO: 96753 - protein, 13 aa, Homo sapiens
  CDR3 for alpha chain variable domain of TCR clone 48377 (TRAV27, TRAJ45)
CRSSGEGADGLTF

SEQ ID NO: 96754 - protein, 17 aa, Homo sapiens
  CDR3 for beta chain variable domain of TCR clone 48377 (TRBV11-2, TRBJ2-1)
CASSLYPPGVEYNEQFL

SEQ ID NO: 96755 - protein, 15 aa, Homo sapiens
  CDR3 for alpha chain variable domain of TCR clone 48378 (TRAV4, TRAJ3)
CLVGDSDSSASKIIF

SEQ ID NO: 96756 - protein, 14 aa, Homo sapiens
  CDR3 for beta chain variable domain of TCR clone 48378 (TRBV7-9, TRBJ2-7)
CASSLQQGGYEQHF

SEQ ID NO: 96757 - protein, 10 aa, Homo sapiens
  CDR3 for alpha chain variable domain of TCR clone 48379 (TRAV21, TRAJ31)
CAVDNARLML

SEQ ID NO: 96758 - protein, 13 aa, Homo sapiens
  CDR3 for beta chain variable domain of TCR clone 48379 (TRBV4-1, TRBJ1-1)
CASSRKMNTEAFF

SEQ ID NO: 96759 - protein, 12 aa, Homo sapiens
  CDR3 for alpha chain variable domain of TCR clone 48380 (TRAV21, TRAJ33)
CAKTDSNYQLIW

SEQ ID NO: 96760 - protein, 15 aa, Homo sapiens
  CDR3 for beta chain variable domain of TCR clone 48380 (TRBV12-4, TRBJ2-5)
CASSPPTGLQETQYF

SEQ ID NO: 96761 - protein, 14 aa, Homo sapiens
  CDR3 for alpha chain variable domain of TCR clone 48381 (TRAV38-1, TRAJ29)
CAFITPSGNTPLVF

SEQ ID NO: 96762 - protein, 15 aa, Homo sapiens
  CDR3 for beta chain variable domain of TCR clone 48381 (TRBV7-9, TRBJ2-7)
CASSPGGGLTYEQYF

SEQ ID NO: 96763 - protein, 16 aa, Homo sapiens
  CDR3 for alpha chain variable domain of TCR clone 48382 (TRAV2, TRAJ4)
CAVEDRFSCGYNKLIF

SEQ ID NO: 96764 - protein, 13 aa, Homo sapiens
  CDR3 for beta chain variable domain of TCR clone 48382 (TRBV7-7, TRBJ2-5)
CASSRSGQETQYF

SEQ ID NO: 96765 - protein, 14 aa, Homo sapiens
  CDR3 for alpha chain variable domain of TCR clone 48383 (TRAV12-1, TRAJ17)
CVVNYKAAGNKLTF

SEQ ID NO: 96766 - protein, 17 aa, Homo sapiens
  CDR3 for beta chain variable domain of TCR clone 48383 (TRBV20-1, TRBJ2-1)
CSASSSGLAGSYNDQFF

SEQ ID NO: 96767 - protein, 15 aa, Homo sapiens
  CDR3 for alpha chain variable domain of TCR clone 48384 (TRAV12-2, TRAJ53)
CAVNGGGGSNYKLTF

SEQ ID NO: 96768 - protein, 14 aa, Homo sapiens
  CDR3 for beta chain variable domain of TCR clone 48384 (TRBV20-1, TRBJ1-5)
CSARDDRGNQPQHF

SEQ ID NO: 96769 - protein, 15 aa, Homo sapiens
  CDR3 for alpha chain variable domain of TCR clone 48385 (TRAV3, TRAJ47)
CAVRDIGEYGNKLVF

SEQ ID NO: 96770 - protein, 14 aa, Homo sapiens
  CDR3 for beta chain variable domain of TCR clone 48385 (TRBV13, TRBJ2-5)
CTSSLERVGETQYF

SEQ ID NO: 96771 - protein, 12 aa, Homo sapiens
  CDR3 for alpha chain variable domain of TCR clone 48386 (TRAV3, TRAJ43)
CAVREPNNDMRF

SEQ ID NO: 96772 - protein, 13 aa, Homo sapiens
  CDR3 for beta chain variable domain of TCR clone 48386 (TRBV19, TRBJ1-2)
CASSVPGQDGYTF

SEQ ID NO: 96773 - protein, 12 aa, Homo sapiens
  CDR3 for alpha chain variable domain of TCR clone 48387 (TRAV12-2, TRAJ7)
CAVMRGNNRLAF

SEQ ID NO: 96774 - protein, 12 aa, Homo sapiens
  CDR3 for beta chain variable domain of TCR clone 48387 (TRBV7-8, TRBJ2-7)
CAGSLGDREQYF

SEQ ID NO: 96775 - protein, 15 aa, Homo sapiens
  CDR3 for alpha chain variable domain of TCR clone 48388 (TRAV12-1, TRAJ8)
CVVNVENTGFQKLVF

SEQ ID NO: 96776 - protein, 16 aa, Homo sapiens
  CDR3 for beta chain variable domain of TCR clone 48388 (TRBV7-2, TRBJ2-7)
CASSLEAGGPWYEQCF

SEQ ID NO: 96777 - protein, 17 aa, Homo sapiens
  CDR3 for alpha chain variable domain of TCR clone 48389 (TRAV27, TRAJ42)
CAERVIYYGGSQGNLIF

SEQ ID NO: 96778 - protein, 13 aa, Homo sapiens
  CDR3 for beta chain variable domain of TCR clone 48389 (TRBV6-6, TRBJ2-3)
CSRLQREADTQYF

SEQ ID NO: 96779 - protein, 12 aa, Homo sapiens
  CDR3 for alpha chain variable domain of TCR clone 48390 (TRAV38-1, TRAJ47)
CAFETYGNKLVF

SEQ ID NO: 96780 - protein, 15 aa, Homo sapiens
  CDR3 for beta chain variable domain of TCR clone 48390 (TRBV5-7, TRBJ2-7)
CASSGGRLVPYEQYF

SEQ ID NO: 96781 - protein, 13 aa, Homo sapiens
  CDR3 for alpha chain variable domain of TCR clone 48391 (TRAV13-1, TRAJ27)
CAASTHQCRRINL

SEQ ID NO: 96782 - protein, 16 aa, Homo sapiens
  CDR3 for beta chain variable domain of TCR clone 48391 (TRBV27, TRBJ2-2)
CASSFRGLVRTGELFF

SEQ ID NO: 96783 - protein, 14 aa, Homo sapiens
  CDR3 for alpha chain variable domain of TCR clone 48392 (TRAV17, TRAJ12)
CAIRPMDSSYKLIF

SEQ ID NO: 96784 - protein, 11 aa, Homo sapiens
  CDR3 for beta chain variable domain of TCR clone 48392 (TRBV19, TRBJ1-1)
CASSIGSEAFF

SEQ ID NO: 96785 - protein, 16 aa, Homo sapiens
  CDR3 for alpha chain variable domain of TCR clone 48393 (TRAV3, TRAJ6)
CAVRDGPRAGSYIPTF

SEQ ID NO: 96786 - protein, 14 aa, Homo sapiens
  CDR3 for beta chain variable domain of TCR clone 48393 (TRBV7-2, TRBJ2-7)
CASSPKTSFYEQYF

SEQ ID NO: 96787 - protein, 10 aa, Homo sapiens
  CDR3 for alpha chain variable domain of TCR clone 48394 (TRAV30, TRAJ34)
CGTNPDKLIF

SEQ ID NO: 96788 - protein, 12 aa, Homo sapiens
  CDR3 for beta chain variable domain of TCR clone 48394 (TRBV19, TRBJ1-1)
CASSLSDTEAFF

SEQ ID NO: 96789 - protein, 14 aa, Homo sapiens
  CDR3 for alpha chain variable domain of TCR clone 48395 (TRAV38-2/DV8, TRAJ49)
CAYRSPNTGNQFYF

SEQ ID NO: 96790 - protein, 12 aa, Homo sapiens
  CDR3 for beta chain variable domain of TCR clone 48395 (TRBV11-2, TRBJ2-2)
CASSLGGGELFF

SEQ ID NO: 96791 - protein, 15 aa, Homo sapiens
  CDR3 for alpha chain variable domain of TCR clone 48396 (TRAV27, TRAJ38)
CAARRNAGNNRKLIW

SEQ ID NO: 96792 - protein, 14 aa, Homo sapiens
  CDR3 for beta chain variable domain of TCR clone 48396 (TRBV7-8, TRBJ2-3)
CASSLEAGTDTQYF

SEQ ID NO: 96793 - protein, 15 aa, Homo sapiens
  CDR3 for alpha chain variable domain of TCR clone 48397 (TRAV26-1, TRAJ23)
CIVGVAGYQGGKLIF

SEQ ID NO: 96794 - protein, 18 aa, Homo sapiens
  CDR3 for beta chain variable domain of TCR clone 48397 (TRBV28, TRBJ2-1)
CASSSTSGRANSYNEQFF

SEQ ID NO: 96795 - protein, 12 aa, Homo sapiens
  CDR3 for alpha chain variable domain of TCR clone 48398 (TRAV30, TRAJ43)
CGTEERGNYMRF

SEQ ID NO: 96796 - protein, 13 aa, Homo sapiens
  CDR3 for beta chain variable domain of TCR clone 48398 (TRBV27, TRBJ2-7)
CASSFSQGYEQYF

SEQ ID NO: 96797 - protein, 14 aa, Homo sapiens
  CDR3 for alpha chain variable domain of TCR clone 48399 (TRAV12-3, TRAJ10)
SHLPLTGGGNKLTF

SEQ ID NO: 96798 - protein, 15 aa, Homo sapiens
  CDR3 for beta chain variable domain of TCR clone 48399 (TRBV11-2, TRBJ1-3)
CARSLDGTVGNTIYF

SEQ ID NO: 96799 - protein, 18 aa, Homo sapiens
  CDR3 for alpha chain variable domain of TCR clone 48400 (TRAV26-1, TRAJ27)
CIVRPSFNYNTNAGESTF

SEQ ID NO: 96800 - protein, 14 aa, Homo sapiens
  CDR3 for beta chain variable domain of TCR clone 48400 (TRBV10-3, TRBJ1-6)
CAISVDGDESPLYF

SEQ ID NO: 96801 - protein, 12 aa, Homo sapiens
  CDR3 for alpha chain variable domain of TCR clone 48401 (TRAV1-1, TRAJ9)
CAVDTGGFKTIF

SEQ ID NO: 96802 - protein, 22 aa, Homo sapiens
  CDR3 for beta chain variable domain of TCR clone 48401 (TRBV9, TRBJ1-3)
CASSVDPGETTIALETPYILER

SEQ ID NO: 96803 - protein, 17 aa, Homo sapiens
  CDR3 for alpha chain variable domain of TCR clone 48402 (TRAV8-6, TRAJ58)
CAVSSWVGETSGSRLTF

SEQ ID NO: 96804 - protein, 14 aa, Homo sapiens
  CDR3 for beta chain variable domain of TCR clone 48402 (TRBV4-2, TRBJ2-1)
CASGPDRAYNEQFF

SEQ ID NO: 96805 - protein, 15 aa, Homo sapiens
  CDR3 for alpha chain variable domain of TCR clone 48403 (TRAV8-3, TRAJ45)
CASSYSGGGADGLTF

SEQ ID NO: 96806 - protein, 12 aa, Homo sapiens
  CDR3 for beta chain variable domain of TCR clone 48403 (TRBV7-9, TRBJ2-7)
CASSLEGYEQYF

SEQ ID NO: 96807 - protein, 14 aa, Homo sapiens
  CDR3 for alpha chain variable domain of TCR clone 48404 (TRAV8-2, TRAJ4)
CVVSPSGGYNKLIF

SEQ ID NO: 96808 - protein, 14 aa, Homo sapiens
  CDR3 for beta chain variable domain of TCR clone 48404 (TRBV19, TRBJ2-5)
CASPSSGIQETQYF

SEQ ID NO: 96809 - protein, 14 aa, Homo sapiens
  CDR3 for alpha chain variable domain of TCR clone 48405 (TRAV13-1, TRAJ20)
YAARPGSNDYKLSF

SEQ ID NO: 96810 - protein, 13 aa, Homo sapiens
  CDR3 for beta chain variable domain of TCR clone 48405 (TRBV20-1, TRBJ1-1)
CSAPPGGHTEAFF

SEQ ID NO: 96811 - protein, 10 aa, Homo sapiens
  CDR3 for alpha chain variable domain of TCR clone 48406 (TRAV23/DV6, TRAJ4)
CAARDFWSRD

SEQ ID NO: 96812 - protein, 13 aa, Homo sapiens
  CDR3 for beta chain variable domain of TCR clone 48406 (TRBV7-2, TRBJ1-1)
CASSRNPNTEAFF

SEQ ID NO: 96813 - protein, 13 aa, Homo sapiens
  CDR3 for alpha chain variable domain of TCR clone 48407 (TRAV8-3, TRAJ43)
CAVGPDNNNDMRF

SEQ ID NO: 96814 - protein, 14 aa, Homo sapiens
  CDR3 for beta chain variable domain of TCR clone 48407 (TRBV7-2, TRBJ2-7)
CASSPKTSFYEQYF

SEQ ID NO: 96815 - protein, 14 aa, Homo sapiens
  CDR3 for alpha chain variable domain of TCR clone 48408 (TRAV1-1, TRAJ35)
CAVRSIGFGNVLHC

SEQ ID NO: 96816 - protein, 14 aa, Homo sapiens
  CDR3 for beta chain variable domain of TCR clone 48408 (TRBV5-7, TRBJ2-7)
CASSGGLSPYEQYF

SEQ ID NO: 96817 - protein, 14 aa, Homo sapiens
  CDR3 for alpha chain variable domain of TCR clone 48409 (TRAV17, TRAJ31)
CATVLRNNDARLMF

SEQ ID NO: 96818 - protein, 14 aa, Homo sapiens
  CDR3 for beta chain variable domain of TCR clone 48409 (TRBV12-4, TRBJ2-5)
CASSLWQKQETQYF

SEQ ID NO: 96819 - protein, 21 aa, Homo sapiens
  CDR3 for alpha chain variable domain of TCR clone 48410 (TRAV3, TRAJ17)
CAVRARRGGRSCRQQANCWRR

SEQ ID NO: 96820 - protein, 14 aa, Homo sapiens
  CDR3 for beta chain variable domain of TCR clone 48410 (TRBV4-1, TRBJ2-2)
CASSQAVNTGELFF

SEQ ID NO: 96821 - protein, 15 aa, Homo sapiens
  CDR3 for alpha chain variable domain of TCR clone 48411 (TRAV12-3, TRAJ6)
CAMSATTGGSYIPTF

SEQ ID NO: 96822 - protein, 15 aa, Homo sapiens
  CDR3 for beta chain variable domain of TCR clone 48411 (TRBV7-3, TRBJ2-1)
CASSQRGGALIEQFF

SEQ ID NO: 96823 - protein, 10 aa, Homo sapiens
  CDR3 for alpha chain variable domain of TCR clone 48412 (TRAV23/DV6, TRAJ31)
CARGGARLMF

SEQ ID NO: 96824 - protein, 14 aa, Homo sapiens
  CDR3 for beta chain variable domain of TCR clone 48412 (TRBV7-8, TRBJ1-2)
YASSPDSLSYGHTF

SEQ ID NO: 96825 - protein, 12 aa, Homo sapiens
  CDR3 for alpha chain variable domain of TCR clone 48413 (TRAV12-3, TRAJ17)
CAMTLTGNKLTF

SEQ ID NO: 96826 - protein, 15 aa, Homo sapiens
  CDR3 for beta chain variable domain of TCR clone 48413 (TRBV20-1, TRBJ2-7)
CSARDRVAGMDEQCF

SEQ ID NO: 96827 - protein, 13 aa, Homo sapiens
  CDR3 for alpha chain variable domain of TCR clone 48414 (TRAV3, TRAJ21)
CAVREPDFNKFYF

SEQ ID NO: 96828 - protein, 13 aa, Homo sapiens
  CDR3 for beta chain variable domain of TCR clone 48414 (TRBV12-5, TRBJ2-3)
CASGDRQSDTQYF

SEQ ID NO: 96829 - protein, 15 aa, Homo sapiens
  CDR3 for alpha chain variable domain of TCR clone 48415 (TRAV26-1, TRAJ12)
IASSKLMDSSYKLIF

SEQ ID NO: 96830 - protein, 11 aa, Homo sapiens
  CDR3 for beta chain variable domain of TCR clone 48415 (TRBV7-9, TRBJ2-3)
CASSPPDTQYF

SEQ ID NO: 96831 - protein, 20 aa, Homo sapiens
  CDR3 for alpha chain variable domain of TCR clone 48416 (TRAV2, TRAJ9)
CAVGAGGFKTILEQEQDYLL

SEQ ID NO: 96832 - protein, 16 aa, Homo sapiens
  CDR3 for beta chain variable domain of TCR clone 48416 (TRBV13, TRBJ2-2)
CASSPRTGEHTGELFF

SEQ ID NO: 96833 - protein, 15 aa, Homo sapiens
  CDR3 for alpha chain variable domain of TCR clone 48417 (TRAV12-2, TRAJ53)
CAVNGGGGSNYKLTF

SEQ ID NO: 96834 - protein, 13 aa, Homo sapiens
  CDR3 for beta chain variable domain of TCR clone 48417 (TRBV10-3, TRBJ1-2)
CAISERDSYGYTF

SEQ ID NO: 96835 - protein, 13 aa, Homo sapiens
  CDR3 for alpha chain variable domain of TCR clone 48418 (TRAV17, TRAJ4)
CATKSGGYNKLIF

SEQ ID NO: 96836 - protein, 14 aa, Homo sapiens
  CDR3 for beta chain variable domain of TCR clone 48418 (TRBV20-1, TRBJ1-5)
CSARDDRGNQAQHF

SEQ ID NO: 96837 - protein, 13 aa, Homo sapiens
  CDR3 for alpha chain variable domain of TCR clone 48419 (TRAV26-1, TRAJ39)
CIVRVVAGNMLTS

SEQ ID NO: 96838 - protein, 14 aa, Homo sapiens
  CDR3 for beta chain variable domain of TCR clone 48419 (TRBV20-1, TRBJ2-5)
CSARRQGIRETQYF

SEQ ID NO: 96839 - protein, 16 aa, Homo sapiens
  CDR3 for alpha chain variable domain of TCR clone 48420 (TRAV8-3, TRAJ42)
CAVAGDYGGSQGNLIF

SEQ ID NO: 96840 - protein, 13 aa, Homo sapiens
  CDR3 for beta chain variable domain of TCR clone 48420 (TRBV7-9, TRBJ1-2)
CASSLKQNHGYTF

SEQ ID NO: 96841 - protein, 14 aa, Homo sapiens
  CDR3 for alpha chain variable domain of TCR clone 48421 (TRAV1-2, TRAJ16)
CAVNRFSDGQKLLF

SEQ ID NO: 96842 - protein, 14 aa, Homo sapiens
  CDR3 for beta chain variable domain of TCR clone 48421 (TRBV7-2, TRBJ2-2)
CASRGQGAAGELFF

SEQ ID NO: 96843 - protein, 14 aa, Homo sapiens
  CDR3 for alpha chain variable domain of TCR clone 48422 (TRAV27, TRAJ22)
CAGVFVLGKRQLTF

SEQ ID NO: 96844 - protein, 17 aa, Homo sapiens
  CDR3 for beta chain variable domain of TCR clone 48422 (TRBV14, TRBJ2-1)
CASSQDRRVTSYNEQFF

SEQ ID NO: 96845 - protein, 14 aa, Homo sapiens
  CDR3 for alpha chain variable domain of TCR clone 48423 (TRAV20, TRAJ56)
CAVQFGGANCKLTF

SEQ ID NO: 96846 - protein, 14 aa, Homo sapiens
  CDR3 for beta chain variable domain of TCR clone 48423 (TRBV20-1, TRBJ2-7)
CSAKRGRSSYEQYF

SEQ ID NO: 96847 - protein, 14 aa, Homo sapiens
  CDR3 for alpha chain variable domain of TCR clone 48424 (TRAV21, TRAJ10)
CAVALTGGGNKLTF

SEQ ID NO: 96848 - protein, 13 aa, Homo sapiens
  CDR3 for beta chain variable domain of TCR clone 48424 (TRBV7-2, TRBJ1-6)
CASSLGSDSPLHF

SEQ ID NO: 96849 - protein, 14 aa, Homo sapiens
  CDR3 for alpha chain variable domain of TCR clone 48425 (TRAV1-2, TRAJ16)
CAVNRFSDGQKLLF

SEQ ID NO: 96850 - protein, 16 aa, Homo sapiens
  CDR3 for beta chain variable domain of TCR clone 48425 (TRBV19, TRBJ2-1)
CASSEIIAGDGNEQFF

SEQ ID NO: 96851 - protein, 13 aa, Homo sapiens
  CDR3 for alpha chain variable domain of TCR clone 48426 (TRAV13-1, TRAJ5)
CAARVTGRRALTC

SEQ ID NO: 96852 - protein, 15 aa, Homo sapiens
  CDR3 for beta chain variable domain of TCR clone 48426 (TRBV7-9, TRBJ2-7)
CASSPGGGLTYEQYF

SEQ ID NO: 96853 - protein, 17 aa, Homo sapiens
  CDR3 for alpha chain variable domain of TCR clone 48427 (TRAV3, TRAJ42)
CAVRDRDYGGSQGNLIF

SEQ ID NO: 96854 - protein, 17 aa, Homo sapiens
  CDR3 for beta chain variable domain of TCR clone 48427 (TRBV7-9, TRBJ2-7)
CASSFDGSRGGAYEQYF

SEQ ID NO: 96855 - protein, 13 aa, Homo sapiens
  CDR3 for alpha chain variable domain of TCR clone 48428 (TRAV17, TRAJ9)
CATDGTGGFKTIF

SEQ ID NO: 96856 - protein, 15 aa, Homo sapiens
  CDR3 for beta chain variable domain of TCR clone 48428 (TRBV6-5, TRBJ2-1)
CASSYDAGAGNEQFF

SEQ ID NO: 96857 - protein, 13 aa, Homo sapiens
  CDR3 for alpha chain variable domain of TCR clone 48429 (TRAV13-1, TRAJ39)
CAASIWAGNMLTF

SEQ ID NO: 96858 - protein, 12 aa, Homo sapiens
  CDR3 for beta chain variable domain of TCR clone 48429 (TRBV11-2, TRBJ2-2)
CASSLGGGELFF

SEQ ID NO: 96859 - protein, 15 aa, Homo sapiens
  CDR3 for alpha chain variable domain of TCR clone 48430 (TRAV4, TRAJ39)
CLVGPNNNAGNMLTF

SEQ ID NO: 96860 - protein, 13 aa, Homo sapiens
  CDR3 for beta chain variable domain of TCR clone 48430 (TRBV11-2, TRBJ2-5)
CASSSTVEETQYF

SEQ ID NO: 96861 - protein, 12 aa, Homo sapiens
  CDR3 for alpha chain variable domain of TCR clone 48431 (TRAV13-2, TRAJ8)
CAPWLGFQKLVF

SEQ ID NO: 96862 - protein, 18 aa, Homo sapiens
  CDR3 for beta chain variable domain of TCR clone 48431 (TRBV11-2, TRBJ2-3)
CTSSLGGASRGAPNTQYF

SEQ ID NO: 96863 - protein, 12 aa, Homo sapiens
  CDR3 for alpha chain variable domain of TCR clone 48432 (TRAV8-3, TRAJ26)
CAGDNYGQHFVF

SEQ ID NO: 96864 - protein, 12 aa, Homo sapiens
  CDR3 for beta chain variable domain of TCR clone 48432 (TRBV11-2, TRBJ2-1)
CASSPGNNEQFF

SEQ ID NO: 96865 - protein, 16 aa, Homo sapiens
  CDR3 for alpha chain variable domain of TCR clone 48433 (TRAV3, TRAJ37)
CAVRPHGSGNTGKIIF

SEQ ID NO: 96866 - protein, 16 aa, Homo sapiens
  CDR3 for beta chain variable domain of TCR clone 48433 (TRBV9, TRBJ1-2)
CASSVEEKVSPYGYTF

SEQ ID NO: 96867 - protein, 14 aa, Homo sapiens
  CDR3 for alpha chain variable domain of TCR clone 48434 (TRAV9-2, TRAJ39)
CALYIYNAGNMLTF

SEQ ID NO: 96868 - protein, 15 aa, Homo sapiens
  CDR3 for beta chain variable domain of TCR clone 48434 (TRBV29-1, TRBJ2-1)
CSVGRHALFYNEQFF

SEQ ID NO: 96869 - protein, 14 aa, Homo sapiens
  CDR3 for alpha chain variable domain of TCR clone 48435 (TRAV12-2, TRAJ17)
CAALFKAAGNELTF

SEQ ID NO: 96870 - protein, 16 aa, Homo sapiens
  CDR3 for beta chain variable domain of TCR clone 48435 (TRBV20-1, TRBJ2-2)
CSASASGIPGAGELFF

SEQ ID NO: 96871 - protein, 14 aa, Homo sapiens
  CDR3 for alpha chain variable domain of TCR clone 48436 (TRAV17, TRAJ39)
CATDPVHAGNMLTF

SEQ ID NO: 96872 - protein, 15 aa, Homo sapiens
  CDR3 for beta chain variable domain of TCR clone 48436 (TRBV13, TRBJ1-5)
CASSFGQGGVQPQHF

SEQ ID NO: 96873 - protein, 12 aa, Homo sapiens
  CDR3 for alpha chain variable domain of TCR clone 48437 (TRAV13-1, TRAJ21)
CAAKEGFNKFYF

SEQ ID NO: 96874 - protein, 13 aa, Homo sapiens
  CDR3 for beta chain variable domain of TCR clone 48437 (TRBV7-3, TRBJ1-1)
CAGSQDWGAEAFF

SEQ ID NO: 96875 - protein, 14 aa, Homo sapiens
  CDR3 for alpha chain variable domain of TCR clone 48438 (TRAV26-2, TRAJ32)
CIPFRGGATNKLIF

SEQ ID NO: 96876 - protein, 15 aa, Homo sapiens
  CDR3 for beta chain variable domain of TCR clone 48438 (TRBV2, TRBJ2-2)
CASSGFGAGTGELFF

SEQ ID NO: 96877 - protein, 18 aa, Homo sapiens
  CDR3 for alpha chain variable domain of TCR clone 48439 (TRAV13-1, TRAJ52)
CAAKNPNAGGTSYGKLTF

SEQ ID NO: 96878 - protein, 13 aa, Homo sapiens
  CDR3 for beta chain variable domain of TCR clone 48439 (TRBV7-8, TRBJ2-1)
CASTRDAVDEQFF

SEQ ID NO: 96879 - protein, 12 aa, Homo sapiens
  CDR3 for alpha chain variable domain of TCR clone 48440 (TRAV8-3, TRAJ20)
CAVGANDYKLSF

SEQ ID NO: 96880 - protein, 16 aa, Homo sapiens
  CDR3 for beta chain variable domain of TCR clone 48440 (TRBV19, TRBJ2-2)
CASRSAGTGATGELFF

SEQ ID NO: 96881 - protein, 14 aa, Homo sapiens
  CDR3 for alpha chain variable domain of TCR clone 48441 (TRAV2, TRAJ3)
CAVRPYSSASKIIF

SEQ ID NO: 96882 - protein, 17 aa, Homo sapiens
  CDR3 for beta chain variable domain of TCR clone 48441 (TRBV7-6, TRBJ2-5)
CASGSPQAGDPSETQYF

SEQ ID NO: 96883 - protein, 16 aa, Homo sapiens
  CDR3 for alpha chain variable domain of TCR clone 48442 (TRAV4, TRAJ18)
CCVLLIRGSTLGRLYF

SEQ ID NO: 96884 - protein, 12 aa, Homo sapiens
  CDR3 for beta chain variable domain of TCR clone 48442 (TRBV6-3, TRBJ2-7)
CASSLTPYEQYF

SEQ ID NO: 96885 - protein, 15 aa, Homo sapiens
  CDR3 for alpha chain variable domain of TCR clone 48443 (TRAV3, TRAJ47)
CAVRDIGEYGNKPVF

SEQ ID NO: 96886 - protein, 14 aa, Homo sapiens
  CDR3 for beta chain variable domain of TCR clone 48443 (TRBV13, TRBJ2-5)
CASSLERVGETQYF

SEQ ID NO: 96887 - protein, 14 aa, Homo sapiens
  CDR3 for alpha chain variable domain of TCR clone 48444 (TRAV12-2, TRAJ45)
CALPESGGADGLTF

SEQ ID NO: 96888 - protein, 14 aa, Homo sapiens
  CDR3 for beta chain variable domain of TCR clone 48444 (TRBV18, TRBJ1-5)
CASSPGNSNQPQHF

SEQ ID NO: 96889 - protein, 14 aa, Homo sapiens
  CDR3 for alpha chain variable domain of TCR clone 48445 (TRAV2, TRAJ9)
CAVEDRCGGFKTIF

SEQ ID NO: 96890 - protein, 15 aa, Homo sapiens
  CDR3 for beta chain variable domain of TCR clone 48445 (TRBV7-2, TRBJ2-1)
CASSSGLAGGNEQFF

SEQ ID NO: 96891 - protein, 12 aa, Homo sapiens
  CDR3 for alpha chain variable domain of TCR clone 48446 (TRAV12-2, TRAJ10)
WGVTGGGNKLTF

SEQ ID NO: 96892 - protein, 16 aa, Homo sapiens
  CDR3 for beta chain variable domain of TCR clone 48446 (TRBV19, TRBJ2-1)
CASSKAGPSSYNEQFF

SEQ ID NO: 96893 - protein, 13 aa, Homo sapiens
  CDR3 for alpha chain variable domain of TCR clone 48447 (TRAV35, TRAJ42)
CAGFPGSQGNLIF

SEQ ID NO: 96894 - protein, 13 aa, Homo sapiens
  CDR3 for beta chain variable domain of TCR clone 48447 (TRBV29-1, TRBJ2-1)
CSVEGGRVNEQSF

SEQ ID NO: 96895 - protein, 15 aa, Homo sapiens
  CDR3 for alpha chain variable domain of TCR clone 48448 (TRAV13-2, TRAJ6)
CAESIGAGGSYIPTF

SEQ ID NO: 96896 - protein, 15 aa, Homo sapiens
  CDR3 for beta chain variable domain of TCR clone 48448 (TRBV7-2, TRBJ1-2)
CASSFTQGAKYGYTF

SEQ ID NO: 96897 - protein, 13 aa, Homo sapiens
  CDR3 for alpha chain variable domain of TCR clone 48449 (TRAV39, TRAJ58)
CAGEETSGSRLTL

SEQ ID NO: 96898 - protein, 13 aa, Homo sapiens
  CDR3 for beta chain variable domain of TCR clone 48449 (TRBV15, TRBJ2-7)
CATSTTGHYEQYF

SEQ ID NO: 96899 - protein, 14 aa, Homo sapiens
  CDR3 for alpha chain variable domain of TCR clone 48450 (TRAV30, TRAJ33)
CGTVAPRSNYQLIW

SEQ ID NO: 96900 - protein, 17 aa, Homo sapiens
  CDR3 for beta chain variable domain of TCR clone 48450 (TRBV13, TRBJ2-3)
CASSLSRVAGGRNTQYF

SEQ ID NO: 96901 - protein, 12 aa, Homo sapiens
  CDR3 for alpha chain variable domain of TCR clone 48451 (TRAV10, TRAJ6)
CVVSEGSYIPTF

SEQ ID NO: 96902 - protein, 17 aa, Homo sapiens
  CDR3 for beta chain variable domain of TCR clone 48451 (TRBV13, TRBJ2-3)
CASSLSRVAGGRNTQYF

SEQ ID NO: 96903 - protein, 10 aa, Homo sapiens
  CDR3 for alpha chain variable domain of TCR clone 48452 (TRAV38-1, TRAJ34)
CAFMDDELIF

SEQ ID NO: 96904 - protein, 14 aa, Homo sapiens
  CDR3 for beta chain variable domain of TCR clone 48452 (TRBV7-2, TRBJ2-2)
CASSLNSNTGELFF

SEQ ID NO: 96905 - protein, 16 aa, Homo sapiens
  CDR3 for alpha chain variable domain of TCR clone 48453 (TRAV8-3, TRAJ42)
CAVGEGNGGSQGNLIF

SEQ ID NO: 96906 - protein, 14 aa, Homo sapiens
  CDR3 for beta chain variable domain of TCR clone 48453 (TRBV7-2, TRBJ2-1)
CASSRGGARNDQFF

SEQ ID NO: 96907 - protein, 14 aa, Homo sapiens
  CDR3 for alpha chain variable domain of TCR clone 48454 (TRAV9-2, TRAJ6)
CALSDPGGSYIPTF

SEQ ID NO: 96908 - protein, 15 aa, Homo sapiens
  CDR3 for beta chain variable domain of TCR clone 48454 (TRBV19, TRBJ2-2)
CSRSPGTGATGELFF

SEQ ID NO: 96909 - protein, 10 aa, Homo sapiens
  CDR3 for alpha chain variable domain of TCR clone 48455 (TRAV3, TRAJ43)
CAVRGVGTMT

SEQ ID NO: 96910 - protein, 12 aa, Homo sapiens
  CDR3 for beta chain variable domain of TCR clone 48455 (TRBV5-1, TRBJ2-7)
CASSLDSYEQYF

SEQ ID NO: 96911 - protein, 14 aa, Homo sapiens
  CDR3 for alpha chain variable domain of TCR clone 48456 (TRAV2, TRAJ42)
CAVVGGGSQGNLIF

SEQ ID NO: 96912 - protein, 13 aa, Homo sapiens
  CDR3 for beta chain variable domain of TCR clone 48456 (TRBV7-2, TRBJ2-7)
CASSSPSGSEQYF

SEQ ID NO: 96913 - protein, 14 aa, Homo sapiens
  CDR3 for alpha chain variable domain of TCR clone 48457 (TRAV26-1, TRAJ38)
CIADNAGNNRKLIW

SEQ ID NO: 96914 - protein, 16 aa, Homo sapiens
  CDR3 for beta chain variable domain of TCR clone 48457 (TRBV19, TRBJ2-2)
CASRSPGTGATGELFF

SEQ ID NO: 96915 - protein, 14 aa, Homo sapiens
  CDR3 for alpha chain variable domain of TCR clone 48458 (TRAV13-1, TRAJ35)
CAASKGGFGNGLHC

SEQ ID NO: 96916 - protein, 13 aa, Homo sapiens
  CDR3 for beta chain variable domain of TCR clone 48458 (TRBV7-3, TRBJ1-1)
CASSQDWGAEAFF

SEQ ID NO: 96917 - protein, 14 aa, Homo sapiens
  CDR3 for alpha chain variable domain of TCR clone 48459 (TRAV1-2, TRAJ16)
CAVNRFSDGQKLLF

SEQ ID NO: 96918 - protein, 15 aa, Homo sapiens
  CDR3 for beta chain variable domain of TCR clone 48459 (TRBV7-9, TRBJ1-6)
CAISSPGRGNSPLHF

SEQ ID NO: 96919 - protein, 13 aa, Homo sapiens
  CDR3 for alpha chain variable domain of TCR clone 48460 (TRAV30, TRAJ24)
CGTVTDSWGKLQF

SEQ ID NO: 96920 - protein, 18 aa, Homo sapiens
  CDR3 for beta chain variable domain of TCR clone 48460 (TRBV11-2, TRBJ2-3)
CASSLGGASRGAPNTQYF

SEQ ID NO: 96921 - protein, 13 aa, Homo sapiens
  CDR3 for alpha chain variable domain of TCR clone 48461 (TRAV12-3, TRAJ56)
CALATGANSKLTF

SEQ ID NO: 96922 - protein, 15 aa, Homo sapiens
  CDR3 for beta chain variable domain of TCR clone 48461 (TRBV28, TRBJ1-2)
CASIPQGSDDYGYTF

SEQ ID NO: 96923 - protein, 13 aa, Homo sapiens
  CDR3 for alpha chain variable domain of TCR clone 48462 (TRAV1-2, TRAJ9)
CAALNTGGFKTIF

SEQ ID NO: 96924 - protein, 16 aa, Homo sapiens
  CDR3 for beta chain variable domain of TCR clone 48462 (TRBV13, TRBJ2-2)
CASSPRTGEHTGELFF

SEQ ID NO: 96925 - protein, 13 aa, Homo sapiens
  CDR3 for alpha chain variable domain of TCR clone 48463 (TRAV8-1, TRAJ30)
CAVIMNRDGKIIF

SEQ ID NO: 96926 - protein, 14 aa, Homo sapiens
  CDR3 for beta chain variable domain of TCR clone 48463 (TRBV7-2, TRBJ1-6)
CASSLQGANSPLHF

SEQ ID NO: 96927 - protein, 10 aa, Homo sapiens
  CDR3 for alpha chain variable domain of TCR clone 48464 (TRAV8-4, TRAJ43)
GAVSADDMRF

SEQ ID NO: 96928 - protein, 15 aa, Homo sapiens
  CDR3 for beta chain variable domain of TCR clone 48464 (TRBV5-1, TRBJ2-3)
CASSVTSGSTDTQYF

SEQ ID NO: 96929 - protein, 17 aa, Homo sapiens
  CDR3 for alpha chain variable domain of TCR clone 48465 (TRAV3, TRAJ6)
CAVRDGPRAGGSYIPTF

SEQ ID NO: 96930 - protein, 20 aa, Homo sapiens
  CDR3 for beta chain variable domain of TCR clone 48465 (TRBV28, TRBJ2-1)
CASTPIGRSPGLAGGNEQFV

SEQ ID NO: 96931 - protein, 13 aa, Homo sapiens
  CDR3 for alpha chain variable domain of TCR clone 48466 (TRAV12-3, TRAJ54)
FAMTLQGAQKLVF

SEQ ID NO: 96932 - protein, 14 aa, Homo sapiens
  CDR3 for beta chain variable domain of TCR clone 48466 (TRBV4-1, TRBJ2-2)
CASSQAVNTGELFF

SEQ ID NO: 96933 - protein, 13 aa, Homo sapiens
  CDR3 for alpha chain variable domain of TCR clone 48467 (TRAV1-1, TRAJ9)
CAAKNPGGFKTIF

SEQ ID NO: 96934 - protein, 14 aa, Homo sapiens
  CDR3 for beta chain variable domain of TCR clone 48467 (TRBV20-1, TRBJ2-1)
CSAQIGGSANEQFF

SEQ ID NO: 96935 - protein, 13 aa, Homo sapiens
  CDR3 for alpha chain variable domain of TCR clone 48468 (TRAV8-3, TRAJ48)
CAVVPFGNEKLTF

SEQ ID NO: 96936 - protein, 15 aa, Homo sapiens
  CDR3 for beta chain variable domain of TCR clone 48468 (TRBV11-2, TRBJ2-1)
CASSSPSTRYNEQFV

SEQ ID NO: 96937 - protein, 17 aa, Homo sapiens
  CDR3 for alpha chain variable domain of TCR clone 48469 (TRAV3, TRAJ6)
CAVRDGPRAEGSYIPTF

SEQ ID NO: 96938 - protein, 14 aa, Homo sapiens
  CDR3 for beta chain variable domain of TCR clone 48469 (TRBV7-2, TRBJ2-7)
CVSSPKTSFYEQYF

SEQ ID NO: 96939 - protein, 17 aa, Homo sapiens
  CDR3 for alpha chain variable domain of TCR clone 48470 (TRAV3, TRAJ6)
CAVRDGPRAGGSYIPTY

SEQ ID NO: 96940 - protein, 20 aa, Homo sapiens
  CDR3 for beta chain variable domain of TCR clone 48470 (TRBV28, TRBJ2-1)
CASTPIGRSPGLAGGNEQFF

SEQ ID NO: 96941 - protein, 15 aa, Homo sapiens
  CDR3 for alpha chain variable domain of TCR clone 48471 (TRAV23/DV6, TRAJ44)
CAARTLTGTASKLTF

SEQ ID NO: 96942 - protein, 17 aa, Homo sapiens
  CDR3 for beta chain variable domain of TCR clone 48471 (TRBV24-1, TRBJ2-1)
CATSDVSTSGTYNERFF

SEQ ID NO: 96943 - protein, 12 aa, Homo sapiens
  CDR3 for alpha chain variable domain of TCR clone 48472 (TRAV13-2, TRAJ8)
CAPWLGFQKLVF

SEQ ID NO: 96944 - protein, 15 aa, Homo sapiens
  CDR3 for beta chain variable domain of TCR clone 48472 (TRBV12-4, TRBJ2-5)
CASSLSGAFQDTQYF

SEQ ID NO: 96945 - protein, 12 aa, Homo sapiens
  CDR3 for alpha chain variable domain of TCR clone 48473 (TRAV13-1, TRAJ21)
CAAKEGFNKFYF

SEQ ID NO: 96946 - protein, 12 aa, Homo sapiens
  CDR3 for beta chain variable domain of TCR clone 48473 (TRBV12-4, TRBJ2-3)
CASSTLPDTQYF

SEQ ID NO: 96947 - protein, 14 aa, Homo sapiens
  CDR3 for alpha chain variable domain of TCR clone 48474 (TRAV9-2, TRAJ39)
CALYIYNAGNMLTF

SEQ ID NO: 96948 - protein, 17 aa, Homo sapiens
  CDR3 for beta chain variable domain of TCR clone 48474 (TRBV13, TRBJ2-3)
CASSLSRVAGGRNMQYF

SEQ ID NO: 96949 - protein, 15 aa, Homo sapiens
  CDR3 for alpha chain variable domain of TCR clone 48475 (TRAV13-1, TRAJ48)
CAASTGGFGNEKLTF

SEQ ID NO: 96950 - protein, 14 aa, Homo sapiens
  CDR3 for beta chain variable domain of TCR clone 48475 (TRBV24-1, TRBJ2-2)
CATGGLGNTGEPFF

SEQ ID NO: 96951 - protein, 11 aa, Homo sapiens
  CDR3 for alpha chain variable domain of TCR clone 48476 (TRAV4, TRAJ31)
CLVGDNARLMF

SEQ ID NO: 96952 - protein, 16 aa, Homo sapiens
  CDR3 for beta chain variable domain of TCR clone 48476 (TRBV7-2, TRBJ2-5)
CASSSNWLSGQETQYF

SEQ ID NO: 96953 - protein, 12 aa, Homo sapiens
  CDR3 for alpha chain variable domain of TCR clone 48477 (TRAV13-1, TRAJ48)
CAANFGNEKLTF

SEQ ID NO: 96954 - protein, 11 aa, Homo sapiens
  CDR3 for beta chain variable domain of TCR clone 48477 (TRBV20-1, TRBJ1-5)
CSAQGDQPQHL

SEQ ID NO: 96955 - protein, 14 aa, Homo sapiens
  CDR3 for alpha chain variable domain of TCR clone 48478 (TRAV12-3, TRAJ9)
CAMSPNTGGFKTIF

SEQ ID NO: 96956 - protein, 13 aa, Homo sapiens
  CDR3 for beta chain variable domain of TCR clone 48478 (TRBV19, TRBJ1-2)
CASSVPGQDGYTF

SEQ ID NO: 96957 - protein, 17 aa, Homo sapiens
  CDR3 for alpha chain variable domain of TCR clone 48479 (TRAV3, TRAJ6)
WAVRDGPRAGGSYIPTF

SEQ ID NO: 96958 - protein, 13 aa, Homo sapiens
  CDR3 for beta chain variable domain of TCR clone 48479 (TRBV19, TRBJ2-7)
CASSIDRTYEQYF

SEQ ID NO: 96959 - protein, 16 aa, Homo sapiens
  CDR3 for alpha chain variable domain of TCR clone 48480 (TRAV20, TRAJ53)
CAVQGNSGGSNYKLTF

SEQ ID NO: 96960 - protein, 12 aa, Homo sapiens
  CDR3 for beta chain variable domain of TCR clone 48480 (TRBV7-9, TRBJ2-7)
CASSLEGYEQYF

SEQ ID NO: 96961 - protein, 11 aa, Homo sapiens
  CDR3 for alpha chain variable domain of TCR clone 48481 (TRAV13-1, TRAJ40)
CAVSGTYKYIF

SEQ ID NO: 96962 - protein, 14 aa, Homo sapiens
  CDR3 for beta chain variable domain of TCR clone 48481 (TRBV7-2, TRBJ2-7)
CASSPKTSFYEQYF

SEQ ID NO: 96963 - protein, 11 aa, Homo sapiens
  CDR3 for alpha chain variable domain of TCR clone 48482 (TRAV12-2, TRAJ23)
CARGRGGKLIF

SEQ ID NO: 96964 - protein, 14 aa, Homo sapiens
  CDR3 for beta chain variable domain of TCR clone 48482 (TRBV28, TRBJ2-5)
CACSLGDRAETQYF

SEQ ID NO: 96965 - protein, 15 aa, Homo sapiens
  CDR3 for alpha chain variable domain of TCR clone 48483 (TRAV27, TRAJ38)
CAARRNAGNNRKLIW

SEQ ID NO: 96966 - protein, 11 aa, Homo sapiens
  CDR3 for beta chain variable domain of TCR clone 48483 (TRBV7-8, TRBJ2-7)
CASSLSLEQYF

SEQ ID NO: 96967 - protein, 14 aa, Homo sapiens
  CDR3 for alpha chain variable domain of TCR clone 48484 (TRAV12-2, TRAJ45)
CAVYSGGGADVLTF

SEQ ID NO: 96968 - protein, 14 aa, Homo sapiens
  CDR3 for beta chain variable domain of TCR clone 48484 (TRBV6-5, TRBJ1-2)
CASTRGGGSDGYTF

SEQ ID NO: 96969 - protein, 13 aa, Homo sapiens
  CDR3 for alpha chain variable domain of TCR clone 48485 (TRAV2, TRAJ10)
CAVETGGGNELTF

SEQ ID NO: 96970 - protein, 14 aa, Homo sapiens
  CDR3 for beta chain variable domain of TCR clone 48485 (TRBV20-1, TRBJ2-3)
CSAGGRRGTDTQYF

SEQ ID NO: 96971 - protein, 14 aa, Homo sapiens
  CDR3 for alpha chain variable domain of TCR clone 48486 (TRAV1-1, TRAJ34)
CAVSPSYNTDKLIF

SEQ ID NO: 96972 - protein, 16 aa, Homo sapiens
  CDR3 for beta chain variable domain of TCR clone 48486 (TRBV5-1, TRBJ2-5)
CASSLSLAGAQETQYF

SEQ ID NO: 96973 - protein, 14 aa, Homo sapiens
  CDR3 for alpha chain variable domain of TCR clone 48487 (TRAV1-2, TRAJ8)
RAVREDTGFQKLVF

SEQ ID NO: 96974 - protein, 16 aa, Homo sapiens
  CDR3 for beta chain variable domain of TCR clone 48487 (TRBV5-7, TRBJ2-5)
CASTLAPAGGRETQYF

SEQ ID NO: 96975 - protein, 14 aa, Homo sapiens
  CDR3 for alpha chain variable domain of TCR clone 48488 (TRAV3, TRAJ9)
CAVRLNTGGFKTIF

SEQ ID NO: 96976 - protein, 15 aa, Homo sapiens
  CDR3 for beta chain variable domain of TCR clone 48488 (TRBV27, TRBJ2-1)
CASSNGGGSSNEQFF

SEQ ID NO: 96977 - protein, 12 aa, Homo sapiens
  CDR3 for alpha chain variable domain of TCR clone 48489 (TRAV13-1, TRAJ49)
CSASPMGNQFYF

SEQ ID NO: 96978 - protein, 13 aa, Homo sapiens
  CDR3 for beta chain variable domain of TCR clone 48489 (TRBV20-1, TRBJ2-2)
CSASAAGTGELFF

SEQ ID NO: 96979 - protein, 14 aa, Homo sapiens
  CDR3 for alpha chain variable domain of TCR clone 48490 (TRAV1-2, TRAJ16)
CAVNRFSDGQKLLF

SEQ ID NO: 96980 - protein, 19 aa, Homo sapiens
  CDR3 for beta chain variable domain of TCR clone 48490 (TRBV25-1, TRBJ2-2)
CSILVYRVDRGRKTGELFF

SEQ ID NO: 96981 - protein, 16 aa, Homo sapiens
  CDR3 for alpha chain variable domain of TCR clone 48491 (TRAV3, TRAJ23)
CAVKIGTYNQGGKLIF

SEQ ID NO: 96982 - protein, 17 aa, Homo sapiens
  CDR3 for beta chain variable domain of TCR clone 48491 (TRBV10-3, TRBJ2-6)
CAISESTAPSGANVLTF

SEQ ID NO: 96983 - protein, 11 aa, Homo sapiens
  CDR3 for alpha chain variable domain of TCR clone 48492 (TRAV12-1, TRAJ34)
CVVNKGRELIL

SEQ ID NO: 96984 - protein, 12 aa, Homo sapiens
  CDR3 for beta chain variable domain of TCR clone 48492 (TRBV11-2, TRBJ2-2)
CASSLGGGELFF

SEQ ID NO: 96985 - protein, 11 aa, Homo sapiens
  CDR3 for alpha chain variable domain of TCR clone 48493 (TRAV1-1, TRAJ23)
CAVRQGGKLIF

SEQ ID NO: 96986 - protein, 12 aa, Homo sapiens
  CDR3 for beta chain variable domain of TCR clone 48493 (TRBV19, TRBJ2-1)
CASSMQDTEQFF

SEQ ID NO: 96987 - protein, 15 aa, Homo sapiens
  CDR3 for alpha chain variable domain of TCR clone 48494 (TRAV8-3, TRAJ45)
CASSYSGGGADGLTF

SEQ ID NO: 96988 - protein, 13 aa, Homo sapiens
  CDR3 for beta chain variable domain of TCR clone 48494 (TRBV10-2, TRBJ2-7)
CASSEGQYYEQYF

SEQ ID NO: 96989 - protein, 16 aa, Homo sapiens
  CDR3 for alpha chain variable domain of TCR clone 48495 (TRAV30, TRAJ24)
CGTETVDADSWGKFQF

SEQ ID NO: 96990 - protein, 18 aa, Homo sapiens
  CDR3 for beta chain variable domain of TCR clone 48495 (TRBV11-2, TRBJ2-3)
CASSLGGASRGAPNTQYF

SEQ ID NO: 96991 - protein, 15 aa, Homo sapiens
  CDR3 for alpha chain variable domain of TCR clone 48496 (TRAV8-3, TRAJ45)
CALSCSGGGADGLTF

SEQ ID NO: 96992 - protein, 13 aa, Homo sapiens
  CDR3 for beta chain variable domain of TCR clone 48496 (TRBV10-3, TRBJ2-7)
CASKLAVNYEQYF

SEQ ID NO: 96993 - protein, 14 aa, Homo sapiens
  CDR3 for alpha chain variable domain of TCR clone 48497 (TRAV12-2, TRAJ13)
CAVKKTGGYQKVTF

SEQ ID NO: 96994 - protein, 16 aa, Homo sapiens
  CDR3 for beta chain variable domain of TCR clone 48497 (TRBV4-1, TRBJ2-4)
CASSLLRGTAKNIQYF

SEQ ID NO: 96995 - protein, 14 aa, Homo sapiens
  CDR3 for alpha chain variable domain of TCR clone 48498 (TRAV13-1, TRAJ35)
CAASKGGFGNVLHF

SEQ ID NO: 96996 - protein, 14 aa, Homo sapiens
  CDR3 for beta chain variable domain of TCR clone 48498 (TRBV7-2, TRBJ2-7)
CASSPKTSFYEQYF

SEQ ID NO: 96997 - protein, 18 aa, Homo sapiens
  CDR3 for alpha chain variable domain of TCR clone 48499 (TRAV21, TRAJ52)
CAVMPSPAGGTSYGKLTF

SEQ ID NO: 96998 - protein, 15 aa, Homo sapiens
  CDR3 for beta chain variable domain of TCR clone 48499 (TRBV7-9, TRBJ2-7)
CASSSSGLAVYEQYF

SEQ ID NO: 96999 - protein, 13 aa, Homo sapiens
  CDR3 for alpha chain variable domain of TCR clone 48500 (TRAV12-1, TRAJ7)
CVVDMRGNNRLAF

SEQ ID NO: 97000 - protein, 15 aa, Homo sapiens
  CDR3 for beta chain variable domain of TCR clone 48500 (TRBV27, TRBJ2-3)
CASSLGLAATDTQYF

SEQ ID NO: 97001 - protein, 13 aa, Homo sapiens
  CDR3 for alpha chain variable domain of TCR clone 48501 (TRAV2, TRAJ29)
CAAGNSRNTPLVF

SEQ ID NO: 97002 - protein, 16 aa, Homo sapiens
  CDR3 for beta chain variable domain of TCR clone 48501 (TRBV7-9, TRBJ1-2)
CASSPGGGAINYGYTF

SEQ ID NO: 97003 - protein, 14 aa, Homo sapiens
  CDR3 for alpha chain variable domain of TCR clone 48502 (TRAV12-2, TRAJ13)
CAVKKTGGYQKVTF

SEQ ID NO: 97004 - protein, 15 aa, Homo sapiens
  CDR3 for beta chain variable domain of TCR clone 48502 (TRBV28, TRBJ2-4)
CAAGSGTLLMGIQYF

SEQ ID NO: 97005 - protein, 16 aa, Homo sapiens
  CDR3 for alpha chain variable domain of TCR clone 48503 (TRAV16, TRAJ52)
CALSEAGGTSYGKLTF

SEQ ID NO: 97006 - protein, 12 aa, Homo sapiens
  CDR3 for beta chain variable domain of TCR clone 48503 (TRBV12-4, TRBJ1-3)
CASSFSGNTIYF

SEQ ID NO: 97007 - protein, 14 aa, Homo sapiens
  CDR3 for alpha chain variable domain of TCR clone 48504 (TRAV12-2, TRAJ23)
CAVGGYNQGGKLIF

SEQ ID NO: 97008 - protein, 15 aa, Homo sapiens
  CDR3 for beta chain variable domain of TCR clone 48504 (TRBV20-1, TRBJ2-3)
CSASSGGPRTDTRYF

SEQ ID NO: 97009 - protein, 13 aa, Homo sapiens
  CDR3 for alpha chain variable domain of TCR clone 48505 (TRAV2, TRAJ21)
CAVEALNFNKFYF

SEQ ID NO: 97010 - protein, 15 aa, Homo sapiens
  CDR3 for beta chain variable domain of TCR clone 48505 (TRBV28, TRBJ2-5)
CASSPGQGSIETQYF

SEQ ID NO: 97011 - protein, 15 aa, Homo sapiens
  CDR3 for alpha chain variable domain of TCR clone 48506 (TRAV8-3, TRAJ45)
CASSYSGGRADGLTF

SEQ ID NO: 97012 - protein, 13 aa, Homo sapiens
  CDR3 for beta chain variable domain of TCR clone 48506 (TRBV10-3, TRBJ2-7)
CASKLAVNYEQYF

SEQ ID NO: 97013 - protein, 18 aa, Homo sapiens
  CDR3 for alpha chain variable domain of TCR clone 48507 (TRAV9-2, TRAJ52)
WALSRHNAGGTSYGKLTF

SEQ ID NO: 97014 - protein, 13 aa, Homo sapiens
  CDR3 for beta chain variable domain of TCR clone 48507 (TRBV7-9, TRBJ1-2)
CASSLKQNYGYTF

SEQ ID NO: 97015 - protein, 14 aa, Homo sapiens
  CDR3 for alpha chain variable domain of TCR clone 48508 (TRAV17, TRAJ57)
CATDPQGGSEKLVF

SEQ ID NO: 97016 - protein, 15 aa, Homo sapiens
  CDR3 for beta chain variable domain of TCR clone 48508 (TRBV7-8, TRBJ2-1)
CASSLHGGPYNEQFF

SEQ ID NO: 97017 - protein, 15 aa, Homo sapiens
  CDR3 for alpha chain variable domain of TCR clone 48509 (TRAV27, TRAJ38)
CAARRNAGNNRKLIW

SEQ ID NO: 97018 - protein, 13 aa, Homo sapiens
  CDR3 for beta chain variable domain of TCR clone 48509 (TRBV12-5, TRBJ2-3)
CASGDRQSDAQYF

SEQ ID NO: 97019 - protein, 12 aa, Homo sapiens
  CDR3 for alpha chain variable domain of TCR clone 48510 (TRAV26-1, TRAJ36)
CIVRVRADNLSF

SEQ ID NO: 97020 - protein, 13 aa, Homo sapiens
  CDR3 for beta chain variable domain of TCR clone 48510 (TRBV11-2, TRBJ2-5)
CASSRGPSETQYF

SEQ ID NO: 97021 - protein, 12 aa, Homo sapiens
  CDR3 for alpha chain variable domain of TCR clone 48511 (TRAV23/DV6, TRAJ30)
CAASKGDDKIIF

SEQ ID NO: 97022 - protein, 16 aa, Homo sapiens
  CDR3 for beta chain variable domain of TCR clone 48511 (TRBV7-3, TRBJ2-2)
CASSLKRGTLSGELFF

SEQ ID NO: 97023 - protein, 14 aa, Homo sapiens
  CDR3 for alpha chain variable domain of TCR clone 48512 (TRAV38-1, TRAJ40)
CALRPTSGTYKYIF

SEQ ID NO: 97024 - protein, 15 aa, Homo sapiens
  CDR3 for beta chain variable domain of TCR clone 48512 (TRBV27, TRBJ2-1)
CASSNGGGSSNEQFF

SEQ ID NO: 97025 - protein, 12 aa, Homo sapiens
  CDR3 for alpha chain variable domain of TCR clone 48513 (TRAV1-2, TRAJ33)
CAALDSNYPLIW

SEQ ID NO: 97026 - protein, 16 aa, Homo sapiens
  CDR3 for beta chain variable domain of TCR clone 48513 (TRBV6-4, TRBJ1-2)
CASSEAVGDPNYGYTF

SEQ ID NO: 97027 - protein, 10 aa, Homo sapiens
  CDR3 for alpha chain variable domain of TCR clone 48514 (TRAV8-4, TRAJ43)
CAVSADDMRF

SEQ ID NO: 97028 - protein, 15 aa, Homo sapiens
  CDR3 for beta chain variable domain of TCR clone 48514 (TRBV5-1, TRBJ2-3)
CASSVTSGSTDTQYV

SEQ ID NO: 97029 - protein, 13 aa, Homo sapiens
  CDR3 for alpha chain variable domain of TCR clone 48515 (TRAV38-1, TRAJ45)
CLLFRRGADGLTF

SEQ ID NO: 97030 - protein, 20 aa, Homo sapiens
  CDR3 for beta chain variable domain of TCR clone 48515 (TRBV28, TRBJ2-1)
CASTPIGRSPGLAGGNEQFF

SEQ ID NO: 97031 - protein, 16 aa, Homo sapiens
  CDR3 for alpha chain variable domain of TCR clone 48516 (TRAV4, TRAJ5)
CLVGPDHGHGQGSTYF

SEQ ID NO: 97032 - protein, 13 aa, Homo sapiens
  CDR3 for beta chain variable domain of TCR clone 48516 (TRBV4-2, TRBJ1-2)
CASSLSASGGYTF

SEQ ID NO: 97033 - protein, 18 aa, Homo sapiens
  CDR3 for alpha chain variable domain of TCR clone 48517 (TRAV21, TRAJ52)
CAVRPSPAGGTSYVKLTF

SEQ ID NO: 97034 - protein, 15 aa, Homo sapiens
  CDR3 for beta chain variable domain of TCR clone 48517 (TRBV27, TRBJ2-1)
CASSNGGGSSNEQFF

SEQ ID NO: 97035 - protein, 14 aa, Homo sapiens
  CDR3 for alpha chain variable domain of TCR clone 48518 (TRAV29/DV5, TRAJ36)
CAARRKTGANNLFF

SEQ ID NO: 97036 - protein, 14 aa, Homo sapiens
  CDR3 for beta chain variable domain of TCR clone 48518 (TRBV12-5, TRBJ2-5)
CASGSRTHQEIQYF

SEQ ID NO: 97037 - protein, 13 aa, Homo sapiens
  CDR3 for alpha chain variable domain of TCR clone 48519 (TRAV13-1, TRAJ39)
CAASIWAGNMLTF

SEQ ID NO: 97038 - protein, 13 aa, Homo sapiens
  CDR3 for beta chain variable domain of TCR clone 48519 (TRBV10-2, TRBJ2-7)
CASGASGGYEQYF

SEQ ID NO: 97039 - protein, 15 aa, Homo sapiens
  CDR3 for alpha chain variable domain of TCR clone 48520 (TRAV27, TRAJ38)
CAARRNAGNNRKLIW

SEQ ID NO: 97040 - protein, 13 aa, Homo sapiens
  CDR3 for beta chain variable domain of TCR clone 48520 (TRBV12-5, TRBJ2-3)
CASRDRQSDTQYF

SEQ ID NO: 97041 - protein, 14 aa, Homo sapiens
  CDR3 for alpha chain variable domain of TCR clone 48521 (TRAV1-2, TRAJ16)
CAVNQFSDGQKLLF

SEQ ID NO: 97042 - protein, 15 aa, Homo sapiens
  CDR3 for beta chain variable domain of TCR clone 48521 (TRBV29-1, TRBJ2-7)
CSVEFFDRGSYEQYF

SEQ ID NO: 97043 - protein, 16 aa, Homo sapiens
  CDR3 for alpha chain variable domain of TCR clone 48522 (TRAV16, TRAJ57)
CAPYLITQGGSEKLVF

SEQ ID NO: 97044 - protein, 17 aa, Homo sapiens
  CDR3 for beta chain variable domain of TCR clone 48522 (TRBV24-1, TRBJ2-4)
CATSDAEARGVRSIQYF

SEQ ID NO: 97045 - protein, 12 aa, Homo sapiens
  CDR3 for alpha chain variable domain of TCR clone 48523 (TRAV12-2, TRAJ31)
CAVNTPDARLMF

SEQ ID NO: 97046 - protein, 17 aa, Homo sapiens
  CDR3 for beta chain variable domain of TCR clone 48523 (TRBV20-1, TRBJ1-6)
CSARGGYAFSYNSPLHF

SEQ ID NO: 97047 - protein, 14 aa, Homo sapiens
  CDR3 for alpha chain variable domain of TCR clone 48524 (TRAV13-1, TRAJ52)
CAALRGTSYGKLTF

SEQ ID NO: 97048 - protein, 13 aa, Homo sapiens
  CDR3 for beta chain variable domain of TCR clone 48524 (TRBV24-1, TRBJ2-2)
CATSDWSTGELFF

SEQ ID NO: 97049 - protein, 14 aa, Homo sapiens
  CDR3 for alpha chain variable domain of TCR clone 48525 (TRAV1-2, TRAJ6)
CAVRSSGGSYIPTF

SEQ ID NO: 97050 - protein, 14 aa, Homo sapiens
  CDR3 for beta chain variable domain of TCR clone 48525 (TRBV7-9, TRBJ2-2)
CASSTVLGRGELFF

SEQ ID NO: 97051 - protein, 11 aa, Homo sapiens
  CDR3 for alpha chain variable domain of TCR clone 48526 (TRAV12-3, TRAJ43)
CAMSVSNDIRF

SEQ ID NO: 97052 - protein, 20 aa, Homo sapiens
  CDR3 for beta chain variable domain of TCR clone 48526 (TRBV28, TRBJ2-1)
CASTPIGRSPGLAGGNEQFF

SEQ ID NO: 97053 - protein, 14 aa, Homo sapiens
  CDR3 for alpha chain variable domain of TCR clone 48527 (TRAV12-1, TRAJ31)
CVVNNGDNNARLMF

SEQ ID NO: 97054 - protein, 16 aa, Homo sapiens
  CDR3 for beta chain variable domain of TCR clone 48527 (TRBV3-1, TRBJ2-3)
CASSRRAAGGRDTQYF

SEQ ID NO: 97055 - protein, 14 aa, Homo sapiens
  CDR3 for alpha chain variable domain of TCR clone 48528 (TRAV12-2, TRAJ13)
CAVKKTGGYQKVTF

SEQ ID NO: 97056 - protein, 16 aa, Homo sapiens
  CDR3 for beta chain variable domain of TCR clone 48528 (TRBV12-5, TRBJ2-5)
CAGGPRTSGNQETQYF

SEQ ID NO: 97057 - protein, 10 aa, Homo sapiens
  CDR3 for alpha chain variable domain of TCR clone 48529 (TRAV1-2, TRAJ31)
CAFFDARLMF

SEQ ID NO: 97058 - protein, 16 aa, Homo sapiens
  CDR3 for beta chain variable domain of TCR clone 48529 (TRBV27, TRBJ2-2)
CASSSSGVSNTGELFF

SEQ ID NO: 97059 - protein, 12 aa, Homo sapiens
  CDR3 for alpha chain variable domain of TCR clone 48530 (TRAV36/DV7, TRAJ54)
CAVVRGAQKLVF

SEQ ID NO: 97060 - protein, 14 aa, Homo sapiens
  CDR3 for beta chain variable domain of TCR clone 48530 (TRBV7-3, TRBJ1-1)
CASSLKGWNTEAFF

SEQ ID NO: 97061 - protein, 19 aa, Homo sapiens
  CDR3 for alpha chain variable domain of TCR clone 48531 (TRAV1-2, TRAJ26)
CLLPLCCERPDNYGQNFVF

SEQ ID NO: 97062 - protein, 13 aa, Homo sapiens
  CDR3 for beta chain variable domain of TCR clone 48531 (TRBV7-2, TRBJ2-2)
CASSLAVTGELFF

SEQ ID NO: 97063 - protein, 12 aa, Homo sapiens
  CDR3 for alpha chain variable domain of TCR clone 48532 (TRAV30, TRAJ43)
CGTEERGNDMRF

SEQ ID NO: 97064 - protein, 12 aa, Homo sapiens
  CDR3 for beta chain variable domain of TCR clone 48532 (TRBV7-9, TRBJ2-7)
CASSLEGYEQYF

SEQ ID NO: 97065 - protein, 17 aa, Homo sapiens
  CDR3 for alpha chain variable domain of TCR clone 48533 (TRAV3, TRAJ6)
CAVRDGPRAGGSYIPTF

SEQ ID NO: 97066 - protein, 15 aa, Homo sapiens
  CDR3 for beta chain variable domain of TCR clone 48533 (TRBV28, TRBJ2-5)
CASSPPWSYQETQYF

SEQ ID NO: 97067 - protein, 16 aa, Homo sapiens
  CDR3 for alpha chain variable domain of TCR clone 48534 (TRAV3, TRAJ37)
CAGRGKGSGNTGKLIF

SEQ ID NO: 97068 - protein, 15 aa, Homo sapiens
  CDR3 for beta chain variable domain of TCR clone 48534 (TRBV7-3, TRBJ2-2)
CASSETGQGTGELFF

SEQ ID NO: 97069 - protein, 12 aa, Homo sapiens
  CDR3 for alpha chain variable domain of TCR clone 48535 (TRAV8-3, TRAJ35)
CAVGSFGNVLHC

SEQ ID NO: 97070 - protein, 13 aa, Homo sapiens
  CDR3 for beta chain variable domain of TCR clone 48535 (TRBV11-2, TRBJ2-5)
CASSFSSQETQYF

SEQ ID NO: 97071 - protein, 15 aa, Homo sapiens
  CDR3 for alpha chain variable domain of TCR clone 48536 (TRAV4, TRAJ39)
CPVGPNNNAGNMLTF

SEQ ID NO: 97072 - protein, 13 aa, Homo sapiens
  CDR3 for beta chain variable domain of TCR clone 48536 (TRBV11-2, TRBJ2-5)
CASSSTGEETQYF

SEQ ID NO: 97073 - protein, 14 aa, Homo sapiens
  CDR3 for alpha chain variable domain of TCR clone 48537 (TRAV25, TRAJ23)
CAGQGDNQGGKLIF

SEQ ID NO: 97074 - protein, 12 aa, Homo sapiens
  CDR3 for beta chain variable domain of TCR clone 48537 (TRBV7-9, TRBJ1-1)
CAGSLVRGEAFF

SEQ ID NO: 97075 - protein, 16 aa, Homo sapiens
  CDR3 for alpha chain variable domain of TCR clone 48538 (TRAV27, TRAJ52)
CAGAPAGGTSYGKMTF

SEQ ID NO: 97076 - protein, 12 aa, Homo sapiens
  CDR3 for beta chain variable domain of TCR clone 48538 (TRBV27, TRBJ2-1)
CASRGFYNEQFF

SEQ ID NO: 97077 - protein, 14 aa, Homo sapiens
  CDR3 for alpha chain variable domain of TCR clone 48539 (TRAV13-2, TRAJ10)
CAETFTGGGNKLTF

SEQ ID NO: 97078 - protein, 16 aa, Homo sapiens
  CDR3 for beta chain variable domain of TCR clone 48539 (TRBV18, TRBJ2-7)
CASSPRPQGISYEQYF

SEQ ID NO: 97079 - protein, 11 aa, Homo sapiens
  CDR3 for alpha chain variable domain of TCR clone 48540 (TRAV21, TRAJ34)
CARYNTDKLIF

SEQ ID NO: 97080 - protein, 13 aa, Homo sapiens
  CDR3 for beta chain variable domain of TCR clone 48540 (TRBV7-6, TRBJ1-2)
CASSLVADYGYTF

SEQ ID NO: 97081 - protein, 18 aa, Homo sapiens
  CDR3 for alpha chain variable domain of TCR clone 48541 (TRAV21, TRAJ52)
CAVRPPPAGGTSYGKLTF

SEQ ID NO: 97082 - protein, 13 aa, Homo sapiens
  CDR3 for beta chain variable domain of TCR clone 48541 (TRBV2, TRBJ1-5)
CATAGPGNQPQHF

SEQ ID NO: 97083 - protein, 10 aa, Homo sapiens
  CDR3 for alpha chain variable domain of TCR clone 48542 (TRAV30, TRAJ48)
CGIRNEKLTF

SEQ ID NO: 97084 - protein, 14 aa, Homo sapiens
  CDR3 for beta chain variable domain of TCR clone 48542 (TRBV7-6, TRBJ2-3)
CASSVAGGTDTQYF

SEQ ID NO: 97085 - protein, 13 aa, Homo sapiens
  CDR3 for alpha chain variable domain of TCR clone 48543 (TRAV8-3, TRAJ6)
CAARRGGSYIPTF

SEQ ID NO: 97086 - protein, 15 aa, Homo sapiens
  CDR3 for beta chain variable domain of TCR clone 48543 (TRBV4-1, TRBJ2-3)
CASSDLAGGRDTQYF

SEQ ID NO: 97087 - protein, 14 aa, Homo sapiens
  CDR3 for alpha chain variable domain of TCR clone 48544 (TRAV1-2, TRAJ16)
CVVNRFSDGQKLLF

SEQ ID NO: 97088 - protein, 13 aa, Homo sapiens
  CDR3 for beta chain variable domain of TCR clone 48544 (TRBV5-5, TRBJ1-2)
CASSFWRGEDYTF

SEQ ID NO: 97089 - protein, 15 aa, Homo sapiens
  CDR3 for alpha chain variable domain of TCR clone 48545 (TRAV27, TRAJ17)
CRGTMIKAAGNKLTF

SEQ ID NO: 97090 - protein, 13 aa, Homo sapiens
  CDR3 for beta chain variable domain of TCR clone 48545 (TRBV18, TRBJ2-7)
CASQSGGGYEQYF

SEQ ID NO: 97091 - protein, 15 aa, Homo sapiens
  CDR3 for alpha chain variable domain of TCR clone 48546 (TRAV21, TRAJ13)
CAVPRSFWGLPESYL

SEQ ID NO: 97092 - protein, 15 aa, Homo sapiens
  CDR3 for beta chain variable domain of TCR clone 48546 (TRBV27, TRBJ2-5)
CASSLYPRGGETQYF

SEQ ID NO: 97093 - protein, 15 aa, Homo sapiens
  CDR3 for alpha chain variable domain of TCR clone 48547 (TRAV2, TRAJ22)
CAVPSRGGSARQLTF

SEQ ID NO: 97094 - protein, 12 aa, Homo sapiens
  CDR3 for beta chain variable domain of TCR clone 48547 (TRBV11-2, TRBJ2-2)
CASSLGGGELFF

SEQ ID NO: 97095 - protein, 11 aa, Homo sapiens
  CDR3 for alpha chain variable domain of TCR clone 48548 (TRAV26-2, TRAJ8)
CIPTGFQKLVF

SEQ ID NO: 97096 - protein, 19 aa, Homo sapiens
  CDR3 for beta chain variable domain of TCR clone 48548 (TRBV20-1, TRBJ2-1)
CSARGETSGNSPQIDEQFF

SEQ ID NO: 97097 - protein, 12 aa, Homo sapiens
  CDR3 for alpha chain variable domain of TCR clone 48549 (TRAV12-1, TRAJ40)
CVVYSGTYKYIF

SEQ ID NO: 97098 - protein, 14 aa, Homo sapiens
  CDR3 for beta chain variable domain of TCR clone 48549 (TRBV4-1, TRBJ2-2)
CASSQAVNTGELFF

SEQ ID NO: 97099 - protein, 15 aa, Homo sapiens
  CDR3 for alpha chain variable domain of TCR clone 48550 (TRAV8-4, TRAJ47)
CAVSDPEEYGKKLVF

SEQ ID NO: 97100 - protein, 15 aa, Homo sapiens
  CDR3 for beta chain variable domain of TCR clone 48550 (TRBV11-2, TRBJ2-1)
CASSLGPDSYNEQFF

SEQ ID NO: 97101 - protein, 17 aa, Homo sapiens
  CDR3 for alpha chain variable domain of TCR clone 48551 (TRAV8-6, TRAJ58)
SAVSSWVGETSGSRLTF

SEQ ID NO: 97102 - protein, 14 aa, Homo sapiens
  CDR3 for beta chain variable domain of TCR clone 48551 (TRBV4-2, TRBJ2-1)
CASGLDRAYNEQFF

SEQ ID NO: 97103 - protein, 17 aa, Homo sapiens
  CDR3 for alpha chain variable domain of TCR clone 48552 (TRAV26-2, TRAJ42)
CILRDVGYGGSQGNLIF

SEQ ID NO: 97104 - protein, 16 aa, Homo sapiens
  CDR3 for beta chain variable domain of TCR clone 48552 (TRBV12-4, TRBJ2-7)
CARSLIGGTGTYEQYF

SEQ ID NO: 97105 - protein, 12 aa, Homo sapiens
  CDR3 for alpha chain variable domain of TCR clone 48553 (TRAV12-3, TRAJ17)
CAMTLTGNKLTF

SEQ ID NO: 97106 - protein, 14 aa, Homo sapiens
  CDR3 for beta chain variable domain of TCR clone 48553 (TRBV10-2, TRBJ1-5)
CASSSTGRNQPQHF

SEQ ID NO: 97107 - protein, 13 aa, Homo sapiens
  CDR3 for alpha chain variable domain of TCR clone 48554 (TRAV2, TRAJ13)
CAVESGGYRKVTF

SEQ ID NO: 97108 - protein, 13 aa, Homo sapiens
  CDR3 for beta chain variable domain of TCR clone 48554 (TRBV28, TRBJ2-5)
CASSFAGGETQYF

SEQ ID NO: 97109 - protein, 14 aa, Homo sapiens
  CDR3 for alpha chain variable domain of TCR clone 48555 (TRAV26-1, TRAJ39)
YIVRGSRAGNMLTF

SEQ ID NO: 97110 - protein, 15 aa, Homo sapiens
  CDR3 for beta chain variable domain of TCR clone 48555 (TRBV7-9, TRBJ1-5)
CASSQGHQPNQPQHF

SEQ ID NO: 97111 - protein, 16 aa, Homo sapiens
  CDR3 for alpha chain variable domain of TCR clone 48556 (TRAV30, TRAJ24)
CGTEIVDADSWGKLQF

SEQ ID NO: 97112 - protein, 18 aa, Homo sapiens
  CDR3 for beta chain variable domain of TCR clone 48556 (TRBV11-2, TRBJ2-3)
CASSLGGASRGAPNTQYF

SEQ ID NO: 97113 - protein, 12 aa, Homo sapiens
  CDR3 for alpha chain variable domain of TCR clone 48557 (TRAV21, TRAJ33)
CAKMDSNYQLIW

SEQ ID NO: 97114 - protein, 13 aa, Homo sapiens
  CDR3 for beta chain variable domain of TCR clone 48557 (TRBV28, TRBJ1-1)
CASSFPGNTEAFF

SEQ ID NO: 97115 - protein, 13 aa, Homo sapiens
  CDR3 for alpha chain variable domain of TCR clone 48558 (TRAV12-2, TRAJ4)
CAVFSGGYNKLIF

SEQ ID NO: 97116 - protein, 13 aa, Homo sapiens
  CDR3 for beta chain variable domain of TCR clone 48558 (TRBV19, TRBJ1-5)
CASSIDRDQHQHF

SEQ ID NO: 97117 - protein, 16 aa, Homo sapiens
  CDR3 for alpha chain variable domain of TCR clone 48559 (TRAV35, TRAJ28)
CAGQRYSGVGSYQLTF

SEQ ID NO: 97118 - protein, 13 aa, Homo sapiens
  CDR3 for beta chain variable domain of TCR clone 48559 (TRBV19, TRBJ1-2)
CASSQGQVYGYTF

SEQ ID NO: 97119 - protein, 16 aa, Homo sapiens
  CDR3 for alpha chain variable domain of TCR clone 48560 (TRAV14/DV4, TRAJ12)
CAMREVLMDSSYKLIF

SEQ ID NO: 97120 - protein, 13 aa, Homo sapiens
  CDR3 for beta chain variable domain of TCR clone 48560 (TRBV19, TRBJ2-7)
CASSIDRTYEQYF

SEQ ID NO: 97121 - protein, 12 aa, Homo sapiens
  CDR3 for alpha chain variable domain of TCR clone 48561 (TRAV3, TRAJ43)
CAVRDPNNDIRF

SEQ ID NO: 97122 - protein, 12 aa, Homo sapiens
  CDR3 for beta chain variable domain of TCR clone 48561 (TRBV24-1, TRBJ1-1)
CATSDSDRGAFF

SEQ ID NO: 97123 - protein, 15 aa, Homo sapiens
  CDR3 for alpha chain variable domain of TCR clone 48562 (TRAV26-1, TRAJ29)
CIVRVEGSGNAPPVF

SEQ ID NO: 97124 - protein, 13 aa, Homo sapiens
  CDR3 for beta chain variable domain of TCR clone 48562 (TRBV28, TRBJ1-1)
CASSKQGWTEAFF

SEQ ID NO: 97125 - protein, 18 aa, Homo sapiens
  CDR3 for alpha chain variable domain of TCR clone 48563 (TRAV21, TRAJ52)
CAVRPSPAGGTSYEKLTF

SEQ ID NO: 97126 - protein, 13 aa, Homo sapiens
  CDR3 for beta chain variable domain of TCR clone 48563 (TRBV7-3, TRBJ1-1)
CASSQDWGAEAFF

SEQ ID NO: 97127 - protein, 16 aa, Homo sapiens
  CDR3 for alpha chain variable domain of TCR clone 48564 (TRAV38-1, TRAJ56)
CAFMKRQTGANSKLTF

SEQ ID NO: 97128 - protein, 13 aa, Homo sapiens
  CDR3 for beta chain variable domain of TCR clone 48564 (TRBV6-5, TRBJ2-5)
CASSPQGGETQYF

SEQ ID NO: 97129 - protein, 15 aa, Homo sapiens
  CDR3 for alpha chain variable domain of TCR clone 48565 (TRAV2, TRAJ24)
CAVVRLKNSWGKLQF

SEQ ID NO: 97130 - protein, 16 aa, Homo sapiens
  CDR3 for beta chain variable domain of TCR clone 48565 (TRBV7-7, TRBJ2-3)
CASSPGTSGSKDTQYF

SEQ ID NO: 97131 - protein, 11 aa, Homo sapiens
  CDR3 for alpha chain variable domain of TCR clone 48566 (TRAV30, TRAJ24)
WMLTAGGKFQF

SEQ ID NO: 97132 - protein, 15 aa, Homo sapiens
  CDR3 for beta chain variable domain of TCR clone 48566 (TRBV7-9, TRBJ1-4)
CASSARTGGNEKLFF

SEQ ID NO: 97133 - protein, 14 aa, Homo sapiens
  CDR3 for alpha chain variable domain of TCR clone 48567 (TRAV13-1, TRAJ9)
CAASALTGGFKTIF

SEQ ID NO: 97134 - protein, 12 aa, Homo sapiens
  CDR3 for beta chain variable domain of TCR clone 48567 (TRBV7-8, TRBJ2-7)
CASSLGDREQYF

SEQ ID NO: 97135 - protein, 14 aa, Homo sapiens
  CDR3 for alpha chain variable domain of TCR clone 48568 (TRAV20, TRAJ20)
CAVRRGYNDYKLSF

SEQ ID NO: 97136 - protein, 14 aa, Homo sapiens
  CDR3 for beta chain variable domain of TCR clone 48568 (TRBV12-5, TRBJ2-5)
CASGSRTHQETQYF

SEQ ID NO: 97137 - protein, 15 aa, Homo sapiens
  CDR3 for alpha chain variable domain of TCR clone 48569 (TRAV17, TRAJ16)
CATPLRFSDGQKLLF

SEQ ID NO: 97138 - protein, 15 aa, Homo sapiens
  CDR3 for beta chain variable domain of TCR clone 48569 (TRBV13, TRBJ1-5)
CASSFGQGGVQPQHF

SEQ ID NO: 97139 - protein, 14 aa, Homo sapiens
  CDR3 for alpha chain variable domain of TCR clone 48570 (TRAV9-2, TRAJ39)
CALYIYNAGNMLTF

SEQ ID NO: 97140 - protein, 16 aa, Homo sapiens
  CDR3 for beta chain variable domain of TCR clone 48570 (TRBV24-1, TRBJ2-3)
CATSGYRDRDTDTQYF

SEQ ID NO: 97141 - protein, 17 aa, Homo sapiens
  CDR3 for alpha chain variable domain of TCR clone 48571 (TRAV13-1, TRAJ52)
CAAGRNAGGTSYGKLTF

SEQ ID NO: 97142 - protein, 13 aa, Homo sapiens
  CDR3 for beta chain variable domain of TCR clone 48571 (TRBV7-2, TRBJ1-1)
CASSLKGAKVAFF

SEQ ID NO: 97143 - protein, 14 aa, Homo sapiens
  CDR3 for alpha chain variable domain of TCR clone 48572 (TRAV12-2, TRAJ15)
CAPHTGQAGTALIF

SEQ ID NO: 97144 - protein, 17 aa, Homo sapiens
  CDR3 for beta chain variable domain of TCR clone 48572 (TRBV5-5, TRBJ1-2)
CASSLGSLDGQSGGYTF

SEQ ID NO: 97145 - protein, 13 aa, Homo sapiens
  CDR3 for alpha chain variable domain of TCR clone 48573 (TRAV1-2, TRAJ12)
CAVSMDSSYKLIF

SEQ ID NO: 97146 - protein, 14 aa, Homo sapiens
  CDR3 for beta chain variable domain of TCR clone 48573 (TRBV19, TRBJ2-1)
CASSSVRDYNEQFF

SEQ ID NO: 97147 - protein, 13 aa, Homo sapiens
  CDR3 for alpha chain variable domain of TCR clone 48574 (TRAV2, TRAJ29)
CAAGHSGNTPLVF

SEQ ID NO: 97148 - protein, 16 aa, Homo sapiens
  CDR3 for beta chain variable domain of TCR clone 48574 (TRBV7-9, TRBJ1-2)
CASSPGGGAINYGYTF

SEQ ID NO: 97149 - protein, 17 aa, Homo sapiens
  CDR3 for alpha chain variable domain of TCR clone 48575 (TRAV12-3, TRAJ6)
CAMSARGGAGGSYIPTC

SEQ ID NO: 97150 - protein, 12 aa, Homo sapiens
  CDR3 for beta chain variable domain of TCR clone 48575 (TRBV12-4, TRBJ2-3)
CASSTLPDTQYF

SEQ ID NO: 97151 - protein, 14 aa, Homo sapiens
  CDR3 for alpha chain variable domain of TCR clone 48576 (TRAV12-3, TRAJ5)
CAMSTYTGRRALTF

SEQ ID NO: 97152 - protein, 13 aa, Homo sapiens
  CDR3 for beta chain variable domain of TCR clone 48576 (TRBV28, TRBJ2-3)
CASSTGRGDTQYF

SEQ ID NO: 97153 - protein, 15 aa, Homo sapiens
  CDR3 for alpha chain variable domain of TCR clone 48577 (TRAV25, TRAJ53)
CPTSNSGGSNYELTF

SEQ ID NO: 97154 - protein, 14 aa, Homo sapiens
  CDR3 for beta chain variable domain of TCR clone 48577 (TRBV11-2, TRBJ2-3)
CASSRLARTDTQYF

SEQ ID NO: 97155 - protein, 12 aa, Homo sapiens
  CDR3 for alpha chain variable domain of TCR clone 48578 (TRAV40, TRAJ20)
CLRGLNDYKLSF

SEQ ID NO: 97156 - protein, 14 aa, Homo sapiens
  CDR3 for beta chain variable domain of TCR clone 48578 (TRBV19, TRBJ2-1)
CASSSGRDYSEQFF

SEQ ID NO: 97157 - protein, 15 aa, Homo sapiens
  CDR3 for alpha chain variable domain of TCR clone 48579 (TRAV3, TRAJ47)
CAVRDIGEYVNKLVF

SEQ ID NO: 97158 - protein, 14 aa, Homo sapiens
  CDR3 for beta chain variable domain of TCR clone 48579 (TRBV13, TRBJ2-5)
CASSLERVGETQYF

SEQ ID NO: 97159 - protein, 13 aa, Homo sapiens
  CDR3 for alpha chain variable domain of TCR clone 48580 (TRAV3, TRAJ21)
CAVATSTNFTLDL

SEQ ID NO: 97160 - protein, 16 aa, Homo sapiens
  CDR3 for beta chain variable domain of TCR clone 48580 (TRBV19, TRBJ2-1)
CASSKAGPSPYNEQFF

SEQ ID NO: 97161 - protein, 13 aa, Homo sapiens
  CDR3 for alpha chain variable domain of TCR clone 48581 (TRAV26-2, TRAJ43)
CILRAVNNNDMRF

SEQ ID NO: 97162 - protein, 14 aa, Homo sapiens
  CDR3 for beta chain variable domain of TCR clone 48581 (TRBV6-1, TRBJ1-3)
CASVQGGGGNTIYF

SEQ ID NO: 97163 - protein, 11 aa, Homo sapiens
  CDR3 for alpha chain variable domain of TCR clone 48582 (TRAV2, TRAJ13)
CASGGYQKVTF

SEQ ID NO: 97164 - protein, 16 aa, Homo sapiens
  CDR3 for beta chain variable domain of TCR clone 48582 (TRBV6-1, TRBJ2-5)
CASSETLDRGAETEYF

SEQ ID NO: 97165 - protein, 13 aa, Homo sapiens
  CDR3 for alpha chain variable domain of TCR clone 48583 (TRAV13-1, TRAJ5)
CAAEHTGRRALTF

SEQ ID NO: 97166 - protein, 13 aa, Homo sapiens
  CDR3 for beta chain variable domain of TCR clone 48583 (TRBV12-4, TRBJ1-2)
CASSLRQGKGYTF

SEQ ID NO: 97167 - protein, 17 aa, Homo sapiens
  CDR3 for alpha chain variable domain of TCR clone 48584 (TRAV12-1, TRAJ53)
CVAGAIVGGGSNYKLTF

SEQ ID NO: 97168 - protein, 16 aa, Homo sapiens
  CDR3 for beta chain variable domain of TCR clone 48584 (TRBV29-1, TRBJ1-2)
CSVEANRDIANYGYTF

SEQ ID NO: 97169 - protein, 12 aa, Homo sapiens
  CDR3 for alpha chain variable domain of TCR clone 48585 (TRAV13-1, TRAJ53)
AASGGSNYKMTF

SEQ ID NO: 97170 - protein, 15 aa, Homo sapiens
  CDR3 for beta chain variable domain of TCR clone 48585 (TRBV5-1, TRBJ2-1)
CASSPPRAPYNEQFF

SEQ ID NO: 97171 - protein, 11 aa, Homo sapiens
  CDR3 for alpha chain variable domain of TCR clone 48586 (TRAV12-3, TRAJ43)
CAMSVSNDMRF

SEQ ID NO: 97172 - protein, 15 aa, Homo sapiens
  CDR3 for beta chain variable domain of TCR clone 48586 (TRBV7-9, TRBJ1-6)
CASSSPGRGNSPLHF

SEQ ID NO: 97173 - protein, 15 aa, Homo sapiens
  CDR3 for alpha chain variable domain of TCR clone 48587 (TRAV23/DV6, TRAJ10)
CAAGGLTGGGNKLTF

SEQ ID NO: 97174 - protein, 12 aa, Homo sapiens
  CDR3 for beta chain variable domain of TCR clone 48587 (TRBV7-8, TRBJ2-7)
CASSLGDREQYF

SEQ ID NO: 97175 - protein, 12 aa, Homo sapiens
  CDR3 for alpha chain variable domain of TCR clone 48588 (TRAV8-3, TRAJ20)
CAVGANDYKLSF

SEQ ID NO: 97176 - protein, 16 aa, Homo sapiens
  CDR3 for beta chain variable domain of TCR clone 48588 (TRBV19, TRBJ2-2)
CASRSPGTGGTGELFF

SEQ ID NO: 97177 - protein, 13 aa, Homo sapiens
  CDR3 for alpha chain variable domain of TCR clone 48589 (TRAV27, TRAJ6)
CAGGTRGSYIPTF

SEQ ID NO: 97178 - protein, 13 aa, Homo sapiens
  CDR3 for beta chain variable domain of TCR clone 48589 (TRBV4-1, TRBJ2-2)
CASSQENTGGLFF

SEQ ID NO: 97179 - protein, 13 aa, Homo sapiens
  CDR3 for alpha chain variable domain of TCR clone 48590 (TRAV1-1, TRAJ9)
CAAKNTGGFKTIF

SEQ ID NO: 97180 - protein, 16 aa, Homo sapiens
  CDR3 for beta chain variable domain of TCR clone 48590 (TRBV13, TRBJ2-2)
CASSPRTGEHTGELFF

SEQ ID NO: 97181 - protein, 15 aa, Homo sapiens
  CDR3 for alpha chain variable domain of TCR clone 48591 (TRAV26-1, TRAJ29)
CIVRVEGSGNTPLVF

SEQ ID NO: 97182 - protein, 14 aa, Homo sapiens
  CDR3 for beta chain variable domain of TCR clone 48591 (TRBV5-4, TRBJ1-1)
CASSLDSRRDEAFF

SEQ ID NO: 97183 - protein, 14 aa, Homo sapiens
  CDR3 for alpha chain variable domain of TCR clone 48592 (TRAV12-2, TRAJ32)
CAHPESGATTKLIF

SEQ ID NO: 97184 - protein, 14 aa, Homo sapiens
  CDR3 for beta chain variable domain of TCR clone 48592 (TRBV4-2, TRBJ2-3)
CASRETRAPGMQYF

SEQ ID NO: 97185 - protein, 15 aa, Homo sapiens
  CDR3 for alpha chain variable domain of TCR clone 48593 (TRAV2, TRAJ15)
CAVEDRGQAGTDLIF

SEQ ID NO: 97186 - protein, 13 aa, Homo sapiens
  CDR3 for beta chain variable domain of TCR clone 48593 (TRBV10-2, TRBJ2-7)
CASGASGGYEQYF

SEQ ID NO: 97187 - protein, 14 aa, Homo sapiens
  CDR3 for alpha chain variable domain of TCR clone 48594 (TRAV17, TRAJ40)
CATALTSGTYKYIF

SEQ ID NO: 97188 - protein, 15 aa, Homo sapiens
  CDR3 for beta chain variable domain of TCR clone 48594 (TRBV27, TRBJ1-6)
CASSFDRGLGSPLHF

SEQ ID NO: 97189 - protein, 13 aa, Homo sapiens
  CDR3 for alpha chain variable domain of TCR clone 48595 (TRAV12-1, TRAJ40)
CVVPTSGTYKYIF

SEQ ID NO: 97190 - protein, 16 aa, Homo sapiens
  CDR3 for beta chain variable domain of TCR clone 48595 (TRBV7-2, TRBJ2-7)
CASSFPLAGGPLEQYF

SEQ ID NO: 97191 - protein, 15 aa, Homo sapiens
  CDR3 for alpha chain variable domain of TCR clone 48596 (TRAV12-1, TRAJ44)
CVVDEYTGTASKLTF

SEQ ID NO: 97192 - protein, 14 aa, Homo sapiens
  CDR3 for beta chain variable domain of TCR clone 48596 (TRBV5-1, TRBJ1-2)
CASSSEPVNYGYTF

SEQ ID NO: 97193 - protein, 12 aa, Homo sapiens
  CDR3 for alpha chain variable domain of TCR clone 48597 (TRAV8-3, TRAJ26)
CAGDNYDQNFVF

SEQ ID NO: 97194 - protein, 15 aa, Homo sapiens
  CDR3 for beta chain variable domain of TCR clone 48597 (TRBV5-1, TRBJ2-3)
CASSVTSGSTDTQYF

SEQ ID NO: 97195 - protein, 13 aa, Homo sapiens
  CDR3 for alpha chain variable domain of TCR clone 48598 (TRAV21, TRAJ27)
CAARPGNAGKSTF

SEQ ID NO: 97196 - protein, 16 aa, Homo sapiens
  CDR3 for beta chain variable domain of TCR clone 48598 (TRBV19, TRBJ2-2)
CASRSPGTGATGELFF

SEQ ID NO: 97197 - protein, 19 aa, Homo sapiens
  CDR3 for alpha chain variable domain of TCR clone 48599 (TRAV38-1, TRAJ53)
CAFMKHGLESGGSSYKLTF

SEQ ID NO: 97198 - protein, 13 aa, Homo sapiens
  CDR3 for beta chain variable domain of TCR clone 48599 (TRBV19, TRBJ2-7)
CASSPRQSYEQYF

SEQ ID NO: 97199 - protein, 14 aa, Homo sapiens
  CDR3 for alpha chain variable domain of TCR clone 48600 (TRAV26-1, TRAJ45)
CIEVTGGGADGLTL

SEQ ID NO: 97200 - protein, 15 aa, Homo sapiens
  CDR3 for beta chain variable domain of TCR clone 48600 (TRBV5-1, TRBJ1-1)
CASSSTTGTNTEAFF

SEQ ID NO: 97201 - protein, 14 aa, Homo sapiens
  CDR3 for alpha chain variable domain of TCR clone 48601 (TRAV12-2, TRAJ53)
WRERGGGSNYKLTF

SEQ ID NO: 97202 - protein, 17 aa, Homo sapiens
  CDR3 for beta chain variable domain of TCR clone 48601 (TRBV7-3, TRBJ2-3)
RASSLMKRMRGADTQYF

SEQ ID NO: 97203 - protein, 17 aa, Homo sapiens
  CDR3 for alpha chain variable domain of TCR clone 48602 (TRAV3, TRAJ6)
CAVRDGPRAGGSYIPTF

SEQ ID NO: 97204 - protein, 16 aa, Homo sapiens
  CDR3 for beta chain variable domain of TCR clone 48602 (TRBV7-9, TRBJ2-2)
CASSGFGGANTGELFF

SEQ ID NO: 97205 - protein, 13 aa, Homo sapiens
  CDR3 for alpha chain variable domain of TCR clone 48603 (TRAV12-1, TRAJ21)
CVVTLYNFNKFYF

SEQ ID NO: 97206 - protein, 20 aa, Homo sapiens
  CDR3 for beta chain variable domain of TCR clone 48603 (TRBV7-8, TRBJ2-1)
CASRLAHRLAGVRSYNEQFF

SEQ ID NO: 97207 - protein, 14 aa, Homo sapiens
  CDR3 for alpha chain variable domain of TCR clone 48604 (TRAV38-1, TRAJ40)
CALRPTSGTYEYIF

SEQ ID NO: 97208 - protein, 14 aa, Homo sapiens
  CDR3 for beta chain variable domain of TCR clone 48604 (TRBV5-4, TRBJ1-1)
CASSLDSRRDEAFF

SEQ ID NO: 97209 - protein, 13 aa, Homo sapiens
  CDR3 for alpha chain variable domain of TCR clone 48605 (TRAV12-2, TRAJ20)
CAVYPSNDYKLSF

SEQ ID NO: 97210 - protein, 13 aa, Homo sapiens
  CDR3 for beta chain variable domain of TCR clone 48605 (TRBV10-3, TRBJ2-7)
CASKLAVNYEQYF

SEQ ID NO: 97211 - protein, 13 aa, Homo sapiens
  CDR3 for alpha chain variable domain of TCR clone 48606 (TRAV8-1, TRAJ33)
CAVKLGSNYQLIW

SEQ ID NO: 97212 - protein, 17 aa, Homo sapiens
  CDR3 for beta chain variable domain of TCR clone 48606 (TRBV27, TRBJ2-5)
CASSFSLLGNYQETQYF

SEQ ID NO: 97213 - protein, 14 aa, Homo sapiens
  CDR3 for alpha chain variable domain of TCR clone 48607 (TRAV26-1, TRAJ38)
CIADNAGNNSKLIW

SEQ ID NO: 97214 - protein, 12 aa, Homo sapiens
  CDR3 for beta chain variable domain of TCR clone 48607 (TRBV29-1, TRBJ2-3)
CSVTGGADTQYF

SEQ ID NO: 97215 - protein, 14 aa, Homo sapiens
  CDR3 for alpha chain variable domain of TCR clone 48608 (TRAV38-1, TRAJ29)
CAFITPSGNTPLVF

SEQ ID NO: 97216 - protein, 17 aa, Homo sapiens
  CDR3 for beta chain variable domain of TCR clone 48608 (TRBV4-1, TRBJ2-3)
CASSQGYVSGGTDTQYF

SEQ ID NO: 97217 - protein, 16 aa, Homo sapiens
  CDR3 for alpha chain variable domain of TCR clone 48609 (TRAV3, TRAJ37)
CAVRGKGSGNTGKLIF

SEQ ID NO: 97218 - protein, 16 aa, Homo sapiens
  CDR3 for beta chain variable domain of TCR clone 48609 (TRBV12-4, TRBJ1-5)
CASSRPVGGSNQTQHF

SEQ ID NO: 97219 - protein, 13 aa, Homo sapiens
  CDR3 for alpha chain variable domain of TCR clone 48610 (TRAV1-2, TRAJ9)
CAVLNTGGFKTIF

SEQ ID NO: 97220 - protein, 18 aa, Homo sapiens
  CDR3 for beta chain variable domain of TCR clone 48610 (TRBV19, TRBJ1-5)
CASSKGQVSIHSNQPQHF

SEQ ID NO: 97221 - protein, 13 aa, Homo sapiens
  CDR3 for alpha chain variable domain of TCR clone 48611 (TRAV35, TRAJ42)
CAGFPGSQGNLIF

SEQ ID NO: 97222 - protein, 14 aa, Homo sapiens
  CDR3 for beta chain variable domain of TCR clone 48611 (TRBV19, TRBJ2-1)
CASPTFVLSGEQFS

SEQ ID NO: 97223 - protein, 17 aa, Homo sapiens
  CDR3 for alpha chain variable domain of TCR clone 48612 (TRAV26-1, TRAJ53)
CIVRVDDSGSSNYKLTF

SEQ ID NO: 97224 - protein, 15 aa, Homo sapiens
  CDR3 for beta chain variable domain of TCR clone 48612 (TRBV20-1, TRBJ2-7)
CSARVPAAYFYEQYF

SEQ ID NO: 97225 - protein, 13 aa, Homo sapiens
  CDR3 for alpha chain variable domain of TCR clone 48613 (TRAV12-2, TRAJ6)
CAVNVSRKLHPYI

SEQ ID NO: 97226 - protein, 12 aa, Homo sapiens
  CDR3 for beta chain variable domain of TCR clone 48613 (TRBV29-1, TRBJ2-3)
CSVTGGADTQYF

SEQ ID NO: 97227 - protein, 13 aa, Homo sapiens
  CDR3 for alpha chain variable domain of TCR clone 48614 (TRAV9-2, TRAJ53)
CALSGGSNYKLKF

SEQ ID NO: 97228 - protein, 17 aa, Homo sapiens
  CDR3 for beta chain variable domain of TCR clone 48614 (TRBV11-2, TRBJ2-1)
CASSLYPPGVEYNEQFF

SEQ ID NO: 97229 - protein, 13 aa, Homo sapiens
  CDR3 for alpha chain variable domain of TCR clone 48615 (TRAV17, TRAJ5)
CSPMDTGRRALTF

SEQ ID NO: 97230 - protein, 13 aa, Homo sapiens
  CDR3 for beta chain variable domain of TCR clone 48615 (TRBV7-9, TRBJ1-2)
CASSLKQNYGYTF

SEQ ID NO: 97231 - protein, 13 aa, Homo sapiens
  CDR3 for alpha chain variable domain of TCR clone 48616 (TRAV12-3, TRAJ4)
CAMTERGYSKLIF

SEQ ID NO: 97232 - protein, 17 aa, Homo sapiens
  CDR3 for beta chain variable domain of TCR clone 48616 (TRBV28, TRBJ2-3)
CASSLQVGPSSTDTQYF

SEQ ID NO: 97233 - protein, 10 aa, Homo sapiens
  CDR3 for alpha chain variable domain of TCR clone 48617 (TRAV38-2/DV8, TRAJ21)
CAYRSNKFYF

SEQ ID NO: 97234 - protein, 14 aa, Homo sapiens
  CDR3 for beta chain variable domain of TCR clone 48617 (TRBV19, TRBJ2-1)
CASPTFVLSGEQFF

SEQ ID NO: 97235 - protein, 15 aa, Homo sapiens
  CDR3 for alpha chain variable domain of TCR clone 48618 (TRAV34, TRAJ38)
CGADFTPGNNRKLIW

SEQ ID NO: 97236 - protein, 13 aa, Homo sapiens
  CDR3 for beta chain variable domain of TCR clone 48618 (TRBV12-4, TRBJ2-5)
CASRLAVQETQYF

SEQ ID NO: 97237 - protein, 16 aa, Homo sapiens
  CDR3 for alpha chain variable domain of TCR clone 48619 (TRAV8-3, TRAJ42)
SAVAGDYGGSQGNLIF

SEQ ID NO: 97238 - protein, 16 aa, Homo sapiens
  CDR3 for beta chain variable domain of TCR clone 48619 (TRBV7-8, TRBJ2-1)
CASSLVGGGPYNEQFF

SEQ ID NO: 97239 - protein, 14 aa, Homo sapiens
  CDR3 for alpha chain variable domain of TCR clone 48620 (TRAV2, TRAJ9)
CAVEDQSGGFKTIF

SEQ ID NO: 97240 - protein, 14 aa, Homo sapiens
  CDR3 for beta chain variable domain of TCR clone 48620 (TRBV12-5, TRBJ2-5)
CASGSRTHQETQYF

SEQ ID NO: 97241 - protein, 11 aa, Homo sapiens
  CDR3 for alpha chain variable domain of TCR clone 48621 (TRAV16, TRAJ33)
CALRSNHQLIW

SEQ ID NO: 97242 - protein, 15 aa, Homo sapiens
  CDR3 for beta chain variable domain of TCR clone 48621 (TRBV4-1, TRBJ2-7)
CASSQQGQGFDEQYF

SEQ ID NO: 97243 - protein, 15 aa, Homo sapiens
  CDR3 for alpha chain variable domain of TCR clone 48622 (TRAV17, TRAJ23)
CAMDAEDNQGGKLIF

SEQ ID NO: 97244 - protein, 12 aa, Homo sapiens
  CDR3 for beta chain variable domain of TCR clone 48622 (TRBV2, TRBJ2-1)
CAKREGYNEQFF

SEQ ID NO: 97245 - protein, 18 aa, Homo sapiens
  CDR3 for alpha chain variable domain of TCR clone 48623 (TRAV13-1, TRAJ52)
CAASKRSAGGTSYGKLTF

SEQ ID NO: 97246 - protein, 13 aa, Homo sapiens
  CDR3 for beta chain variable domain of TCR clone 48623 (TRBV12-4, TRBJ1-2)
CASSLRQGKGYTS

SEQ ID NO: 97247 - protein, 14 aa, Homo sapiens
  CDR3 for alpha chain variable domain of TCR clone 48624 (TRAV26-1, TRAJ48)
CIVRVGFGNEKLTF

SEQ ID NO: 97248 - protein, 17 aa, Homo sapiens
  CDR3 for beta chain variable domain of TCR clone 48624 (TRBV20-1, TRBJ2-1)
CSASSSGLAGSYNEQFF

SEQ ID NO: 97249 - protein, 14 aa, Homo sapiens
  CDR3 for alpha chain variable domain of TCR clone 48625 (TRAV8-1, TRAJ4)
CAVPFSGGYNELIF

SEQ ID NO: 97250 - protein, 16 aa, Homo sapiens
  CDR3 for beta chain variable domain of TCR clone 48625 (TRBV6-1, TRBJ1-2)
CASSGAWQGRSHGYTF

SEQ ID NO: 97251 - protein, 12 aa, Homo sapiens
  CDR3 for alpha chain variable domain of TCR clone 48626 (TRAV13-1, TRAJ22)
DLSSGSARQLTF

SEQ ID NO: 97252 - protein, 13 aa, Homo sapiens
  CDR3 for beta chain variable domain of TCR clone 48626 (TRBV7-7, TRBJ1-5)
CASSPGKNKPQHF

SEQ ID NO: 97253 - protein, 14 aa, Homo sapiens
  CDR3 for alpha chain variable domain of TCR clone 48627 (TRAV14/DV4, TRAJ27)
CAMRGNTNAGKSTF

SEQ ID NO: 97254 - protein, 15 aa, Homo sapiens
  CDR3 for beta chain variable domain of TCR clone 48627 (TRBV6-6, TRBJ2-4)
CASSHMGSGKNIQYF

SEQ ID NO: 97255 - protein, 16 aa, Homo sapiens
  CDR3 for alpha chain variable domain of TCR clone 48628 (TRAV21, TRAJ37)
CAVRTAGSSNTGKLIF

SEQ ID NO: 97256 - protein, 13 aa, Homo sapiens
  CDR3 for beta chain variable domain of TCR clone 48628 (TRBV7-9, TRBJ2-5)
CDSLPSGRETQYF

SEQ ID NO: 97257 - protein, 15 aa, Homo sapiens
  CDR3 for alpha chain variable domain of TCR clone 48629 (TRAV12-1, TRAJ44)
CVADLPTGTASKFTF

SEQ ID NO: 97258 - protein, 13 aa, Homo sapiens
  CDR3 for beta chain variable domain of TCR clone 48629 (TRBV6-5, TRBJ2-5)
CASSPQGGETQYF

SEQ ID NO: 97259 - protein, 14 aa, Homo sapiens
  CDR3 for alpha chain variable domain of TCR clone 48630 (TRAV8-3, TRAJ6)
CAVSSSGGSYIPTF

SEQ ID NO: 97260 - protein, 13 aa, Homo sapiens
  CDR3 for beta chain variable domain of TCR clone 48630 (TRBV2, TRBJ1-6)
CADSGSYNSPLHF

SEQ ID NO: 97261 - protein, 16 aa, Homo sapiens
  CDR3 for alpha chain variable domain of TCR clone 48631 (TRAV3, TRAJ3)
CAVRDRAKSSASKIIF

SEQ ID NO: 97262 - protein, 13 aa, Homo sapiens
  CDR3 for beta chain variable domain of TCR clone 48631 (TRBV19, TRBJ1-2)
CASSVPGQDGYTF

SEQ ID NO: 97263 - protein, 14 aa, Homo sapiens
  CDR3 for alpha chain variable domain of TCR clone 48632 (TRAV8-3, TRAJ4)
CAVGAAGGYNKLIF

SEQ ID NO: 97264 - protein, 14 aa, Homo sapiens
  CDR3 for beta chain variable domain of TCR clone 48632 (TRBV2, TRBJ2-7)
CASSLTSGGYEQYF

SEQ ID NO: 97265 - protein, 14 aa, Homo sapiens
  CDR3 for alpha chain variable domain of TCR clone 48633 (TRAV1-2, TRAJ8)
CAVRGDTGFQKLVF

SEQ ID NO: 97266 - protein, 14 aa, Homo sapiens
  CDR3 for beta chain variable domain of TCR clone 48633 (TRBV7-3, TRBJ2-2)
CASSSGGYTGELFF

SEQ ID NO: 97267 - protein, 12 aa, Homo sapiens
  CDR3 for alpha chain variable domain of TCR clone 48634 (TRAV29/DV5, TRAJ49)
CAATDTGNKFYF

SEQ ID NO: 97268 - protein, 19 aa, Homo sapiens
  CDR3 for beta chain variable domain of TCR clone 48634 (TRBV25-1, TRBJ2-2)
CAILVYRVDRGRKTGELFF

SEQ ID NO: 97269 - protein, 13 aa, Homo sapiens
  CDR3 for alpha chain variable domain of TCR clone 48635 (TRAV21, TRAJ27)
CAARPGNAGKSTF

SEQ ID NO: 97270 - protein, 14 aa, Homo sapiens
  CDR3 for beta chain variable domain of TCR clone 48635 (TRBV7-9, TRBJ2-5)
CASSLGTAQETQYF

SEQ ID NO: 97271 - protein, 13 aa, Homo sapiens
  CDR3 for alpha chain variable domain of TCR clone 48636 (TRAV21, TRAJ57)
CAVTQGGSEKLVF

SEQ ID NO: 97272 - protein, 16 aa, Homo sapiens
  CDR3 for beta chain variable domain of TCR clone 48636 (TRBV29-1, TRBJ2-7)
CSVEDAEVGTAYEQYF

SEQ ID NO: 97273 - protein, 11 aa, Homo sapiens
  CDR3 for alpha chain variable domain of TCR clone 48637 (TRAV12-3, TRAJ43)
CAMSVSNDMRF

SEQ ID NO: 97274 - protein, 15 aa, Homo sapiens
  CDR3 for beta chain variable domain of TCR clone 48637 (TRBV5-1, TRBJ2-1)
CASSPPRAPYSEQFF

SEQ ID NO: 97275 - protein, 15 aa, Homo sapiens
  CDR3 for alpha chain variable domain of TCR clone 48638 (TRAV3, TRAJ20)
CAVRDIKLSDYKLSS

SEQ ID NO: 97276 - protein, 15 aa, Homo sapiens
  CDR3 for beta chain variable domain of TCR clone 48638 (TRBV7-9, TRBJ1-6)
CASSSPGRGNSPLHF

SEQ ID NO: 97277 - protein, 13 aa, Homo sapiens
  CDR3 for alpha chain variable domain of TCR clone 48639 (TRAV2, TRAJ15)
CAVASQAGTALIF

SEQ ID NO: 97278 - protein, 14 aa, Homo sapiens
  CDR3 for beta chain variable domain of TCR clone 48639 (TRBV4-2, TRBJ2-1)
CASGLDRAYNEQFF

SEQ ID NO: 97279 - protein, 13 aa, Homo sapiens
  CDR3 for alpha chain variable domain of TCR clone 48640 (TRAV13-1, TRAJ32)
QVTDGGATNKLIF

SEQ ID NO: 97280 - protein, 17 aa, Homo sapiens
  CDR3 for beta chain variable domain of TCR clone 48640 (TRBV15, TRBJ1-2)
CATSGREIDVVNYGYTF

SEQ ID NO: 97281 - protein, 12 aa, Homo sapiens
  CDR3 for alpha chain variable domain of TCR clone 48641 (TRAV13-1, TRAJ21)
CAAKEGFNKFYF

SEQ ID NO: 97282 - protein, 16 aa, Homo sapiens
  CDR3 for beta chain variable domain of TCR clone 48641 (TRBV7-8, TRBJ2-4)
CASSAERTLAKNTQYF

SEQ ID NO: 97283 - protein, 12 aa, Homo sapiens
  CDR3 for alpha chain variable domain of TCR clone 48642 (TRAV13-2, TRAJ8)
CAPWLGFQKLVF

SEQ ID NO: 97284 - protein, 14 aa, Homo sapiens
  CDR3 for beta chain variable domain of TCR clone 48642 (TRBV7-2, TRBJ2-7)
CASRSQGAAYEQYF

SEQ ID NO: 97285 - protein, 13 aa, Homo sapiens
  CDR3 for alpha chain variable domain of TCR clone 48643 (TRAV13-2, TRAJ53)
CAENMGSNYKLTF

SEQ ID NO: 97286 - protein, 11 aa, Homo sapiens
  CDR3 for beta chain variable domain of TCR clone 48643 (TRBV11-2, TRBJ2-2)
CASSLPGELFF

SEQ ID NO: 97287 - protein, 11 aa, Homo sapiens
  CDR3 for alpha chain variable domain of TCR clone 48644 (TRAV17, TRAJ9)
CATTGGFKTIF

SEQ ID NO: 97288 - protein, 14 aa, Homo sapiens
  CDR3 for beta chain variable domain of TCR clone 48644 (TRBV7-9, TRBJ2-2)
CANSGLADTGELFF

SEQ ID NO: 97289 - protein, 11 aa, Homo sapiens
  CDR3 for alpha chain variable domain of TCR clone 48645 (TRAV12-1, TRAJ30)
CVVNDQDKIIF

SEQ ID NO: 97290 - protein, 12 aa, Homo sapiens
  CDR3 for beta chain variable domain of TCR clone 48645 (TRBV27, TRBJ2-2)
CASKLFTGELFF

SEQ ID NO: 97291 - protein, 15 aa, Homo sapiens
  CDR3 for alpha chain variable domain of TCR clone 48646 (TRAV12-1, TRAJ42)
CVVTRDGGSQGNLIF

SEQ ID NO: 97292 - protein, 15 aa, Homo sapiens
  CDR3 for beta chain variable domain of TCR clone 48646 (TRBV7-2, TRBJ2-7)
CASSLKGALTYEQYF

SEQ ID NO: 97293 - protein, 12 aa, Homo sapiens
  CDR3 for alpha chain variable domain of TCR clone 48647 (TRAV3, TRAJ20)
CAVRDPDYKLSF

SEQ ID NO: 97294 - protein, 14 aa, Homo sapiens
  CDR3 for beta chain variable domain of TCR clone 48647 (TRBV7-9, TRBJ2-1)
CASSPRDSLYEQFF

SEQ ID NO: 97295 - protein, 23 aa, Homo sapiens
  CDR3 for alpha chain variable domain of TCR clone 48648 (TRAV2, TRAJ9)
CAVRIEVLEASKLSLEQEQDYLL

SEQ ID NO: 97296 - protein, 16 aa, Homo sapiens
  CDR3 for beta chain variable domain of TCR clone 48648 (TRBV24-1, TRBJ2-3)
CATSDPGTGATVTQYF

SEQ ID NO: 97297 - protein, 17 aa, Homo sapiens
  CDR3 for alpha chain variable domain of TCR clone 48649 (TRAV16, TRAJ58)
CITVLSNGETSGSRLTF

SEQ ID NO: 97298 - protein, 17 aa, Homo sapiens
  CDR3 for beta chain variable domain of TCR clone 48649 (TRBV18, TRBJ2-1)
CASAKGLSGGADNEQFF

SEQ ID NO: 97299 - protein, 12 aa, Homo sapiens
  CDR3 for alpha chain variable domain of TCR clone 48650 (TRAV13-1, TRAJ15)
CAASQAGTALIF

SEQ ID NO: 97300 - protein, 18 aa, Homo sapiens
  CDR3 for beta chain variable domain of TCR clone 48650 (TRBV7-9, TRBJ2-3)
CASSLPINVQISTDTQYF

SEQ ID NO: 97301 - protein, 17 aa, Homo sapiens
  CDR3 for alpha chain variable domain of TCR clone 48651 (TRAV26-1, TRAJ53)
CIVRVDDSGGSNYKLTF

SEQ ID NO: 97302 - protein, 15 aa, Homo sapiens
  CDR3 for beta chain variable domain of TCR clone 48651 (TRBV20-1, TRBJ2-7)
CSARVPAAYFYEQYV

SEQ ID NO: 97303 - protein, 13 aa, Homo sapiens
  CDR3 for alpha chain variable domain of TCR clone 48652 (TRAV21, TRAJ27)
CAARPGHAGQSTF

SEQ ID NO: 97304 - protein, 14 aa, Homo sapiens
  CDR3 for beta chain variable domain of TCR clone 48652 (TRBV7-6, TRBJ2-3)
CASSLGTVTDTQYF

SEQ ID NO: 97305 - protein, 14 aa, Homo sapiens
  CDR3 for alpha chain variable domain of TCR clone 48653 (TRAV1-2, TRAJ16)
CAVNRFSDGQKLLF

SEQ ID NO: 97306 - protein, 15 aa, Homo sapiens
  CDR3 for beta chain variable domain of TCR clone 48653 (TRBV7-9, TRBJ1-6)
CASNSPGRGNSPLHF

SEQ ID NO: 97307 - protein, 16 aa, Homo sapiens
  CDR3 for alpha chain variable domain of TCR clone 48654 (TRAV30, TRAJ24)
CGTEIVDADRWGKFQF

SEQ ID NO: 97308 - protein, 14 aa, Homo sapiens
  CDR3 for beta chain variable domain of TCR clone 48654 (TRBV12-5, TRBJ2-5)
CAGGSRTHQETQYF

SEQ ID NO: 97309 - protein, 14 aa, Homo sapiens
  CDR3 for alpha chain variable domain of TCR clone 48655 (TRAV1-2, TRAJ16)
CAVNRFSDGQKLLF

SEQ ID NO: 97310 - protein, 16 aa, Homo sapiens
  CDR3 for beta chain variable domain of TCR clone 48655 (TRBV12-5, TRBJ2-5)
CASGPRTSGNQGTQYF

SEQ ID NO: 97311 - protein, 15 aa, Homo sapiens
  CDR3 for alpha chain variable domain of TCR clone 48656 (TRAV19, TRAJ45)
CALSEAGRGADGLTF

SEQ ID NO: 97312 - protein, 13 aa, Homo sapiens
  CDR3 for beta chain variable domain of TCR clone 48656 (TRBV11-2, TRBJ2-2)
CASGRDREEELFF

SEQ ID NO: 97313 - protein, 16 aa, Homo sapiens
  CDR3 for alpha chain variable domain of TCR clone 48657 (TRAV3, TRAJ10)
CAVRDMRAGGGNKLNF

SEQ ID NO: 97314 - protein, 14 aa, Homo sapiens
  CDR3 for beta chain variable domain of TCR clone 48657 (TRBV25-1, TRBJ1-1)
CASTHLGGNTEAFF

SEQ ID NO: 97315 - protein, 14 aa, Homo sapiens
  CDR3 for alpha chain variable domain of TCR clone 48658 (TRAV23/DV6, TRAJ57)
CAASNQGGSEKLVF

SEQ ID NO: 97316 - protein, 16 aa, Homo sapiens
  CDR3 for beta chain variable domain of TCR clone 48658 (TRBV28, TRBJ1-4)
CASSPPYRGRSEKLFF

SEQ ID NO: 97317 - protein, 14 aa, Homo sapiens
  CDR3 for alpha chain variable domain of TCR clone 48659 (TRAV35, TRAJ22)
CAGLRTGSARQLTF

SEQ ID NO: 97318 - protein, 15 aa, Homo sapiens
  CDR3 for beta chain variable domain of TCR clone 48659 (TRBV12-4, TRBJ2-5)
CASSPPTGLQETQYF

SEQ ID NO: 97319 - protein, 11 aa, Homo sapiens
  CDR3 for alpha chain variable domain of TCR clone 48660 (TRAV1-1, TRAJ23)
CAVRQGEKLIF

SEQ ID NO: 97320 - protein, 14 aa, Homo sapiens
  CDR3 for beta chain variable domain of TCR clone 48660 (TRBV19, TRBJ2-1)
CASPTFVLSGEQFF

SEQ ID NO: 97321 - protein, 14 aa, Homo sapiens
  CDR3 for alpha chain variable domain of TCR clone 48661 (TRAV1-2, TRAJ8)
CTVREDTGFQKLVF

SEQ ID NO: 97322 - protein, 16 aa, Homo sapiens
  CDR3 for beta chain variable domain of TCR clone 48661 (TRBV5-1, TRBJ2-2)
CASSLWDTTNTGELFF

SEQ ID NO: 97323 - protein, 12 aa, Homo sapiens
  CDR3 for alpha chain variable domain of TCR clone 48662 (TRAV21, TRAJ11)
CAATSGYSTLTF

SEQ ID NO: 97324 - protein, 13 aa, Homo sapiens
  CDR3 for beta chain variable domain of TCR clone 48662 (TRBV7-9, TRBJ1-2)
CASSLKQNYGYTF

SEQ ID NO: 97325 - protein, 10 aa, Homo sapiens
  CDR3 for alpha chain variable domain of TCR clone 48663 (TRAV38-2/DV8, TRAJ40)
CASGTYKYIF

SEQ ID NO: 97326 - protein, 16 aa, Homo sapiens
  CDR3 for beta chain variable domain of TCR clone 48663 (TRBV2, TRBJ2-3)
CASSTSVEGVTDTQYF

SEQ ID NO: 97327 - protein, 12 aa, Homo sapiens
  CDR3 for alpha chain variable domain of TCR clone 48664 (TRAV13-1, TRAJ37)
CAATRNTGKLIF

SEQ ID NO: 97328 - protein, 13 aa, Homo sapiens
  CDR3 for beta chain variable domain of TCR clone 48664 (TRBV19, TRBJ2-5)
CASRLAGHETQYF

SEQ ID NO: 97329 - protein, 13 aa, Homo sapiens
  CDR3 for alpha chain variable domain of TCR clone 48665 (TRAV12-1, TRAJ40)
CVVPTSGTYKYIF

SEQ ID NO: 97330 - protein, 18 aa, Homo sapiens
  CDR3 for beta chain variable domain of TCR clone 48665 (TRBV7-6, TRBJ2-1)
CASSPRTSGTSSYNEQFF

SEQ ID NO: 97331 - protein, 11 aa, Homo sapiens
  CDR3 for alpha chain variable domain of TCR clone 48666 (TRAV25, TRAJ5)
CAGGGQESTYF

SEQ ID NO: 97332 - protein, 15 aa, Homo sapiens
  CDR3 for beta chain variable domain of TCR clone 48666 (TRBV20-1, TRBJ2-7)
CSARDRVSGMDEQYF

SEQ ID NO: 97333 - protein, 14 aa, Homo sapiens
  CDR3 for alpha chain variable domain of TCR clone 48667 (TRAV26-1, TRAJ38)
CIADNAGNNRKLIW

SEQ ID NO: 97334 - protein, 11 aa, Homo sapiens
  CDR3 for beta chain variable domain of TCR clone 48667 (TRBV19, TRBJ1-1)
CASSIGSEAFF

SEQ ID NO: 97335 - protein, 13 aa, Homo sapiens
  CDR3 for alpha chain variable domain of TCR clone 48668 (TRAV3, TRAJ43)
CAVKARNNNDMRF

SEQ ID NO: 97336 - protein, 15 aa, Homo sapiens
  CDR3 for beta chain variable domain of TCR clone 48668 (TRBV9, TRBJ1-6)
CASSVAGTGDSPLHF

SEQ ID NO: 97337 - protein, 14 aa, Homo sapiens
  CDR3 for alpha chain variable domain of TCR clone 48669 (TRAV12-1, TRAJ29)
CVVNEGSGNTPLVF

SEQ ID NO: 97338 - protein, 13 aa, Homo sapiens
  CDR3 for beta chain variable domain of TCR clone 48669 (TRBV7-9, TRBJ2-3)
CASSPGSTDTRYF

SEQ ID NO: 97339 - protein, 15 aa, Homo sapiens
  CDR3 for alpha chain variable domain of TCR clone 48670 (TRAV13-1, TRAJ32)
CAASIYGGATNKLIF

SEQ ID NO: 97340 - protein, 14 aa, Homo sapiens
  CDR3 for beta chain variable domain of TCR clone 48670 (TRBV18, TRBJ2-5)
CASSPGVSQETQYF

SEQ ID NO: 97341 - protein, 16 aa, Homo sapiens
  CDR3 for alpha chain variable domain of TCR clone 48671 (TRAV4, TRAJ9)
CLVGDPNRPGGFKTIF

SEQ ID NO: 97342 - protein, 16 aa, Homo sapiens
  CDR3 for beta chain variable domain of TCR clone 48671 (TRBV28, TRBJ1-4)
CARSPPYRGRSEKLFF

SEQ ID NO: 97343 - protein, 15 aa, Homo sapiens
  CDR3 for alpha chain variable domain of TCR clone 48672 (TRAV12-1, TRAJ44)
CVVDEYTGTASKLTF

SEQ ID NO: 97344 - protein, 12 aa, Homo sapiens
  CDR3 for beta chain variable domain of TCR clone 48672 (TRBV7-8, TRBJ2-7)
CASSLGDREQYF

SEQ ID NO: 97345 - protein, 16 aa, Homo sapiens
  CDR3 for alpha chain variable domain of TCR clone 48673 (TRAV4, TRAJ18)
CCVLLIGGSTLGRLYF

SEQ ID NO: 97346 - protein, 12 aa, Homo sapiens
  CDR3 for beta chain variable domain of TCR clone 48673 (TRBV6-3, TRBJ2-7)
CASSLTPYGQYF

SEQ ID NO: 97347 - protein, 13 aa, Homo sapiens
  CDR3 for alpha chain variable domain of TCR clone 48674 (TRAV27, TRAJ56)
CAGKPGANSKLTF

SEQ ID NO: 97348 - protein, 14 aa, Homo sapiens
  CDR3 for beta chain variable domain of TCR clone 48674 (TRBV19, TRBJ1-1)
CASSRDRDATEALF

SEQ ID NO: 97349 - protein, 16 aa, Homo sapiens
  CDR3 for alpha chain variable domain of TCR clone 48675 (TRAV3, TRAJ18)
CAVRDGRGATLGRLYF

SEQ ID NO: 97350 - protein, 15 aa, Homo sapiens
  CDR3 for beta chain variable domain of TCR clone 48675 (TRBV7-9, TRBJ1-6)
CASSSPGRGNSPLHF

SEQ ID NO: 97351 - protein, 14 aa, Homo sapiens
  CDR3 for alpha chain variable domain of TCR clone 48676 (TRAV1-2, TRAJ16)
CAVNRFSDGQKLLF

SEQ ID NO: 97352 - protein, 15 aa, Homo sapiens
  CDR3 for beta chain variable domain of TCR clone 48676 (TRBV20-1, TRBJ2-2)
CSAIPGHSNTGELFF

SEQ ID NO: 97353 - protein, 14 aa, Homo sapiens
  CDR3 for alpha chain variable domain of TCR clone 48677 (TRAV1-2, TRAJ16)
CSVNRFSDGQKLLF

SEQ ID NO: 97354 - protein, 11 aa, Homo sapiens
  CDR3 for beta chain variable domain of TCR clone 48677 (TRBV29-1, TRBJ2-5)
CSEDRTGTQYF

SEQ ID NO: 97355 - protein, 12 aa, Homo sapiens
  CDR3 for alpha chain variable domain of TCR clone 48678 (TRAV12-3, TRAJ17)
CAMTLTGNKLTF

SEQ ID NO: 97356 - protein, 13 aa, Homo sapiens
  CDR3 for beta chain variable domain of TCR clone 48678 (TRBV9, TRBJ2-1)
CASSPSGGSEQFF

SEQ ID NO: 97357 - protein, 15 aa, Homo sapiens
  CDR3 for alpha chain variable domain of TCR clone 48679 (TRAV26-1, TRAJ22)
CIVRVSFWFCKATDL

SEQ ID NO: 97358 - protein, 13 aa, Homo sapiens
  CDR3 for beta chain variable domain of TCR clone 48679 (TRBV7-9, TRBJ1-2)
GASSLKQNYGYTF

SEQ ID NO: 97359 - protein, 17 aa, Homo sapiens
  CDR3 for alpha chain variable domain of TCR clone 48680 (TRAV2, TRAJ22)
ILQVREADAAEQRQLTF

SEQ ID NO: 97360 - protein, 16 aa, Homo sapiens
  CDR3 for beta chain variable domain of TCR clone 48680 (TRBV2, TRBJ2-5)
CASSETQGIGEETQYF

SEQ ID NO: 97361 - protein, 18 aa, Homo sapiens
  CDR3 for alpha chain variable domain of TCR clone 48681 (TRAV21, TRAJ52)
CAVRPSPAGGTSYGKLTF

SEQ ID NO: 97362 - protein, 17 aa, Homo sapiens
  CDR3 for beta chain variable domain of TCR clone 48681 (TRBV13, TRBJ2-3)
CASSLSRVAGGRNTQFF

SEQ ID NO: 97363 - protein, 14 aa, Homo sapiens
  CDR3 for alpha chain variable domain of TCR clone 48682 (TRAV12-3, TRAJ10)
SHLPLTGGGNKLTF

SEQ ID NO: 97364 - protein, 15 aa, Homo sapiens
  CDR3 for beta chain variable domain of TCR clone 48682 (TRBV4-1, TRBJ1-4)
CASSDTGGTNEELFF

SEQ ID NO: 97365 - protein, 10 aa, Homo sapiens
  CDR3 for alpha chain variable domain of TCR clone 48683 (TRAV13-1, TRAJ52)
GGTSYGKLTF

SEQ ID NO: 97366 - protein, 12 aa, Homo sapiens
  CDR3 for beta chain variable domain of TCR clone 48683 (TRBV29-1, TRBJ1-3)
CSTRDSGNTIYF

SEQ ID NO: 97367 - protein, 15 aa, Homo sapiens
  CDR3 for alpha chain variable domain of TCR clone 48684 (TRAV12-2, TRAJ53)
CAVNGRGGSNYKLTF

SEQ ID NO: 97368 - protein, 17 aa, Homo sapiens
  CDR3 for beta chain variable domain of TCR clone 48684 (TRBV7-3, TRBJ2-3)
RASSLMKRMRGADTQYF

SEQ ID NO: 97369 - protein, 15 aa, Homo sapiens
  CDR3 for alpha chain variable domain of TCR clone 48685 (TRAV3, TRAJ20)
CAVRDIKLSDYKLSF

SEQ ID NO: 97370 - protein, 12 aa, Homo sapiens
  CDR3 for beta chain variable domain of TCR clone 48685 (TRBV11-2, TRBJ2-2)
CASSLGGGELFF

SEQ ID NO: 97371 - protein, 17 aa, Homo sapiens
  CDR3 for alpha chain variable domain of TCR clone 48686 (TRAV23/DV6, TRAJ18)
CAASSSHRGSTLGRLYF

SEQ ID NO: 97372 - protein, 15 aa, Homo sapiens
  CDR3 for beta chain variable domain of TCR clone 48686 (TRBV10-2, TRBJ2-6)
CASSEQGTGANVLTF

SEQ ID NO: 97373 - protein, 15 aa, Homo sapiens
  CDR3 for alpha chain variable domain of TCR clone 48687 (TRAV12-3, TRAJ27)
CAMRAYNNNAGKSTF

SEQ ID NO: 97374 - protein, 13 aa, Homo sapiens
  CDR3 for beta chain variable domain of TCR clone 48687 (TRBV11-2, TRBJ2-5)
CASSRGPSETQYF

SEQ ID NO: 97375 - protein, 14 aa, Homo sapiens
  CDR3 for alpha chain variable domain of TCR clone 48688 (TRAV8-4, TRAJ48)
CAVSETFGNEKLTF

SEQ ID NO: 97376 - protein, 17 aa, Homo sapiens
  CDR3 for beta chain variable domain of TCR clone 48688 (TRBV24-1, TRBJ2-1)
CATSDVSTSGTYNEQFF

SEQ ID NO: 97377 - protein, 13 aa, Homo sapiens
  CDR3 for alpha chain variable domain of TCR clone 48689 (TRAV12-1, TRAJ16)
CVVNGPDGHKLLF

SEQ ID NO: 97378 - protein, 13 aa, Homo sapiens
  CDR3 for beta chain variable domain of TCR clone 48689 (TRBV2, TRBJ1-1)
CARNPTGGFHAFF

SEQ ID NO: 97379 - protein, 15 aa, Homo sapiens
  CDR3 for alpha chain variable domain of TCR clone 48690 (TRAV27, TRAJ38)
CAAGRNAGNNRKLIW

SEQ ID NO: 97380 - protein, 13 aa, Homo sapiens
  CDR3 for beta chain variable domain of TCR clone 48690 (TRBV12-5, TRBJ2-3)
CASGDRQSDTQYF

SEQ ID NO: 97381 - protein, 13 aa, Homo sapiens
  CDR3 for alpha chain variable domain of TCR clone 48691 (TRAV17, TRAJ6)
CATGFGGSYIPTF

SEQ ID NO: 97382 - protein, 13 aa, Homo sapiens
  CDR3 for beta chain variable domain of TCR clone 48691 (TRBV10-3, TRBJ2-7)
CASKLAVNYEQYF

SEQ ID NO: 97383 - protein, 13 aa, Homo sapiens
  CDR3 for alpha chain variable domain of TCR clone 48692 (TRAV2, TRAJ40)
CAVVTSGTYKCIF

SEQ ID NO: 97384 - protein, 15 aa, Homo sapiens
  CDR3 for beta chain variable domain of TCR clone 48692 (TRBV28, TRBJ2-1)
CASSGLAEVDNEQFF

SEQ ID NO: 97385 - protein, 14 aa, Homo sapiens
  CDR3 for alpha chain variable domain of TCR clone 48693 (TRAV12-2, TRAJ45)
CALPERGGADGRTF

SEQ ID NO: 97386 - protein, 14 aa, Homo sapiens
  CDR3 for beta chain variable domain of TCR clone 48693 (TRBV18, TRBJ1-5)
CASSPGNSNQPQHF

SEQ ID NO: 97387 - protein, 14 aa, Homo sapiens
  CDR3 for alpha chain variable domain of TCR clone 48694 (TRAV26-1, TRAJ38)
CIADNAGNNRKLIW

SEQ ID NO: 97388 - protein, 13 aa, Homo sapiens
  CDR3 for beta chain variable domain of TCR clone 48694 (TRBV27, TRBJ1-1)
CASSLSIGAEAFF

SEQ ID NO: 97389 - protein, 14 aa, Homo sapiens
  CDR3 for alpha chain variable domain of TCR clone 48695 (TRAV20, TRAJ42)
CAVQAGGSQGNLIF

SEQ ID NO: 97390 - protein, 14 aa, Homo sapiens
  CDR3 for beta chain variable domain of TCR clone 48695 (TRBV28, TRBJ1-2)
CASRRQGANYGYTF

SEQ ID NO: 97391 - protein, 14 aa, Homo sapiens
  CDR3 for alpha chain variable domain of TCR clone 48696 (TRAV26-1, TRAJ26)
CIVRATFLGQNLVF

SEQ ID NO: 97392 - protein, 16 aa, Homo sapiens
  CDR3 for beta chain variable domain of TCR clone 48696 (TRBV12-4, TRBJ2-7)
CASRSAGTGPSYEQYF

SEQ ID NO: 97393 - protein, 14 aa, Homo sapiens
  CDR3 for alpha chain variable domain of TCR clone 48697 (TRAV12-3, TRAJ42)
CAMNYGGSQGNLIF

SEQ ID NO: 97394 - protein, 15 aa, Homo sapiens
  CDR3 for beta chain variable domain of TCR clone 48697 (TRBV19, TRBJ2-5)
CASKVTGGTGETQYF

SEQ ID NO: 97395 - protein, 12 aa, Homo sapiens
  CDR3 for alpha chain variable domain of TCR clone 48698 (TRAV13-2, TRAJ23)
RAERHRGGKLIF

SEQ ID NO: 97396 - protein, 19 aa, Homo sapiens
  CDR3 for beta chain variable domain of TCR clone 48698 (TRBV19, TRBJ2-5)
CASSIGQVTDFFLGETQYF

SEQ ID NO: 97397 - protein, 10 aa, Homo sapiens
  CDR3 for alpha chain variable domain of TCR clone 48699 (TRAV8-6, TRAJ43)
CAVSADDMRF

SEQ ID NO: 97398 - protein, 15 aa, Homo sapiens
  CDR3 for beta chain variable domain of TCR clone 48699 (TRBV5-1, TRBJ2-3)
CASSVTSGSTDTQYF

SEQ ID NO: 97399 - protein, 12 aa, Homo sapiens
  CDR3 for alpha chain variable domain of TCR clone 48700 (TRAV12-1, TRAJ40)
CVVYAGTYKYIF

SEQ ID NO: 97400 - protein, 18 aa, Homo sapiens
  CDR3 for beta chain variable domain of TCR clone 48700 (TRBV11-2, TRBJ2-3)
CASSLGGASRGAPNTQYF

SEQ ID NO: 97401 - protein, 13 aa, Homo sapiens
  CDR3 for alpha chain variable domain of TCR clone 48701 (TRAV12-3, TRAJ53)
CAMRGGSNYKLTF

SEQ ID NO: 97402 - protein, 15 aa, Homo sapiens
  CDR3 for beta chain variable domain of TCR clone 48701 (TRBV2, TRBJ2-1)
CATRARLVMIGEQFF

SEQ ID NO: 97403 - protein, 13 aa, Homo sapiens
  CDR3 for alpha chain variable domain of TCR clone 48702 (TRAV8-6, TRAJ49)
CAVITNTGNQFYL

SEQ ID NO: 97404 - protein, 17 aa, Homo sapiens
  CDR3 for beta chain variable domain of TCR clone 48702 (TRBV11-2, TRBJ2-1)
CASSLYPPGVEYNEQFF

SEQ ID NO: 97405 - protein, 14 aa, Homo sapiens
  CDR3 for alpha chain variable domain of TCR clone 48703 (TRAV8-1, TRAJ5)
CAVRTDTGRRALTF

SEQ ID NO: 97406 - protein, 15 aa, Homo sapiens
  CDR3 for beta chain variable domain of TCR clone 48703 (TRBV7-3, TRBJ2-1)
CASSPTEGGEVEQFF

SEQ ID NO: 97407 - protein, 13 aa, Homo sapiens
  CDR3 for alpha chain variable domain of TCR clone 48704 (TRAV27, TRAJ49)
CAPRPYTGNQFYF

SEQ ID NO: 97408 - protein, 16 aa, Homo sapiens
  CDR3 for beta chain variable domain of TCR clone 48704 (TRBV12-5, TRBJ2-5)
CASGPRTSGNQETQYF

SEQ ID NO: 97409 - protein, 11 aa, Homo sapiens
  CDR3 for alpha chain variable domain of TCR clone 48705 (TRAV29/DV5, TRAJ37)
CATSNTGKLIF

SEQ ID NO: 97410 - protein, 13 aa, Homo sapiens
  CDR3 for beta chain variable domain of TCR clone 48705 (TRBV12-4, TRBJ2-3)
YASSSPLGGTQYF

SEQ ID NO: 97411 - protein, 13 aa, Homo sapiens
  CDR3 for alpha chain variable domain of TCR clone 48706 (TRAV1-1, TRAJ9)
CAAKNTGGFKTIF

SEQ ID NO: 97412 - protein, 14 aa, Homo sapiens
  CDR3 for beta chain variable domain of TCR clone 48706 (TRBV20-1, TRBJ2-1)
CSAQIGGSTNEQFF

SEQ ID NO: 97413 - protein, 19 aa, Homo sapiens
  CDR3 for alpha chain variable domain of TCR clone 48707 (TRAV17, TRAJ54)
CFLLLCYGRGVQGAQKLAF

SEQ ID NO: 97414 - protein, 14 aa, Homo sapiens
  CDR3 for beta chain variable domain of TCR clone 48707 (TRBV4-1, TRBJ2-5)
CASSRSGSGETQYF

SEQ ID NO: 97415 - protein, 15 aa, Homo sapiens
  CDR3 for alpha chain variable domain of TCR clone 48708 (TRAV21, TRAJ32)
CAVKSYGGATNKLIF

SEQ ID NO: 97416 - protein, 18 aa, Homo sapiens
  CDR3 for beta chain variable domain of TCR clone 48708 (TRBV7-9, TRBJ2-1)
CASSTGLAEGSSYNEQFF

SEQ ID NO: 97417 - protein, 15 aa, Homo sapiens
  CDR3 for alpha chain variable domain of TCR clone 48709 (TRAV12-3, TRAJ6)
CAMSATTGGSYIPTF

SEQ ID NO: 97418 - protein, 14 aa, Homo sapiens
  CDR3 for beta chain variable domain of TCR clone 48709 (TRBV11-2, TRBJ2-7)
CASSLGAGAYEQYF

SEQ ID NO: 97419 - protein, 16 aa, Homo sapiens
  CDR3 for alpha chain variable domain of TCR clone 48710 (TRAV1-2, TRAJ10)
CAVRGVLTGGGNKLTF

SEQ ID NO: 97420 - protein, 14 aa, Homo sapiens
  CDR3 for beta chain variable domain of TCR clone 48710 (TRBV18, TRBJ2-5)
CASSPGVSQETQYF

SEQ ID NO: 97421 - protein, 17 aa, Homo sapiens
  CDR3 for alpha chain variable domain of TCR clone 48711 (TRAV35, TRAJ47)
CAGAFGLSDSYGIWKQT

SEQ ID NO: 97422 - protein, 11 aa, Homo sapiens
  CDR3 for beta chain variable domain of TCR clone 48711 (TRBV29-1, TRBJ1-1)
CSVEVGTRTFF

SEQ ID NO: 97423 - protein, 11 aa, Homo sapiens
  CDR3 for alpha chain variable domain of TCR clone 48712 (TRAV3, TRAJ21)
CAVGNFNKFYF

SEQ ID NO: 97424 - protein, 14 aa, Homo sapiens
  CDR3 for beta chain variable domain of TCR clone 48712 (TRBV7-2, TRBJ1-1)
CASSFLTGTTEAFF

SEQ ID NO: 97425 - protein, 16 aa, Homo sapiens
  CDR3 for alpha chain variable domain of TCR clone 48713 (TRAV3, TRAJ37)
CAVRGKGSGNTGKLIF

SEQ ID NO: 97426 - protein, 14 aa, Homo sapiens
  CDR3 for beta chain variable domain of TCR clone 48713 (TRBV19, TRBJ2-1)
CASPTFVLSGEQFF

SEQ ID NO: 97427 - protein, 15 aa, Homo sapiens
  CDR3 for alpha chain variable domain of TCR clone 48714 (TRAV17, TRAJ22)
CATFAPSGSARQLTF

SEQ ID NO: 97428 - protein, 16 aa, Homo sapiens
  CDR3 for beta chain variable domain of TCR clone 48714 (TRBV10-3, TRBJ2-7)
CAISADFADRPYEQYF

SEQ ID NO: 97429 - protein, 12 aa, Homo sapiens
  CDR3 for alpha chain variable domain of TCR clone 48715 (TRAV3, TRAJ20)
CAVRDPDYKLSF

SEQ ID NO: 97430 - protein, 12 aa, Homo sapiens
  CDR3 for beta chain variable domain of TCR clone 48715 (TRBV9, TRBJ2-1)
CQQRRAGGEQFF

SEQ ID NO: 97431 - protein, 14 aa, Homo sapiens
  CDR3 for alpha chain variable domain of TCR clone 48716 (TRAV23/DV6, TRAJ8)
CAASKATGFQKLVS

SEQ ID NO: 97432 - protein, 13 aa, Homo sapiens
  CDR3 for beta chain variable domain of TCR clone 48716 (TRBV11-3, TRBJ2-5)
CASSSGLQETQYF

SEQ ID NO: 97433 - protein, 15 aa, Homo sapiens
  CDR3 for alpha chain variable domain of TCR clone 48717 (TRAV3, TRAJ5)
CAVRDRKTGRRALTF

SEQ ID NO: 97434 - protein, 15 aa, Homo sapiens
  CDR3 for beta chain variable domain of TCR clone 48717 (TRBV7-8, TRBJ2-1)
CASSSADSLYNEQFF

SEQ ID NO: 97435 - protein, 16 aa, Homo sapiens
  CDR3 for alpha chain variable domain of TCR clone 48718 (TRAV3, TRAJ37)
CAVRVRGSGDTGKLIF

SEQ ID NO: 97436 - protein, 11 aa, Homo sapiens
  CDR3 for beta chain variable domain of TCR clone 48718 (TRBV11-2, TRBJ2-2)
CASSLPGELFF

SEQ ID NO: 97437 - protein, 14 aa, Homo sapiens
  CDR3 for alpha chain variable domain of TCR clone 48719 (TRAV3, TRAJ22)
CAVRDSGSARQLTF

SEQ ID NO: 97438 - protein, 15 aa, Homo sapiens
  CDR3 for beta chain variable domain of TCR clone 48719 (TRBV11-2, TRBJ2-5)
CASSLVSYSGETQYF

SEQ ID NO: 97439 - protein, 16 aa, Homo sapiens
  CDR3 for alpha chain variable domain of TCR clone 48720 (TRAV12-3, TRAJ53)
CAMSPGSGGSNCKLTF

SEQ ID NO: 97440 - protein, 15 aa, Homo sapiens
  CDR3 for beta chain variable domain of TCR clone 48720 (TRBV27, TRBJ2-1)
CASSNGGGSSNEQFF

SEQ ID NO: 97441 - protein, 11 aa, Homo sapiens
  CDR3 for alpha chain variable domain of TCR clone 48721 (TRAV2, TRAJ33)
CAVESNYQLIW

SEQ ID NO: 97442 - protein, 14 aa, Homo sapiens
  CDR3 for beta chain variable domain of TCR clone 48721 (TRBV19, TRBJ1-5)
CASRAPDSFLSQHF

SEQ ID NO: 97443 - protein, 16 aa, Homo sapiens
  CDR3 for alpha chain variable domain of TCR clone 48722 (TRAV12-1, TRAJ43)
CVVNPHRFGARTRLTV

SEQ ID NO: 97444 - protein, 14 aa, Homo sapiens
  CDR3 for beta chain variable domain of TCR clone 48722 (TRBV7-2, TRBJ2-7)
CASRSQGAAYEQYF

SEQ ID NO: 97445 - protein, 14 aa, Homo sapiens
  CDR3 for alpha chain variable domain of TCR clone 48723 (TRAV38-1, TRAJ40)
CALRPTSGTYKYIF

SEQ ID NO: 97446 - protein, 15 aa, Homo sapiens
  CDR3 for beta chain variable domain of TCR clone 48723 (TRBV9, TRBJ1-6)
CASSVAGTGDSPLHF

SEQ ID NO: 97447 - protein, 14 aa, Homo sapiens
  CDR3 for alpha chain variable domain of TCR clone 48724 (TRAV8-6, TRAJ5)
CAVSVDTGRRALTF

SEQ ID NO: 97448 - protein, 14 aa, Homo sapiens
  CDR3 for beta chain variable domain of TCR clone 48724 (TRBV6-1, TRBJ1-3)
CASVQGGGGNAIYF

SEQ ID NO: 97449 - protein, 13 aa, Homo sapiens
  CDR3 for alpha chain variable domain of TCR clone 48725 (TRAV21, TRAJ27)
CAARPGNAGKSTF

SEQ ID NO: 97450 - protein, 16 aa, Homo sapiens
  CDR3 for beta chain variable domain of TCR clone 48725 (TRBV6-1, TRBJ2-5)
CASSETLDRGAETQYF

SEQ ID NO: 97451 - protein, 17 aa, Homo sapiens
  CDR3 for alpha chain variable domain of TCR clone 48726 (TRAV3, TRAJ12)
CAVRDGGRMGSSYKLIF

SEQ ID NO: 97452 - protein, 15 aa, Homo sapiens
  CDR3 for beta chain variable domain of TCR clone 48726 (TRBV5-1, TRBJ2-3)
CASSVTSGSTDTQYF

SEQ ID NO: 97453 - protein, 16 aa, Homo sapiens
  CDR3 for alpha chain variable domain of TCR clone 48727 (TRAV26-1, TRAJ53)
CIVRVAMGGSNYTLTF

SEQ ID NO: 97454 - protein, 12 aa, Homo sapiens
  CDR3 for beta chain variable domain of TCR clone 48727 (TRBV7-9, TRBJ1-5)
CASSPQGQPQHF

SEQ ID NO: 97455 - protein, 13 aa, Homo sapiens
  CDR3 for alpha chain variable domain of TCR clone 48728 (TRAV3, TRAJ16)
CAVRDRNGQKLLF

SEQ ID NO: 97456 - protein, 15 aa, Homo sapiens
  CDR3 for beta chain variable domain of TCR clone 48728 (TRBV5-1, TRBJ2-1)
GASSPPRAPYNKQFF

SEQ ID NO: 97457 - protein, 13 aa, Homo sapiens
  CDR3 for alpha chain variable domain of TCR clone 48729 (TRAV8-6, TRAJ8)
CAVSNAGFQKLVF

SEQ ID NO: 97458 - protein, 15 aa, Homo sapiens
  CDR3 for beta chain variable domain of TCR clone 48729 (TRBV28, TRBJ2-5)
CASSSGRTIQETQYF

SEQ ID NO: 97459 - protein, 17 aa, Homo sapiens
  CDR3 for alpha chain variable domain of TCR clone 48730 (TRAV3, TRAJ6)
CAVRDGPRAGGSYIPTF

SEQ ID NO: 97460 - protein, 14 aa, Homo sapiens
  CDR3 for beta chain variable domain of TCR clone 48730 (TRBV7-8, TRBJ2-7)
CASSPKTSFYEQYF

SEQ ID NO: 97461 - protein, 13 aa, Homo sapiens
  CDR3 for alpha chain variable domain of TCR clone 48731 (TRAV8-3, TRAJ37)
CAVPSSNTGKLIF

SEQ ID NO: 97462 - protein, 13 aa, Homo sapiens
  CDR3 for beta chain variable domain of TCR clone 48731 (TRBV12-4, TRBJ1-2)
CASSLRQGKGYTF

SEQ ID NO: 97463 - protein, 15 aa, Homo sapiens
  CDR3 for alpha chain variable domain of TCR clone 48732 (TRAV34, TRAJ38)
CEADFTPGNNRKLIW

SEQ ID NO: 97464 - protein, 16 aa, Homo sapiens
  CDR3 for beta chain variable domain of TCR clone 48732 (TRBV12-5, TRBJ2-5)
CASGPRTSGNQETQYF

SEQ ID NO: 97465 - protein, 13 aa, Homo sapiens
  CDR3 for alpha chain variable domain of TCR clone 48733 (TRAV14/DV4, TRAJ20)
CAMRESNDYKLSF

SEQ ID NO: 97466 - protein, 15 aa, Homo sapiens
  CDR3 for beta chain variable domain of TCR clone 48733 (TRBV7-9, TRBJ1-1)
CASSRPGTANTEALF

SEQ ID NO: 97467 - protein, 11 aa, Homo sapiens
  CDR3 for alpha chain variable domain of TCR clone 48734 (TRAV21, TRAJ34)
CAVTNTDKLIF

SEQ ID NO: 97468 - protein, 16 aa, Homo sapiens
  CDR3 for beta chain variable domain of TCR clone 48734 (TRBV24-1, TRBJ2-3)
CATSDPGTGATDTQYF

SEQ ID NO: 97469 - protein, 17 aa, Homo sapiens
  CDR3 for alpha chain variable domain of TCR clone 48735 (TRAV26-1, TRAJ53)
CIVRVDDSGGSNYKLTF

SEQ ID NO: 97470 - protein, 14 aa, Homo sapiens
  CDR3 for beta chain variable domain of TCR clone 48735 (TRBV19, TRBJ2-1)
CASPTFVLSGEQFF

SEQ ID NO: 97471 - protein, 12 aa, Homo sapiens
  CDR3 for alpha chain variable domain of TCR clone 48736 (TRAV12-3, TRAJ17)
CAMTLTGNKLTF

SEQ ID NO: 97472 - protein, 15 aa, Homo sapiens
  CDR3 for beta chain variable domain of TCR clone 48736 (TRBV11-2, TRBJ2-2)
CASGSDRVNAGELFF

SEQ ID NO: 97473 - protein, 14 aa, Homo sapiens
  CDR3 for alpha chain variable domain of TCR clone 48737 (TRAV12-2, TRAJ13)
CAVKKTGGYQKVTF

SEQ ID NO: 97474 - protein, 23 aa, Homo sapiens
  CDR3 for beta chain variable domain of TCR clone 48737 (TRBV3-1, TRBJ2-1)
CISVPADPGTSGGLPIPYNEQFF

SEQ ID NO: 97475 - protein, 14 aa, Homo sapiens
  CDR3 for alpha chain variable domain of TCR clone 48738 (TRAV12-2, TRAJ13)
CAVKKTGGYRKVTF

SEQ ID NO: 97476 - protein, 12 aa, Homo sapiens
  CDR3 for beta chain variable domain of TCR clone 48738 (TRBV12-4, TRBJ1-2)
CASSFIWLHLRF

SEQ ID NO: 97477 - protein, 17 aa, Homo sapiens
  CDR3 for alpha chain variable domain of TCR clone 48739 (TRAV13-1, TRAJ53)
CAASWKSSGGSNYKLTF

SEQ ID NO: 97478 - protein, 11 aa, Homo sapiens
  CDR3 for beta chain variable domain of TCR clone 48739 (TRBV10-1, TRBJ2-3)
CASSDSDTQYF

SEQ ID NO: 97479 - protein, 14 aa, Homo sapiens
  CDR3 for alpha chain variable domain of TCR clone 48740 (TRAV17, TRAJ57)
CATDPQGGSEKPVF

SEQ ID NO: 97480 - protein, 14 aa, Homo sapiens
  CDR3 for beta chain variable domain of TCR clone 48740 (TRBV27, TRBJ2-5)
CASSSLKGWETQYF

SEQ ID NO: 97481 - protein, 20 aa, Homo sapiens
  CDR3 for alpha chain variable domain of TCR clone 48741 (TRAV26-1, TRAJ42)
CCVLLHRQPYYGGSQGNLIF

SEQ ID NO: 97482 - protein, 16 aa, Homo sapiens
  CDR3 for beta chain variable domain of TCR clone 48741 (TRBV7-3, TRBJ2-2)
CASSLKRGTLSGELFF

SEQ ID NO: 97483 - protein, 19 aa, Homo sapiens
  CDR3 for alpha chain variable domain of TCR clone 48742 (TRAV2, TRAJ20)
ILQVREADAAVYRDCKLSF

SEQ ID NO: 97484 - protein, 13 aa, Homo sapiens
  CDR3 for beta chain variable domain of TCR clone 48742 (TRBV7-9, TRBJ1-2)
CASSLKQNYGYTF

SEQ ID NO: 97485 - protein, 14 aa, Homo sapiens
  CDR3 for alpha chain variable domain of TCR clone 48743 (TRAV35, TRAJ22)
CAGLRPGSARQLTV

SEQ ID NO: 97486 - protein, 15 aa, Homo sapiens
  CDR3 for beta chain variable domain of TCR clone 48743 (TRBV12-4, TRBJ2-5)
CASSPPTGLQETQYF

SEQ ID NO: 97487 - protein, 14 aa, Homo sapiens
  CDR3 for alpha chain variable domain of TCR clone 48744 (TRAV16, TRAJ29)
CALTRNSGNTPLVF

SEQ ID NO: 97488 - protein, 17 aa, Homo sapiens
  CDR3 for beta chain variable domain of TCR clone 48744 (TRBV13, TRBJ2-3)
CASSLPRVAGGRNTQYF

SEQ ID NO: 97489 - protein, 15 aa, Homo sapiens
  CDR3 for alpha chain variable domain of TCR clone 48745 (TRAV3, TRAJ5)
CAVGGLDTGRRALTF

SEQ ID NO: 97490 - protein, 13 aa, Homo sapiens
  CDR3 for beta chain variable domain of TCR clone 48745 (TRBV12-4, TRBJ2-7)
CASSPTETYEQYF

SEQ ID NO: 97491 - protein, 16 aa, Homo sapiens
  CDR3 for alpha chain variable domain of TCR clone 48746 (TRAV4, TRAJ18)
CCVLLIGGSTLGGLYF

SEQ ID NO: 97492 - protein, 12 aa, Homo sapiens
  CDR3 for beta chain variable domain of TCR clone 48746 (TRBV6-3, TRBJ2-7)
CASSLTPYEQYF

SEQ ID NO: 97493 - protein, 18 aa, Homo sapiens
  CDR3 for alpha chain variable domain of TCR clone 48747 (TRAV12-3, TRAJ52)
CAMSVGGAGVTSYGKLTF

SEQ ID NO: 97494 - protein, 15 aa, Homo sapiens
  CDR3 for beta chain variable domain of TCR clone 48747 (TRBV27, TRBJ1-6)
CASSFDRGLGSPLHF

SEQ ID NO: 97495 - protein, 14 aa, Homo sapiens
  CDR3 for alpha chain variable domain of TCR clone 48748 (TRAV2, TRAJ9)
CAVGDRSGGFKTIF

SEQ ID NO: 97496 - protein, 14 aa, Homo sapiens
  CDR3 for beta chain variable domain of TCR clone 48748 (TRBV7-3, TRBJ2-1)
CASSLAGGTNEQFF

SEQ ID NO: 97497 - protein, 14 aa, Homo sapiens
  CDR3 for alpha chain variable domain of TCR clone 48749 (TRAV17, TRAJ32)
CATDPGGATNKLIF

SEQ ID NO: 97498 - protein, 14 aa, Homo sapiens
  CDR3 for beta chain variable domain of TCR clone 48749 (TRBV2, TRBJ1-5)
CASSENRGGQAQHF

SEQ ID NO: 97499 - protein, 13 aa, Homo sapiens
  CDR3 for alpha chain variable domain of TCR clone 48750 (TRAV12-2, TRAJ18)
CAVRGSTLGRLYF

SEQ ID NO: 97500 - protein, 20 aa, Homo sapiens
  CDR3 for beta chain variable domain of TCR clone 48750 (TRBV7-8, TRBJ2-2)
CASSHLFPGPTIHITGELFL

SEQ ID NO: 97501 - protein, 13 aa, Homo sapiens
  CDR3 for alpha chain variable domain of TCR clone 48751 (TRAV13-2, TRAJ48)
CAEMDFGNEKLTF

SEQ ID NO: 97502 - protein, 15 aa, Homo sapiens
  CDR3 for beta chain variable domain of TCR clone 48751 (TRBV7-9, TRBJ1-6)
CASSSPGRGNAPLHF

SEQ ID NO: 97503 - protein, 15 aa, Homo sapiens
  CDR3 for alpha chain variable domain of TCR clone 48752 (TRAV12-1, TRAJ17)
CGEHDEKAAGNKLTF

SEQ ID NO: 97504 - protein, 14 aa, Homo sapiens
  CDR3 for beta chain variable domain of TCR clone 48752 (TRBV13, TRBJ2-5)
CASSLERVGETQYF

SEQ ID NO: 97505 - protein, 15 aa, Homo sapiens
  CDR3 for alpha chain variable domain of TCR clone 48753 (TRAV26-1, TRAJ22)
CIVRVSFWFCKATDL

SEQ ID NO: 97506 - protein, 15 aa, Homo sapiens
  CDR3 for beta chain variable domain of TCR clone 48753 (TRBV11-3, TRBJ2-3)
CASLKDGREGDTQYF

SEQ ID NO: 97507 - protein, 12 aa, Homo sapiens
  CDR3 for alpha chain variable domain of TCR clone 48754 (TRAV21, TRAJ20)
CAVRGNDYKPSF

SEQ ID NO: 97508 - protein, 14 aa, Homo sapiens
  CDR3 for beta chain variable domain of TCR clone 48754 (TRBV7-8, TRBJ2-7)
CASSQTQGADEQYF

SEQ ID NO: 97509 - protein, 18 aa, Homo sapiens
  CDR3 for alpha chain variable domain of TCR clone 48755 (TRAV12-3, TRAJ52)
CAMSVGGAGGTSYGKLTF

SEQ ID NO: 97510 - protein, 13 aa, Homo sapiens
  CDR3 for beta chain variable domain of TCR clone 48755 (TRBV7-3, TRBJ1-1)
CASSQDWGAEDFF

SEQ ID NO: 97511 - protein, 11 aa, Homo sapiens
  CDR3 for alpha chain variable domain of TCR clone 48756 (TRAV13-1, TRAJ30)
CAARRDDKIIF

SEQ ID NO: 97512 - protein, 15 aa, Homo sapiens
  CDR3 for beta chain variable domain of TCR clone 48756 (TRBV18, TRBJ1-1)
CASSPSSWVNTEAFF

SEQ ID NO: 97513 - protein, 16 aa, Homo sapiens
  CDR3 for alpha chain variable domain of TCR clone 48757 (TRAV30, TRAJ24)
CGTEIVDADSWGKFQF

SEQ ID NO: 97514 - protein, 18 aa, Homo sapiens
  CDR3 for beta chain variable domain of TCR clone 48757 (TRBV5-1, TRBJ2-7)
CASSLAGFGGMSSYEQYF

SEQ ID NO: 97515 - protein, 11 aa, Homo sapiens
  CDR3 for alpha chain variable domain of TCR clone 48758 (TRAV12-1, TRAJ15)
CVVNAGTALIF

SEQ ID NO: 97516 - protein, 17 aa, Homo sapiens
  CDR3 for beta chain variable domain of TCR clone 48758 (TRBV2, TRBJ2-5)
CASSPRGGGPSTSGQAR

SEQ ID NO: 97517 - protein, 15 aa, Homo sapiens
  CDR3 for alpha chain variable domain of TCR clone 48759 (TRAV8-3, TRAJ15)
CAVGAPNQAGTALTF

SEQ ID NO: 97518 - protein, 14 aa, Homo sapiens
  CDR3 for beta chain variable domain of TCR clone 48759 (TRBV20-1, TRBJ2-1)
CSPNDEASYNEQFF

SEQ ID NO: 97519 - protein, 10 aa, Homo sapiens
  CDR3 for alpha chain variable domain of TCR clone 48760 (TRAV1-2, TRAJ31)
CAFFDARLMF

SEQ ID NO: 97520 - protein, 15 aa, Homo sapiens
  CDR3 for beta chain variable domain of TCR clone 48760 (TRBV28, TRBJ2-3)
CAPTFRDWSTDTQYF

SEQ ID NO: 97521 - protein, 13 aa, Homo sapiens
  CDR3 for alpha chain variable domain of TCR clone 48761 (TRAV25, TRAJ10)
CAGRTGRGNKLTF

SEQ ID NO: 97522 - protein, 16 aa, Homo sapiens
  CDR3 for beta chain variable domain of TCR clone 48761 (TRBV12-5, TRBJ2-5)
CASGPRTSGNQETQYF

SEQ ID NO: 97523 - protein, 16 aa, Homo sapiens
  CDR3 for alpha chain variable domain of TCR clone 48762 (TRAV30, TRAJ24)
CGTEIVDADSWGKFQF

SEQ ID NO: 97524 - protein, 17 aa, Homo sapiens
  CDR3 for beta chain variable domain of TCR clone 48762 (TRBV20-1, TRBJ2-1)
CSARDRRRASSYNEQFS

SEQ ID NO: 97525 - protein, 14 aa, Homo sapiens
  CDR3 for alpha chain variable domain of TCR clone 48763 (TRAV9-2, TRAJ39)
CALYIYNAGNMLTF

SEQ ID NO: 97526 - protein, 13 aa, Homo sapiens
  CDR3 for beta chain variable domain of TCR clone 48763 (TRBV7-2, TRBJ2-2)
CASGLAVTGELFF

SEQ ID NO: 97527 - protein, 11 aa, Homo sapiens
  CDR3 for alpha chain variable domain of TCR clone 48764 (TRAV2, TRAJ13)
CASGGYQKVTF

SEQ ID NO: 97528 - protein, 20 aa, Homo sapiens
  CDR3 for beta chain variable domain of TCR clone 48764 (TRBV28, TRBJ2-1)
CASTPIGRSPGLAGGDEQFF

SEQ ID NO: 97529 - protein, 12 aa, Homo sapiens
  CDR3 for alpha chain variable domain of TCR clone 48765 (TRAV3, TRAJ43)
CAVRDPNNDMRF

SEQ ID NO: 97530 - protein, 14 aa, Homo sapiens
  CDR3 for beta chain variable domain of TCR clone 48765 (TRBV5-4, TRBJ2-2)
CASRLDGGTGELFF

SEQ ID NO: 97531 - protein, 14 aa, Homo sapiens
  CDR3 for alpha chain variable domain of TCR clone 48766 (TRAV2, TRAJ37)
CAVDFTSNTGKLIF

SEQ ID NO: 97532 - protein, 15 aa, Homo sapiens
  CDR3 for beta chain variable domain of TCR clone 48766 (TRBV6-1, TRBJ2-3)
CASSEIAHSTDTQYF

SEQ ID NO: 97533 - protein, 13 aa, Homo sapiens
  CDR3 for alpha chain variable domain of TCR clone 48767 (TRAV12-2, TRAJ20)
CAVYPSNDYKLSF

SEQ ID NO: 97534 - protein, 15 aa, Homo sapiens
  CDR3 for beta chain variable domain of TCR clone 48767 (TRBV7-9, TRBJ2-2)
CASSPETGAGGELFF

SEQ ID NO: 97535 - protein, 15 aa, Homo sapiens
  CDR3 for alpha chain variable domain of TCR clone 48768 (TRAV12-1, TRAJ37)
CVVNLPTSNTGELIF

SEQ ID NO: 97536 - protein, 16 aa, Homo sapiens
  CDR3 for beta chain variable domain of TCR clone 48768 (TRBV2, TRBJ2-1)
CASRSPAGGKYNEQFF

SEQ ID NO: 97537 - protein, 12 aa, Homo sapiens
  CDR3 for alpha chain variable domain of TCR clone 48769 (TRAV12-3, TRAJ31)
CAMSVPNARLMF

SEQ ID NO: 97538 - protein, 12 aa, Homo sapiens
  CDR3 for beta chain variable domain of TCR clone 48769 (TRBV11-3, TRBJ2-1)
CASSVQREGQFF

SEQ ID NO: 97539 - protein, 14 aa, Homo sapiens
  CDR3 for alpha chain variable domain of TCR clone 48770 (TRAV1-2, TRAJ16)
CAVNRFSDGQKLLF

SEQ ID NO: 97540 - protein, 12 aa, Homo sapiens
  CDR3 for beta chain variable domain of TCR clone 48770 (TRBV18, TRBJ1-1)
CASSPGGTEAFF

SEQ ID NO: 97541 - protein, 12 aa, Homo sapiens
  CDR3 for alpha chain variable domain of TCR clone 48771 (TRAV8-3, TRAJ20)
CAVGANDYKLSF

SEQ ID NO: 97542 - protein, 14 aa, Homo sapiens
  CDR3 for beta chain variable domain of TCR clone 48771 (TRBV20-1, TRBJ1-1)
CSAQTRIGGTEAFF

SEQ ID NO: 97543 - protein, 13 aa, Homo sapiens
  CDR3 for alpha chain variable domain of TCR clone 48772 (TRAV12-2, TRAJ39)
CAVNNNAVNMLTF

SEQ ID NO: 97544 - protein, 13 aa, Homo sapiens
  CDR3 for beta chain variable domain of TCR clone 48772 (TRBV2, TRBJ1-5)
CATAGPGNQPQHF

SEQ ID NO: 97545 - protein, 14 aa, Homo sapiens
  CDR3 for alpha chain variable domain of TCR clone 48773 (TRAV26-1, TRAJ38)
CIADNAGNNRKLIW

SEQ ID NO: 97546 - protein, 13 aa, Homo sapiens
  CDR3 for beta chain variable domain of TCR clone 48773 (TRBV20-1, TRBJ1-1)
CSARGGGNTEAFI

SEQ ID NO: 97547 - protein, 11 aa, Homo sapiens
  CDR3 for alpha chain variable domain of TCR clone 48774 (TRAV2, TRAJ13)
CASGGYQKVTF

SEQ ID NO: 97548 - protein, 13 aa, Homo sapiens
  CDR3 for beta chain variable domain of TCR clone 48774 (TRBV7-9, TRBJ2-5)
CASLPSGRETQYF

SEQ ID NO: 97549 - protein, 11 aa, Homo sapiens
  CDR3 for alpha chain variable domain of TCR clone 48775 (TRAV35, TRAJ30)
CAGPEDDKIIF

SEQ ID NO: 97550 - protein, 14 aa, Homo sapiens
  CDR3 for beta chain variable domain of TCR clone 48775 (TRBV7-6, TRBJ1-6)
CASSQAGGGSHLHF

SEQ ID NO: 97551 - protein, 11 aa, Homo sapiens
  CDR3 for alpha chain variable domain of TCR clone 48776 (TRAV8-4, TRAJ20)
CAVTNVLTTTS

SEQ ID NO: 97552 - protein, 16 aa, Homo sapiens
  CDR3 for beta chain variable domain of TCR clone 48776 (TRBV6-1, TRBJ1-2)
CASSGAWQGRSHGYAF

SEQ ID NO: 97553 - protein, 11 aa, Homo sapiens
  CDR3 for alpha chain variable domain of TCR clone 48777 (TRAV21, TRAJ11)
CAVNGYSTLTF

SEQ ID NO: 97554 - protein, 15 aa, Homo sapiens
  CDR3 for beta chain variable domain of TCR clone 48777 (TRBV28, TRBJ1-3)
CASSMGWASGNTIYF

SEQ ID NO: 97555 - protein, 15 aa, Homo sapiens
  CDR3 for alpha chain variable domain of TCR clone 48778 (TRAV12-3, TRAJ49)
CAMAVTPNTGNQFYF

SEQ ID NO: 97556 - protein, 18 aa, Homo sapiens
  CDR3 for beta chain variable domain of TCR clone 48778 (TRBV4-1, TRBJ1-5)
CASSRDPRGQGLNQPQHF

SEQ ID NO: 97557 - protein, 17 aa, Homo sapiens
  CDR3 for alpha chain variable domain of TCR clone 48779 (TRAV4, TRAJ18)
CLVGERSVGSTLGRRYF

SEQ ID NO: 97558 - protein, 16 aa, Homo sapiens
  CDR3 for beta chain variable domain of TCR clone 48779 (TRBV19, TRBJ2-1)
CASSKAGPSSYNEQFF

SEQ ID NO: 97559 - protein, 16 aa, Homo sapiens
  CDR3 for alpha chain variable domain of TCR clone 48780 (TRAV3, TRAJ10)
CAVRDMRAGGGNELTF

SEQ ID NO: 97560 - protein, 14 aa, Homo sapiens
  CDR3 for beta chain variable domain of TCR clone 48780 (TRBV7-2, TRBJ1-1)
CASSFLTGTTEAFF

SEQ ID NO: 97561 - protein, 12 aa, Homo sapiens
  CDR3 for alpha chain variable domain of TCR clone 48781 (TRAV36/DV7, TRAJ54)
CAVVRGAQRLVF

SEQ ID NO: 97562 - protein, 18 aa, Homo sapiens
  CDR3 for beta chain variable domain of TCR clone 48781 (TRBV20-1, TRBJ2-3)
CSASGLAGGPGTTDTQYF

SEQ ID NO: 97563 - protein, 15 aa, Homo sapiens
  CDR3 for alpha chain variable domain of TCR clone 48782 (TRAV2, TRAJ28)
CAVPYSGAGSYQLTF

SEQ ID NO: 97564 - protein, 10 aa, Homo sapiens
  CDR3 for beta chain variable domain of TCR clone 48782 (TRBV23-1, TRBJ2-1)
KWSSYNEQYF

SEQ ID NO: 97565 - protein, 16 aa, Homo sapiens
  CDR3 for alpha chain variable domain of TCR clone 48783 (TRAV14/DV4, TRAJ20)
CAMREGRSRDDYKLSF

SEQ ID NO: 97566 - protein, 11 aa, Homo sapiens
  CDR3 for beta chain variable domain of TCR clone 48783 (TRBV20-1, TRBJ2-7)
CSARLSYEQYF

SEQ ID NO: 97567 - protein, 14 aa, Homo sapiens
  CDR3 for alpha chain variable domain of TCR clone 48784 (TRAV1-2, TRAJ16)
CVVNRFSDGQKLLF

SEQ ID NO: 97568 - protein, 13 aa, Homo sapiens
  CDR3 for beta chain variable domain of TCR clone 48784 (TRBV20-1, TRBJ1-1)
CSARVGGNTEAFF

SEQ ID NO: 97569 - protein, 11 aa, Homo sapiens
  CDR3 for alpha chain variable domain of TCR clone 48785 (TRAV21, TRAJ39)
LLVNAGNMLTF

SEQ ID NO: 97570 - protein, 15 aa, Homo sapiens
  CDR3 for beta chain variable domain of TCR clone 48785 (TRBV29-1, TRBJ2-1)
RSGRDRKSSYNEQFF

SEQ ID NO: 97571 - protein, 17 aa, Homo sapiens
  CDR3 for alpha chain variable domain of TCR clone 48786 (TRAV17, TRAJ7)
CATLCRLAFGKGNQVVV

SEQ ID NO: 97572 - protein, 13 aa, Homo sapiens
  CDR3 for beta chain variable domain of TCR clone 48786 (TRBV12-4, TRBJ2-7)
CASSLERVREQYF

SEQ ID NO: 97573 - protein, 12 aa, Homo sapiens
  CDR3 for alpha chain variable domain of TCR clone 48787 (TRAV8-3, TRAJ26)
CAGDNYGQNFVF

SEQ ID NO: 97574 - protein, 15 aa, Homo sapiens
  CDR3 for beta chain variable domain of TCR clone 48787 (TRBV11-2, TRBJ2-2)
CASSSDRVNAGELFF

SEQ ID NO: 97575 - protein, 15 aa, Homo sapiens
  CDR3 for alpha chain variable domain of TCR clone 48788 (TRAV25, TRAJ52)
CAGTSGGTSYGKLTF

SEQ ID NO: 97576 - protein, 13 aa, Homo sapiens
  CDR3 for beta chain variable domain of TCR clone 48788 (TRBV6-5, TRBJ2-5)
CASSPQGGETRYF

SEQ ID NO: 97577 - protein, 11 aa, Homo sapiens
  CDR3 for alpha chain variable domain of TCR clone 48789 (TRAV2, TRAJ33)
CAVESNYQLIW

SEQ ID NO: 97578 - protein, 16 aa, Homo sapiens
  CDR3 for beta chain variable domain of TCR clone 48789 (TRBV4-1, TRBJ2-1)
CASSQARQGWINEQFF

SEQ ID NO: 97579 - protein, 12 aa, Homo sapiens
  CDR3 for alpha chain variable domain of TCR clone 48790 (TRAV8-3, TRAJ26)
CAGDNYGENFVF

SEQ ID NO: 97580 - protein, 15 aa, Homo sapiens
  CDR3 for beta chain variable domain of TCR clone 48790 (TRBV9, TRBJ2-1)
CASSLAGSSYNEQFF

SEQ ID NO: 97581 - protein, 13 aa, Homo sapiens
  CDR3 for alpha chain variable domain of TCR clone 48791 (TRAV36/DV7, TRAJ49)
CAVAQTPVTSSIL

SEQ ID NO: 97582 - protein, 14 aa, Homo sapiens
  CDR3 for beta chain variable domain of TCR clone 48791 (TRBV25-1, TRBJ1-1)
CASTHLGGNTEAFF

SEQ ID NO: 97583 - protein, 13 aa, Homo sapiens
  CDR3 for alpha chain variable domain of TCR clone 48792 (TRAV8-3, TRAJ43)
CAVGPDNNNDMRF

SEQ ID NO: 97584 - protein, 13 aa, Homo sapiens
  CDR3 for beta chain variable domain of TCR clone 48792 (TRBV29-1, TRBJ2-1)
CSVEGGRVSEQFF

SEQ ID NO: 97585 - protein, 16 aa, Homo sapiens
  CDR3 for alpha chain variable domain of TCR clone 48793 (TRAV30, TRAJ24)
CGTEIVDADSWGKFQF

SEQ ID NO: 97586 - protein, 13 aa, Homo sapiens
  CDR3 for beta chain variable domain of TCR clone 48793 (TRBV23-1, TRBJ1-4)
CASRGKFNEKLFF

SEQ ID NO: 97587 - protein, 16 aa, Homo sapiens
  CDR3 for alpha chain variable domain of TCR clone 48794 (TRAV12-3, TRAJ53)
CAMSPGSGSSNYKLTF

SEQ ID NO: 97588 - protein, 16 aa, Homo sapiens
  CDR3 for beta chain variable domain of TCR clone 48794 (TRBV4-2, TRBJ1-1)
CASSQAGFGMNTEAFF

SEQ ID NO: 97589 - protein, 14 aa, Homo sapiens
  CDR3 for alpha chain variable domain of TCR clone 48795 (TRAV1-2, TRAJ16)
CAVNRFSDGQKLLF

SEQ ID NO: 97590 - protein, 14 aa, Homo sapiens
  CDR3 for beta chain variable domain of TCR clone 48795 (TRBV20-1, TRBJ2-4)
CSASGRVGVNIQYF

SEQ ID NO: 97591 - protein, 13 aa, Homo sapiens
  CDR3 for alpha chain variable domain of TCR clone 48796 (TRAV13-2, TRAJ13)
CAERPGGYQEVTF

SEQ ID NO: 97592 - protein, 16 aa, Homo sapiens
  CDR3 for beta chain variable domain of TCR clone 48796 (TRBV18, TRBJ2-5)
CASSPPSSGGAKTQYF

SEQ ID NO: 97593 - protein, 11 aa, Homo sapiens
  CDR3 for alpha chain variable domain of TCR clone 48797 (TRAV2, TRAJ13)
CASGGYQKVTF

SEQ ID NO: 97594 - protein, 16 aa, Homo sapiens
  CDR3 for beta chain variable domain of TCR clone 48797 (TRBV12-4, TRBJ2-1)
CASSAVGQGNGDEQFF

SEQ ID NO: 97595 - protein, 14 aa, Homo sapiens
  CDR3 for alpha chain variable domain of TCR clone 48798 (TRAV1-2, TRAJ10)
CAVRFTGGGNKLTF

SEQ ID NO: 97596 - protein, 12 aa, Homo sapiens
  CDR3 for beta chain variable domain of TCR clone 48798 (TRBV5-4, TRBJ1-1)
CASSFGQTEAFF

SEQ ID NO: 97597 - protein, 14 aa, Homo sapiens
  CDR3 for alpha chain variable domain of TCR clone 48799 (TRAV1-2, TRAJ16)
CAVNRFSDGQKLLF

SEQ ID NO: 97598 - protein, 11 aa, Homo sapiens
  CDR3 for beta chain variable domain of TCR clone 48799 (TRBV11-3, TRBJ2-2)
CASSLPGELFF

SEQ ID NO: 97599 - protein, 10 aa, Homo sapiens
  CDR3 for alpha chain variable domain of TCR clone 48800 (TRAV13-1, TRAJ43)
CAATLNDMRF

SEQ ID NO: 97600 - protein, 11 aa, Homo sapiens
  CDR3 for beta chain variable domain of TCR clone 48800 (TRBV12-4, TRBJ2-3)
CASTATDTQYF

SEQ ID NO: 97601 - protein, 13 aa, Homo sapiens
  CDR3 for alpha chain variable domain of TCR clone 48801 (TRAV2, TRAJ40)
CAVVTSGTYKYIF

SEQ ID NO: 97602 - protein, 13 aa, Homo sapiens
  CDR3 for beta chain variable domain of TCR clone 48801 (TRBV20-1, TRBJ1-6)
CSAKSSYNSPLHF

SEQ ID NO: 97603 - protein, 11 aa, Homo sapiens
  CDR3 for alpha chain variable domain of TCR clone 48802 (TRAV3, TRAJ21)
CAVGNFNKFYF

SEQ ID NO: 97604 - protein, 16 aa, Homo sapiens
  CDR3 for beta chain variable domain of TCR clone 48802 (TRBV19, TRBJ2-1)
CASSEAGPSSYNEQFL

SEQ ID NO: 97605 - protein, 17 aa, Homo sapiens
  CDR3 for alpha chain variable domain of TCR clone 48803 (TRAV8-6, TRAJ58)
CAVGSWVGETSGSRLIF

SEQ ID NO: 97606 - protein, 14 aa, Homo sapiens
  CDR3 for beta chain variable domain of TCR clone 48803 (TRBV4-2, TRBJ2-1)
CASGLDRAYNEQFF

SEQ ID NO: 97607 - protein, 11 aa, Homo sapiens
  CDR3 for alpha chain variable domain of TCR clone 48804 (TRAV21, TRAJ34)
CAHYNTDKLIF

SEQ ID NO: 97608 - protein, 15 aa, Homo sapiens
  CDR3 for beta chain variable domain of TCR clone 48804 (TRBV5-1, TRBJ2-3)
CASSVTSGSTDTQYF

SEQ ID NO: 97609 - protein, 14 aa, Homo sapiens
  CDR3 for alpha chain variable domain of TCR clone 48805 (TRAV12-2, TRAJ13)
CAVKKTGGYQKVTF

SEQ ID NO: 97610 - protein, 16 aa, Homo sapiens
  CDR3 for beta chain variable domain of TCR clone 48805 (TRBV7-2, TRBJ2-7)
CASSLEAGGPWYEQYF

SEQ ID NO: 97611 - protein, 14 aa, Homo sapiens
  CDR3 for alpha chain variable domain of TCR clone 48806 (TRAV13-1, TRAJ23)
CAASRLRRGGKLIF

SEQ ID NO: 97612 - protein, 15 aa, Homo sapiens
  CDR3 for beta chain variable domain of TCR clone 48806 (TRBV7-2, TRBJ2-1)
CASSLVAGRYNEQFF

SEQ ID NO: 97613 - protein, 14 aa, Homo sapiens
  CDR3 for alpha chain variable domain of TCR clone 48807 (TRAV1-1, TRAJ23)
CAVSIYNQGGKLIF

SEQ ID NO: 97614 - protein, 15 aa, Homo sapiens
  CDR3 for beta chain variable domain of TCR clone 48807 (TRBV5-8, TRBJ2-2)
CASSLDRGATGVLFF

SEQ ID NO: 97615 - protein, 15 aa, Homo sapiens
  CDR3 for alpha chain variable domain of TCR clone 48808 (TRAV3, TRAJ20)
CAVRDIKLSDYKLSF

SEQ ID NO: 97616 - protein, 13 aa, Homo sapiens
  CDR3 for beta chain variable domain of TCR clone 48808 (TRBV20-1, TRBJ1-1)
CSARVGGNTEAFL

SEQ ID NO: 97617 - protein, 14 aa, Homo sapiens
  CDR3 for alpha chain variable domain of TCR clone 48809 (TRAV1-2, TRAJ16)
CAVNRFSDGQKPLF

SEQ ID NO: 97618 - protein, 16 aa, Homo sapiens
  CDR3 for beta chain variable domain of TCR clone 48809 (TRBV11-2, TRBJ1-2)
CASSLDTGGADYGYTF

SEQ ID NO: 97619 - protein, 12 aa, Homo sapiens
  CDR3 for alpha chain variable domain of TCR clone 48810 (TRAV13-2, TRAJ23)
CAERHRGGKLIF

SEQ ID NO: 97620 - protein, 16 aa, Homo sapiens
  CDR3 for beta chain variable domain of TCR clone 48810 (TRBV7-9, TRBJ1-2)
CASSLGFSSGEGGYTF

SEQ ID NO: 97621 - protein, 11 aa, Homo sapiens
  CDR3 for alpha chain variable domain of TCR clone 48811 (TRAV21, TRAJ48)
FAVDGNEKLTF

SEQ ID NO: 97622 - protein, 16 aa, Homo sapiens
  CDR3 for beta chain variable domain of TCR clone 48811 (TRBV12-4, TRBJ1-5)
CASSSGPRGSNQPQHF

SEQ ID NO: 97623 - protein, 13 aa, Homo sapiens
  CDR3 for alpha chain variable domain of TCR clone 48812 (TRAV26-2, TRAJ43)
CLLRAVNNNDMRF

SEQ ID NO: 97624 - protein, 15 aa, Homo sapiens
  CDR3 for beta chain variable domain of TCR clone 48812 (TRBV7-2, TRBJ2-1)
CASTHGTGIYNEQFF

SEQ ID NO: 97625 - protein, 14 aa, Homo sapiens
  CDR3 for alpha chain variable domain of TCR clone 48813 (TRAV25, TRAJ27)
CAGPGNTNAGKSTF

SEQ ID NO: 97626 - protein, 16 aa, Homo sapiens
  CDR3 for beta chain variable domain of TCR clone 48813 (TRBV4-1, TRBJ2-6)
CASSQDGGPGANGLTF

SEQ ID NO: 97627 - protein, 17 aa, Homo sapiens
  CDR3 for alpha chain variable domain of TCR clone 48814 (TRAV3, TRAJ38)
CAVRDCLNAGNNRKLIW

SEQ ID NO: 97628 - protein, 16 aa, Homo sapiens
  CDR3 for beta chain variable domain of TCR clone 48814 (TRBV7-9, TRBJ1-2)
CASSLGFSSGEDGYTF

SEQ ID NO: 97629 - protein, 14 aa, Homo sapiens
  CDR3 for alpha chain variable domain of TCR clone 48815 (TRAV1-2, TRAJ6)
CAVSLSGGSYIPPF

SEQ ID NO: 97630 - protein, 15 aa, Homo sapiens
  CDR3 for beta chain variable domain of TCR clone 48815 (TRBV28, TRBJ2-7)
CASSPGGRGFYEQYF

SEQ ID NO: 97631 - protein, 14 aa, Homo sapiens
  CDR3 for alpha chain variable domain of TCR clone 48816 (TRAV12-2, TRAJ13)
CAVKKTGGYQKVTF

SEQ ID NO: 97632 - protein, 15 aa, Homo sapiens
  CDR3 for beta chain variable domain of TCR clone 48816 (TRBV2, TRBJ1-3)
CASSVELPSGNTIYF

SEQ ID NO: 97633 - protein, 11 aa, Homo sapiens
  CDR3 for alpha chain variable domain of TCR clone 48817 (TRAV4, TRAJ31)
CLVGLSARLMF

SEQ ID NO: 97634 - protein, 16 aa, Homo sapiens
  CDR3 for beta chain variable domain of TCR clone 48817 (TRBV15, TRBJ2-6)
CATSVNGGFLANVLTF

SEQ ID NO: 97635 - protein, 11 aa, Homo sapiens
  CDR3 for alpha chain variable domain of TCR clone 48818 (TRAV2, TRAJ13)
CASGGYQKVTF

SEQ ID NO: 97636 - protein, 16 aa, Homo sapiens
  CDR3 for beta chain variable domain of TCR clone 48818 (TRBV19, TRBJ2-1)
CAGSKAGPSSYNEQFF

SEQ ID NO: 97637 - protein, 16 aa, Homo sapiens
  CDR3 for alpha chain variable domain of TCR clone 48819 (TRAV30, TRAJ24)
CGTEIVDADSWGKFQF

SEQ ID NO: 97638 - protein, 11 aa, Homo sapiens
  CDR3 for beta chain variable domain of TCR clone 48819 (TRBV11-2, TRBJ1-1)
CASSINTEAFF

SEQ ID NO: 97639 - protein, 11 aa, Homo sapiens
  CDR3 for alpha chain variable domain of TCR clone 48820 (TRAV1-2, TRAJ31)
CAVNNNARLMF

SEQ ID NO: 97640 - protein, 15 aa, Homo sapiens
  CDR3 for beta chain variable domain of TCR clone 48820 (TRBV28, TRBJ2-1)
CASSIIAGGRSKQFF

SEQ ID NO: 97641 - protein, 12 aa, Homo sapiens
  CDR3 for alpha chain variable domain of TCR clone 48821 (TRAV12-1, TRAJ31)
CVVNLNNARLMF

SEQ ID NO: 97642 - protein, 13 aa, Homo sapiens
  CDR3 for beta chain variable domain of TCR clone 48821 (TRBV10-3, TRBJ2-7)
CASKLAVNYEQYF

SEQ ID NO: 97643 - protein, 12 aa, Homo sapiens
  CDR3 for alpha chain variable domain of TCR clone 48822 (TRAV1-1, TRAJ33)
CAASDSNYQLIC

SEQ ID NO: 97644 - protein, 18 aa, Homo sapiens
  CDR3 for beta chain variable domain of TCR clone 48822 (TRBV20-1, TRBJ2-2)
CSARVQTARPSGTGELFF

SEQ ID NO: 97645 - protein, 15 aa, Homo sapiens
  CDR3 for alpha chain variable domain of TCR clone 48823 (TRAV3, TRAJ5)
CAVRDLDTGRRALTF

SEQ ID NO: 97646 - protein, 13 aa, Homo sapiens
  CDR3 for beta chain variable domain of TCR clone 48823 (TRBV20-1, TRBJ2-5)
CSTRDSKQATQYF

SEQ ID NO: 97647 - protein, 17 aa, Homo sapiens
  CDR3 for alpha chain variable domain of TCR clone 48824 (TRAV3, TRAJ6)
CAVRDGPRAGGSYIPTF

SEQ ID NO: 97648 - protein, 13 aa, Homo sapiens
  CDR3 for beta chain variable domain of TCR clone 48824 (TRBV27, TRBJ2-1)
CASRTLGVGEQFF

SEQ ID NO: 97649 - protein, 14 aa, Homo sapiens
  CDR3 for alpha chain variable domain of TCR clone 48825 (TRAV17, TRAJ37)
CATDGSSNTGKLIF

SEQ ID NO: 97650 - protein, 13 aa, Homo sapiens
  CDR3 for beta chain variable domain of TCR clone 48825 (TRBV11-2, TRBJ2-1)
CANSLDLVNEQFF

SEQ ID NO: 97651 - protein, 21 aa, Homo sapiens
  CDR3 for alpha chain variable domain of TCR clone 48826 (TRAV1-1, TRAJ6)
CLLLLRCERLEKTGGSYIPTF

SEQ ID NO: 97652 - protein, 13 aa, Homo sapiens
  CDR3 for beta chain variable domain of TCR clone 48826 (TRBV7-2, TRBJ2-5)
CQQLVRGGETQYF

SEQ ID NO: 97653 - protein, 14 aa, Homo sapiens
  CDR3 for alpha chain variable domain of TCR clone 48827 (TRAV12-3, TRAJ10)
IHLPLTGGGNKLTF

SEQ ID NO: 97654 - protein, 15 aa, Homo sapiens
  CDR3 for beta chain variable domain of TCR clone 48827 (TRBV7-9, TRBJ1-6)
CASSSPGRGNSPLHF

SEQ ID NO: 97655 - protein, 13 aa, Homo sapiens
  CDR3 for alpha chain variable domain of TCR clone 48828 (TRAV29/DV5, TRAJ31)
CAASRNNNARLMF

SEQ ID NO: 97656 - protein, 16 aa, Homo sapiens
  CDR3 for beta chain variable domain of TCR clone 48828 (TRBV20-1, TRBJ2-7)
CSARAPGLALSYEQYF

SEQ ID NO: 97657 - protein, 15 aa, Homo sapiens
  CDR3 for alpha chain variable domain of TCR clone 48829 (TRAV3, TRAJ5)
CSVRDLDTGRRALTF

SEQ ID NO: 97658 - protein, 14 aa, Homo sapiens
  CDR3 for beta chain variable domain of TCR clone 48829 (TRBV25-1, TRBJ1-1)
CASTHLGGNTEAFF

SEQ ID NO: 97659 - protein, 12 aa, Homo sapiens
  CDR3 for alpha chain variable domain of TCR clone 48830 (TRAV13-1, TRAJ21)
CAAREGFNKFYF

SEQ ID NO: 97660 - protein, 15 aa, Homo sapiens
  CDR3 for beta chain variable domain of TCR clone 48830 (TRBV15, TRBJ1-5)
CATSRDPVSNQPQHF

SEQ ID NO: 97661 - protein, 14 aa, Homo sapiens
  CDR3 for alpha chain variable domain of TCR clone 48831 (TRAV1-2, TRAJ16)
CAVNRFSDGQKLLF

SEQ ID NO: 97662 - protein, 19 aa, Homo sapiens
  CDR3 for beta chain variable domain of TCR clone 48831 (TRBV18, TRBJ2-7)
CASSPRGGGLRAVLRAGHQ

SEQ ID NO: 97663 - protein, 13 aa, Homo sapiens
  CDR3 for alpha chain variable domain of TCR clone 48832 (TRAV21, TRAJ57)
CAVTQGGSEKLVL

SEQ ID NO: 97664 - protein, 15 aa, Homo sapiens
  CDR3 for beta chain variable domain of TCR clone 48832 (TRBV5-1, TRBJ1-1)
CASSSTTGTNTEAFF

SEQ ID NO: 97665 - protein, 11 aa, Homo sapiens
  CDR3 for alpha chain variable domain of TCR clone 48833 (TRAV16, TRAJ21)
CAVGNFNKFYF

SEQ ID NO: 97666 - protein, 16 aa, Homo sapiens
  CDR3 for beta chain variable domain of TCR clone 48833 (TRBV19, TRBJ2-1)
CASSKAGPSSYNEQFF

SEQ ID NO: 97667 - protein, 13 aa, Homo sapiens
  CDR3 for alpha chain variable domain of TCR clone 48834 (TRAV30, TRAJ34)
CGTVGDNTDKLIF

SEQ ID NO: 97668 - protein, 16 aa, Homo sapiens
  CDR3 for beta chain variable domain of TCR clone 48834 (TRBV7-9, TRBJ1-2)
CASSLGFSSGEDGYTF

SEQ ID NO: 97669 - protein, 14 aa, Homo sapiens
  CDR3 for alpha chain variable domain of TCR clone 48835 (TRAV2, TRAJ9)
CAVEDRSGGFKNIF

SEQ ID NO: 97670 - protein, 16 aa, Homo sapiens
  CDR3 for beta chain variable domain of TCR clone 48835 (TRBV7-3, TRBJ2-1)
CASSLEGYRSYNEQFF

SEQ ID NO: 97671 - protein, 13 aa, Homo sapiens
  CDR3 for alpha chain variable domain of TCR clone 48836 (TRAV12-2, TRAJ6)
CAVNVSRKLHTYI

SEQ ID NO: 97672 - protein, 12 aa, Homo sapiens
  CDR3 for beta chain variable domain of TCR clone 48836 (TRBV29-1, TRBJ2-3)
CSVTRGADTQYF

SEQ ID NO: 97673 - protein, 15 aa, Homo sapiens
  CDR3 for alpha chain variable domain of TCR clone 48837 (TRAV3, TRAJ36)
CAVRASQTGANNLFF

SEQ ID NO: 97674 - protein, 15 aa, Homo sapiens
  CDR3 for beta chain variable domain of TCR clone 48837 (TRBV19, TRBJ2-2)
CQPISRDRGHRGAVF

SEQ ID NO: 97675 - protein, 11 aa, Homo sapiens
  CDR3 for alpha chain variable domain of TCR clone 48838 (TRAV12-1, TRAJ21)
CVVNNFNKFYF

SEQ ID NO: 97676 - protein, 13 aa, Homo sapiens
  CDR3 for beta chain variable domain of TCR clone 48838 (TRBV18, TRBJ2-7)
CQLTERGAYEQYF

SEQ ID NO: 97677 - protein, 14 aa, Homo sapiens
  CDR3 for alpha chain variable domain of TCR clone 48839 (TRAV13-1, TRAJ40)
CAASMTSGTYKYIF

SEQ ID NO: 97678 - protein, 15 aa, Homo sapiens
  CDR3 for beta chain variable domain of TCR clone 48839 (TRBV7-3, TRBJ2-1)
CASSPTGGGEVEHFF

SEQ ID NO: 97679 - protein, 16 aa, Homo sapiens
  CDR3 for alpha chain variable domain of TCR clone 48840 (TRAV17, TRAJ28)
CATASVSGAGSYQLTF

SEQ ID NO: 97680 - protein, 11 aa, Homo sapiens
  CDR3 for beta chain variable domain of TCR clone 48840 (TRBV7-9, TRBJ2-5)
CAGSLGETQYF

SEQ ID NO: 97681 - protein, 11 aa, Homo sapiens
  CDR3 for alpha chain variable domain of TCR clone 48841 (TRAV2, TRAJ13)
CASGGYQKVTF

SEQ ID NO: 97682 - protein, 12 aa, Homo sapiens
  CDR3 for beta chain variable domain of TCR clone 48841 (TRBV28, TRBJ1-3)
CASVSSGNTIYF

SEQ ID NO: 97683 - protein, 15 aa, Homo sapiens
  CDR3 for alpha chain variable domain of TCR clone 48842 (TRAV3, TRAJ20)
CAVRDIKLSDYKLSF

SEQ ID NO: 97684 - protein, 15 aa, Homo sapiens
  CDR3 for beta chain variable domain of TCR clone 48842 (TRBV7-9, TRBJ1-6)
CASSSPGRGNSPLHV

SEQ ID NO: 97685 - protein, 14 aa, Homo sapiens
  CDR3 for alpha chain variable domain of TCR clone 48843 (TRAV35, TRAJ33)
CAGSSQDSNYQLIW

SEQ ID NO: 97686 - protein, 15 aa, Homo sapiens
  CDR3 for beta chain variable domain of TCR clone 48843 (TRBV20-1, TRBJ2-7)
CSAESGTSGAYDQYF

SEQ ID NO: 97687 - protein, 16 aa, Homo sapiens
  CDR3 for alpha chain variable domain of TCR clone 48844 (TRAV3, TRAJ37)
CAVRGKGSGNTGRLIF

SEQ ID NO: 97688 - protein, 15 aa, Homo sapiens
  CDR3 for beta chain variable domain of TCR clone 48844 (TRBV7-9, TRBJ2-2)
CASGPLDTFPGELFF

SEQ ID NO: 97689 - protein, 14 aa, Homo sapiens
  CDR3 for alpha chain variable domain of TCR clone 48845 (TRAV12-3, TRAJ10)
SHLPLTGGGNKLTF

SEQ ID NO: 97690 - protein, 15 aa, Homo sapiens
  CDR3 for beta chain variable domain of TCR clone 48845 (TRBV20-1, TRBJ2-5)
CSAEGTGGLQETQYF

SEQ ID NO: 97691 - protein, 15 aa, Homo sapiens
  CDR3 for alpha chain variable domain of TCR clone 48846 (TRAV26-2, TRAJ13)
CILRDLSGGYQKITF

SEQ ID NO: 97692 - protein, 14 aa, Homo sapiens
  CDR3 for beta chain variable domain of TCR clone 48846 (TRBV4-1, TRBJ2-3)
CASSQEGSTDTQYF

SEQ ID NO: 97693 - protein, 19 aa, Homo sapiens
  CDR3 for alpha chain variable domain of TCR clone 48847 (TRAV27, TRAJ53)
ASTSVQSRTSGGSNYKLTF

SEQ ID NO: 97694 - protein, 14 aa, Homo sapiens
  CDR3 for beta chain variable domain of TCR clone 48847 (TRBV11-1, TRBJ2-7)
CASTFAVPSYEQYF

SEQ ID NO: 97695 - protein, 14 aa, Homo sapiens
  CDR3 for alpha chain variable domain of TCR clone 48848 (TRAV12-2, TRAJ17)
CAVLFKAAGNKLTF

SEQ ID NO: 97696 - protein, 17 aa, Homo sapiens
  CDR3 for beta chain variable domain of TCR clone 48848 (TRBV11-2, TRBJ2-1)
CASSLCPPGVEYNEQFF

SEQ ID NO: 97697 - protein, 12 aa, Homo sapiens
  CDR3 for alpha chain variable domain of TCR clone 48849 (TRAV13-1, TRAJ21)
CAAKEGLNKFYF

SEQ ID NO: 97698 - protein, 17 aa, Homo sapiens
  CDR3 for beta chain variable domain of TCR clone 48849 (TRBV20-1, TRBJ2-1)
CSASSSGLAGSYNEQFF

SEQ ID NO: 97699 - protein, 12 aa, Homo sapiens
  CDR3 for alpha chain variable domain of TCR clone 48850 (TRAV12-3, TRAJ17)
CAMTLTGNELTF

SEQ ID NO: 97700 - protein, 17 aa, Homo sapiens
  CDR3 for beta chain variable domain of TCR clone 48850 (TRBV7-3, TRBJ2-3)
CASSLMKRMRGADTQYF

SEQ ID NO: 97701 - protein, 18 aa, Homo sapiens
  CDR3 for alpha chain variable domain of TCR clone 48851 (TRAV26-1, TRAJ23)
CIVRVGLEVWSQGGKLIF

SEQ ID NO: 97702 - protein, 16 aa, Homo sapiens
  CDR3 for beta chain variable domain of TCR clone 48851 (TRBV12-4, TRBJ2-5)
CASSFFVRGRQETQYF

SEQ ID NO: 97703 - protein, 15 aa, Homo sapiens
  CDR3 for alpha chain variable domain of TCR clone 48852 (TRAV21, TRAJ40)
CAVRPQTSGTYKYIF

SEQ ID NO: 97704 - protein, 13 aa, Homo sapiens
  CDR3 for beta chain variable domain of TCR clone 48852 (TRBV19, TRBJ1-2)
CASSVPGQDGYTF

SEQ ID NO: 97705 - protein, 16 aa, Homo sapiens
  CDR3 for alpha chain variable domain of TCR clone 48853 (TRAV16, TRAJ52)
CALSAAGGTSYGKLTF

SEQ ID NO: 97706 - protein, 13 aa, Homo sapiens
  CDR3 for beta chain variable domain of TCR clone 48853 (TRBV4-2, TRBJ1-1)
CASSQAGNTEAFF

SEQ ID NO: 97707 - protein, 14 aa, Homo sapiens
  CDR3 for alpha chain variable domain of TCR clone 48854 (TRAV13-1, TRAJ9)
CAASALTGCFKTIF

SEQ ID NO: 97708 - protein, 13 aa, Homo sapiens
  CDR3 for beta chain variable domain of TCR clone 48854 (TRBV20-1, TRBJ1-1)
CSAGTVGNTEAFF

SEQ ID NO: 97709 - protein, 19 aa, Homo sapiens
  CDR3 for alpha chain variable domain of TCR clone 48855 (TRAV26-1, TRAJ52)
CIVRAHRNAGGTSDGKLTF

SEQ ID NO: 97710 - protein, 15 aa, Homo sapiens
  CDR3 for beta chain variable domain of TCR clone 48855 (TRBV29-1, TRBJ2-1)
CSGRDRKSSYNEQFF

SEQ ID NO: 97711 - protein, 18 aa, Homo sapiens
  CDR3 for alpha chain variable domain of TCR clone 48856 (TRAV13-1, TRAJ52)
CAAKNPNAGGTNYGKLTF

SEQ ID NO: 97712 - protein, 14 aa, Homo sapiens
  CDR3 for beta chain variable domain of TCR clone 48856 (TRBV7-3, TRBJ2-1)
CASSLAGGTNEQFF

SEQ ID NO: 97713 - protein, 16 aa, Homo sapiens
  CDR3 for alpha chain variable domain of TCR clone 48857 (TRAV23/DV6, TRAJ9)
CAASIGGNTGGFKTIF

SEQ ID NO: 97714 - protein, 17 aa, Homo sapiens
  CDR3 for beta chain variable domain of TCR clone 48857 (TRBV13, TRBJ2-3)
CASSLSRVAGGEEYAVF

SEQ ID NO: 97715 - protein, 15 aa, Homo sapiens
  CDR3 for alpha chain variable domain of TCR clone 48858 (TRAV26-1, TRAJ44)
CIVRANTGTASKRTF

SEQ ID NO: 97716 - protein, 16 aa, Homo sapiens
  CDR3 for beta chain variable domain of TCR clone 48858 (TRBV7-7, TRBJ2-1)
CASSLASGTSYNEQFF

SEQ ID NO: 97717 - protein, 16 aa, Homo sapiens
  CDR3 for alpha chain variable domain of TCR clone 48859 (TRAV8-3, TRAJ10)
CAVGPILTGGGNKLTF

SEQ ID NO: 97718 - protein, 16 aa, Homo sapiens
  CDR3 for beta chain variable domain of TCR clone 48859 (TRBV7-2, TRBJ2-5)
CASGSKWLSGQETQYF

SEQ ID NO: 97719 - protein, 14 aa, Homo sapiens
  CDR3 for alpha chain variable domain of TCR clone 48860 (TRAV1-2, TRAJ8)
CAVREDTCFQKLVF

SEQ ID NO: 97720 - protein, 17 aa, Homo sapiens
  CDR3 for beta chain variable domain of TCR clone 48860 (TRBV13, TRBJ2-3)
CASSLSRVAGGRNTQYF

SEQ ID NO: 97721 - protein, 12 aa, Homo sapiens
  CDR3 for alpha chain variable domain of TCR clone 48861 (TRAV1-2, TRAJ33)
CAALDSNYQLIW

SEQ ID NO: 97722 - protein, 20 aa, Homo sapiens
  CDR3 for beta chain variable domain of TCR clone 48861 (TRBV7-8, TRBJ2-2)
CASSHLFPGPTIHITGELFF

SEQ ID NO: 97723 - protein, 15 aa, Homo sapiens
  CDR3 for alpha chain variable domain of TCR clone 48862 (TRAV23/DV6, TRAJ13)
CAAWPGGGGYQKVTF

SEQ ID NO: 97724 - protein, 17 aa, Homo sapiens
  CDR3 for beta chain variable domain of TCR clone 48862 (TRBV19, TRBJ2-7)
CASSISFYDSYPYEQYV

SEQ ID NO: 97725 - protein, 14 aa, Homo sapiens
  CDR3 for alpha chain variable domain of TCR clone 48863 (TRAV38-1, TRAJ45)
CAYYSGGGADGLTF

SEQ ID NO: 97726 - protein, 15 aa, Homo sapiens
  CDR3 for beta chain variable domain of TCR clone 48863 (TRBV12-4, TRBJ2-5)
CASSPPTGLQETQYF

SEQ ID NO: 97727 - protein, 11 aa, Homo sapiens
  CDR3 for alpha chain variable domain of TCR clone 48864 (TRAV21, TRAJ48)
CAEDGNEKLTF

SEQ ID NO: 97728 - protein, 16 aa, Homo sapiens
  CDR3 for beta chain variable domain of TCR clone 48864 (TRBV19, TRBJ2-1)
CASSSKGTRSYNEQFF

SEQ ID NO: 97729 - protein, 13 aa, Homo sapiens
  CDR3 for alpha chain variable domain of TCR clone 48865 (TRAV21, TRAJ20)
CAVGLRVDYKLSF

SEQ ID NO: 97730 - protein, 14 aa, Homo sapiens
  CDR3 for beta chain variable domain of TCR clone 48865 (TRBV15, TRBJ2-3)
CATRSGTSTDTQYF

SEQ ID NO: 97731 - protein, 15 aa, Homo sapiens
  CDR3 for alpha chain variable domain of TCR clone 48866 (TRAV8-3, TRAJ40)
CAVGPYTSGTYRYIF

SEQ ID NO: 97732 - protein, 16 aa, Homo sapiens
  CDR3 for beta chain variable domain of TCR clone 48866 (TRBV7-2, TRBJ2-7)
CASSLDPGGGSGEQYF

SEQ ID NO: 97733 - protein, 15 aa, Homo sapiens
  CDR3 for alpha chain variable domain of TCR clone 48867 (TRAV8-2, TRAJ40)
CVVLGTTSGTYKYIF

SEQ ID NO: 97734 - protein, 16 aa, Homo sapiens
  CDR3 for beta chain variable domain of TCR clone 48867 (TRBV7-3, TRBJ2-1)
CASILEGYRSYNEQFF

SEQ ID NO: 97735 - protein, 15 aa, Homo sapiens
  CDR3 for alpha chain variable domain of TCR clone 48868 (TRAV3, TRAJ4)
CAVRDGTGGYNKLIF

SEQ ID NO: 97736 - protein, 16 aa, Homo sapiens
  CDR3 for beta chain variable domain of TCR clone 48868 (TRBV27, TRBJ2-2)
CASSSSGVSNTGELFL

SEQ ID NO: 97737 - protein, 14 aa, Homo sapiens
  CDR3 for alpha chain variable domain of TCR clone 48869 (TRAV26-1, TRAJ44)
CIVKSTGTASKLTF

SEQ ID NO: 97738 - protein, 15 aa, Homo sapiens
  CDR3 for beta chain variable domain of TCR clone 48869 (TRBV19, TRBJ2-4)
CASSDGGGDKNIQYF

SEQ ID NO: 97739 - protein, 14 aa, Homo sapiens
  CDR3 for alpha chain variable domain of TCR clone 48870 (TRAV13-1, TRAJ35)
CAASKGGFGNVLHC

SEQ ID NO: 97740 - protein, 15 aa, Homo sapiens
  CDR3 for beta chain variable domain of TCR clone 48870 (TRBV7-9, TRBJ1-6)
CASGSPGRGNSPLHF

SEQ ID NO: 97741 - protein, 15 aa, Homo sapiens
  CDR3 for alpha chain variable domain of TCR clone 48871 (TRAV12-3, TRAJ6)
CAMSATTGGSYIPTF

SEQ ID NO: 97742 - protein, 16 aa, Homo sapiens
  CDR3 for beta chain variable domain of TCR clone 48871 (TRBV20-1, TRBJ1-2)
CSASMGQGVTNYGYTF

SEQ ID NO: 97743 - protein, 21 aa, Homo sapiens
  CDR3 for alpha chain variable domain of TCR clone 48872 (TRAV13-1, TRAJ37)
CAATPKEIKHRQTNLWARDNF

SEQ ID NO: 97744 - protein, 13 aa, Homo sapiens
  CDR3 for beta chain variable domain of TCR clone 48872 (TRBV20-1, TRBJ2-7)
CSATSEDSCEQYF

SEQ ID NO: 97745 - protein, 10 aa, Homo sapiens
  CDR3 for alpha chain variable domain of TCR clone 48873 (TRAV1-2, TRAJ20)
CALNGYKLSF

SEQ ID NO: 97746 - protein, 16 aa, Homo sapiens
  CDR3 for beta chain variable domain of TCR clone 48873 (TRBV20-1, TRBJ1-1)
CSARALTQGMNTEAFF

SEQ ID NO: 97747 - protein, 17 aa, Homo sapiens
  CDR3 for alpha chain variable domain of TCR clone 48874 (TRAV13-1, TRAJ52)
CAASSGAGCTSYGKLTF

SEQ ID NO: 97748 - protein, 15 aa, Homo sapiens
  CDR3 for beta chain variable domain of TCR clone 48874 (TRBV2, TRBJ2-1)
CASSELAGSYNEQFF

SEQ ID NO: 97749 - protein, 14 aa, Homo sapiens
  CDR3 for alpha chain variable domain of TCR clone 48875 (TRAV12-1, TRAJ9)
CVVTGYTRGFKTIF

SEQ ID NO: 97750 - protein, 13 aa, Homo sapiens
  CDR3 for beta chain variable domain of TCR clone 48875 (TRBV20-1, TRBJ1-1)
CSARDGGNTEAFF

SEQ ID NO: 97751 - protein, 17 aa, Homo sapiens
  CDR3 for alpha chain variable domain of TCR clone 48876 (TRAV8-6, TRAJ8)
CAVKEGIENTGFQKIVF

SEQ ID NO: 97752 - protein, 12 aa, Homo sapiens
  CDR3 for beta chain variable domain of TCR clone 48876 (TRBV19, TRBJ1-4)
CASKDWPGGLFF

SEQ ID NO: 97753 - protein, 16 aa, Homo sapiens
  CDR3 for alpha chain variable domain of TCR clone 48877 (TRAV14/DV4, TRAJ21)
CAMREGPENNLNKFYF

SEQ ID NO: 97754 - protein, 12 aa, Homo sapiens
  CDR3 for beta chain variable domain of TCR clone 48877 (TRBV29-1, TRBJ2-2)
CSVDKYTGELFF

SEQ ID NO: 97755 - protein, 14 aa, Homo sapiens
  CDR3 for alpha chain variable domain of TCR clone 48878 (TRAV12-2, TRAJ13)
CAVKKTGGYQKVVF

SEQ ID NO: 97756 - protein, 15 aa, Homo sapiens
  CDR3 for beta chain variable domain of TCR clone 48878 (TRBV27, TRBJ2-1)
CASSNGGGSSNEQFF

SEQ ID NO: 97757 - protein, 10 aa, Homo sapiens
  CDR3 for alpha chain variable domain of TCR clone 48879 (TRAV36/DV7, TRAJ48)
CAVGNEKLTF

SEQ ID NO: 97758 - protein, 13 aa, Homo sapiens
  CDR3 for beta chain variable domain of TCR clone 48879 (TRBV12-4, TRBJ2-2)
CASSITGSGELFF

SEQ ID NO: 97759 - protein, 17 aa, Homo sapiens
  CDR3 for alpha chain variable domain of TCR clone 48880 (TRAV4, TRAJ13)
CPVGVQGSSGGYQKVTF

SEQ ID NO: 97760 - protein, 16 aa, Homo sapiens
  CDR3 for beta chain variable domain of TCR clone 48880 (TRBV28, TRBJ2-7)
CASSLFFETGGPEQYF

SEQ ID NO: 97761 - protein, 13 aa, Homo sapiens
  CDR3 for alpha chain variable domain of TCR clone 48881 (TRAV3, TRAJ15)
CAVRDQAGTALIF

SEQ ID NO: 97762 - protein, 15 aa, Homo sapiens
  CDR3 for beta chain variable domain of TCR clone 48881 (TRBV11-1, TRBJ2-7)
CASSLNYVASYEQYF

SEQ ID NO: 97763 - protein, 17 aa, Homo sapiens
  CDR3 for alpha chain variable domain of TCR clone 48882 (TRAV8-6, TRAJ58)
CAVSSWVGETSGSGLTF

SEQ ID NO: 97764 - protein, 14 aa, Homo sapiens
  CDR3 for beta chain variable domain of TCR clone 48882 (TRBV20-1, TRBJ2-1)
CSAQIGGSANEQFF

SEQ ID NO: 97765 - protein, 12 aa, Homo sapiens
  CDR3 for alpha chain variable domain of TCR clone 48883 (TRAV3, TRAJ6)
CAVRDSRRKLHT

SEQ ID NO: 97766 - protein, 15 aa, Homo sapiens
  CDR3 for beta chain variable domain of TCR clone 48883 (TRBV18, TRBJ2-7)
CASSPLQGRTYEQYF

SEQ ID NO: 97767 - protein, 16 aa, Homo sapiens
  CDR3 for alpha chain variable domain of TCR clone 48884 (TRAV12-1, TRAJ48)
CVVNMVSNLGNEKLTF

SEQ ID NO: 97768 - protein, 18 aa, Homo sapiens
  CDR3 for beta chain variable domain of TCR clone 48884 (TRBV11-2, TRBJ2-6)
CASSLNPFLGTGANVLTF

SEQ ID NO: 97769 - protein, 13 aa, Homo sapiens
  CDR3 for alpha chain variable domain of TCR clone 48885 (TRAV20, TRAJ37)
CAGCSSNTGKLIF

SEQ ID NO: 97770 - protein, 16 aa, Homo sapiens
  CDR3 for beta chain variable domain of TCR clone 48885 (TRBV7-3, TRBJ2-2)
CASSLKRGTLSGELFF

SEQ ID NO: 97771 - protein, 13 aa, Homo sapiens
  CDR3 for alpha chain variable domain of TCR clone 48886 (TRAV12-2, TRAJ42)
CAVKRGSQGNLTF

SEQ ID NO: 97772 - protein, 13 aa, Homo sapiens
  CDR3 for beta chain variable domain of TCR clone 48886 (TRBV7-9, TRBJ2-3)
CASSPGSTDTQYF

SEQ ID NO: 97773 - protein, 17 aa, Homo sapiens
  CDR3 for alpha chain variable domain of TCR clone 48887 (TRAV3, TRAJ6)
CAVRDGPRVGGSYIPTF

SEQ ID NO: 97774 - protein, 20 aa, Homo sapiens
  CDR3 for beta chain variable domain of TCR clone 48887 (TRBV28, TRBJ2-1)
CASTPIGRSPGLAGGNEQFF

SEQ ID NO: 97775 - protein, 13 aa, Homo sapiens
  CDR3 for alpha chain variable domain of TCR clone 48888 (TRAV12-3, TRAJ9)
CAMRNTGGFKTIF

SEQ ID NO: 97776 - protein, 14 aa, Homo sapiens
  CDR3 for beta chain variable domain of TCR clone 48888 (TRBV11-2, TRBJ2-7)
CASSSTGEGYEQCF

SEQ ID NO: 97777 - protein, 14 aa, Homo sapiens
  CDR3 for alpha chain variable domain of TCR clone 48889 (TRAV4, TRAJ9)
CLVGSGTGGFKTIF

SEQ ID NO: 97778 - protein, 16 aa, Homo sapiens
  CDR3 for beta chain variable domain of TCR clone 48889 (TRBV12-5, TRBJ2-5)
CASGPRTSGNQETQYF

SEQ ID NO: 97779 - protein, 14 aa, Homo sapiens
  CDR3 for alpha chain variable domain of TCR clone 48890 (TRAV12-3, TRAJ10)
SHLPLTGGGNKLTF

SEQ ID NO: 97780 - protein, 16 aa, Homo sapiens
  CDR3 for beta chain variable domain of TCR clone 48890 (TRBV4-1, TRBJ1-4)
CASSQDLQRGGEKLFF

SEQ ID NO: 97781 - protein, 15 aa, Homo sapiens
  CDR3 for alpha chain variable domain of TCR clone 48891 (TRAV34, TRAJ38)
CGADFTPGNNRELIW

SEQ ID NO: 97782 - protein, 16 aa, Homo sapiens
  CDR3 for beta chain variable domain of TCR clone 48891 (TRBV12-5, TRBJ2-5)
CASGPRTSGNQETQYF

SEQ ID NO: 97783 - protein, 14 aa, Homo sapiens
  CDR3 for alpha chain variable domain of TCR clone 48892 (TRAV2, TRAJ9)
CAVEDRSGGFKTIF

SEQ ID NO: 97784 - protein, 16 aa, Homo sapiens
  CDR3 for beta chain variable domain of TCR clone 48892 (TRBV7-3, TRBJ2-1)
CAGSLEGYRSYNEQFF

SEQ ID NO: 97785 - protein, 13 aa, Homo sapiens
  CDR3 for alpha chain variable domain of TCR clone 48893 (TRAV23/DV6, TRAJ27)
CAASKPMQANQPL

SEQ ID NO: 97786 - protein, 13 aa, Homo sapiens
  CDR3 for beta chain variable domain of TCR clone 48893 (TRBV19, TRBJ1-5)
CASSMRGYQPQHF

SEQ ID NO: 97787 - protein, 12 aa, Homo sapiens
  CDR3 for alpha chain variable domain of TCR clone 48894 (TRAV13-1, TRAJ21)
CAAKEGFNKFYF

SEQ ID NO: 97788 - protein, 13 aa, Homo sapiens
  CDR3 for beta chain variable domain of TCR clone 48894 (TRBV7-7, TRBJ2-5)
CASSRSGQETQYF

SEQ ID NO: 97789 - protein, 16 aa, Homo sapiens
  CDR3 for alpha chain variable domain of TCR clone 48895 (TRAV26-1, TRAJ52)
YIVSNAGGTSYGKLTF

SEQ ID NO: 97790 - protein, 15 aa, Homo sapiens
  CDR3 for beta chain variable domain of TCR clone 48895 (TRBV7-3, TRBJ2-1)
CASSPTGGGEVEQFF

SEQ ID NO: 97791 - protein, 16 aa, Homo sapiens
  CDR3 for alpha chain variable domain of TCR clone 48896 (TRAV3, TRAJ42)
CAVRDIEGGSKGNLIF

SEQ ID NO: 97792 - protein, 14 aa, Homo sapiens
  CDR3 for beta chain variable domain of TCR clone 48896 (TRBV18, TRBJ1-1)
CASSPPTGRTEAFF

SEQ ID NO: 97793 - protein, 15 aa, Homo sapiens
  CDR3 for alpha chain variable domain of TCR clone 48897 (TRAV27, TRAJ50)
CAGVGRGTSYAKVIF

SEQ ID NO: 97794 - protein, 14 aa, Homo sapiens
  CDR3 for beta chain variable domain of TCR clone 48897 (TRBV7-2, TRBJ1-1)
CASSFYDLNTEAFF

SEQ ID NO: 97795 - protein, 14 aa, Homo sapiens
  CDR3 for alpha chain variable domain of TCR clone 48898 (TRAV8-2, TRAJ37)
CVVSISGNTGKLIF

SEQ ID NO: 97796 - protein, 13 aa, Homo sapiens
  CDR3 for beta chain variable domain of TCR clone 48898 (TRBV20-1, TRBJ1-5)
CSASGRGNQPQHF

SEQ ID NO: 97797 - protein, 14 aa, Homo sapiens
  CDR3 for alpha chain variable domain of TCR clone 48899 (TRAV2, TRAJ9)
CAVEDRSGGFKTIF

SEQ ID NO: 97798 - protein, 13 aa, Homo sapiens
  CDR3 for beta chain variable domain of TCR clone 48899 (TRBV7-2, TRBJ1-6)
CASSLKFDSPLHF

SEQ ID NO: 97799 - protein, 13 aa, Homo sapiens
  CDR3 for alpha chain variable domain of TCR clone 48900 (TRAV26-1, TRAJ40)
CVLLHSRTYKYIF

SEQ ID NO: 97800 - protein, 15 aa, Homo sapiens
  CDR3 for beta chain variable domain of TCR clone 48900 (TRBV19, TRBJ2-1)
CASSSPGVPLDEQFF

SEQ ID NO: 97801 - protein, 22 aa, Homo sapiens
  CDR3 for alpha chain variable domain of TCR clone 48901 (TRAV25, TRAJ13)
TAAQTTDVGTFLDSGGYQKVTF

SEQ ID NO: 97802 - protein, 17 aa, Homo sapiens
  CDR3 for beta chain variable domain of TCR clone 48901 (TRBV2, TRBJ1-6)
CASSLRSGGLMTSPLHF

SEQ ID NO: 97803 - protein, 14 aa, Homo sapiens
  CDR3 for alpha chain variable domain of TCR clone 48902 (TRAV12-3, TRAJ9)
CAMSVEAGGFKTIF

SEQ ID NO: 97804 - protein, 14 aa, Homo sapiens
  CDR3 for beta chain variable domain of TCR clone 48902 (TRBV7-2, TRBJ2-7)
CASRSQGAAYEQYF

SEQ ID NO: 97805 - protein, 13 aa, Homo sapiens
  CDR3 for alpha chain variable domain of TCR clone 48903 (TRAV8-3, TRAJ43)
CAVGPGNNNDMRF

SEQ ID NO: 97806 - protein, 14 aa, Homo sapiens
  CDR3 for beta chain variable domain of TCR clone 48903 (TRBV19, TRBJ2-1)
CASPTFVLSGEQFF

SEQ ID NO: 97807 - protein, 12 aa, Homo sapiens
  CDR3 for alpha chain variable domain of TCR clone 48904 (TRAV12-2, TRAJ31)
CAVNTPNARLMF

SEQ ID NO: 97808 - protein, 17 aa, Homo sapiens
  CDR3 for beta chain variable domain of TCR clone 48904 (TRBV20-1, TRBJ1-6)
CSARGGYTFSYSSPLHF

SEQ ID NO: 97809 - protein, 12 aa, Homo sapiens
  CDR3 for alpha chain variable domain of TCR clone 48905 (TRAV35, TRAJ39)
LAPNNAGNMLTF

SEQ ID NO: 97810 - protein, 16 aa, Homo sapiens
  CDR3 for beta chain variable domain of TCR clone 48905 (TRBV2, TRBJ2-3)
CASRTSVEGVTDTQYF

SEQ ID NO: 97811 - protein, 12 aa, Homo sapiens
  CDR3 for alpha chain variable domain of TCR clone 48906 (TRAV29/DV5, TRAJ34)
CAASGNNDKLIF

SEQ ID NO: 97812 - protein, 16 aa, Homo sapiens
  CDR3 for beta chain variable domain of TCR clone 48906 (TRBV12-4, TRBJ1-5)
CASRQPVEGSNQPQHF

SEQ ID NO: 97813 - protein, 13 aa, Homo sapiens
  CDR3 for alpha chain variable domain of TCR clone 48907 (TRAV21, TRAJ57)
CAVTQGGSEKLVF

SEQ ID NO: 97814 - protein, 16 aa, Homo sapiens
  CDR3 for beta chain variable domain of TCR clone 48907 (TRBV29-1, TRBJ2-7)
CSVEDGEDGTAYEQYF

SEQ ID NO: 97815 - protein, 16 aa, Homo sapiens
  CDR3 for alpha chain variable domain of TCR clone 48908 (TRAV1-2, TRAJ10)
CAVRGVLTGGGNKLTF

SEQ ID NO: 97816 - protein, 14 aa, Homo sapiens
  CDR3 for beta chain variable domain of TCR clone 48908 (TRBV7-9, TRBJ2-1)
CASSPRDSLYEQFF

SEQ ID NO: 97817 - protein, 16 aa, Homo sapiens
  CDR3 for alpha chain variable domain of TCR clone 48909 (TRAV1-2, TRAJ10)
CAVRGVLTGGGNKLTF

SEQ ID NO: 97818 - protein, 11 aa, Homo sapiens
  CDR3 for beta chain variable domain of TCR clone 48909 (TRBV29-1, TRBJ2-5)
CSEDRTGTQYF

SEQ ID NO: 97819 - protein, 11 aa, Homo sapiens
  CDR3 for alpha chain variable domain of TCR clone 48910 (TRAV12-1, TRAJ30)
CVVNGQEKIIF

SEQ ID NO: 97820 - protein, 12 aa, Homo sapiens
  CDR3 for beta chain variable domain of TCR clone 48910 (TRBV27, TRBJ2-2)
CASKLFTGELFF

SEQ ID NO: 97821 - protein, 12 aa, Homo sapiens
  CDR3 for alpha chain variable domain of TCR clone 48911 (TRAV16, TRAJ10)
CSRTGGGNKLTF

SEQ ID NO: 97822 - protein, 11 aa, Homo sapiens
  CDR3 for beta chain variable domain of TCR clone 48911 (TRBV7-8, TRBJ2-7)
CASSLSLEQYF

SEQ ID NO: 97823 - protein, 12 aa, Homo sapiens
  CDR3 for alpha chain variable domain of TCR clone 48912 (TRAV8-3, TRAJ26)
CAGDSYGRNSVF

SEQ ID NO: 97824 - protein, 13 aa, Homo sapiens
  CDR3 for beta chain variable domain of TCR clone 48912 (TRBV27, TRBJ1-1)
CASSLSIGAEAFF

SEQ ID NO: 97825 - protein, 15 aa, Homo sapiens
  CDR3 for alpha chain variable domain of TCR clone 48913 (TRAV38-1, TRAJ37)
CAFVFGSGNTGKLIF

SEQ ID NO: 97826 - protein, 12 aa, Homo sapiens
  CDR3 for beta chain variable domain of TCR clone 48913 (TRBV7-9, TRBJ2-7)
CASSLEGYEQYF

SEQ ID NO: 97827 - protein, 14 aa, Homo sapiens
  CDR3 for alpha chain variable domain of TCR clone 48914 (TRAV12-1, TRAJ13)
CVVIDSGGYQKFTF

SEQ ID NO: 97828 - protein, 12 aa, Homo sapiens
  CDR3 for beta chain variable domain of TCR clone 48914 (TRBV29-1, TRBJ2-3)
CSVTGGADTQYF

SEQ ID NO: 97829 - protein, 14 aa, Homo sapiens
  CDR3 for alpha chain variable domain of TCR clone 48915 (TRAV12-2, TRAJ13)
CAVKKTGGYQKVTF

SEQ ID NO: 97830 - protein, 15 aa, Homo sapiens
  CDR3 for beta chain variable domain of TCR clone 48915 (TRBV20-1, TRBJ1-1)
CSASWDRFLSTEAFF

SEQ ID NO: 97831 - protein, 17 aa, Homo sapiens
  CDR3 for alpha chain variable domain of TCR clone 48916 (TRAV3, TRAJ6)
CAVRDGPRAGGSYIPTF

SEQ ID NO: 97832 - protein, 16 aa, Homo sapiens
  CDR3 for beta chain variable domain of TCR clone 48916 (TRBV20-1, TRBJ2-1)
CSALTWTSGSYNEQFF

SEQ ID NO: 97833 - protein, 14 aa, Homo sapiens
  CDR3 for alpha chain variable domain of TCR clone 48917 (TRAV16, TRAJ33)
CALSAMDSNYQLIW

SEQ ID NO: 97834 - protein, 14 aa, Homo sapiens
  CDR3 for beta chain variable domain of TCR clone 48917 (TRBV11-2, TRBJ1-5)
CASSLDRGRQPQHF

SEQ ID NO: 97835 - protein, 12 aa, Homo sapiens
  CDR3 for alpha chain variable domain of TCR clone 48918 (TRAV38-1, TRAJ47)
CAFETYGNKLAF

SEQ ID NO: 97836 - protein, 15 aa, Homo sapiens
  CDR3 for beta chain variable domain of TCR clone 48918 (TRBV5-7, TRBJ2-7)
CASSGGRPVPYEQYF

SEQ ID NO: 97837 - protein, 11 aa, Homo sapiens
  CDR3 for alpha chain variable domain of TCR clone 48919 (TRAV17, TRAJ49)
CATNTGNQFYF

SEQ ID NO: 97838 - protein, 12 aa, Homo sapiens
  CDR3 for beta chain variable domain of TCR clone 48919 (TRBV2, TRBJ2-7)
YASSGGSGIPYF

SEQ ID NO: 97839 - protein, 14 aa, Homo sapiens
  CDR3 for alpha chain variable domain of TCR clone 48920 (TRAV12-3, TRAJ42)
CAMNYGGSQGNLIF

SEQ ID NO: 97840 - protein, 13 aa, Homo sapiens
  CDR3 for beta chain variable domain of TCR clone 48920 (TRBV7-3, TRBJ1-1)
CASSQDWGAEAFF

SEQ ID NO: 97841 - protein, 15 aa, Homo sapiens
  CDR3 for alpha chain variable domain of TCR clone 48921 (TRAV2, TRAJ15)
CAVEDRGQAGTALIF

SEQ ID NO: 97842 - protein, 13 aa, Homo sapiens
  CDR3 for beta chain variable domain of TCR clone 48921 (TRBV10-2, TRBJ2-7)
CASGAIGGYEQYF

SEQ ID NO: 97843 - protein, 14 aa, Homo sapiens
  CDR3 for alpha chain variable domain of TCR clone 48922 (TRAV1-2, TRAJ8)
CAVREDTGFQKLVF

SEQ ID NO: 97844 - protein, 12 aa, Homo sapiens
  CDR3 for beta chain variable domain of TCR clone 48922 (TRBV11-2, TRBJ2-2)
CASSLGGGELFL

SEQ ID NO: 97845 - protein, 17 aa, Homo sapiens
  CDR3 for alpha chain variable domain of TCR clone 48923 (TRAV3, TRAJ6)
CAVRDGPRAGGSYIPTF

SEQ ID NO: 97846 - protein, 13 aa, Homo sapiens
  CDR3 for beta chain variable domain of TCR clone 48923 (TRBV11-2, TRBJ2-1)
CASSLGLAGGRFF

SEQ ID NO: 97847 - protein, 14 aa, Homo sapiens
  CDR3 for alpha chain variable domain of TCR clone 48924 (TRAV12-2, TRAJ33)
CAVKRARSNYQLIW

SEQ ID NO: 97848 - protein, 14 aa, Homo sapiens
  CDR3 for beta chain variable domain of TCR clone 48924 (TRBV6-1, TRBJ1-3)
CASVQGGGGNTIYF

SEQ ID NO: 97849 - protein, 15 aa, Homo sapiens
  CDR3 for alpha chain variable domain of TCR clone 48925 (TRAV21, TRAJ24)
CAALSSTDSWGKLQF

SEQ ID NO: 97850 - protein, 13 aa, Homo sapiens
  CDR3 for beta chain variable domain of TCR clone 48925 (TRBV11-2, TRBJ2-5)
CASSSTGEETQYF

SEQ ID NO: 97851 - protein, 16 aa, Homo sapiens
  CDR3 for alpha chain variable domain of TCR clone 48926 (TRAV8-3, TRAJ8)
CAVPRDGNTGFQKLVF

SEQ ID NO: 97852 - protein, 14 aa, Homo sapiens
  CDR3 for beta chain variable domain of TCR clone 48926 (TRBV4-1, TRBJ2-2)
CANSQAVNTGELFF

SEQ ID NO: 97853 - protein, 19 aa, Homo sapiens
  CDR3 for alpha chain variable domain of TCR clone 48927 (TRAV26-1, TRAJ42)
CVLLRRQTYYGGSQGNLIS

SEQ ID NO: 97854 - protein, 16 aa, Homo sapiens
  CDR3 for beta chain variable domain of TCR clone 48927 (TRBV7-3, TRBJ2-2)
CASSLKRGTLSGELFF

SEQ ID NO: 97855 - protein, 11 aa, Homo sapiens
  CDR3 for alpha chain variable domain of TCR clone 48928 (TRAV2, TRAJ13)
CVSGGYQKVTF

SEQ ID NO: 97856 - protein, 16 aa, Homo sapiens
  CDR3 for beta chain variable domain of TCR clone 48928 (TRBV6-1, TRBJ2-5)
CASSETLDRGAETQYF

SEQ ID NO: 97857 - protein, 10 aa, Homo sapiens
  CDR3 for alpha chain variable domain of TCR clone 48929 (TRAV29/DV5, TRAJ54)
LIQGAQKLVF

SEQ ID NO: 97858 - protein, 18 aa, Homo sapiens
  CDR3 for beta chain variable domain of TCR clone 48929 (TRBV3-1, TRBJ1-2)
CASSQDVIGWNGDYGYTF

SEQ ID NO: 97859 - protein, 14 aa, Homo sapiens
  CDR3 for alpha chain variable domain of TCR clone 48930 (TRAV6, TRAJ17)
CALDIEAAGNKLTF

SEQ ID NO: 97860 - protein, 17 aa, Homo sapiens
  CDR3 for beta chain variable domain of TCR clone 48930 (TRBV2, TRBJ1-5)
CASSVGAGMRGYQPQHF

SEQ ID NO: 97861 - protein, 15 aa, Homo sapiens
  CDR3 for alpha chain variable domain of TCR clone 48931 (TRAV17, TRAJ56)
CATAANTGANSKLTF

SEQ ID NO: 97862 - protein, 14 aa, Homo sapiens
  CDR3 for beta chain variable domain of TCR clone 48931 (TRBV19, TRBJ1-5)
CASSLGTGGQPQHF

SEQ ID NO: 97863 - protein, 14 aa, Homo sapiens
  CDR3 for alpha chain variable domain of TCR clone 48932 (TRAV1-2, TRAJ16)
CAVNRFSDGQELLF

SEQ ID NO: 97864 - protein, 13 aa, Homo sapiens
  CDR3 for beta chain variable domain of TCR clone 48932 (TRBV10-3, TRBJ2-7)
CASKLAVNYEQYF

SEQ ID NO: 97865 - protein, 16 aa, Homo sapiens
  CDR3 for alpha chain variable domain of TCR clone 48933 (TRAV26-1, TRAJ53)
CIVRVAMGGSNYKLTF

SEQ ID NO: 97866 - protein, 12 aa, Homo sapiens
  CDR3 for beta chain variable domain of TCR clone 48933 (TRBV7-9, TRBJ1-5)
CASRPQGQPQHF

SEQ ID NO: 97867 - protein, 14 aa, Homo sapiens
  CDR3 for alpha chain variable domain of TCR clone 48934 (TRAV16, TRAJ39)
FALSKNNAGNMLTF

SEQ ID NO: 97868 - protein, 16 aa, Homo sapiens
  CDR3 for beta chain variable domain of TCR clone 48934 (TRBV6-6, TRBJ2-1)
CASSYSFSGSYNEQFF

SEQ ID NO: 97869 - protein, 11 aa, Homo sapiens
  CDR3 for alpha chain variable domain of TCR clone 48935 (TRAV3, TRAJ21)
CAVGNFNKFYF

SEQ ID NO: 97870 - protein, 16 aa, Homo sapiens
  CDR3 for beta chain variable domain of TCR clone 48935 (TRBV19, TRBJ2-3)
CASSPGAASRTDTQYF

SEQ ID NO: 97871 - protein, 14 aa, Homo sapiens
  CDR3 for alpha chain variable domain of TCR clone 48936 (TRAV20, TRAJ56)
CAVQFGGANSKLTF

SEQ ID NO: 97872 - protein, 14 aa, Homo sapiens
  CDR3 for beta chain variable domain of TCR clone 48936 (TRBV20-1, TRBJ2-7)
YSAKRGRSSYEQYF

SEQ ID NO: 97873 - protein, 14 aa, Homo sapiens
  CDR3 for alpha chain variable domain of TCR clone 48937 (TRAV26-1, TRAJ38)
CIADNAGNNRKLIW

SEQ ID NO: 97874 - protein, 16 aa, Homo sapiens
  CDR3 for beta chain variable domain of TCR clone 48937 (TRBV6-1, TRBJ2-5)
CASSETLDRGAETQYF

SEQ ID NO: 97875 - protein, 15 aa, Homo sapiens
  CDR3 for alpha chain variable domain of TCR clone 48938 (TRAV3, TRAJ20)
CAVRDIKLSDYKLSF

SEQ ID NO: 97876 - protein, 13 aa, Homo sapiens
  CDR3 for beta chain variable domain of TCR clone 48938 (TRBV7-9, TRBJ2-3)
CASSPGSTDTQYF

SEQ ID NO: 97877 - protein, 13 aa, Homo sapiens
  CDR3 for alpha chain variable domain of TCR clone 48939 (TRAV13-2, TRAJ21)
CAETPDNFNKFYF

SEQ ID NO: 97878 - protein, 14 aa, Homo sapiens
  CDR3 for beta chain variable domain of TCR clone 48939 (TRBV10-3, TRBJ2-1)
CAISDRGGVTEQFF

SEQ ID NO: 97879 - protein, 16 aa, Homo sapiens
  CDR3 for alpha chain variable domain of TCR clone 48940 (TRAV3, TRAJ40)
CAVRDRIASETYKYIF

SEQ ID NO: 97880 - protein, 16 aa, Homo sapiens
  CDR3 for beta chain variable domain of TCR clone 48940 (TRBV6-1, TRBJ1-2)
CASSEANSIINYGYTF

SEQ ID NO: 97881 - protein, 14 aa, Homo sapiens
  CDR3 for alpha chain variable domain of TCR clone 48941 (TRAV38-2/DV8, TRAJ54)
AAMYQIQGAQKLVF

SEQ ID NO: 97882 - protein, 17 aa, Homo sapiens
  CDR3 for beta chain variable domain of TCR clone 48941 (TRBV6-1, TRBJ2-3)
CASSDALRLISTDTQYF

SEQ ID NO: 97883 - protein, 14 aa, Homo sapiens
  CDR3 for alpha chain variable domain of TCR clone 48942 (TRAV12-2, TRAJ40)
CAVKIPSGTYKYIF

SEQ ID NO: 97884 - protein, 15 aa, Homo sapiens
  CDR3 for beta chain variable domain of TCR clone 48942 (TRBV28, TRBJ2-1)
CASSIIAGGRSEQFF

SEQ ID NO: 97885 - protein, 12 aa, Homo sapiens
  CDR3 for alpha chain variable domain of TCR clone 48943 (TRAV12-2, TRAJ10)
WGVTGGGNKLTF

SEQ ID NO: 97886 - protein, 13 aa, Homo sapiens
  CDR3 for beta chain variable domain of TCR clone 48943 (TRBV7-6, TRBJ1-2)
CASSLVADYGYTF

SEQ ID NO: 97887 - protein, 16 aa, Homo sapiens
  CDR3 for alpha chain variable domain of TCR clone 48944 (TRAV16, TRAJ4)
CALSRMFSGGYNKLIF

SEQ ID NO: 97888 - protein, 16 aa, Homo sapiens
  CDR3 for beta chain variable domain of TCR clone 48944 (TRBV24-1, TRBJ2-3)
CATSDPGTGATDMQYF

SEQ ID NO: 97889 - protein, 16 aa, Homo sapiens
  CDR3 for alpha chain variable domain of TCR clone 48945 (TRAV3, TRAJ10)
CAVRDMRAGGGNKLTF

SEQ ID NO: 97890 - protein, 13 aa, Homo sapiens
  CDR3 for beta chain variable domain of TCR clone 48945 (TRBV6-1, TRBJ1-1)
CASSRQGNAEAFF

SEQ ID NO: 97891 - protein, 14 aa, Homo sapiens
  CDR3 for alpha chain variable domain of TCR clone 48946 (TRAV12-3, TRAJ42)
CAMNYGGSQGNRIF

SEQ ID NO: 97892 - protein, 15 aa, Homo sapiens
  CDR3 for beta chain variable domain of TCR clone 48946 (TRBV5-7, TRBJ1-5)
CASSYGKLWDQPQHF

SEQ ID NO: 97893 - protein, 11 aa, Homo sapiens
  CDR3 for alpha chain variable domain of TCR clone 48947 (TRAV3, TRAJ21)
CAAGNFNKFYF

SEQ ID NO: 97894 - protein, 16 aa, Homo sapiens
  CDR3 for beta chain variable domain of TCR clone 48947 (TRBV19, TRBJ2-1)
CASSKAGPSSYNKQFF

SEQ ID NO: 97895 - protein, 14 aa, Homo sapiens
  CDR3 for alpha chain variable domain of TCR clone 48948 (TRAV35, TRAJ33)
CWPRWRDSNYQLIW

SEQ ID NO: 97896 - protein, 11 aa, Homo sapiens
  CDR3 for beta chain variable domain of TCR clone 48948 (TRBV10-3, TRBJ2-7)
CAISEGLEQYF

SEQ ID NO: 97897 - protein, 13 aa, Homo sapiens
  CDR3 for alpha chain variable domain of TCR clone 48949 (TRAV36/DV7, TRAJ29)
CAVEPSGNTPLVF

SEQ ID NO: 97898 - protein, 11 aa, Homo sapiens
  CDR3 for beta chain variable domain of TCR clone 48949 (TRBV19, TRBJ2-7)
CASGDSYEQYF

SEQ ID NO: 97899 - protein, 14 aa, Homo sapiens
  CDR3 for alpha chain variable domain of TCR clone 48950 (TRAV23/DV6, TRAJ40)
CAARKNSGTYKYVF

SEQ ID NO: 97900 - protein, 14 aa, Homo sapiens
  CDR3 for beta chain variable domain of TCR clone 48950 (TRBV10-3, TRBJ2-5)
CAISERDYQETQYF

SEQ ID NO: 97901 - protein, 17 aa, Homo sapiens
  CDR3 for alpha chain variable domain of TCR clone 48951 (TRAV14/DV4, TRAJ32)
CAMRERSFGGATNKLIF

SEQ ID NO: 97902 - protein, 15 aa, Homo sapiens
  CDR3 for beta chain variable domain of TCR clone 48951 (TRBV5-1, TRBJ2-1)
CASSPPRAPYNEQFF

SEQ ID NO: 97903 - protein, 15 aa, Homo sapiens
  CDR3 for alpha chain variable domain of TCR clone 48952 (TRAV3, TRAJ3)
CAVRDRDSSASKIIF

SEQ ID NO: 97904 - protein, 17 aa, Homo sapiens
  CDR3 for beta chain variable domain of TCR clone 48952 (TRBV18, TRBJ2-2)
CASSQRSSGQGPGELFF

SEQ ID NO: 97905 - protein, 17 aa, Homo sapiens
  CDR3 for alpha chain variable domain of TCR clone 48953 (TRAV3, TRAJ6)
CAVRDGPRAGGSYIPTF

SEQ ID NO: 97906 - protein, 11 aa, Homo sapiens
  CDR3 for beta chain variable domain of TCR clone 48953 (TRBV7-2, TRBJ2-3)
CASSSSDTQYF

SEQ ID NO: 97907 - protein, 12 aa, Homo sapiens
  CDR3 for alpha chain variable domain of TCR clone 48954 (TRAV8-3, TRAJ20)
CAVGANDYKLSF

SEQ ID NO: 97908 - protein, 15 aa, Homo sapiens
  CDR3 for beta chain variable domain of TCR clone 48954 (TRBV6-3, TRBJ2-7)
CASSSPGTVFYEQYF

SEQ ID NO: 97909 - protein, 19 aa, Homo sapiens
  CDR3 for alpha chain variable domain of TCR clone 48955 (TRAV2, TRAJ20)
ILQVREADAAVYRDCKLSF

SEQ ID NO: 97910 - protein, 14 aa, Homo sapiens
  CDR3 for beta chain variable domain of TCR clone 48955 (TRBV15, TRBJ2-3)
CATRSGTSTDTQYF

SEQ ID NO: 97911 - protein, 14 aa, Homo sapiens
  CDR3 for alpha chain variable domain of TCR clone 48956 (TRAV38-1, TRAJ45)
CAYYSGGGADGLTF

SEQ ID NO: 97912 - protein, 18 aa, Homo sapiens
  CDR3 for beta chain variable domain of TCR clone 48956 (TRBV28, TRBJ2-1)
CTPTGRSPGLAGGNEQFF

SEQ ID NO: 97913 - protein, 13 aa, Homo sapiens
  CDR3 for alpha chain variable domain of TCR clone 48957 (TRAV23/DV6, TRAJ27)
CSASKPMQANQPL

SEQ ID NO: 97914 - protein, 14 aa, Homo sapiens
  CDR3 for beta chain variable domain of TCR clone 48957 (TRBV5-4, TRBJ1-1)
CASSLDSRRDEAFF

SEQ ID NO: 97915 - protein, 14 aa, Homo sapiens
  CDR3 for alpha chain variable domain of TCR clone 48958 (TRAV9-2, TRAJ39)
CALYIYNAGNMLTF

SEQ ID NO: 97916 - protein, 11 aa, Homo sapiens
  CDR3 for beta chain variable domain of TCR clone 48958 (TRBV18, TRBJ2-5)
CASSPRETQYF

SEQ ID NO: 97917 - protein, 13 aa, Homo sapiens
  CDR3 for alpha chain variable domain of TCR clone 48959 (TRAV12-1, TRAJ40)
CVVPTSGTYEYIF

SEQ ID NO: 97918 - protein, 18 aa, Homo sapiens
  CDR3 for beta chain variable domain of TCR clone 48959 (TRBV7-6, TRBJ2-1)
CASSPRTSGMSSYNEQFF

SEQ ID NO: 97919 - protein, 13 aa, Homo sapiens
  CDR3 for alpha chain variable domain of TCR clone 48960 (TRAV21, TRAJ27)
CAALNTNAGKSTF

SEQ ID NO: 97920 - protein, 14 aa, Homo sapiens
  CDR3 for beta chain variable domain of TCR clone 48960 (TRBV27, TRBJ1-1)
CANSLLSGLSEAFF

SEQ ID NO: 97921 - protein, 16 aa, Homo sapiens
  CDR3 for alpha chain variable domain of TCR clone 48961 (TRAV12-2, TRAJ6)
CAAPLAGSGGSYIPTF

SEQ ID NO: 97922 - protein, 10 aa, Homo sapiens
  CDR3 for beta chain variable domain of TCR clone 48961 (TRBV28, TRBJ1-2)
CASSSDSAVF

SEQ ID NO: 97923 - protein, 11 aa, Homo sapiens
  CDR3 for alpha chain variable domain of TCR clone 48962 (TRAV17, TRAJ43)
CATDNNNDMRF

SEQ ID NO: 97924 - protein, 15 aa, Homo sapiens
  CDR3 for beta chain variable domain of TCR clone 48962 (TRBV20-1, TRBJ1-2)
CSAIRTGAFSYGYTF

SEQ ID NO: 97925 - protein, 16 aa, Homo sapiens
  CDR3 for alpha chain variable domain of TCR clone 48963 (TRAV16, TRAJ4)
CALSRMFSGGYNKLIF

SEQ ID NO: 97926 - protein, 16 aa, Homo sapiens
  CDR3 for beta chain variable domain of TCR clone 48963 (TRBV7-2, TRBJ2-6)
CASSLAGRSGANVLTF

SEQ ID NO: 97927 - protein, 12 aa, Homo sapiens
  CDR3 for alpha chain variable domain of TCR clone 48964 (TRAV26-1, TRAJ26)
CIVFIYGQNFVF

SEQ ID NO: 97928 - protein, 15 aa, Homo sapiens
  CDR3 for beta chain variable domain of TCR clone 48964 (TRBV20-1, TRBJ2-7)
CSARDRVSGMDEQYF

SEQ ID NO: 97929 - protein, 11 aa, Homo sapiens
  CDR3 for alpha chain variable domain of TCR clone 48965 (TRAV2, TRAJ33)
CAVESNYQLIW

SEQ ID NO: 97930 - protein, 15 aa, Homo sapiens
  CDR3 for beta chain variable domain of TCR clone 48965 (TRBV11-3, TRBJ2-3)
CASLKDGREGDTQYF

SEQ ID NO: 97931 - protein, 14 aa, Homo sapiens
  CDR3 for alpha chain variable domain of TCR clone 48966 (TRAV8-3, TRAJ4)
CAVGASGGYNKLLF

SEQ ID NO: 97932 - protein, 13 aa, Homo sapiens
  CDR3 for beta chain variable domain of TCR clone 48966 (TRBV18, TRBJ2-5)
CASSLQGQETQYF

SEQ ID NO: 97933 - protein, 15 aa, Homo sapiens
  CDR3 for alpha chain variable domain of TCR clone 48967 (TRAV2, TRAJ32)
CAVAHYGGATNKLIF

SEQ ID NO: 97934 - protein, 15 aa, Homo sapiens
  CDR3 for beta chain variable domain of TCR clone 48967 (TRBV7-7, TRBJ2-5)
CASSQLERAEETQYF

SEQ ID NO: 97935 - protein, 15 aa, Homo sapiens
  CDR3 for alpha chain variable domain of TCR clone 48968 (TRAV8-3, TRAJ45)
CASSNSGGGADGLTF

SEQ ID NO: 97936 - protein, 13 aa, Homo sapiens
  CDR3 for beta chain variable domain of TCR clone 48968 (TRBV10-3, TRBJ2-7)
CASKLAVNYEQYF

SEQ ID NO: 97937 - protein, 16 aa, Homo sapiens
  CDR3 for alpha chain variable domain of TCR clone 48969 (TRAV16, TRAJ52)
CALSAACGTSYGKLTF

SEQ ID NO: 97938 - protein, 12 aa, Homo sapiens
  CDR3 for beta chain variable domain of TCR clone 48969 (TRBV12-4, TRBJ1-3)
CASSFSGNTIYF

SEQ ID NO: 97939 - protein, 12 aa, Homo sapiens
  CDR3 for alpha chain variable domain of TCR clone 48970 (TRAV12-3, TRAJ17)
CAMTLTGNKLTF

SEQ ID NO: 97940 - protein, 13 aa, Homo sapiens
  CDR3 for beta chain variable domain of TCR clone 48970 (TRBV20-1, TRBJ2-7)
CSATHTSGYEQYF

SEQ ID NO: 97941 - protein, 14 aa, Homo sapiens
  CDR3 for alpha chain variable domain of TCR clone 48971 (TRAV12-3, TRAJ54)
CAMSALQGAQKLVF

SEQ ID NO: 97942 - protein, 15 aa, Homo sapiens
  CDR3 for beta chain variable domain of TCR clone 48971 (TRBV19, TRBJ2-4)
CASSTPGIAKNTQYF

SEQ ID NO: 97943 - protein, 15 aa, Homo sapiens
  CDR3 for alpha chain variable domain of TCR clone 48972 (TRAV12-3, TRAJ49)
CAMAVTPNTGNQFYF

SEQ ID NO: 97944 - protein, 18 aa, Homo sapiens
  CDR3 for beta chain variable domain of TCR clone 48972 (TRBV4-1, TRBJ1-5)
CASSQDPRGQGLNQPQHL

SEQ ID NO: 97945 - protein, 12 aa, Homo sapiens
  CDR3 for alpha chain variable domain of TCR clone 48973 (TRAV12-3, TRAJ17)
CAMTLTGNKLTS

SEQ ID NO: 97946 - protein, 17 aa, Homo sapiens
  CDR3 for beta chain variable domain of TCR clone 48973 (TRBV11-2, TRBJ2-1)
CASSLYPPGVEYNEQFF

SEQ ID NO: 97947 - protein, 12 aa, Homo sapiens
  CDR3 for alpha chain variable domain of TCR clone 48974 (TRAV8-3, TRAJ41)
CAVALSGYALNF

SEQ ID NO: 97948 - protein, 18 aa, Homo sapiens
  CDR3 for beta chain variable domain of TCR clone 48974 (TRBV20-1, TRBJ2-6)
CSAETTTTHGSGANVLTF

SEQ ID NO: 97949 - protein, 10 aa, Homo sapiens
  CDR3 for alpha chain variable domain of TCR clone 48975 (TRAV23/DV6, TRAJ57)
CAASSTLSQG

SEQ ID NO: 97950 - protein, 14 aa, Homo sapiens
  CDR3 for beta chain variable domain of TCR clone 48975 (TRBV25-1, TRBJ1-1)
CASTHLGGNTEPFF

SEQ ID NO: 97951 - protein, 14 aa, Homo sapiens
  CDR3 for alpha chain variable domain of TCR clone 48976 (TRAV1-2, TRAJ16)
CAVNRFSDGQKLLF

SEQ ID NO: 97952 - protein, 16 aa, Homo sapiens
  CDR3 for beta chain variable domain of TCR clone 48976 (TRBV12-5, TRBJ2-5)
CASGPRTSGKQETQYF

SEQ ID NO: 97953 - protein, 12 aa, Homo sapiens
  CDR3 for alpha chain variable domain of TCR clone 48977 (TRAV3, TRAJ26)
CAVRDYGQSFVF

SEQ ID NO: 97954 - protein, 16 aa, Homo sapiens
  CDR3 for beta chain variable domain of TCR clone 48977 (TRBV11-2, TRBJ1-2)
CASSPSGREANYGYTF

SEQ ID NO: 97955 - protein, 13 aa, Homo sapiens
  CDR3 for alpha chain variable domain of TCR clone 48978 (TRAV12-1, TRAJ33)
CGDAPDSNYQLIW

SEQ ID NO: 97956 - protein, 15 aa, Homo sapiens
  CDR3 for beta chain variable domain of TCR clone 48978 (TRBV9, TRBJ1-6)
CASSVAGTGDSPLHF

SEQ ID NO: 97957 - protein, 15 aa, Homo sapiens
  CDR3 for alpha chain variable domain of TCR clone 48979 (TRAV8-6, TRAJ6)
CAVRDASGGSYIPTF

SEQ ID NO: 97958 - protein, 15 aa, Homo sapiens
  CDR3 for beta chain variable domain of TCR clone 48979 (TRBV6-3, TRBJ2-7)
CASSSPGTVFYEQYF

SEQ ID NO: 97959 - protein, 19 aa, Homo sapiens
  CDR3 for alpha chain variable domain of TCR clone 48980 (TRAV1-2, TRAJ26)
CLLPLCFERPDNYGQNFVF

SEQ ID NO: 97960 - protein, 11 aa, Homo sapiens
  CDR3 for beta chain variable domain of TCR clone 48980 (TRBV12-4, TRBJ2-3)
CASTATDTQYF

SEQ ID NO: 97961 - protein, 15 aa, Homo sapiens
  CDR3 for alpha chain variable domain of TCR clone 48981 (TRAV3, TRAJ24)
CAVRDKMTAGGNCGL

SEQ ID NO: 97962 - protein, 14 aa, Homo sapiens
  CDR3 for beta chain variable domain of TCR clone 48981 (TRBV7-2, TRBJ2-3)
CASSQTGSSYTQYF

SEQ ID NO: 97963 - protein, 13 aa, Homo sapiens
  CDR3 for alpha chain variable domain of TCR clone 48982 (TRAV12-1, TRAJ42)
CGGVGGSQGNLIS

SEQ ID NO: 97964 - protein, 15 aa, Homo sapiens
  CDR3 for beta chain variable domain of TCR clone 48982 (TRBV5-4, TRBJ1-4)
CASSSFGTGNEKLFF

SEQ ID NO: 97965 - protein, 11 aa, Homo sapiens
  CDR3 for alpha chain variable domain of TCR clone 48983 (TRAV1-1, TRAJ23)
CAVRQGGKLIF

SEQ ID NO: 97966 - protein, 13 aa, Homo sapiens
  CDR3 for beta chain variable domain of TCR clone 48983 (TRBV7-3, TRBJ1-1)
CAGSQDWGAEAFF

SEQ ID NO: 97967 - protein, 13 aa, Homo sapiens
  CDR3 for alpha chain variable domain of TCR clone 48984 (TRAV3, TRAJ29)
CAARDIIDTPLVF

SEQ ID NO: 97968 - protein, 14 aa, Homo sapiens
  CDR3 for beta chain variable domain of TCR clone 48984 (TRBV27, TRBJ2-1)
CASSATGGYNEQFF

SEQ ID NO: 97969 - protein, 14 aa, Homo sapiens
  CDR3 for alpha chain variable domain of TCR clone 48985 (TRAV1-2, TRAJ16)
CAVNRFSDGQKLLF

SEQ ID NO: 97970 - protein, 14 aa, Homo sapiens
  CDR3 for beta chain variable domain of TCR clone 48985 (TRBV7-2, TRBJ2-7)
CASSPKTSSYEQYF

SEQ ID NO: 97971 - protein, 15 aa, Homo sapiens
  CDR3 for alpha chain variable domain of TCR clone 48986 (TRAV26-1, TRAJ44)
RIARVPFGTASKLTF

SEQ ID NO: 97972 - protein, 17 aa, Homo sapiens
  CDR3 for beta chain variable domain of TCR clone 48986 (TRBV24-1, TRBJ2-4)
CATSDAEARGVRNIQYF

SEQ ID NO: 97973 - protein, 16 aa, Homo sapiens
  CDR3 for alpha chain variable domain of TCR clone 48987 (TRAV12-2, TRAJ32)
CAVNLSQGGATNKLIF

SEQ ID NO: 97974 - protein, 15 aa, Homo sapiens
  CDR3 for beta chain variable domain of TCR clone 48987 (TRBV20-1, TRBJ2-7)
CSARGPLAGGREQYF

SEQ ID NO: 97975 - protein, 14 aa, Homo sapiens
  CDR3 for alpha chain variable domain of TCR clone 48988 (TRAV30, TRAJ33)
CGTVAPRSNYQLIW

SEQ ID NO: 97976 - protein, 14 aa, Homo sapiens
  CDR3 for beta chain variable domain of TCR clone 48988 (TRBV19, TRBJ2-1)
CASPIFVLSGEQFF

SEQ ID NO: 97977 - protein, 21 aa, Homo sapiens
  CDR3 for alpha chain variable domain of TCR clone 48989 (TRAV1-1, TRAJ6)
CLLLLRCERLERTVGSYIPTF

SEQ ID NO: 97978 - protein, 13 aa, Homo sapiens
  CDR3 for beta chain variable domain of TCR clone 48989 (TRBV10-2, TRBJ2-7)
CASGASGGYEQYF

SEQ ID NO: 97979 - protein, 13 aa, Homo sapiens
  CDR3 for alpha chain variable domain of TCR clone 48990 (TRAV17, TRAJ39)
CATDSNAGNMLTF

SEQ ID NO: 97980 - protein, 14 aa, Homo sapiens
  CDR3 for beta chain variable domain of TCR clone 48990 (TRBV7-2, TRBJ2-7)
CASSPKTSFYEQYF

SEQ ID NO: 97981 - protein, 17 aa, Homo sapiens
  CDR3 for alpha chain variable domain of TCR clone 48991 (TRAV12-2, TRAJ22)
CAVNRIPFSGSARQLTF

SEQ ID NO: 97982 - protein, 14 aa, Homo sapiens
  CDR3 for beta chain variable domain of TCR clone 48991 (TRBV7-8, TRBJ2-3)
CASSLEAGTDTQYF

SEQ ID NO: 97983 - protein, 12 aa, Homo sapiens
  CDR3 for alpha chain variable domain of TCR clone 48992 (TRAV12-2, TRAJ9)
CAVYNGGFKTIF

SEQ ID NO: 97984 - protein, 13 aa, Homo sapiens
  CDR3 for beta chain variable domain of TCR clone 48992 (TRBV7-3, TRBJ2-5)
CASSFRGGETQYF

SEQ ID NO: 97985 - protein, 14 aa, Homo sapiens
  CDR3 for alpha chain variable domain of TCR clone 48993 (TRAV12-3, TRAJ10)
SHLPLTGGGNKLTF

SEQ ID NO: 97986 - protein, 16 aa, Homo sapiens
  CDR3 for beta chain variable domain of TCR clone 48993 (TRBV10-3, TRBJ2-1)
CAISLTSGNSYNEQLF

SEQ ID NO: 97987 - protein, 11 aa, Homo sapiens
  CDR3 for alpha chain variable domain of TCR clone 48994 (TRAV21, TRAJ27)
CAVRMQANQPL

SEQ ID NO: 97988 - protein, 16 aa, Homo sapiens
  CDR3 for beta chain variable domain of TCR clone 48994 (TRBV3-1, TRBJ2-7)
CASSQGAAGVAYEQYF

SEQ ID NO: 97989 - protein, 14 aa, Homo sapiens
  CDR3 for alpha chain variable domain of TCR clone 48995 (TRAV12-3, TRAJ42)
CAMNYGGSQGNIIF

SEQ ID NO: 97990 - protein, 15 aa, Homo sapiens
  CDR3 for beta chain variable domain of TCR clone 48995 (TRBV5-7, TRBJ1-5)
CASSYGKLWDQPQHF

SEQ ID NO: 97991 - protein, 13 aa, Homo sapiens
  CDR3 for alpha chain variable domain of TCR clone 48996 (TRAV13-1, TRAJ6)
CAASKGGSYIPTF

SEQ ID NO: 97992 - protein, 14 aa, Homo sapiens
  CDR3 for beta chain variable domain of TCR clone 48996 (TRBV7-2, TRBJ2-1)
CASSLGVRYNEQFF

SEQ ID NO: 97993 - protein, 12 aa, Homo sapiens
  CDR3 for alpha chain variable domain of TCR clone 48997 (TRAV1-1, TRAJ23)
CAVTNQGGKLIF

SEQ ID NO: 97994 - protein, 15 aa, Homo sapiens
  CDR3 for beta chain variable domain of TCR clone 48997 (TRBV5-1, TRBJ2-1)
CASSPPRAPYNEQFF

SEQ ID NO: 97995 - protein, 13 aa, Homo sapiens
  CDR3 for alpha chain variable domain of TCR clone 48998 (TRAV13-1, TRAJ49)
CAAMLYTGNQFYF

SEQ ID NO: 97996 - protein, 15 aa, Homo sapiens
  CDR3 for beta chain variable domain of TCR clone 48998 (TRBV12-4, TRBJ1-5)
CASTRGSGFGQAQHF

SEQ ID NO: 97997 - protein, 12 aa, Homo sapiens
  CDR3 for alpha chain variable domain of TCR clone 48999 (TRAV30, TRAJ43)
CGTEERGNDMRF

SEQ ID NO: 97998 - protein, 15 aa, Homo sapiens
  CDR3 for beta chain variable domain of TCR clone 48999 (TRBV19, TRBJ1-1)
CASSIGGGRNTEAFF

SEQ ID NO: 97999 - protein, 14 aa, Homo sapiens
  CDR3 for alpha chain variable domain of TCR clone 49000 (TRAV29/DV5, TRAJ36)
CAARRKTGANNLFF

SEQ ID NO: 98000 - protein, 13 aa, Homo sapiens
  CDR3 for beta chain variable domain of TCR clone 49000 (TRBV19, TRBJ1-2)
CASSVPGQDGYTF

SEQ ID NO: 98001 - protein, 12 aa, Homo sapiens
  CDR3 for alpha chain variable domain of TCR clone 49001 (TRAV8-3, TRAJ20)
CAVGANDYKLSF

SEQ ID NO: 98002 - protein, 16 aa, Homo sapiens
  CDR3 for beta chain variable domain of TCR clone 49001 (TRBV19, TRBJ2-2)
CASRSPGTGDTGELFF

SEQ ID NO: 98003 - protein, 14 aa, Homo sapiens
  CDR3 for alpha chain variable domain of TCR clone 49002 (TRAV12-2, TRAJ40)
CAVKIPSGAYKYIF

SEQ ID NO: 98004 - protein, 15 aa, Homo sapiens
  CDR3 for beta chain variable domain of TCR clone 49002 (TRBV2, TRBJ2-7)
CASSEGLARSYEQYF

SEQ ID NO: 98005 - protein, 16 aa, Homo sapiens
  CDR3 for alpha chain variable domain of TCR clone 49003 (TRAV12-3, TRAJ53)
CAMSPGSGGSNYKLTF

SEQ ID NO: 98006 - protein, 11 aa, Homo sapiens
  CDR3 for beta chain variable domain of TCR clone 49003 (TRBV29-1, TRBJ2-5)
CSEDRTGTHYF

SEQ ID NO: 98007 - protein, 17 aa, Homo sapiens
  CDR3 for alpha chain variable domain of TCR clone 49004 (TRAV3, TRAJ42)
CAVRDRDYGGSQGNLIF

SEQ ID NO: 98008 - protein, 20 aa, Homo sapiens
  CDR3 for beta chain variable domain of TCR clone 49004 (TRBV28, TRBJ2-1)
CTSTPIGRSPGLAGGNEQFF

SEQ ID NO: 98009 - protein, 14 aa, Homo sapiens
  CDR3 for alpha chain variable domain of TCR clone 49005 (TRAV1-2, TRAJ16)
CAVNRFSDGQKLLF

SEQ ID NO: 98010 - protein, 16 aa, Homo sapiens
  CDR3 for beta chain variable domain of TCR clone 49005 (TRBV11-2, TRBJ1-2)
CASSLDTGGADYGDTF

SEQ ID NO: 98011 - protein, 12 aa, Homo sapiens
  CDR3 for alpha chain variable domain of TCR clone 49006 (TRAV22, TRAJ29)
CAPPSGNTPLVF

SEQ ID NO: 98012 - protein, 20 aa, Homo sapiens
  CDR3 for beta chain variable domain of TCR clone 49006 (TRBV28, TRBJ2-1)
CASTPIGRSPGLAGGNEQFF

SEQ ID NO: 98013 - protein, 13 aa, Homo sapiens
  CDR3 for alpha chain variable domain of TCR clone 49007 (TRAV20, TRAJ20)
CAVHALNDYKLSF

SEQ ID NO: 98014 - protein, 13 aa, Homo sapiens
  CDR3 for beta chain variable domain of TCR clone 49007 (TRBV7-9, TRBJ1-4)
CASSLPGIEKLFF

SEQ ID NO: 98015 - protein, 14 aa, Homo sapiens
  CDR3 for alpha chain variable domain of TCR clone 49008 (TRAV12-2, TRAJ44)
CAVNPAGTASKLTF

SEQ ID NO: 98016 - protein, 16 aa, Homo sapiens
  CDR3 for beta chain variable domain of TCR clone 49008 (TRBV2, TRBJ2-1)
CASSVGGYLSYNEQFF

SEQ ID NO: 98017 - protein, 13 aa, Homo sapiens
  CDR3 for alpha chain variable domain of TCR clone 49009 (TRAV12-3, TRAJ7)
CAMTPYGNNRLAF

SEQ ID NO: 98018 - protein, 13 aa, Homo sapiens
  CDR3 for beta chain variable domain of TCR clone 49009 (TRBV12-5, TRBJ1-2)
CASGVRTGNGYTF

SEQ ID NO: 98019 - protein, 12 aa, Homo sapiens
  CDR3 for alpha chain variable domain of TCR clone 49010 (TRAV2, TRAJ9)
CAVGAGGFKTIF

SEQ ID NO: 98020 - protein, 15 aa, Homo sapiens
  CDR3 for beta chain variable domain of TCR clone 49010 (TRBV5-1, TRBJ2-1)
CASSPPRAPYNEQFF

SEQ ID NO: 98021 - protein, 14 aa, Homo sapiens
  CDR3 for alpha chain variable domain of TCR clone 49011 (TRAV1-2, TRAJ16)
CAVNRFSDGQKLLF

SEQ ID NO: 98022 - protein, 14 aa, Homo sapiens
  CDR3 for beta chain variable domain of TCR clone 49011 (TRBV19, TRBJ2-1)
CARGARSFQWEQFF

SEQ ID NO: 98023 - protein, 14 aa, Homo sapiens
  CDR3 for alpha chain variable domain of TCR clone 49012 (TRAV12-3, TRAJ10)
SHLPLTGGGDKLTF

SEQ ID NO: 98024 - protein, 19 aa, Homo sapiens
  CDR3 for beta chain variable domain of TCR clone 49012 (TRBV5-1, TRBJ2-3)
CASSLWLAGGITTTDTQYF

SEQ ID NO: 98025 - protein, 14 aa, Homo sapiens
  CDR3 for alpha chain variable domain of TCR clone 49013 (TRAV17, TRAJ35)
CATDRPGFGSVLHC

SEQ ID NO: 98026 - protein, 15 aa, Homo sapiens
  CDR3 for beta chain variable domain of TCR clone 49013 (TRBV28, TRBJ2-5)
CASSSGRVIQETQYF

SEQ ID NO: 98027 - protein, 13 aa, Homo sapiens
  CDR3 for alpha chain variable domain of TCR clone 49014 (TRAV21, TRAJ20)
CAVGLRVDYKLSF

SEQ ID NO: 98028 - protein, 14 aa, Homo sapiens
  CDR3 for beta chain variable domain of TCR clone 49014 (TRBV7-3, TRBJ2-1)
CASSLAGGTNEQFF

SEQ ID NO: 98029 - protein, 14 aa, Homo sapiens
  CDR3 for alpha chain variable domain of TCR clone 49015 (TRAV26-1, TRAJ38)
CIADNAGNNRMLIW

SEQ ID NO: 98030 - protein, 17 aa, Homo sapiens
  CDR3 for beta chain variable domain of TCR clone 49015 (TRBV13, TRBJ2-3)
CASSLSRVAGGRNTQYF

SEQ ID NO: 98031 - protein, 18 aa, Homo sapiens
  CDR3 for alpha chain variable domain of TCR clone 49016 (TRAV26-1, TRAJ52)
CIVRVEGAGGTSCGKLTF

SEQ ID NO: 98032 - protein, 13 aa, Homo sapiens
  CDR3 for beta chain variable domain of TCR clone 49016 (TRBV7-3, TRBJ1-2)
CASSLKRGYGYTF

SEQ ID NO: 98033 - protein, 10 aa, Homo sapiens
  CDR3 for alpha chain variable domain of TCR clone 49017 (TRAV21, TRAJ49)
CAVTGNQFYF

SEQ ID NO: 98034 - protein, 13 aa, Homo sapiens
  CDR3 for beta chain variable domain of TCR clone 49017 (TRBV7-3, TRBJ1-1)
CASSQDWGAEAFF

SEQ ID NO: 98035 - protein, 11 aa, Homo sapiens
  CDR3 for alpha chain variable domain of TCR clone 49018 (TRAV1-1, TRAJ23)
CAVRQGGKLIF

SEQ ID NO: 98036 - protein, 13 aa, Homo sapiens
  CDR3 for beta chain variable domain of TCR clone 49018 (TRBV20-1, TRBJ1-1)
CSARGGGNTEAFF

SEQ ID NO: 98037 - protein, 14 aa, Homo sapiens
  CDR3 for alpha chain variable domain of TCR clone 49019 (TRAV12-3, TRAJ33)
CAMSAGDSNYQLIW

SEQ ID NO: 98038 - protein, 13 aa, Homo sapiens
  CDR3 for beta chain variable domain of TCR clone 49019 (TRBV12-4, TRBJ2-7)
CASSPTETYEQYF

SEQ ID NO: 98039 - protein, 14 aa, Homo sapiens
  CDR3 for alpha chain variable domain of TCR clone 49020 (TRAV12-2, TRAJ40)
CAVKIPSGTYKYIF

SEQ ID NO: 98040 - protein, 16 aa, Homo sapiens
  CDR3 for beta chain variable domain of TCR clone 49020 (TRBV27, TRBJ2-2)
CASSFRGLVRTGELFF

SEQ ID NO: 98041 - protein, 13 aa, Homo sapiens
  CDR3 for alpha chain variable domain of TCR clone 49021 (TRAV8-6, TRAJ8)
CAVSNTGFQKLVF

SEQ ID NO: 98042 - protein, 15 aa, Homo sapiens
  CDR3 for beta chain variable domain of TCR clone 49021 (TRBV28, TRBJ2-5)
CASSSGRTIQETRYF

SEQ ID NO: 98043 - protein, 14 aa, Homo sapiens
  CDR3 for alpha chain variable domain of TCR clone 49022 (TRAV12-2, TRAJ53)
CAVKGGGSNYKLTF

SEQ ID NO: 98044 - protein, 14 aa, Homo sapiens
  CDR3 for beta chain variable domain of TCR clone 49022 (TRBV7-7, TRBJ2-2)
CATRQDSDTGELFF

SEQ ID NO: 98045 - protein, 12 aa, Homo sapiens
  CDR3 for alpha chain variable domain of TCR clone 49023 (TRAV26-1, TRAJ54)
CIGGWGAQKLGF

SEQ ID NO: 98046 - protein, 14 aa, Homo sapiens
  CDR3 for beta chain variable domain of TCR clone 49023 (TRBV11-2, TRBJ1-2)
CASSSGQAGDGYTF

SEQ ID NO: 98047 - protein, 13 aa, Homo sapiens
  CDR3 for alpha chain variable domain of TCR clone 49024 (TRAV3, TRAJ27)
CVVRPLGAGKSTF

SEQ ID NO: 98048 - protein, 13 aa, Homo sapiens
  CDR3 for beta chain variable domain of TCR clone 49024 (TRBV7-9, TRBJ2-3)
CASSPGSTDTQYF

SEQ ID NO: 98049 - protein, 14 aa, Homo sapiens
  CDR3 for alpha chain variable domain of TCR clone 49025 (TRAV12-3, TRAJ10)
SHLPLTGGGNKLTF

SEQ ID NO: 98050 - protein, 16 aa, Homo sapiens
  CDR3 for beta chain variable domain of TCR clone 49025 (TRBV5-8, TRBJ2-2)
RASSLINPGGAGELFF

SEQ ID NO: 98051 - protein, 10 aa, Homo sapiens
  CDR3 for alpha chain variable domain of TCR clone 49026 (TRAV12-3, TRAJ49)
CTMNDDQLYF

SEQ ID NO: 98052 - protein, 13 aa, Homo sapiens
  CDR3 for beta chain variable domain of TCR clone 49026 (TRBV12-4, TRBJ1-1)
CASSPGTGFEAFF

SEQ ID NO: 98053 - protein, 13 aa, Homo sapiens
  CDR3 for alpha chain variable domain of TCR clone 49027 (TRAV21, TRAJ27)
CAALNTNAGKSPF

SEQ ID NO: 98054 - protein, 14 aa, Homo sapiens
  CDR3 for beta chain variable domain of TCR clone 49027 (TRBV27, TRBJ1-1)
CASSLLSGLSEAFF

SEQ ID NO: 98055 - protein, 12 aa, Homo sapiens
  CDR3 for alpha chain variable domain of TCR clone 49028 (TRAV1-1, TRAJ43)
CAPRVSSNDMRF

SEQ ID NO: 98056 - protein, 15 aa, Homo sapiens
  CDR3 for beta chain variable domain of TCR clone 49028 (TRBV5-1, TRBJ2-7)
CASSLGDFTTHEQYF

SEQ ID NO: 98057 - protein, 14 aa, Homo sapiens
  CDR3 for alpha chain variable domain of TCR clone 49029 (TRAV23/DV6, TRAJ4)
CTANLSGGYNKLIF

SEQ ID NO: 98058 - protein, 17 aa, Homo sapiens
  CDR3 for beta chain variable domain of TCR clone 49029 (TRBV4-1, TRBJ1-3)
CASSPQRGIRFGNTIYF

SEQ ID NO: 98059 - protein, 12 aa, Homo sapiens
  CDR3 for alpha chain variable domain of TCR clone 49030 (TRAV12-3, TRAJ17)
CAMTPTGNKLTF

SEQ ID NO: 98060 - protein, 15 aa, Homo sapiens
  CDR3 for beta chain variable domain of TCR clone 49030 (TRBV20-1, TRBJ2-7)
RSARDRVSGMDEQYF

SEQ ID NO: 98061 - protein, 14 aa, Homo sapiens
  CDR3 for alpha chain variable domain of TCR clone 49031 (TRAV1-2, TRAJ16)
CAVNRFSDGKKLLF

SEQ ID NO: 98062 - protein, 13 aa, Homo sapiens
  CDR3 for beta chain variable domain of TCR clone 49031 (TRBV10-3, TRBJ2-7)
CASKLAVNYEQYF

SEQ ID NO: 98063 - protein, 12 aa, Homo sapiens
  CDR3 for alpha chain variable domain of TCR clone 49032 (TRAV12-1, TRAJ40)
CVVNGETYKYVF

SEQ ID NO: 98064 - protein, 14 aa, Homo sapiens
  CDR3 for beta chain variable domain of TCR clone 49032 (TRBV6-1, TRBJ1-3)
CASVQGGGGNTIYF

SEQ ID NO: 98065 - protein, 13 aa, Homo sapiens
  CDR3 for alpha chain variable domain of TCR clone 49033 (TRAV3, TRAJ20)
CAVRPLNDYKLSF

SEQ ID NO: 98066 - protein, 16 aa, Homo sapiens
  CDR3 for beta chain variable domain of TCR clone 49033 (TRBV19, TRBJ2-2)
CASRSPGTGATGELFF

SEQ ID NO: 98067 - protein, 15 aa, Homo sapiens
  CDR3 for alpha chain variable domain of TCR clone 49034 (TRAV3, TRAJ22)
RAVRDRGGSARQLTF

SEQ ID NO: 98068 - protein, 12 aa, Homo sapiens
  CDR3 for beta chain variable domain of TCR clone 49034 (TRBV7-2, TRBJ2-1)
CASSPQDIEQFF

SEQ ID NO: 98069 - protein, 15 aa, Homo sapiens
  CDR3 for alpha chain variable domain of TCR clone 49035 (TRAV23/DV6, TRAJ18)
CAARYRGSTLGRLYF

SEQ ID NO: 98070 - protein, 13 aa, Homo sapiens
  CDR3 for beta chain variable domain of TCR clone 49035 (TRBV7-2, TRBJ2-7)
YASSSPSGSEQYF

SEQ ID NO: 98071 - protein, 14 aa, Homo sapiens
  CDR3 for alpha chain variable domain of TCR clone 49036 (TRAV12-2, TRAJ17)
CAVLFKAAGNKLTF

SEQ ID NO: 98072 - protein, 12 aa, Homo sapiens
  CDR3 for beta chain variable domain of TCR clone 49036 (TRBV11-2, TRBJ2-2)
CASRLGGGELFF

SEQ ID NO: 98073 - protein, 13 aa, Homo sapiens
  CDR3 for alpha chain variable domain of TCR clone 49037 (TRAV2, TRAJ40)
CAVVTSGTYKYIF

SEQ ID NO: 98074 - protein, 14 aa, Homo sapiens
  CDR3 for beta chain variable domain of TCR clone 49037 (TRBV19, TRBJ2-1)
CAGPTLVLSGEQFF

SEQ ID NO: 98075 - protein, 14 aa, Homo sapiens
  CDR3 for alpha chain variable domain of TCR clone 49038 (TRAV1-2, TRAJ16)
CAVNRFSDGQKLLF

SEQ ID NO: 98076 - protein, 14 aa, Homo sapiens
  CDR3 for beta chain variable domain of TCR clone 49038 (TRBV19, TRBJ2-3)
CASSIDLGGDTQYF

SEQ ID NO: 98077 - protein, 17 aa, Homo sapiens
  CDR3 for alpha chain variable domain of TCR clone 49039 (TRAV13-1, TRAJ52)
CAASSGAGGTSYGKLTF

SEQ ID NO: 98078 - protein, 15 aa, Homo sapiens
  CDR3 for beta chain variable domain of TCR clone 49039 (TRBV12-4, TRBJ1-5)
CANTRGSGFGKPQHF

SEQ ID NO: 98079 - protein, 11 aa, Homo sapiens
  CDR3 for alpha chain variable domain of TCR clone 49040 (TRAV1-1, TRAJ23)
CAVRQGGKLIF

SEQ ID NO: 98080 - protein, 20 aa, Homo sapiens
  CDR3 for beta chain variable domain of TCR clone 49040 (TRBV7-8, TRBJ2-2)
CASSHLFPGPTVHIAGELFF

SEQ ID NO: 98081 - protein, 14 aa, Homo sapiens
  CDR3 for alpha chain variable domain of TCR clone 49041 (TRAV38-1, TRAJ45)
CASHSGGGADGLTF

SEQ ID NO: 98082 - protein, 14 aa, Homo sapiens
  CDR3 for beta chain variable domain of TCR clone 49041 (TRBV19, TRBJ2-1)
CASPTFVLSGEQFF

SEQ ID NO: 98083 - protein, 14 aa, Homo sapiens
  CDR3 for alpha chain variable domain of TCR clone 49042 (TRAV12-2, TRAJ40)
CAVKIPSGTYKYIF

SEQ ID NO: 98084 - protein, 18 aa, Homo sapiens
  CDR3 for beta chain variable domain of TCR clone 49042 (TRBV11-2, TRBJ2-3)
CASSLGGASRGTPNTQYF

SEQ ID NO: 98085 - protein, 15 aa, Homo sapiens
  CDR3 for alpha chain variable domain of TCR clone 49043 (TRAV8-3, TRAJ27)
CAVGPSKTNAGKSTF

SEQ ID NO: 98086 - protein, 15 aa, Homo sapiens
  CDR3 for beta chain variable domain of TCR clone 49043 (TRBV7-2, TRBJ2-1)
CASSSGLAGGNEQIF

SEQ ID NO: 98087 - protein, 18 aa, Homo sapiens
  CDR3 for alpha chain variable domain of TCR clone 49044 (TRAV26-1, TRAJ52)
CIVRVAGAGGTSYGRLTF

SEQ ID NO: 98088 - protein, 13 aa, Homo sapiens
  CDR3 for beta chain variable domain of TCR clone 49044 (TRBV7-8, TRBJ1-2)
CASSAQSYYGYTF

SEQ ID NO: 98089 - protein, 12 aa, Homo sapiens
  CDR3 for alpha chain variable domain of TCR clone 49045 (TRAV8-6, TRAJ11)
CAVSSGYSTLTF

SEQ ID NO: 98090 - protein, 14 aa, Homo sapiens
  CDR3 for beta chain variable domain of TCR clone 49045 (TRBV7-2, TRBJ2-7)
CASRSQGAAYEQYF

SEQ ID NO: 98091 - protein, 16 aa, Homo sapiens
  CDR3 for alpha chain variable domain of TCR clone 49046 (TRAV12-3, TRAJ53)
CARSPGSGGSNYKLTF

SEQ ID NO: 98092 - protein, 11 aa, Homo sapiens
  CDR3 for beta chain variable domain of TCR clone 49046 (TRBV29-1, TRBJ2-5)
CSEDRTGTQYF

SEQ ID NO: 98093 - protein, 12 aa, Homo sapiens
  CDR3 for alpha chain variable domain of TCR clone 49047 (TRAV21, TRAJ33)
CAKMDSNYQLIW

SEQ ID NO: 98094 - protein, 13 aa, Homo sapiens
  CDR3 for beta chain variable domain of TCR clone 49047 (TRBV18, TRBJ1-1)
CASSGGRNTEAFF

SEQ ID NO: 98095 - protein, 20 aa, Homo sapiens
  CDR3 for alpha chain variable domain of TCR clone 49048 (TRAV12-3, TRAJ41)
SLFTRDSQPSDSATPEALNF

SEQ ID NO: 98096 - protein, 15 aa, Homo sapiens
  CDR3 for beta chain variable domain of TCR clone 49048 (TRBV5-1, TRBJ2-7)
CASSLDLTSSYEQYF

SEQ ID NO: 98097 - protein, 17 aa, Homo sapiens
  CDR3 for alpha chain variable domain of TCR clone 49049 (TRAV3, TRAJ6)
CAVRDGPRAGGSYIPTF

SEQ ID NO: 98098 - protein, 12 aa, Homo sapiens
  CDR3 for beta chain variable domain of TCR clone 49049 (TRBV14, TRBJ2-5)
CASSQLKETQYF

SEQ ID NO: 98099 - protein, 14 aa, Homo sapiens
  CDR3 for alpha chain variable domain of TCR clone 49050 (TRAV17, TRAJ54)
CATDSNQGAQKLVF

SEQ ID NO: 98100 - protein, 12 aa, Homo sapiens
  CDR3 for beta chain variable domain of TCR clone 49050 (TRBV6-3, TRBJ2-1)
CASSGSYNEQFF

SEQ ID NO: 98101 - protein, 17 aa, Homo sapiens
  CDR3 for alpha chain variable domain of TCR clone 49051 (TRAV8-3, TRAJ34)
CAIPGKLIFGTGTRLQV

SEQ ID NO: 98102 - protein, 15 aa, Homo sapiens
  CDR3 for beta chain variable domain of TCR clone 49051 (TRBV5-7, TRBJ2-1)
YASSRRLAGDNEQFF

SEQ ID NO: 98103 - protein, 14 aa, Homo sapiens
  CDR3 for alpha chain variable domain of TCR clone 49052 (TRAV12-2, TRAJ11)
CAVNRESGDSTLTF

SEQ ID NO: 98104 - protein, 10 aa, Homo sapiens
  CDR3 for beta chain variable domain of TCR clone 49052 (TRBV20-1, TRBJ2-5)
CSARFETQYF

SEQ ID NO: 98105 - protein, 14 aa, Homo sapiens
  CDR3 for alpha chain variable domain of TCR clone 49053 (TRAV1-2, TRAJ16)
CAVNRFSDGQKLLF

SEQ ID NO: 98106 - protein, 13 aa, Homo sapiens
  CDR3 for beta chain variable domain of TCR clone 49053 (TRBV4-1, TRBJ2-1)
CAGSQAGGDEQFF

SEQ ID NO: 98107 - protein, 14 aa, Homo sapiens
  CDR3 for alpha chain variable domain of TCR clone 49054 (TRAV36/DV7, TRAJ13)
WGSDENGGYQKVTF

SEQ ID NO: 98108 - protein, 15 aa, Homo sapiens
  CDR3 for beta chain variable domain of TCR clone 49054 (TRBV19, TRBJ2-1)
CASSTGTSSYNEQFF

SEQ ID NO: 98109 - protein, 14 aa, Homo sapiens
  CDR3 for alpha chain variable domain of TCR clone 49055 (TRAV1-2, TRAJ16)
CAVNRFSGGQKLLF

SEQ ID NO: 98110 - protein, 13 aa, Homo sapiens
  CDR3 for beta chain variable domain of TCR clone 49055 (TRBV10-3, TRBJ2-7)
CASKLAVNYEQYF

SEQ ID NO: 98111 - protein, 11 aa, Homo sapiens
  CDR3 for alpha chain variable domain of TCR clone 49056 (TRAV21, TRAJ34)
CAHYNTDRLIF

SEQ ID NO: 98112 - protein, 13 aa, Homo sapiens
  CDR3 for beta chain variable domain of TCR clone 49056 (TRBV7-6, TRBJ1-2)
CASSLVADYGYTF

SEQ ID NO: 98113 - protein, 10 aa, Homo sapiens
  CDR3 for alpha chain variable domain of TCR clone 49057 (TRAV16, TRAJ22)
SAMYLRQLTF

SEQ ID NO: 98114 - protein, 15 aa, Homo sapiens
  CDR3 for beta chain variable domain of TCR clone 49057 (TRBV4-1, TRBJ2-5)
CASSQWDLYQETQYF

SEQ ID NO: 98115 - protein, 15 aa, Homo sapiens
  CDR3 for alpha chain variable domain of TCR clone 49058 (TRAV26-2, TRAJ26)
CILRDFGNYGQNFVF

SEQ ID NO: 98116 - protein, 14 aa, Homo sapiens
  CDR3 for beta chain variable domain of TCR clone 49058 (TRBV29-1, TRBJ2-5)
CSFWTPYAGETQYF

SEQ ID NO: 98117 - protein, 11 aa, Homo sapiens
  CDR3 for alpha chain variable domain of TCR clone 49059 (TRAV12-3, TRAJ49)
CAANTGNQFYF

SEQ ID NO: 98118 - protein, 12 aa, Homo sapiens
  CDR3 for beta chain variable domain of TCR clone 49059 (TRBV6-3, TRBJ2-7)
CARSEPGFEQYF

SEQ ID NO: 98119 - protein, 11 aa, Homo sapiens
  CDR3 for alpha chain variable domain of TCR clone 49060 (TRAV3, TRAJ32)
CAVREGIMVVL

SEQ ID NO: 98120 - protein, 13 aa, Homo sapiens
  CDR3 for beta chain variable domain of TCR clone 49060 (TRBV2, TRBJ1-1)
CASSEGGNTEALF

SEQ ID NO: 98121 - protein, 12 aa, Homo sapiens
  CDR3 for alpha chain variable domain of TCR clone 49061 (TRAV38-1, TRAJ32)
CAPLGATNKLIF

SEQ ID NO: 98122 - protein, 14 aa, Homo sapiens
  CDR3 for beta chain variable domain of TCR clone 49061 (TRBV29-1, TRBJ2-5)
CSVKTSGSGETQYF

SEQ ID NO: 98123 - protein, 15 aa, Homo sapiens
  CDR3 for alpha chain variable domain of TCR clone 49062 (TRAV21, TRAJ53)
CATLNSGGSNYKLTF

SEQ ID NO: 98124 - protein, 17 aa, Homo sapiens
  CDR3 for beta chain variable domain of TCR clone 49062 (TRBV4-1, TRBJ1-4)
CASSQEGPRGVEEKLFF

SEQ ID NO: 98125 - protein, 18 aa, Homo sapiens
  CDR3 for alpha chain variable domain of TCR clone 49063 (TRAV21, TRAJ52)
CAVRASPAGGTSYGKLTF

SEQ ID NO: 98126 - protein, 17 aa, Homo sapiens
  CDR3 for beta chain variable domain of TCR clone 49063 (TRBV13, TRBJ2-3)
CASSLSRVAGGRNTQYF

SEQ ID NO: 98127 - protein, 16 aa, Homo sapiens
  CDR3 for alpha chain variable domain of TCR clone 49064 (TRAV12-2, TRAJ18)
CAVTTDRGSTLVRLYF

SEQ ID NO: 98128 - protein, 14 aa, Homo sapiens
  CDR3 for beta chain variable domain of TCR clone 49064 (TRBV4-2, TRBJ1-5)
CASSQDSINQPQHF

SEQ ID NO: 98129 - protein, 15 aa, Homo sapiens
  CDR3 for alpha chain variable domain of TCR clone 49065 (TRAV14/DV4, TRAJ33)
CAMREGRDSNYQLIW

SEQ ID NO: 98130 - protein, 15 aa, Homo sapiens
  CDR3 for beta chain variable domain of TCR clone 49065 (TRBV5-5, TRBJ1-5)
RASSSTPGSNQPQHF

SEQ ID NO: 98131 - protein, 13 aa, Homo sapiens
  CDR3 for alpha chain variable domain of TCR clone 49066 (TRAV35, TRAJ42)
CAGFPGSQGDLIF

SEQ ID NO: 98132 - protein, 13 aa, Homo sapiens
  CDR3 for beta chain variable domain of TCR clone 49066 (TRBV29-1, TRBJ2-1)
CSVEGGRVNEQFF

SEQ ID NO: 98133 - protein, 12 aa, Homo sapiens
  CDR3 for alpha chain variable domain of TCR clone 49067 (TRAV21, TRAJ29)
CAVTSGNTPLVF

SEQ ID NO: 98134 - protein, 15 aa, Homo sapiens
  CDR3 for beta chain variable domain of TCR clone 49067 (TRBV12-4, TRBJ1-2)
CASRLGVAGNYGYSF

SEQ ID NO: 98135 - protein, 17 aa, Homo sapiens
  CDR3 for alpha chain variable domain of TCR clone 49068 (TRAV3, TRAJ6)
CAVRDGPRAGGSYIPPF

SEQ ID NO: 98136 - protein, 14 aa, Homo sapiens
  CDR3 for beta chain variable domain of TCR clone 49068 (TRBV7-2, TRBJ2-7)
CASSPKTSLYEQYF

SEQ ID NO: 98137 - protein, 17 aa, Homo sapiens
  CDR3 for alpha chain variable domain of TCR clone 49069 (TRAV13-1, TRAJ52)
CAASSGAGGTSYGKLTF

SEQ ID NO: 98138 - protein, 15 aa, Homo sapiens
  CDR3 for beta chain variable domain of TCR clone 49069 (TRBV2, TRBJ2-1)
CASSELSGSYNEQFF

SEQ ID NO: 98139 - protein, 11 aa, Homo sapiens
  CDR3 for alpha chain variable domain of TCR clone 49070 (TRAV35, TRAJ30)
CAGERDDKIIF

SEQ ID NO: 98140 - protein, 15 aa, Homo sapiens
  CDR3 for beta chain variable domain of TCR clone 49070 (TRBV19, TRBJ1-6)
CASSTQGAVGSPLHF

SEQ ID NO: 98141 - protein, 12 aa, Homo sapiens
  CDR3 for alpha chain variable domain of TCR clone 49071 (TRAV13-2, TRAJ23)
CAERHRGGKLIF

SEQ ID NO: 98142 - protein, 16 aa, Homo sapiens
  CDR3 for beta chain variable domain of TCR clone 49071 (TRBV20-1, TRBJ1-4)
CSAPGQGLLTKEKLFF

SEQ ID NO: 98143 - protein, 15 aa, Homo sapiens
  CDR3 for alpha chain variable domain of TCR clone 49072 (TRAV17, TRAJ57)
CATGPSQGGSEKLVF

SEQ ID NO: 98144 - protein, 16 aa, Homo sapiens
  CDR3 for beta chain variable domain of TCR clone 49072 (TRBV12-4, TRBJ1-5)
GASSRPVGGSNQPQHF

SEQ ID NO: 98145 - protein, 18 aa, Homo sapiens
  CDR3 for alpha chain variable domain of TCR clone 49073 (TRAV21, TRAJ52)
CAVRPSPAGGTSYGKLTF

SEQ ID NO: 98146 - protein, 14 aa, Homo sapiens
  CDR3 for beta chain variable domain of TCR clone 49073 (TRBV20-1, TRBJ2-3)
CSARGGTSTDTQYF

SEQ ID NO: 98147 - protein, 12 aa, Homo sapiens
  CDR3 for alpha chain variable domain of TCR clone 49074 (TRAV12-3, TRAJ42)
CAPGGSQGNLIF

SEQ ID NO: 98148 - protein, 13 aa, Homo sapiens
  CDR3 for beta chain variable domain of TCR clone 49074 (TRBV6-4, TRBJ1-5)
CASSADLNQPQHF

SEQ ID NO: 98149 - protein, 12 aa, Homo sapiens
  CDR3 for alpha chain variable domain of TCR clone 49075 (TRAV2, TRAJ33)
CAFMDSNYQLIW

SEQ ID NO: 98150 - protein, 16 aa, Homo sapiens
  CDR3 for beta chain variable domain of TCR clone 49075 (TRBV2, TRBJ2-7)
CASSEPWAGPSYEQYF

SEQ ID NO: 98151 - protein, 11 aa, Homo sapiens
  CDR3 for alpha chain variable domain of TCR clone 49076 (TRAV35, TRAJ34)
CWARNTDKLIF

SEQ ID NO: 98152 - protein, 13 aa, Homo sapiens
  CDR3 for beta chain variable domain of TCR clone 49076 (TRBV7-9, TRBJ1-2)
CASSLKQNYGYTF

SEQ ID NO: 98153 - protein, 10 aa, Homo sapiens
  CDR3 for alpha chain variable domain of TCR clone 49077 (TRAV12-3, TRAJ49)
CAMNDDQFYF

SEQ ID NO: 98154 - protein, 13 aa, Homo sapiens
  CDR3 for beta chain variable domain of TCR clone 49077 (TRBV12-4, TRBJ1-1)
CASSPGTGFEVFF

SEQ ID NO: 98155 - protein, 15 aa, Homo sapiens
  CDR3 for alpha chain variable domain of TCR clone 49078 (TRAV26-1, TRAJ15)
CIVRAANQAGTALIF

SEQ ID NO: 98156 - protein, 15 aa, Homo sapiens
  CDR3 for beta chain variable domain of TCR clone 49078 (TRBV20-1, TRBJ1-1)
CSARSAVTSNTEAFF

SEQ ID NO: 98157 - protein, 13 aa, Homo sapiens
  CDR3 for alpha chain variable domain of TCR clone 49079 (TRAV3, TRAJ20)
CAVRSLSDYKLSF

SEQ ID NO: 98158 - protein, 13 aa, Homo sapiens
  CDR3 for beta chain variable domain of TCR clone 49079 (TRBV6-1, TRBJ2-1)
CAGMDPTNNEQFF

SEQ ID NO: 98159 - protein, 11 aa, Homo sapiens
  CDR3 for alpha chain variable domain of TCR clone 49080 (TRAV12-2, TRAJ41)
CAMNAREALNF

SEQ ID NO: 98160 - protein, 16 aa, Homo sapiens
  CDR3 for beta chain variable domain of TCR clone 49080 (TRBV7-8, TRBJ2-3)
CASSTEGQRETDTQYF

SEQ ID NO: 98161 - protein, 13 aa, Homo sapiens
  CDR3 for alpha chain variable domain of TCR clone 49081 (TRAV12-1, TRAJ33)
CGDAPDSNYQLTW

SEQ ID NO: 98162 - protein, 15 aa, Homo sapiens
  CDR3 for beta chain variable domain of TCR clone 49081 (TRBV27, TRBJ2-1)
CASSNGGGSSNEQFF

SEQ ID NO: 98163 - protein, 16 aa, Homo sapiens
  CDR3 for alpha chain variable domain of TCR clone 49082 (TRAV38-1, TRAJ56)
CAFMKRQTGANSKLTF

SEQ ID NO: 98164 - protein, 12 aa, Homo sapiens
  CDR3 for beta chain variable domain of TCR clone 49082 (TRBV11-2, TRBJ2-2)
CASSLGGGELFF

SEQ ID NO: 98165 - protein, 15 aa, Homo sapiens
  CDR3 for alpha chain variable domain of TCR clone 49083 (TRAV12-1, TRAJ44)
CVVDEYTGTASKLTF

SEQ ID NO: 98166 - protein, 14 aa, Homo sapiens
  CDR3 for beta chain variable domain of TCR clone 49083 (TRBV5-1, TRBJ1-2)
CASSLEPVNCGYTF

SEQ ID NO: 98167 - protein, 18 aa, Homo sapiens
  CDR3 for alpha chain variable domain of TCR clone 49084 (TRAV26-1, TRAJ23)
CIVRVGLEVWNQVGKLIF

SEQ ID NO: 98168 - protein, 16 aa, Homo sapiens
  CDR3 for beta chain variable domain of TCR clone 49084 (TRBV12-4, TRBJ2-5)
CASSFFVRGRQETQYF

SEQ ID NO: 98169 - protein, 13 aa, Homo sapiens
  CDR3 for alpha chain variable domain of TCR clone 49085 (TRAV23/DV6, TRAJ47)
CAASSQYGNKLAF

SEQ ID NO: 98170 - protein, 15 aa, Homo sapiens
  CDR3 for beta chain variable domain of TCR clone 49085 (TRBV7-3, TRBJ2-1)
CASSLDGNSYNEQFF

SEQ ID NO: 98171 - protein, 14 aa, Homo sapiens
  CDR3 for alpha chain variable domain of TCR clone 49086 (TRAV12-1, TRAJ17)
CVVNYKAAGNKLTF

SEQ ID NO: 98172 - protein, 15 aa, Homo sapiens
  CDR3 for beta chain variable domain of TCR clone 49086 (TRBV11-3, TRBJ2-2)
CASSLGGRPTGELFF

SEQ ID NO: 98173 - protein, 16 aa, Homo sapiens
  CDR3 for alpha chain variable domain of TCR clone 49087 (TRAV16, TRAJ4)
CALSRMFSGGYNKLIF

SEQ ID NO: 98174 - protein, 16 aa, Homo sapiens
  CDR3 for beta chain variable domain of TCR clone 49087 (TRBV24-1, TRBJ2-3)
CASSDPGTGATDTQYF

SEQ ID NO: 98175 - protein, 15 aa, Homo sapiens
  CDR3 for alpha chain variable domain of TCR clone 49088 (TRAV4, TRAJ28)
CLVEGSGAGSYQPTF

SEQ ID NO: 98176 - protein, 15 aa, Homo sapiens
  CDR3 for beta chain variable domain of TCR clone 49088 (TRBV9, TRBJ2-3)
CASSVRGLAVDTQYF

SEQ ID NO: 98177 - protein, 15 aa, Homo sapiens
  CDR3 for alpha chain variable domain of TCR clone 49089 (TRAV13-1, TRAJ44)
CAAGRGGGTASKLTF

SEQ ID NO: 98178 - protein, 14 aa, Homo sapiens
  CDR3 for beta chain variable domain of TCR clone 49089 (TRBV7-2, TRBJ2-5)
CASSPRGSSETQYF

SEQ ID NO: 98179 - protein, 14 aa, Homo sapiens
  CDR3 for alpha chain variable domain of TCR clone 49090 (TRAV8-3, TRAJ16)
CAVDRVSDGQKLLF

SEQ ID NO: 98180 - protein, 15 aa, Homo sapiens
  CDR3 for beta chain variable domain of TCR clone 49090 (TRBV7-6, TRBJ2-1)
CASSPGQGPYNEQFF

SEQ ID NO: 98181 - protein, 11 aa, Homo sapiens
  CDR3 for alpha chain variable domain of TCR clone 49091 (TRAV1-1, TRAJ23)
CAVRQGGKLIF

SEQ ID NO: 98182 - protein, 16 aa, Homo sapiens
  CDR3 for beta chain variable domain of TCR clone 49091 (TRBV5-4, TRBJ2-3)
CASQQPGAGGAGTQYF

SEQ ID NO: 98183 - protein, 11 aa, Homo sapiens
  CDR3 for alpha chain variable domain of TCR clone 49092 (TRAV13-1, TRAJ24)
CAASGGGKLQF

SEQ ID NO: 98184 - protein, 15 aa, Homo sapiens
  CDR3 for beta chain variable domain of TCR clone 49092 (TRBV11-2, TRBJ2-2)
CASSLDTGNTGELFF

SEQ ID NO: 98185 - protein, 11 aa, Homo sapiens
  CDR3 for alpha chain variable domain of TCR clone 49093 (TRAV21, TRAJ33)
CQMDSNYQLIW

SEQ ID NO: 98186 - protein, 14 aa, Homo sapiens
  CDR3 for beta chain variable domain of TCR clone 49093 (TRBV2, TRBJ2-7)
CASSLTSGGYEQYF

SEQ ID NO: 98187 - protein, 14 aa, Homo sapiens
  CDR3 for alpha chain variable domain of TCR clone 49094 (TRAV12-1, TRAJ13)
CVVIDSGGYQKVTF

SEQ ID NO: 98188 - protein, 15 aa, Homo sapiens
  CDR3 for beta chain variable domain of TCR clone 49094 (TRBV28, TRBJ1-3)
CASSMGWASGNTIYF

SEQ ID NO: 98189 - protein, 14 aa, Homo sapiens
  CDR3 for alpha chain variable domain of TCR clone 49095 (TRAV12-2, TRAJ40)
CAVKIPSGTYKYIF

SEQ ID NO: 98190 - protein, 13 aa, Homo sapiens
  CDR3 for beta chain variable domain of TCR clone 49095 (TRBV20-1, TRBJ1-3)
CSARVQGRNTIYF

SEQ ID NO: 98191 - protein, 14 aa, Homo sapiens
  CDR3 for alpha chain variable domain of TCR clone 49096 (TRAV8-4, TRAJ39)
CAVSLNNAGNMPTF

SEQ ID NO: 98192 - protein, 16 aa, Homo sapiens
  CDR3 for beta chain variable domain of TCR clone 49096 (TRBV13, TRBJ2-7)
CASSSRESGRTYEQYF

SEQ ID NO: 98193 - protein, 14 aa, Homo sapiens
  CDR3 for alpha chain variable domain of TCR clone 49097 (TRAV35, TRAJ53)
CAGNSGGSNYKLTF

SEQ ID NO: 98194 - protein, 16 aa, Homo sapiens
  CDR3 for beta chain variable domain of TCR clone 49097 (TRBV7-2, TRBJ1-2)
CASSPTSGASLGGYTF

SEQ ID NO: 98195 - protein, 14 aa, Homo sapiens
  CDR3 for alpha chain variable domain of TCR clone 49098 (TRAV13-1, TRAJ44)
CAAKATGTASKLTF

SEQ ID NO: 98196 - protein, 17 aa, Homo sapiens
  CDR3 for beta chain variable domain of TCR clone 49098 (TRBV7-3, TRBJ2-3)
CASSLMNRMRGADTQYF

SEQ ID NO: 98197 - protein, 15 aa, Homo sapiens
  CDR3 for alpha chain variable domain of TCR clone 49099 (TRAV12-3, TRAJ6)
CAMSAASGGSYIPTF

SEQ ID NO: 98198 - protein, 11 aa, Homo sapiens
  CDR3 for beta chain variable domain of TCR clone 49099 (TRBV20-1, TRBJ1-5)
CSAQGDQPQHF

SEQ ID NO: 98199 - protein, 15 aa, Homo sapiens
  CDR3 for alpha chain variable domain of TCR clone 49100 (TRAV3, TRAJ4)
CAVRDGTGGYNKLIF

SEQ ID NO: 98200 - protein, 16 aa, Homo sapiens
  CDR3 for beta chain variable domain of TCR clone 49100 (TRBV27, TRBJ2-2)
CASSSSGVSNAGELFF

SEQ ID NO: 98201 - protein, 12 aa, Homo sapiens
  CDR3 for alpha chain variable domain of TCR clone 49101 (TRAV8-3, TRAJ26)
CAGDNYGQNFVF

SEQ ID NO: 98202 - protein, 16 aa, Homo sapiens
  CDR3 for beta chain variable domain of TCR clone 49101 (TRBV7-8, TRBJ2-6)
CQQRRDRGAGANVLTF

SEQ ID NO: 98203 - protein, 13 aa, Homo sapiens
  CDR3 for alpha chain variable domain of TCR clone 49102 (TRAV27, TRAJ45)
CRSSGGGADGLTF

SEQ ID NO: 98204 - protein, 13 aa, Homo sapiens
  CDR3 for beta chain variable domain of TCR clone 49102 (TRBV7-2, TRBJ2-7)
CASSSPSGSEQYF

SEQ ID NO: 98205 - protein, 13 aa, Homo sapiens
  CDR3 for alpha chain variable domain of TCR clone 49103 (TRAV20, TRAJ37)
CAGCSSNTGKLIF

SEQ ID NO: 98206 - protein, 12 aa, Homo sapiens
  CDR3 for beta chain variable domain of TCR clone 49103 (TRBV2, TRBJ2-1)
CAYGPPGNEQFF

SEQ ID NO: 98207 - protein, 15 aa, Homo sapiens
  CDR3 for alpha chain variable domain of TCR clone 49104 (TRAV8-3, TRAJ41)
CAVGSNSNSGYALNF

SEQ ID NO: 98208 - protein, 13 aa, Homo sapiens
  CDR3 for beta chain variable domain of TCR clone 49104 (TRBV7-3, TRBJ1-1)
CASSQDWGAEAFF

SEQ ID NO: 98209 - protein, 12 aa, Homo sapiens
  CDR3 for alpha chain variable domain of TCR clone 49105 (TRAV35, TRAJ30)
CAGSNRDDKIIF

SEQ ID NO: 98210 - protein, 15 aa, Homo sapiens
  CDR3 for beta chain variable domain of TCR clone 49105 (TRBV18, TRBJ2-3)
CASSPLAGETDTQYF

SEQ ID NO: 98211 - protein, 13 aa, Homo sapiens
  CDR3 for alpha chain variable domain of TCR clone 49106 (TRAV8-4, TRAJ30)
CAVSVNRDDKIIF

SEQ ID NO: 98212 - protein, 13 aa, Homo sapiens
  CDR3 for beta chain variable domain of TCR clone 49106 (TRBV3-1, TRBJ2-2)
CASLARGSGELFL

SEQ ID NO: 98213 - protein, 13 aa, Homo sapiens
  CDR3 for alpha chain variable domain of TCR clone 49107 (TRAV12-1, TRAJ26)
CVVRRNYGQNFFF

SEQ ID NO: 98214 - protein, 15 aa, Homo sapiens
  CDR3 for beta chain variable domain of TCR clone 49107 (TRBV28, TRBJ2-1)
CASSIIAGGRSEQFF

SEQ ID NO: 98215 - protein, 14 aa, Homo sapiens
  CDR3 for alpha chain variable domain of TCR clone 49108 (TRAV38-1, TRAJ45)
CAYYSGGGAVGLTF

SEQ ID NO: 98216 - protein, 20 aa, Homo sapiens
  CDR3 for beta chain variable domain of TCR clone 49108 (TRBV28, TRBJ2-1)
CASTPIGRSPGLAGGNEQFF

SEQ ID NO: 98217 - protein, 15 aa, Homo sapiens
  CDR3 for alpha chain variable domain of TCR clone 49109 (TRAV26-2, TRAJ21)
CILSNTTSTSFTLDL

SEQ ID NO: 98218 - protein, 16 aa, Homo sapiens
  CDR3 for beta chain variable domain of TCR clone 49109 (TRBV4-2, TRBJ2-6)
CASSQARSSGANVLTF

SEQ ID NO: 98219 - protein, 12 aa, Homo sapiens
  CDR3 for alpha chain variable domain of TCR clone 49110 (TRAV8-3, TRAJ26)
CVGDNYGQNFVF

SEQ ID NO: 98220 - protein, 15 aa, Homo sapiens
  CDR3 for beta chain variable domain of TCR clone 49110 (TRBV9, TRBJ2-1)
CASSLAGSSYNEQFF

SEQ ID NO: 98221 - protein, 15 aa, Homo sapiens
  CDR3 for alpha chain variable domain of TCR clone 49111 (TRAV29/DV5, TRAJ24)
CAASGATDSWGKCQF

SEQ ID NO: 98222 - protein, 12 aa, Homo sapiens
  CDR3 for beta chain variable domain of TCR clone 49111 (TRBV11-2, TRBJ2-2)
CASSLPTGELFF

SEQ ID NO: 98223 - protein, 14 aa, Homo sapiens
  CDR3 for alpha chain variable domain of TCR clone 49112 (TRAV1-2, TRAJ16)
CAVNRFSDGQKLLF

SEQ ID NO: 98224 - protein, 15 aa, Homo sapiens
  CDR3 for beta chain variable domain of TCR clone 49112 (TRBV7-2, TRBJ1-2)
CASSLVSGGDYGYTF

SEQ ID NO: 98225 - protein, 13 aa, Homo sapiens
  CDR3 for alpha chain variable domain of TCR clone 49113 (TRAV13-2, TRAJ48)
CAEMDFGTEKLTF

SEQ ID NO: 98226 - protein, 15 aa, Homo sapiens
  CDR3 for beta chain variable domain of TCR clone 49113 (TRBV7-9, TRBJ1-6)
CASSSPGRGNSPLHF

SEQ ID NO: 98227 - protein, 15 aa, Homo sapiens
  CDR3 for alpha chain variable domain of TCR clone 49114 (TRAV26-1, TRAJ29)
CILRVEGSGNTPLVF

SEQ ID NO: 98228 - protein, 15 aa, Homo sapiens
  CDR3 for beta chain variable domain of TCR clone 49114 (TRBV7-9, TRBJ1-5)
CASSQGHQPNQPQHF

SEQ ID NO: 98229 - protein, 11 aa, Homo sapiens
  CDR3 for alpha chain variable domain of TCR clone 49115 (TRAV12-1, TRAJ26)
CVVAYGQNSVF

SEQ ID NO: 98230 - protein, 15 aa, Homo sapiens
  CDR3 for beta chain variable domain of TCR clone 49115 (TRBV12-4, TRBJ2-5)
CASSGTGQAQETQYF

SEQ ID NO: 98231 - protein, 13 aa, Homo sapiens
  CDR3 for alpha chain variable domain of TCR clone 49116 (TRAV27, TRAJ45)
CRSSGGGADGLTF

SEQ ID NO: 98232 - protein, 14 aa, Homo sapiens
  CDR3 for beta chain variable domain of TCR clone 49116 (TRBV7-2, TRBJ1-1)
CASSFLTGTTEAFF

SEQ ID NO: 98233 - protein, 17 aa, Homo sapiens
  CDR3 for alpha chain variable domain of TCR clone 49117 (TRAV13-1, TRAJ28)
CAASPPYSGAGSYQLTF

SEQ ID NO: 98234 - protein, 14 aa, Homo sapiens
  CDR3 for beta chain variable domain of TCR clone 49117 (TRBV20-1, TRBJ2-7)
CSAPELAGVGEQYF

SEQ ID NO: 98235 - protein, 14 aa, Homo sapiens
  CDR3 for alpha chain variable domain of TCR clone 49118 (TRAV1-2, TRAJ16)
CAVNRFSDGQKLLF

SEQ ID NO: 98236 - protein, 15 aa, Homo sapiens
  CDR3 for beta chain variable domain of TCR clone 49118 (TRBV12-4, TRBJ2-5)
CQQFFVRGRQETQYF

SEQ ID NO: 98237 - protein, 15 aa, Homo sapiens
  CDR3 for alpha chain variable domain of TCR clone 49119 (TRAV3, TRAJ3)
CAVRDRESSASKIIF

SEQ ID NO: 98238 - protein, 15 aa, Homo sapiens
  CDR3 for beta chain variable domain of TCR clone 49119 (TRBV29-1, TRBJ2-7)
CSVEFFDRGSYEQYF

SEQ ID NO: 98239 - protein, 14 aa, Homo sapiens
  CDR3 for alpha chain variable domain of TCR clone 49120 (TRAV12-1, TRAJ3)
CVVNPGSSASKIIF

SEQ ID NO: 98240 - protein, 17 aa, Homo sapiens
  CDR3 for beta chain variable domain of TCR clone 49120 (TRBV5-8, TRBJ1-5)
CASSSRLQLYSNQPQHF

SEQ ID NO: 98241 - protein, 14 aa, Homo sapiens
  CDR3 for alpha chain variable domain of TCR clone 49121 (TRAV26-2, TRAJ38)
RILYNAGNNRKLIW

SEQ ID NO: 98242 - protein, 14 aa, Homo sapiens
  CDR3 for beta chain variable domain of TCR clone 49121 (TRBV19, TRBJ2-1)
CASPTFVLSGEQFF

SEQ ID NO: 98243 - protein, 16 aa, Homo sapiens
  CDR3 for alpha chain variable domain of TCR clone 49122 (TRAV3, TRAJ37)
CAVRGKGSGNTGKLIF

SEQ ID NO: 98244 - protein, 15 aa, Homo sapiens
  CDR3 for beta chain variable domain of TCR clone 49122 (TRBV4-2, TRBJ1-1)
CASSQDQGLNTEAFF

SEQ ID NO: 98245 - protein, 14 aa, Homo sapiens
  CDR3 for alpha chain variable domain of TCR clone 49123 (TRAV30, TRAJ26)
CGAEIVSYGQNFVF

SEQ ID NO: 98246 - protein, 13 aa, Homo sapiens
  CDR3 for beta chain variable domain of TCR clone 49123 (TRBV7-3, TRBJ1-1)
CASSQDWGAEAFF

SEQ ID NO: 98247 - protein, 14 aa, Homo sapiens
  CDR3 for alpha chain variable domain of TCR clone 49124 (TRAV17, TRAJ30)
CATVTMNRDDKIIF

SEQ ID NO: 98248 - protein, 12 aa, Homo sapiens
  CDR3 for beta chain variable domain of TCR clone 49124 (TRBV4-1, TRBJ2-3)
CASSQGTDTQYF

SEQ ID NO: 98249 - protein, 13 aa, Homo sapiens
  CDR3 for alpha chain variable domain of TCR clone 49125 (TRAV12-3, TRAJ33)
CAMSVNSNYQLIW

SEQ ID NO: 98250 - protein, 13 aa, Homo sapiens
  CDR3 for beta chain variable domain of TCR clone 49125 (TRBV7-2, TRBJ2-2)
CASSLAVTGELVF

SEQ ID NO: 98251 - protein, 16 aa, Homo sapiens
  CDR3 for alpha chain variable domain of TCR clone 49126 (TRAV3, TRAJ37)
CAVRPHGSGNTGKLIF

SEQ ID NO: 98252 - protein, 16 aa, Homo sapiens
  CDR3 for beta chain variable domain of TCR clone 49126 (TRBV9, TRBJ1-2)
CASSVEEKASPYGYTF

SEQ ID NO: 98253 - protein, 14 aa, Homo sapiens
  CDR3 for alpha chain variable domain of TCR clone 49127 (TRAV25, TRAJ22)
CAVRSSGSARQLTF

SEQ ID NO: 98254 - protein, 16 aa, Homo sapiens
  CDR3 for beta chain variable domain of TCR clone 49127 (TRBV4-2, TRBJ1-1)
CASSPSPGRAAPEALF

SEQ ID NO: 98255 - protein, 17 aa, Homo sapiens
  CDR3 for alpha chain variable domain of TCR clone 49128 (TRAV23/DV6, TRAJ57)
CAAGSTLSQGGSEKLVF

SEQ ID NO: 98256 - protein, 14 aa, Homo sapiens
  CDR3 for beta chain variable domain of TCR clone 49128 (TRBV25-1, TRBJ1-1)
CASTHLGGNTEAFF

SEQ ID NO: 98257 - protein, 14 aa, Homo sapiens
  CDR3 for alpha chain variable domain of TCR clone 49129 (TRAV2, TRAJ37)
CAVDFTSNTGKLIF

SEQ ID NO: 98258 - protein, 14 aa, Homo sapiens
  CDR3 for beta chain variable domain of TCR clone 49129 (TRBV2, TRBJ1-5)
CASSGTVSNQPQHF

SEQ ID NO: 98259 - protein, 10 aa, Homo sapiens
  CDR3 for alpha chain variable domain of TCR clone 49130 (TRAV5, TRAJ34)
SAEDTDKLIF

SEQ ID NO: 98260 - protein, 15 aa, Homo sapiens
  CDR3 for beta chain variable domain of TCR clone 49130 (TRBV4-1, TRBJ2-3)
CASGRGQGIPDTQYF

SEQ ID NO: 98261 - protein, 13 aa, Homo sapiens
  CDR3 for alpha chain variable domain of TCR clone 49131 (TRAV2, TRAJ15)
CAVASQAGTALIF

SEQ ID NO: 98262 - protein, 16 aa, Homo sapiens
  CDR3 for beta chain variable domain of TCR clone 49131 (TRBV5-1, TRBJ1-1)
CASSSGGNSLNTEAIF

SEQ ID NO: 98263 - protein, 11 aa, Homo sapiens
  CDR3 for alpha chain variable domain of TCR clone 49132 (TRAV17, TRAJ49)
CAADAGNQFYF

SEQ ID NO: 98264 - protein, 16 aa, Homo sapiens
  CDR3 for beta chain variable domain of TCR clone 49132 (TRBV7-2, TRBJ1-2)
CASSPTSGTSLGGYTF

SEQ ID NO: 98265 - protein, 11 aa, Homo sapiens
  CDR3 for alpha chain variable domain of TCR clone 49133 (TRAV2, TRAJ33)
CAVESNYQLIW

SEQ ID NO: 98266 - protein, 15 aa, Homo sapiens
  CDR3 for beta chain variable domain of TCR clone 49133 (TRBV2, TRBJ2-7)
CASSEGLARSYEQYF

SEQ ID NO: 98267 - protein, 13 aa, Homo sapiens
  CDR3 for alpha chain variable domain of TCR clone 49134 (TRAV26-2, TRAJ43)
CILRAVNNNDMRF

SEQ ID NO: 98268 - protein, 15 aa, Homo sapiens
  CDR3 for beta chain variable domain of TCR clone 49134 (TRBV7-8, TRBJ2-1)
CASTHGTGIYNEQFF

SEQ ID NO: 98269 - protein, 12 aa, Homo sapiens
  CDR3 for alpha chain variable domain of TCR clone 49135 (TRAV8-3, TRAJ20)
CGVGANDYKLSF

SEQ ID NO: 98270 - protein, 16 aa, Homo sapiens
  CDR3 for beta chain variable domain of TCR clone 49135 (TRBV19, TRBJ2-2)
CASRSPGTGATGELFF

SEQ ID NO: 98271 - protein, 16 aa, Homo sapiens
  CDR3 for alpha chain variable domain of TCR clone 49136 (TRAV3, TRAJ10)
CAVRDMRAGGGNKLTF

SEQ ID NO: 98272 - protein, 17 aa, Homo sapiens
  CDR3 for beta chain variable domain of TCR clone 49136 (TRBV28, TRBJ2-5)
CASSTPEGDAIQETQYF

SEQ ID NO: 98273 - protein, 12 aa, Homo sapiens
  CDR3 for alpha chain variable domain of TCR clone 49137 (TRAV12-1, TRAJ40)
CVVYSGTYKYIF

SEQ ID NO: 98274 - protein, 20 aa, Homo sapiens
  CDR3 for beta chain variable domain of TCR clone 49137 (TRBV7-8, TRBJ2-2)
CASSHLFPGPTIHITGELFF

SEQ ID NO: 98275 - protein, 15 aa, Homo sapiens
  CDR3 for alpha chain variable domain of TCR clone 49138 (TRAV12-1, TRAJ44)
CVVFVNTGTASKLTF

SEQ ID NO: 98276 - protein, 17 aa, Homo sapiens
  CDR3 for beta chain variable domain of TCR clone 49138 (TRBV7-8, TRBJ2-6)
CASSAGTGSAGANVLTF

SEQ ID NO: 98277 - protein, 14 aa, Homo sapiens
  CDR3 for alpha chain variable domain of TCR clone 49139 (TRAV38-1, TRAJ29)
CAFITPSGNTPLVV

SEQ ID NO: 98278 - protein, 14 aa, Homo sapiens
  CDR3 for beta chain variable domain of TCR clone 49139 (TRBV18, TRBJ2-7)
CASSPRGGAYEQYF

SEQ ID NO: 98279 - protein, 14 aa, Homo sapiens
  CDR3 for alpha chain variable domain of TCR clone 49140 (TRAV1-2, TRAJ8)
CAVREDTGFQKLVF

SEQ ID NO: 98280 - protein, 15 aa, Homo sapiens
  CDR3 for beta chain variable domain of TCR clone 49140 (TRBV7-3, TRBJ2-2)
CASSGTGQGTGELFF

SEQ ID NO: 98281 - protein, 11 aa, Homo sapiens
  CDR3 for alpha chain variable domain of TCR clone 49141 (TRAV12-1, TRAJ21)
CVVNNFNKFYF

SEQ ID NO: 98282 - protein, 13 aa, Homo sapiens
  CDR3 for beta chain variable domain of TCR clone 49141 (TRBV12-4, TRBJ1-2)
CASSLRQGKGYTF

SEQ ID NO: 98283 - protein, 15 aa, Homo sapiens
  CDR3 for alpha chain variable domain of TCR clone 49142 (TRAV38-1, TRAJ37)
CAFIFGSGNTGKIIF

SEQ ID NO: 98284 - protein, 12 aa, Homo sapiens
  CDR3 for beta chain variable domain of TCR clone 49142 (TRBV7-9, TRBJ2-7)
CASSLEGYEQYF

SEQ ID NO: 98285 - protein, 16 aa, Homo sapiens
  CDR3 for alpha chain variable domain of TCR clone 49143 (TRAV30, TRAJ24)
CGTEIVDADSWGKFQF

SEQ ID NO: 98286 - protein, 16 aa, Homo sapiens
  CDR3 for beta chain variable domain of TCR clone 49143 (TRBV2, TRBJ1-3)
CASSRTGGSTGNTIYF

SEQ ID NO: 98287 - protein, 15 aa, Homo sapiens
  CDR3 for alpha chain variable domain of TCR clone 49144 (TRAV23/DV6, TRAJ18)
CAARYRGSTLGRLYF

SEQ ID NO: 98288 - protein, 13 aa, Homo sapiens
  CDR3 for beta chain variable domain of TCR clone 49144 (TRBV7-2, TRBJ2-7)
CASSSPSGSEQYL

SEQ ID NO: 98289 - protein, 14 aa, Homo sapiens
  CDR3 for alpha chain variable domain of TCR clone 49145 (TRAV12-2, TRAJ44)
CAVNPAGTASKLTF

SEQ ID NO: 98290 - protein, 14 aa, Homo sapiens
  CDR3 for beta chain variable domain of TCR clone 49145 (TRBV19, TRBJ2-1)
CASPTFVLSGEQFF

SEQ ID NO: 98291 - protein, 15 aa, Homo sapiens
  CDR3 for alpha chain variable domain of TCR clone 49146 (TRAV17, TRAJ42)
CATDHYGGSQGNLIS

SEQ ID NO: 98292 - protein, 14 aa, Homo sapiens
  CDR3 for beta chain variable domain of TCR clone 49146 (TRBV19, TRBJ2-5)
CASSIEHSQETQYF

SEQ ID NO: 98293 - protein, 16 aa, Homo sapiens
  CDR3 for alpha chain variable domain of TCR clone 49147 (TRAV12-3, TRAJ53)
CAMSPGSGGSNYKLTF

SEQ ID NO: 98294 - protein, 17 aa, Homo sapiens
  CDR3 for beta chain variable domain of TCR clone 49147 (TRBV6-6, TRBJ2-5)
CASSYPLAGGPQETQYF

SEQ ID NO: 98295 - protein, 15 aa, Homo sapiens
  CDR3 for alpha chain variable domain of TCR clone 49148 (TRAV3, TRAJ32)
CAVRDPGGATNKLIF

SEQ ID NO: 98296 - protein, 14 aa, Homo sapiens
  CDR3 for beta chain variable domain of TCR clone 49148 (TRBV9, TRBJ1-2)
CASGVKGDNYGYTF

SEQ ID NO: 98297 - protein, 14 aa, Homo sapiens
  CDR3 for alpha chain variable domain of TCR clone 49149 (TRAV13-1, TRAJ44)
CAAKATGTASKLTF

SEQ ID NO: 98298 - protein, 15 aa, Homo sapiens
  CDR3 for beta chain variable domain of TCR clone 49149 (TRBV27, TRBJ2-1)
CASSNGGGSSNEQFF

SEQ ID NO: 98299 - protein, 15 aa, Homo sapiens
  CDR3 for alpha chain variable domain of TCR clone 49150 (TRAV3, TRAJ5)
CAVRDLDTGRRALTF

SEQ ID NO: 98300 - protein, 14 aa, Homo sapiens
  CDR3 for beta chain variable domain of TCR clone 49150 (TRBV6-1, TRBJ1-1)
CASTPLQMNTEAFF

SEQ ID NO: 98301 - protein, 13 aa, Homo sapiens
  CDR3 for alpha chain variable domain of TCR clone 49151 (TRAV3, TRAJ21)
CAVREPDFNKFYF

SEQ ID NO: 98302 - protein, 15 aa, Homo sapiens
  CDR3 for beta chain variable domain of TCR clone 49151 (TRBV28, TRBJ2-5)
CASSSGRTIQETQYF

SEQ ID NO: 98303 - protein, 14 aa, Homo sapiens
  CDR3 for alpha chain variable domain of TCR clone 49152 (TRAV8-3, TRAJ9)
CAVVYNTGGFKTIF

SEQ ID NO: 98304 - protein, 14 aa, Homo sapiens
  CDR3 for beta chain variable domain of TCR clone 49152 (TRBV7-3, TRBJ2-2)
CASSSGGYTRELFF

SEQ ID NO: 98305 - protein, 23 aa, Homo sapiens
  CDR3 for alpha chain variable domain of TCR clone 49153 (TRAV26-1, TRAJ38)
CIADNAGNNHIQNPDPAVYQLRD

SEQ ID NO: 98306 - protein, 13 aa, Homo sapiens
  CDR3 for beta chain variable domain of TCR clone 49153 (TRBV7-3, TRBJ1-1)
CASSQDWGAEAFF

SEQ ID NO: 98307 - protein, 14 aa, Homo sapiens
  CDR3 for alpha chain variable domain of TCR clone 49154 (TRAV12-2, TRAJ13)
CAVKKTGGYRKVTF

SEQ ID NO: 98308 - protein, 15 aa, Homo sapiens
  CDR3 for beta chain variable domain of TCR clone 49154 (TRBV6-3, TRBJ2-7)
CASSSPGTVFYEQYF

SEQ ID NO: 98309 - protein, 13 aa, Homo sapiens
  CDR3 for alpha chain variable domain of TCR clone 49155 (TRAV2, TRAJ40)
CAVLTSGTYKYIF

SEQ ID NO: 98310 - protein, 15 aa, Homo sapiens
  CDR3 for beta chain variable domain of TCR clone 49155 (TRBV11-3, TRBJ2-3)
CASLKDGREGDTQYF

SEQ ID NO: 98311 - protein, 13 aa, Homo sapiens
  CDR3 for alpha chain variable domain of TCR clone 49156 (TRAV38-1, TRAJ42)
CARWGGSQGNLIF

SEQ ID NO: 98312 - protein, 16 aa, Homo sapiens
  CDR3 for beta chain variable domain of TCR clone 49156 (TRBV4-3, TRBJ2-3)
CASSQELAGDTDTQYF

SEQ ID NO: 98313 - protein, 13 aa, Homo sapiens
  CDR3 for alpha chain variable domain of TCR clone 49157 (TRAV3, TRAJ43)
CAMRDTRGGDMRF

SEQ ID NO: 98314 - protein, 15 aa, Homo sapiens
  CDR3 for beta chain variable domain of TCR clone 49157 (TRBV6-5, TRBJ1-5)
CASSYSRRSNQPQHF

SEQ ID NO: 98315 - protein, 13 aa, Homo sapiens
  CDR3 for alpha chain variable domain of TCR clone 49158 (TRAV13-2, TRAJ48)
CAEMDFGNEKLTF

SEQ ID NO: 98316 - protein, 14 aa, Homo sapiens
  CDR3 for beta chain variable domain of TCR clone 49158 (TRBV19, TRBJ2-2)
CASSTLHRSGELFF

SEQ ID NO: 98317 - protein, 16 aa, Homo sapiens
  CDR3 for alpha chain variable domain of TCR clone 49159 (TRAV12-1, TRAJ13)
CVVNLEVSGGYQKVTF

SEQ ID NO: 98318 - protein, 16 aa, Homo sapiens
  CDR3 for beta chain variable domain of TCR clone 49159 (TRBV24-1, TRBJ2-6)
CATSDRRVSGANVLTF

SEQ ID NO: 98319 - protein, 14 aa, Homo sapiens
  CDR3 for alpha chain variable domain of TCR clone 49160 (TRAV1-1, TRAJ27)
CAVIYNTNAGKLTF

SEQ ID NO: 98320 - protein, 15 aa, Homo sapiens
  CDR3 for beta chain variable domain of TCR clone 49160 (TRBV7-2, TRBJ2-1)
CASSSGLAGGNEQFF

SEQ ID NO: 98321 - protein, 14 aa, Homo sapiens
  CDR3 for alpha chain variable domain of TCR clone 49161 (TRAV1-2, TRAJ16)
CAVNRFSDGQKLLF

SEQ ID NO: 98322 - protein, 14 aa, Homo sapiens
  CDR3 for beta chain variable domain of TCR clone 49161 (TRBV20-1, TRBJ1-1)
CSAQTRIAGTEAFF

SEQ ID NO: 98323 - protein, 23 aa, Homo sapiens
  CDR3 for alpha chain variable domain of TCR clone 49162 (TRAV12-2, TRAJ36)
SLLIRDSQPSDSATQERANNLFF

SEQ ID NO: 98324 - protein, 17 aa, Homo sapiens
  CDR3 for beta chain variable domain of TCR clone 49162 (TRBV3-1, TRBJ2-3)
CASSQLLDRGHTDTQYF

SEQ ID NO: 98325 - protein, 12 aa, Homo sapiens
  CDR3 for alpha chain variable domain of TCR clone 49163 (TRAV8-4, TRAJ37)
WAVRSNTGKLIF

SEQ ID NO: 98326 - protein, 16 aa, Homo sapiens
  CDR3 for beta chain variable domain of TCR clone 49163 (TRBV7-2, TRBJ2-3)
CASSLVGDASTDTQYF

SEQ ID NO: 98327 - protein, 12 aa, Homo sapiens
  CDR3 for alpha chain variable domain of TCR clone 49164 (TRAV17, TRAJ4)
CATDGGYSKLIF

SEQ ID NO: 98328 - protein, 13 aa, Homo sapiens
  CDR3 for beta chain variable domain of TCR clone 49164 (TRBV29-1, TRBJ2-2)
CSTTGVNTGELFF

SEQ ID NO: 98329 - protein, 15 aa, Homo sapiens
  CDR3 for alpha chain variable domain of TCR clone 49165 (TRAV26-1, TRAJ29)
CIVRVEGSGNTPLVF

SEQ ID NO: 98330 - protein, 11 aa, Homo sapiens
  CDR3 for beta chain variable domain of TCR clone 49165 (TRBV25-1, TRBJ2-7)
CASSTSYEQYF

SEQ ID NO: 98331 - protein, 14 aa, Homo sapiens
  CDR3 for alpha chain variable domain of TCR clone 49166 (TRAV1-2, TRAJ16)
CAVNRFSDGQKLLF

SEQ ID NO: 98332 - protein, 18 aa, Homo sapiens
  CDR3 for beta chain variable domain of TCR clone 49166 (TRBV5-5, TRBJ1-5)
CASSLRQVKGSSNQPQHF

SEQ ID NO: 98333 - protein, 11 aa, Homo sapiens
  CDR3 for alpha chain variable domain of TCR clone 49167 (TRAV3, TRAJ21)
CAVGNFNKFYF

SEQ ID NO: 98334 - protein, 16 aa, Homo sapiens
  CDR3 for beta chain variable domain of TCR clone 49167 (TRBV2, TRBJ1-5)
CASSESPQGLNQPQHF

SEQ ID NO: 98335 - protein, 17 aa, Homo sapiens
  CDR3 for alpha chain variable domain of TCR clone 49168 (TRAV3, TRAJ42)
CAVRDRDYGGSQGNTIF

SEQ ID NO: 98336 - protein, 15 aa, Homo sapiens
  CDR3 for beta chain variable domain of TCR clone 49168 (TRBV6-6, TRBJ2-7)
CASSYSYGGSYEQYF

SEQ ID NO: 98337 - protein, 11 aa, Homo sapiens
  CDR3 for alpha chain variable domain of TCR clone 49169 (TRAV12-2, TRAJ39)
CAVNNMLTFGG

SEQ ID NO: 98338 - protein, 16 aa, Homo sapiens
  CDR3 for beta chain variable domain of TCR clone 49169 (TRBV9, TRBJ2-7)
CASSAGPDRAPYEQYF

SEQ ID NO: 98339 - protein, 14 aa, Homo sapiens
  CDR3 for alpha chain variable domain of TCR clone 49170 (TRAV13-2, TRAJ17)
CAENSKAAGNKLTF

SEQ ID NO: 98340 - protein, 12 aa, Homo sapiens
  CDR3 for beta chain variable domain of TCR clone 49170 (TRBV7-9, TRBJ2-7)
CASSIKREEQYF

SEQ ID NO: 98341 - protein, 13 aa, Homo sapiens
  CDR3 for alpha chain variable domain of TCR clone 49171 (TRAV30, TRAJ24)
CGTVTDSWGKLQF

SEQ ID NO: 98342 - protein, 17 aa, Homo sapiens
  CDR3 for beta chain variable domain of TCR clone 49171 (TRBV20-1, TRBJ2-2)
CSASGSGQGGLTGELFF

SEQ ID NO: 98343 - protein, 12 aa, Homo sapiens
  CDR3 for alpha chain variable domain of TCR clone 49172 (TRAV26-1, TRAJ35)
CIGLSFGNVLHC

SEQ ID NO: 98344 - protein, 14 aa, Homo sapiens
  CDR3 for beta chain variable domain of TCR clone 49172 (TRBV5-1, TRBJ2-7)
CASSRGESLYEQYF

SEQ ID NO: 98345 - protein, 13 aa, Homo sapiens
  CDR3 for alpha chain variable domain of TCR clone 49173 (TRAV2, TRAJ40)
CAVVTPGTYKYIF

SEQ ID NO: 98346 - protein, 17 aa, Homo sapiens
  CDR3 for beta chain variable domain of TCR clone 49173 (TRBV7-3, TRBJ2-3)
CASSLMKRMRGADTQYF

SEQ ID NO: 98347 - protein, 15 aa, Homo sapiens
  CDR3 for alpha chain variable domain of TCR clone 49174 (TRAV3, TRAJ5)
CAVRDLDTGRRALTF

SEQ ID NO: 98348 - protein, 14 aa, Homo sapiens
  CDR3 for beta chain variable domain of TCR clone 49174 (TRBV4-2, TRBJ2-1)
CASGLDRAYNEQFF

SEQ ID NO: 98349 - protein, 17 aa, Homo sapiens
  CDR3 for alpha chain variable domain of TCR clone 49175 (TRAV12-2, TRAJ48)
CASNEKLTFGTGTRLTI

SEQ ID NO: 98350 - protein, 14 aa, Homo sapiens
  CDR3 for beta chain variable domain of TCR clone 49175 (TRBV19, TRBJ2-1)
CASPTFVLSGEQFF

SEQ ID NO: 98351 - protein, 13 aa, Homo sapiens
  CDR3 for alpha chain variable domain of TCR clone 49176 (TRAV13-1, TRAJ11)
CAASIRGYSTLTF

SEQ ID NO: 98352 - protein, 17 aa, Homo sapiens
  CDR3 for beta chain variable domain of TCR clone 49176 (TRBV4-3, TRBJ1-2)
CASSSRLQAGGSVGYTL

SEQ ID NO: 98353 - protein, 13 aa, Homo sapiens
  CDR3 for alpha chain variable domain of TCR clone 49177 (TRAV8-3, TRAJ21)
CAVGAYNFNKFYF

SEQ ID NO: 98354 - protein, 16 aa, Homo sapiens
  CDR3 for beta chain variable domain of TCR clone 49177 (TRBV19, TRBJ2-1)
CASSMGGGSAYNEQFF

SEQ ID NO: 98355 - protein, 13 aa, Homo sapiens
  CDR3 for alpha chain variable domain of TCR clone 49178 (TRAV35, TRAJ44)
CAGLSGTASKLTF

SEQ ID NO: 98356 - protein, 17 aa, Homo sapiens
  CDR3 for beta chain variable domain of TCR clone 49178 (TRBV7-8, TRBJ1-2)
CASGLRPLQGHLYGYTF

SEQ ID NO: 98357 - protein, 13 aa, Homo sapiens
  CDR3 for alpha chain variable domain of TCR clone 49179 (TRAV38-1, TRAJ48)
CAFMKQGNEKLTF

SEQ ID NO: 98358 - protein, 14 aa, Homo sapiens
  CDR3 for beta chain variable domain of TCR clone 49179 (TRBV19, TRBJ2-6)
CASSMNPGANVLTF

SEQ ID NO: 98359 - protein, 15 aa, Homo sapiens
  CDR3 for alpha chain variable domain of TCR clone 49180 (TRAV3, TRAJ22)
CAVRDRGGSARQLTF

SEQ ID NO: 98360 - protein, 12 aa, Homo sapiens
  CDR3 for beta chain variable domain of TCR clone 49180 (TRBV14, TRBJ2-5)
CASSQLKETQYF

SEQ ID NO: 98361 - protein, 15 aa, Homo sapiens
  CDR3 for alpha chain variable domain of TCR clone 49181 (TRAV35, TRAJ40)
FAGQLGTSGTYKYIF

SEQ ID NO: 98362 - protein, 14 aa, Homo sapiens
  CDR3 for beta chain variable domain of TCR clone 49181 (TRBV7-3, TRBJ2-1)
CASSLAGGTNEQFF

SEQ ID NO: 98363 - protein, 16 aa, Homo sapiens
  CDR3 for alpha chain variable domain of TCR clone 49182 (TRAV26-2, TRAJ57)
CILRDVGSGGSEKLVF

SEQ ID NO: 98364 - protein, 13 aa, Homo sapiens
  CDR3 for beta chain variable domain of TCR clone 49182 (TRBV18, TRBJ2-3)
CASSPGVTDTQHF

SEQ ID NO: 98365 - protein, 18 aa, Homo sapiens
  CDR3 for alpha chain variable domain of TCR clone 49183 (TRAV9-2, TRAJ52)
CALSRHNAGGTSYGTLTF

SEQ ID NO: 98366 - protein, 13 aa, Homo sapiens
  CDR3 for beta chain variable domain of TCR clone 49183 (TRBV7-9, TRBJ1-2)
CASSLKQNYGYTF

SEQ ID NO: 98367 - protein, 15 aa, Homo sapiens
  CDR3 for alpha chain variable domain of TCR clone 49184 (TRAV3, TRAJ4)
CAQNMLSGGYNKLIF

SEQ ID NO: 98368 - protein, 16 aa, Homo sapiens
  CDR3 for beta chain variable domain of TCR clone 49184 (TRBV3-1, TRBJ1-6)
CASSQEFQGSYSPLHF

SEQ ID NO: 98369 - protein, 12 aa, Homo sapiens
  CDR3 for alpha chain variable domain of TCR clone 49185 (TRAV3, TRAJ20)
CAVRDPDYKLSF

SEQ ID NO: 98370 - protein, 14 aa, Homo sapiens
  CDR3 for beta chain variable domain of TCR clone 49185 (TRBV4-2, TRBJ2-1)
CASGLDRAYNVQFF

SEQ ID NO: 98371 - protein, 13 aa, Homo sapiens
  CDR3 for alpha chain variable domain of TCR clone 49186 (TRAV13-1, TRAJ39)
CAASIWAGNMLTF

SEQ ID NO: 98372 - protein, 15 aa, Homo sapiens
  CDR3 for beta chain variable domain of TCR clone 49186 (TRBV7-9, TRBJ1-1)
CASSLREQGGTEAFF

SEQ ID NO: 98373 - protein, 15 aa, Homo sapiens
  CDR3 for alpha chain variable domain of TCR clone 49187 (TRAV12-1, TRAJ44)
CVADLPTGTASTLTF

SEQ ID NO: 98374 - protein, 13 aa, Homo sapiens
  CDR3 for beta chain variable domain of TCR clone 49187 (TRBV6-5, TRBJ2-5)
CASSPQGGETQYF

SEQ ID NO: 98375 - protein, 14 aa, Homo sapiens
  CDR3 for alpha chain variable domain of TCR clone 49188 (TRAV1-2, TRAJ16)
CAVNRFSDGQKLLF

SEQ ID NO: 98376 - protein, 14 aa, Homo sapiens
  CDR3 for beta chain variable domain of TCR clone 49188 (TRBV19, TRBJ1-5)
CASSIGGGGQPQHF

SEQ ID NO: 98377 - protein, 12 aa, Homo sapiens
  CDR3 for alpha chain variable domain of TCR clone 49189 (TRAV13-1, TRAJ3)
CEATGVQQCFQD

SEQ ID NO: 98378 - protein, 16 aa, Homo sapiens
  CDR3 for beta chain variable domain of TCR clone 49189 (TRBV7-3, TRBJ2-2)
CASSLKRGTLSGELFF

SEQ ID NO: 98379 - protein, 16 aa, Homo sapiens
  CDR3 for alpha chain variable domain of TCR clone 49190 (TRAV14/DV4, TRAJ15)
RAMREGPAQAGTALIF

SEQ ID NO: 98380 - protein, 12 aa, Homo sapiens
  CDR3 for beta chain variable domain of TCR clone 49190 (TRBV28, TRBJ2-6)
CAIQAGANVLTF

SEQ ID NO: 98381 - protein, 14 aa, Homo sapiens
  CDR3 for alpha chain variable domain of TCR clone 49191 (TRAV3, TRAJ8)
CAVSLNTGFQKLVF

SEQ ID NO: 98382 - protein, 14 aa, Homo sapiens
  CDR3 for beta chain variable domain of TCR clone 49191 (TRBV6-6, TRBJ1-5)
CASVDSGSNQPQHF

SEQ ID NO: 98383 - protein, 14 aa, Homo sapiens
  CDR3 for alpha chain variable domain of TCR clone 49192 (TRAV12-3, TRAJ10)
SHLPLTGGGNKLTF

SEQ ID NO: 98384 - protein, 14 aa, Homo sapiens
  CDR3 for beta chain variable domain of TCR clone 49192 (TRBV28, TRBJ1-4)
CASSLSRTNEKLFF

SEQ ID NO: 98385 - protein, 14 aa, Homo sapiens
  CDR3 for alpha chain variable domain of TCR clone 49193 (TRAV8-3, TRAJ4)
CAVGASGGYNKLIF

SEQ ID NO: 98386 - protein, 15 aa, Homo sapiens
  CDR3 for beta chain variable domain of TCR clone 49193 (TRBV6-5, TRBJ2-1)
CASSYDAGAGNEQFF

SEQ ID NO: 98387 - protein, 15 aa, Homo sapiens
  CDR3 for alpha chain variable domain of TCR clone 49194 (TRAV12-1, TRAJ44)
CVVFVNTGTASKLTF

SEQ ID NO: 98388 - protein, 14 aa, Homo sapiens
  CDR3 for beta chain variable domain of TCR clone 49194 (TRBV7-6, TRBJ2-3)
CASSLGTVTDTQYF

SEQ ID NO: 98389 - protein, 14 aa, Homo sapiens
  CDR3 for alpha chain variable domain of TCR clone 49195 (TRAV13-2, TRAJ49)
CAEILSNTGNQFYF

SEQ ID NO: 98390 - protein, 16 aa, Homo sapiens
  CDR3 for beta chain variable domain of TCR clone 49195 (TRBV28, TRBJ2-1)
CASSSPEYPRDNEQFF

SEQ ID NO: 98391 - protein, 15 aa, Homo sapiens
  CDR3 for alpha chain variable domain of TCR clone 49196 (TRAV29/DV5, TRAJ24)
CAASGATDSWGKFQF

SEQ ID NO: 98392 - protein, 14 aa, Homo sapiens
  CDR3 for beta chain variable domain of TCR clone 49196 (TRBV25-1, TRBJ1-1)
CASTHLGGNTEAFF

SEQ ID NO: 98393 - protein, 14 aa, Homo sapiens
  CDR3 for alpha chain variable domain of TCR clone 49197 (TRAV26-1, TRAJ22)
CIVRVYGSARQLTF

SEQ ID NO: 98394 - protein, 17 aa, Homo sapiens
  CDR3 for beta chain variable domain of TCR clone 49197 (TRBV7-3, TRBJ2-3)
CASSPGGLAGFGGTQYF

SEQ ID NO: 98395 - protein, 14 aa, Homo sapiens
  CDR3 for alpha chain variable domain of TCR clone 49198 (TRAV23/DV6, TRAJ37)
CAASTSSNTGKLIF

SEQ ID NO: 98396 - protein, 17 aa, Homo sapiens
  CDR3 for beta chain variable domain of TCR clone 49198 (TRBV7-9, TRBJ2-1)
CASSLLWGQGYNNEQFF

SEQ ID NO: 98397 - protein, 15 aa, Homo sapiens
  CDR3 for alpha chain variable domain of TCR clone 49199 (TRAV23/DV6, TRAJ17)
CARGSCRQQANFWRR

SEQ ID NO: 98398 - protein, 14 aa, Homo sapiens
  CDR3 for beta chain variable domain of TCR clone 49199 (TRBV7-2, TRBJ1-2)
CASSQTGSTYGYTF

SEQ ID NO: 98399 - protein, 11 aa, Homo sapiens
  CDR3 for alpha chain variable domain of TCR clone 49200 (TRAV17, TRAJ9)
CATTGGFKTIF

SEQ ID NO: 98400 - protein, 14 aa, Homo sapiens
  CDR3 for beta chain variable domain of TCR clone 49200 (TRBV7-9, TRBJ2-2)
CASSGLADTGEMFF

SEQ ID NO: 98401 - protein, 16 aa, Homo sapiens
  CDR3 for alpha chain variable domain of TCR clone 49201 (TRAV22, TRAJ45)
CAVERGKRRGADGLTF

SEQ ID NO: 98402 - protein, 13 aa, Homo sapiens
  CDR3 for beta chain variable domain of TCR clone 49201 (TRBV27, TRBJ1-1)
CASSLSIGAEAFF

SEQ ID NO: 98403 - protein, 13 aa, Homo sapiens
  CDR3 for alpha chain variable domain of TCR clone 49202 (TRAV8-6, TRAJ49)
CAVITNTGNQFYF

SEQ ID NO: 98404 - protein, 17 aa, Homo sapiens
  CDR3 for beta chain variable domain of TCR clone 49202 (TRBV20-1, TRBJ2-1)
CSASSSGLAGSYNEQFF

SEQ ID NO: 98405 - protein, 10 aa, Homo sapiens
  CDR3 for alpha chain variable domain of TCR clone 49203 (TRAV1-2, TRAJ20)
CALNDYKLSF

SEQ ID NO: 98406 - protein, 12 aa, Homo sapiens
  CDR3 for beta chain variable domain of TCR clone 49203 (TRBV29-1, TRBJ2-3)
CSVTGGADTQYF

SEQ ID NO: 98407 - protein, 14 aa, Homo sapiens
  CDR3 for alpha chain variable domain of TCR clone 49204 (TRAV38-1, TRAJ43)
CTFMRHNNNNDMRF

SEQ ID NO: 98408 - protein, 17 aa, Homo sapiens
  CDR3 for beta chain variable domain of TCR clone 49204 (TRBV7-7, TRBJ1-4)
CASSLVGQGASNEKLFF

SEQ ID NO: 98409 - protein, 13 aa, Homo sapiens
  CDR3 for alpha chain variable domain of TCR clone 49205 (TRAV16, TRAJ34)
CALRTWNTDKLIF

SEQ ID NO: 98410 - protein, 14 aa, Homo sapiens
  CDR3 for beta chain variable domain of TCR clone 49205 (TRBV7-9, TRBJ2-5)
CASSLDTAQETQYF

SEQ ID NO: 98411 - protein, 15 aa, Homo sapiens
  CDR3 for alpha chain variable domain of TCR clone 49206 (TRAV21, TRAJ53)
CATLNSGGSNYKLTF

SEQ ID NO: 98412 - protein, 14 aa, Homo sapiens
  CDR3 for beta chain variable domain of TCR clone 49206 (TRBV18, TRBJ2-7)
CASSPRGGAYEQYF

SEQ ID NO: 98413 - protein, 18 aa, Homo sapiens
  CDR3 for alpha chain variable domain of TCR clone 49207 (TRAV29/DV5, TRAJ26)
CSVLLCSKHKPEGQNFVF

SEQ ID NO: 98414 - protein, 17 aa, Homo sapiens
  CDR3 for beta chain variable domain of TCR clone 49207 (TRBV20-1, TRBJ2-2)
CSASGSGQGGLTGELFF

SEQ ID NO: 98415 - protein, 14 aa, Homo sapiens
  CDR3 for alpha chain variable domain of TCR clone 49208 (TRAV20, TRAJ29)
CAVQAWVGNTPLVF

SEQ ID NO: 98416 - protein, 13 aa, Homo sapiens
  CDR3 for beta chain variable domain of TCR clone 49208 (TRBV12-5, TRBJ2-3)
CASGDRQSDTQYF

SEQ ID NO: 98417 - protein, 15 aa, Homo sapiens
  CDR3 for alpha chain variable domain of TCR clone 49209 (TRAV29/DV5, TRAJ29)
CAASERSSGNTPLVF

SEQ ID NO: 98418 - protein, 17 aa, Homo sapiens
  CDR3 for beta chain variable domain of TCR clone 49209 (TRBV4-1, TRBJ1-4)
CASSQEGPRGVEENLFF

SEQ ID NO: 98419 - protein, 12 aa, Homo sapiens
  CDR3 for alpha chain variable domain of TCR clone 49210 (TRAV8-3, TRAJ26)
CAGDNYGQNFVF

SEQ ID NO: 98420 - protein, 15 aa, Homo sapiens
  CDR3 for beta chain variable domain of TCR clone 49210 (TRBV11-2, TRBJ2-1)
CASSLETSGLNEQFF

SEQ ID NO: 98421 - protein, 12 aa, Homo sapiens
  CDR3 for alpha chain variable domain of TCR clone 49211 (TRAV12-3, TRAJ40)
CAVSSGTYKYIF

SEQ ID NO: 98422 - protein, 15 aa, Homo sapiens
  CDR3 for beta chain variable domain of TCR clone 49211 (TRBV7-3, TRBJ2-2)
CASSETGQGTGELFF

SEQ ID NO: 98423 - protein, 12 aa, Homo sapiens
  CDR3 for alpha chain variable domain of TCR clone 49212 (TRAV23/DV6, TRAJ17)
CARGSCRQQANF

SEQ ID NO: 98424 - protein, 14 aa, Homo sapiens
  CDR3 for beta chain variable domain of TCR clone 49212 (TRBV7-2, TRBJ1-2)
CASSQTGSTYGYTL

SEQ ID NO: 98425 - protein, 19 aa, Homo sapiens
  CDR3 for alpha chain variable domain of TCR clone 49213 (TRAV2, TRAJ20)
ILQVREADAAAYRDCKLSF

SEQ ID NO: 98426 - protein, 13 aa, Homo sapiens
  CDR3 for beta chain variable domain of TCR clone 49213 (TRBV15, TRBJ1-6)
CATSGGLNSPLHF

SEQ ID NO: 98427 - protein, 16 aa, Homo sapiens
  CDR3 for alpha chain variable domain of TCR clone 49214 (TRAV3, TRAJ27)
CAVRDPQGTNAGKSTF

SEQ ID NO: 98428 - protein, 16 aa, Homo sapiens
  CDR3 for beta chain variable domain of TCR clone 49214 (TRBV19, TRBJ2-1)
CASSKAGPSSYNEQFF

SEQ ID NO: 98429 - protein, 14 aa, Homo sapiens
  CDR3 for alpha chain variable domain of TCR clone 49215 (TRAV38-1, TRAJ29)
CAFITSSGNTPLVF

SEQ ID NO: 98430 - protein, 14 aa, Homo sapiens
  CDR3 for beta chain variable domain of TCR clone 49215 (TRBV18, TRBJ2-7)
CASSPRGGAYEQYF

SEQ ID NO: 98431 - protein, 15 aa, Homo sapiens
  CDR3 for alpha chain variable domain of TCR clone 49216 (TRAV2, TRAJ22)
CAVPSRGGSARQLTF

SEQ ID NO: 98432 - protein, 11 aa, Homo sapiens
  CDR3 for beta chain variable domain of TCR clone 49216 (TRBV27, TRBJ2-3)
CASSLGDTQHF

SEQ ID NO: 98433 - protein, 15 aa, Homo sapiens
  CDR3 for alpha chain variable domain of TCR clone 49217 (TRAV3, TRAJ4)
CAVRDGTGGYNKLIF

SEQ ID NO: 98434 - protein, 12 aa, Homo sapiens
  CDR3 for beta chain variable domain of TCR clone 49217 (TRBV27, TRBJ2-2)
CASSSSGVSNTG

SEQ ID NO: 98435 - protein, 16 aa, Homo sapiens
  CDR3 for alpha chain variable domain of TCR clone 49218 (TRAV16, TRAJ52)
CALSAAGGTSYGNLTF

SEQ ID NO: 98436 - protein, 12 aa, Homo sapiens
  CDR3 for beta chain variable domain of TCR clone 49218 (TRBV12-4, TRBJ1-3)
CASSFSGNTIYF

SEQ ID NO: 98437 - protein, 13 aa, Homo sapiens
  CDR3 for alpha chain variable domain of TCR clone 49219 (TRAV8-3, TRAJ6)
CAVGSGGSYIPTF

SEQ ID NO: 98438 - protein, 14 aa, Homo sapiens
  CDR3 for beta chain variable domain of TCR clone 49219 (TRBV11-2, TRBJ1-1)
CASSTQRGGTEAFF

SEQ ID NO: 98439 - protein, 13 aa, Homo sapiens
  CDR3 for alpha chain variable domain of TCR clone 49220 (TRAV13-1, TRAJ21)
CAASIYNFNKFYF

SEQ ID NO: 98440 - protein, 18 aa, Homo sapiens
  CDR3 for beta chain variable domain of TCR clone 49220 (TRBV4-1, TRBJ1-5)
CASSQDPRGQGLNQPQHF

SEQ ID NO: 98441 - protein, 15 aa, Homo sapiens
  CDR3 for alpha chain variable domain of TCR clone 49221 (TRAV13-2, TRAJ13)
CAEPFNSGGYQKVTF

SEQ ID NO: 98442 - protein, 15 aa, Homo sapiens
  CDR3 for beta chain variable domain of TCR clone 49221 (TRBV25-1, TRBJ1-4)
CASSKRIATNEKLFF

SEQ ID NO: 98443 - protein, 16 aa, Homo sapiens
  CDR3 for alpha chain variable domain of TCR clone 49222 (TRAV16, TRAJ52)
CALSAAGGTSYGKLTF

SEQ ID NO: 98444 - protein, 14 aa, Homo sapiens
  CDR3 for beta chain variable domain of TCR clone 49222 (TRBV7-7, TRBJ2-2)
CASSMGQNTGELFF

SEQ ID NO: 98445 - protein, 13 aa, Homo sapiens
  CDR3 for alpha chain variable domain of TCR clone 49223 (TRAV12-1, TRAJ33)
CGDAPDSNYQLIW

SEQ ID NO: 98446 - protein, 12 aa, Homo sapiens
  CDR3 for beta chain variable domain of TCR clone 49223 (TRBV11-2, TRBJ2-2)
CASSLGGGGLFF

SEQ ID NO: 98447 - protein, 17 aa, Homo sapiens
  CDR3 for alpha chain variable domain of TCR clone 49224 (TRAV38-1, TRAJ45)
CAFMRSHSGGGADGLPF

SEQ ID NO: 98448 - protein, 15 aa, Homo sapiens
  CDR3 for beta chain variable domain of TCR clone 49224 (TRBV7-2, TRBJ2-3)
CASSLVVRGPDTQYF

SEQ ID NO: 98449 - protein, 14 aa, Homo sapiens
  CDR3 for alpha chain variable domain of TCR clone 49225 (TRAV12-3, TRAJ10)
SHLPLTGGGNKLTF

SEQ ID NO: 98450 - protein, 16 aa, Homo sapiens
  CDR3 for beta chain variable domain of TCR clone 49225 (TRBV28, TRBJ1-5)
CASSLTGQGWNQPQHF

SEQ ID NO: 98451 - protein, 12 aa, Homo sapiens
  CDR3 for alpha chain variable domain of TCR clone 49226 (TRAV13-1, TRAJ15)
CAASQAGTALIF

SEQ ID NO: 98452 - protein, 18 aa, Homo sapiens
  CDR3 for beta chain variable domain of TCR clone 49226 (TRBV7-9, TRBJ2-3)
CDSSLPINGQISTDTQYF

SEQ ID NO: 98453 - protein, 13 aa, Homo sapiens
  CDR3 for alpha chain variable domain of TCR clone 49227 (TRAV12-2, TRAJ15)
CAVFNQAGTALIF

SEQ ID NO: 98454 - protein, 23 aa, Homo sapiens
  CDR3 for beta chain variable domain of TCR clone 49227 (TRBV7-8, TRBJ1-5)
RGTPPCISVPAAGGGGADQPQHF

SEQ ID NO: 98455 - protein, 14 aa, Homo sapiens
  CDR3 for alpha chain variable domain of TCR clone 49228 (TRAV12-3, TRAJ6)
CATSATGGSYIPTF

SEQ ID NO: 98456 - protein, 16 aa, Homo sapiens
  CDR3 for beta chain variable domain of TCR clone 49228 (TRBV4-2, TRBJ2-1)
CASSPRAGQGANEQFF

SEQ ID NO: 98457 - protein, 15 aa, Homo sapiens
  CDR3 for alpha chain variable domain of TCR clone 49229 (TRAV12-2, TRAJ52)
CAVTSGGTSYGKLTF

SEQ ID NO: 98458 - protein, 15 aa, Homo sapiens
  CDR3 for beta chain variable domain of TCR clone 49229 (TRBV7-2, TRBJ2-1)
CASSPGFIGGNEQFF

SEQ ID NO: 98459 - protein, 13 aa, Homo sapiens
  CDR3 for alpha chain variable domain of TCR clone 49230 (TRAV17, TRAJ9)
CATDYTGGFKTIF

SEQ ID NO: 98460 - protein, 14 aa, Homo sapiens
  CDR3 for beta chain variable domain of TCR clone 49230 (TRBV19, TRBJ2-5)
CASSMTGQHETQYF

SEQ ID NO: 98461 - protein, 14 aa, Homo sapiens
  CDR3 for alpha chain variable domain of TCR clone 49231 (TRAV26-1, TRAJ6)
CIVSPVGGSYIPTF

SEQ ID NO: 98462 - protein, 16 aa, Homo sapiens
  CDR3 for beta chain variable domain of TCR clone 49231 (TRBV4-1, TRBJ2-5)
CASSSGLAGVWGTQYF

SEQ ID NO: 98463 - protein, 12 aa, Homo sapiens
  CDR3 for alpha chain variable domain of TCR clone 49232 (TRAV16, TRAJ34)
CAHSYNTDKLIF

SEQ ID NO: 98464 - protein, 14 aa, Homo sapiens
  CDR3 for beta chain variable domain of TCR clone 49232 (TRBV25-1, TRBJ1-1)
CASTHLGGNTEAFF

SEQ ID NO: 98465 - protein, 14 aa, Homo sapiens
  CDR3 for alpha chain variable domain of TCR clone 49233 (TRAV1-2, TRAJ16)
CAVNRFSDGQKLLF

SEQ ID NO: 98466 - protein, 14 aa, Homo sapiens
  CDR3 for beta chain variable domain of TCR clone 49233 (TRBV28, TRBJ1-1)
CASSSEQGYTEAFF

SEQ ID NO: 98467 - protein, 14 aa, Homo sapiens
  CDR3 for alpha chain variable domain of TCR clone 49234 (TRAV38-1, TRAJ45)
CAYYSGGGADGLTF

SEQ ID NO: 98468 - protein, 20 aa, Homo sapiens
  CDR3 for beta chain variable domain of TCR clone 49234 (TRBV28, TRBJ2-1)
CASTPIGRSPGLAGGNEHLF

SEQ ID NO: 98469 - protein, 13 aa, Homo sapiens
  CDR3 for alpha chain variable domain of TCR clone 49235 (TRAV22, TRAJ49)
CAVGREAVTSSIL

SEQ ID NO: 98470 - protein, 12 aa, Homo sapiens
  CDR3 for beta chain variable domain of TCR clone 49235 (TRBV5-5, TRBJ2-5)
CASSYFGETQYF

SEQ ID NO: 98471 - protein, 15 aa, Homo sapiens
  CDR3 for alpha chain variable domain of TCR clone 49236 (TRAV26-1, TRAJ29)
CIVRVEGSGNTPLVF

SEQ ID NO: 98472 - protein, 18 aa, Homo sapiens
  CDR3 for beta chain variable domain of TCR clone 49236 (TRBV20-1, TRBJ2-6)
CSAETTPTHGSGANVLTF

SEQ ID NO: 98473 - protein, 15 aa, Homo sapiens
  CDR3 for alpha chain variable domain of TCR clone 49237 (TRAV8-3, TRAJ11)
CAVGLLNAGYSTLTF

SEQ ID NO: 98474 - protein, 16 aa, Homo sapiens
  CDR3 for beta chain variable domain of TCR clone 49237 (TRBV7-9, TRBJ1-2)
CASSLGFSSGEDGYTF

SEQ ID NO: 98475 - protein, 15 aa, Homo sapiens
  CDR3 for alpha chain variable domain of TCR clone 49238 (TRAV21, TRAJ38)
CAVRQDAGNNRKLIW

SEQ ID NO: 98476 - protein, 16 aa, Homo sapiens
  CDR3 for beta chain variable domain of TCR clone 49238 (TRBV4-2, TRBJ1-1)
CASRPIDGGGDTEAFF

SEQ ID NO: 98477 - protein, 12 aa, Homo sapiens
  CDR3 for alpha chain variable domain of TCR clone 49239 (TRAV12-2, TRAJ43)
CAVNVNNNDMRF

SEQ ID NO: 98478 - protein, 14 aa, Homo sapiens
  CDR3 for beta chain variable domain of TCR clone 49239 (TRBV7-2, TRBJ2-7)
CASSFLERVYEQYF

SEQ ID NO: 98479 - protein, 16 aa, Homo sapiens
  CDR3 for alpha chain variable domain of TCR clone 49240 (TRAV30, TRAJ24)
CGTEIVDADSWGKFQF

SEQ ID NO: 98480 - protein, 14 aa, Homo sapiens
  CDR3 for beta chain variable domain of TCR clone 49240 (TRBV7-9, TRBJ2-4)
CTSSLAMGGNIQYF

SEQ ID NO: 98481 - protein, 15 aa, Homo sapiens
  CDR3 for alpha chain variable domain of TCR clone 49241 (TRAV17, TRAJ22)
YATVAPSGSARQLTF

SEQ ID NO: 98482 - protein, 14 aa, Homo sapiens
  CDR3 for beta chain variable domain of TCR clone 49241 (TRBV4-1, TRBJ2-2)
CASSQAVNTGELFF

SEQ ID NO: 98483 - protein, 12 aa, Homo sapiens
  CDR3 for alpha chain variable domain of TCR clone 49242 (TRAV13-2, TRAJ23)
CAERHRGGKLIF

SEQ ID NO: 98484 - protein, 14 aa, Homo sapiens
  CDR3 for beta chain variable domain of TCR clone 49242 (TRBV24-1, TRBJ1-1)
CATSIPRGDTEAFF

SEQ ID NO: 98485 - protein, 16 aa, Homo sapiens
  CDR3 for alpha chain variable domain of TCR clone 49243 (TRAV17, TRAJ52)
CATGIIGGTSHGKLTF

SEQ ID NO: 98486 - protein, 14 aa, Homo sapiens
  CDR3 for beta chain variable domain of TCR clone 49243 (TRBV7-3, TRBJ2-2)
CASSSGGYTGELLF

SEQ ID NO: 98487 - protein, 16 aa, Homo sapiens
  CDR3 for alpha chain variable domain of TCR clone 49244 (TRAV30, TRAJ24)
CGKEIVDDDSWGKFQF

SEQ ID NO: 98488 - protein, 14 aa, Homo sapiens
  CDR3 for beta chain variable domain of TCR clone 49244 (TRBV12-5, TRBJ2-5)
CASGSRTHQETQYF

SEQ ID NO: 98489 - protein, 12 aa, Homo sapiens
  CDR3 for alpha chain variable domain of TCR clone 49245 (TRAV13-2, TRAJ23)
CAERHRGGKLIF

SEQ ID NO: 98490 - protein, 13 aa, Homo sapiens
  CDR3 for beta chain variable domain of TCR clone 49245 (TRBV12-4, TRBJ2-7)
CASSLERVREQYF

SEQ ID NO: 98491 - protein, 15 aa, Homo sapiens
  CDR3 for alpha chain variable domain of TCR clone 49246 (TRAV21, TRAJ53)
CATLNSGGSNYRLTF

SEQ ID NO: 98492 - protein, 13 aa, Homo sapiens
  CDR3 for beta chain variable domain of TCR clone 49246 (TRBV4-1, TRBJ2-2)
CASSQENTGELFF

SEQ ID NO: 98493 - protein, 12 aa, Homo sapiens
  CDR3 for alpha chain variable domain of TCR clone 49247 (TRAV17, TRAJ30)
CVPERRDDKTIF

SEQ ID NO: 98494 - protein, 14 aa, Homo sapiens
  CDR3 for beta chain variable domain of TCR clone 49247 (TRBV7-7, TRBJ2-2)
CASSRDRSTGELFF

SEQ ID NO: 98495 - protein, 12 aa, Homo sapiens
  CDR3 for alpha chain variable domain of TCR clone 49248 (TRAV2, TRAJ33)
CAVPDSNYQLIW

SEQ ID NO: 98496 - protein, 18 aa, Homo sapiens
  CDR3 for beta chain variable domain of TCR clone 49248 (TRBV7-3, TRBJ2-3)
CASSSTRTYPGSTDTQYF

SEQ ID NO: 98497 - protein, 10 aa, Homo sapiens
  CDR3 for alpha chain variable domain of TCR clone 49249 (TRAV12-1, TRAJ37)
ARGNTGKLIV

SEQ ID NO: 98498 - protein, 15 aa, Homo sapiens
  CDR3 for beta chain variable domain of TCR clone 49249 (TRBV7-2, TRBJ2-3)
CASSLEQGGTDTQYF

SEQ ID NO: 98499 - protein, 15 aa, Homo sapiens
  CDR3 for alpha chain variable domain of TCR clone 49250 (TRAV8-3, TRAJ32)
CAVGPYGGTTNKLIF

SEQ ID NO: 98500 - protein, 14 aa, Homo sapiens
  CDR3 for beta chain variable domain of TCR clone 49250 (TRBV29-1, TRBJ2-2)
CSVLAETNTGELFF

SEQ ID NO: 98501 - protein, 20 aa, Homo sapiens
  CDR3 for alpha chain variable domain of TCR clone 49251 (TRAV12-3, TRAJ41)
SLFIRGSQPSDSATPEALNF

SEQ ID NO: 98502 - protein, 15 aa, Homo sapiens
  CDR3 for beta chain variable domain of TCR clone 49251 (TRBV5-1, TRBJ2-7)
CASSLDLTSSYEQYF

SEQ ID NO: 98503 - protein, 13 aa, Homo sapiens
  CDR3 for alpha chain variable domain of TCR clone 49252 (TRAV21, TRAJ15)
CAVANQAGTALIF

SEQ ID NO: 98504 - protein, 17 aa, Homo sapiens
  CDR3 for beta chain variable domain of TCR clone 49252 (TRBV4-1, TRBJ2-7)
CASSRDPLGVRGGEQYF

SEQ ID NO: 98505 - protein, 15 aa, Homo sapiens
  CDR3 for alpha chain variable domain of TCR clone 49253 (TRAV3, TRAJ33)
CAVRDLMDSNYQLIW

SEQ ID NO: 98506 - protein, 17 aa, Homo sapiens
  CDR3 for beta chain variable domain of TCR clone 49253 (TRBV13, TRBJ2-3)
CASSLSRVAGGRNTQYF

SEQ ID NO: 98507 - protein, 12 aa, Homo sapiens
  CDR3 for alpha chain variable domain of TCR clone 49254 (TRAV29/DV5, TRAJ43)
CAAPYNNNDMRF

SEQ ID NO: 98508 - protein, 15 aa, Homo sapiens
  CDR3 for beta chain variable domain of TCR clone 49254 (TRBV18, TRBJ1-6)
CASSRIQGRNSPIHF

SEQ ID NO: 98509 - protein, 11 aa, Homo sapiens
  CDR3 for alpha chain variable domain of TCR clone 49255 (TRAV17, TRAJ9)
CGFTGGFKPIF

SEQ ID NO: 98510 - protein, 14 aa, Homo sapiens
  CDR3 for beta chain variable domain of TCR clone 49255 (TRBV7-9, TRBJ2-2)
CASSLVQDTGELFF

SEQ ID NO: 98511 - protein, 18 aa, Homo sapiens
  CDR3 for alpha chain variable domain of TCR clone 49256 (TRAV12-3, TRAJ52)
CAMSVGGAGGTSYGKLTF

SEQ ID NO: 98512 - protein, 14 aa, Homo sapiens
  CDR3 for beta chain variable domain of TCR clone 49256 (TRBV20-1, TRBJ2-1)
CSAQIGGSANEQFF

SEQ ID NO: 98513 - protein, 11 aa, Homo sapiens
  CDR3 for alpha chain variable domain of TCR clone 49257 (TRAV2, TRAJ23)
CAVEARGKLIF

SEQ ID NO: 98514 - protein, 14 aa, Homo sapiens
  CDR3 for beta chain variable domain of TCR clone 49257 (TRBV2, TRBJ2-3)
CASSEGQNTDTQYF

SEQ ID NO: 98515 - protein, 12 aa, Homo sapiens
  CDR3 for alpha chain variable domain of TCR clone 49258 (TRAV13-1, TRAJ34)
CAASKGTDKLIF

SEQ ID NO: 98516 - protein, 16 aa, Homo sapiens
  CDR3 for beta chain variable domain of TCR clone 49258 (TRBV6-3, TRBJ1-1)
CASTDLGTVPNTEAFF

SEQ ID NO: 98517 - protein, 14 aa, Homo sapiens
  CDR3 for alpha chain variable domain of TCR clone 49259 (TRAV1-2, TRAJ16)
CAVNRFSDGQKLLF

SEQ ID NO: 98518 - protein, 16 aa, Homo sapiens
  CDR3 for beta chain variable domain of TCR clone 49259 (TRBV20-1, TRBJ1-4)
SSAPGQGLLTNEKLFF

SEQ ID NO: 98519 - protein, 17 aa, Homo sapiens
  CDR3 for alpha chain variable domain of TCR clone 49260 (TRAV14/DV4, TRAJ4)
CAMREASGRGGYNKLIF

SEQ ID NO: 98520 - protein, 16 aa, Homo sapiens
  CDR3 for beta chain variable domain of TCR clone 49260 (TRBV3-1, TRBJ2-5)
CASSQDWASGQETQYF

SEQ ID NO: 98521 - protein, 16 aa, Homo sapiens
  CDR3 for alpha chain variable domain of TCR clone 49261 (TRAV4, TRAJ9)
CLVGDPNRPGGFKTIF

SEQ ID NO: 98522 - protein, 13 aa, Homo sapiens
  CDR3 for beta chain variable domain of TCR clone 49261 (TRBV5-5, TRBJ1-2)
CASSFWRGEDDTF

SEQ ID NO: 98523 - protein, 17 aa, Homo sapiens
  CDR3 for alpha chain variable domain of TCR clone 49262 (TRAV23/DV6, TRAJ57)
CAASSTLSQGGSEKLVF

SEQ ID NO: 98524 - protein, 14 aa, Homo sapiens
  CDR3 for beta chain variable domain of TCR clone 49262 (TRBV25-1, TRBJ1-1)
CASAHLGGNTEAFF

SEQ ID NO: 98525 - protein, 16 aa, Homo sapiens
  CDR3 for alpha chain variable domain of TCR clone 49263 (TRAV20, TRAJ52)
CAVLRAGGTSYGKLTF

SEQ ID NO: 98526 - protein, 16 aa, Homo sapiens
  CDR3 for beta chain variable domain of TCR clone 49263 (TRBV6-6, TRBJ2-7)
CASIETGTNSSYEQYF

SEQ ID NO: 98527 - protein, 15 aa, Homo sapiens
  CDR3 for alpha chain variable domain of TCR clone 49264 (TRAV3, TRAJ4)
CAVRDGTGGYNKLIF

SEQ ID NO: 98528 - protein, 13 aa, Homo sapiens
  CDR3 for beta chain variable domain of TCR clone 49264 (TRBV12-5, TRBJ2-3)
CASGDRQSDTQYF

SEQ ID NO: 98529 - protein, 12 aa, Homo sapiens
  CDR3 for alpha chain variable domain of TCR clone 49265 (TRAV13-2, TRAJ23)
CAERHRGGKLSS

SEQ ID NO: 98530 - protein, 16 aa, Homo sapiens
  CDR3 for beta chain variable domain of TCR clone 49265 (TRBV20-1, TRBJ1-4)
CSAPGQGLLTNEKLFF

SEQ ID NO: 98531 - protein, 18 aa, Homo sapiens
  CDR3 for alpha chain variable domain of TCR clone 49266 (TRAV8-3, TRAJ13)
CAVGAYPSGGTRKLPLEL

SEQ ID NO: 98532 - protein, 15 aa, Homo sapiens
  CDR3 for beta chain variable domain of TCR clone 49266 (TRBV19, TRBJ1-5)
CASSIVWADNQPQHF

SEQ ID NO: 98533 - protein, 16 aa, Homo sapiens
  CDR3 for alpha chain variable domain of TCR clone 49267 (TRAV3, TRAJ37)
CAVRPHGSGNTGKLIF

SEQ ID NO: 98534 - protein, 16 aa, Homo sapiens
  CDR3 for beta chain variable domain of TCR clone 49267 (TRBV9, TRBJ1-2)
YASSVEEKVSPYGYTF

SEQ ID NO: 98535 - protein, 14 aa, Homo sapiens
  CDR3 for alpha chain variable domain of TCR clone 49268 (TRAV16, TRAJ33)
CALSAMNSNYQLIW

SEQ ID NO: 98536 - protein, 16 aa, Homo sapiens
  CDR3 for beta chain variable domain of TCR clone 49268 (TRBV25-1, TRBJ2-7)
CASSELTGGGIYEQYF

SEQ ID NO: 98537 - protein, 13 aa, Homo sapiens
  CDR3 for alpha chain variable domain of TCR clone 49269 (TRAV21, TRAJ27)
CAARPGNAGQSTF

SEQ ID NO: 98538 - protein, 13 aa, Homo sapiens
  CDR3 for beta chain variable domain of TCR clone 49269 (TRBV18, TRBJ2-7)
CASQSGGGYEQYF

SEQ ID NO: 98539 - protein, 15 aa, Homo sapiens
  CDR3 for alpha chain variable domain of TCR clone 49270 (TRAV1-2, TRAJ20)
CLLPLCCASDYKLSF

SEQ ID NO: 98540 - protein, 18 aa, Homo sapiens
  CDR3 for beta chain variable domain of TCR clone 49270 (TRBV20-1, TRBJ2-6)
CSAETTPTHGSGANVLTF

SEQ ID NO: 98541 - protein, 13 aa, Homo sapiens
  CDR3 for alpha chain variable domain of TCR clone 49271 (TRAV23/DV6, TRAJ16)
CAASISDGQKLLF

SEQ ID NO: 98542 - protein, 15 aa, Homo sapiens
  CDR3 for beta chain variable domain of TCR clone 49271 (TRBV2, TRBJ1-1)
CASTEPGQGASGAFF

SEQ ID NO: 98543 - protein, 14 aa, Homo sapiens
  CDR3 for alpha chain variable domain of TCR clone 49272 (TRAV23/DV6, TRAJ11)
CAASLQSGYSTLTF

SEQ ID NO: 98544 - protein, 13 aa, Homo sapiens
  CDR3 for beta chain variable domain of TCR clone 49272 (TRBV4-1, TRBJ2-5)
CASSLTRGETQYF

SEQ ID NO: 98545 - protein, 12 aa, Homo sapiens
  CDR3 for alpha chain variable domain of TCR clone 49273 (TRAV8-3, TRAJ26)
CAGDNYGQNFVF

SEQ ID NO: 98546 - protein, 16 aa, Homo sapiens
  CDR3 for beta chain variable domain of TCR clone 49273 (TRBV2, TRBJ1-4)
CASNLLQGATNEKLFF

SEQ ID NO: 98547 - protein, 12 aa, Homo sapiens
  CDR3 for alpha chain variable domain of TCR clone 49274 (TRAV12-3, TRAJ17)
CAMTLTVSKLTF

SEQ ID NO: 98548 - protein, 15 aa, Homo sapiens
  CDR3 for beta chain variable domain of TCR clone 49274 (TRBV20-1, TRBJ2-7)
CSARDRVSGMDEQYF

SEQ ID NO: 98549 - protein, 20 aa, Homo sapiens
  CDR3 for alpha chain variable domain of TCR clone 49275 (TRAV12-2, TRAJ52)
SPVIQPPARAGGTSYGKLTF

SEQ ID NO: 98550 - protein, 16 aa, Homo sapiens
  CDR3 for beta chain variable domain of TCR clone 49275 (TRBV7-9, TRBJ1-2)
CASSLGFSSGEDGYTF

SEQ ID NO: 98551 - protein, 14 aa, Homo sapiens
  CDR3 for alpha chain variable domain of TCR clone 49276 (TRAV8-1, TRAJ5)
CAVRTDTGRRALTF

SEQ ID NO: 98552 - protein, 16 aa, Homo sapiens
  CDR3 for beta chain variable domain of TCR clone 49276 (TRBV11-2, TRBJ2-7)
CASSPTTGGVSYEQYF

SEQ ID NO: 98553 - protein, 12 aa, Homo sapiens
  CDR3 for alpha chain variable domain of TCR clone 49277 (TRAV3, TRAJ20)
CAVRGGDYKLSF

SEQ ID NO: 98554 - protein, 13 aa, Homo sapiens
  CDR3 for beta chain variable domain of TCR clone 49277 (TRBV9, TRBJ2-1)
CASSVGQGGEQFF

SEQ ID NO: 98555 - protein, 15 aa, Homo sapiens
  CDR3 for alpha chain variable domain of TCR clone 49278 (TRAV26-1, TRAJ56)
CIVRVATGANSKLTF

SEQ ID NO: 98556 - protein, 16 aa, Homo sapiens
  CDR3 for beta chain variable domain of TCR clone 49278 (TRBV7-9, TRBJ2-1)
CASSDVAGGSYNEQFF

SEQ ID NO: 98557 - protein, 14 aa, Homo sapiens
  CDR3 for alpha chain variable domain of TCR clone 49279 (TRAV13-2, TRAJ43)
CAEMPTYNNNDMRF

SEQ ID NO: 98558 - protein, 15 aa, Homo sapiens
  CDR3 for beta chain variable domain of TCR clone 49279 (TRBV7-9, TRBJ2-2)
CASGPLDTFPGELFF

SEQ ID NO: 98559 - protein, 14 aa, Homo sapiens
  CDR3 for alpha chain variable domain of TCR clone 49280 (TRAV30, TRAJ33)
CGTVAPRSNYQLIW

SEQ ID NO: 98560 - protein, 16 aa, Homo sapiens
  CDR3 for beta chain variable domain of TCR clone 49280 (TRBV13, TRBJ2-2)
CASSPRTGEHTGELFF

SEQ ID NO: 98561 - protein, 13 aa, Homo sapiens
  CDR3 for alpha chain variable domain of TCR clone 49281 (TRAV1-2, TRAJ9)
CAVLNTGGFKPIF

SEQ ID NO: 98562 - protein, 14 aa, Homo sapiens
  CDR3 for beta chain variable domain of TCR clone 49281 (TRBV20-1, TRBJ2-3)
CSARGGTSTDTQYF

SEQ ID NO: 98563 - protein, 14 aa, Homo sapiens
  CDR3 for alpha chain variable domain of TCR clone 49282 (TRAV1-1, TRAJ27)
CAVIYNTNAGKPTF

SEQ ID NO: 98564 - protein, 15 aa, Homo sapiens
  CDR3 for beta chain variable domain of TCR clone 49282 (TRBV6-3, TRBJ2-7)
CASSSPGTVFYEQYF

SEQ ID NO: 98565 - protein, 14 aa, Homo sapiens
  CDR3 for alpha chain variable domain of TCR clone 49283 (TRAV12-3, TRAJ10)
SHLPLTGGGNKLTF

SEQ ID NO: 98566 - protein, 19 aa, Homo sapiens
  CDR3 for beta chain variable domain of TCR clone 49283 (TRBV4-1, TRBJ1-1)
CASSRIILTPRGVNTEAFL

SEQ ID NO: 98567 - protein, 10 aa, Homo sapiens
  CDR3 for alpha chain variable domain of TCR clone 49284 (TRAV17, TRAJ36)
CATVAGNLFF

SEQ ID NO: 98568 - protein, 12 aa, Homo sapiens
  CDR3 for beta chain variable domain of TCR clone 49284 (TRBV11-2, TRBJ2-4)
CASGSASGSEYF

SEQ ID NO: 98569 - protein, 13 aa, Homo sapiens
  CDR3 for alpha chain variable domain of TCR clone 49285 (TRAV38-2/DV8, TRAJ34)
CAYRSYNTDKLIF

SEQ ID NO: 98570 - protein, 15 aa, Homo sapiens
  CDR3 for beta chain variable domain of TCR clone 49285 (TRBV20-1, TRBJ2-5)
CSAEGTGGLQETQYF

SEQ ID NO: 98571 - protein, 14 aa, Homo sapiens
  CDR3 for alpha chain variable domain of TCR clone 49286 (TRAV12-3, TRAJ10)
GHLPLTGGGNKLTF

SEQ ID NO: 98572 - protein, 13 aa, Homo sapiens
  CDR3 for beta chain variable domain of TCR clone 49286 (TRBV7-6, TRBJ2-3)
CASSLAVGDTQYF

SEQ ID NO: 98573 - protein, 18 aa, Homo sapiens
  CDR3 for alpha chain variable domain of TCR clone 49287 (TRAV12-2, )
CAVGDIQNPDPAVYQLRD

SEQ ID NO: 98574 - protein, 17 aa, Homo sapiens
  CDR3 for beta chain variable domain of TCR clone 49287 (TRBV11-2, TRBJ2-1)
CASSLYPPGVEYNEQFF

SEQ ID NO: 98575 - protein, 12 aa, Homo sapiens
  CDR3 for alpha chain variable domain of TCR clone 49288 (TRAV8-6, TRAJ43)
CAVSNNNNDMRF

SEQ ID NO: 98576 - protein, 15 aa, Homo sapiens
  CDR3 for beta chain variable domain of TCR clone 49288 (TRBV7-3, TRBJ2-6)
CASSLGGSGANGLTF

SEQ ID NO: 98577 - protein, 16 aa, Homo sapiens
  CDR3 for alpha chain variable domain of TCR clone 49289 (TRAV30, TRAJ24)
CGTEIVDADSWGKFQF

SEQ ID NO: 98578 - protein, 16 aa, Homo sapiens
  CDR3 for beta chain variable domain of TCR clone 49289 (TRBV5-1, TRBJ1-1)
CASSSGGNSLNTEAFF

SEQ ID NO: 98579 - protein, 14 aa, Homo sapiens
  CDR3 for alpha chain variable domain of TCR clone 49290 (TRAV8-3, TRAJ4)
CAVGAAGGYNNLIF

SEQ ID NO: 98580 - protein, 15 aa, Homo sapiens
  CDR3 for beta chain variable domain of TCR clone 49290 (TRBV20-1, TRBJ2-5)
CSAPPRTGFGETQYF

SEQ ID NO: 98581 - protein, 15 aa, Homo sapiens
  CDR3 for alpha chain variable domain of TCR clone 49291 (TRAV20, TRAJ39)
CAVQALLVAGNMLTF

SEQ ID NO: 98582 - protein, 14 aa, Homo sapiens
  CDR3 for beta chain variable domain of TCR clone 49291 (TRBV25-1, TRBJ1-1)
CASTHLGGNTEAFF

SEQ ID NO: 98583 - protein, 13 aa, Homo sapiens
  CDR3 for alpha chain variable domain of TCR clone 49292 (TRAV36/DV7, TRAJ49)
CAGDSNTGNQFYF

SEQ ID NO: 98584 - protein, 13 aa, Homo sapiens
  CDR3 for beta chain variable domain of TCR clone 49292 (TRBV7-7, TRBJ2-3)
CASSLSRADTQYF

SEQ ID NO: 98585 - protein, 12 aa, Homo sapiens
  CDR3 for alpha chain variable domain of TCR clone 49293 (TRAV12-2, TRAJ10)
WWVTGGGNKLTF

SEQ ID NO: 98586 - protein, 15 aa, Homo sapiens
  CDR3 for beta chain variable domain of TCR clone 49293 (TRBV10-2, TRBJ2-6)
CASSEQGTGANVLTF

SEQ ID NO: 98587 - protein, 16 aa, Homo sapiens
  CDR3 for alpha chain variable domain of TCR clone 49294 (TRAV16, TRAJ4)
CALSRTFSGGYNKLIF

SEQ ID NO: 98588 - protein, 16 aa, Homo sapiens
  CDR3 for beta chain variable domain of TCR clone 49294 (TRBV24-1, TRBJ2-3)
CATSDPGTGATDTQYF

SEQ ID NO: 98589 - protein, 11 aa, Homo sapiens
  CDR3 for alpha chain variable domain of TCR clone 49295 (TRAV2, TRAJ13)
CASGGYQKVTF

SEQ ID NO: 98590 - protein, 18 aa, Homo sapiens
  CDR3 for beta chain variable domain of TCR clone 49295 (TRBV7-2, TRBJ2-3)
CASSLKREGSGITDTQYF

SEQ ID NO: 98591 - protein, 16 aa, Homo sapiens
  CDR3 for alpha chain variable domain of TCR clone 49296 (TRAV12-3, TRAJ53)
CAMSPGSGGSNYKLTF

SEQ ID NO: 98592 - protein, 16 aa, Homo sapiens
  CDR3 for beta chain variable domain of TCR clone 49296 (TRBV7-3, TRBJ2-1)
CASSLEGYRSYNEQFF

SEQ ID NO: 98593 - protein, 14 aa, Homo sapiens
  CDR3 for alpha chain variable domain of TCR clone 49297 (TRAV20, TRAJ10)
CAVRVEGGGNKLTF

SEQ ID NO: 98594 - protein, 13 aa, Homo sapiens
  CDR3 for beta chain variable domain of TCR clone 49297 (TRBV13, TRBJ2-2)
CASSPVLTGELFF

SEQ ID NO: 98595 - protein, 14 aa, Homo sapiens
  CDR3 for alpha chain variable domain of TCR clone 49298 (TRAV21, TRAJ32)
CCGDYGGATNKLIF

SEQ ID NO: 98596 - protein, 13 aa, Homo sapiens
  CDR3 for beta chain variable domain of TCR clone 49298 (TRBV2, TRBJ1-6)
CASGRGGIPPLHF

SEQ ID NO: 98597 - protein, 11 aa, Homo sapiens
  CDR3 for alpha chain variable domain of TCR clone 49299 (TRAV17, TRAJ31)
CATSNNARLMF

SEQ ID NO: 98598 - protein, 16 aa, Homo sapiens
  CDR3 for beta chain variable domain of TCR clone 49299 (TRBV7-8, TRBJ2-4)
CASSAGRTLAKNIQYF

SEQ ID NO: 98599 - protein, 14 aa, Homo sapiens
  CDR3 for alpha chain variable domain of TCR clone 49300 (TRAV29/DV5, TRAJ36)
CAARRKTGANNLFF

SEQ ID NO: 98600 - protein, 14 aa, Homo sapiens
  CDR3 for beta chain variable domain of TCR clone 49300 (TRBV12-5, TRBJ2-5)
YASGSRTHQETQYF

SEQ ID NO: 98601 - protein, 12 aa, Homo sapiens
  CDR3 for alpha chain variable domain of TCR clone 49301 (TRAV13-1, TRAJ21)
CAAKEGFNKFYF

SEQ ID NO: 98602 - protein, 16 aa, Homo sapiens
  CDR3 for beta chain variable domain of TCR clone 49301 (TRBV7-2, TRBJ2-6)
CASSLAGRSGANALTF

SEQ ID NO: 98603 - protein, 13 aa, Homo sapiens
  CDR3 for alpha chain variable domain of TCR clone 49302 (TRAV2, TRAJ23)
CAVMGNQGGKLIF

SEQ ID NO: 98604 - protein, 16 aa, Homo sapiens
  CDR3 for beta chain variable domain of TCR clone 49302 (TRBV28, TRBJ2-7)
CASSSGTSGRGYEQYF

SEQ ID NO: 98605 - protein, 12 aa, Homo sapiens
  CDR3 for alpha chain variable domain of TCR clone 49303 (TRAV12-1, TRAJ50)
CVGRTSYDKVIF

SEQ ID NO: 98606 - protein, 12 aa, Homo sapiens
  CDR3 for beta chain variable domain of TCR clone 49303 (TRBV5-6, TRBJ1-1)
CASSLVGTEAFF

SEQ ID NO: 98607 - protein, 12 aa, Homo sapiens
  CDR3 for alpha chain variable domain of TCR clone 49304 (TRAV12-3, TRAJ40)
CAMNSGTYKYIF

SEQ ID NO: 98608 - protein, 15 aa, Homo sapiens
  CDR3 for beta chain variable domain of TCR clone 49304 (TRBV7-3, TRBJ2-2)
CASSETGQGTGELFF

SEQ ID NO: 98609 - protein, 16 aa, Homo sapiens
  CDR3 for alpha chain variable domain of TCR clone 49305 (TRAV1-2, TRAJ10)
CAVRGVLTGGGNKLTF

SEQ ID NO: 98610 - protein, 16 aa, Homo sapiens
  CDR3 for beta chain variable domain of TCR clone 49305 (TRBV6-1, TRBJ2-5)
CASSETLDRGAETQYF

SEQ ID NO: 98611 - protein, 12 aa, Homo sapiens
  CDR3 for alpha chain variable domain of TCR clone 49306 (TRAV27, TRAJ9)
CAGESGGFKTVF

SEQ ID NO: 98612 - protein, 18 aa, Homo sapiens
  CDR3 for beta chain variable domain of TCR clone 49306 (TRBV10-2, TRBJ2-2)
CISAPAVHRQADAGELFF

SEQ ID NO: 98613 - protein, 10 aa, Homo sapiens
  CDR3 for alpha chain variable domain of TCR clone 49307 (TRAV30, TRAJ20)
CGTDDYKLSF

SEQ ID NO: 98614 - protein, 15 aa, Homo sapiens
  CDR3 for beta chain variable domain of TCR clone 49307 (TRBV7-9, TRBJ1-6)
CASSSPGRGNSPLHF

SEQ ID NO: 98615 - protein, 13 aa, Homo sapiens
  CDR3 for alpha chain variable domain of TCR clone 49308 (TRAV13-1, TRAJ21)
CAASIYNFNKFYF

SEQ ID NO: 98616 - protein, 15 aa, Homo sapiens
  CDR3 for beta chain variable domain of TCR clone 49308 (TRBV7-9, TRBJ1-6)
CASSSPGRGNSPLHF

SEQ ID NO: 98617 - protein, 16 aa, Homo sapiens
  CDR3 for alpha chain variable domain of TCR clone 49309 (TRAV12-2, TRAJ40)
CAVIRGGTSGTYKHIF

SEQ ID NO: 98618 - protein, 13 aa, Homo sapiens
  CDR3 for beta chain variable domain of TCR clone 49309 (TRBV7-9, TRBJ1-2)
CASSLKQNYGYTF

SEQ ID NO: 98619 - protein, 14 aa, Homo sapiens
  CDR3 for alpha chain variable domain of TCR clone 49310 (TRAV13-1, TRAJ13)
CAASRVGGYQKVTF

SEQ ID NO: 98620 - protein, 12 aa, Homo sapiens
  CDR3 for beta chain variable domain of TCR clone 49310 (TRBV12-4, TRBJ1-4)
CASSETNEKLFF

SEQ ID NO: 98621 - protein, 17 aa, Homo sapiens
  CDR3 for alpha chain variable domain of TCR clone 49311 (TRAV3, TRAJ6)
CAVRDGPRVGGSYIPTF

SEQ ID NO: 98622 - protein, 12 aa, Homo sapiens
  CDR3 for beta chain variable domain of TCR clone 49311 (TRBV11-2, TRBJ2-2)
CAGSLGGGELFS

SEQ ID NO: 98623 - protein, 12 aa, Homo sapiens
  CDR3 for alpha chain variable domain of TCR clone 49312 (TRAV8-4, TRAJ37)
CAKSSNTGKLIF

SEQ ID NO: 98624 - protein, 15 aa, Homo sapiens
  CDR3 for beta chain variable domain of TCR clone 49312 (TRBV27, TRBJ2-1)
CASSGGGPSYNEQFF

SEQ ID NO: 98625 - protein, 12 aa, Homo sapiens
  CDR3 for alpha chain variable domain of TCR clone 49313 (TRAV12-3, TRAJ17)
CAMTLTGTNLTF

SEQ ID NO: 98626 - protein, 15 aa, Homo sapiens
  CDR3 for beta chain variable domain of TCR clone 49313 (TRBV20-1, TRBJ2-7)
CSARDRVSGMDEQYF

SEQ ID NO: 98627 - protein, 11 aa, Homo sapiens
  CDR3 for alpha chain variable domain of TCR clone 49314 (TRAV17, TRAJ31)
CATDRTARLMF

SEQ ID NO: 98628 - protein, 14 aa, Homo sapiens
  CDR3 for beta chain variable domain of TCR clone 49314 (TRBV4-2, TRBJ2-3)
CASSQERGTDTQYF

SEQ ID NO: 98629 - protein, 14 aa, Homo sapiens
  CDR3 for alpha chain variable domain of TCR clone 49315 (TRAV12-2, TRAJ44)
CAMNPAGTASKLTF

SEQ ID NO: 98630 - protein, 13 aa, Homo sapiens
  CDR3 for beta chain variable domain of TCR clone 49315 (TRBV20-1, TRBJ1-6)
CSAPLGVGSPLHF

SEQ ID NO: 98631 - protein, 15 aa, Homo sapiens
  CDR3 for alpha chain variable domain of TCR clone 49316 (TRAV8-3, TRAJ6)
CAAGGEEATYLHLEE

SEQ ID NO: 98632 - protein, 14 aa, Homo sapiens
  CDR3 for beta chain variable domain of TCR clone 49316 (TRBV5-1, TRBJ2-7)
CASSRGESLYEQYF

SEQ ID NO: 98633 - protein, 16 aa, Homo sapiens
  CDR3 for alpha chain variable domain of TCR clone 49317 (TRAV12-3, TRAJ53)
CATSPGSGGSNYKLTF

SEQ ID NO: 98634 - protein, 20 aa, Homo sapiens
  CDR3 for beta chain variable domain of TCR clone 49317 (TRBV7-8, TRBJ2-2)
CASSHLFPGPTIHITGELFF

SEQ ID NO: 98635 - protein, 13 aa, Homo sapiens
  CDR3 for alpha chain variable domain of TCR clone 49318 (TRAV13-2, TRAJ13)
CAERPGGYQKVTF

SEQ ID NO: 98636 - protein, 15 aa, Homo sapiens
  CDR3 for beta chain variable domain of TCR clone 49318 (TRBV11-3, TRBJ2-7)
CASGPGPASSYEQYF

SEQ ID NO: 98637 - protein, 13 aa, Homo sapiens
  CDR3 for alpha chain variable domain of TCR clone 49319 (TRAV1-1, TRAJ28)
CVTSGAGSYQLTF

SEQ ID NO: 98638 - protein, 17 aa, Homo sapiens
  CDR3 for beta chain variable domain of TCR clone 49319 (TRBV18, TRBJ2-2)
CGSSQRSSGQGPGELFF

SEQ ID NO: 98639 - protein, 21 aa, Homo sapiens
  CDR3 for alpha chain variable domain of TCR clone 49320 (TRAV1-1, TRAJ6)
CLLLLRCERLERTGGSYIPTF

SEQ ID NO: 98640 - protein, 14 aa, Homo sapiens
  CDR3 for beta chain variable domain of TCR clone 49320 (TRBV7-2, TRBJ2-7)
CASSPKTSFYEQYF

SEQ ID NO: 98641 - protein, 14 aa, Homo sapiens
  CDR3 for alpha chain variable domain of TCR clone 49321 (TRAV1-1, TRAJ27)
CAVIFNTNAGKSTF

SEQ ID NO: 98642 - protein, 15 aa, Homo sapiens
  CDR3 for beta chain variable domain of TCR clone 49321 (TRBV7-2, TRBJ2-1)
CASSSGLAGGNEQFF

SEQ ID NO: 98643 - protein, 14 aa, Homo sapiens
  CDR3 for alpha chain variable domain of TCR clone 49322 (TRAV13-2, TRAJ11)
CAETGNSGYSTLTF

SEQ ID NO: 98644 - protein, 15 aa, Homo sapiens
  CDR3 for beta chain variable domain of TCR clone 49322 (TRBV7-3, TRBJ2-1)
CASSPTGGGEVEQFF

SEQ ID NO: 98645 - protein, 13 aa, Homo sapiens
  CDR3 for alpha chain variable domain of TCR clone 49323 (TRAV13-1, TRAJ5)
CAARVTGRRALTF

SEQ ID NO: 98646 - protein, 15 aa, Homo sapiens
  CDR3 for beta chain variable domain of TCR clone 49323 (TRBV7-9, TRBJ2-7)
CASSPGGGLTYEQYV

SEQ ID NO: 98647 - protein, 18 aa, Homo sapiens
  CDR3 for alpha chain variable domain of TCR clone 49324 (TRAV26-1, TRAJ23)
CTVRVGLEVWNQGGKLIF

SEQ ID NO: 98648 - protein, 16 aa, Homo sapiens
  CDR3 for beta chain variable domain of TCR clone 49324 (TRBV12-4, TRBJ2-5)
CASSFFVRGRQETQYF

SEQ ID NO: 98649 - protein, 16 aa, Homo sapiens
  CDR3 for alpha chain variable domain of TCR clone 49325 (TRAV3, TRAJ3)
CAVRDRAKSSASKIIF

SEQ ID NO: 98650 - protein, 13 aa, Homo sapiens
  CDR3 for beta chain variable domain of TCR clone 49325 (TRBV10-3, TRBJ2-7)
CASKRAVNYEQYF

SEQ ID NO: 98651 - protein, 15 aa, Homo sapiens
  CDR3 for alpha chain variable domain of TCR clone 49326 (TRAV3, TRAJ29)
CAVRDLYSGNTPLVF

SEQ ID NO: 98652 - protein, 16 aa, Homo sapiens
  CDR3 for beta chain variable domain of TCR clone 49326 (TRBV20-1, TRBJ1-2)
CSASMGQGVANYGYTF

SEQ ID NO: 98653 - protein, 17 aa, Homo sapiens
  CDR3 for alpha chain variable domain of TCR clone 49327 (TRAV3, TRAJ12)
CAVRDGGRMDSSYKLSF

SEQ ID NO: 98654 - protein, 13 aa, Homo sapiens
  CDR3 for beta chain variable domain of TCR clone 49327 (TRBV15, TRBJ1-6)
CATSGGLNSPLHF

SEQ ID NO: 98655 - protein, 14 aa, Homo sapiens
  CDR3 for alpha chain variable domain of TCR clone 49328 (TRAV12-2, TRAJ44)
CAVNPAGTASKLTF

SEQ ID NO: 98656 - protein, 13 aa, Homo sapiens
  CDR3 for beta chain variable domain of TCR clone 49328 (TRBV20-1, TRBJ1-6)
CSAPLGVGSPLHC

SEQ ID NO: 98657 - protein, 15 aa, Homo sapiens
  CDR3 for alpha chain variable domain of TCR clone 49329 (TRAV14/DV4, TRAJ40)
CAMRGFTSGTYKYIF

SEQ ID NO: 98658 - protein, 13 aa, Homo sapiens
  CDR3 for beta chain variable domain of TCR clone 49329 (TRBV15, TRBJ1-6)
CATSGGLNSPLHF

SEQ ID NO: 98659 - protein, 14 aa, Homo sapiens
  CDR3 for alpha chain variable domain of TCR clone 49330 (TRAV35, TRAJ22)
CAGSPSGGYQKVTF

SEQ ID NO: 98660 - protein, 16 aa, Homo sapiens
  CDR3 for beta chain variable domain of TCR clone 49330 (TRBV20-1, TRBJ2-2)
CSARRPGTGNTGELFF

SEQ ID NO: 98661 - protein, 15 aa, Homo sapiens
  CDR3 for alpha chain variable domain of TCR clone 49331 (TRAV26-2, TRAJ39)
CSLRGNNNASNMLTF

SEQ ID NO: 98662 - protein, 15 aa, Homo sapiens
  CDR3 for beta chain variable domain of TCR clone 49331 (TRBV5-4, TRBJ1-1)
CASSSLGWANTEAFF

SEQ ID NO: 98663 - protein, 14 aa, Homo sapiens
  CDR3 for alpha chain variable domain of TCR clone 49332 (TRAV1-2, TRAJ16)
CAVNRFSDGQKLLF

SEQ ID NO: 98664 - protein, 14 aa, Homo sapiens
  CDR3 for beta chain variable domain of TCR clone 49332 (TRBV20-1, TRBJ1-1)
CSAQKRIGGTEAFF

SEQ ID NO: 98665 - protein, 11 aa, Homo sapiens
  CDR3 for alpha chain variable domain of TCR clone 49333 (TRAV21, TRAJ11)
CAVKGYSTLTF

SEQ ID NO: 98666 - protein, 11 aa, Homo sapiens
  CDR3 for beta chain variable domain of TCR clone 49333 (TRBV11-2, TRBJ2-7)
CASSSDYEQYF

SEQ ID NO: 98667 - protein, 12 aa, Homo sapiens
  CDR3 for alpha chain variable domain of TCR clone 49334 (TRAV12-3, TRAJ17)
CAMTLTGSKLTF

SEQ ID NO: 98668 - protein, 17 aa, Homo sapiens
  CDR3 for beta chain variable domain of TCR clone 49334 (TRBV15, TRBJ2-7)
CATSIDRTSGRSYEQYF

SEQ ID NO: 98669 - protein, 13 aa, Homo sapiens
  CDR3 for alpha chain variable domain of TCR clone 49335 (TRAV12-2, TRAJ33)
CGDAPDSNYQLIW

SEQ ID NO: 98670 - protein, 13 aa, Homo sapiens
  CDR3 for beta chain variable domain of TCR clone 49335 (TRBV7-2, TRBJ2-5)
CASSQTSVETQYF

SEQ ID NO: 98671 - protein, 11 aa, Homo sapiens
  CDR3 for alpha chain variable domain of TCR clone 49336 (TRAV21, TRAJ9)
CAVPGGFKTIF

SEQ ID NO: 98672 - protein, 12 aa, Homo sapiens
  CDR3 for beta chain variable domain of TCR clone 49336 (TRBV20-1, TRBJ2-3)
CSARVGTDKQYF

SEQ ID NO: 98673 - protein, 12 aa, Homo sapiens
  CDR3 for alpha chain variable domain of TCR clone 49337 (TRAV1-1, TRAJ30)
CAVRGRDDKIIF

SEQ ID NO: 98674 - protein, 17 aa, Homo sapiens
  CDR3 for beta chain variable domain of TCR clone 49337 (TRBV10-1, TRBJ2-3)
CASSESETSGSSDTQYF

SEQ ID NO: 98675 - protein, 12 aa, Homo sapiens
  CDR3 for alpha chain variable domain of TCR clone 49338 (TRAV8-3, TRAJ27)
CAVGAEAGKSTF

SEQ ID NO: 98676 - protein, 14 aa, Homo sapiens
  CDR3 for beta chain variable domain of TCR clone 49338 (TRBV2, TRBJ2-1)
CASRLTVGHDEQFF

SEQ ID NO: 98677 - protein, 14 aa, Homo sapiens
  CDR3 for alpha chain variable domain of TCR clone 49339 (TRAV12-2, TRAJ44)
CAVNPAGTASKLTF

SEQ ID NO: 98678 - protein, 15 aa, Homo sapiens
  CDR3 for beta chain variable domain of TCR clone 49339 (TRBV20-1, TRBJ1-6)
CSAPLGLDHPSTLGM

SEQ ID NO: 98679 - protein, 15 aa, Homo sapiens
  CDR3 for alpha chain variable domain of TCR clone 49340 (TRAV12-3, TRAJ6)
CAMSATTGGSYIPTF

SEQ ID NO: 98680 - protein, 15 aa, Homo sapiens
  CDR3 for beta chain variable domain of TCR clone 49340 (TRBV4-2, TRBJ1-2)
CASSQRTGGRDGYTF

SEQ ID NO: 98681 - protein, 12 aa, Homo sapiens
  CDR3 for alpha chain variable domain of TCR clone 49341 (TRAV2, TRAJ33)
CAFMDSNYQLIW

SEQ ID NO: 98682 - protein, 22 aa, Homo sapiens
  CDR3 for beta chain variable domain of TCR clone 49341 (TRBV7-2, TRBJ1-4)
CASSFDPYSKTVFWQWNPALCL

SEQ ID NO: 98683 - protein, 16 aa, Homo sapiens
  CDR3 for alpha chain variable domain of TCR clone 49342 (TRAV3, TRAJ37)
CAVRPHGSGNTGKLIF

SEQ ID NO: 98684 - protein, 16 aa, Homo sapiens
  CDR3 for beta chain variable domain of TCR clone 49342 (TRBV9, TRBJ1-2)
CASSVEEKVSPYGYTV

SEQ ID NO: 98685 - protein, 14 aa, Homo sapiens
  CDR3 for alpha chain variable domain of TCR clone 49343 (TRAV13-1, TRAJ9)
CAASALTRGFKTIF

SEQ ID NO: 98686 - protein, 13 aa, Homo sapiens
  CDR3 for beta chain variable domain of TCR clone 49343 (TRBV20-1, TRBJ1-1)
CSAGTVGNTEAFF

SEQ ID NO: 98687 - protein, 14 aa, Homo sapiens
  CDR3 for alpha chain variable domain of TCR clone 49344 (TRAV12-2, TRAJ40)
CAVKIPSGTYKYNF

SEQ ID NO: 98688 - protein, 20 aa, Homo sapiens
  CDR3 for beta chain variable domain of TCR clone 49344 (TRBV28, TRBJ2-1)
CASTPIGRSPGLAGGNEQFF

SEQ ID NO: 98689 - protein, 14 aa, Homo sapiens
  CDR3 for alpha chain variable domain of TCR clone 49345 (TRAV12-3, TRAJ10)
SHLPLTGGGNKLTF

SEQ ID NO: 98690 - protein, 19 aa, Homo sapiens
  CDR3 for beta chain variable domain of TCR clone 49345 (TRBV28, TRBJ2-1)
CASSFSIRGSGRTRYEQFF

SEQ ID NO: 98691 - protein, 12 aa, Homo sapiens
  CDR3 for alpha chain variable domain of TCR clone 49346 (TRAV12-3, TRAJ20)
CAMVRGDYKLSF

SEQ ID NO: 98692 - protein, 12 aa, Homo sapiens
  CDR3 for beta chain variable domain of TCR clone 49346 (TRBV6-1, TRBJ2-7)
CASSDHSYEQYF

SEQ ID NO: 98693 - protein, 18 aa, Homo sapiens
  CDR3 for alpha chain variable domain of TCR clone 49347 (TRAV21, TRAJ52)
CAVRPSSAGGTSYGKLTF

SEQ ID NO: 98694 - protein, 14 aa, Homo sapiens
  CDR3 for beta chain variable domain of TCR clone 49347 (TRBV4-1, TRBJ2-2)
CASSQAVNTGELFF

SEQ ID NO: 98695 - protein, 18 aa, Homo sapiens
  CDR3 for alpha chain variable domain of TCR clone 49348 (TRAV13-1, TRAJ52)
CAAKNPNAGGTSYGKLTF

SEQ ID NO: 98696 - protein, 14 aa, Homo sapiens
  CDR3 for beta chain variable domain of TCR clone 49348 (TRBV7-8, TRBJ2-3)
RASSLEAGTDTQYF

SEQ ID NO: 98697 - protein, 14 aa, Homo sapiens
  CDR3 for alpha chain variable domain of TCR clone 49349 (TRAV12-2, TRAJ17)
CAVLFKAAGNKLTF

SEQ ID NO: 98698 - protein, 12 aa, Homo sapiens
  CDR3 for beta chain variable domain of TCR clone 49349 (TRBV11-2, TRBJ2-2)
CDSSLPTGELFF

SEQ ID NO: 98699 - protein, 12 aa, Homo sapiens
  CDR3 for alpha chain variable domain of TCR clone 49350 (TRAV12-3, TRAJ17)
CAMTLTGNKLTS

SEQ ID NO: 98700 - protein, 13 aa, Homo sapiens
  CDR3 for beta chain variable domain of TCR clone 49350 (TRBV7-9, TRBJ1-2)
CASSLKQNYGYTF

SEQ ID NO: 98701 - protein, 13 aa, Homo sapiens
  CDR3 for alpha chain variable domain of TCR clone 49351 (TRAV35, TRAJ42)
CAGFPGSQGNLIF

SEQ ID NO: 98702 - protein, 13 aa, Homo sapiens
  CDR3 for beta chain variable domain of TCR clone 49351 (TRBV29-1, TRBJ2-1)
CSVEGGRVNEQFV

SEQ ID NO: 98703 - protein, 19 aa, Homo sapiens
  CDR3 for alpha chain variable domain of TCR clone 49352 (TRAV3, TRAJ6)
CAVRDRNPSRSGGSYIPTF

SEQ ID NO: 98704 - protein, 15 aa, Homo sapiens
  CDR3 for beta chain variable domain of TCR clone 49352 (TRBV18, TRBJ2-7)
FASSPTFMDSYEQYF

SEQ ID NO: 98705 - protein, 13 aa, Homo sapiens
  CDR3 for alpha chain variable domain of TCR clone 49353 (TRAV26-1, TRAJ33)
CIVRVEDNYQLIW

SEQ ID NO: 98706 - protein, 16 aa, Homo sapiens
  CDR3 for beta chain variable domain of TCR clone 49353 (TRBV15, TRBJ2-7)
CATSRDRGRRRGEQYF

SEQ ID NO: 98707 - protein, 11 aa, Homo sapiens
  CDR3 for alpha chain variable domain of TCR clone 49354 (TRAV2, TRAJ13)
CASGGYQKVTF

SEQ ID NO: 98708 - protein, 16 aa, Homo sapiens
  CDR3 for beta chain variable domain of TCR clone 49354 (TRBV19, TRBJ2-1)
CASSKAGPSSYNEQLF

SEQ ID NO: 98709 - protein, 14 aa, Homo sapiens
  CDR3 for alpha chain variable domain of TCR clone 49355 (TRAV9-2, TRAJ39)
CALYIYNAGNMLTF

SEQ ID NO: 98710 - protein, 12 aa, Homo sapiens
  CDR3 for beta chain variable domain of TCR clone 49355 (TRBV19, TRBJ1-5)
CASSIAQQPQHF

SEQ ID NO: 98711 - protein, 13 aa, Homo sapiens
  CDR3 for alpha chain variable domain of TCR clone 49356 (TRAV27, TRAJ41)
CAREGNSGYALNF

SEQ ID NO: 98712 - protein, 14 aa, Homo sapiens
  CDR3 for beta chain variable domain of TCR clone 49356 (TRBV7-2, TRBJ1-1)
CASSFLTGTTEAFF

SEQ ID NO: 98713 - protein, 13 aa, Homo sapiens
  CDR3 for alpha chain variable domain of TCR clone 49357 (TRAV1-1, TRAJ9)
CAAKNTGGFKTIF

SEQ ID NO: 98714 - protein, 14 aa, Homo sapiens
  CDR3 for beta chain variable domain of TCR clone 49357 (TRBV20-1, TRBJ2-1)
CSAQIVGSANEQFF

SEQ ID NO: 98715 - protein, 13 aa, Homo sapiens
  CDR3 for alpha chain variable domain of TCR clone 49358 (TRAV21, TRAJ37)
CAVSSGNTGKLIF

SEQ ID NO: 98716 - protein, 12 aa, Homo sapiens
  CDR3 for beta chain variable domain of TCR clone 49358 (TRBV11-2, TRBJ2-2)
CASSLGGGELFF

SEQ ID NO: 98717 - protein, 15 aa, Homo sapiens
  CDR3 for alpha chain variable domain of TCR clone 49359 (TRAV8-3, TRAJ34)
DAAEHFCAIPGKLIF

SEQ ID NO: 98718 - protein, 15 aa, Homo sapiens
  CDR3 for beta chain variable domain of TCR clone 49359 (TRBV5-7, TRBJ2-1)
CASSRRLAGDNEQFF

SEQ ID NO: 98719 - protein, 12 aa, Homo sapiens
  CDR3 for alpha chain variable domain of TCR clone 49360 (TRAV21, TRAJ33)
CAKMDSNFQLIW

SEQ ID NO: 98720 - protein, 14 aa, Homo sapiens
  CDR3 for beta chain variable domain of TCR clone 49360 (TRBV2, TRBJ2-7)
CASSLTSGGYEQYF

SEQ ID NO: 98721 - protein, 13 aa, Homo sapiens
  CDR3 for alpha chain variable domain of TCR clone 49361 (TRAV30, TRAJ24)
CGTVTDSWGKLQF

SEQ ID NO: 98722 - protein, 14 aa, Homo sapiens
  CDR3 for beta chain variable domain of TCR clone 49361 (TRBV12-5, TRBJ2-5)
CASGSRTHQETQYF

SEQ ID NO: 98723 - protein, 14 aa, Homo sapiens
  CDR3 for alpha chain variable domain of TCR clone 49362 (TRAV1-2, TRAJ8)
CAVREDTGFQKLVF

SEQ ID NO: 98724 - protein, 15 aa, Homo sapiens
  CDR3 for beta chain variable domain of TCR clone 49362 (TRBV7-3, TRBJ2-2)
CASSETGQGTGELFL

SEQ ID NO: 98725 - protein, 15 aa, Homo sapiens
  CDR3 for alpha chain variable domain of TCR clone 49363 (TRAV12-2, TRAJ53)
CAVNGGGGSNYKLTF

SEQ ID NO: 98726 - protein, 13 aa, Homo sapiens
  CDR3 for beta chain variable domain of TCR clone 49363 (TRBV3-1, TRBJ1-1)
CASSPEVITEAFF

SEQ ID NO: 98727 - protein, 14 aa, Homo sapiens
  CDR3 for alpha chain variable domain of TCR clone 49364 (TRAV35, TRAJ34)
CAGRGTPTSSSLGL

SEQ ID NO: 98728 - protein, 14 aa, Homo sapiens
  CDR3 for beta chain variable domain of TCR clone 49364 (TRBV5-1, TRBJ2-7)
CASSRGESLYEQYF

SEQ ID NO: 98729 - protein, 14 aa, Homo sapiens
  CDR3 for alpha chain variable domain of TCR clone 49365 (TRAV17, TRAJ57)
CATDALGGSEKLVF

SEQ ID NO: 98730 - protein, 14 aa, Homo sapiens
  CDR3 for beta chain variable domain of TCR clone 49365 (TRBV4-2, TRBJ2-1)
CASGLDRAYNEQFF

SEQ ID NO: 98731 - protein, 14 aa, Homo sapiens
  CDR3 for alpha chain variable domain of TCR clone 49366 (TRAV35, TRAJ50)
CAGHRKTSYDKVIS

SEQ ID NO: 98732 - protein, 13 aa, Homo sapiens
  CDR3 for beta chain variable domain of TCR clone 49366 (TRBV7-7, TRBJ2-3)
CASSLSRADTQYF

SEQ ID NO: 98733 - protein, 13 aa, Homo sapiens
  CDR3 for alpha chain variable domain of TCR clone 49367 (TRAV12-1, TRAJ34)
CVVTGYSTDKLIF

SEQ ID NO: 98734 - protein, 13 aa, Homo sapiens
  CDR3 for beta chain variable domain of TCR clone 49367 (TRBV28, TRBJ2-7)
CASKAGGVYEQYF

SEQ ID NO: 98735 - protein, 11 aa, Homo sapiens
  CDR3 for alpha chain variable domain of TCR clone 49368 (TRAV23/DV6, TRAJ58)
CAARLLRGETS

SEQ ID NO: 98736 - protein, 12 aa, Homo sapiens
  CDR3 for beta chain variable domain of TCR clone 49368 (TRBV10-2, TRBJ2-5)
CASSGGGKTQYF

SEQ ID NO: 98737 - protein, 11 aa, Homo sapiens
  CDR3 for alpha chain variable domain of TCR clone 49369 (TRAV2, TRAJ13)
CASGGYQKVTF

SEQ ID NO: 98738 - protein, 15 aa, Homo sapiens
  CDR3 for beta chain variable domain of TCR clone 49369 (TRBV11-1, TRBJ2-7)
CASSLNYGASHEQYF

SEQ ID NO: 98739 - protein, 16 aa, Homo sapiens
  CDR3 for alpha chain variable domain of TCR clone 49370 (TRAV12-3, TRAJ53)
CAISPGSGGSNYKLTF

SEQ ID NO: 98740 - protein, 17 aa, Homo sapiens
  CDR3 for beta chain variable domain of TCR clone 49370 (TRBV7-8, TRBJ2-6)
CASSAGTGGAGANVLTF

SEQ ID NO: 98741 - protein, 13 aa, Homo sapiens
  CDR3 for alpha chain variable domain of TCR clone 49371 (TRAV13-2, TRAJ53)
CAENMGSNYKLTF

SEQ ID NO: 98742 - protein, 15 aa, Homo sapiens
  CDR3 for beta chain variable domain of TCR clone 49371 (TRBV7-9, TRBJ1-5)
CASSQGHQPNQPQHF

SEQ ID NO: 98743 - protein, 13 aa, Homo sapiens
  CDR3 for alpha chain variable domain of TCR clone 49372 (TRAV3, TRAJ27)
CAVRPRGAGKSTF

SEQ ID NO: 98744 - protein, 13 aa, Homo sapiens
  CDR3 for beta chain variable domain of TCR clone 49372 (TRBV7-9, TRBJ2-3)
CASSPGSTDTQYF

SEQ ID NO: 98745 - protein, 11 aa, Homo sapiens
  CDR3 for alpha chain variable domain of TCR clone 49373 (TRAV8-1, TRAJ7)
CAVNSYNRLAF

SEQ ID NO: 98746 - protein, 17 aa, Homo sapiens
  CDR3 for beta chain variable domain of TCR clone 49373 (TRBV13, TRBJ2-3)
CASSLSRVAGGRNTQYF

SEQ ID NO: 98747 - protein, 13 aa, Homo sapiens
  CDR3 for alpha chain variable domain of TCR clone 49374 (TRAV2, TRAJ40)
CAVVTSGTYKYIF

SEQ ID NO: 98748 - protein, 15 aa, Homo sapiens
  CDR3 for beta chain variable domain of TCR clone 49374 (TRBV9, TRBJ1-6)
CASSVAGAGDSPLHF

SEQ ID NO: 98749 - protein, 14 aa, Homo sapiens
  CDR3 for alpha chain variable domain of TCR clone 49375 (TRAV3, TRAJ34)
CAVRDINNTDKLIF

SEQ ID NO: 98750 - protein, 14 aa, Homo sapiens
  CDR3 for beta chain variable domain of TCR clone 49375 (TRBV7-2, TRBJ2-2)
CASSLGQNNGELFF

SEQ ID NO: 98751 - protein, 21 aa, Homo sapiens
  CDR3 for alpha chain variable domain of TCR clone 49376 (TRAV1-1, TRAJ6)
CLLLLRCDRLERTGGSYIPTF

SEQ ID NO: 98752 - protein, 13 aa, Homo sapiens
  CDR3 for beta chain variable domain of TCR clone 49376 (TRBV10-2, TRBJ2-7)
CASGASGGYEQYF

SEQ ID NO: 98753 - protein, 11 aa, Homo sapiens
  CDR3 for alpha chain variable domain of TCR clone 49377 (TRAV21, TRAJ13)
CAHYNTDKLIF

SEQ ID NO: 98754 - protein, 15 aa, Homo sapiens
  CDR3 for beta chain variable domain of TCR clone 49377 (TRBV19, TRBJ1-5)
CASSIVWADNQPQHF

SEQ ID NO: 98755 - protein, 10 aa, Homo sapiens
  CDR3 for alpha chain variable domain of TCR clone 49378 (TRAV25, TRAJ20)
CAVNDYKFSF

SEQ ID NO: 98756 - protein, 17 aa, Homo sapiens
  CDR3 for beta chain variable domain of TCR clone 49378 (TRBV5-4, TRBJ2-1)
CASSSAGGRGPYNEQFF

SEQ ID NO: 98757 - protein, 12 aa, Homo sapiens
  CDR3 for alpha chain variable domain of TCR clone 49379 (TRAV25, TRAJ26)
CAGDNYGQDFVF

SEQ ID NO: 98758 - protein, 14 aa, Homo sapiens
  CDR3 for beta chain variable domain of TCR clone 49379 (TRBV5-1, TRBJ2-7)
CASSRGESLYEQYF

SEQ ID NO: 98759 - protein, 14 aa, Homo sapiens
  CDR3 for alpha chain variable domain of TCR clone 49380 (TRAV12-1, TRAJ30)
CVVNIGGRDDEIIF

SEQ ID NO: 98760 - protein, 15 aa, Homo sapiens
  CDR3 for beta chain variable domain of TCR clone 49380 (TRBV18, TRBJ1-2)
CASSPSNTPNYGYTF

SEQ ID NO: 98761 - protein, 17 aa, Homo sapiens
  CDR3 for alpha chain variable domain of TCR clone 49381 (TRAV3, TRAJ6)
CAVRDGPRAGGSYIPTL

SEQ ID NO: 98762 - protein, 12 aa, Homo sapiens
  CDR3 for beta chain variable domain of TCR clone 49381 (TRBV11-2, TRBJ2-1)
CASSPGNNEQFF

SEQ ID NO: 98763 - protein, 14 aa, Homo sapiens
  CDR3 for alpha chain variable domain of TCR clone 49382 (TRAV21, TRAJ23)
CAIMIYNQGGKLIF

SEQ ID NO: 98764 - protein, 18 aa, Homo sapiens
  CDR3 for beta chain variable domain of TCR clone 49382 (TRBV20-1, TRBJ2-6)
CSAEATPTHGSGANVLTF

SEQ ID NO: 98765 - protein, 12 aa, Homo sapiens
  CDR3 for alpha chain variable domain of TCR clone 49383 (TRAV13-2, TRAJ16)
CAASPDGQKLLF

SEQ ID NO: 98766 - protein, 16 aa, Homo sapiens
  CDR3 for beta chain variable domain of TCR clone 49383 (TRBV9, TRBJ2-1)
CASSVGGGGNYNEQFF

SEQ ID NO: 98767 - protein, 13 aa, Homo sapiens
  CDR3 for alpha chain variable domain of TCR clone 49384 (TRAV1-1, TRAJ9)
CAAKNTGGFKTIF

SEQ ID NO: 98768 - protein, 14 aa, Homo sapiens
  CDR3 for beta chain variable domain of TCR clone 49384 (TRBV20-1, TRBJ2-1)
CSAQIGGSANGQFF

SEQ ID NO: 98769 - protein, 12 aa, Homo sapiens
  CDR3 for alpha chain variable domain of TCR clone 49385 (TRAV13-1, TRAJ49)
CAASICGNQFYF

SEQ ID NO: 98770 - protein, 14 aa, Homo sapiens
  CDR3 for beta chain variable domain of TCR clone 49385 (TRBV12-4, TRBJ1-1)
CASSLDGLNTEAFF

SEQ ID NO: 98771 - protein, 12 aa, Homo sapiens
  CDR3 for alpha chain variable domain of TCR clone 49386 (TRAV4, TRAJ26)
FLVGDYGQNFVF

SEQ ID NO: 98772 - protein, 16 aa, Homo sapiens
  CDR3 for beta chain variable domain of TCR clone 49386 (TRBV7-2, TRBJ1-2)
CASSSNQDRRGHGYTF

SEQ ID NO: 98773 - protein, 11 aa, Homo sapiens
  CDR3 for alpha chain variable domain of TCR clone 49387 (TRAV17, TRAJ31)
CATSNNARLMS

SEQ ID NO: 98774 - protein, 16 aa, Homo sapiens
  CDR3 for beta chain variable domain of TCR clone 49387 (TRBV7-8, TRBJ2-4)
CASSAERTLAKNIQYF

SEQ ID NO: 98775 - protein, 13 aa, Homo sapiens
  CDR3 for alpha chain variable domain of TCR clone 49388 (TRAV13-2, TRAJ5)
CAVMDTGRRALTF

SEQ ID NO: 98776 - protein, 12 aa, Homo sapiens
  CDR3 for beta chain variable domain of TCR clone 49388 (TRBV28, TRBJ2-7)
CASSLSSYEQYF

SEQ ID NO: 98777 - protein, 12 aa, Homo sapiens
  CDR3 for alpha chain variable domain of TCR clone 49389 (TRAV3, TRAJ20)
CAVRDGDYKLSF

SEQ ID NO: 98778 - protein, 13 aa, Homo sapiens
  CDR3 for beta chain variable domain of TCR clone 49389 (TRBV9, TRBJ2-1)
RASSVGQGGEQFF

SEQ ID NO: 98779 - protein, 12 aa, Homo sapiens
  CDR3 for alpha chain variable domain of TCR clone 49390 (TRAV12-3, TRAJ40)
CAMSSGTYKYIF

SEQ ID NO: 98780 - protein, 13 aa, Homo sapiens
  CDR3 for beta chain variable domain of TCR clone 49390 (TRBV10-3, TRBJ2-7)
CASKLAVNYEQYF

SEQ ID NO: 98781 - protein, 11 aa, Homo sapiens
  CDR3 for alpha chain variable domain of TCR clone 49391 (TRAV13-1, TRAJ39)
CASHAGNMLTL

SEQ ID NO: 98782 - protein, 15 aa, Homo sapiens
  CDR3 for beta chain variable domain of TCR clone 49391 (TRBV6-3, TRBJ2-7)
CASSSPGTVFYEQYF

SEQ ID NO: 98783 - protein, 12 aa, Homo sapiens
  CDR3 for alpha chain variable domain of TCR clone 49392 (TRAV12-3, TRAJ17)
CAMTLTGNKLTF

SEQ ID NO: 98784 - protein, 16 aa, Homo sapiens
  CDR3 for beta chain variable domain of TCR clone 49392 (TRBV7-8, TRBJ2-5)
CASSFGGQPAQETQYF

SEQ ID NO: 98785 - protein, 15 aa, Homo sapiens
  CDR3 for alpha chain variable domain of TCR clone 49393 (TRAV3, TRAJ5)
CAVRDLDTGRRALTF

SEQ ID NO: 98786 - protein, 13 aa, Homo sapiens
  CDR3 for beta chain variable domain of TCR clone 49393 (TRBV12-4, TRBJ2-7)
CASSPMETYEQYF

SEQ ID NO: 98787 - protein, 14 aa, Homo sapiens
  CDR3 for alpha chain variable domain of TCR clone 49394 (TRAV8-4, TRAJ13)
CAVTLFGGYQKVTF

SEQ ID NO: 98788 - protein, 14 aa, Homo sapiens
  CDR3 for beta chain variable domain of TCR clone 49394 (TRBV7-2, TRBJ1-2)
CASSQTGSTYGYTF

SEQ ID NO: 98789 - protein, 10 aa, Homo sapiens
  CDR3 for alpha chain variable domain of TCR clone 49395 (TRAV6, TRAJ36)
PLCTANNLFF

SEQ ID NO: 98790 - protein, 14 aa, Homo sapiens
  CDR3 for beta chain variable domain of TCR clone 49395 (TRBV10-2, TRBJ1-5)
CASSSTGRNQPQHF

SEQ ID NO: 98791 - protein, 14 aa, Homo sapiens
  CDR3 for alpha chain variable domain of TCR clone 49396 (TRAV12-2, TRAJ13)
CAVKKTGGYQKVTF

SEQ ID NO: 98792 - protein, 15 aa, Homo sapiens
  CDR3 for beta chain variable domain of TCR clone 49396 (TRBV4-1, TRBJ2-5)
CASSQWDLYQETQYF

SEQ ID NO: 98793 - protein, 16 aa, Homo sapiens
  CDR3 for alpha chain variable domain of TCR clone 49397 (TRAV30, TRAJ24)
CGTEIVDADSWGKFQF

SEQ ID NO: 98794 - protein, 15 aa, Homo sapiens
  CDR3 for beta chain variable domain of TCR clone 49397 (TRBV18, TRBJ1-1)
CASSPSSQLNTEAFF

SEQ ID NO: 98795 - protein, 10 aa, Homo sapiens
  CDR3 for alpha chain variable domain of TCR clone 49398 (TRAV36/DV7, TRAJ49)
CALTGNQFYF

SEQ ID NO: 98796 - protein, 17 aa, Homo sapiens
  CDR3 for beta chain variable domain of TCR clone 49398 (TRBV11-2, TRBJ2-1)
CASSLYPPGVEYNEQFF

SEQ ID NO: 98797 - protein, 15 aa, Homo sapiens
  CDR3 for alpha chain variable domain of TCR clone 49399 (TRAV26-1, TRAJ22)
CIVRVSFWFCKATDL

SEQ ID NO: 98798 - protein, 15 aa, Homo sapiens
  CDR3 for beta chain variable domain of TCR clone 49399 (TRBV7-9, TRBJ2-7)
CASSSSGLAVYEQYF

SEQ ID NO: 98799 - protein, 16 aa, Homo sapiens
  CDR3 for alpha chain variable domain of TCR clone 49400 (TRAV30, TRAJ24)
CGTEIVDADSWGKFQF

SEQ ID NO: 98800 - protein, 11 aa, Homo sapiens
  CDR3 for beta chain variable domain of TCR clone 49400 (TRBV27, TRBJ2-3)
CASSLGDTQYF

SEQ ID NO: 98801 - protein, 14 aa, Homo sapiens
  CDR3 for alpha chain variable domain of TCR clone 49401 (TRAV23/DV6, TRAJ6)
CAVSRSGGSYIPTF

SEQ ID NO: 98802 - protein, 17 aa, Homo sapiens
  CDR3 for beta chain variable domain of TCR clone 49401 (TRBV20-1, TRBJ2-1)
CSASASGLAGSYNEQFF

SEQ ID NO: 98803 - protein, 11 aa, Homo sapiens
  CDR3 for alpha chain variable domain of TCR clone 49402 (TRAV26-1, TRAJ37)
CIVRVGRKLIF

SEQ ID NO: 98804 - protein, 15 aa, Homo sapiens
  CDR3 for beta chain variable domain of TCR clone 49402 (TRBV7-9, TRBJ1-5)
CASSQGHQPNQPQHF

SEQ ID NO: 98805 - protein, 12 aa, Homo sapiens
  CDR3 for alpha chain variable domain of TCR clone 49403 (TRAV10, TRAJ34)
CVVSGKHRQAHL

SEQ ID NO: 98806 - protein, 14 aa, Homo sapiens
  CDR3 for beta chain variable domain of TCR clone 49403 (TRBV19, TRBJ2-1)
CASPTFVLSGEQSF

SEQ ID NO: 98807 - protein, 12 aa, Homo sapiens
  CDR3 for alpha chain variable domain of TCR clone 49404 (TRAV12-2, TRAJ10)
WGVTGGGNKLTF

SEQ ID NO: 98808 - protein, 19 aa, Homo sapiens
  CDR3 for beta chain variable domain of TCR clone 49404 (TRBV25-1, TRBJ2-2)
CAILVYRVDRGRKTGELFF

SEQ ID NO: 98809 - protein, 11 aa, Homo sapiens
  CDR3 for alpha chain variable domain of TCR clone 49405 (TRAV3, TRAJ21)
CAAGNFNKFYF

SEQ ID NO: 98810 - protein, 17 aa, Homo sapiens
  CDR3 for beta chain variable domain of TCR clone 49405 (TRBV24-1, TRBJ2-1)
CATSDVSTSGTYNEQFF

SEQ ID NO: 98811 - protein, 15 aa, Homo sapiens
  CDR3 for alpha chain variable domain of TCR clone 49406 (TRAV25, TRAJ52)
CAGTSGGTSYGKLTF

SEQ ID NO: 98812 - protein, 13 aa, Homo sapiens
  CDR3 for beta chain variable domain of TCR clone 49406 (TRBV6-5, TRBJ2-5)
CASSPQEGETQYF

SEQ ID NO: 98813 - protein, 18 aa, Homo sapiens
  CDR3 for alpha chain variable domain of TCR clone 49407 (TRAV12-3, TRAJ52)
CAMSRTNAGGTSYGKLTF

SEQ ID NO: 98814 - protein, 13 aa, Homo sapiens
  CDR3 for beta chain variable domain of TCR clone 49407 (TRBV7-9, TRBJ1-2)
CASSSKQNYGYTF

SEQ ID NO: 98815 - protein, 14 aa, Homo sapiens
  CDR3 for alpha chain variable domain of TCR clone 49408 (TRAV12-1, TRAJ9)
CVVTGYTGGFKTIF

SEQ ID NO: 98816 - protein, 15 aa, Homo sapiens
  CDR3 for beta chain variable domain of TCR clone 49408 (TRBV19, TRBJ2-1)
CASSSPGVPLDEQFF

SEQ ID NO: 98817 - protein, 17 aa, Homo sapiens
  CDR3 for alpha chain variable domain of TCR clone 49409 (TRAV13-1, TRAJ52)
CAAGRNAGGTSYGKLTF

SEQ ID NO: 98818 - protein, 15 aa, Homo sapiens
  CDR3 for beta chain variable domain of TCR clone 49409 (TRBV28, TRBJ2-3)
CAPTFRDWSTDTQYF

SEQ ID NO: 98819 - protein, 12 aa, Homo sapiens
  CDR3 for alpha chain variable domain of TCR clone 49410 (TRAV2, TRAJ33)
CAVPDSNYQLIW

SEQ ID NO: 98820 - protein, 18 aa, Homo sapiens
  CDR3 for beta chain variable domain of TCR clone 49410 (TRBV7-3, TRBJ2-3)
CASSSTGTYPGSTGTQYF

SEQ ID NO: 98821 - protein, 15 aa, Homo sapiens
  CDR3 for alpha chain variable domain of TCR clone 49411 (TRAV21, TRAJ53)
CATLNSGGSNYKLTF

SEQ ID NO: 98822 - protein, 15 aa, Homo sapiens
  CDR3 for beta chain variable domain of TCR clone 49411 (TRBV6-1, TRBJ2-4)
CASSEAVWTINMQYF

SEQ ID NO: 98823 - protein, 15 aa, Homo sapiens
  CDR3 for alpha chain variable domain of TCR clone 49412 (TRAV12-1, TRAJ15)
CVVTRANQAGTALIF

SEQ ID NO: 98824 - protein, 14 aa, Homo sapiens
  CDR3 for beta chain variable domain of TCR clone 49412 (TRBV5-1, TRBJ1-1)
CAISLVSINTEAFF

SEQ ID NO: 98825 - protein, 13 aa, Homo sapiens
  CDR3 for alpha chain variable domain of TCR clone 49413 (TRAV2, TRAJ15)
CAVASQAGTAPIF

SEQ ID NO: 98826 - protein, 14 aa, Homo sapiens
  CDR3 for beta chain variable domain of TCR clone 49413 (TRBV25-1, TRBJ1-1)
CASTHLGGNTEAFF

SEQ ID NO: 98827 - protein, 15 aa, Homo sapiens
  CDR3 for alpha chain variable domain of TCR clone 49414 (TRAV23/DV6, TRAJ18)
CAARYRGSTLGRLYF

SEQ ID NO: 98828 - protein, 14 aa, Homo sapiens
  CDR3 for beta chain variable domain of TCR clone 49414 (TRBV6-1, TRBJ1-3)
CASVQGGGGNTIYF

SEQ ID NO: 98829 - protein, 18 aa, Homo sapiens
  CDR3 for alpha chain variable domain of TCR clone 49415 (TRAV26-1, TRAJ5)
CIVRVVPPRDTGRRALTF

SEQ ID NO: 98830 - protein, 15 aa, Homo sapiens
  CDR3 for beta chain variable domain of TCR clone 49415 (TRBV7-9, TRBJ2-7)
RASSLPMGQANEQYF

SEQ ID NO: 98831 - protein, 12 aa, Homo sapiens
  CDR3 for alpha chain variable domain of TCR clone 49416 (TRAV21, TRAJ13)
PGPSGGYQKVTF

SEQ ID NO: 98832 - protein, 15 aa, Homo sapiens
  CDR3 for beta chain variable domain of TCR clone 49416 (TRBV11-2, TRBJ1-3)
CASSLDGTVGNTIYF

SEQ ID NO: 98833 - protein, 11 aa, Homo sapiens
  CDR3 for alpha chain variable domain of TCR clone 49417 (TRAV1-2, TRAJ31)
CAVNNNARLMF

SEQ ID NO: 98834 - protein, 17 aa, Homo sapiens
  CDR3 for beta chain variable domain of TCR clone 49417 (TRBV7-8, TRBJ2-6)
CASSAGTGGAGANVLTF

SEQ ID NO: 98835 - protein, 12 aa, Homo sapiens
  CDR3 for alpha chain variable domain of TCR clone 49418 (TRAV12-3, TRAJ17)
CTMTLTGNKLTF

SEQ ID NO: 98836 - protein, 13 aa, Homo sapiens
  CDR3 for beta chain variable domain of TCR clone 49418 (TRBV12-4, TRBJ1-1)
CASSPGTGFEAFF

SEQ ID NO: 98837 - protein, 21 aa, Homo sapiens
  CDR3 for alpha chain variable domain of TCR clone 49419 (TRAV1-2, TRAJ37)
CLLPLCCERFHGSGNTGKLIF

SEQ ID NO: 98838 - protein, 14 aa, Homo sapiens
  CDR3 for beta chain variable domain of TCR clone 49419 (TRBV2, TRBJ2-5)
CASSEVLAQGTQYF

SEQ ID NO: 98839 - protein, 13 aa, Homo sapiens
  CDR3 for alpha chain variable domain of TCR clone 49420 (TRAV8-3, TRAJ28)
CAVGAVGSYLLTF

SEQ ID NO: 98840 - protein, 15 aa, Homo sapiens
  CDR3 for beta chain variable domain of TCR clone 49420 (TRBV7-9, TRBJ1-5)
CASSQGHQPNQPQHF

SEQ ID NO: 98841 - protein, 12 aa, Homo sapiens
  CDR3 for alpha chain variable domain of TCR clone 49421 (TRAV12-3, TRAJ17)
CAMTLTGDKLTF

SEQ ID NO: 98842 - protein, 14 aa, Homo sapiens
  CDR3 for beta chain variable domain of TCR clone 49421 (TRBV25-1, TRBJ1-1)
CASTHLGGNTEAFF

SEQ ID NO: 98843 - protein, 16 aa, Homo sapiens
  CDR3 for alpha chain variable domain of TCR clone 49422 (TRAV8-4, TRAJ18)
CAVTASGGSTLGRLYF

SEQ ID NO: 98844 - protein, 14 aa, Homo sapiens
  CDR3 for beta chain variable domain of TCR clone 49422 (TRBV12-4, TRBJ1-2)
CASSSAGHIYGYTF

SEQ ID NO: 98845 - protein, 15 aa, Homo sapiens
  CDR3 for alpha chain variable domain of TCR clone 49423 (TRAV13-1, TRAJ32)
CSASIYGGATNKLIF

SEQ ID NO: 98846 - protein, 17 aa, Homo sapiens
  CDR3 for beta chain variable domain of TCR clone 49423 (TRBV7-3, TRBJ2-5)
CASSLGSGRSGSETQYF

SEQ ID NO: 98847 - protein, 14 aa, Homo sapiens
  CDR3 for alpha chain variable domain of TCR clone 49424 (TRAV13-1, TRAJ10)
CAAKEPGGRNKLTF

SEQ ID NO: 98848 - protein, 12 aa, Homo sapiens
  CDR3 for beta chain variable domain of TCR clone 49424 (TRBV11-2, TRBJ2-2)
CASSLGGGELFF

SEQ ID NO: 98849 - protein, 14 aa, Homo sapiens
  CDR3 for alpha chain variable domain of TCR clone 49425 (TRAV3, TRAJ22)
CSVRDYGSARQLTF

SEQ ID NO: 98850 - protein, 13 aa, Homo sapiens
  CDR3 for beta chain variable domain of TCR clone 49425 (TRBV11-2, TRBJ2-5)
CASGHGAKETQYF

SEQ ID NO: 98851 - protein, 16 aa, Homo sapiens
  CDR3 for alpha chain variable domain of TCR clone 49426 (TRAV30, TRAJ24)
CGTEIVDADSWGKFQF

SEQ ID NO: 98852 - protein, 14 aa, Homo sapiens
  CDR3 for beta chain variable domain of TCR clone 49426 (TRBV20-1, TRBJ2-7)
CSAPELAGVGEQYF

SEQ ID NO: 98853 - protein, 12 aa, Homo sapiens
  CDR3 for alpha chain variable domain of TCR clone 49427 (TRAV17, TRAJ57)
CATDGGSEELVF

SEQ ID NO: 98854 - protein, 18 aa, Homo sapiens
  CDR3 for beta chain variable domain of TCR clone 49427 (TRBV7-9, TRBJ2-1)
CASSLAVSGTSGRNEQFF

SEQ ID NO: 98855 - protein, 15 aa, Homo sapiens
  CDR3 for alpha chain variable domain of TCR clone 49428 (TRAV2, TRAJ9)
CAVEDRGTGGFKTIF

SEQ ID NO: 98856 - protein, 16 aa, Homo sapiens
  CDR3 for beta chain variable domain of TCR clone 49428 (TRBV24-1, TRBJ2-3)
CATSDPRTGATDTQYF

SEQ ID NO: 98857 - protein, 15 aa, Homo sapiens
  CDR3 for alpha chain variable domain of TCR clone 49429 (TRAV23/DV6, TRAJ44)
CAARTLTGTASRLTF

SEQ ID NO: 98858 - protein, 17 aa, Homo sapiens
  CDR3 for beta chain variable domain of TCR clone 49429 (TRBV24-1, TRBJ2-1)
CATSDVSTSGTYNEQFF

SEQ ID NO: 98859 - protein, 16 aa, Homo sapiens
  CDR3 for alpha chain variable domain of TCR clone 49430 (TRAV30, TRAJ24)
CGTEIVDADSWGKFQF

SEQ ID NO: 98860 - protein, 14 aa, Homo sapiens
  CDR3 for beta chain variable domain of TCR clone 49430 (TRBV13, TRBJ1-1)
CASTVITVNTEAFF

SEQ ID NO: 98861 - protein, 14 aa, Homo sapiens
  CDR3 for alpha chain variable domain of TCR clone 49431 (TRAV20, TRAJ56)
CAVQFGGANSKLTF

SEQ ID NO: 98862 - protein, 12 aa, Homo sapiens
  CDR3 for beta chain variable domain of TCR clone 49431 (TRBV11-2, TRBJ2-1)
CASSPGNNEQFF

SEQ ID NO: 98863 - protein, 14 aa, Homo sapiens
  CDR3 for alpha chain variable domain of TCR clone 49432 (TRAV24, TRAJ57)
CASPTQGGSEKLVL

SEQ ID NO: 98864 - protein, 15 aa, Homo sapiens
  CDR3 for beta chain variable domain of TCR clone 49432 (TRBV7-2, TRBJ2-1)
CASSLVAGGHNEQFF

SEQ ID NO: 98865 - protein, 12 aa, Homo sapiens
  CDR3 for alpha chain variable domain of TCR clone 49433 (TRAV12-1, TRAJ40)
CVLYSGTYKYIF

SEQ ID NO: 98866 - protein, 18 aa, Homo sapiens
  CDR3 for beta chain variable domain of TCR clone 49433 (TRBV12-4, TRBJ2-2)
CASSLVAGTRGRAGELFF

SEQ ID NO: 98867 - protein, 14 aa, Homo sapiens
  CDR3 for alpha chain variable domain of TCR clone 49434 (TRAV17, TRAJ22)
CATSPSGSARQRTF

SEQ ID NO: 98868 - protein, 15 aa, Homo sapiens
  CDR3 for beta chain variable domain of TCR clone 49434 (TRBV4-1, TRBJ2-5)
CASSQWDLYQETQYF

SEQ ID NO: 98869 - protein, 14 aa, Homo sapiens
  CDR3 for alpha chain variable domain of TCR clone 49435 (TRAV12-2, TRAJ44)
CAVNPAGTASKLTF

SEQ ID NO: 98870 - protein, 11 aa, Homo sapiens
  CDR3 for beta chain variable domain of TCR clone 49435 (TRBV7-2, TRBJ2-7)
CASSSGLWQYF

SEQ ID NO: 98871 - protein, 14 aa, Homo sapiens
  CDR3 for alpha chain variable domain of TCR clone 49436 (TRAV3, TRAJ21)
CAVESQANFNKFYF

SEQ ID NO: 98872 - protein, 18 aa, Homo sapiens
  CDR3 for beta chain variable domain of TCR clone 49436 (TRBV7-9, TRBJ2-1)
RASSLAVSGTSGRNEQFF

SEQ ID NO: 98873 - protein, 16 aa, Homo sapiens
  CDR3 for alpha chain variable domain of TCR clone 49437 (TRAV4, TRAJ22)
CLVGDLYSGSARQLTF

SEQ ID NO: 98874 - protein, 14 aa, Homo sapiens
  CDR3 for beta chain variable domain of TCR clone 49437 (TRBV7-9, TRBJ2-2)
CASSLVQDTGELFF

SEQ ID NO: 98875 - protein, 15 aa, Homo sapiens
  CDR3 for alpha chain variable domain of TCR clone 49438 (TRAV12-3, TRAJ27)
CAMRAYNTNAGKSTF

SEQ ID NO: 98876 - protein, 13 aa, Homo sapiens
  CDR3 for beta chain variable domain of TCR clone 49438 (TRBV11-2, TRBJ2-5)
CASSRAPSETQYF

SEQ ID NO: 98877 - protein, 14 aa, Homo sapiens
  CDR3 for alpha chain variable domain of TCR clone 49439 (TRAV17, TRAJ54)
CATDANQGAQTLVF

SEQ ID NO: 98878 - protein, 12 aa, Homo sapiens
  CDR3 for beta chain variable domain of TCR clone 49439 (TRBV6-3, TRBJ2-1)
CASSGSYNEQFF

SEQ ID NO: 98879 - protein, 14 aa, Homo sapiens
  CDR3 for alpha chain variable domain of TCR clone 49440 (TRAV38-1, TRAJ29)
CAFITPSGNTPLVF

SEQ ID NO: 98880 - protein, 14 aa, Homo sapiens
  CDR3 for beta chain variable domain of TCR clone 49440 (TRBV6-1, TRBJ1-3)
CASVQGGGGNTIYF

SEQ ID NO: 98881 - protein, 15 aa, Homo sapiens
  CDR3 for alpha chain variable domain of TCR clone 49441 (TRAV20, TRAJ24)
CAVQAAPDSWGKFQF

SEQ ID NO: 98882 - protein, 14 aa, Homo sapiens
  CDR3 for beta chain variable domain of TCR clone 49441 (TRBV20-1, TRBJ1-1)
CSARDRGRGSEAFF

SEQ ID NO: 98883 - protein, 15 aa, Homo sapiens
  CDR3 for alpha chain variable domain of TCR clone 49442 (TRAV17, TRAJ56)
CATEPFTGANSKLTF

SEQ ID NO: 98884 - protein, 14 aa, Homo sapiens
  CDR3 for beta chain variable domain of TCR clone 49442 (TRBV19, TRBJ2-1)
CASPTLVLSGEQFF

SEQ ID NO: 98885 - protein, 23 aa, Homo sapiens
  CDR3 for alpha chain variable domain of TCR clone 49443 (TRAV8-3, )
CAVVTTRIPDIQNPDPAVYQLSD

SEQ ID NO: 98886 - protein, 14 aa, Homo sapiens
  CDR3 for beta chain variable domain of TCR clone 49443 (TRBV11-2, TRBJ2-7)
CASSPSTTSYEQYF

SEQ ID NO: 98887 - protein, 11 aa, Homo sapiens
  CDR3 for alpha chain variable domain of TCR clone 49444 (TRAV35, TRAJ34)
CWARNTDKLTF

SEQ ID NO: 98888 - protein, 12 aa, Homo sapiens
  CDR3 for beta chain variable domain of TCR clone 49444 (TRBV11-2, TRBJ2-2)
CASSLGGGELFF

SEQ ID NO: 98889 - protein, 12 aa, Homo sapiens
  CDR3 for alpha chain variable domain of TCR clone 49445 (TRAV12-1, TRAJ40)
CVGYSGTYKYIF

SEQ ID NO: 98890 - protein, 14 aa, Homo sapiens
  CDR3 for beta chain variable domain of TCR clone 49445 (TRBV7-9, TRBJ2-5)
CASSLDTAQETQYF

SEQ ID NO: 98891 - protein, 14 aa, Homo sapiens
  CDR3 for alpha chain variable domain of TCR clone 49446 (TRAV13-1, TRAJ44)
CAAKSTGTASKLTF

SEQ ID NO: 98892 - protein, 17 aa, Homo sapiens
  CDR3 for beta chain variable domain of TCR clone 49446 (TRBV7-3, TRBJ2-3)
CASSLMKRMRGADTQYF

SEQ ID NO: 98893 - protein, 14 aa, Homo sapiens
  CDR3 for alpha chain variable domain of TCR clone 49447 (TRAV13-1, TRAJ44)
CAAKATGTAGKLTF

SEQ ID NO: 98894 - protein, 22 aa, Homo sapiens
  CDR3 for beta chain variable domain of TCR clone 49447 (TRBV19, TRBJ2-1)
CASSVRDRVTGTSGRIYNEQFF

SEQ ID NO: 98895 - protein, 14 aa, Homo sapiens
  CDR3 for alpha chain variable domain of TCR clone 49448 (TRAV12-3, TRAJ29)
CAMILLSGNTPLVF

SEQ ID NO: 98896 - protein, 16 aa, Homo sapiens
  CDR3 for beta chain variable domain of TCR clone 49448 (TRBV28, TRBJ2-7)
CASSSGTSGREYEQYF

SEQ ID NO: 98897 - protein, 14 aa, Homo sapiens
  CDR3 for alpha chain variable domain of TCR clone 49449 (TRAV8-2, TRAJ4)
CVVGPSGGYNKLIF

SEQ ID NO: 98898 - protein, 15 aa, Homo sapiens
  CDR3 for beta chain variable domain of TCR clone 49449 (TRBV27, TRBJ2-7)
CASRFWGQGADEQYF

SEQ ID NO: 98899 - protein, 16 aa, Homo sapiens
  CDR3 for alpha chain variable domain of TCR clone 49450 (TRAV12-1, TRAJ22)
CVVNTISSGSARQLTF

SEQ ID NO: 98900 - protein, 13 aa, Homo sapiens
  CDR3 for beta chain variable domain of TCR clone 49450 (TRBV19, TRBJ2-1)
CASNGGVFNEQFF

SEQ ID NO: 98901 - protein, 17 aa, Homo sapiens
  CDR3 for alpha chain variable domain of TCR clone 49451 (TRAV3, TRAJ6)
CAVRDGPRAGGSYIPTF

SEQ ID NO: 98902 - protein, 13 aa, Homo sapiens
  CDR3 for beta chain variable domain of TCR clone 49451 (TRBV5-1, TRBJ1-3)
CASSPRERSTIYF

SEQ ID NO: 98903 - protein, 15 aa, Homo sapiens
  CDR3 for alpha chain variable domain of TCR clone 49452 (TRAV29/DV5, TRAJ24)
CAASGATDSWGKFQF

SEQ ID NO: 98904 - protein, 15 aa, Homo sapiens
  CDR3 for beta chain variable domain of TCR clone 49452 (TRBV4-1, TRBJ1-4)
CASSDTGGTNEKLFF

SEQ ID NO: 98905 - protein, 14 aa, Homo sapiens
  CDR3 for alpha chain variable domain of TCR clone 49453 (TRAV20, TRAJ20)
CAVRRGYNDYKLSF

SEQ ID NO: 98906 - protein, 13 aa, Homo sapiens
  CDR3 for beta chain variable domain of TCR clone 49453 (TRBV19, TRBJ1-2)
CASSVPGQDGYTF

SEQ ID NO: 98907 - protein, 11 aa, Homo sapiens
  CDR3 for alpha chain variable domain of TCR clone 49454 (TRAV2, TRAJ13)
CASGGYQKVTF

SEQ ID NO: 98908 - protein, 16 aa, Homo sapiens
  CDR3 for beta chain variable domain of TCR clone 49454 (TRBV29-1, TRBJ2-7)
CSVEVVGTSGSYEQYF

SEQ ID NO: 98909 - protein, 13 aa, Homo sapiens
  CDR3 for alpha chain variable domain of TCR clone 49455 (TRAV17, TRAJ29)
CATDAFRKHTSCL

SEQ ID NO: 98910 - protein, 13 aa, Homo sapiens
  CDR3 for beta chain variable domain of TCR clone 49455 (TRBV5-7, TRBJ2-6)
CASTSSGANALTF

SEQ ID NO: 98911 - protein, 15 aa, Homo sapiens
  CDR3 for alpha chain variable domain of TCR clone 49456 (TRAV26-2, TRAJ39)
CSLRGNNNAGNMPTF

SEQ ID NO: 98912 - protein, 15 aa, Homo sapiens
  CDR3 for beta chain variable domain of TCR clone 49456 (TRBV5-4, TRBJ1-1)
CASSSLGWANTEAFF

SEQ ID NO: 98913 - protein, 13 aa, Homo sapiens
  CDR3 for alpha chain variable domain of TCR clone 49457 (TRAV13-1, TRAJ48)
CARSNFGNEKLTF

SEQ ID NO: 98914 - protein, 14 aa, Homo sapiens
  CDR3 for beta chain variable domain of TCR clone 49457 (TRBV10-3, TRBJ2-1)
CAISSDLAYNEQFF

SEQ ID NO: 98915 - protein, 11 aa, Homo sapiens
  CDR3 for alpha chain variable domain of TCR clone 49458 (TRAV2, TRAJ33)
CAVDSNYQLIW

SEQ ID NO: 98916 - protein, 16 aa, Homo sapiens
  CDR3 for beta chain variable domain of TCR clone 49458 (TRBV12-4, TRBJ1-5)
CASSRPVGGSNQPQHF

SEQ ID NO: 98917 - protein, 13 aa, Homo sapiens
  CDR3 for alpha chain variable domain of TCR clone 49459 (TRAV36/DV7, TRAJ7)
CAGTRYGNNRLAF

SEQ ID NO: 98918 - protein, 14 aa, Homo sapiens
  CDR3 for beta chain variable domain of TCR clone 49459 (TRBV19, TRBJ2-1)
CASPTVVLSGEQFF

SEQ ID NO: 98919 - protein, 12 aa, Homo sapiens
  CDR3 for alpha chain variable domain of TCR clone 49460 (TRAV3, TRAJ7)
CADLLWEQQTRF

SEQ ID NO: 98920 - protein, 13 aa, Homo sapiens
  CDR3 for beta chain variable domain of TCR clone 49460 (TRBV7-3, TRBJ2-5)
CASSFRGGETQYS

SEQ ID NO: 98921 - protein, 11 aa, Homo sapiens
  CDR3 for alpha chain variable domain of TCR clone 49461 (TRAV12-3, TRAJ6)
CAMSGSYIPTF

SEQ ID NO: 98922 - protein, 14 aa, Homo sapiens
  CDR3 for beta chain variable domain of TCR clone 49461 (TRBV7-2, TRBJ2-7)
CASSPKTSFYEQYF

SEQ ID NO: 98923 - protein, 20 aa, Homo sapiens
  CDR3 for alpha chain variable domain of TCR clone 49462 (TRAV26-1, TRAJ42)
CCVLLHRQTYYGGSQGNLIF

SEQ ID NO: 98924 - protein, 16 aa, Homo sapiens
  CDR3 for beta chain variable domain of TCR clone 49462 (TRBV7-3, TRBJ2-2)
CASSLKLGTLSGELFF

SEQ ID NO: 98925 - protein, 13 aa, Homo sapiens
  CDR3 for alpha chain variable domain of TCR clone 49463 (TRAV13-1, TRAJ21)
CAASIYNFNKFYF

SEQ ID NO: 98926 - protein, 15 aa, Homo sapiens
  CDR3 for beta chain variable domain of TCR clone 49463 (TRBV28, TRBJ2-7)
CASKKPSGRAYEQYF

SEQ ID NO: 98927 - protein, 13 aa, Homo sapiens
  CDR3 for alpha chain variable domain of TCR clone 49464 (TRAV21, TRAJ20)
CAVGRRVDYKLSF

SEQ ID NO: 98928 - protein, 13 aa, Homo sapiens
  CDR3 for beta chain variable domain of TCR clone 49464 (TRBV6-1, TRBJ1-1)
CASSRQGNTEAFF

SEQ ID NO: 98929 - protein, 15 aa, Homo sapiens
  CDR3 for alpha chain variable domain of TCR clone 49465 (TRAV26-1, TRAJ39)
RIVRVASNAGNMLTF

SEQ ID NO: 98930 - protein, 14 aa, Homo sapiens
  CDR3 for beta chain variable domain of TCR clone 49465 (TRBV7-6, TRBJ2-3)
CASSVAGGTDTQYF

SEQ ID NO: 98931 - protein, 13 aa, Homo sapiens
  CDR3 for alpha chain variable domain of TCR clone 49466 (TRAV27, TRAJ29)
CAGAHSGNTHLVF

SEQ ID NO: 98932 - protein, 14 aa, Homo sapiens
  CDR3 for beta chain variable domain of TCR clone 49466 (TRBV7-9, TRBJ2-7)
CASSIGQGAGEQYF

SEQ ID NO: 98933 - protein, 14 aa, Homo sapiens
  CDR3 for alpha chain variable domain of TCR clone 49467 (TRAV2, TRAJ22)
CAVGRGGSARQLTF

SEQ ID NO: 98934 - protein, 12 aa, Homo sapiens
  CDR3 for beta chain variable domain of TCR clone 49467 (TRBV19, TRBJ2-1)
CASSMQDTGQFF

SEQ ID NO: 98935 - protein, 13 aa, Homo sapiens
  CDR3 for alpha chain variable domain of TCR clone 49468 (TRAV3, TRAJ21)
CAVGNFNNFTLDL

SEQ ID NO: 98936 - protein, 16 aa, Homo sapiens
  CDR3 for beta chain variable domain of TCR clone 49468 (TRBV19, TRBJ2-1)
CASSKAGPSSYNEQFF

SEQ ID NO: 98937 - protein, 12 aa, Homo sapiens
  CDR3 for alpha chain variable domain of TCR clone 49469 (TRAV12-3, TRAJ17)
CAMKITGNKLTF

SEQ ID NO: 98938 - protein, 15 aa, Homo sapiens
  CDR3 for beta chain variable domain of TCR clone 49469 (TRBV20-1, TRBJ2-7)
CSARDRVSGMDEQYF

SEQ ID NO: 98939 - protein, 13 aa, Homo sapiens
  CDR3 for alpha chain variable domain of TCR clone 49470 (TRAV8-2, TRAJ49)
CVVSTSTGNQFYF

SEQ ID NO: 98940 - protein, 14 aa, Homo sapiens
  CDR3 for beta chain variable domain of TCR clone 49470 (TRBV11-2, TRBJ2-7)
CASSRSGGAGEQYF

SEQ ID NO: 98941 - protein, 15 aa, Homo sapiens
  CDR3 for alpha chain variable domain of TCR clone 49471 (TRAV3, TRAJ22)
CAVRDRGGSARQLTF

SEQ ID NO: 98942 - protein, 14 aa, Homo sapiens
  CDR3 for beta chain variable domain of TCR clone 49471 (TRBV7-2, TRBJ2-2)
CASRGQGAAGELFF

SEQ ID NO: 98943 - protein, 12 aa, Homo sapiens
  CDR3 for alpha chain variable domain of TCR clone 49472 (TRAV8-3, TRAJ20)
CAVGANDYKLSF

SEQ ID NO: 98944 - protein, 13 aa, Homo sapiens
  CDR3 for beta chain variable domain of TCR clone 49472 (TRBV28, TRBJ1-2)
CAGRDRGNYGYTF

SEQ ID NO: 98945 - protein, 13 aa, Homo sapiens
  CDR3 for alpha chain variable domain of TCR clone 49473 (TRAV38-1, TRAJ42)
CARWGGSQGNLIF

SEQ ID NO: 98946 - protein, 17 aa, Homo sapiens
  CDR3 for beta chain variable domain of TCR clone 49473 (TRBV20-1, TRBJ2-1)
CSARDPLAGVWDNEHFF

SEQ ID NO: 98947 - protein, 16 aa, Homo sapiens
  CDR3 for alpha chain variable domain of TCR clone 49474 (TRAV12-3, TRAJ53)
CAVSPGSGGGNYKLTF

SEQ ID NO: 98948 - protein, 15 aa, Homo sapiens
  CDR3 for beta chain variable domain of TCR clone 49474 (TRBV7-2, TRBJ2-1)
CASSSGLAGGNEQFF

SEQ ID NO: 98949 - protein, 14 aa, Homo sapiens
  CDR3 for alpha chain variable domain of TCR clone 49475 (TRAV12-2, TRAJ13)
CAVKKTGGYQKVTF

SEQ ID NO: 98950 - protein, 14 aa, Homo sapiens
  CDR3 for beta chain variable domain of TCR clone 49475 (TRBV7-9, TRBJ2-5)
CASSLVGGEETQYF

SEQ ID NO: 98951 - protein, 12 aa, Homo sapiens
  CDR3 for alpha chain variable domain of TCR clone 49476 (TRAV12-3, TRAJ3)
CAIDSSASQIIF

SEQ ID NO: 98952 - protein, 17 aa, Homo sapiens
  CDR3 for beta chain variable domain of TCR clone 49476 (TRBV7-9, TRBJ2-3)
CASSLEEAGAYPDTQYF

SEQ ID NO: 98953 - protein, 14 aa, Homo sapiens
  CDR3 for alpha chain variable domain of TCR clone 49477 (TRAV12-2, TRAJ45)
CAVNKGGGADGLTF

SEQ ID NO: 98954 - protein, 15 aa, Homo sapiens
  CDR3 for beta chain variable domain of TCR clone 49477 (TRBV7-8, TRBJ2-1)
CASSSRLAAYNEQFF

SEQ ID NO: 98955 - protein, 13 aa, Homo sapiens
  CDR3 for alpha chain variable domain of TCR clone 49478 (TRAV2, TRAJ40)
CAVVTSRTYKYIF

SEQ ID NO: 98956 - protein, 15 aa, Homo sapiens
  CDR3 for beta chain variable domain of TCR clone 49478 (TRBV11-3, TRBJ2-3)
CASLKDGREGDTQYF

SEQ ID NO: 98957 - protein, 13 aa, Homo sapiens
  CDR3 for alpha chain variable domain of TCR clone 49479 (TRAV13-1, TRAJ12)
CAASPDSSSKLIF

SEQ ID NO: 98958 - protein, 16 aa, Homo sapiens
  CDR3 for beta chain variable domain of TCR clone 49479 (TRBV15, TRBJ2-1)
CATSRERLAGAYEQFF

SEQ ID NO: 98959 - protein, 13 aa, Homo sapiens
  CDR3 for alpha chain variable domain of TCR clone 49480 (TRAV17, TRAJ9)
CATDYTRGFKTIL

SEQ ID NO: 98960 - protein, 14 aa, Homo sapiens
  CDR3 for beta chain variable domain of TCR clone 49480 (TRBV19, TRBJ2-5)
CASSMTGQQETQYF

SEQ ID NO: 98961 - protein, 12 aa, Homo sapiens
  CDR3 for alpha chain variable domain of TCR clone 49481 (TRAV12-1, TRAJ40)
CVVYSGTYKYIF

SEQ ID NO: 98962 - protein, 18 aa, Homo sapiens
  CDR3 for beta chain variable domain of TCR clone 49481 (TRBV11-2, TRBJ2-3)
CASSLGGASRGAPNTKYF

SEQ ID NO: 98963 - protein, 12 aa, Homo sapiens
  CDR3 for alpha chain variable domain of TCR clone 49482 (TRAV13-1, TRAJ9)
CASHTGCFKTIF

SEQ ID NO: 98964 - protein, 18 aa, Homo sapiens
  CDR3 for beta chain variable domain of TCR clone 49482 (TRBV11-2, TRBJ2-3)
CASSLGGASRGAPNTQYF

SEQ ID NO: 98965 - protein, 14 aa, Homo sapiens
  CDR3 for alpha chain variable domain of TCR clone 49483 (TRAV3, TRAJ33)
CAVRYMGSNYQLIW

SEQ ID NO: 98966 - protein, 17 aa, Homo sapiens
  CDR3 for beta chain variable domain of TCR clone 49483 (TRBV19, TRBJ2-1)
CASSIWSAQPTHNEQFF

SEQ ID NO: 98967 - protein, 11 aa, Homo sapiens
  CDR3 for alpha chain variable domain of TCR clone 49484 (TRAV3, TRAJ17)
PRGAAGNKLTF

SEQ ID NO: 98968 - protein, 16 aa, Homo sapiens
  CDR3 for beta chain variable domain of TCR clone 49484 (TRBV7-6, TRBJ2-1)
CASSAPGPSSYNEQFL

SEQ ID NO: 98969 - protein, 15 aa, Homo sapiens
  CDR3 for alpha chain variable domain of TCR clone 49485 (TRAV25, TRAJ53)
CPTSNSGGSNYKLTF

SEQ ID NO: 98970 - protein, 13 aa, Homo sapiens
  CDR3 for beta chain variable domain of TCR clone 49485 (TRBV11-2, TRBJ2-5)
CASSSTGEETQYF

SEQ ID NO: 98971 - protein, 11 aa, Homo sapiens
  CDR3 for alpha chain variable domain of TCR clone 49486 (TRAV27, TRAJ47)
CRSNRGNKLVF

SEQ ID NO: 98972 - protein, 16 aa, Homo sapiens
  CDR3 for beta chain variable domain of TCR clone 49486 (TRBV7-9, TRBJ2-1)
CASSDVAGGSYNEQFF

SEQ ID NO: 98973 - protein, 13 aa, Homo sapiens
  CDR3 for alpha chain variable domain of TCR clone 49487 (TRAV1-2, TRAJ9)
CAVLNTGGFRTIF

SEQ ID NO: 98974 - protein, 14 aa, Homo sapiens
  CDR3 for beta chain variable domain of TCR clone 49487 (TRBV20-1, TRBJ2-3)
CSARGGTSTDTQYF

SEQ ID NO: 98975 - protein, 12 aa, Homo sapiens
  CDR3 for alpha chain variable domain of TCR clone 49488 (TRAV12-3, TRAJ20)
CAMVRGDYNLSF

SEQ ID NO: 98976 - protein, 14 aa, Homo sapiens
  CDR3 for beta chain variable domain of TCR clone 49488 (TRBV5-5, TRBJ1-5)
CASSGQGVDQPQHF

SEQ ID NO: 98977 - protein, 14 aa, Homo sapiens
  CDR3 for alpha chain variable domain of TCR clone 49489 (TRAV16, TRAJ17)
CALSGRAAGNKLTF

SEQ ID NO: 98978 - protein, 17 aa, Homo sapiens
  CDR3 for beta chain variable domain of TCR clone 49489 (TRBV18, TRBJ2-6)
CASSPRQGAVEANVLTF

SEQ ID NO: 98979 - protein, 12 aa, Homo sapiens
  CDR3 for alpha chain variable domain of TCR clone 49490 (TRAV12-3, TRAJ48)
CAMRVGNEKLTF

SEQ ID NO: 98980 - protein, 12 aa, Homo sapiens
  CDR3 for beta chain variable domain of TCR clone 49490 (TRBV13, TRBJ2-7)
CASSLQAYEQYF

SEQ ID NO: 98981 - protein, 14 aa, Homo sapiens
  CDR3 for alpha chain variable domain of TCR clone 49491 (TRAV12-1, TRAJ17)
CVVNYKAAGNKLTF

SEQ ID NO: 98982 - protein, 17 aa, Homo sapiens
  CDR3 for beta chain variable domain of TCR clone 49491 (TRBV20-1, TRBJ2-1)
CSASSSGLAGSYNEQFF

SEQ ID NO: 98983 - protein, 14 aa, Homo sapiens
  CDR3 for alpha chain variable domain of TCR clone 49492 (TRAV26-1, TRAJ22)
CIVRVYGSASQLTF

SEQ ID NO: 98984 - protein, 17 aa, Homo sapiens
  CDR3 for beta chain variable domain of TCR clone 49492 (TRBV7-3, TRBJ2-3)
CASSPGGLAGFGDTQYF

SEQ ID NO: 98985 - protein, 11 aa, Homo sapiens
  CDR3 for alpha chain variable domain of TCR clone 49493 (TRAV23/DV6, TRAJ23)
AMGNQGGKLIF

SEQ ID NO: 98986 - protein, 12 aa, Homo sapiens
  CDR3 for beta chain variable domain of TCR clone 49493 (TRBV11-2, TRBJ2-5)
CASSLGQETQYF

SEQ ID NO: 98987 - protein, 13 aa, Homo sapiens
  CDR3 for alpha chain variable domain of TCR clone 49494 (TRAV3, TRAJ20)
CAMRSLNDYKLSF

SEQ ID NO: 98988 - protein, 13 aa, Homo sapiens
  CDR3 for beta chain variable domain of TCR clone 49494 (TRBV6-1, TRBJ2-1)
CAGMDPTNNEQFF

SEQ ID NO: 98989 - protein, 12 aa, Homo sapiens
  CDR3 for alpha chain variable domain of TCR clone 49495 (TRAV21, TRAJ23)
CDVGPQGGKLIF

SEQ ID NO: 98990 - protein, 13 aa, Homo sapiens
  CDR3 for beta chain variable domain of TCR clone 49495 (TRBV20-1, TRBJ2-7)
CSARTGAGYEQYF

SEQ ID NO: 98991 - protein, 14 aa, Homo sapiens
  CDR3 for alpha chain variable domain of TCR clone 49496 (TRAV17, TRAJ56)
CATFPAGANSKLTF

SEQ ID NO: 98992 - protein, 13 aa, Homo sapiens
  CDR3 for beta chain variable domain of TCR clone 49496 (TRBV12-4, TRBJ2-2)
CASSITGSGELFF

SEQ ID NO: 98993 - protein, 23 aa, Homo sapiens
  CDR3 for alpha chain variable domain of TCR clone 49497 (TRAV1-1, TRAJ29)
LLQELQMKDSASYFLGRNTPLVF

SEQ ID NO: 98994 - protein, 13 aa, Homo sapiens
  CDR3 for beta chain variable domain of TCR clone 49497 (TRBV25-1, TRBJ2-7)
CASSEDGDYEQYF

SEQ ID NO: 98995 - protein, 16 aa, Homo sapiens
  CDR3 for alpha chain variable domain of TCR clone 49498 (TRAV16, TRAJ52)
CALSAAGGTSYGKLTF

SEQ ID NO: 98996 - protein, 13 aa, Homo sapiens
  CDR3 for beta chain variable domain of TCR clone 49498 (TRBV7-7, TRBJ2-3)
CASSLSRADTQYF

SEQ ID NO: 98997 - protein, 18 aa, Homo sapiens
  CDR3 for alpha chain variable domain of TCR clone 49499 (TRAV13-1, TRAJ52)
CAASKRSAGGTSYGKLTF

SEQ ID NO: 98998 - protein, 15 aa, Homo sapiens
  CDR3 for beta chain variable domain of TCR clone 49499 (TRBV20-1, TRBJ2-7)
CSARDRVSGMDEQYF

SEQ ID NO: 98999 - protein, 14 aa, Homo sapiens
  CDR3 for alpha chain variable domain of TCR clone 49500 (TRAV2, TRAJ9)
CAVEDRSGGFKTIF

SEQ ID NO: 99000 - protein, 19 aa, Homo sapiens
  CDR3 for beta chain variable domain of TCR clone 49500 (TRBV25-1, TRBJ2-2)
CAILVYRVGRGRKTGELFF

SEQ ID NO: 99001 - protein, 14 aa, Homo sapiens
  CDR3 for alpha chain variable domain of TCR clone 49501 (TRAV35, TRAJ33)
CAGSSQDSNYQLIW

SEQ ID NO: 99002 - protein, 15 aa, Homo sapiens
  CDR3 for beta chain variable domain of TCR clone 49501 (TRBV27, TRBJ2-1)
CASSNGGGSSNEQFF

SEQ ID NO: 99003 - protein, 13 aa, Homo sapiens
  CDR3 for alpha chain variable domain of TCR clone 49502 (TRAV8-1, TRAJ36)
CAANSPTGANNLF

SEQ ID NO: 99004 - protein, 15 aa, Homo sapiens
  CDR3 for beta chain variable domain of TCR clone 49502 (TRBV7-2, TRBJ2-3)
CASSLEQGGTDTQYF

SEQ ID NO: 99005 - protein, 16 aa, Homo sapiens
  CDR3 for alpha chain variable domain of TCR clone 49503 (TRAV3, TRAJ10)
CAVRDMRAGGGNKLTF

SEQ ID NO: 99006 - protein, 14 aa, Homo sapiens
  CDR3 for beta chain variable domain of TCR clone 49503 (TRBV5-1, TRBJ1-1)
CASSFTGRNTEAFF

SEQ ID NO: 99007 - protein, 14 aa, Homo sapiens
  CDR3 for alpha chain variable domain of TCR clone 49504 (TRAV17, TRAJ45)
CATASGGGADGLTF

SEQ ID NO: 99008 - protein, 13 aa, Homo sapiens
  CDR3 for beta chain variable domain of TCR clone 49504 (TRBV15, TRBJ2-7)
CATSTAGHYEQYF

SEQ ID NO: 99009 - protein, 14 aa, Homo sapiens
  CDR3 for alpha chain variable domain of TCR clone 49505 (TRAV23/DV6, TRAJ4)
CAANLSGGYNKLLF

SEQ ID NO: 99010 - protein, 17 aa, Homo sapiens
  CDR3 for beta chain variable domain of TCR clone 49505 (TRBV4-1, TRBJ1-3)
CASSPQRGIRFGNTIYF

SEQ ID NO: 99011 - protein, 11 aa, Homo sapiens
  CDR3 for alpha chain variable domain of TCR clone 49506 (TRAV1-2, TRAJ31)
CAVNNNTRLMF

SEQ ID NO: 99012 - protein, 15 aa, Homo sapiens
  CDR3 for beta chain variable domain of TCR clone 49506 (TRBV28, TRBJ2-1)
CASSIIAGGRSEQFF

SEQ ID NO: 99013 - protein, 14 aa, Homo sapiens
  CDR3 for alpha chain variable domain of TCR clone 49507 (TRAV12-3, TRAJ42)
CAMNYGGSQGNLIF

SEQ ID NO: 99014 - protein, 15 aa, Homo sapiens
  CDR3 for beta chain variable domain of TCR clone 49507 (TRBV5-7, TRBJ1-5)
CARSYGKLWDQPQHF

SEQ ID NO: 99015 - protein, 15 aa, Homo sapiens
  CDR3 for alpha chain variable domain of TCR clone 49508 (TRAV3, TRAJ22)
CAVRDRGGSARQLTF

SEQ ID NO: 99016 - protein, 14 aa, Homo sapiens
  CDR3 for beta chain variable domain of TCR clone 49508 (TRBV11-2, TRBJ2-7)
CASSLGAGAYEQYF

SEQ ID NO: 99017 - protein, 14 aa, Homo sapiens
  CDR3 for alpha chain variable domain of TCR clone 49509 (TRAV1-2, TRAJ16)
CAVNRFSDGQKLLF

SEQ ID NO: 99018 - protein, 16 aa, Homo sapiens
  CDR3 for beta chain variable domain of TCR clone 49509 (TRBV11-2, TRBJ1-2)
CGSSLDTGGADYGYTF

SEQ ID NO: 99019 - protein, 17 aa, Homo sapiens
  CDR3 for alpha chain variable domain of TCR clone 49510 (TRAV13-1, TRAJ5)
CSNPSLSRATGRRALTF

SEQ ID NO: 99020 - protein, 17 aa, Homo sapiens
  CDR3 for beta chain variable domain of TCR clone 49510 (TRBV24-1, TRBJ2-1)
CATSDVSTSGTYNEQFF

SEQ ID NO: 99021 - protein, 15 aa, Homo sapiens
  CDR3 for alpha chain variable domain of TCR clone 49511 (TRAV16, TRAJ4)
CVLEDPSGGYNKLIF

SEQ ID NO: 99022 - protein, 13 aa, Homo sapiens
  CDR3 for beta chain variable domain of TCR clone 49511 (TRBV7-3, TRBJ2-7)
CASSQAGGYEQYF

SEQ ID NO: 99023 - protein, 14 aa, Homo sapiens
  CDR3 for alpha chain variable domain of TCR clone 49512 (TRAV1-2, TRAJ8)
CAVREDTGFQKLVF

SEQ ID NO: 99024 - protein, 17 aa, Homo sapiens
  CDR3 for beta chain variable domain of TCR clone 49512 (TRBV19, TRBJ2-7)
CASSISFYDSYPYEQYF

SEQ ID NO: 99025 - protein, 10 aa, Homo sapiens
  CDR3 for alpha chain variable domain of TCR clone 49513 (TRAV23/DV6, TRAJ57)
CAASSTLSQG

SEQ ID NO: 99026 - protein, 17 aa, Homo sapiens
  CDR3 for beta chain variable domain of TCR clone 49513 (TRBV20-1, TRBJ1-2)
CSATASPGQGAFYGYTF

SEQ ID NO: 99027 - protein, 12 aa, Homo sapiens
  CDR3 for alpha chain variable domain of TCR clone 49514 (TRAV12-3, TRAJ20)
CAMVRGGYKLSF

SEQ ID NO: 99028 - protein, 12 aa, Homo sapiens
  CDR3 for beta chain variable domain of TCR clone 49514 (TRBV6-1, TRBJ2-7)
CASSDYSYEQYF

SEQ ID NO: 99029 - protein, 18 aa, Homo sapiens
  CDR3 for alpha chain variable domain of TCR clone 49515 (TRAV12-3, TRAJ52)
CEMSRTNAGGTSYGKLTF

SEQ ID NO: 99030 - protein, 17 aa, Homo sapiens
  CDR3 for beta chain variable domain of TCR clone 49515 (TRBV7-3, TRBJ2-3)
CASSLMKRMRGADTQYF

SEQ ID NO: 99031 - protein, 14 aa, Homo sapiens
  CDR3 for alpha chain variable domain of TCR clone 49516 (TRAV3, TRAJ36)
CAVRDGTGANNLFF

SEQ ID NO: 99032 - protein, 16 aa, Homo sapiens
  CDR3 for beta chain variable domain of TCR clone 49516 (TRBV20-1, TRBJ2-6)
CSASEGPGVGANVLTF

SEQ ID NO: 99033 - protein, 15 aa, Homo sapiens
  CDR3 for alpha chain variable domain of TCR clone 49517 (TRAV3, TRAJ22)
CAVRDRGGSARQLTF

SEQ ID NO: 99034 - protein, 14 aa, Homo sapiens
  CDR3 for beta chain variable domain of TCR clone 49517 (TRBV7-8, TRBJ2-3)
CASSLEAGTDTQYF

SEQ ID NO: 99035 - protein, 14 aa, Homo sapiens
  CDR3 for alpha chain variable domain of TCR clone 49518 (TRAV26-1, TRAJ39)
CIVRGSRAGNMLTF

SEQ ID NO: 99036 - protein, 14 aa, Homo sapiens
  CDR3 for beta chain variable domain of TCR clone 49518 (TRBV7-9, TRBJ1-5)
CQQPRSPAQSAQHF

SEQ ID NO: 99037 - protein, 13 aa, Homo sapiens
  CDR3 for alpha chain variable domain of TCR clone 49519 (TRAV8-3, TRAJ48)
CAVVPFGNEKLTL

SEQ ID NO: 99038 - protein, 15 aa, Homo sapiens
  CDR3 for beta chain variable domain of TCR clone 49519 (TRBV11-2, TRBJ2-1)
CASSSPSTRYNEQFF

SEQ ID NO: 99039 - protein, 13 aa, Homo sapiens
  CDR3 for alpha chain variable domain of TCR clone 49520 (TRAV8-3, TRAJ28)
CAVGAVGSYQLTF

SEQ ID NO: 99040 - protein, 15 aa, Homo sapiens
  CDR3 for beta chain variable domain of TCR clone 49520 (TRBV7-9, TRBJ1-5)
CASSQGHQPNQPQRF

SEQ ID NO: 99041 - protein, 14 aa, Homo sapiens
  CDR3 for alpha chain variable domain of TCR clone 49521 (TRAV12-2, TRAJ5)
CAVNRSTGRRALTF

SEQ ID NO: 99042 - protein, 17 aa, Homo sapiens
  CDR3 for beta chain variable domain of TCR clone 49521 (TRBV13, TRBJ2-3)
CASSLSRVAGGRNTQYF

SEQ ID NO: 99043 - protein, 13 aa, Homo sapiens
  CDR3 for alpha chain variable domain of TCR clone 49522 (TRAV8-4, TRAJ49)
CAVRTLTGNQFYF

SEQ ID NO: 99044 - protein, 16 aa, Homo sapiens
  CDR3 for beta chain variable domain of TCR clone 49522 (TRBV5-7, TRBJ2-5)
CASTLAPAGDRETQYF

SEQ ID NO: 99045 - protein, 16 aa, Homo sapiens
  CDR3 for alpha chain variable domain of TCR clone 49523 (TRAV20, TRAJ26)
CAVQHRRDNYGQNFVF

SEQ ID NO: 99046 - protein, 15 aa, Homo sapiens
  CDR3 for beta chain variable domain of TCR clone 49523 (TRBV7-2, TRBJ2-7)
CSSSWGQGAIYEQYF

SEQ ID NO: 99047 - protein, 12 aa, Homo sapiens
  CDR3 for alpha chain variable domain of TCR clone 49524 (TRAV30, TRAJ43)
CGTEERGSDMRF

SEQ ID NO: 99048 - protein, 17 aa, Homo sapiens
  CDR3 for beta chain variable domain of TCR clone 49524 (TRBV11-2, TRBJ2-1)
CASSLYPPGVEYNEQFF

SEQ ID NO: 99049 - protein, 11 aa, Homo sapiens
  CDR3 for alpha chain variable domain of TCR clone 49525 (TRAV2, TRAJ13)
CASGGYQKVAF

SEQ ID NO: 99050 - protein, 17 aa, Homo sapiens
  CDR3 for beta chain variable domain of TCR clone 49525 (TRBV20-1, TRBJ2-2)
CSASGSGQGGLTGELFF

SEQ ID NO: 99051 - protein, 13 aa, Homo sapiens
  CDR3 for alpha chain variable domain of TCR clone 49526 (TRAV2, TRAJ40)
CAVVTSGTYKYIF

SEQ ID NO: 99052 - protein, 15 aa, Homo sapiens
  CDR3 for beta chain variable domain of TCR clone 49526 (TRBV18, TRBJ1-1)
CASSPRQGENTEACF

SEQ ID NO: 99053 - protein, 14 aa, Homo sapiens
  CDR3 for alpha chain variable domain of TCR clone 49527 (TRAV8-2, TRAJ37)
CVVSTSGNTGKLIF

SEQ ID NO: 99054 - protein, 11 aa, Homo sapiens
  CDR3 for beta chain variable domain of TCR clone 49527 (TRBV18, TRBJ2-5)
CASSPRETQYF

SEQ ID NO: 99055 - protein, 14 aa, Homo sapiens
  CDR3 for alpha chain variable domain of TCR clone 49528 (TRAV19, TRAJ45)
CALKGGGGADGLTF

SEQ ID NO: 99056 - protein, 15 aa, Homo sapiens
  CDR3 for beta chain variable domain of TCR clone 49528 (TRBV9, TRBJ1-6)
CASSVAGTGDSPLHF

SEQ ID NO: 99057 - protein, 12 aa, Homo sapiens
  CDR3 for alpha chain variable domain of TCR clone 49529 (TRAV36/DV7, TRAJ54)
CAVVRGAQKLVF

SEQ ID NO: 99058 - protein, 14 aa, Homo sapiens
  CDR3 for beta chain variable domain of TCR clone 49529 (TRBV7-3, TRBJ1-1)
CASSLRGGNTEAFF

SEQ ID NO: 99059 - protein, 17 aa, Homo sapiens
  CDR3 for alpha chain variable domain of TCR clone 49530 (TRAV3, TRAJ6)
CAVRDGPRAGGSYIPTF

SEQ ID NO: 99060 - protein, 16 aa, Homo sapiens
  CDR3 for beta chain variable domain of TCR clone 49530 (TRBV28, TRBJ1-4)
CASSPPYRGRSEKLFF

SEQ ID NO: 99061 - protein, 15 aa, Homo sapiens
  CDR3 for alpha chain variable domain of TCR clone 49531 (TRAV3, TRAJ47)
CAVRDIGEYGNKLVF

SEQ ID NO: 99062 - protein, 14 aa, Homo sapiens
  CDR3 for beta chain variable domain of TCR clone 49531 (TRBV13, TRBJ2-5)
CAISLERVGETQYF

SEQ ID NO: 99063 - protein, 14 aa, Homo sapiens
  CDR3 for alpha chain variable domain of TCR clone 49532 (TRAV12-1, TRAJ24)
CVVRSTDSRGKFQF

SEQ ID NO: 99064 - protein, 13 aa, Homo sapiens
  CDR3 for beta chain variable domain of TCR clone 49532 (TRBV2, TRBJ2-3)
CASILAGGQGQYF

SEQ ID NO: 99065 - protein, 14 aa, Homo sapiens
  CDR3 for alpha chain variable domain of TCR clone 49533 (TRAV17, TRAJ22)
CATSPSGSARQLTF

SEQ ID NO: 99066 - protein, 13 aa, Homo sapiens
  CDR3 for beta chain variable domain of TCR clone 49533 (TRBV12-4, TRBJ1-2)
CASSLRQGKGYAF

SEQ ID NO: 99067 - protein, 13 aa, Homo sapiens
  CDR3 for alpha chain variable domain of TCR clone 49534 (TRAV12-3, TRAJ41)
CAIAPNSGNALNF

SEQ ID NO: 99068 - protein, 14 aa, Homo sapiens
  CDR3 for beta chain variable domain of TCR clone 49534 (TRBV7-2, TRBJ1-3)
CASSLGTAGNTIYF

SEQ ID NO: 99069 - protein, 14 aa, Homo sapiens
  CDR3 for alpha chain variable domain of TCR clone 49535 (TRAV4, TRAJ26)
CLVGPHNYCQNFVF

SEQ ID NO: 99070 - protein, 17 aa, Homo sapiens
  CDR3 for beta chain variable domain of TCR clone 49535 (TRBV24-1, TRBJ2-1)
CATSDVSTSGTYNEQFF

SEQ ID NO: 99071 - protein, 11 aa, Homo sapiens
  CDR3 for alpha chain variable domain of TCR clone 49536 (TRAV13-2, TRAJ23)
CAESPRGELIF

SEQ ID NO: 99072 - protein, 18 aa, Homo sapiens
  CDR3 for beta chain variable domain of TCR clone 49536 (TRBV6-5, TRBJ1-1)
CASSYSAPGGTGGTEAFF

SEQ ID NO: 99073 - protein, 14 aa, Homo sapiens
  CDR3 for alpha chain variable domain of TCR clone 49537 (TRAV12-1, TRAJ23)
CVVIVYNQGGKLIF

SEQ ID NO: 99074 - protein, 15 aa, Homo sapiens
  CDR3 for beta chain variable domain of TCR clone 49537 (TRBV20-1, TRBJ1-5)
CSAKPSGQGPQPQHF

SEQ ID NO: 99075 - protein, 12 aa, Homo sapiens
  CDR3 for alpha chain variable domain of TCR clone 49538 (TRAV4, TRAJ26)
CLVGDYGQNFVF

SEQ ID NO: 99076 - protein, 13 aa, Homo sapiens
  CDR3 for beta chain variable domain of TCR clone 49538 (TRBV7-3, TRBJ1-1)
CASSQDWGAEAFF

SEQ ID NO: 99077 - protein, 17 aa, Homo sapiens
  CDR3 for alpha chain variable domain of TCR clone 49539 (TRAV3, TRAJ6)
CAVRDGPRAGGSYIPTF

SEQ ID NO: 99078 - protein, 14 aa, Homo sapiens
  CDR3 for beta chain variable domain of TCR clone 49539 (TRBV7-2, TRBJ2-7)
CASGPKTNFYEQYF

SEQ ID NO: 99079 - protein, 13 aa, Homo sapiens
  CDR3 for alpha chain variable domain of TCR clone 49540 (TRAV1-2, TRAJ9)
CAALNTGGFKTIF

SEQ ID NO: 99080 - protein, 15 aa, Homo sapiens
  CDR3 for beta chain variable domain of TCR clone 49540 (TRBV2, TRBJ2-1)
CASSEEREGDNEQFF

SEQ ID NO: 99081 - protein, 17 aa, Homo sapiens
  CDR3 for alpha chain variable domain of TCR clone 49541 (TRAV3, TRAJ6)
CAVRDVPRAGGSYIPTF

SEQ ID NO: 99082 - protein, 14 aa, Homo sapiens
  CDR3 for beta chain variable domain of TCR clone 49541 (TRBV20-1, TRBJ2-7)
CSAKRGRSSYEQYF

SEQ ID NO: 99083 - protein, 16 aa, Homo sapiens
  CDR3 for alpha chain variable domain of TCR clone 49542 (TRAV8-3, TRAJ48)
CAVGLISNFGNEELTF

SEQ ID NO: 99084 - protein, 13 aa, Homo sapiens
  CDR3 for beta chain variable domain of TCR clone 49542 (TRBV20-1, TRBJ1-5)
CSASWGRSQPQHF

SEQ ID NO: 99085 - protein, 16 aa, Homo sapiens
  CDR3 for alpha chain variable domain of TCR clone 49543 (TRAV12-3, TRAJ53)
CAMSPGSGGSNYRLTF

SEQ ID NO: 99086 - protein, 14 aa, Homo sapiens
  CDR3 for beta chain variable domain of TCR clone 49543 (TRBV7-2, TRBJ1-1)
CASSFLTGTTEAFF

SEQ ID NO: 99087 - protein, 13 aa, Homo sapiens
  CDR3 for alpha chain variable domain of TCR clone 49544 (TRAV27, TRAJ41)
CAGEGNSGYALNF

SEQ ID NO: 99088 - protein, 14 aa, Homo sapiens
  CDR3 for beta chain variable domain of TCR clone 49544 (TRBV7-2, TRBJ2-7)
CASRSQGAAYEQYF

SEQ ID NO: 99089 - protein, 12 aa, Homo sapiens
  CDR3 for alpha chain variable domain of TCR clone 49545 (TRAV13-1, TRAJ15)
FAASQAGTALIF

SEQ ID NO: 99090 - protein, 14 aa, Homo sapiens
  CDR3 for beta chain variable domain of TCR clone 49545 (TRBV19, TRBJ2-2)
CASSTLHRSGELFF

SEQ ID NO: 99091 - protein, 15 aa, Homo sapiens
  CDR3 for alpha chain variable domain of TCR clone 49546 (TRAV2, TRAJ15)
CAVEDRGQAGTALIF

SEQ ID NO: 99092 - protein, 14 aa, Homo sapiens
  CDR3 for beta chain variable domain of TCR clone 49546 (TRBV19, TRBJ1-5)
CASRAPDSFLSQHF

SEQ ID NO: 99093 - protein, 10 aa, Homo sapiens
  CDR3 for alpha chain variable domain of TCR clone 49547 (TRAV26-1, TRAJ40)
CIAGTYRYIF

SEQ ID NO: 99094 - protein, 15 aa, Homo sapiens
  CDR3 for beta chain variable domain of TCR clone 49547 (TRBV19, TRBJ2-1)
CASSSPGVPLDEQFF

SEQ ID NO: 99095 - protein, 14 aa, Homo sapiens
  CDR3 for alpha chain variable domain of TCR clone 49548 (TRAV12-2, TRAJ24)
CAVTPADSWGKLQF

SEQ ID NO: 99096 - protein, 14 aa, Homo sapiens
  CDR3 for beta chain variable domain of TCR clone 49548 (TRBV7-2, TRBJ2-1)
CASSLSGVYNEQFF

SEQ ID NO: 99097 - protein, 14 aa, Homo sapiens
  CDR3 for alpha chain variable domain of TCR clone 49549 (TRAV12-2, TRAJ40)
CAVKIPSGTYKYIF

SEQ ID NO: 99098 - protein, 14 aa, Homo sapiens
  CDR3 for beta chain variable domain of TCR clone 49549 (TRBV20-1, TRBJ1-1)
CSAQTRIGATEAFF

SEQ ID NO: 99099 - protein, 14 aa, Homo sapiens
  CDR3 for alpha chain variable domain of TCR clone 49550 (TRAV1-2, TRAJ16)
CAVNRLSDGQKLLF

SEQ ID NO: 99100 - protein, 15 aa, Homo sapiens
  CDR3 for beta chain variable domain of TCR clone 49550 (TRBV12-4, TRBJ2-5)
CASSPPTGLQETQYF

SEQ ID NO: 99101 - protein, 15 aa, Homo sapiens
  CDR3 for alpha chain variable domain of TCR clone 49551 (TRAV9-2, TRAJ31)
CALSDQVGNNARLMF

SEQ ID NO: 99102 - protein, 14 aa, Homo sapiens
  CDR3 for beta chain variable domain of TCR clone 49551 (TRBV7-2, TRBJ1-3)
CASSRLRSGNTIYF

SEQ ID NO: 99103 - protein, 14 aa, Homo sapiens
  CDR3 for alpha chain variable domain of TCR clone 49552 (TRAV12-2, TRAJ13)
CAVKKTGGYQKVTF

SEQ ID NO: 99104 - protein, 15 aa, Homo sapiens
  CDR3 for beta chain variable domain of TCR clone 49552 (TRBV27, TRBJ2-1)
CATSNGGGSSNEQFF

SEQ ID NO: 99105 - protein, 15 aa, Homo sapiens
  CDR3 for alpha chain variable domain of TCR clone 49553 (TRAV3, TRAJ22)
CAVRDRGGSARQLTV

SEQ ID NO: 99106 - protein, 16 aa, Homo sapiens
  CDR3 for beta chain variable domain of TCR clone 49553 (TRBV5-4, TRBJ2-3)
CASQQPGAGGADTQYF

SEQ ID NO: 99107 - protein, 16 aa, Homo sapiens
  CDR3 for alpha chain variable domain of TCR clone 49554 (TRAV16, TRAJ52)
CALSGVGGTSYGKLTF

SEQ ID NO: 99108 - protein, 14 aa, Homo sapiens
  CDR3 for beta chain variable domain of TCR clone 49554 (TRBV19, TRBJ1-2)
CASSLKGQAYGYTF

SEQ ID NO: 99109 - protein, 11 aa, Homo sapiens
  CDR3 for alpha chain variable domain of TCR clone 49555 (TRAV12-3, TRAJ43)
CAMSVSNDMRF

SEQ ID NO: 99110 - protein, 16 aa, Homo sapiens
  CDR3 for beta chain variable domain of TCR clone 49555 (TRBV20-1, TRBJ2-1)
CSARDSLGAVYNGQFF

SEQ ID NO: 99111 - protein, 15 aa, Homo sapiens
  CDR3 for alpha chain variable domain of TCR clone 49556 (TRAV34, TRAJ38)
CGADFTPGNNRKLIW

SEQ ID NO: 99112 - protein, 16 aa, Homo sapiens
  CDR3 for beta chain variable domain of TCR clone 49556 (TRBV12-5, TRBJ2-5)
CASGPRTSGNQGTQYF

SEQ ID NO: 99113 - protein, 13 aa, Homo sapiens
  CDR3 for alpha chain variable domain of TCR clone 49557 (TRAV2, TRAJ40)
CAVVTSGTYKYIF

SEQ ID NO: 99114 - protein, 14 aa, Homo sapiens
  CDR3 for beta chain variable domain of TCR clone 49557 (TRBV19, TRBJ2-1)
CASPTFVVGGEQFF

SEQ ID NO: 99115 - protein, 14 aa, Homo sapiens
  CDR3 for alpha chain variable domain of TCR clone 49558 (TRAV20, TRAJ56)
CAVQFGGANSKLTF

SEQ ID NO: 99116 - protein, 14 aa, Homo sapiens
  CDR3 for beta chain variable domain of TCR clone 49558 (TRBV20-1, TRBJ2-7)
CSAKRGRSSYEQFF

SEQ ID NO: 99117 - protein, 14 aa, Homo sapiens
  CDR3 for alpha chain variable domain of TCR clone 49559 (TRAV12-2, TRAJ13)
CAVKKTGGYQKVTF

SEQ ID NO: 99118 - protein, 12 aa, Homo sapiens
  CDR3 for beta chain variable domain of TCR clone 49559 (TRBV18, TRBJ2-1)
CASSSDEDEQFF

SEQ ID NO: 99119 - protein, 16 aa, Homo sapiens
  CDR3 for alpha chain variable domain of TCR clone 49560 (TRAV26-1, TRAJ53)
CIVRVAMGGSNYKLTF

SEQ ID NO: 99120 - protein, 12 aa, Homo sapiens
  CDR3 for beta chain variable domain of TCR clone 49560 (TRBV7-9, TRBJ1-5)
YASSPQGQPQHF

SEQ ID NO: 99121 - protein, 13 aa, Homo sapiens
  CDR3 for alpha chain variable domain of TCR clone 49561 (TRAV12-2, TRAJ6)
CAVNVSRKLHTHI

SEQ ID NO: 99122 - protein, 12 aa, Homo sapiens
  CDR3 for beta chain variable domain of TCR clone 49561 (TRBV29-1, TRBJ2-3)
CSVTGGADTQYF

SEQ ID NO: 99123 - protein, 13 aa, Homo sapiens
  CDR3 for alpha chain variable domain of TCR clone 49562 (TRAV2, TRAJ40)
CAVVTLGTYKYIF

SEQ ID NO: 99124 - protein, 15 aa, Homo sapiens
  CDR3 for beta chain variable domain of TCR clone 49562 (TRBV28, TRBJ2-1)
CASSGLAEVDNEQFF

SEQ ID NO: 99125 - protein, 15 aa, Homo sapiens
  CDR3 for alpha chain variable domain of TCR clone 49563 (TRAV25, TRAJ10)
CAGPLLTGGGNKLTF

SEQ ID NO: 99126 - protein, 14 aa, Homo sapiens
  CDR3 for beta chain variable domain of TCR clone 49563 (TRBV7-9, TRBJ2-1)
CASSPRDSLYEQFF

SEQ ID NO: 99127 - protein, 11 aa, Homo sapiens
  CDR3 for alpha chain variable domain of TCR clone 49564 (TRAV12-3, TRAJ43)
CAMSVSNDMRF

SEQ ID NO: 99128 - protein, 14 aa, Homo sapiens
  CDR3 for beta chain variable domain of TCR clone 49564 (TRBV12-5, TRBJ2-5)
CASGLRTHQETQYF

SEQ ID NO: 99129 - protein, 12 aa, Homo sapiens
  CDR3 for alpha chain variable domain of TCR clone 49565 (TRAV27, TRAJ35)
CTGADFGNVLHC

SEQ ID NO: 99130 - protein, 15 aa, Homo sapiens
  CDR3 for beta chain variable domain of TCR clone 49565 (TRBV20-1, TRBJ2-7)
CSARDRVSGMDEQYF

SEQ ID NO: 99131 - protein, 15 aa, Homo sapiens
  CDR3 for alpha chain variable domain of TCR clone 49566 (TRAV17, TRAJ23)
CVTDAEDNQGGKLIF

SEQ ID NO: 99132 - protein, 12 aa, Homo sapiens
  CDR3 for beta chain variable domain of TCR clone 49566 (TRBV2, TRBJ2-1)
CAKREGYNEQFF

SEQ ID NO: 99133 - protein, 16 aa, Homo sapiens
  CDR3 for alpha chain variable domain of TCR clone 49567 (TRAV30, TRAJ24)
CGTEIVDADSWGKFQF

SEQ ID NO: 99134 - protein, 15 aa, Homo sapiens
  CDR3 for beta chain variable domain of TCR clone 49567 (TRBV28, TRBJ1-3)
CASSMGWASGNTIYF

SEQ ID NO: 99135 - protein, 11 aa, Homo sapiens
  CDR3 for alpha chain variable domain of TCR clone 49568 (TRAV1-2, TRAJ20)
CAVANDYKLSF

SEQ ID NO: 99136 - protein, 18 aa, Homo sapiens
  CDR3 for beta chain variable domain of TCR clone 49568 (TRBV20-1, TRBJ2-6)
CSTETTPTHGSGANVLTF

SEQ ID NO: 99137 - protein, 11 aa, Homo sapiens
  CDR3 for alpha chain variable domain of TCR clone 49569 (TRAV3, TRAJ31)
CAVRPDARLMF

SEQ ID NO: 99138 - protein, 12 aa, Homo sapiens
  CDR3 for beta chain variable domain of TCR clone 49569 (TRBV7-9, TRBJ2-2)
CASSLDTGELFF

SEQ ID NO: 99139 - protein, 16 aa, Homo sapiens
  CDR3 for alpha chain variable domain of TCR clone 49570 (TRAV2, TRAJ4)
CAVEDRFSGGYNKLIF

SEQ ID NO: 99140 - protein, 13 aa, Homo sapiens
  CDR3 for beta chain variable domain of TCR clone 49570 (TRBV7-7, TRBJ2-5)
CASSRSGRETQYF

SEQ ID NO: 99141 - protein, 21 aa, Homo sapiens
  CDR3 for alpha chain variable domain of TCR clone 49571 (TRAV1-1, TRAJ6)
CLLLLRCERLERTGRSYIPTF

SEQ ID NO: 99142 - protein, 13 aa, Homo sapiens
  CDR3 for beta chain variable domain of TCR clone 49571 (TRBV10-2, TRBJ2-7)
CASGASGGYEQYF

SEQ ID NO: 99143 - protein, 14 aa, Homo sapiens
  CDR3 for alpha chain variable domain of TCR clone 49572 (TRAV4, TRAJ6)
CLGGEAGGSYIPTF

SEQ ID NO: 99144 - protein, 16 aa, Homo sapiens
  CDR3 for beta chain variable domain of TCR clone 49572 (TRBV7-6, TRBJ2-1)
CASSLNEGPSYNEQFF

SEQ ID NO: 99145 - protein, 13 aa, Homo sapiens
  CDR3 for alpha chain variable domain of TCR clone 49573 (TRAV12-1, TRAJ34)
CVVTGYNADKLIF

SEQ ID NO: 99146 - protein, 13 aa, Homo sapiens
  CDR3 for beta chain variable domain of TCR clone 49573 (TRBV28, TRBJ2-7)
CASKAGGVYEQYF

SEQ ID NO: 99147 - protein, 13 aa, Homo sapiens
  CDR3 for alpha chain variable domain of TCR clone 49574 (TRAV39, TRAJ58)
CAGEETSGSRLTS

SEQ ID NO: 99148 - protein, 13 aa, Homo sapiens
  CDR3 for beta chain variable domain of TCR clone 49574 (TRBV15, TRBJ2-7)
CATSTTGHYEQYF

SEQ ID NO: 99149 - protein, 14 aa, Homo sapiens
  CDR3 for alpha chain variable domain of TCR clone 49575 (TRAV12-2, TRAJ40)
CAVKIPPGTYKYIF

SEQ ID NO: 99150 - protein, 13 aa, Homo sapiens
  CDR3 for beta chain variable domain of TCR clone 49575 (TRBV7-9, TRBJ1-2)
CASSLKQNYGYTF

SEQ ID NO: 99151 - protein, 12 aa, Homo sapiens
  CDR3 for alpha chain variable domain of TCR clone 49576 (TRAV13-2, TRAJ8)
CAPWLGFQKLVF

SEQ ID NO: 99152 - protein, 17 aa, Homo sapiens
  CDR3 for beta chain variable domain of TCR clone 49576 (TRBV10-3, TRBJ1-1)
CAISESGTGGGTTEAFF

SEQ ID NO: 99153 - protein, 16 aa, Homo sapiens
  CDR3 for alpha chain variable domain of TCR clone 49577 (TRAV30, TRAJ24)
CGTEIVDADSWGKFQF

SEQ ID NO: 99154 - protein, 12 aa, Homo sapiens
  CDR3 for beta chain variable domain of TCR clone 49577 (TRBV4-1, TRBJ2-2)
RQQPREHRELFF

SEQ ID NO: 99155 - protein, 13 aa, Homo sapiens
  CDR3 for alpha chain variable domain of TCR clone 49578 (TRAV29/DV5, TRAJ43)
CAASAGENNDMRF

SEQ ID NO: 99156 - protein, 17 aa, Homo sapiens
  CDR3 for beta chain variable domain of TCR clone 49578 (TRBV20-1, TRBJ2-1)
CSARDDRGPRFDNEQFF

SEQ ID NO: 99157 - protein, 10 aa, Homo sapiens
  CDR3 for alpha chain variable domain of TCR clone 49579 (TRAV12-3, TRAJ18)
CAMSAEAQPR

SEQ ID NO: 99158 - protein, 13 aa, Homo sapiens
  CDR3 for beta chain variable domain of TCR clone 49579 (TRBV15, TRBJ1-6)
CATSGGLNSPLHF

SEQ ID NO: 99159 - protein, 18 aa, Homo sapiens
  CDR3 for alpha chain variable domain of TCR clone 49580 (TRAV21, TRAJ52)
CAVRPSPAGGTSYGKLAF

SEQ ID NO: 99160 - protein, 12 aa, Homo sapiens
  CDR3 for beta chain variable domain of TCR clone 49580 (TRBV11-2, TRBJ2-2)
CASSLGGGELFF

SEQ ID NO: 99161 - protein, 14 aa, Homo sapiens
  CDR3 for alpha chain variable domain of TCR clone 49581 (TRAV3, TRAJ21)
CAVRDAYNFNKFYF

SEQ ID NO: 99162 - protein, 15 aa, Homo sapiens
  CDR3 for beta chain variable domain of TCR clone 49581 (TRBV20-1, TRBJ2-7)
CSARDRVSGMDEQYF

SEQ ID NO: 99163 - protein, 15 aa, Homo sapiens
  CDR3 for alpha chain variable domain of TCR clone 49582 (TRAV21, TRAJ10)
CAVPLLTGGGNNLTF

SEQ ID NO: 99164 - protein, 14 aa, Homo sapiens
  CDR3 for beta chain variable domain of TCR clone 49582 (TRBV12-4, TRBJ1-1)
CASSLGTGGTEAFF

SEQ ID NO: 99165 - protein, 12 aa, Homo sapiens
  CDR3 for alpha chain variable domain of TCR clone 49583 (TRAV25, TRAJ11)
CAGASGYSTLTF

SEQ ID NO: 99166 - protein, 14 aa, Homo sapiens
  CDR3 for beta chain variable domain of TCR clone 49583 (TRBV5-8, TRBJ2-3)
RASSLGQGTDTQYF

SEQ ID NO: 99167 - protein, 19 aa, Homo sapiens
  CDR3 for alpha chain variable domain of TCR clone 49584 (TRAV1-2, TRAJ26)
CLLPQCCERPDNYGQNFVF

SEQ ID NO: 99168 - protein, 15 aa, Homo sapiens
  CDR3 for beta chain variable domain of TCR clone 49584 (TRBV9, TRBJ1-6)
CASSVAGTGDSPLHF

SEQ ID NO: 99169 - protein, 14 aa, Homo sapiens
  CDR3 for alpha chain variable domain of TCR clone 49585 (TRAV8-1, TRAJ5)
CAVRTDTGRRALTF

SEQ ID NO: 99170 - protein, 14 aa, Homo sapiens
  CDR3 for beta chain variable domain of TCR clone 49585 (TRBV7-8, TRBJ2-3)
CASSFPDGQDTQYS

SEQ ID NO: 99171 - protein, 14 aa, Homo sapiens
  CDR3 for alpha chain variable domain of TCR clone 49586 (TRAV26-1, TRAJ45)
CIEVTGGGADGPTF

SEQ ID NO: 99172 - protein, 13 aa, Homo sapiens
  CDR3 for beta chain variable domain of TCR clone 49586 (TRBV7-7, TRBJ1-2)
CASSLVADYGYTF

SEQ ID NO: 99173 - protein, 12 aa, Homo sapiens
  CDR3 for alpha chain variable domain of TCR clone 49587 (TRAV13-1, TRAJ48)
CAANFGNEKLTF

SEQ ID NO: 99174 - protein, 13 aa, Homo sapiens
  CDR3 for beta chain variable domain of TCR clone 49587 (TRBV7-3, TRBJ1-1)
CASSQGRGAEAFF

SEQ ID NO: 99175 - protein, 14 aa, Homo sapiens
  CDR3 for alpha chain variable domain of TCR clone 49588 (TRAV3, TRAJ34)
CAVRAPGNTDTLIF

SEQ ID NO: 99176 - protein, 17 aa, Homo sapiens
  CDR3 for beta chain variable domain of TCR clone 49588 (TRBV20-1, TRBJ2-7)
CSAAPGLARGISYEQYF

SEQ ID NO: 99177 - protein, 16 aa, Homo sapiens
  CDR3 for alpha chain variable domain of TCR clone 49589 (TRAV13-1, TRAJ8)
CAAFYLLNTGSQKLVF

SEQ ID NO: 99178 - protein, 14 aa, Homo sapiens
  CDR3 for beta chain variable domain of TCR clone 49589 (TRBV29-1, TRBJ2-5)
CSVGPAGGQETQYF

SEQ ID NO: 99179 - protein, 14 aa, Homo sapiens
  CDR3 for alpha chain variable domain of TCR clone 49590 (TRAV13-1, TRAJ44)
RAAKATGTASKLTF

SEQ ID NO: 99180 - protein, 17 aa, Homo sapiens
  CDR3 for beta chain variable domain of TCR clone 49590 (TRBV7-3, TRBJ2-3)
RASSLMKRMRGADTQYF

SEQ ID NO: 99181 - protein, 14 aa, Homo sapiens
  CDR3 for alpha chain variable domain of TCR clone 49591 (TRAV9-2, TRAJ39)
CALYIYNAGNMLTF

SEQ ID NO: 99182 - protein, 14 aa, Homo sapiens
  CDR3 for beta chain variable domain of TCR clone 49591 (TRBV20-1, TRBJ2-1)
CSAQIGGSANEQFF

SEQ ID NO: 99183 - protein, 15 aa, Homo sapiens
  CDR3 for alpha chain variable domain of TCR clone 49592 (TRAV36/DV7, TRAJ53)
CAEEGSGGSNYKLTF

SEQ ID NO: 99184 - protein, 16 aa, Homo sapiens
  CDR3 for beta chain variable domain of TCR clone 49592 (TRBV27, TRBJ2-2)
CASSLSGFWVTGELFF

SEQ ID NO: 99185 - protein, 16 aa, Homo sapiens
  CDR3 for alpha chain variable domain of TCR clone 49593 (TRAV4, TRAJ18)
CCVLLIGGPTLGRLYF

SEQ ID NO: 99186 - protein, 14 aa, Homo sapiens
  CDR3 for beta chain variable domain of TCR clone 49593 (TRBV12-5, TRBJ2-5)
CASGSRTHQETQYF

SEQ ID NO: 99187 - protein, 14 aa, Homo sapiens
  CDR3 for alpha chain variable domain of TCR clone 49594 (TRAV1-2, TRAJ29)
CAVRELTSATPLAF

SEQ ID NO: 99188 - protein, 14 aa, Homo sapiens
  CDR3 for beta chain variable domain of TCR clone 49594 (TRBV3-1, TRBJ2-5)
CASSQGPDQETQYF

SEQ ID NO: 99189 - protein, 13 aa, Homo sapiens
  CDR3 for alpha chain variable domain of TCR clone 49595 (TRAV20, TRAJ29)
CAVQAVGNTPLVF

SEQ ID NO: 99190 - protein, 15 aa, Homo sapiens
  CDR3 for beta chain variable domain of TCR clone 49595 (TRBV10-2, TRBJ2-5)
CSSRGSGGPQETQYF

SEQ ID NO: 99191 - protein, 11 aa, Homo sapiens
  CDR3 for alpha chain variable domain of TCR clone 49596 (TRAV3, TRAJ21)
CAVGNFNKFYF

SEQ ID NO: 99192 - protein, 12 aa, Homo sapiens
  CDR3 for beta chain variable domain of TCR clone 49596 (TRBV19, TRBJ1-5)
CASSIAQQPQHF

SEQ ID NO: 99193 - protein, 14 aa, Homo sapiens
  CDR3 for alpha chain variable domain of TCR clone 49597 (TRAV12-2, TRAJ13)
CAVKKTGGYQKVTF

SEQ ID NO: 99194 - protein, 13 aa, Homo sapiens
  CDR3 for beta chain variable domain of TCR clone 49597 (TRBV2, TRBJ2-1)
GAQRGGKYNEQFF

SEQ ID NO: 99195 - protein, 15 aa, Homo sapiens
  CDR3 for alpha chain variable domain of TCR clone 49598 (TRAV26-1, TRAJ44)
CIARVPFGTASKLTF

SEQ ID NO: 99196 - protein, 17 aa, Homo sapiens
  CDR3 for beta chain variable domain of TCR clone 49598 (TRBV24-1, TRBJ2-4)
CATSDAEARGVRTIQYF

SEQ ID NO: 99197 - protein, 12 aa, Homo sapiens
  CDR3 for alpha chain variable domain of TCR clone 49599 (TRAV29/DV5, TRAJ49)
CAATDTGNQFYF

SEQ ID NO: 99198 - protein, 13 aa, Homo sapiens
  CDR3 for beta chain variable domain of TCR clone 49599 (TRBV11-2, TRBJ1-3)
CASSLEPVNTIYF

SEQ ID NO: 99199 - protein, 15 aa, Homo sapiens
  CDR3 for alpha chain variable domain of TCR clone 49600 (TRAV26-1, TRAJ56)
CIVRVDNGANSKLTF

SEQ ID NO: 99200 - protein, 15 aa, Homo sapiens
  CDR3 for beta chain variable domain of TCR clone 49600 (TRBV20-1, TRBJ2-7)
CSARDPTGVGHEQYF

SEQ ID NO: 99201 - protein, 13 aa, Homo sapiens
  CDR3 for alpha chain variable domain of TCR clone 49601 (TRAV30, TRAJ49)
CGTESQPVTSSIL

SEQ ID NO: 99202 - protein, 14 aa, Homo sapiens
  CDR3 for beta chain variable domain of TCR clone 49601 (TRBV27, TRBJ2-2)
CASSLSVVDGRMFF

SEQ ID NO: 99203 - protein, 15 aa, Homo sapiens
  CDR3 for alpha chain variable domain of TCR clone 49602 (TRAV2, TRAJ15)
CAVEDRGQAGTALIF

SEQ ID NO: 99204 - protein, 16 aa, Homo sapiens
  CDR3 for beta chain variable domain of TCR clone 49602 (TRBV7-2, TRBJ1-2)
CASSSNQDRRGHGYTF

SEQ ID NO: 99205 - protein, 15 aa, Homo sapiens
  CDR3 for alpha chain variable domain of TCR clone 49603 (TRAV12-2, TRAJ43)
CALDMRFGAGTRLTV

SEQ ID NO: 99206 - protein, 18 aa, Homo sapiens
  CDR3 for beta chain variable domain of TCR clone 49603 (TRBV20-1, TRBJ2-3)
CSASGLAGGPGTTDTQYF

SEQ ID NO: 99207 - protein, 17 aa, Homo sapiens
  CDR3 for alpha chain variable domain of TCR clone 49604 (TRAV12-2, TRAJ42)
CAVNMLNYGGSQGNLIF

SEQ ID NO: 99208 - protein, 13 aa, Homo sapiens
  CDR3 for beta chain variable domain of TCR clone 49604 (TRBV3-1, TRBJ1-5)
CASSQDLDQPQHF

SEQ ID NO: 99209 - protein, 13 aa, Homo sapiens
  CDR3 for alpha chain variable domain of TCR clone 49605 (TRAV21, TRAJ20)
CAVGLGVDYKLSF

SEQ ID NO: 99210 - protein, 13 aa, Homo sapiens
  CDR3 for beta chain variable domain of TCR clone 49605 (TRBV3-1, TRBJ2-2)
CASLARGSGELFF

SEQ ID NO: 99211 - protein, 14 aa, Homo sapiens
  CDR3 for alpha chain variable domain of TCR clone 49606 (TRAV26-2, TRAJ32)
CILFRGGATNKLIF

SEQ ID NO: 99212 - protein, 15 aa, Homo sapiens
  CDR3 for beta chain variable domain of TCR clone 49606 (TRBV2, TRBJ2-2)
CVSSGFGAGTGELFF

SEQ ID NO: 99213 - protein, 15 aa, Homo sapiens
  CDR3 for alpha chain variable domain of TCR clone 49607 (TRAV13-1, TRAJ15)
CAASIERQAGTALIL

SEQ ID NO: 99214 - protein, 13 aa, Homo sapiens
  CDR3 for beta chain variable domain of TCR clone 49607 (TRBV5-1, TRBJ2-7)
CASSATGGNEQYF

SEQ ID NO: 99215 - protein, 10 aa, Homo sapiens
  CDR3 for alpha chain variable domain of TCR clone 49608 (TRAV23/DV6, TRAJ57)
CAASSTLSQG

SEQ ID NO: 99216 - protein, 14 aa, Homo sapiens
  CDR3 for beta chain variable domain of TCR clone 49608 (TRBV25-1, TRBJ1-1)
CARTHLGGNTEAFF

SEQ ID NO: 99217 - protein, 20 aa, Homo sapiens
  CDR3 for alpha chain variable domain of TCR clone 49609 (TRAV26-1, TRAJ42)
CCVLLHRQTSYGGSQGNLIF

SEQ ID NO: 99218 - protein, 16 aa, Homo sapiens
  CDR3 for beta chain variable domain of TCR clone 49609 (TRBV7-3, TRBJ2-2)
CASSLKRGTLSGELFF

SEQ ID NO: 99219 - protein, 15 aa, Homo sapiens
  CDR3 for alpha chain variable domain of TCR clone 49610 (TRAV8-3, TRAJ37)
CAVGARAGNTGKLIF

SEQ ID NO: 99220 - protein, 15 aa, Homo sapiens
  CDR3 for beta chain variable domain of TCR clone 49610 (TRBV5-4, TRBJ2-3)
CASSLAGRVTDTQYF

SEQ ID NO: 99221 - protein, 12 aa, Homo sapiens
  CDR3 for alpha chain variable domain of TCR clone 49611 (TRAV12-2, TRAJ54)
CAVQEGAQKLVF

SEQ ID NO: 99222 - protein, 17 aa, Homo sapiens
  CDR3 for beta chain variable domain of TCR clone 49611 (TRBV13, TRBJ2-3)
CASSLSRVAGGRNTQYF

SEQ ID NO: 99223 - protein, 14 aa, Homo sapiens
  CDR3 for alpha chain variable domain of TCR clone 49612 (TRAV3, TRAJ21)
CSVESQANFNKFYF

SEQ ID NO: 99224 - protein, 18 aa, Homo sapiens
  CDR3 for beta chain variable domain of TCR clone 49612 (TRBV7-9, TRBJ2-1)
CASSLAVSGTSGRNEQFF

SEQ ID NO: 99225 - protein, 13 aa, Homo sapiens
  CDR3 for alpha chain variable domain of TCR clone 49613 (TRAV3, TRAJ20)
CAVRSLNDYKLSF

SEQ ID NO: 99226 - protein, 13 aa, Homo sapiens
  CDR3 for beta chain variable domain of TCR clone 49613 (TRBV7-3, TRBJ1-1)
CASSQDWGAEAVF

SEQ ID NO: 99227 - protein, 14 aa, Homo sapiens
  CDR3 for alpha chain variable domain of TCR clone 49614 (TRAV12-3, TRAJ10)
SHLPLTGGGNKLTF

SEQ ID NO: 99228 - protein, 16 aa, Homo sapiens
  CDR3 for beta chain variable domain of TCR clone 49614 (TRBV4-2, TRBJ2-5)
CASSQELVGSQETQYF

SEQ ID NO: 99229 - protein, 12 aa, Homo sapiens
  CDR3 for alpha chain variable domain of TCR clone 49615 (TRAV12-3, TRAJ17)
CAMTLTGDKLTF

SEQ ID NO: 99230 - protein, 15 aa, Homo sapiens
  CDR3 for beta chain variable domain of TCR clone 49615 (TRBV20-1, TRBJ2-7)
CSARDRVSGMEEQYF

SEQ ID NO: 99231 - protein, 12 aa, Homo sapiens
  CDR3 for alpha chain variable domain of TCR clone 49616 (TRAV12-3, TRAJ41)
CAMSYSGYALNF

SEQ ID NO: 99232 - protein, 13 aa, Homo sapiens
  CDR3 for beta chain variable domain of TCR clone 49616 (TRBV7-3, TRBJ2-1)
CASSLNSYNEQFF

SEQ ID NO: 99233 - protein, 15 aa, Homo sapiens
  CDR3 for alpha chain variable domain of TCR clone 49617 (TRAV3, TRAJ5)
CAGRDLDTGRRALTF

SEQ ID NO: 99234 - protein, 13 aa, Homo sapiens
  CDR3 for beta chain variable domain of TCR clone 49617 (TRBV12-4, TRBJ2-7)
CASSPTETYEQYF

SEQ ID NO: 99235 - protein, 14 aa, Homo sapiens
  CDR3 for alpha chain variable domain of TCR clone 49618 (TRAV2, TRAJ37)
CAVDFTSNTGKLIF

SEQ ID NO: 99236 - protein, 15 aa, Homo sapiens
  CDR3 for beta chain variable domain of TCR clone 49618 (TRBV7-9, TRBJ1-4)
CASSARTGGNEKLFF

SEQ ID NO: 99237 - protein, 15 aa, Homo sapiens
  CDR3 for alpha chain variable domain of TCR clone 49619 (TRAV26-1, TRAJ15)
CTVRAANQAGTALIF

SEQ ID NO: 99238 - protein, 13 aa, Homo sapiens
  CDR3 for beta chain variable domain of TCR clone 49619 (TRBV7-9, TRBJ1-2)
CASSLKQNYGYTF

SEQ ID NO: 99239 - protein, 11 aa, Homo sapiens
  CDR3 for alpha chain variable domain of TCR clone 49620 (TRAV17, TRAJ43)
CATPRSNDMRF

SEQ ID NO: 99240 - protein, 14 aa, Homo sapiens
  CDR3 for beta chain variable domain of TCR clone 49620 (TRBV7-9, TRBJ1-5)
CASADLGSNQPQHF

SEQ ID NO: 99241 - protein, 15 aa, Homo sapiens
  CDR3 for alpha chain variable domain of TCR clone 49621 (TRAV12-1, TRAJ44)
CVVDAPQGTAGKLTF

SEQ ID NO: 99242 - protein, 13 aa, Homo sapiens
  CDR3 for beta chain variable domain of TCR clone 49621 (TRBV27, TRBJ2-1)
CASSSGSYNEQFF

SEQ ID NO: 99243 - protein, 14 aa, Homo sapiens
  CDR3 for alpha chain variable domain of TCR clone 49622 (TRAV8-3, TRAJ4)
CAVGASGGYNKRIF

SEQ ID NO: 99244 - protein, 16 aa, Homo sapiens
  CDR3 for beta chain variable domain of TCR clone 49622 (TRBV4-3, TRBJ2-2)
CASSHLQGSGTGELFF

SEQ ID NO: 99245 - protein, 18 aa, Homo sapiens
  CDR3 for alpha chain variable domain of TCR clone 49623 (TRAV13-1, TRAJ52)
CAASKRSAGGTCYGKLTF

SEQ ID NO: 99246 - protein, 14 aa, Homo sapiens
  CDR3 for beta chain variable domain of TCR clone 49623 (TRBV7-2, TRBJ2-7)
CASSPKTSFYEQYF

SEQ ID NO: 99247 - protein, 13 aa, Homo sapiens
  CDR3 for alpha chain variable domain of TCR clone 49624 (TRAV21, TRAJ27)
CAARPGNAGKSTF

SEQ ID NO: 99248 - protein, 14 aa, Homo sapiens
  CDR3 for beta chain variable domain of TCR clone 49624 (TRBV7-8, TRBJ2-3)
CASSLEAGTDTQYF

SEQ ID NO: 99249 - protein, 12 aa, Homo sapiens
  CDR3 for alpha chain variable domain of TCR clone 49625 (TRAV3, TRAJ26)
CAVRGYGQNFVF

SEQ ID NO: 99250 - protein, 16 aa, Homo sapiens
  CDR3 for beta chain variable domain of TCR clone 49625 (TRBV11-2, TRBJ1-2)
CASSPSGREANYGYTF

SEQ ID NO: 99251 - protein, 21 aa, Homo sapiens
  CDR3 for alpha chain variable domain of TCR clone 49626 (TRAV25, TRAJ47)
TATQTTDVGTYFCEYGNKLVF

SEQ ID NO: 99252 - protein, 16 aa, Homo sapiens
  CDR3 for beta chain variable domain of TCR clone 49626 (TRBV6-6, TRBJ2-1)
CASSWGGQGPYNEQFF

SEQ ID NO: 99253 - protein, 15 aa, Homo sapiens
  CDR3 for alpha chain variable domain of TCR clone 49627 (TRAV26-1, TRAJ22)
CIVRVSFWFCKATDL

SEQ ID NO: 99254 - protein, 16 aa, Homo sapiens
  CDR3 for beta chain variable domain of TCR clone 49627 (TRBV19, TRBJ2-2)
CASRSPGTGATGELFF

SEQ ID NO: 99255 - protein, 17 aa, Homo sapiens
  CDR3 for alpha chain variable domain of TCR clone 49628 (TRAV3, TRAJ42)
CAVRDRDYGGNQGNLIF

SEQ ID NO: 99256 - protein, 15 aa, Homo sapiens
  CDR3 for beta chain variable domain of TCR clone 49628 (TRBV6-6, TRBJ2-7)
CASSYSYGGSYEQYF

SEQ ID NO: 99257 - protein, 19 aa, Homo sapiens
  CDR3 for alpha chain variable domain of TCR clone 49629 (TRAV21, TRAJ20)
SLVTQPPTSVLPNDYKLSF

SEQ ID NO: 99258 - protein, 15 aa, Homo sapiens
  CDR3 for beta chain variable domain of TCR clone 49629 (TRBV7-2, TRBJ1-2)
CASSPRAGWNYGYTF

SEQ ID NO: 99259 - protein, 13 aa, Homo sapiens
  CDR3 for alpha chain variable domain of TCR clone 49630 (TRAV3, TRAJ27)
CAVSPLGAGKSTF

SEQ ID NO: 99260 - protein, 13 aa, Homo sapiens
  CDR3 for beta chain variable domain of TCR clone 49630 (TRBV7-9, TRBJ2-3)
CASSPRSTDTQYF

SEQ ID NO: 99261 - protein, 14 aa, Homo sapiens
  CDR3 for alpha chain variable domain of TCR clone 49631 (TRAV1-2, TRAJ16)
CAVNRFSDGQKLIF

SEQ ID NO: 99262 - protein, 11 aa, Homo sapiens
  CDR3 for beta chain variable domain of TCR clone 49631 (TRBV7-6, TRBJ2-5)
CASSSQETQYF

SEQ ID NO: 99263 - protein, 14 aa, Homo sapiens
  CDR3 for alpha chain variable domain of TCR clone 49632 (TRAV23/DV6, TRAJ24)
CAASLSDSWGKLKF

SEQ ID NO: 99264 - protein, 16 aa, Homo sapiens
  CDR3 for beta chain variable domain of TCR clone 49632 (TRBV7-9, TRBJ2-6)
CASSLKGPLRANVLTF

SEQ ID NO: 99265 - protein, 13 aa, Homo sapiens
  CDR3 for alpha chain variable domain of TCR clone 49633 (TRAV12-3, TRAJ13)
CAMSSGGYQKVTF

SEQ ID NO: 99266 - protein, 13 aa, Homo sapiens
  CDR3 for beta chain variable domain of TCR clone 49633 (TRBV20-1, TRBJ1-1)
CSAPPWGHTEAFF

SEQ ID NO: 99267 - protein, 11 aa, Homo sapiens
  CDR3 for alpha chain variable domain of TCR clone 49634 (TRAV2, TRAJ21)
CAVFNFNKFYF

SEQ ID NO: 99268 - protein, 15 aa, Homo sapiens
  CDR3 for beta chain variable domain of TCR clone 49634 (TRBV6-3, TRBJ2-7)
CASSSPGTVFYEQYF

SEQ ID NO: 99269 - protein, 12 aa, Homo sapiens
  CDR3 for alpha chain variable domain of TCR clone 49635 (TRAV1-2, TRAJ7)
CAAAYGNNRLAF

SEQ ID NO: 99270 - protein, 16 aa, Homo sapiens
  CDR3 for beta chain variable domain of TCR clone 49635 (TRBV5-1, TRBJ2-7)
CASSPMTGALSYEQYF

SEQ ID NO: 99271 - protein, 11 aa, Homo sapiens
  CDR3 for alpha chain variable domain of TCR clone 49636 (TRAV1-1, TRAJ9)
CAVAGGFKTIF

SEQ ID NO: 99272 - protein, 16 aa, Homo sapiens
  CDR3 for beta chain variable domain of TCR clone 49636 (TRBV7-8, TRBJ2-4)
CASSAERTLAKNIQYF

SEQ ID NO: 99273 - protein, 14 aa, Homo sapiens
  CDR3 for alpha chain variable domain of TCR clone 49637 (TRAV12-2, TRAJ13)
CAVKKTGGYQRVTF

SEQ ID NO: 99274 - protein, 14 aa, Homo sapiens
  CDR3 for beta chain variable domain of TCR clone 49637 (TRBV19, TRBJ2-1)
CASPTFVLSGEQFF

SEQ ID NO: 99275 - protein, 15 aa, Homo sapiens
  CDR3 for alpha chain variable domain of TCR clone 49638 (TRAV25, TRAJ23)
CAGVPIYNQGGKPIF

SEQ ID NO: 99276 - protein, 15 aa, Homo sapiens
  CDR3 for beta chain variable domain of TCR clone 49638 (TRBV19, TRBJ2-3)
CASRMRGSFTDTQYF

SEQ ID NO: 99277 - protein, 14 aa, Homo sapiens
  CDR3 for alpha chain variable domain of TCR clone 49639 (TRAV1-2, TRAJ16)
CAVNRFSHGQKLLF

SEQ ID NO: 99278 - protein, 15 aa, Homo sapiens
  CDR3 for beta chain variable domain of TCR clone 49639 (TRBV7-9, TRBJ1-6)
CASSSPGRGNSPLHF

SEQ ID NO: 99279 - protein, 17 aa, Homo sapiens
  CDR3 for alpha chain variable domain of TCR clone 49640 (TRAV3, TRAJ6)
CAVRDGPRAGGSYIPTF

SEQ ID NO: 99280 - protein, 20 aa, Homo sapiens
  CDR3 for beta chain variable domain of TCR clone 49640 (TRBV28, TRBJ2-1)
CASTPIGWSPGLAGGNEQFF

SEQ ID NO: 99281 - protein, 22 aa, Homo sapiens
  CDR3 for alpha chain variable domain of TCR clone 49641 (TRAV3, TRAJ38)
CAVRDCLNAGNNHIQNPDPAVY

SEQ ID NO: 99282 - protein, 13 aa, Homo sapiens
  CDR3 for beta chain variable domain of TCR clone 49641 (TRBV7-9, TRBJ1-2)
CASSLKQNYGYTF

SEQ ID NO: 99283 - protein, 14 aa, Homo sapiens
  CDR3 for alpha chain variable domain of TCR clone 49642 (TRAV1-2, TRAJ16)
CAVNRFSDGQKLLF

SEQ ID NO: 99284 - protein, 14 aa, Homo sapiens
  CDR3 for beta chain variable domain of TCR clone 49642 (TRBV7-9, TRBJ2-3)
CASSSEDGTDTQYF

SEQ ID NO: 99285 - protein, 14 aa, Homo sapiens
  CDR3 for alpha chain variable domain of TCR clone 49643 (TRAV12-2, TRAJ40)
CAVKIPPGAYKYIF

SEQ ID NO: 99286 - protein, 14 aa, Homo sapiens
  CDR3 for beta chain variable domain of TCR clone 49643 (TRBV20-1, TRBJ1-1)
CSAQTRIGGTEAFF

SEQ ID NO: 99287 - protein, 14 aa, Homo sapiens
  CDR3 for alpha chain variable domain of TCR clone 49644 (TRAV17, TRAJ57)
CATDPQGGSEKLVF

SEQ ID NO: 99288 - protein, 15 aa, Homo sapiens
  CDR3 for beta chain variable domain of TCR clone 49644 (TRBV25-1, TRBJ1-4)
CASSKRIATNEKLFF

SEQ ID NO: 99289 - protein, 14 aa, Homo sapiens
  CDR3 for alpha chain variable domain of TCR clone 49645 (TRAV8-4, TRAJ38)
YARLNAGNNRKLIW

SEQ ID NO: 99290 - protein, 12 aa, Homo sapiens
  CDR3 for beta chain variable domain of TCR clone 49645 (TRBV6-1, TRBJ2-7)
CASSEPLYEQYF

SEQ ID NO: 99291 - protein, 16 aa, Homo sapiens
  CDR3 for alpha chain variable domain of TCR clone 49646 (TRAV4, TRAJ9)
CLVGDPNRPGGFKTIF

SEQ ID NO: 99292 - protein, 15 aa, Homo sapiens
  CDR3 for beta chain variable domain of TCR clone 49646 (TRBV9, TRBJ1-6)
CASSVAGTGDSPLHF

SEQ ID NO: 99293 - protein, 11 aa, Homo sapiens
  CDR3 for alpha chain variable domain of TCR clone 49647 (TRAV1-2, TRAJ31)
CAVNNNARLMF

SEQ ID NO: 99294 - protein, 15 aa, Homo sapiens
  CDR3 for beta chain variable domain of TCR clone 49647 (TRBV28, TRBJ2-1)
CASSIIARGRSEQFF

SEQ ID NO: 99295 - protein, 12 aa, Homo sapiens
  CDR3 for alpha chain variable domain of TCR clone 49648 (TRAV8-2, TRAJ45)
CAQGGGADGLTF

SEQ ID NO: 99296 - protein, 14 aa, Homo sapiens
  CDR3 for beta chain variable domain of TCR clone 49648 (TRBV4-3, TRBJ1-1)
CASSQGWTPARAFF

SEQ ID NO: 99297 - protein, 15 aa, Homo sapiens
  CDR3 for alpha chain variable domain of TCR clone 49649 (TRAV8-3, TRAJ45)
CASSYSGGGADGLTL

SEQ ID NO: 99298 - protein, 20 aa, Homo sapiens
  CDR3 for beta chain variable domain of TCR clone 49649 (TRBV28, TRBJ2-1)
CASTPIGRSPGLAGGNEQFF

SEQ ID NO: 99299 - protein, 11 aa, Homo sapiens
  CDR3 for alpha chain variable domain of TCR clone 49650 (TRAV3, TRAJ21)
CAVGNLNKFYF

SEQ ID NO: 99300 - protein, 14 aa, Homo sapiens
  CDR3 for beta chain variable domain of TCR clone 49650 (TRBV18, TRBJ2-5)
CASSPGVSQETQYF

SEQ ID NO: 99301 - protein, 16 aa, Homo sapiens
  CDR3 for alpha chain variable domain of TCR clone 49651 (TRAV3, TRAJ37)
CAVRGRGSGNTGKLIF

SEQ ID NO: 99302 - protein, 12 aa, Homo sapiens
  CDR3 for beta chain variable domain of TCR clone 49651 (TRBV11-2, TRBJ2-2)
CASSLGGGELFF

SEQ ID NO: 99303 - protein, 10 aa, Homo sapiens
  CDR3 for alpha chain variable domain of TCR clone 49652 (TRAV23/DV6, TRAJ31)
CARGGARFMF

SEQ ID NO: 99304 - protein, 14 aa, Homo sapiens
  CDR3 for beta chain variable domain of TCR clone 49652 (TRBV7-8, TRBJ1-2)
CASSPDSLSYGYTF

SEQ ID NO: 99305 - protein, 13 aa, Homo sapiens
  CDR3 for alpha chain variable domain of TCR clone 49653 (TRAV36/DV7, TRAJ37)
CAVFSSNTGKLIF

SEQ ID NO: 99306 - protein, 16 aa, Homo sapiens
  CDR3 for beta chain variable domain of TCR clone 49653 (TRBV19, TRBJ2-3)
CASSPGAASRTDTQYF

SEQ ID NO: 99307 - protein, 14 aa, Homo sapiens
  CDR3 for alpha chain variable domain of TCR clone 49654 (TRAV27, TRAJ54)
CAGIPIQGAQKLVF

SEQ ID NO: 99308 - protein, 13 aa, Homo sapiens
  CDR3 for beta chain variable domain of TCR clone 49654 (TRBV4-1, TRBJ2-1)
CASSQAGGDEQFF

SEQ ID NO: 99309 - protein, 17 aa, Homo sapiens
  CDR3 for alpha chain variable domain of TCR clone 49655 (TRAV3, TRAJ6)
CAVRDGPRAGGGYIPTF

SEQ ID NO: 99310 - protein, 14 aa, Homo sapiens
  CDR3 for beta chain variable domain of TCR clone 49655 (TRBV7-2, TRBJ2-7)
CANSPKTSFYEQYF

SEQ ID NO: 99311 - protein, 13 aa, Homo sapiens
  CDR3 for alpha chain variable domain of TCR clone 49656 (TRAV12-1, TRAJ6)
CVVYPGGSYIPTF

SEQ ID NO: 99312 - protein, 16 aa, Homo sapiens
  CDR3 for beta chain variable domain of TCR clone 49656 (TRBV11-3, TRBJ2-5)
CASSSVVAGSTETQYF

SEQ ID NO: 99313 - protein, 15 aa, Homo sapiens
  CDR3 for alpha chain variable domain of TCR clone 49657 (TRAV22, TRAJ45)
CAAKYSGGGADGLTF

SEQ ID NO: 99314 - protein, 18 aa, Homo sapiens
  CDR3 for beta chain variable domain of TCR clone 49657 (TRBV11-2, TRBJ2-3)
CASSLRGASRGAPNTQYF

SEQ ID NO: 99315 - protein, 14 aa, Homo sapiens
  CDR3 for alpha chain variable domain of TCR clone 49658 (TRAV26-2, TRAJ27)
CILRDISDAGRSTF

SEQ ID NO: 99316 - protein, 15 aa, Homo sapiens
  CDR3 for beta chain variable domain of TCR clone 49658 (TRBV10-3, TRBJ2-7)
CATREQGLRSYEQYF

SEQ ID NO: 99317 - protein, 10 aa, Homo sapiens
  CDR3 for alpha chain variable domain of TCR clone 49659 (TRAV36/DV7, TRAJ38)
CAANNRKLIW

SEQ ID NO: 99318 - protein, 15 aa, Homo sapiens
  CDR3 for beta chain variable domain of TCR clone 49659 (TRBV20-1, TRBJ2-7)
CSARDRVSGMDEQYF

SEQ ID NO: 99319 - protein, 17 aa, Homo sapiens
  CDR3 for alpha chain variable domain of TCR clone 49660 (TRAV3, TRAJ42)
CAMRDRDYGGSQGNLIF

SEQ ID NO: 99320 - protein, 15 aa, Homo sapiens
  CDR3 for beta chain variable domain of TCR clone 49660 (TRBV6-6, TRBJ2-7)
CASSYSYGGSYEQYF

SEQ ID NO: 99321 - protein, 15 aa, Homo sapiens
  CDR3 for alpha chain variable domain of TCR clone 49661 (TRAV25, TRAJ53)
CPTSNSGGSNYKLTV

SEQ ID NO: 99322 - protein, 14 aa, Homo sapiens
  CDR3 for beta chain variable domain of TCR clone 49661 (TRBV11-2, TRBJ2-3)
CASSRLARTDTQYF

SEQ ID NO: 99323 - protein, 13 aa, Homo sapiens
  CDR3 for alpha chain variable domain of TCR clone 49662 (TRAV21, TRAJ57)
CAVIQGGSEKLVF

SEQ ID NO: 99324 - protein, 16 aa, Homo sapiens
  CDR3 for beta chain variable domain of TCR clone 49662 (TRBV29-1, TRBJ2-7)
CSVEDAEDGTAYEQYF

SEQ ID NO: 99325 - protein, 15 aa, Homo sapiens
  CDR3 for alpha chain variable domain of TCR clone 49663 (TRAV25, TRAJ52)
CAGRPGGTSYGKLTF

SEQ ID NO: 99326 - protein, 17 aa, Homo sapiens
  CDR3 for beta chain variable domain of TCR clone 49663 (TRBV7-8, TRBJ2-6)
CASSAWTGGAGANVLTF

SEQ ID NO: 99327 - protein, 16 aa, Homo sapiens
  CDR3 for alpha chain variable domain of TCR clone 49664 (TRAV3, TRAJ10)
CAVRDMRAGGGNKLTF

SEQ ID NO: 99328 - protein, 14 aa, Homo sapiens
  CDR3 for beta chain variable domain of TCR clone 49664 (TRBV6-1, TRBJ1-3)
CASVQGGGGNTMYF

SEQ ID NO: 99329 - protein, 17 aa, Homo sapiens
  CDR3 for alpha chain variable domain of TCR clone 49665 (TRAV4, TRAJ18)
CLVGERSVGSTLGRLYF

SEQ ID NO: 99330 - protein, 14 aa, Homo sapiens
  CDR3 for beta chain variable domain of TCR clone 49665 (TRBV6-5, TRBJ1-2)
CAGSYDGTGGGYTF

SEQ ID NO: 99331 - protein, 16 aa, Homo sapiens
  CDR3 for alpha chain variable domain of TCR clone 49666 (TRAV27, TRAJ13)
CAGARSDSGGYQKVTF

SEQ ID NO: 99332 - protein, 15 aa, Homo sapiens
  CDR3 for beta chain variable domain of TCR clone 49666 (TRBV29-1, TRBJ2-1)
CSVGRHALFYNEQFF

SEQ ID NO: 99333 - protein, 16 aa, Homo sapiens
  CDR3 for alpha chain variable domain of TCR clone 49667 (TRAV30, TRAJ24)
CGTEIVDADSWGKFQF

SEQ ID NO: 99334 - protein, 15 aa, Homo sapiens
  CDR3 for beta chain variable domain of TCR clone 49667 (TRBV4-1, TRBJ1-4)
CASSGTGGTNEKLFF

SEQ ID NO: 99335 - protein, 13 aa, Homo sapiens
  CDR3 for alpha chain variable domain of TCR clone 49668 (TRAV35, TRAJ42)
YAGFPGSQGNLIF

SEQ ID NO: 99336 - protein, 13 aa, Homo sapiens
  CDR3 for beta chain variable domain of TCR clone 49668 (TRBV29-1, TRBJ2-1)
CSVEGGRVNEQSF

SEQ ID NO: 99337 - protein, 15 aa, Homo sapiens
  CDR3 for alpha chain variable domain of TCR clone 49669 (TRAV8-3, TRAJ11)
CAVGLLNSGYSTLTF

SEQ ID NO: 99338 - protein, 16 aa, Homo sapiens
  CDR3 for beta chain variable domain of TCR clone 49669 (TRBV6-6, TRBJ2-1)
RASSYSFSGSYNEQFF

SEQ ID NO: 99339 - protein, 14 aa, Homo sapiens
  CDR3 for alpha chain variable domain of TCR clone 49670 (TRAV12-2, TRAJ48)
CAANAFFGNEKLTF

SEQ ID NO: 99340 - protein, 13 aa, Homo sapiens
  CDR3 for beta chain variable domain of TCR clone 49670 (TRBV28, TRBJ2-7)
CAGAQQGLDEQYF

SEQ ID NO: 99341 - protein, 13 aa, Homo sapiens
  CDR3 for alpha chain variable domain of TCR clone 49671 (TRAV8-3, TRAJ48)
CAVVPFGNEKLTF

SEQ ID NO: 99342 - protein, 15 aa, Homo sapiens
  CDR3 for beta chain variable domain of TCR clone 49671 (TRBV11-2, TRBJ2-1)
CASSFPSTRYNEQFF

SEQ ID NO: 99343 - protein, 15 aa, Homo sapiens
  CDR3 for alpha chain variable domain of TCR clone 49672 (TRAV8-3, TRAJ42)
CAVGSQAGSQGNLIF

SEQ ID NO: 99344 - protein, 16 aa, Homo sapiens
  CDR3 for beta chain variable domain of TCR clone 49672 (TRBV12-5, TRBJ2-5)
CASGPRTSGNQETQYF

SEQ ID NO: 99345 - protein, 10 aa, Homo sapiens
  CDR3 for alpha chain variable domain of TCR clone 49673 (TRAV1-2, TRAJ23)
CAGQGGKLIF

SEQ ID NO: 99346 - protein, 17 aa, Homo sapiens
  CDR3 for beta chain variable domain of TCR clone 49673 (TRBV20-1, TRBJ2-2)
CSASGSGQGGLTGELFF

SEQ ID NO: 99347 - protein, 12 aa, Homo sapiens
  CDR3 for alpha chain variable domain of TCR clone 49674 (TRAV8-3, TRAJ26)
CAGDNYGQNFVF

SEQ ID NO: 99348 - protein, 15 aa, Homo sapiens
  CDR3 for beta chain variable domain of TCR clone 49674 (TRBV9, TRBJ2-1)
CASSLVGSSYNEQFF

SEQ ID NO: 99349 - protein, 16 aa, Homo sapiens
  CDR3 for alpha chain variable domain of TCR clone 49675 (TRAV20, TRAJ26)
CAVQHRRDNYGQNFVF

SEQ ID NO: 99350 - protein, 13 aa, Homo sapiens
  CDR3 for beta chain variable domain of TCR clone 49675 (TRBV7-9, TRBJ1-2)
CASSLKQNYGYTF

SEQ ID NO: 99351 - protein, 11 aa, Homo sapiens
  CDR3 for alpha chain variable domain of TCR clone 49676 (TRAV1-1, TRAJ23)
CAVRQGGKLFF

SEQ ID NO: 99352 - protein, 20 aa, Homo sapiens
  CDR3 for beta chain variable domain of TCR clone 49676 (TRBV7-8, TRBJ2-2)
CASSHLFPGPTIHITGELFF

SEQ ID NO: 99353 - protein, 15 aa, Homo sapiens
  CDR3 for alpha chain variable domain of TCR clone 49677 (TRAV3, TRAJ45)
CAVRTPWGGADGLTF

SEQ ID NO: 99354 - protein, 16 aa, Homo sapiens
  CDR3 for beta chain variable domain of TCR clone 49677 (TRBV6-1, TRBJ2-2)
CASSLGQGANTGELFF

SEQ ID NO: 99355 - protein, 11 aa, Homo sapiens
  CDR3 for alpha chain variable domain of TCR clone 49678 (TRAV17, TRAJ9)
CATTGGFKTIF

SEQ ID NO: 99356 - protein, 20 aa, Homo sapiens
  CDR3 for beta chain variable domain of TCR clone 49678 (TRBV7-8, TRBJ2-2)
CASSHLFPGPTIHITGELFF

SEQ ID NO: 99357 - protein, 14 aa, Homo sapiens
  CDR3 for alpha chain variable domain of TCR clone 49679 (TRAV13-1, TRAJ44)
CAAKATGTASNLTF

SEQ ID NO: 99358 - protein, 14 aa, Homo sapiens
  CDR3 for beta chain variable domain of TCR clone 49679 (TRBV19, TRBJ2-2)
CASSTLHRSGELFF

SEQ ID NO: 99359 - protein, 16 aa, Homo sapiens
  CDR3 for alpha chain variable domain of TCR clone 49680 (TRAV23/DV6, TRAJ21)
CAASSGGGTTSTNFTL

SEQ ID NO: 99360 - protein, 11 aa, Homo sapiens
  CDR3 for beta chain variable domain of TCR clone 49680 (TRBV7-8, TRBJ2-7)
CASSPSLEQYF

SEQ ID NO: 99361 - protein, 14 aa, Homo sapiens
  CDR3 for alpha chain variable domain of TCR clone 49681 (TRAV1-2, TRAJ16)
CAANRFSDGQKLLF

SEQ ID NO: 99362 - protein, 11 aa, Homo sapiens
  CDR3 for beta chain variable domain of TCR clone 49681 (TRBV4-1, TRBJ2-2)
CASEHTGELFF

SEQ ID NO: 99363 - protein, 13 aa, Homo sapiens
  CDR3 for alpha chain variable domain of TCR clone 49682 (TRAV39, TRAJ30)
CARWMNRDDKIIF

SEQ ID NO: 99364 - protein, 16 aa, Homo sapiens
  CDR3 for beta chain variable domain of TCR clone 49682 (TRBV13, TRBJ2-2)
CASSLGRGYGTGELFF

SEQ ID NO: 99365 - protein, 15 aa, Homo sapiens
  CDR3 for alpha chain variable domain of TCR clone 49683 (TRAV26-1, TRAJ44)
CIVIANTGTASKLTF

SEQ ID NO: 99366 - protein, 16 aa, Homo sapiens
  CDR3 for beta chain variable domain of TCR clone 49683 (TRBV7-7, TRBJ2-1)
CASSLASGTSYNEQFF

SEQ ID NO: 99367 - protein, 12 aa, Homo sapiens
  CDR3 for alpha chain variable domain of TCR clone 49684 (TRAV3, TRAJ26)
CASKDGGQNFVF

SEQ ID NO: 99368 - protein, 13 aa, Homo sapiens
  CDR3 for beta chain variable domain of TCR clone 49684 (TRBV25-1, TRBJ1-1)
CASSDRGRAEAFF

SEQ ID NO: 99369 - protein, 18 aa, Homo sapiens
  CDR3 for alpha chain variable domain of TCR clone 49685 (TRAV38-1, TRAJ8)
CDVFLCFSMDTGFQKLVF

SEQ ID NO: 99370 - protein, 14 aa, Homo sapiens
  CDR3 for beta chain variable domain of TCR clone 49685 (TRBV4-1, TRBJ2-3)
CASSQEGSTDTQYF

SEQ ID NO: 99371 - protein, 13 aa, Homo sapiens
  CDR3 for alpha chain variable domain of TCR clone 49686 (TRAV3, TRAJ15)
CVVRDQAGTALIF

SEQ ID NO: 99372 - protein, 15 aa, Homo sapiens
  CDR3 for beta chain variable domain of TCR clone 49686 (TRBV11-1, TRBJ2-7)
CASSLNYGASYEQYF

SEQ ID NO: 99373 - protein, 13 aa, Homo sapiens
  CDR3 for alpha chain variable domain of TCR clone 49687 (TRAV21, TRAJ57)
CAVTQGGSEKLVF

SEQ ID NO: 99374 - protein, 16 aa, Homo sapiens
  CDR3 for beta chain variable domain of TCR clone 49687 (TRBV29-1, TRBJ2-7)
CSVEDAKDGTAYEQYF

SEQ ID NO: 99375 - protein, 16 aa, Homo sapiens
  CDR3 for alpha chain variable domain of TCR clone 49688 (TRAV3, TRAJ37)
CAVRPHGSGNTGKLIF

SEQ ID NO: 99376 - protein, 17 aa, Homo sapiens
  CDR3 for beta chain variable domain of TCR clone 49688 (TRBV5-1, TRBJ2-5)
CASSPVALGQNQETQYL

SEQ ID NO: 99377 - protein, 12 aa, Homo sapiens
  CDR3 for alpha chain variable domain of TCR clone 49689 (TRAV3, TRAJ26)
CAVRDYGQHFVF

SEQ ID NO: 99378 - protein, 16 aa, Homo sapiens
  CDR3 for beta chain variable domain of TCR clone 49689 (TRBV11-2, TRBJ1-2)
CASSPSGREANYGYTF

SEQ ID NO: 99379 - protein, 14 aa, Homo sapiens
  CDR3 for alpha chain variable domain of TCR clone 49690 (TRAV16, TRAJ39)
CALSKNNAGNMPTF

SEQ ID NO: 99380 - protein, 16 aa, Homo sapiens
  CDR3 for beta chain variable domain of TCR clone 49690 (TRBV6-6, TRBJ2-1)
CASSYSFSGSYNEQFF

SEQ ID NO: 99381 - protein, 11 aa, Homo sapiens
  CDR3 for alpha chain variable domain of TCR clone 49691 (TRAV21, TRAJ23)
CAPQRRGKLTF

SEQ ID NO: 99382 - protein, 14 aa, Homo sapiens
  CDR3 for beta chain variable domain of TCR clone 49691 (TRBV12-4, TRBJ1-1)
CASTWTGHDTEAFF

SEQ ID NO: 99383 - protein, 16 aa, Homo sapiens
  CDR3 for alpha chain variable domain of TCR clone 49692 (TRAV27, TRAJ13)
CAGAKSDSGGYQKVTF

SEQ ID NO: 99384 - protein, 15 aa, Homo sapiens
  CDR3 for beta chain variable domain of TCR clone 49692 (TRBV29-1, TRBJ2-1)
CSVGRYALFYNEQFF

SEQ ID NO: 99385 - protein, 16 aa, Homo sapiens
  CDR3 for alpha chain variable domain of TCR clone 49693 (TRAV3, TRAJ37)
CAVRPHGSGNTGKLIF

SEQ ID NO: 99386 - protein, 22 aa, Homo sapiens
  CDR3 for beta chain variable domain of TCR clone 49693 (TRBV19, TRBJ2-1)
CASSVRDRVTGTSGRIYNEQFF

SEQ ID NO: 99387 - protein, 14 aa, Homo sapiens
  CDR3 for alpha chain variable domain of TCR clone 49694 (TRAV23/DV6, TRAJ11)
CAASLESGYSTLTS

SEQ ID NO: 99388 - protein, 13 aa, Homo sapiens
  CDR3 for beta chain variable domain of TCR clone 49694 (TRBV4-1, TRBJ2-5)
CASSLTRGETQYF

SEQ ID NO: 99389 - protein, 13 aa, Homo sapiens
  CDR3 for alpha chain variable domain of TCR clone 49695 (TRAV23/DV6, TRAJ22)
CAPYSGSARQLTF

SEQ ID NO: 99390 - protein, 14 aa, Homo sapiens
  CDR3 for beta chain variable domain of TCR clone 49695 (TRBV10-3, TRBJ1-6)
CAISVDGDESPLHF

SEQ ID NO: 99391 - protein, 14 aa, Homo sapiens
  CDR3 for alpha chain variable domain of TCR clone 49696 (TRAV13-1, TRAJ44)
CAAKATGTASKLTF

SEQ ID NO: 99392 - protein, 18 aa, Homo sapiens
  CDR3 for beta chain variable domain of TCR clone 49696 (TRBV5-1, TRBJ1-6)
CASSVGGGYGERNSPLHF

SEQ ID NO: 99393 - protein, 14 aa, Homo sapiens
  CDR3 for alpha chain variable domain of TCR clone 49697 (TRAV17, TRAJ16)
CATADCSDGQKLLF

SEQ ID NO: 99394 - protein, 15 aa, Homo sapiens
  CDR3 for beta chain variable domain of TCR clone 49697 (TRBV18, TRBJ2-1)
CASSPPSASYNEQFF

SEQ ID NO: 99395 - protein, 13 aa, Homo sapiens
  CDR3 for alpha chain variable domain of TCR clone 49698 (TRAV35, TRAJ36)
CARPRIGANNLFF

SEQ ID NO: 99396 - protein, 15 aa, Homo sapiens
  CDR3 for beta chain variable domain of TCR clone 49698 (TRBV28, TRBJ2-5)
CASSTPWSYQETQHF

SEQ ID NO: 99397 - protein, 14 aa, Homo sapiens
  CDR3 for alpha chain variable domain of TCR clone 49699 (TRAV12-3, TRAJ53)
CAMSGGGSNYKLTF

SEQ ID NO: 99398 - protein, 15 aa, Homo sapiens
  CDR3 for beta chain variable domain of TCR clone 49699 (TRBV12-4, TRBJ2-5)
CASSPPTGLQETQYF

SEQ ID NO: 99399 - protein, 16 aa, Homo sapiens
  CDR3 for alpha chain variable domain of TCR clone 49700 (TRAV3, TRAJ10)
CAVRDMRAGGGNKLTF

SEQ ID NO: 99400 - protein, 14 aa, Homo sapiens
  CDR3 for beta chain variable domain of TCR clone 49700 (TRBV12-4, TRBJ1-4)
CASGMTGRSEKLFF

SEQ ID NO: 99401 - protein, 15 aa, Homo sapiens
  CDR3 for alpha chain variable domain of TCR clone 49701 (TRAV25, TRAJ52)
CAGTSGGASYGKLTF

SEQ ID NO: 99402 - protein, 16 aa, Homo sapiens
  CDR3 for beta chain variable domain of TCR clone 49701 (TRBV15, TRBJ1-2)
CATSRGPRTGGGGYTF

SEQ ID NO: 99403 - protein, 11 aa, Homo sapiens
  CDR3 for alpha chain variable domain of TCR clone 49702 (TRAV3, TRAJ21)
CAVGNFNKFYF

SEQ ID NO: 99404 - protein, 14 aa, Homo sapiens
  CDR3 for beta chain variable domain of TCR clone 49702 (TRBV29-1, TRBJ2-2)
CSGRGSGNTGELSF

SEQ ID NO: 99405 - protein, 13 aa, Homo sapiens
  CDR3 for alpha chain variable domain of TCR clone 49703 (TRAV2, TRAJ15)
CAVASQAGTALIF

SEQ ID NO: 99406 - protein, 13 aa, Homo sapiens
  CDR3 for beta chain variable domain of TCR clone 49703 (TRBV12-4, TRBJ2-7)
CASSPTETYEQYF

SEQ ID NO: 99407 - protein, 13 aa, Homo sapiens
  CDR3 for alpha chain variable domain of TCR clone 49704 (TRAV21, TRAJ27)
CAARPGNAGKSTF

SEQ ID NO: 99408 - protein, 20 aa, Homo sapiens
  CDR3 for beta chain variable domain of TCR clone 49704 (TRBV7-8, TRBJ2-2)
CASSHLFPRPTIHITGELFF

SEQ ID NO: 99409 - protein, 15 aa, Homo sapiens
  CDR3 for alpha chain variable domain of TCR clone 49705 (TRAV3, TRAJ42)
CAVRGGPGSQGNLIF

SEQ ID NO: 99410 - protein, 14 aa, Homo sapiens
  CDR3 for beta chain variable domain of TCR clone 49705 (TRBV19, TRBJ1-2)
CASSSLFARDVYTF

SEQ ID NO: 99411 - protein, 11 aa, Homo sapiens
  CDR3 for alpha chain variable domain of TCR clone 49706 (TRAV2, TRAJ33)
CAVDSNYQLIW

SEQ ID NO: 99412 - protein, 12 aa, Homo sapiens
  CDR3 for beta chain variable domain of TCR clone 49706 (TRBV11-2, TRBJ2-2)
CANSLGGGELFF

SEQ ID NO: 99413 - protein, 14 aa, Homo sapiens
  CDR3 for alpha chain variable domain of TCR clone 49707 (TRAV3, TRAJ7)
CAVREEEREQQTRF

SEQ ID NO: 99414 - protein, 16 aa, Homo sapiens
  CDR3 for beta chain variable domain of TCR clone 49707 (TRBV7-3, TRBJ2-2)
CASSLKRGTLSGELFF

SEQ ID NO: 99415 - protein, 18 aa, Homo sapiens
  CDR3 for alpha chain variable domain of TCR clone 49708 (TRAV17, TRAJ45)
CATSLDLYSGGGADGLPF

SEQ ID NO: 99416 - protein, 13 aa, Homo sapiens
  CDR3 for beta chain variable domain of TCR clone 49708 (TRBV10-3, TRBJ2-7)
CASKLAVNYEQYF

SEQ ID NO: 99417 - protein, 17 aa, Homo sapiens
  CDR3 for alpha chain variable domain of TCR clone 49709 (TRAV4, TRAJ18)
CLVGERSVGSTLGRLYF

SEQ ID NO: 99418 - protein, 14 aa, Homo sapiens
  CDR3 for beta chain variable domain of TCR clone 49709 (TRBV6-5, TRBJ1-2)
CASSYDGTGGGYTV

SEQ ID NO: 99419 - protein, 15 aa, Homo sapiens
  CDR3 for alpha chain variable domain of TCR clone 49710 (TRAV8-3, TRAJ27)
CAVGPSKTNAGKSTF

SEQ ID NO: 99420 - protein, 15 aa, Homo sapiens
  CDR3 for beta chain variable domain of TCR clone 49710 (TRBV7-2, TRBJ2-1)
FASSSGLAGGNEQFF

SEQ ID NO: 99421 - protein, 14 aa, Homo sapiens
  CDR3 for alpha chain variable domain of TCR clone 49711 (TRAV17, TRAJ57)
CTTDPQGGSEKLVF

SEQ ID NO: 99422 - protein, 16 aa, Homo sapiens
  CDR3 for beta chain variable domain of TCR clone 49711 (TRBV20-1, TRBJ1-4)
CSAPGQGLLTNEKLFF

SEQ ID NO: 99423 - protein, 12 aa, Homo sapiens
  CDR3 for alpha chain variable domain of TCR clone 49712 (TRAV2, TRAJ9)
CAVGAGGFKTIF

SEQ ID NO: 99424 - protein, 16 aa, Homo sapiens
  CDR3 for beta chain variable domain of TCR clone 49712 (TRBV13, TRBJ2-2)
YASSPRTGEHTGELFF

SEQ ID NO: 99425 - protein, 17 aa, Homo sapiens
  CDR3 for alpha chain variable domain of TCR clone 49713 (TRAV13-1, TRAJ28)
CAASPPYPGAGSYQLTF

SEQ ID NO: 99426 - protein, 13 aa, Homo sapiens
  CDR3 for beta chain variable domain of TCR clone 49713 (TRBV12-5, TRBJ2-3)
CASGDRQSDTQYF

SEQ ID NO: 99427 - protein, 15 aa, Homo sapiens
  CDR3 for alpha chain variable domain of TCR clone 49714 (TRAV12-3, TRAJ6)
CAMSATTGGSSIPTF

SEQ ID NO: 99428 - protein, 16 aa, Homo sapiens
  CDR3 for beta chain variable domain of TCR clone 49714 (TRBV20-1, TRBJ1-2)
CSASMGQGVANYGYTF

SEQ ID NO: 99429 - protein, 15 aa, Homo sapiens
  CDR3 for alpha chain variable domain of TCR clone 49715 (TRAV23/DV6, TRAJ44)
CAASGGTGTASKLTL

SEQ ID NO: 99430 - protein, 15 aa, Homo sapiens
  CDR3 for beta chain variable domain of TCR clone 49715 (TRBV6-3, TRBJ2-7)
CASSSPGTVFYEQYF

SEQ ID NO: 99431 - protein, 15 aa, Homo sapiens
  CDR3 for alpha chain variable domain of TCR clone 49716 (TRAV12-1, TRAJ44)
CVADLPTGTASKLTF

SEQ ID NO: 99432 - protein, 13 aa, Homo sapiens
  CDR3 for beta chain variable domain of TCR clone 49716 (TRBV6-5, TRBJ2-5)
CAGSPQGGETQYF

SEQ ID NO: 99433 - protein, 14 aa, Homo sapiens
  CDR3 for alpha chain variable domain of TCR clone 49717 (TRAV1-2, TRAJ8)
CAVREDTGFQKLVF

SEQ ID NO: 99434 - protein, 15 aa, Homo sapiens
  CDR3 for beta chain variable domain of TCR clone 49717 (TRBV19, TRBJ1-5)
CASSIVWADNQPQHF

SEQ ID NO: 99435 - protein, 17 aa, Homo sapiens
  CDR3 for alpha chain variable domain of TCR clone 49718 (TRAV3, TRAJ6)
CAVRDGPRAGGSYMTTF

SEQ ID NO: 99436 - protein, 14 aa, Homo sapiens
  CDR3 for beta chain variable domain of TCR clone 49718 (TRBV7-2, TRBJ2-7)
CASSPKTSFYEQYF

SEQ ID NO: 99437 - protein, 11 aa, Homo sapiens
  CDR3 for alpha chain variable domain of TCR clone 49719 (TRAV13-2, TRAJ36)
CAETGANNLFF

SEQ ID NO: 99438 - protein, 13 aa, Homo sapiens
  CDR3 for beta chain variable domain of TCR clone 49719 (TRBV7-9, TRBJ2-4)
CATEGLVGNIQYF

SEQ ID NO: 99439 - protein, 13 aa, Homo sapiens
  CDR3 for alpha chain variable domain of TCR clone 49720 (TRAV6, TRAJ5)
CAPADTGRRALTF

SEQ ID NO: 99440 - protein, 15 aa, Homo sapiens
  CDR3 for beta chain variable domain of TCR clone 49720 (TRBV2, TRBJ2-1)
CASSELAGSYNEQFF

SEQ ID NO: 99441 - protein, 13 aa, Homo sapiens
  CDR3 for alpha chain variable domain of TCR clone 49721 (TRAV3, TRAJ21)
CAARELDFNKFYF

SEQ ID NO: 99442 - protein, 17 aa, Homo sapiens
  CDR3 for beta chain variable domain of TCR clone 49721 (TRBV7-8, TRBJ2-6)
CASSAGTGGAGANVLTF

SEQ ID NO: 99443 - protein, 14 aa, Homo sapiens
  CDR3 for alpha chain variable domain of TCR clone 49722 (TRAV1-2, TRAJ16)
CAVNRFSDGEKLLF

SEQ ID NO: 99444 - protein, 14 aa, Homo sapiens
  CDR3 for beta chain variable domain of TCR clone 49722 (TRBV19, TRBJ2-1)
CASPTFVLSGEQFF

SEQ ID NO: 99445 - protein, 13 aa, Homo sapiens
  CDR3 for alpha chain variable domain of TCR clone 49723 (TRAV12-1, TRAJ21)
CVVTLYNLNKFYF

SEQ ID NO: 99446 - protein, 20 aa, Homo sapiens
  CDR3 for beta chain variable domain of TCR clone 49723 (TRBV7-8, TRBJ2-1)
CASSLAHRLAGVRSYNEQFF

SEQ ID NO: 99447 - protein, 13 aa, Homo sapiens
  CDR3 for alpha chain variable domain of TCR clone 49724 (TRAV1-2, TRAJ9)
CAALNTGGFKTIF

SEQ ID NO: 99448 - protein, 14 aa, Homo sapiens
  CDR3 for beta chain variable domain of TCR clone 49724 (TRBV11-2, TRBJ2-3)
CASSRLARTDTQYF

SEQ ID NO: 99449 - protein, 15 aa, Homo sapiens
  CDR3 for alpha chain variable domain of TCR clone 49725 (TRAV20, TRAJ40)
CAVQRGTSGTYKYIF

SEQ ID NO: 99450 - protein, 12 aa, Homo sapiens
  CDR3 for beta chain variable domain of TCR clone 49725 (TRBV10-3, TRBJ2-7)
CAHGADSGEQYF

SEQ ID NO: 99451 - protein, 12 aa, Homo sapiens
  CDR3 for alpha chain variable domain of TCR clone 49726 (TRAV36/DV7, TRAJ54)
CAVVRGAQNLVF

SEQ ID NO: 99452 - protein, 14 aa, Homo sapiens
  CDR3 for beta chain variable domain of TCR clone 49726 (TRBV7-3, TRBJ1-1)
CASSLKGGNTEAFF

SEQ ID NO: 99453 - protein, 20 aa, Homo sapiens
  CDR3 for alpha chain variable domain of TCR clone 49727 (TRAV1-2, TRAJ34)
LLKELQMKDSASPNTDKLIF

SEQ ID NO: 99454 - protein, 14 aa, Homo sapiens
  CDR3 for beta chain variable domain of TCR clone 49727 (TRBV12-4, TRBJ2-3)
CASSLVPSTDTQYF

SEQ ID NO: 99455 - protein, 14 aa, Homo sapiens
  CDR3 for alpha chain variable domain of TCR clone 49728 (TRAV2, TRAJ9)
CAVEDRSGGFKTIF

SEQ ID NO: 99456 - protein, 16 aa, Homo sapiens
  CDR3 for beta chain variable domain of TCR clone 49728 (TRBV7-3, TRBJ2-2)
CASSLKRRTLSGELFF

SEQ ID NO: 99457 - protein, 14 aa, Homo sapiens
  CDR3 for alpha chain variable domain of TCR clone 49729 (TRAV29/DV5, TRAJ49)
CAASAQNTGNQFYF

SEQ ID NO: 99458 - protein, 16 aa, Homo sapiens
  CDR3 for beta chain variable domain of TCR clone 49729 (TRBV12-4, TRBJ1-5)
CAGRQPVEGSNQPQHF

SEQ ID NO: 99459 - protein, 13 aa, Homo sapiens
  CDR3 for alpha chain variable domain of TCR clone 49730 (TRAV13-2, TRAJ49)
CAETLHGGNQFYF

SEQ ID NO: 99460 - protein, 14 aa, Homo sapiens
  CDR3 for beta chain variable domain of TCR clone 49730 (TRBV18, TRBJ2-7)
CASSPRGGAYEQYF

SEQ ID NO: 99461 - protein, 13 aa, Homo sapiens
  CDR3 for alpha chain variable domain of TCR clone 49731 (TRAV13-1, TRAJ5)
CAASDTGRRALTF

SEQ ID NO: 99462 - protein, 12 aa, Homo sapiens
  CDR3 for beta chain variable domain of TCR clone 49731 (TRBV28, TRBJ2-3)
CARSLYRDTQYF

SEQ ID NO: 99463 - protein, 17 aa, Homo sapiens
  CDR3 for alpha chain variable domain of TCR clone 49732 (TRAV23/DV6, TRAJ57)
CAASSTLSQGGSEKLVF

SEQ ID NO: 99464 - protein, 14 aa, Homo sapiens
  CDR3 for beta chain variable domain of TCR clone 49732 (TRBV25-1, TRBJ1-1)
CASNHLGGNTEAFF

SEQ ID NO: 99465 - protein, 15 aa, Homo sapiens
  CDR3 for alpha chain variable domain of TCR clone 49733 (TRAV4, TRAJ39)
CLVGPNNNAGKMLTF

SEQ ID NO: 99466 - protein, 14 aa, Homo sapiens
  CDR3 for beta chain variable domain of TCR clone 49733 (TRBV19, TRBJ2-1)
CASPTFVLSGEQFF

SEQ ID NO: 99467 - protein, 14 aa, Homo sapiens
  CDR3 for alpha chain variable domain of TCR clone 49734 (TRAV8-2, TRAJ4)
CVGSPSGGYNKLIF

SEQ ID NO: 99468 - protein, 15 aa, Homo sapiens
  CDR3 for beta chain variable domain of TCR clone 49734 (TRBV4-1, TRBJ1-4)
CASSDTGGTNEKLFF

SEQ ID NO: 99469 - protein, 15 aa, Homo sapiens
  CDR3 for alpha chain variable domain of TCR clone 49735 (TRAV3, TRAJ45)
CAVRTPWGGADGLTL

SEQ ID NO: 99470 - protein, 16 aa, Homo sapiens
  CDR3 for beta chain variable domain of TCR clone 49735 (TRBV6-1, TRBJ2-2)
CASSFGQGANTGELFF

SEQ ID NO: 99471 - protein, 17 aa, Homo sapiens
  CDR3 for alpha chain variable domain of TCR clone 49736 (TRAV3, TRAJ42)
CAVRDRDYGGSQGNLIF

SEQ ID NO: 99472 - protein, 14 aa, Homo sapiens
  CDR3 for beta chain variable domain of TCR clone 49736 (TRBV18, TRBJ1-5)
CASSRQQRNQPQHF

SEQ ID NO: 99473 - protein, 15 aa, Homo sapiens
  CDR3 for alpha chain variable domain of TCR clone 49737 (TRAV2, TRAJ15)
CAVEYRGQAGTALIF

SEQ ID NO: 99474 - protein, 13 aa, Homo sapiens
  CDR3 for beta chain variable domain of TCR clone 49737 (TRBV10-2, TRBJ2-7)
CASGASGGYEQYF

SEQ ID NO: 99475 - protein, 14 aa, Homo sapiens
  CDR3 for alpha chain variable domain of TCR clone 49738 (TRAV13-1, TRAJ35)
CAASKGGFGNVLHC

SEQ ID NO: 99476 - protein, 16 aa, Homo sapiens
  CDR3 for beta chain variable domain of TCR clone 49738 (TRBV20-1, TRBJ1-4)
CSAPGQGLLTNEKLFF

SEQ ID NO: 99477 - protein, 12 aa, Homo sapiens
  CDR3 for alpha chain variable domain of TCR clone 49739 (TRAV1-1, TRAJ9)
CAVDTGGFKTIF

SEQ ID NO: 99478 - protein, 20 aa, Homo sapiens
  CDR3 for beta chain variable domain of TCR clone 49739 (TRBV28, TRBJ2-1)
CASTPIGRSPGLAGGNEQFF

SEQ ID NO: 99479 - protein, 15 aa, Homo sapiens
  CDR3 for alpha chain variable domain of TCR clone 49740 (TRAV12-1, TRAJ44)
CVADLPTGTASKLTF

SEQ ID NO: 99480 - protein, 15 aa, Homo sapiens
  CDR3 for beta chain variable domain of TCR clone 49740 (TRBV18, TRBJ2-5)
CASTDRGPRQETQYF

SEQ ID NO: 99481 - protein, 13 aa, Homo sapiens
  CDR3 for alpha chain variable domain of TCR clone 49741 (TRAV8-3, TRAJ36)
CAVDATGANNLFF

SEQ ID NO: 99482 - protein, 15 aa, Homo sapiens
  CDR3 for beta chain variable domain of TCR clone 49741 (TRBV7-2, TRBJ1-2)
CASSPRAGWNYGYTF

SEQ ID NO: 99483 - protein, 14 aa, Homo sapiens
  CDR3 for alpha chain variable domain of TCR clone 49742 (TRAV1-2, TRAJ8)
CAVREDTGFQKLVF

SEQ ID NO: 99484 - protein, 17 aa, Homo sapiens
  CDR3 for beta chain variable domain of TCR clone 49742 (TRBV7-3, TRBJ2-3)
CASSRGLAGEVPDTQYF

SEQ ID NO: 99485 - protein, 13 aa, Homo sapiens
  CDR3 for alpha chain variable domain of TCR clone 49743 (TRAV13-1, TRAJ6)
CSASSGGSYIPTF

SEQ ID NO: 99486 - protein, 15 aa, Homo sapiens
  CDR3 for beta chain variable domain of TCR clone 49743 (TRBV12-4, TRBJ2-5)
CASSPPTGLQETQYF

SEQ ID NO: 99487 - protein, 11 aa, Homo sapiens
  CDR3 for alpha chain variable domain of TCR clone 49744 (TRAV35, TRAJ30)
CAPGGDDKIIF

SEQ ID NO: 99488 - protein, 18 aa, Homo sapiens
  CDR3 for beta chain variable domain of TCR clone 49744 (TRBV7-6, TRBJ2-1)
GHVSLGQQLGGGADEQFF

SEQ ID NO: 99489 - protein, 13 aa, Homo sapiens
  CDR3 for alpha chain variable domain of TCR clone 49745 (TRAV2, TRAJ40)
CAVVTSGTYKYIF

SEQ ID NO: 99490 - protein, 17 aa, Homo sapiens
  CDR3 for beta chain variable domain of TCR clone 49745 (TRBV7-3, TRBJ2-3)
CASSSMKRMRGADTQYF

SEQ ID NO: 99491 - protein, 16 aa, Homo sapiens
  CDR3 for alpha chain variable domain of TCR clone 49746 (TRAV3, TRAJ37)
CAVRPHGSGSTGKLIF

SEQ ID NO: 99492 - protein, 13 aa, Homo sapiens
  CDR3 for beta chain variable domain of TCR clone 49746 (TRBV2, TRBJ1-5)
CASGTGGYQPQHF

SEQ ID NO: 99493 - protein, 13 aa, Homo sapiens
  CDR3 for alpha chain variable domain of TCR clone 49747 (TRAV20, TRAJ34)
CAVSSYNTDKLIF

SEQ ID NO: 99494 - protein, 20 aa, Homo sapiens
  CDR3 for beta chain variable domain of TCR clone 49747 (TRBV7-8, TRBJ2-2)
CASSHLFPGPTIHITGELFF

SEQ ID NO: 99495 - protein, 13 aa, Homo sapiens
  CDR3 for alpha chain variable domain of TCR clone 49748 (TRAV13-1, TRAJ6)
RAASKGGSYIPTF

SEQ ID NO: 99496 - protein, 14 aa, Homo sapiens
  CDR3 for beta chain variable domain of TCR clone 49748 (TRBV7-2, TRBJ2-1)
CASSLGVGYNEQFF

SEQ ID NO: 99497 - protein, 15 aa, Homo sapiens
  CDR3 for alpha chain variable domain of TCR clone 49749 (TRAV3, TRAJ22)
CAVRDRGGSARQLTF

SEQ ID NO: 99498 - protein, 16 aa, Homo sapiens
  CDR3 for beta chain variable domain of TCR clone 49749 (TRBV5-4, TRBJ2-3)
CASQHPGAGGADTQYF

SEQ ID NO: 99499 - protein, 13 aa, Homo sapiens
  CDR3 for alpha chain variable domain of TCR clone 49750 (TRAV8-3, TRAJ48)
CAVVPFGNGKLTF

SEQ ID NO: 99500 - protein, 12 aa, Homo sapiens
  CDR3 for beta chain variable domain of TCR clone 49750 (TRBV11-2, TRBJ2-2)
CASSLGGGELFF

SEQ ID NO: 99501 - protein, 14 aa, Homo sapiens
  CDR3 for alpha chain variable domain of TCR clone 49751 (TRAV26-1, TRAJ49)
CIVRPSNTGNQFYF

SEQ ID NO: 99502 - protein, 15 aa, Homo sapiens
  CDR3 for beta chain variable domain of TCR clone 49751 (TRBV2, TRBJ2-1)
CASSELAGSYNDQFF

SEQ ID NO: 99503 - protein, 15 aa, Homo sapiens
  CDR3 for alpha chain variable domain of TCR clone 49752 (TRAV21, TRAJ24)
CAARSSTDSWGKLQF

SEQ ID NO: 99504 - protein, 19 aa, Homo sapiens
  CDR3 for beta chain variable domain of TCR clone 49752 (TRBV14, TRBJ2-1)
CASSQDQRWEAPEYNEQFF

SEQ ID NO: 99505 - protein, 11 aa, Homo sapiens
  CDR3 for alpha chain variable domain of TCR clone 49753 (TRAV16, TRAJ31)
CALFNNARLMF

SEQ ID NO: 99506 - protein, 15 aa, Homo sapiens
  CDR3 for beta chain variable domain of TCR clone 49753 (TRBV7-9, TRBJ1-5)
CASSQGHQPNQPQHF

SEQ ID NO: 99507 - protein, 15 aa, Homo sapiens
  CDR3 for alpha chain variable domain of TCR clone 49754 (TRAV27, TRAJ38)
CAARRNAGNNRELIW

SEQ ID NO: 99508 - protein, 11 aa, Homo sapiens
  CDR3 for beta chain variable domain of TCR clone 49754 (TRBV12-4, TRBJ2-2)
CASSSAGELFF

SEQ ID NO: 99509 - protein, 15 aa, Homo sapiens
  CDR3 for alpha chain variable domain of TCR clone 49755 (TRAV26-1, TRAJ44)
CIARVPFGTASKLTL

SEQ ID NO: 99510 - protein, 17 aa, Homo sapiens
  CDR3 for beta chain variable domain of TCR clone 49755 (TRBV24-1, TRBJ2-4)
CATSDAEARGVRNIQYF

SEQ ID NO: 99511 - protein, 17 aa, Homo sapiens
  CDR3 for alpha chain variable domain of TCR clone 49756 (TRAV3, TRAJ6)
CAVIDGPRAGGSYIPTF

SEQ ID NO: 99512 - protein, 16 aa, Homo sapiens
  CDR3 for beta chain variable domain of TCR clone 49756 (TRBV4-1, TRBJ2-7)
CASSLTAGQATYEQYF

SEQ ID NO: 99513 - protein, 14 aa, Homo sapiens
  CDR3 for alpha chain variable domain of TCR clone 49757 (TRAV17, TRAJ57)
CATDPQGGSEKLVF

SEQ ID NO: 99514 - protein, 16 aa, Homo sapiens
  CDR3 for beta chain variable domain of TCR clone 49757 (TRBV20-1, TRBJ1-4)
CSAPGQGLLTNEELFF

SEQ ID NO: 99515 - protein, 14 aa, Homo sapiens
  CDR3 for alpha chain variable domain of TCR clone 49758 (TRAV1-1, TRAJ27)
CAVIYNTNAGKSTF

SEQ ID NO: 99516 - protein, 17 aa, Homo sapiens
  CDR3 for beta chain variable domain of TCR clone 49758 (TRBV11-2, TRBJ2-1)
CASSLYPPGVEYNEQFF

SEQ ID NO: 99517 - protein, 14 aa, Homo sapiens
  CDR3 for alpha chain variable domain of TCR clone 49759 (TRAV8-3, TRAJ4)
CAVGASGGYNKLTF

SEQ ID NO: 99518 - protein, 14 aa, Homo sapiens
  CDR3 for beta chain variable domain of TCR clone 49759 (TRBV11-1, TRBJ2-7)
CASTFAVPSYEQYF

SEQ ID NO: 99519 - protein, 14 aa, Homo sapiens
  CDR3 for alpha chain variable domain of TCR clone 49760 (TRAV13-1, TRAJ44)
CAAKATGTASKLTF

SEQ ID NO: 99520 - protein, 13 aa, Homo sapiens
  CDR3 for beta chain variable domain of TCR clone 49760 (TRBV5-5, TRBJ1-2)
RASSFWRGGDYTF

SEQ ID NO: 99521 - protein, 13 aa, Homo sapiens
  CDR3 for alpha chain variable domain of TCR clone 49761 (TRAV27, TRAJ41)
CAGEGNSGYALNF

SEQ ID NO: 99522 - protein, 14 aa, Homo sapiens
  CDR3 for beta chain variable domain of TCR clone 49761 (TRBV7-2, TRBJ1-1)
CARSFLTGTTEAFF

SEQ ID NO: 99523 - protein, 18 aa, Homo sapiens
  CDR3 for alpha chain variable domain of TCR clone 49762 (TRAV21, TRAJ52)
CAVRPSPAGGTSYGKLTF

SEQ ID NO: 99524 - protein, 15 aa, Homo sapiens
  CDR3 for beta chain variable domain of TCR clone 49762 (TRBV7-9, TRBJ1-4)
CASSARTGGNEKLFF

SEQ ID NO: 99525 - protein, 11 aa, Homo sapiens
  CDR3 for alpha chain variable domain of TCR clone 49763 (TRAV12-3, TRAJ43)
CAMSVSNDMRF

SEQ ID NO: 99526 - protein, 15 aa, Homo sapiens
  CDR3 for beta chain variable domain of TCR clone 49763 (TRBV18, TRBJ2-1)
CASSPPSASYNEQFF

SEQ ID NO: 99527 - protein, 13 aa, Homo sapiens
  CDR3 for alpha chain variable domain of TCR clone 49764 (TRAV8-3, TRAJ43)
CAVVPYNNNDMRL

SEQ ID NO: 99528 - protein, 16 aa, Homo sapiens
  CDR3 for beta chain variable domain of TCR clone 49764 (TRBV7-2, TRBJ2-5)
CASSPFPTGGEETQYF

SEQ ID NO: 99529 - protein, 13 aa, Homo sapiens
  CDR3 for alpha chain variable domain of TCR clone 49765 (TRAV13-1, TRAJ39)
CSKYSNAGNMLTF

SEQ ID NO: 99530 - protein, 16 aa, Homo sapiens
  CDR3 for beta chain variable domain of TCR clone 49765 (TRBV4-3, TRBJ2-2)
CASSQDLSGGYGELFF

SEQ ID NO: 99531 - protein, 11 aa, Homo sapiens
  CDR3 for alpha chain variable domain of TCR clone 49766 (TRAV4, TRAJ20)
CLVGDKVTTTS

SEQ ID NO: 99532 - protein, 15 aa, Homo sapiens
  CDR3 for beta chain variable domain of TCR clone 49766 (TRBV18, TRBJ2-7)
CASSPSSTGNYEQYL

SEQ ID NO: 99533 - protein, 11 aa, Homo sapiens
  CDR3 for alpha chain variable domain of TCR clone 49767 (TRAV21, TRAJ9)
CAVPGGFNTIF

SEQ ID NO: 99534 - protein, 12 aa, Homo sapiens
  CDR3 for beta chain variable domain of TCR clone 49767 (TRBV20-1, TRBJ2-3)
CSARVGTDTQYF

SEQ ID NO: 99535 - protein, 12 aa, Homo sapiens
  CDR3 for alpha chain variable domain of TCR clone 49768 (TRAV1-1, TRAJ30)
CAVRGRDDKIIF

SEQ ID NO: 99536 - protein, 12 aa, Homo sapiens
  CDR3 for beta chain variable domain of TCR clone 49768 (TRBV29-1, TRBJ2-3)
CSVTGGADTQYF

SEQ ID NO: 99537 - protein, 13 aa, Homo sapiens
  CDR3 for alpha chain variable domain of TCR clone 49769 (TRAV3, TRAJ20)
CAVRPLNDYKLSL

SEQ ID NO: 99538 - protein, 12 aa, Homo sapiens
  CDR3 for beta chain variable domain of TCR clone 49769 (TRBV6-1, TRBJ2-1)
CATYGLNNEQFF

SEQ ID NO: 99539 - protein, 16 aa, Homo sapiens
  CDR3 for alpha chain variable domain of TCR clone 49770 (TRAV12-3, TRAJ53)
CAMSPGSGGSNYKMTF

SEQ ID NO: 99540 - protein, 16 aa, Homo sapiens
  CDR3 for beta chain variable domain of TCR clone 49770 (TRBV4-2, TRBJ1-1)
CASSQAGFGMNTEAFF

SEQ ID NO: 99541 - protein, 13 aa, Homo sapiens
  CDR3 for alpha chain variable domain of TCR clone 49771 (TRAV17, TRAJ9)
CATDYTGGFKTIF

SEQ ID NO: 99542 - protein, 13 aa, Homo sapiens
  CDR3 for beta chain variable domain of TCR clone 49771 (TRBV7-2, TRBJ2-7)
CASSSPSGSEQYF

SEQ ID NO: 99543 - protein, 15 aa, Homo sapiens
  CDR3 for alpha chain variable domain of TCR clone 49772 (TRAV12-2, TRAJ53)
CAVNGGGGSNYKLTF

SEQ ID NO: 99544 - protein, 14 aa, Homo sapiens
  CDR3 for beta chain variable domain of TCR clone 49772 (TRBV7-2, TRBJ1-1)
CASSFLTGTTEAFF

SEQ ID NO: 99545 - protein, 17 aa, Homo sapiens
  CDR3 for alpha chain variable domain of TCR clone 49773 (TRAV3, TRAJ6)
RAVRDGPRAGGSYIPTF

SEQ ID NO: 99546 - protein, 14 aa, Homo sapiens
  CDR3 for beta chain variable domain of TCR clone 49773 (TRBV7-2, TRBJ2-7)
CASSPKTSFYEKYF

SEQ ID NO: 99547 - protein, 14 aa, Homo sapiens
  CDR3 for alpha chain variable domain of TCR clone 49774 (TRAV8-1, TRAJ24)
CAVNAADSWGRLQF

SEQ ID NO: 99548 - protein, 16 aa, Homo sapiens
  CDR3 for beta chain variable domain of TCR clone 49774 (TRBV4-3, TRBJ2-1)
CASSPALDRGVNEQFF

SEQ ID NO: 99549 - protein, 14 aa, Homo sapiens
  CDR3 for alpha chain variable domain of TCR clone 49775 (TRAV12-2, TRAJ13)
CAVKKTGGYQKVTF

SEQ ID NO: 99550 - protein, 13 aa, Homo sapiens
  CDR3 for beta chain variable domain of TCR clone 49775 (TRBV12-4, TRBJ2-5)
CASRLAVQETQYF

SEQ ID NO: 99551 - protein, 14 aa, Homo sapiens
  CDR3 for alpha chain variable domain of TCR clone 49776 (TRAV8-3, TRAJ4)
CAVGASGGYNKLIF

SEQ ID NO: 99552 - protein, 16 aa, Homo sapiens
  CDR3 for beta chain variable domain of TCR clone 49776 (TRBV7-2, TRBJ2-6)
CASSERRASGANVLTF

SEQ ID NO: 99553 - protein, 14 aa, Homo sapiens
  CDR3 for alpha chain variable domain of TCR clone 49777 (TRAV16, TRAJ33)
CALSAMDSNYQLIW

SEQ ID NO: 99554 - protein, 16 aa, Homo sapiens
  CDR3 for beta chain variable domain of TCR clone 49777 (TRBV12-4, TRBJ2-3)
CASSFPSSTNTDTQYF

SEQ ID NO: 99555 - protein, 11 aa, Homo sapiens
  CDR3 for alpha chain variable domain of TCR clone 49778 (TRAV13-1, TRAJ5)
CAPKGRRALTF

SEQ ID NO: 99556 - protein, 17 aa, Homo sapiens
  CDR3 for beta chain variable domain of TCR clone 49778 (TRBV28, TRBJ2-5)
CARGTPEGDALQETQYF

SEQ ID NO: 99557 - protein, 12 aa, Homo sapiens
  CDR3 for alpha chain variable domain of TCR clone 49779 (TRAV21, TRAJ33)
CAKMDSNYQLIW

SEQ ID NO: 99558 - protein, 14 aa, Homo sapiens
  CDR3 for beta chain variable domain of TCR clone 49779 (TRBV2, TRBJ2-7)
CASSLTSDGYEQYF

SEQ ID NO: 99559 - protein, 14 aa, Homo sapiens
  CDR3 for alpha chain variable domain of TCR clone 49780 (TRAV36/DV7, TRAJ48)
CAQRRDFGNEKLTF

SEQ ID NO: 99560 - protein, 14 aa, Homo sapiens
  CDR3 for beta chain variable domain of TCR clone 49780 (TRBV28, TRBJ2-4)
CASTQVTGANIQYF

SEQ ID NO: 99561 - protein, 14 aa, Homo sapiens
  CDR3 for alpha chain variable domain of TCR clone 49781 (TRAV21, TRAJ38)
RAVMGAGNNRKLIW

SEQ ID NO: 99562 - protein, 13 aa, Homo sapiens
  CDR3 for beta chain variable domain of TCR clone 49781 (TRBV7-3, TRBJ2-5)
CASSIGFFETQYF

SEQ ID NO: 99563 - protein, 12 aa, Homo sapiens
  CDR3 for alpha chain variable domain of TCR clone 49782 (TRAV12-3, TRAJ17)
CAMTLTGNKPTF

SEQ ID NO: 99564 - protein, 13 aa, Homo sapiens
  CDR3 for beta chain variable domain of TCR clone 49782 (TRBV27, TRBJ2-2)
CASSWRNTGELFF

SEQ ID NO: 99565 - protein, 19 aa, Homo sapiens
  CDR3 for alpha chain variable domain of TCR clone 49783 (TRAV12-3, TRAJ6)
CAMSAREGQEEATYLHLEE

SEQ ID NO: 99566 - protein, 12 aa, Homo sapiens
  CDR3 for beta chain variable domain of TCR clone 49783 (TRBV12-4, TRBJ2-3)
CASSTLPDTQYF

SEQ ID NO: 99567 - protein, 14 aa, Homo sapiens
  CDR3 for alpha chain variable domain of TCR clone 49784 (TRAV12-2, TRAJ53)
CRERGGGSNYKLTF

SEQ ID NO: 99568 - protein, 14 aa, Homo sapiens
  CDR3 for beta chain variable domain of TCR clone 49784 (TRBV12-5, TRBJ2-5)
CASGSRTHQETQYF

SEQ ID NO: 99569 - protein, 13 aa, Homo sapiens
  CDR3 for alpha chain variable domain of TCR clone 49785 (TRAV12-3, TRAJ13)
CAMTSGGYQKVTF

SEQ ID NO: 99570 - protein, 18 aa, Homo sapiens
  CDR3 for beta chain variable domain of TCR clone 49785 (TRBV11-2, TRBJ2-3)
CASSLGGASRGAPNTQYF

SEQ ID NO: 99571 - protein, 15 aa, Homo sapiens
  CDR3 for alpha chain variable domain of TCR clone 49786 (TRAV3, TRAJ5)
CAVRPLGHGQESTYF

SEQ ID NO: 99572 - protein, 16 aa, Homo sapiens
  CDR3 for beta chain variable domain of TCR clone 49786 (TRBV3-1, TRBJ2-7)
CASSQGVGKGSSERYF

SEQ ID NO: 99573 - protein, 14 aa, Homo sapiens
  CDR3 for alpha chain variable domain of TCR clone 49787 (TRAV34, TRAJ22)
CGADTSGSERQLTF

SEQ ID NO: 99574 - protein, 15 aa, Homo sapiens
  CDR3 for beta chain variable domain of TCR clone 49787 (TRBV19, TRBJ1-6)
CASSTQGAVGSPLHF

SEQ ID NO: 99575 - protein, 16 aa, Homo sapiens
  CDR3 for alpha chain variable domain of TCR clone 49788 (TRAV12-3, TRAJ53)
CAMSPESGGSNYKLTF

SEQ ID NO: 99576 - protein, 13 aa, Homo sapiens
  CDR3 for beta chain variable domain of TCR clone 49788 (TRBV19, TRBJ1-2)
CASSVPGQDGYTF

SEQ ID NO: 99577 - protein, 20 aa, Homo sapiens
  CDR3 for alpha chain variable domain of TCR clone 49789 (TRAV16, TRAJ10)
CSRGRLSHVLLCSRTGGLTF

SEQ ID NO: 99578 - protein, 19 aa, Homo sapiens
  CDR3 for beta chain variable domain of TCR clone 49789 (TRBV28, TRBJ2-1)
CASSFSIRGSGRTRYEQFF

SEQ ID NO: 99579 - protein, 17 aa, Homo sapiens
  CDR3 for alpha chain variable domain of TCR clone 49790 (TRAV12-2, TRAJ36)
CAVKDNLFFGTGTRLTV

SEQ ID NO: 99580 - protein, 15 aa, Homo sapiens
  CDR3 for beta chain variable domain of TCR clone 49790 (TRBV28, TRBJ2-2)
CASTVAGANTGELFL

SEQ ID NO: 99581 - protein, 16 aa, Homo sapiens
  CDR3 for alpha chain variable domain of TCR clone 49791 (TRAV8-3, TRAJ13)
CAVGAYPSGGYQKVTF

SEQ ID NO: 99582 - protein, 11 aa, Homo sapiens
  CDR3 for beta chain variable domain of TCR clone 49791 (TRBV11-2, TRBJ1-1)
CASSINTEAFF

SEQ ID NO: 99583 - protein, 14 aa, Homo sapiens
  CDR3 for alpha chain variable domain of TCR clone 49792 (TRAV8-4, TRAJ9)
CAVRINTGGFKTIF

SEQ ID NO: 99584 - protein, 16 aa, Homo sapiens
  CDR3 for beta chain variable domain of TCR clone 49792 (TRBV12-5, TRBJ2-5)
CASGPRTSGNQETQYF

SEQ ID NO: 99585 - protein, 11 aa, Homo sapiens
  CDR3 for alpha chain variable domain of TCR clone 49793 (TRAV13-2, TRAJ39)
CAENAGNMLTF

SEQ ID NO: 99586 - protein, 14 aa, Homo sapiens
  CDR3 for beta chain variable domain of TCR clone 49793 (TRBV19, TRBJ1-5)
CASRAPDSFLSQHF

SEQ ID NO: 99587 - protein, 13 aa, Homo sapiens
  CDR3 for alpha chain variable domain of TCR clone 49794 (TRAV9-2, TRAJ53)
CALSGGGNYKLTF

SEQ ID NO: 99588 - protein, 17 aa, Homo sapiens
  CDR3 for beta chain variable domain of TCR clone 49794 (TRBV11-2, TRBJ2-1)
CASSLYPPGVEYNEQFF

SEQ ID NO: 99589 - protein, 14 aa, Homo sapiens
  CDR3 for alpha chain variable domain of TCR clone 49795 (TRAV1-2, TRAJ16)
CAVNRFSDGQKLLF

SEQ ID NO: 99590 - protein, 14 aa, Homo sapiens
  CDR3 for beta chain variable domain of TCR clone 49795 (TRBV7-2, TRBJ2-7)
CASSPKTSFYEQCF

SEQ ID NO: 99591 - protein, 11 aa, Homo sapiens
  CDR3 for alpha chain variable domain of TCR clone 49796 (TRAV4, TRAJ31)
CLVGDNARLMF

SEQ ID NO: 99592 - protein, 12 aa, Homo sapiens
  CDR3 for beta chain variable domain of TCR clone 49796 (TRBV7-9, TRBJ1-4)
CASSTDREKLFF

SEQ ID NO: 99593 - protein, 13 aa, Homo sapiens
  CDR3 for alpha chain variable domain of TCR clone 49797 (TRAV3, TRAJ27)
CAVRPLGAGKSTF

SEQ ID NO: 99594 - protein, 13 aa, Homo sapiens
  CDR3 for beta chain variable domain of TCR clone 49797 (TRBV7-9, TRBJ2-3)
CASSPGSTDTQDF

SEQ ID NO: 99595 - protein, 14 aa, Homo sapiens
  CDR3 for alpha chain variable domain of TCR clone 49798 (TRAV23/DV6, TRAJ58)
CAGMRETSGSRMTF

SEQ ID NO: 99596 - protein, 13 aa, Homo sapiens
  CDR3 for beta chain variable domain of TCR clone 49798 (TRBV28, TRBJ2-7)
CASRSSGVYEQYF

SEQ ID NO: 99597 - protein, 12 aa, Homo sapiens
  CDR3 for alpha chain variable domain of TCR clone 49799 (TRAV16, TRAJ10)
CSRTGGGNKLTF

SEQ ID NO: 99598 - protein, 13 aa, Homo sapiens
  CDR3 for beta chain variable domain of TCR clone 49799 (TRBV20-1, TRBJ1-1)
CSARGGGNTEAFF

SEQ ID NO: 99599 - protein, 16 aa, Homo sapiens
  CDR3 for alpha chain variable domain of TCR clone 49800 (TRAV30, TRAJ24)
CGTEIVDADSWGKFQF

SEQ ID NO: 99600 - protein, 19 aa, Homo sapiens
  CDR3 for beta chain variable domain of TCR clone 49800 (TRBV25-1, TRBJ2-2)
CAILVYRADRGRKTGELFF

SEQ ID NO: 99601 - protein, 14 aa, Homo sapiens
  CDR3 for alpha chain variable domain of TCR clone 49801 (TRAV12-3, TRAJ10)
SHLPLTGGGNKLTF

SEQ ID NO: 99602 - protein, 14 aa, Homo sapiens
  CDR3 for beta chain variable domain of TCR clone 49801 (TRBV7-9, TRBJ2-5)
CASSLDTAQETQYF

SEQ ID NO: 99603 - protein, 13 aa, Homo sapiens
  CDR3 for alpha chain variable domain of TCR clone 49802 (TRAV9-2, TRAJ39)
CALYIYNAGTCSP

SEQ ID NO: 99604 - protein, 11 aa, Homo sapiens
  CDR3 for beta chain variable domain of TCR clone 49802 (TRBV29-1, TRBJ2-5)
CSEDRTGTQYF

SEQ ID NO: 99605 - protein, 14 aa, Homo sapiens
  CDR3 for alpha chain variable domain of TCR clone 49803 (TRAV1-2, TRAJ8)
CAVREDTGFQKLVF

SEQ ID NO: 99606 - protein, 13 aa, Homo sapiens
  CDR3 for beta chain variable domain of TCR clone 49803 (TRBV6-1, TRBJ1-1)
CASSRQGNTEAFF

SEQ ID NO: 99607 - protein, 14 aa, Homo sapiens
  CDR3 for alpha chain variable domain of TCR clone 49804 (TRAV13-1, TRAJ44)
CAAEATGTASKLTF

SEQ ID NO: 99608 - protein, 17 aa, Homo sapiens
  CDR3 for beta chain variable domain of TCR clone 49804 (TRBV7-3, TRBJ2-3)
RASSLMKRMRGADTQYF

SEQ ID NO: 99609 - protein, 13 aa, Homo sapiens
  CDR3 for alpha chain variable domain of TCR clone 49805 (TRAV27, TRAJ29)
CAGAHSGNTPLVF

SEQ ID NO: 99610 - protein, 18 aa, Homo sapiens
  CDR3 for beta chain variable domain of TCR clone 49805 (TRBV6-6, TRBJ1-3)
CASSYSKWDSISGNTMYF

SEQ ID NO: 99611 - protein, 14 aa, Homo sapiens
  CDR3 for alpha chain variable domain of TCR clone 49806 (TRAV8-4, TRAJ8)
CAVSEDTGFQKLVF

SEQ ID NO: 99612 - protein, 13 aa, Homo sapiens
  CDR3 for beta chain variable domain of TCR clone 49806 (TRBV7-9, TRBJ1-2)
CASSLKQNYGHTF

SEQ ID NO: 99613 - protein, 15 aa, Homo sapiens
  CDR3 for alpha chain variable domain of TCR clone 49807 (TRAV12-3, TRAJ49)
CAMAVTPNAGNQFYF

SEQ ID NO: 99614 - protein, 18 aa, Homo sapiens
  CDR3 for beta chain variable domain of TCR clone 49807 (TRBV4-1, TRBJ1-5)
CASSQDPRGQGLNQPQHF

SEQ ID NO: 99615 - protein, 13 aa, Homo sapiens
  CDR3 for alpha chain variable domain of TCR clone 49808 (TRAV12-2, TRAJ18)
CAVRGSTLGRLYF

SEQ ID NO: 99616 - protein, 15 aa, Homo sapiens
  CDR3 for beta chain variable domain of TCR clone 49808 (TRBV11-3, TRBJ2-3)
CASLKDGREGDTQYF

SEQ ID NO: 99617 - protein, 12 aa, Homo sapiens
  CDR3 for alpha chain variable domain of TCR clone 49809 (TRAV13-1, TRAJ53)
AASGGSNYKLTF

SEQ ID NO: 99618 - protein, 13 aa, Homo sapiens
  CDR3 for beta chain variable domain of TCR clone 49809 (TRBV7-2, TRBJ2-2)
CASSSVRAGELFS

SEQ ID NO: 99619 - protein, 14 aa, Homo sapiens
  CDR3 for alpha chain variable domain of TCR clone 49810 (TRAV13-1, TRAJ35)
CAASKGGFGNVLHC

SEQ ID NO: 99620 - protein, 13 aa, Homo sapiens
  CDR3 for beta chain variable domain of TCR clone 49810 (TRBV6-1, TRBJ1-1)
CASSRQGNTEAFF

SEQ ID NO: 99621 - protein, 13 aa, Homo sapiens
  CDR3 for alpha chain variable domain of TCR clone 49811 (TRAV30, TRAJ20)
CGTEDRSDYKPSF

SEQ ID NO: 99622 - protein, 15 aa, Homo sapiens
  CDR3 for beta chain variable domain of TCR clone 49811 (TRBV2, TRBJ1-2)
CASTQVQDSNYGYTF

SEQ ID NO: 99623 - protein, 14 aa, Homo sapiens
  CDR3 for alpha chain variable domain of TCR clone 49812 (TRAV12-2, TRAJ24)
CAVTPADSWGQLQF

SEQ ID NO: 99624 - protein, 13 aa, Homo sapiens
  CDR3 for beta chain variable domain of TCR clone 49812 (TRBV6-4, TRBJ1-5)
CASSADLNQPQHF

SEQ ID NO: 99625 - protein, 15 aa, Homo sapiens
  CDR3 for alpha chain variable domain of TCR clone 49813 (TRAV12-2, TRAJ53)
CAVNGGGGSNYKLTF

SEQ ID NO: 99626 - protein, 12 aa, Homo sapiens
  CDR3 for beta chain variable domain of TCR clone 49813 (TRBV7-6, TRBJ2-5)
CASSLGQETQYF

SEQ ID NO: 99627 - protein, 18 aa, Homo sapiens
  CDR3 for alpha chain variable domain of TCR clone 49814 (TRAV12-3, TRAJ52)
CAMSRTNAGGTSYGKLTF

SEQ ID NO: 99628 - protein, 17 aa, Homo sapiens
  CDR3 for beta chain variable domain of TCR clone 49814 (TRBV7-3, TRBJ2-3)
CASSLMKSMRGADTQYF

SEQ ID NO: 99629 - protein, 12 aa, Homo sapiens
  CDR3 for alpha chain variable domain of TCR clone 49815 (TRAV12-1, TRAJ39)
CVVREAGNMLTF

SEQ ID NO: 99630 - protein, 14 aa, Homo sapiens
  CDR3 for beta chain variable domain of TCR clone 49815 (TRBV7-2, TRBJ2-2)
CASRGQGAAGELFF

SEQ ID NO: 99631 - protein, 12 aa, Homo sapiens
  CDR3 for alpha chain variable domain of TCR clone 49816 (TRAV13-2, TRAJ23)
CAERHRGGKLIF

SEQ ID NO: 99632 - protein, 14 aa, Homo sapiens
  CDR3 for beta chain variable domain of TCR clone 49816 (TRBV28, TRBJ2-2)
CASRIRSGTGELFF

SEQ ID NO: 99633 - protein, 15 aa, Homo sapiens
  CDR3 for alpha chain variable domain of TCR clone 49817 (TRAV9-2, TRAJ37)
CALSGGSSNTGKLIF

SEQ ID NO: 99634 - protein, 17 aa, Homo sapiens
  CDR3 for beta chain variable domain of TCR clone 49817 (TRBV7-8, TRBJ2-6)
CASSAGTGGAGANVLTF

SEQ ID NO: 99635 - protein, 16 aa, Homo sapiens
  CDR3 for alpha chain variable domain of TCR clone 49818 (TRAV26-1, TRAJ37)
CIVRGDGSGNTGRLIF

SEQ ID NO: 99636 - protein, 17 aa, Homo sapiens
  CDR3 for beta chain variable domain of TCR clone 49818 (TRBV4-1, TRBJ2-7)
CASSRDPLGVRGGEQYF

SEQ ID NO: 99637 - protein, 15 aa, Homo sapiens
  CDR3 for alpha chain variable domain of TCR clone 49819 (TRAV26-1, TRAJ29)
SIVRVEGSGNTPLVF

SEQ ID NO: 99638 - protein, 14 aa, Homo sapiens
  CDR3 for beta chain variable domain of TCR clone 49819 (TRBV25-1, TRBJ1-1)
CASTHLGGNTEAFF

SEQ ID NO: 99639 - protein, 10 aa, Homo sapiens
  CDR3 for alpha chain variable domain of TCR clone 49820 (TRAV2, TRAJ34)
RAVVNDKLIF

SEQ ID NO: 99640 - protein, 15 aa, Homo sapiens
  CDR3 for beta chain variable domain of TCR clone 49820 (TRBV3-1, TRBJ2-2)
CASGQDWTRAGELFF

SEQ ID NO: 99641 - protein, 16 aa, Homo sapiens
  CDR3 for alpha chain variable domain of TCR clone 49821 (TRAV21, TRAJ37)
CAVRTAGSSNTGKLIC

SEQ ID NO: 99642 - protein, 13 aa, Homo sapiens
  CDR3 for beta chain variable domain of TCR clone 49821 (TRBV7-9, TRBJ2-5)
CASLPSGRETQYF

SEQ ID NO: 99643 - protein, 14 aa, Homo sapiens
  CDR3 for alpha chain variable domain of TCR clone 49822 (TRAV8-1, TRAJ22)
CAAPSSGSARQLAF

SEQ ID NO: 99644 - protein, 14 aa, Homo sapiens
  CDR3 for beta chain variable domain of TCR clone 49822 (TRBV9, TRBJ2-2)
CASSVGQGAGELFF

SEQ ID NO: 99645 - protein, 12 aa, Homo sapiens
  CDR3 for alpha chain variable domain of TCR clone 49823 (TRAV13-1, TRAJ11)
CAATSGYSTLTF

SEQ ID NO: 99646 - protein, 14 aa, Homo sapiens
  CDR3 for beta chain variable domain of TCR clone 49823 (TRBV20-1, TRBJ2-7)
CSAPELAGVGEQYF

SEQ ID NO: 99647 - protein, 18 aa, Homo sapiens
  CDR3 for alpha chain variable domain of TCR clone 49824 (TRAV26-1, TRAJ5)
CIVRVVPPRDTGRRAPTF

SEQ ID NO: 99648 - protein, 15 aa, Homo sapiens
  CDR3 for beta chain variable domain of TCR clone 49824 (TRBV7-9, TRBJ2-7)
CASSLPMGQANEQYF

SEQ ID NO: 99649 - protein, 14 aa, Homo sapiens
  CDR3 for alpha chain variable domain of TCR clone 49825 (TRAV1-2, TRAJ16)
CAVNRFSDGQKLLF

SEQ ID NO: 99650 - protein, 15 aa, Homo sapiens
  CDR3 for beta chain variable domain of TCR clone 49825 (TRBV27, TRBJ1-4)
CASSAQQDLNEKLFF

SEQ ID NO: 99651 - protein, 15 aa, Homo sapiens
  CDR3 for alpha chain variable domain of TCR clone 49826 (TRAV3, TRAJ22)
CAVRDRGGSARQLTF

SEQ ID NO: 99652 - protein, 12 aa, Homo sapiens
  CDR3 for beta chain variable domain of TCR clone 49826 (TRBV7-9, TRBJ2-7)
CASSIKREEQYF

SEQ ID NO: 99653 - protein, 15 aa, Homo sapiens
  CDR3 for alpha chain variable domain of TCR clone 49827 (TRAV26-1, TRAJ40)
CIVRVTTSGTYKYIF

SEQ ID NO: 99654 - protein, 12 aa, Homo sapiens
  CDR3 for beta chain variable domain of TCR clone 49827 (TRBV7-9, TRBJ1-4)
CTSSTDREKLFF

SEQ ID NO: 99655 - protein, 15 aa, Homo sapiens
  CDR3 for alpha chain variable domain of TCR clone 49828 (TRAV12-1, TRAJ44)
CVADLHTGTASKLTF

SEQ ID NO: 99656 - protein, 13 aa, Homo sapiens
  CDR3 for beta chain variable domain of TCR clone 49828 (TRBV6-5, TRBJ2-5)
CASSPQGGETQYF

SEQ ID NO: 99657 - protein, 15 aa, Homo sapiens
  CDR3 for alpha chain variable domain of TCR clone 49829 (TRAV8-3, TRAJ45)
CASSYSGGGAYGLTF

SEQ ID NO: 99658 - protein, 18 aa, Homo sapiens
  CDR3 for beta chain variable domain of TCR clone 49829 (TRBV18, TRBJ1-3)
CASSPRGGAGPSGNTIYF

SEQ ID NO: 99659 - protein, 13 aa, Homo sapiens
  CDR3 for alpha chain variable domain of TCR clone 49830 (TRAV27, TRAJ49)
FAPRPYTGNQFYF

SEQ ID NO: 99660 - protein, 16 aa, Homo sapiens
  CDR3 for beta chain variable domain of TCR clone 49830 (TRBV4-1, TRBJ1-2)
CASSQDAGQVLYGYTF

SEQ ID NO: 99661 - protein, 13 aa, Homo sapiens
  CDR3 for alpha chain variable domain of TCR clone 49831 (TRAV27, TRAJ45)
CRSSGGGADGLTF

SEQ ID NO: 99662 - protein, 18 aa, Homo sapiens
  CDR3 for beta chain variable domain of TCR clone 49831 (TRBV11-2, TRBJ2-3)
CASSLGGASRGAPNTQYF

SEQ ID NO: 99663 - protein, 11 aa, Homo sapiens
  CDR3 for alpha chain variable domain of TCR clone 49832 (TRAV12-1, TRAJ43)
CVEYDNNDIRF

SEQ ID NO: 99664 - protein, 17 aa, Homo sapiens
  CDR3 for beta chain variable domain of TCR clone 49832 (TRBV20-1, TRBJ2-1)
CSARDPLAGVWDNEQFF

SEQ ID NO: 99665 - protein, 14 aa, Homo sapiens
  CDR3 for alpha chain variable domain of TCR clone 49833 (TRAV3, TRAJ21)
CAVESQADFNKFYF

SEQ ID NO: 99666 - protein, 18 aa, Homo sapiens
  CDR3 for beta chain variable domain of TCR clone 49833 (TRBV7-9, TRBJ2-1)
CASSLAVSGTSGRNEQFF

SEQ ID NO: 99667 - protein, 13 aa, Homo sapiens
  CDR3 for alpha chain variable domain of TCR clone 49834 (TRAV27, TRAJ45)
CRSSGGGADGLTF

SEQ ID NO: 99668 - protein, 17 aa, Homo sapiens
  CDR3 for beta chain variable domain of TCR clone 49834 (TRBV11-2, TRBJ2-1)
CASSLYPPGVEYTEQFF

SEQ ID NO: 99669 - protein, 14 aa, Homo sapiens
  CDR3 for alpha chain variable domain of TCR clone 49835 (TRAV3, TRAJ21)
CALESQANFNKFYF

SEQ ID NO: 99670 - protein, 18 aa, Homo sapiens
  CDR3 for beta chain variable domain of TCR clone 49835 (TRBV7-9, TRBJ2-1)
CASSLAVSGTSGRNEQFF

SEQ ID NO: 99671 - protein, 14 aa, Homo sapiens
  CDR3 for alpha chain variable domain of TCR clone 49836 (TRAV12-3, TRAJ10)
SHLPLTGGGNKLTF

SEQ ID NO: 99672 - protein, 12 aa, Homo sapiens
  CDR3 for beta chain variable domain of TCR clone 49836 (TRBV4-2, TRBJ2-2)
CASSHLPGELFF

SEQ ID NO: 99673 - protein, 14 aa, Homo sapiens
  CDR3 for alpha chain variable domain of TCR clone 49837 (TRAV2, TRAJ37)
CAVDFTSNTGKPIF

SEQ ID NO: 99674 - protein, 14 aa, Homo sapiens
  CDR3 for beta chain variable domain of TCR clone 49837 (TRBV5-1, TRBJ2-5)
CASSFGGSQETQYF

SEQ ID NO: 99675 - protein, 13 aa, Homo sapiens
  CDR3 for alpha chain variable domain of TCR clone 49838 (TRAV21, TRAJ45)
CAVPGGGADGLTF

SEQ ID NO: 99676 - protein, 14 aa, Homo sapiens
  CDR3 for beta chain variable domain of TCR clone 49838 (TRBV5-4, TRBJ1-1)
CASSLDSRRDEAFF

SEQ ID NO: 99677 - protein, 11 aa, Homo sapiens
  CDR3 for alpha chain variable domain of TCR clone 49839 (TRAV26-1, TRAJ37)
CIVRVGRKLIF

SEQ ID NO: 99678 - protein, 14 aa, Homo sapiens
  CDR3 for beta chain variable domain of TCR clone 49839 (TRBV7-2, TRBJ2-5)
CASSLSGGGETQYF

SEQ ID NO: 99679 - protein, 16 aa, Homo sapiens
  CDR3 for alpha chain variable domain of TCR clone 49840 (TRAV12-2, TRAJ40)
CAVKIPSGTYKYILEQ

SEQ ID NO: 99680 - protein, 14 aa, Homo sapiens
  CDR3 for beta chain variable domain of TCR clone 49840 (TRBV20-1, TRBJ1-1)
CSAQTRIGGTEAFF

SEQ ID NO: 99681 - protein, 16 aa, Homo sapiens
  CDR3 for alpha chain variable domain of TCR clone 49841 (TRAV30, TRAJ24)
CGTEIVDADSWGKFQF

SEQ ID NO: 99682 - protein, 14 aa, Homo sapiens
  CDR3 for beta chain variable domain of TCR clone 49841 (TRBV12-5, TRBJ2-5)
CASGSRTHQEAKYF

SEQ ID NO: 99683 - protein, 10 aa, Homo sapiens
  CDR3 for alpha chain variable domain of TCR clone 49842 (TRAV8-4, TRAJ43)
CAVNADDMRF

SEQ ID NO: 99684 - protein, 15 aa, Homo sapiens
  CDR3 for beta chain variable domain of TCR clone 49842 (TRBV5-1, TRBJ2-3)
CASSVTSGSTDTQYF

SEQ ID NO: 99685 - protein, 13 aa, Homo sapiens
  CDR3 for alpha chain variable domain of TCR clone 49843 (TRAV12-3, TRAJ7)
CAVTPYGNNRLAF

SEQ ID NO: 99686 - protein, 13 aa, Homo sapiens
  CDR3 for beta chain variable domain of TCR clone 49843 (TRBV10-3, TRBJ1-2)
CAINADLNYGYTF

SEQ ID NO: 99687 - protein, 12 aa, Homo sapiens
  CDR3 for alpha chain variable domain of TCR clone 49844 (TRAV13-1, TRAJ15)
CAASQAGTALIF

SEQ ID NO: 99688 - protein, 20 aa, Homo sapiens
  CDR3 for beta chain variable domain of TCR clone 49844 (TRBV7-8, TRBJ2-2)
CASSHLFPGPTIHITGELFF

SEQ ID NO: 99689 - protein, 14 aa, Homo sapiens
  CDR3 for alpha chain variable domain of TCR clone 49845 (TRAV36/DV7, TRAJ13)
WGSGENGGYQKVTF

SEQ ID NO: 99690 - protein, 15 aa, Homo sapiens
  CDR3 for beta chain variable domain of TCR clone 49845 (TRBV19, TRBJ2-1)
CASSTRTSSYNEQFF

SEQ ID NO: 99691 - protein, 15 aa, Homo sapiens
  CDR3 for alpha chain variable domain of TCR clone 49846 (TRAV17, TRAJ56)
CAADANTGANSKLTF

SEQ ID NO: 99692 - protein, 14 aa, Homo sapiens
  CDR3 for beta chain variable domain of TCR clone 49846 (TRBV19, TRBJ1-5)
CASSLGTGGQPQHF

SEQ ID NO: 99693 - protein, 12 aa, Homo sapiens
  CDR3 for alpha chain variable domain of TCR clone 49847 (TRAV1-2, TRAJ33)
CAALDSNYQLIW

SEQ ID NO: 99694 - protein, 13 aa, Homo sapiens
  CDR3 for beta chain variable domain of TCR clone 49847 (TRBV27, TRBJ1-6)
CASSLVLVSPLHF

SEQ ID NO: 99695 - protein, 10 aa, Homo sapiens
  CDR3 for alpha chain variable domain of TCR clone 49848 (TRAV23/DV6, TRAJ57)
CAASSTLSQG

SEQ ID NO: 99696 - protein, 14 aa, Homo sapiens
  CDR3 for beta chain variable domain of TCR clone 49848 (TRBV25-1, TRBJ1-1)
CASTHLEGNTEAFF

SEQ ID NO: 99697 - protein, 15 aa, Homo sapiens
  CDR3 for alpha chain variable domain of TCR clone 49849 (TRAV1-1, TRAJ20)
CAVRDNVANDYKLSF

SEQ ID NO: 99698 - protein, 13 aa, Homo sapiens
  CDR3 for beta chain variable domain of TCR clone 49849 (TRBV4-1, TRBJ2-2)
CASSQENTGELFL

SEQ ID NO: 99699 - protein, 13 aa, Homo sapiens
  CDR3 for alpha chain variable domain of TCR clone 49850 (TRAV5, TRAJ30)
CAEIANRDDKTIF

SEQ ID NO: 99700 - protein, 14 aa, Homo sapiens
  CDR3 for beta chain variable domain of TCR clone 49850 (TRBV4-1, TRBJ2-2)
CASSQAVNTGELFF

SEQ ID NO: 99701 - protein, 12 aa, Homo sapiens
  CDR3 for alpha chain variable domain of TCR clone 49851 (TRAV12-2, TRAJ10)
WGVTGGGNKLTF

SEQ ID NO: 99702 - protein, 15 aa, Homo sapiens
  CDR3 for beta chain variable domain of TCR clone 49851 (TRBV10-2, TRBJ2-6)
CASSEQGTGADVLTF

SEQ ID NO: 99703 - protein, 11 aa, Homo sapiens
  CDR3 for alpha chain variable domain of TCR clone 49852 (TRAV1-1, TRAJ23)
CAVRQGGKLIF

SEQ ID NO: 99704 - protein, 20 aa, Homo sapiens
  CDR3 for beta chain variable domain of TCR clone 49852 (TRBV7-8, TRBJ2-2)
CASSHLFPGPTIPITGELFF

SEQ ID NO: 99705 - protein, 14 aa, Homo sapiens
  CDR3 for alpha chain variable domain of TCR clone 49853 (TRAV38-1, TRAJ45)
CAYYSGGGADGLTF

SEQ ID NO: 99706 - protein, 20 aa, Homo sapiens
  CDR3 for beta chain variable domain of TCR clone 49853 (TRBV28, TRBJ2-1)
CASTPNGRSPGLAGGNEQFF

SEQ ID NO: 99707 - protein, 12 aa, Homo sapiens
  CDR3 for alpha chain variable domain of TCR clone 49854 (TRAV8-6, TRAJ43)
RAVSHNNNDMRF

SEQ ID NO: 99708 - protein, 14 aa, Homo sapiens
  CDR3 for beta chain variable domain of TCR clone 49854 (TRBV10-3, TRBJ1-1)
CAISDGSGVTGAFF

SEQ ID NO: 99709 - protein, 17 aa, Homo sapiens
  CDR3 for alpha chain variable domain of TCR clone 49855 (TRAV12-2, TRAJ52)
CAVNPYAGGTSYGKLTF

SEQ ID NO: 99710 - protein, 14 aa, Homo sapiens
  CDR3 for beta chain variable domain of TCR clone 49855 (TRBV2, TRBJ2-3)
CASSEGQNTDTQYF

SEQ ID NO: 99711 - protein, 15 aa, Homo sapiens
  CDR3 for alpha chain variable domain of TCR clone 49856 (TRAV21, TRAJ40)
CAVRPQTSGTYKYTF

SEQ ID NO: 99712 - protein, 13 aa, Homo sapiens
  CDR3 for beta chain variable domain of TCR clone 49856 (TRBV7-2, TRBJ2-2)
CASSSVRAGELFF

SEQ ID NO: 99713 - protein, 14 aa, Homo sapiens
  CDR3 for alpha chain variable domain of TCR clone 49857 (TRAV38-1, TRAJ45)
CASHSGGGADGLTF

SEQ ID NO: 99714 - protein, 16 aa, Homo sapiens
  CDR3 for beta chain variable domain of TCR clone 49857 (TRBV27, TRBJ2-2)
CASSFRGLVRTGELSF

SEQ ID NO: 99715 - protein, 13 aa, Homo sapiens
  CDR3 for alpha chain variable domain of TCR clone 49858 (TRAV3, TRAJ21)
CAVREPDFNKFYF

SEQ ID NO: 99716 - protein, 14 aa, Homo sapiens
  CDR3 for beta chain variable domain of TCR clone 49858 (TRBV19, TRBJ2-1)
CASGKSTQYNEQFF

SEQ ID NO: 99717 - protein, 14 aa, Homo sapiens
  CDR3 for alpha chain variable domain of TCR clone 49859 (TRAV13-2, TRAJ6)
CRGGPSGGSYIPTF

SEQ ID NO: 99718 - protein, 13 aa, Homo sapiens
  CDR3 for beta chain variable domain of TCR clone 49859 (TRBV9, TRBJ2-7)
CASSVAEYYEQYF

SEQ ID NO: 99719 - protein, 14 aa, Homo sapiens
  CDR3 for alpha chain variable domain of TCR clone 49860 (TRAV23/DV6, TRAJ37)
CAASTSSNTGKLIF

SEQ ID NO: 99720 - protein, 12 aa, Homo sapiens
  CDR3 for beta chain variable domain of TCR clone 49860 (TRBV24-1, TRBJ1-1)
CATLYPDTEAFF

SEQ ID NO: 99721 - protein, 14 aa, Homo sapiens
  CDR3 for alpha chain variable domain of TCR clone 49861 (TRAV3, TRAJ27)
CAVRDDTNAGKSTL

SEQ ID NO: 99722 - protein, 15 aa, Homo sapiens
  CDR3 for beta chain variable domain of TCR clone 49861 (TRBV7-7, TRBJ2-2)
CATSKLAKNTGELFF

SEQ ID NO: 99723 - protein, 12 aa, Homo sapiens
  CDR3 for alpha chain variable domain of TCR clone 49862 (TRAV8-3, TRAJ20)
RAVDFNDYKLSF

SEQ ID NO: 99724 - protein, 12 aa, Homo sapiens
  CDR3 for beta chain variable domain of TCR clone 49862 (TRBV29-1, TRBJ2-3)
CSVTGGADTQYF

SEQ ID NO: 99725 - protein, 13 aa, Homo sapiens
  CDR3 for alpha chain variable domain of TCR clone 49863 (TRAV12-3, TRAJ13)
CAMTSGGYQEVTF

SEQ ID NO: 99726 - protein, 13 aa, Homo sapiens
  CDR3 for beta chain variable domain of TCR clone 49863 (TRBV20-1, TRBJ2-2)
CSALSGGAGELFF

SEQ ID NO: 99727 - protein, 14 aa, Homo sapiens
  CDR3 for alpha chain variable domain of TCR clone 49864 (TRAV8-3, TRAJ4)
CAVGAAGGYNKLIF

SEQ ID NO: 99728 - protein, 14 aa, Homo sapiens
  CDR3 for beta chain variable domain of TCR clone 49864 (TRBV4-1, TRBJ1-5)
CASSQGPTNQPQHF

SEQ ID NO: 99729 - protein, 18 aa, Homo sapiens
  CDR3 for alpha chain variable domain of TCR clone 49865 (TRAV17, TRAJ45)
CATSLDLYSGGGADGLTF

SEQ ID NO: 99730 - protein, 14 aa, Homo sapiens
  CDR3 for beta chain variable domain of TCR clone 49865 (TRBV11-2, TRBJ2-3)
CASSRLARTDTQYF

SEQ ID NO: 99731 - protein, 10 aa, Homo sapiens
  CDR3 for alpha chain variable domain of TCR clone 49866 (TRAV16, TRAJ22)
SAMYLRQLTF

SEQ ID NO: 99732 - protein, 15 aa, Homo sapiens
  CDR3 for beta chain variable domain of TCR clone 49866 (TRBV7-9, TRBJ1-6)
CASSSPGRGNSPFHF

SEQ ID NO: 99733 - protein, 12 aa, Homo sapiens
  CDR3 for alpha chain variable domain of TCR clone 49867 (TRAV21, TRAJ49)
CDVTNTGNQFYF

SEQ ID NO: 99734 - protein, 17 aa, Homo sapiens
  CDR3 for beta chain variable domain of TCR clone 49867 (TRBV13, TRBJ2-3)
CASSLSRVAGGRNTQYF

SEQ ID NO: 99735 - protein, 15 aa, Homo sapiens
  CDR3 for alpha chain variable domain of TCR clone 49868 (TRAV8-1, TRAJ6)
CAVNTPPGGSYIPPF

SEQ ID NO: 99736 - protein, 14 aa, Homo sapiens
  CDR3 for beta chain variable domain of TCR clone 49868 (TRBV12-4, TRBJ2-1)
CASSLGQGASEQFF

SEQ ID NO: 99737 - protein, 14 aa, Homo sapiens
  CDR3 for alpha chain variable domain of TCR clone 49869 (TRAV1-2, TRAJ16)
CAVNRFSDGQKLLF

SEQ ID NO: 99738 - protein, 14 aa, Homo sapiens
  CDR3 for beta chain variable domain of TCR clone 49869 (TRBV7-9, TRBJ2-3)
CASSLEGGTDTQYF

SEQ ID NO: 99739 - protein, 17 aa, Homo sapiens
  CDR3 for alpha chain variable domain of TCR clone 49870 (TRAV12-2, TRAJ48)
CASNEKLTFGTGARLTI

SEQ ID NO: 99740 - protein, 16 aa, Homo sapiens
  CDR3 for beta chain variable domain of TCR clone 49870 (TRBV7-3, TRBJ2-2)
CASSLKRGTLSGELFF

SEQ ID NO: 99741 - protein, 14 aa, Homo sapiens
  CDR3 for alpha chain variable domain of TCR clone 49871 (TRAV2, TRAJ9)
CAVEDRSGGFKTIF

SEQ ID NO: 99742 - protein, 18 aa, Homo sapiens
  CDR3 for beta chain variable domain of TCR clone 49871 (TRBV11-2, TRBJ2-3)
CASSLGGASRGAPNAQYF

SEQ ID NO: 99743 - protein, 13 aa, Homo sapiens
  CDR3 for alpha chain variable domain of TCR clone 49872 (TRAV17, TRAJ9)
CATDYNGGFKTIF

SEQ ID NO: 99744 - protein, 14 aa, Homo sapiens
  CDR3 for beta chain variable domain of TCR clone 49872 (TRBV19, TRBJ2-5)
CASSMTGQQETQYF

SEQ ID NO: 99745 - protein, 15 aa, Homo sapiens
  CDR3 for alpha chain variable domain of TCR clone 49873 (TRAV21, TRAJ40)
CAVRPQTSGTYKYIF

SEQ ID NO: 99746 - protein, 13 aa, Homo sapiens
  CDR3 for beta chain variable domain of TCR clone 49873 (TRBV7-2, TRBJ2-2)
CASSSVRAGELFL

SEQ ID NO: 99747 - protein, 12 aa, Homo sapiens
  CDR3 for alpha chain variable domain of TCR clone 49874 (TRAV21, TRAJ3)
CCFYSSASKIIF

SEQ ID NO: 99748 - protein, 13 aa, Homo sapiens
  CDR3 for beta chain variable domain of TCR clone 49874 (TRBV19, TRBJ1-1)
CASSPSNGGEAFF

SEQ ID NO: 99749 - protein, 13 aa, Homo sapiens
  CDR3 for alpha chain variable domain of TCR clone 49875 (TRAV26-1, TRAJ34)
CIVRPWITDRLIF

SEQ ID NO: 99750 - protein, 14 aa, Homo sapiens
  CDR3 for beta chain variable domain of TCR clone 49875 (TRBV7-2, TRBJ2-7)
CASRSQGAAYEQYF

SEQ ID NO: 99751 - protein, 14 aa, Homo sapiens
  CDR3 for alpha chain variable domain of TCR clone 49876 (TRAV3, TRAJ9)
CAVRDDTGGFKTIF

SEQ ID NO: 99752 - protein, 18 aa, Homo sapiens
  CDR3 for beta chain variable domain of TCR clone 49876 (TRBV20-1, TRBJ2-6)
CSAETTPTHGSGANDLTF

SEQ ID NO: 99753 - protein, 15 aa, Homo sapiens
  CDR3 for alpha chain variable domain of TCR clone 49877 (TRAV8-3, TRAJ45)
CASSYSGGGADGLTF

SEQ ID NO: 99754 - protein, 16 aa, Homo sapiens
  CDR3 for beta chain variable domain of TCR clone 49877 (TRBV7-9, TRBJ1-2)
CASSLGFSSGEDGYTF

SEQ ID NO: 99755 - protein, 13 aa, Homo sapiens
  CDR3 for alpha chain variable domain of TCR clone 49878 (TRAV13-2, TRAJ48)
CAEMDFGNEKLTF

SEQ ID NO: 99756 - protein, 14 aa, Homo sapiens
  CDR3 for beta chain variable domain of TCR clone 49878 (TRBV6-1, TRBJ1-3)
CASVQGGGGNTIYF

SEQ ID NO: 99757 - protein, 13 aa, Homo sapiens
  CDR3 for alpha chain variable domain of TCR clone 49879 (TRAV26-2, TRAJ54)
CIPRVGGAQKLGF

SEQ ID NO: 99758 - protein, 16 aa, Homo sapiens
  CDR3 for beta chain variable domain of TCR clone 49879 (TRBV4-1, TRBJ1-1)
CASSSMSERPNTEAFF

SEQ ID NO: 99759 - protein, 18 aa, Homo sapiens
  CDR3 for alpha chain variable domain of TCR clone 49880 (TRAV13-1, TRAJ52)
CAAKNPNAGGTSYGKLIF

SEQ ID NO: 99760 - protein, 15 aa, Homo sapiens
  CDR3 for beta chain variable domain of TCR clone 49880 (TRBV6-1, TRBJ2-3)
CASSERGGITDTQYF

SEQ ID NO: 99761 - protein, 13 aa, Homo sapiens
  CDR3 for alpha chain variable domain of TCR clone 49881 (TRAV26-1, TRAJ30)
CIVRVESNDKIIF

SEQ ID NO: 99762 - protein, 16 aa, Homo sapiens
  CDR3 for beta chain variable domain of TCR clone 49881 (TRBV19, TRBJ2-1)
CASSKAGPSSYNEQFF

SEQ ID NO: 99763 - protein, 11 aa, Homo sapiens
  CDR3 for alpha chain variable domain of TCR clone 49882 (TRAV3, TRAJ21)
RAVGNFNEFYF

SEQ ID NO: 99764 - protein, 16 aa, Homo sapiens
  CDR3 for beta chain variable domain of TCR clone 49882 (TRBV19, TRBJ2-1)
CASSKAGPSSYNEQFF

SEQ ID NO: 99765 - protein, 14 aa, Homo sapiens
  CDR3 for alpha chain variable domain of TCR clone 49883 (TRAV1-2, TRAJ16)
CAVNRFSDGQKLPF

SEQ ID NO: 99766 - protein, 15 aa, Homo sapiens
  CDR3 for beta chain variable domain of TCR clone 49883 (TRBV6-6, TRBJ2-7)
CASSYSYGGSYEQYF

SEQ ID NO: 99767 - protein, 13 aa, Homo sapiens
  CDR3 for alpha chain variable domain of TCR clone 49884 (TRAV13-1, TRAJ43)
CAVSKNNNNDMRF

SEQ ID NO: 99768 - protein, 14 aa, Homo sapiens
  CDR3 for beta chain variable domain of TCR clone 49884 (TRBV14, TRBJ2-1)
CASSQVQGRGEQFF

SEQ ID NO: 99769 - protein, 15 aa, Homo sapiens
  CDR3 for alpha chain variable domain of TCR clone 49885 (TRAV2, TRAJ15)
CAVEDREQAGTALIF

SEQ ID NO: 99770 - protein, 13 aa, Homo sapiens
  CDR3 for beta chain variable domain of TCR clone 49885 (TRBV10-2, TRBJ2-3)
CASSESGDHMQYF

SEQ ID NO: 99771 - protein, 15 aa, Homo sapiens
  CDR3 for alpha chain variable domain of TCR clone 49886 (TRAV13-1, TRAJ10)
CAATILTGGGNKLTF

SEQ ID NO: 99772 - protein, 15 aa, Homo sapiens
  CDR3 for beta chain variable domain of TCR clone 49886 (TRBV2, TRBJ2-7)
CTSTLLGSGATEQYF

SEQ ID NO: 99773 - protein, 13 aa, Homo sapiens
  CDR3 for alpha chain variable domain of TCR clone 49887 (TRAV8-1, TRAJ15)
CAVKNQAGTALIF

SEQ ID NO: 99774 - protein, 15 aa, Homo sapiens
  CDR3 for beta chain variable domain of TCR clone 49887 (TRBV7-3, TRBJ2-7)
CASSLTPTGYDEQHF

SEQ ID NO: 99775 - protein, 16 aa, Homo sapiens
  CDR3 for alpha chain variable domain of TCR clone 49888 (TRAV30, TRAJ24)
CGTEIVDADGWGKFQF

SEQ ID NO: 99776 - protein, 15 aa, Homo sapiens
  CDR3 for beta chain variable domain of TCR clone 49888 (TRBV28, TRBJ2-1)
CASSIIAGGRSEQFF

SEQ ID NO: 99777 - protein, 11 aa, Homo sapiens
  CDR3 for alpha chain variable domain of TCR clone 49889 (TRAV2, TRAJ13)
CASGGYQKVTF

SEQ ID NO: 99778 - protein, 15 aa, Homo sapiens
  CDR3 for beta chain variable domain of TCR clone 49889 (TRBV5-1, TRBJ2-3)
CASSVTSGSTDTQYF

SEQ ID NO: 99779 - protein, 15 aa, Homo sapiens
  CDR3 for alpha chain variable domain of TCR clone 49890 (TRAV3, TRAJ17)
CAVSPKEAAGTKLTF

SEQ ID NO: 99780 - protein, 12 aa, Homo sapiens
  CDR3 for beta chain variable domain of TCR clone 49890 (TRBV7-9, TRBJ1-6)
CASSLMTSPLHF

SEQ ID NO: 99781 - protein, 17 aa, Homo sapiens
  CDR3 for alpha chain variable domain of TCR clone 49891 (TRAV26-1, TRAJ22)
CIVRVSFWFCKATDLWI

SEQ ID NO: 99782 - protein, 13 aa, Homo sapiens
  CDR3 for beta chain variable domain of TCR clone 49891 (TRBV7-9, TRBJ1-2)
CASSLKQNYGYTF

SEQ ID NO: 99783 - protein, 17 aa, Homo sapiens
  CDR3 for alpha chain variable domain of TCR clone 49892 (TRAV17, TRAJ52)
CATDRNAGGTSYGKLTS

SEQ ID NO: 99784 - protein, 13 aa, Homo sapiens
  CDR3 for beta chain variable domain of TCR clone 49892 (TRBV4-2, TRBJ1-1)
CASSQAGNTEALF

SEQ ID NO: 99785 - protein, 12 aa, Homo sapiens
  CDR3 for alpha chain variable domain of TCR clone 49893 (TRAV2, TRAJ10)
CASTGGGNKLTF

SEQ ID NO: 99786 - protein, 13 aa, Homo sapiens
  CDR3 for beta chain variable domain of TCR clone 49893 (TRBV7-2, TRBJ2-5)
CQQLVRGGETQYF

SEQ ID NO: 99787 - protein, 14 aa, Homo sapiens
  CDR3 for alpha chain variable domain of TCR clone 49894 (TRAV12-1, TRAJ30)
CVPTGTNGDDKIIF

SEQ ID NO: 99788 - protein, 11 aa, Homo sapiens
  CDR3 for beta chain variable domain of TCR clone 49894 (TRBV4-1, TRBJ2-2)
CASEHTGELFF

SEQ ID NO: 99789 - protein, 16 aa, Homo sapiens
  CDR3 for alpha chain variable domain of TCR clone 49895 (TRAV30, TRAJ24)
CGTEIVDADSWGKFQF

SEQ ID NO: 99790 - protein, 14 aa, Homo sapiens
  CDR3 for beta chain variable domain of TCR clone 49895 (TRBV7-9, TRBJ2-2)
CASSLVQDTGELFF

SEQ ID NO: 99791 - protein, 14 aa, Homo sapiens
  CDR3 for alpha chain variable domain of TCR clone 49896 (TRAV12-3, TRAJ42)
CAMNYGGSQGNLIF

SEQ ID NO: 99792 - protein, 15 aa, Homo sapiens
  CDR3 for beta chain variable domain of TCR clone 49896 (TRBV5-7, TRBJ1-5)
CASSYGKLWGQPQHF

SEQ ID NO: 99793 - protein, 14 aa, Homo sapiens
  CDR3 for alpha chain variable domain of TCR clone 49897 (TRAV16, TRAJ15)
CALSFNQAGTALIF

SEQ ID NO: 99794 - protein, 14 aa, Homo sapiens
  CDR3 for beta chain variable domain of TCR clone 49897 (TRBV19, TRBJ2-1)
CASPTFVLSGEQFF

SEQ ID NO: 99795 - protein, 12 aa, Homo sapiens
  CDR3 for alpha chain variable domain of TCR clone 49898 (TRAV8-3, TRAJ20)
CAVGANDYKLSF

SEQ ID NO: 99796 - protein, 14 aa, Homo sapiens
  CDR3 for beta chain variable domain of TCR clone 49898 (TRBV18, TRBJ2-5)
CASSPGVSQETQYF

SEQ ID NO: 99797 - protein, 13 aa, Homo sapiens
  CDR3 for alpha chain variable domain of TCR clone 49899 (TRAV3, TRAJ20)
CCEAFCNDYKLSF

SEQ ID NO: 99798 - protein, 15 aa, Homo sapiens
  CDR3 for beta chain variable domain of TCR clone 49899 (TRBV19, TRBJ2-6)
CASARRDSGANVLTF

SEQ ID NO: 99799 - protein, 10 aa, Homo sapiens
  CDR3 for alpha chain variable domain of TCR clone 49900 (TRAV23/DV6, TRAJ31)
CARGGARLMF

SEQ ID NO: 99800 - protein, 14 aa, Homo sapiens
  CDR3 for beta chain variable domain of TCR clone 49900 (TRBV7-8, TRBJ1-2)
CASSPGSLSYGYTF

SEQ ID NO: 99801 - protein, 15 aa, Homo sapiens
  CDR3 for alpha chain variable domain of TCR clone 49901 (TRAV8-3, TRAJ45)
CASSYSGGGADGLTF

SEQ ID NO: 99802 - protein, 14 aa, Homo sapiens
  CDR3 for beta chain variable domain of TCR clone 49901 (TRBV28, TRBJ2-5)
CASSLGDRAETQYF

SEQ ID NO: 99803 - protein, 15 aa, Homo sapiens
  CDR3 for alpha chain variable domain of TCR clone 49902 (TRAV17, TRAJ37)
CATDHGSSNIGKLIF

SEQ ID NO: 99804 - protein, 14 aa, Homo sapiens
  CDR3 for beta chain variable domain of TCR clone 49902 (TRBV7-2, TRBJ2-3)
CASSRTSGADTQYF

SEQ ID NO: 99805 - protein, 11 aa, Homo sapiens
  CDR3 for alpha chain variable domain of TCR clone 49903 (TRAV12-2, TRAJ21)
CAVRNFNKFYF

SEQ ID NO: 99806 - protein, 15 aa, Homo sapiens
  CDR3 for beta chain variable domain of TCR clone 49903 (TRBV20-1, TRBJ2-7)
CSARDRVSGMDEQYF

SEQ ID NO: 99807 - protein, 12 aa, Homo sapiens
  CDR3 for alpha chain variable domain of TCR clone 49904 (TRAV26-1, TRAJ36)
CIVRVRADNLFF

SEQ ID NO: 99808 - protein, 13 aa, Homo sapiens
  CDR3 for beta chain variable domain of TCR clone 49904 (TRBV11-2, TRBJ2-5)
YASSRGPSETQYF

SEQ ID NO: 99809 - protein, 13 aa, Homo sapiens
  CDR3 for alpha chain variable domain of TCR clone 49905 (TRAV12-1, TRAJ34)
CVVTGYDTDKLIF

SEQ ID NO: 99810 - protein, 13 aa, Homo sapiens
  CDR3 for beta chain variable domain of TCR clone 49905 (TRBV28, TRBJ2-7)
CASKAGGVYEQYF

SEQ ID NO: 99811 - protein, 14 aa, Homo sapiens
  CDR3 for alpha chain variable domain of TCR clone 49906 (TRAV1-2, TRAJ16)
CAVSRFSDGQKLLF

SEQ ID NO: 99812 - protein, 13 aa, Homo sapiens
  CDR3 for beta chain variable domain of TCR clone 49906 (TRBV11-2, TRBJ2-5)
CASSFSCQETQYF

SEQ ID NO: 99813 - protein, 15 aa, Homo sapiens
  CDR3 for alpha chain variable domain of TCR clone 49907 (TRAV3, TRAJ5)
CAVRDRKTGRRALTL

SEQ ID NO: 99814 - protein, 15 aa, Homo sapiens
  CDR3 for beta chain variable domain of TCR clone 49907 (TRBV7-8, TRBJ2-1)
CASSLADSLYNEQFF

SEQ ID NO: 99815 - protein, 14 aa, Homo sapiens
  CDR3 for alpha chain variable domain of TCR clone 49908 (TRAV35, TRAJ22)
CAGLRPGSARQLTF

SEQ ID NO: 99816 - protein, 13 aa, Homo sapiens
  CDR3 for beta chain variable domain of TCR clone 49908 (TRBV20-1, TRBJ2-7)
CSATHTSGYGQYF

SEQ ID NO: 99817 - protein, 11 aa, Homo sapiens
  CDR3 for alpha chain variable domain of TCR clone 49909 (TRAV3, TRAJ21)
CAVGNFNKFYF

SEQ ID NO: 99818 - protein, 13 aa, Homo sapiens
  CDR3 for beta chain variable domain of TCR clone 49909 (TRBV7-9, TRBJ1-2)
CASSLKQNYGDTF

SEQ ID NO: 99819 - protein, 16 aa, Homo sapiens
  CDR3 for alpha chain variable domain of TCR clone 49910 (TRAV3, TRAJ10)
CAVRDMRAGGGNKLNF

SEQ ID NO: 99820 - protein, 14 aa, Homo sapiens
  CDR3 for beta chain variable domain of TCR clone 49910 (TRBV6-1, TRBJ1-3)
CASVQGGGGNTIYF

SEQ ID NO: 99821 - protein, 14 aa, Homo sapiens
  CDR3 for alpha chain variable domain of TCR clone 49911 (TRAV16, TRAJ39)
CALSKNNAGNMLTF

SEQ ID NO: 99822 - protein, 17 aa, Homo sapiens
  CDR3 for beta chain variable domain of TCR clone 49911 (TRBV13, TRBJ2-3)
CASSLSRVAGGRNTQYF

SEQ ID NO: 99823 - protein, 14 aa, Homo sapiens
  CDR3 for alpha chain variable domain of TCR clone 49912 (TRAV14/DV4, TRAJ15)
CAMRRDQAGTALIF

SEQ ID NO: 99824 - protein, 15 aa, Homo sapiens
  CDR3 for beta chain variable domain of TCR clone 49912 (TRBV6-6, TRBJ2-7)
CASSYSYGGSYEQYF

SEQ ID NO: 99825 - protein, 14 aa, Homo sapiens
  CDR3 for alpha chain variable domain of TCR clone 49913 (TRAV8-1, TRAJ24)
CAVNAADSWGKLQF

SEQ ID NO: 99826 - protein, 16 aa, Homo sapiens
  CDR3 for beta chain variable domain of TCR clone 49913 (TRBV4-3, TRBJ2-1)
RASSPALDRGVNEQFF

SEQ ID NO: 99827 - protein, 15 aa, Homo sapiens
  CDR3 for alpha chain variable domain of TCR clone 49914 (TRAV13-1, TRAJ45)
CAASGSGGGADGLTF

SEQ ID NO: 99828 - protein, 14 aa, Homo sapiens
  CDR3 for beta chain variable domain of TCR clone 49914 (TRBV12-4, TRBJ1-2)
CASSFVGTAYGYAF

SEQ ID NO: 99829 - protein, 14 aa, Homo sapiens
  CDR3 for alpha chain variable domain of TCR clone 49915 (TRAV3, TRAJ37)
CAVKESGNTGKLIF

SEQ ID NO: 99830 - protein, 17 aa, Homo sapiens
  CDR3 for beta chain variable domain of TCR clone 49915 (TRBV11-2, TRBJ2-1)
CASSLYPPGVEYNEQFF

SEQ ID NO: 99831 - protein, 12 aa, Homo sapiens
  CDR3 for alpha chain variable domain of TCR clone 49916 (TRAV12-2, TRAJ42)
CAVGGSQGDLIF

SEQ ID NO: 99832 - protein, 15 aa, Homo sapiens
  CDR3 for beta chain variable domain of TCR clone 49916 (TRBV9, TRBJ1-6)
CASSVAGTGDSPLHF

SEQ ID NO: 99833 - protein, 13 aa, Homo sapiens
  CDR3 for alpha chain variable domain of TCR clone 49917 (TRAV12-3, TRAJ13)
CAMSSGGYKKVTF

SEQ ID NO: 99834 - protein, 13 aa, Homo sapiens
  CDR3 for beta chain variable domain of TCR clone 49917 (TRBV20-1, TRBJ1-1)
CSAPPGGHTEAFF

SEQ ID NO: 99835 - protein, 17 aa, Homo sapiens
  CDR3 for alpha chain variable domain of TCR clone 49918 (TRAV3, TRAJ42)
CAVRDRDYGGSQGNFIF

SEQ ID NO: 99836 - protein, 15 aa, Homo sapiens
  CDR3 for beta chain variable domain of TCR clone 49918 (TRBV6-6, TRBJ2-7)
CASSYSYGGSYEQYF

SEQ ID NO: 99837 - protein, 14 aa, Homo sapiens
  CDR3 for alpha chain variable domain of TCR clone 49919 (TRAV1-2, TRAJ8)
CAVRGDTGFQKLVF

SEQ ID NO: 99838 - protein, 15 aa, Homo sapiens
  CDR3 for beta chain variable domain of TCR clone 49919 (TRBV28, TRBJ2-6)
CASSLAGSGANVLTF

SEQ ID NO: 99839 - protein, 13 aa, Homo sapiens
  CDR3 for alpha chain variable domain of TCR clone 49920 (TRAV8-3, TRAJ48)
CSVVPFGNEKLTF

SEQ ID NO: 99840 - protein, 15 aa, Homo sapiens
  CDR3 for beta chain variable domain of TCR clone 49920 (TRBV11-2, TRBJ2-1)
CASSSPSTRYNEQFF

SEQ ID NO: 99841 - protein, 15 aa, Homo sapiens
  CDR3 for alpha chain variable domain of TCR clone 49921 (TRAV25, TRAJ52)
CAGTSGGTSYGKLTF

SEQ ID NO: 99842 - protein, 16 aa, Homo sapiens
  CDR3 for beta chain variable domain of TCR clone 49921 (TRBV15, TRBJ1-2)
CAASRGPRTGGGGYTF

SEQ ID NO: 99843 - protein, 13 aa, Homo sapiens
  CDR3 for alpha chain variable domain of TCR clone 49922 (TRAV13-1, TRAJ39)
CSKYSNAGNMLTF

SEQ ID NO: 99844 - protein, 16 aa, Homo sapiens
  CDR3 for beta chain variable domain of TCR clone 49922 (TRBV20-1, TRBJ1-4)
CSAPGQGLLTNEELFF

SEQ ID NO: 99845 - protein, 17 aa, Homo sapiens
  CDR3 for alpha chain variable domain of TCR clone 49923 (TRAV13-1, TRAJ52)
CAASSGAGGTSYGKLTF

SEQ ID NO: 99846 - protein, 18 aa, Homo sapiens
  CDR3 for beta chain variable domain of TCR clone 49923 (TRBV24-1, TRBJ2-1)
CATSDLMFLGRGVHEQFF

SEQ ID NO: 99847 - protein, 16 aa, Homo sapiens
  CDR3 for alpha chain variable domain of TCR clone 49924 (TRAV38-1, TRAJ37)
CAFKGDGSSKTGKLIF

SEQ ID NO: 99848 - protein, 13 aa, Homo sapiens
  CDR3 for beta chain variable domain of TCR clone 49924 (TRBV12-4, TRBJ2-5)
CASSLFRRETQYF

SEQ ID NO: 99849 - protein, 13 aa, Homo sapiens
  CDR3 for alpha chain variable domain of TCR clone 49925 (TRAV21, TRAJ27)
CAARTGNAGKSTF

SEQ ID NO: 99850 - protein, 13 aa, Homo sapiens
  CDR3 for beta chain variable domain of TCR clone 49925 (TRBV13, TRBJ2-1)
CASILGGRGEQFF

SEQ ID NO: 99851 - protein, 14 aa, Homo sapiens
  CDR3 for alpha chain variable domain of TCR clone 49926 (TRAV12-3, TRAJ43)
CAMSLGGAGTRLTV

SEQ ID NO: 99852 - protein, 13 aa, Homo sapiens
  CDR3 for beta chain variable domain of TCR clone 49926 (TRBV7-9, TRBJ1-2)
CASSLRQNYGYTF

SEQ ID NO: 99853 - protein, 13 aa, Homo sapiens
  CDR3 for alpha chain variable domain of TCR clone 49927 (TRAV20, TRAJ37)
CAGCSSNTGKLIF

SEQ ID NO: 99854 - protein, 11 aa, Homo sapiens
  CDR3 for beta chain variable domain of TCR clone 49927 (TRBV12-4, TRBJ2-3)
CATTATDTQYF

SEQ ID NO: 99855 - protein, 14 aa, Homo sapiens
  CDR3 for alpha chain variable domain of TCR clone 49928 (TRAV1-2, TRAJ16)
CAVNRFSDGHKLLF

SEQ ID NO: 99856 - protein, 14 aa, Homo sapiens
  CDR3 for beta chain variable domain of TCR clone 49928 (TRBV7-3, TRBJ2-1)
CASSLAGGTNEQFF

SEQ ID NO: 99857 - protein, 14 aa, Homo sapiens
  CDR3 for alpha chain variable domain of TCR clone 49929 (TRAV3, TRAJ7)
CAVREKEREQQTRF

SEQ ID NO: 99858 - protein, 12 aa, Homo sapiens
  CDR3 for beta chain variable domain of TCR clone 49929 (TRBV6-3, TRBJ2-7)
CASSLTPYEQYF

SEQ ID NO: 99859 - protein, 13 aa, Homo sapiens
  CDR3 for alpha chain variable domain of TCR clone 49930 (TRAV8-6, TRAJ49)
CAVITNTGNQFYF

SEQ ID NO: 99860 - protein, 17 aa, Homo sapiens
  CDR3 for beta chain variable domain of TCR clone 49930 (TRBV13, TRBJ2-3)
CASSSLGTSGLTDTQYF

SEQ ID NO: 99861 - protein, 12 aa, Homo sapiens
  CDR3 for alpha chain variable domain of TCR clone 49931 (TRAV12-3, TRAJ17)
CEMTLTGNKLTF

SEQ ID NO: 99862 - protein, 15 aa, Homo sapiens
  CDR3 for beta chain variable domain of TCR clone 49931 (TRBV20-1, TRBJ2-7)
CSAGDRVSGMDEQYF

SEQ ID NO: 99863 - protein, 14 aa, Homo sapiens
  CDR3 for alpha chain variable domain of TCR clone 49932 (TRAV1-2, TRAJ16)
CAVNRFSDGQKLLF

SEQ ID NO: 99864 - protein, 16 aa, Homo sapiens
  CDR3 for beta chain variable domain of TCR clone 49932 (TRBV5-1, TRBJ2-1)
CASSLDLGGPEGSSSS

SEQ ID NO: 99865 - protein, 14 aa, Homo sapiens
  CDR3 for alpha chain variable domain of TCR clone 49933 (TRAV38-1, TRAJ40)
CALRPTSGTYKYIF

SEQ ID NO: 99866 - protein, 15 aa, Homo sapiens
  CDR3 for beta chain variable domain of TCR clone 49933 (TRBV5-1, TRBJ2-3)
CASSVTSGSTDTQYF

SEQ ID NO: 99867 - protein, 13 aa, Homo sapiens
  CDR3 for alpha chain variable domain of TCR clone 49934 (TRAV13-1, TRAJ17)
CAVNKAAGNKLTF

SEQ ID NO: 99868 - protein, 14 aa, Homo sapiens
  CDR3 for beta chain variable domain of TCR clone 49934 (TRBV10-3, TRBJ2-5)
CATKGGNNQETQYF

SEQ ID NO: 99869 - protein, 14 aa, Homo sapiens
  CDR3 for alpha chain variable domain of TCR clone 49935 (TRAV21, TRAJ35)
CAVMPIGFGNLLHC

SEQ ID NO: 99870 - protein, 12 aa, Homo sapiens
  CDR3 for beta chain variable domain of TCR clone 49935 (TRBV7-9, TRBJ2-7)
CASSIKRKEQYF

SEQ ID NO: 99871 - protein, 11 aa, Homo sapiens
  CDR3 for alpha chain variable domain of TCR clone 49936 (TRAV12-3, TRAJ27)
CAMANAGKSTF

SEQ ID NO: 99872 - protein, 13 aa, Homo sapiens
  CDR3 for beta chain variable domain of TCR clone 49936 (TRBV20-1, TRBJ1-1)
CSARVGVNTEAFF

SEQ ID NO: 99873 - protein, 14 aa, Homo sapiens
  CDR3 for alpha chain variable domain of TCR clone 49937 (TRAV13-1, TRAJ44)
CAAKATGTASKLTF

SEQ ID NO: 99874 - protein, 16 aa, Homo sapiens
  CDR3 for beta chain variable domain of TCR clone 49937 (TRBV7-9, TRBJ2-6)
CASSLKGPLRANVLTF

SEQ ID NO: 99875 - protein, 14 aa, Homo sapiens
  CDR3 for alpha chain variable domain of TCR clone 49938 (TRAV16, TRAJ33)
CALSAMDSNYQLIW

SEQ ID NO: 99876 - protein, 15 aa, Homo sapiens
  CDR3 for beta chain variable domain of TCR clone 49938 (TRBV11-3, TRBJ2-3)
CASLKDGREGDTQYF

SEQ ID NO: 99877 - protein, 12 aa, Homo sapiens
  CDR3 for alpha chain variable domain of TCR clone 49939 (TRAV21, TRAJ8)
CAVNTGFQKLVF

SEQ ID NO: 99878 - protein, 13 aa, Homo sapiens
  CDR3 for beta chain variable domain of TCR clone 49939 (TRBV6-3, TRBJ2-1)
CASSYGNYNEQFF

SEQ ID NO: 99879 - protein, 13 aa, Homo sapiens
  CDR3 for alpha chain variable domain of TCR clone 49940 (TRAV16, TRAJ22)
SAMLAGSARQLTF

SEQ ID NO: 99880 - protein, 18 aa, Homo sapiens
  CDR3 for beta chain variable domain of TCR clone 49940 (TRBV7-2, TRBJ2-3)
CASSLETGRGRKADTQYF

SEQ ID NO: 99881 - protein, 13 aa, Homo sapiens
  CDR3 for alpha chain variable domain of TCR clone 49941 (TRAV30, TRAJ34)
CGTVGYNTDRLIF

SEQ ID NO: 99882 - protein, 16 aa, Homo sapiens
  CDR3 for beta chain variable domain of TCR clone 49941 (TRBV7-9, TRBJ1-2)
CASSLGFSSGEDGYTF

SEQ ID NO: 99883 - protein, 14 aa, Homo sapiens
  CDR3 for alpha chain variable domain of TCR clone 49942 (TRAV12-2, TRAJ13)
CAVKKTGGYQRVTF

SEQ ID NO: 99884 - protein, 12 aa, Homo sapiens
  CDR3 for beta chain variable domain of TCR clone 49942 (TRBV3-1, TRBJ2-1)
CASSQGSSGQFF

SEQ ID NO: 99885 - protein, 11 aa, Homo sapiens
  CDR3 for alpha chain variable domain of TCR clone 49943 (TRAV1-2, TRAJ20)
CAVSNNYKLSF

SEQ ID NO: 99886 - protein, 16 aa, Homo sapiens
  CDR3 for beta chain variable domain of TCR clone 49943 (TRBV10-3, TRBJ2-1)
CAISGVGDGGGGEQFF

SEQ ID NO: 99887 - protein, 13 aa, Homo sapiens
  CDR3 for alpha chain variable domain of TCR clone 49944 (TRAV27, TRAJ53)
CAGQGGSNYKLTF

SEQ ID NO: 99888 - protein, 13 aa, Homo sapiens
  CDR3 for beta chain variable domain of TCR clone 49944 (TRBV29-1, TRBJ1-1)
CSVESGFGTEASF

SEQ ID NO: 99889 - protein, 14 aa, Homo sapiens
  CDR3 for alpha chain variable domain of TCR clone 49945 (TRAV13-2, TRAJ11)
CAETGNSGYSTLTF

SEQ ID NO: 99890 - protein, 13 aa, Homo sapiens
  CDR3 for beta chain variable domain of TCR clone 49945 (TRBV13, TRBJ1-1)
CASSSGGGTEAFF

SEQ ID NO: 99891 - protein, 14 aa, Homo sapiens
  CDR3 for alpha chain variable domain of TCR clone 49946 (TRAV38-1, TRAJ43)
CASMKHNNNNDMRF

SEQ ID NO: 99892 - protein, 14 aa, Homo sapiens
  CDR3 for beta chain variable domain of TCR clone 49946 (TRBV5-4, TRBJ1-1)
CASSLDSRRDEAFF

SEQ ID NO: 99893 - protein, 13 aa, Homo sapiens
  CDR3 for alpha chain variable domain of TCR clone 49947 (TRAV23/DV6, TRAJ27)
CAASKPMQANQPL

SEQ ID NO: 99894 - protein, 14 aa, Homo sapiens
  CDR3 for beta chain variable domain of TCR clone 49947 (TRBV7-2, TRBJ2-7)
CASRSQGAAYEQYF

SEQ ID NO: 99895 - protein, 10 aa, Homo sapiens
  CDR3 for alpha chain variable domain of TCR clone 49948 (TRAV26-1, TRAJ40)
CIAGTYKYTF

SEQ ID NO: 99896 - protein, 15 aa, Homo sapiens
  CDR3 for beta chain variable domain of TCR clone 49948 (TRBV19, TRBJ2-1)
FASSSPGVPLDEQFF

SEQ ID NO: 99897 - protein, 11 aa, Homo sapiens
  CDR3 for alpha chain variable domain of TCR clone 49949 (TRAV1-2, TRAJ40)
CAVPGTYKYIF

SEQ ID NO: 99898 - protein, 13 aa, Homo sapiens
  CDR3 for beta chain variable domain of TCR clone 49949 (TRBV15, TRBJ1-6)
CATSGGLNSPLHF

SEQ ID NO: 99899 - protein, 18 aa, Homo sapiens
  CDR3 for alpha chain variable domain of TCR clone 49950 (TRAV35, TRAJ28)
CAGHNYPLSGAGSYQLTF

SEQ ID NO: 99900 - protein, 12 aa, Homo sapiens
  CDR3 for beta chain variable domain of TCR clone 49950 (TRBV7-9, TRBJ1-1)
CASGLEGTEAFF

SEQ ID NO: 99901 - protein, 16 aa, Homo sapiens
  CDR3 for alpha chain variable domain of TCR clone 49951 (TRAV16, TRAJ4)
CALSRMFSGGYNKLIF

SEQ ID NO: 99902 - protein, 16 aa, Homo sapiens
  CDR3 for beta chain variable domain of TCR clone 49951 (TRBV12-4, TRBJ1-5)
CASSRPVGGSNKPQHF

SEQ ID NO: 99903 - protein, 16 aa, Homo sapiens
  CDR3 for alpha chain variable domain of TCR clone 49952 (TRAV30, TRAJ24)
CGTEIVDADSWGKFPF

SEQ ID NO: 99904 - protein, 12 aa, Homo sapiens
  CDR3 for beta chain variable domain of TCR clone 49952 (TRBV11-2, TRBJ2-1)
CASSPGNNEQFF

SEQ ID NO: 99905 - protein, 17 aa, Homo sapiens
  CDR3 for alpha chain variable domain of TCR clone 49953 (TRAV13-1, TRAJ52)
CAASSGAGCTSYGKLTF

SEQ ID NO: 99906 - protein, 15 aa, Homo sapiens
  CDR3 for beta chain variable domain of TCR clone 49953 (TRBV28, TRBJ2-4)
CAAGSGTLLMGIQYF

SEQ ID NO: 99907 - protein, 16 aa, Homo sapiens
  CDR3 for alpha chain variable domain of TCR clone 49954 (TRAV30, TRAJ24)
CGTEIVDADSWGKFKF

SEQ ID NO: 99908 - protein, 16 aa, Homo sapiens
  CDR3 for beta chain variable domain of TCR clone 49954 (TRBV12-5, TRBJ2-5)
CASGPRTSGNQETQYF

SEQ ID NO: 99909 - protein, 16 aa, Homo sapiens
  CDR3 for alpha chain variable domain of TCR clone 49955 (TRAV1-2, TRAJ10)
CAVRGVLTGGGNKLTF

SEQ ID NO: 99910 - protein, 14 aa, Homo sapiens
  CDR3 for beta chain variable domain of TCR clone 49955 (TRBV28, TRBJ1-1)
CASSSEQGYTEAFF

SEQ ID NO: 99911 - protein, 13 aa, Homo sapiens
  CDR3 for alpha chain variable domain of TCR clone 49956 (TRAV12-1, TRAJ33)
CGDAPDSNYQLIW

SEQ ID NO: 99912 - protein, 12 aa, Homo sapiens
  CDR3 for beta chain variable domain of TCR clone 49956 (TRBV11-2, TRBJ2-2)
RASSLGGGELFF

SEQ ID NO: 99913 - protein, 13 aa, Homo sapiens
  CDR3 for alpha chain variable domain of TCR clone 49957 (TRAV3, TRAJ20)
CAVRDTPRYKLSF

SEQ ID NO: 99914 - protein, 16 aa, Homo sapiens
  CDR3 for beta chain variable domain of TCR clone 49957 (TRBV20-1, TRBJ2-7)
CSARAPGRALSYEQYF

SEQ ID NO: 99915 - protein, 14 aa, Homo sapiens
  CDR3 for alpha chain variable domain of TCR clone 49958 (TRAV17, TRAJ22)
CATVISGSARQLTF

SEQ ID NO: 99916 - protein, 14 aa, Homo sapiens
  CDR3 for beta chain variable domain of TCR clone 49958 (TRBV12-4, TRBJ2-5)
CASSFGDRGETQYF

SEQ ID NO: 99917 - protein, 14 aa, Homo sapiens
  CDR3 for alpha chain variable domain of TCR clone 49959 (TRAV25, TRAJ22)
CAVRPSGSARQLTF

SEQ ID NO: 99918 - protein, 16 aa, Homo sapiens
  CDR3 for beta chain variable domain of TCR clone 49959 (TRBV4-2, TRBJ1-1)
CASSPSPGRAAPEAFF

SEQ ID NO: 99919 - protein, 14 aa, Homo sapiens
  CDR3 for alpha chain variable domain of TCR clone 49960 (TRAV21, TRAJ39)
CAVRVNNAGNMLTF

SEQ ID NO: 99920 - protein, 15 aa, Homo sapiens
  CDR3 for beta chain variable domain of TCR clone 49960 (TRBV3-1, TRBJ1-3)
CASSHVGTDRNTIYF

SEQ ID NO: 99921 - protein, 16 aa, Homo sapiens
  CDR3 for alpha chain variable domain of TCR clone 49961 (TRAV26-1, TRAJ45)
CIVEKYSGGGADGLTF

SEQ ID NO: 99922 - protein, 16 aa, Homo sapiens
  CDR3 for beta chain variable domain of TCR clone 49961 (TRBV19, TRBJ2-1)
CASSKAGPSSYNEQFF

SEQ ID NO: 99923 - protein, 15 aa, Homo sapiens
  CDR3 for alpha chain variable domain of TCR clone 49962 (TRAV17, TRAJ56)
CATEPFTGANSKLTF

SEQ ID NO: 99924 - protein, 15 aa, Homo sapiens
  CDR3 for beta chain variable domain of TCR clone 49962 (TRBV28, TRBJ1-5)
YASSRTGGYVQPQHF

SEQ ID NO: 99925 - protein, 10 aa, Homo sapiens
  CDR3 for alpha chain variable domain of TCR clone 49963 (TRAV5, TRAJ34)
CAEDTDKLIF

SEQ ID NO: 99926 - protein, 13 aa, Homo sapiens
  CDR3 for beta chain variable domain of TCR clone 49963 (TRBV19, TRBJ1-5)
CASSEGSNQPQHF

SEQ ID NO: 99927 - protein, 12 aa, Homo sapiens
  CDR3 for alpha chain variable domain of TCR clone 49964 (TRAV12-1, TRAJ34)
CVVAGATDKLIF

SEQ ID NO: 99928 - protein, 16 aa, Homo sapiens
  CDR3 for beta chain variable domain of TCR clone 49964 (TRBV7-2, TRBJ1-2)
CASSSNQDRRGHGYAF

SEQ ID NO: 99929 - protein, 14 aa, Homo sapiens
  CDR3 for alpha chain variable domain of TCR clone 49965 (TRAV2, TRAJ9)
CAVDPNTGGLKTIF

SEQ ID NO: 99930 - protein, 13 aa, Homo sapiens
  CDR3 for beta chain variable domain of TCR clone 49965 (TRBV20-1, TRBJ2-1)
CSASTGTSNEQFF

SEQ ID NO: 99931 - protein, 15 aa, Homo sapiens
  CDR3 for alpha chain variable domain of TCR clone 49966 (TRAV8-3, TRAJ45)
CASLYSGGGADGLTF

SEQ ID NO: 99932 - protein, 18 aa, Homo sapiens
  CDR3 for beta chain variable domain of TCR clone 49966 (TRBV18, TRBJ1-3)
CASSPRGGAGPSGNTIYF

SEQ ID NO: 99933 - protein, 14 aa, Homo sapiens
  CDR3 for alpha chain variable domain of TCR clone 49967 (TRAV13-2, TRAJ43)
CAEIPTYNNNDMRF

SEQ ID NO: 99934 - protein, 15 aa, Homo sapiens
  CDR3 for beta chain variable domain of TCR clone 49967 (TRBV7-9, TRBJ2-2)
CASGPLDTFPGERFF

SEQ ID NO: 99935 - protein, 10 aa, Homo sapiens
  CDR3 for alpha chain variable domain of TCR clone 49968 (TRAV26-1, TRAJ22)
CIVSLNFFWF

SEQ ID NO: 99936 - protein, 15 aa, Homo sapiens
  CDR3 for beta chain variable domain of TCR clone 49968 (TRBV28, TRBJ2-1)
CASSLDTSSYNEQFF

SEQ ID NO: 99937 - protein, 16 aa, Homo sapiens
  CDR3 for alpha chain variable domain of TCR clone 49969 (TRAV30, TRAJ24)
CGTEIVDADSWGKFQF

SEQ ID NO: 99938 - protein, 16 aa, Homo sapiens
  CDR3 for beta chain variable domain of TCR clone 49969 (TRBV12-5, TRBJ2-5)
CASGPRTSGKQETQYF

SEQ ID NO: 99939 - protein, 16 aa, Homo sapiens
  CDR3 for alpha chain variable domain of TCR clone 49970 (TRAV30, TRAJ24)
CGTEIVDADSWGKFQF

SEQ ID NO: 99940 - protein, 13 aa, Homo sapiens
  CDR3 for beta chain variable domain of TCR clone 49970 (TRBV7-9, TRBJ1-2)
CASSLKQNYGYAF

SEQ ID NO: 99941 - protein, 11 aa, Homo sapiens
  CDR3 for alpha chain variable domain of TCR clone 49971 (TRAV2, TRAJ13)
CASGGYQKVTF

SEQ ID NO: 99942 - protein, 17 aa, Homo sapiens
  CDR3 for beta chain variable domain of TCR clone 49971 (TRBV20-1, TRBJ2-1)
CSASSSGLAGSYNEQFF

SEQ ID NO: 99943 - protein, 14 aa, Homo sapiens
  CDR3 for alpha chain variable domain of TCR clone 49972 (TRAV12-2, TRAJ13)
CAVKKAGGYQKVTF

SEQ ID NO: 99944 - protein, 13 aa, Homo sapiens
  CDR3 for beta chain variable domain of TCR clone 49972 (TRBV10-3, TRBJ2-7)
CASKLAVNYEQYF

SEQ ID NO: 99945 - protein, 16 aa, Homo sapiens
  CDR3 for alpha chain variable domain of TCR clone 49973 (TRAV3, TRAJ21)
CAVRDIERGNFNKFYF

SEQ ID NO: 99946 - protein, 16 aa, Homo sapiens
  CDR3 for beta chain variable domain of TCR clone 49973 (TRBV12-4, TRBJ1-5)
CASSRPVGGSNQHQHF

SEQ ID NO: 99947 - protein, 15 aa, Homo sapiens
  CDR3 for alpha chain variable domain of TCR clone 49974 (TRAV25, TRAJ52)
CAGTSGGTSYGKLTF

SEQ ID NO: 99948 - protein, 16 aa, Homo sapiens
  CDR3 for beta chain variable domain of TCR clone 49974 (TRBV15, TRBJ1-2)
CATSRGYRTGGGGYTF

SEQ ID NO: 99949 - protein, 13 aa, Homo sapiens
  CDR3 for alpha chain variable domain of TCR clone 49975 (TRAV8-3, TRAJ20)
CAVGRPNDYKLSF

SEQ ID NO: 99950 - protein, 13 aa, Homo sapiens
  CDR3 for beta chain variable domain of TCR clone 49975 (TRBV6-5, TRBJ1-4)
CAGSYLSQEKLFF

SEQ ID NO: 99951 - protein, 17 aa, Homo sapiens
  CDR3 for alpha chain variable domain of TCR clone 49976 (TRAV17, TRAJ13)
CATDAGSGVTRKLPLEL

SEQ ID NO: 99952 - protein, 17 aa, Homo sapiens
  CDR3 for beta chain variable domain of TCR clone 49976 (TRBV11-2, TRBJ2-1)
CASSLYPPGVEYNEQFF

SEQ ID NO: 99953 - protein, 12 aa, Homo sapiens
  CDR3 for alpha chain variable domain of TCR clone 49977 (TRAV24, TRAJ41)
CAPYDSGYALNF

SEQ ID NO: 99954 - protein, 13 aa, Homo sapiens
  CDR3 for beta chain variable domain of TCR clone 49977 (TRBV6-5, TRBJ2-1)
CASSYELSNEQFF

SEQ ID NO: 99955 - protein, 14 aa, Homo sapiens
  CDR3 for alpha chain variable domain of TCR clone 49978 (TRAV1-2, TRAJ8)
CAVREDTGFQKLVF

SEQ ID NO: 99956 - protein, 16 aa, Homo sapiens
  CDR3 for beta chain variable domain of TCR clone 49978 (TRBV4-1, TRBJ1-4)
CASSQDLRRGGEKLFS

SEQ ID NO: 99957 - protein, 18 aa, Homo sapiens
  CDR3 for alpha chain variable domain of TCR clone 49979 (TRAV21, TRAJ52)
CAVRPSPAGGTSYGKLTF

SEQ ID NO: 99958 - protein, 14 aa, Homo sapiens
  CDR3 for beta chain variable domain of TCR clone 49979 (TRBV7-9, TRBJ2-1)
CASSLVVGADEQFF

SEQ ID NO: 99959 - protein, 14 aa, Homo sapiens
  CDR3 for alpha chain variable domain of TCR clone 49980 (TRAV3, TRAJ6)
CAVRDGMGRRKLHN

SEQ ID NO: 99960 - protein, 15 aa, Homo sapiens
  CDR3 for beta chain variable domain of TCR clone 49980 (TRBV9, TRBJ2-1)
CASSLAGSSYNEQFF

SEQ ID NO: 99961 - protein, 13 aa, Homo sapiens
  CDR3 for alpha chain variable domain of TCR clone 49981 (TRAV27, TRAJ45)
CRSPGGGADGLTF

SEQ ID NO: 99962 - protein, 14 aa, Homo sapiens
  CDR3 for beta chain variable domain of TCR clone 49981 (TRBV7-9, TRBJ2-1)
CASSSMVGFGEQFF

SEQ ID NO: 99963 - protein, 14 aa, Homo sapiens
  CDR3 for alpha chain variable domain of TCR clone 49982 (TRAV1-2, TRAJ8)
CAVREDTGFQKLVF

SEQ ID NO: 99964 - protein, 14 aa, Homo sapiens
  CDR3 for beta chain variable domain of TCR clone 49982 (TRBV28, TRBJ2-2)
CASTRRSGDGELFF

SEQ ID NO: 99965 - protein, 12 aa, Homo sapiens
  CDR3 for alpha chain variable domain of TCR clone 49983 (TRAV12-3, TRAJ29)
CAAREGNTPLVF

SEQ ID NO: 99966 - protein, 17 aa, Homo sapiens
  CDR3 for beta chain variable domain of TCR clone 49983 (TRBV18, TRBJ2-1)
CASSPLAAGAGDSEQFF

SEQ ID NO: 99967 - protein, 16 aa, Homo sapiens
  CDR3 for alpha chain variable domain of TCR clone 49984 (TRAV16, TRAJ4)
CALSRMFSGGYNKLIF

SEQ ID NO: 99968 - protein, 16 aa, Homo sapiens
  CDR3 for beta chain variable domain of TCR clone 49984 (TRBV24-1, TRBJ2-3)
CAISDPGTGATDTQYF

SEQ ID NO: 99969 - protein, 16 aa, Homo sapiens
  CDR3 for alpha chain variable domain of TCR clone 49985 (TRAV38-1, TRAJ45)
CAFMKGSGGGADGLTF

SEQ ID NO: 99970 - protein, 15 aa, Homo sapiens
  CDR3 for beta chain variable domain of TCR clone 49985 (TRBV20-1, TRBJ2-7)
CSAREGRDSLYEQYL

SEQ ID NO: 99971 - protein, 13 aa, Homo sapiens
  CDR3 for alpha chain variable domain of TCR clone 49986 (TRAV21, TRAJ57)
CAVTQGGSEKLVF

SEQ ID NO: 99972 - protein, 14 aa, Homo sapiens
  CDR3 for beta chain variable domain of TCR clone 49986 (TRBV12-5, TRBJ2-5)
CASGSRTHQETQYF

SEQ ID NO: 99973 - protein, 15 aa, Homo sapiens
  CDR3 for alpha chain variable domain of TCR clone 49987 (TRAV27, TRAJ38)
CAGRFSAGNNRKLIW

SEQ ID NO: 99974 - protein, 13 aa, Homo sapiens
  CDR3 for beta chain variable domain of TCR clone 49987 (TRBV12-5, TRBJ2-3)
CASQNRGTDTQYF

SEQ ID NO: 99975 - protein, 12 aa, Homo sapiens
  CDR3 for alpha chain variable domain of TCR clone 49988 (TRAV12-2, TRAJ7)
CAVMRGNNRLAF

SEQ ID NO: 99976 - protein, 17 aa, Homo sapiens
  CDR3 for beta chain variable domain of TCR clone 49988 (TRBV7-9, TRBJ2-3)
CDSSPTVAGDLTDTQYF

SEQ ID NO: 99977 - protein, 15 aa, Homo sapiens
  CDR3 for alpha chain variable domain of TCR clone 49989 (TRAV12-2, TRAJ8)
CAVREENTGFQKLVF

SEQ ID NO: 99978 - protein, 16 aa, Homo sapiens
  CDR3 for beta chain variable domain of TCR clone 49989 (TRBV7-3, TRBJ2-2)
CASSLKRGTLSGELFF

SEQ ID NO: 99979 - protein, 14 aa, Homo sapiens
  CDR3 for alpha chain variable domain of TCR clone 49990 (TRAV1-2, TRAJ8)
CAVREDTGFQKLVF

SEQ ID NO: 99980 - protein, 14 aa, Homo sapiens
  CDR3 for beta chain variable domain of TCR clone 49990 (TRBV15, TRBJ2-3)
CATRSGTSTGTQYF

SEQ ID NO: 99981 - protein, 12 aa, Homo sapiens
  CDR3 for alpha chain variable domain of TCR clone 49991 (TRAV13-1, TRAJ20)
CAASRGDYKLSF

SEQ ID NO: 99982 - protein, 12 aa, Homo sapiens
  CDR3 for beta chain variable domain of TCR clone 49991 (TRBV12-4, TRBJ1-2)
CASSFIWLHLRF

SEQ ID NO: 99983 - protein, 14 aa, Homo sapiens
  CDR3 for alpha chain variable domain of TCR clone 49992 (TRAV12-1, TRAJ17)
CVVNYKAAGNKLTF

SEQ ID NO: 99984 - protein, 16 aa, Homo sapiens
  CDR3 for beta chain variable domain of TCR clone 49992 (TRBV5-1, TRBJ1-1)
CASSSGGNSLNTEAFF

SEQ ID NO: 99985 - protein, 16 aa, Homo sapiens
  CDR3 for alpha chain variable domain of TCR clone 49993 (TRAV14/DV4, TRAJ15)
CAMREGPAQAGTALIF

SEQ ID NO: 99986 - protein, 12 aa, Homo sapiens
  CDR3 for beta chain variable domain of TCR clone 49993 (TRBV28, TRBJ2-6)
CAIQAGAHVLTF

SEQ ID NO: 99987 - protein, 14 aa, Homo sapiens
  CDR3 for alpha chain variable domain of TCR clone 49994 (TRAV13-1, TRAJ35)
CAASKGGFGNVLHC

SEQ ID NO: 99988 - protein, 12 aa, Homo sapiens
  CDR3 for beta chain variable domain of TCR clone 49994 (TRBV7-8, TRBJ2-7)
CASSLAGYEQYF

SEQ ID NO: 99989 - protein, 10 aa, Homo sapiens
  CDR3 for alpha chain variable domain of TCR clone 49995 (TRAV12-1, TRAJ37)
ARGNTGKLIF

SEQ ID NO: 99990 - protein, 15 aa, Homo sapiens
  CDR3 for beta chain variable domain of TCR clone 49995 (TRBV7-2, TRBJ2-3)
CASSLEQGGTDKQYF

SEQ ID NO: 99991 - protein, 16 aa, Homo sapiens
  CDR3 for alpha chain variable domain of TCR clone 49996 (TRAV30, TRAJ24)
CGTEIVDADSWGKIQF

SEQ ID NO: 99992 - protein, 14 aa, Homo sapiens
  CDR3 for beta chain variable domain of TCR clone 49996 (TRBV12-5, TRBJ2-5)
CASGSRTHQETQYF

SEQ ID NO: 99993 - protein, 12 aa, Homo sapiens
  CDR3 for alpha chain variable domain of TCR clone 49997 (TRAV17, TRAJ57)
CATDGGSEKLVF

SEQ ID NO: 99994 - protein, 13 aa, Homo sapiens
  CDR3 for beta chain variable domain of TCR clone 49997 (TRBV12-4, TRBJ1-2)
CTSVPAVSYGYTF

SEQ ID NO: 99995 - protein, 14 aa, Homo sapiens
  CDR3 for alpha chain variable domain of TCR clone 49998 (TRAV23/DV6, TRAJ4)
FAANLSGGYNKLIF

SEQ ID NO: 99996 - protein, 17 aa, Homo sapiens
  CDR3 for beta chain variable domain of TCR clone 49998 (TRBV4-1, TRBJ1-3)
CASSPQRGIRFGNTIYF

SEQ ID NO: 99997 - protein, 12 aa, Homo sapiens
  CDR3 for alpha chain variable domain of TCR clone 49999 (TRAV27, TRAJ37)
CADSGNTGKLIF

SEQ ID NO: 99998 - protein, 15 aa, Homo sapiens
  CDR3 for beta chain variable domain of TCR clone 49999 (TRBV27, TRBJ2-1)
CASSNGGGSSNEQFF

SEQ ID NO: 99999 - protein, 13 aa, Homo sapiens
  CDR3 for alpha chain variable domain of TCR clone 50000 (TRAV13-1, TRAJ21)
CAASIYNFNKFYF

SEQ ID NO: 100000 - protein, 15 aa, Homo sapiens
  CDR3 for beta chain variable domain of TCR clone 50000 (TRBV7-2, TRBJ2-1)
CASSSGLAGGNEQFF

SEQ ID NO: 100001 - protein, 13 aa, Homo sapiens
  CDR3 for alpha chain variable domain of TCR clone 50001 (TRAV12-3, TRAJ9)
CAMRNTGGFKTIF

SEQ ID NO: 100002 - protein, 17 aa, Homo sapiens
  CDR3 for beta chain variable domain of TCR clone 50001 (TRBV13, TRBJ2-3)
CASSLSRVAGGRNTQYF

SEQ ID NO: 100003 - protein, 14 aa, Homo sapiens
  CDR3 for alpha chain variable domain of TCR clone 50002 (TRAV12-2, TRAJ17)
CAVLFKAAGNKLTF

SEQ ID NO: 100004 - protein, 13 aa, Homo sapiens
  CDR3 for beta chain variable domain of TCR clone 50002 (TRBV19, TRBJ1-2)
CASRQGQVYGYTF

SEQ ID NO: 100005 - protein, 16 aa, Homo sapiens
  CDR3 for alpha chain variable domain of TCR clone 50003 (TRAV16, TRAJ42)
CARKMNYGGSQGNLIF

SEQ ID NO: 100006 - protein, 15 aa, Homo sapiens
  CDR3 for beta chain variable domain of TCR clone 50003 (TRBV20-1, TRBJ2-7)
CSAREGRDSPYEQYF

SEQ ID NO: 100007 - protein, 14 aa, Homo sapiens
  CDR3 for alpha chain variable domain of TCR clone 50004 (TRAV12-2, TRAJ9)
CAVRGRTGGFKTIF

SEQ ID NO: 100008 - protein, 15 aa, Homo sapiens
  CDR3 for beta chain variable domain of TCR clone 50004 (TRBV7-2, TRBJ2-7)
CASSFTGQGAQEQYF

SEQ ID NO: 100009 - protein, 12 aa, Homo sapiens
  CDR3 for alpha chain variable domain of TCR clone 50005 (TRAV12-1, TRAJ40)
CVVYSGTYKYIF

SEQ ID NO: 100010 - protein, 18 aa, Homo sapiens
  CDR3 for beta chain variable domain of TCR clone 50005 (TRBV11-2, TRBJ2-3)
CASSLGGASRGALNTQYF

SEQ ID NO: 100011 - protein, 16 aa, Homo sapiens
  CDR3 for alpha chain variable domain of TCR clone 50006 (TRAV30, TRAJ24)
CGTEIVDADSWGKFQF

SEQ ID NO: 100012 - protein, 14 aa, Homo sapiens
  CDR3 for beta chain variable domain of TCR clone 50006 (TRBV19, TRBJ2-7)
CASNFRYTFTGMYF

SEQ ID NO: 100013 - protein, 12 aa, Homo sapiens
  CDR3 for alpha chain variable domain of TCR clone 50007 (TRAV12-1, TRAJ40)
CVFYSGTYKYIF

SEQ ID NO: 100014 - protein, 14 aa, Homo sapiens
  CDR3 for beta chain variable domain of TCR clone 50007 (TRBV4-1, TRBJ2-2)
CASSQAVNTGELFF

SEQ ID NO: 100015 - protein, 15 aa, Homo sapiens
  CDR3 for alpha chain variable domain of TCR clone 50008 (TRAV1-2, TRAJ35)
CAVRDPGGFGNVLHC

SEQ ID NO: 100016 - protein, 14 aa, Homo sapiens
  CDR3 for beta chain variable domain of TCR clone 50008 (TRBV5-1, TRBJ2-1)
CASSLGDRFDEQFF

SEQ ID NO: 100017 - protein, 13 aa, Homo sapiens
  CDR3 for alpha chain variable domain of TCR clone 50009 (TRAV12-1, TRAJ26)
SATYPYYGQNFVF

SEQ ID NO: 100018 - protein, 13 aa, Homo sapiens
  CDR3 for beta chain variable domain of TCR clone 50009 (TRBV12-4, TRBJ1-2)
CASSLDSNYGYTF

SEQ ID NO: 100019 - protein, 11 aa, Homo sapiens
  CDR3 for alpha chain variable domain of TCR clone 50010 (TRAV12-1, TRAJ30)
CVVNGQDKIIF

SEQ ID NO: 100020 - protein, 12 aa, Homo sapiens
  CDR3 for beta chain variable domain of TCR clone 50010 (TRBV27, TRBJ2-2)
CDSKLFTGELFF

SEQ ID NO: 100021 - protein, 17 aa, Homo sapiens
  CDR3 for alpha chain variable domain of TCR clone 50011 (TRAV3, TRAJ38)
CAVRDCLNAGNNRKLIW

SEQ ID NO: 100022 - protein, 13 aa, Homo sapiens
  CDR3 for beta chain variable domain of TCR clone 50011 (TRBV23-1, TRBJ1-4)
CASRGKFYEKLFF

SEQ ID NO: 100023 - protein, 18 aa, Homo sapiens
  CDR3 for alpha chain variable domain of TCR clone 50012 (TRAV21, TRAJ53)
CAVKGGENSGGSNYKLTF

SEQ ID NO: 100024 - protein, 13 aa, Homo sapiens
  CDR3 for beta chain variable domain of TCR clone 50012 (TRBV9, TRBJ2-1)
CASSPSGGSERFF

SEQ ID NO: 100025 - protein, 14 aa, Homo sapiens
  CDR3 for alpha chain variable domain of TCR clone 50013 (TRAV8-4, TRAJ38)
CAVSYAGNNRKLIW

SEQ ID NO: 100026 - protein, 17 aa, Homo sapiens
  CDR3 for beta chain variable domain of TCR clone 50013 (TRBV19, TRBJ2-7)
CASSISFYDSYPYEQYF

SEQ ID NO: 100027 - protein, 12 aa, Homo sapiens
  CDR3 for alpha chain variable domain of TCR clone 50014 (TRAV12-1, TRAJ40)
WVFYSGTYKYIF

SEQ ID NO: 100028 - protein, 12 aa, Homo sapiens
  CDR3 for beta chain variable domain of TCR clone 50014 (TRBV7-3, TRBJ2-1)
CASSFINNEQFF

SEQ ID NO: 100029 - protein, 13 aa, Homo sapiens
  CDR3 for alpha chain variable domain of TCR clone 50015 (TRAV12-3, TRAJ54)
CALAPQGAQKLVF

SEQ ID NO: 100030 - protein, 15 aa, Homo sapiens
  CDR3 for beta chain variable domain of TCR clone 50015 (TRBV4-1, TRBJ2-2)
CASSQDSRGTGELFF

SEQ ID NO: 100031 - protein, 16 aa, Homo sapiens
  CDR3 for alpha chain variable domain of TCR clone 50016 (TRAV30, TRAJ24)
CGTEIVDADSWGQFQF

SEQ ID NO: 100032 - protein, 13 aa, Homo sapiens
  CDR3 for beta chain variable domain of TCR clone 50016 (TRBV18, TRBJ1-2)
CASSASATEGYTF

SEQ ID NO: 100033 - protein, 18 aa, Homo sapiens
  CDR3 for alpha chain variable domain of TCR clone 50017 (TRAV13-1, TRAJ52)
CAASKRSAGGTSYGKLTF

SEQ ID NO: 100034 - protein, 15 aa, Homo sapiens
  CDR3 for beta chain variable domain of TCR clone 50017 (TRBV19, TRBJ1-6)
CASSTQGAVGSPLHF

SEQ ID NO: 100035 - protein, 15 aa, Homo sapiens
  CDR3 for alpha chain variable domain of TCR clone 50018 (TRAV12-2, TRAJ53)
CAVNGGGGSNYKLTF

SEQ ID NO: 100036 - protein, 14 aa, Homo sapiens
  CDR3 for beta chain variable domain of TCR clone 50018 (TRBV19, TRBJ2-2)
CASSALHRSGELFF

SEQ ID NO: 100037 - protein, 14 aa, Homo sapiens
  CDR3 for alpha chain variable domain of TCR clone 50019 (TRAV34, TRAJ22)
CGADTSGSARQLTF

SEQ ID NO: 100038 - protein, 17 aa, Homo sapiens
  CDR3 for beta chain variable domain of TCR clone 50019 (TRBV13, TRBJ2-3)
CASSLSRVAGGRNTQYF

SEQ ID NO: 100039 - protein, 18 aa, Homo sapiens
  CDR3 for alpha chain variable domain of TCR clone 50020 (TRAV26-1, TRAJ23)
CIVRVSLEVWNQGGKLIF

SEQ ID NO: 100040 - protein, 14 aa, Homo sapiens
  CDR3 for beta chain variable domain of TCR clone 50020 (TRBV7-6, TRBJ2-3)
CASSLGTVTDTQYF

SEQ ID NO: 100041 - protein, 15 aa, Homo sapiens
  CDR3 for alpha chain variable domain of TCR clone 50021 (TRAV3, TRAJ17)
CAVRDTGAAGNKLTF

SEQ ID NO: 100042 - protein, 14 aa, Homo sapiens
  CDR3 for beta chain variable domain of TCR clone 50021 (TRBV12-5, TRBJ2-5)
CASGSRTHQETQYF

SEQ ID NO: 100043 - protein, 16 aa, Homo sapiens
  CDR3 for alpha chain variable domain of TCR clone 50022 (TRAV13-2, TRAJ32)
CAENMNYGGATNKLIF

SEQ ID NO: 100044 - protein, 14 aa, Homo sapiens
  CDR3 for beta chain variable domain of TCR clone 50022 (TRBV15, TRBJ2-5)
CATSSTGYQETQCF

SEQ ID NO: 100045 - protein, 14 aa, Homo sapiens
  CDR3 for alpha chain variable domain of TCR clone 50023 (TRAV8-3, TRAJ30)
CAVGDMNRDDKIIF

SEQ ID NO: 100046 - protein, 17 aa, Homo sapiens
  CDR3 for beta chain variable domain of TCR clone 50023 (TRBV19, TRBJ2-2)
CASSRSPGGFGTGELFF

SEQ ID NO: 100047 - protein, 11 aa, Homo sapiens
  CDR3 for alpha chain variable domain of TCR clone 50024 (TRAV2, TRAJ13)
CASGGYQKVTI

SEQ ID NO: 100048 - protein, 16 aa, Homo sapiens
  CDR3 for beta chain variable domain of TCR clone 50024 (TRBV6-1, TRBJ2-5)
CASSETLDRGAETQYF

SEQ ID NO: 100049 - protein, 12 aa, Homo sapiens
  CDR3 for alpha chain variable domain of TCR clone 50025 (TRAV27, TRAJ9)
CSGESGGFKTIF

SEQ ID NO: 100050 - protein, 14 aa, Homo sapiens
  CDR3 for beta chain variable domain of TCR clone 50025 (TRBV6-1, TRBJ2-1)
CASAKDGFYNEQFF

SEQ ID NO: 100051 - protein, 17 aa, Homo sapiens
  CDR3 for alpha chain variable domain of TCR clone 50026 (TRAV29/DV5, TRAJ40)
CAASVIYTTPGTYKYIF

SEQ ID NO: 100052 - protein, 13 aa, Homo sapiens
  CDR3 for beta chain variable domain of TCR clone 50026 (TRBV6-1, TRBJ2-1)
CASSHDRNNEQFF

SEQ ID NO: 100053 - protein, 16 aa, Homo sapiens
  CDR3 for alpha chain variable domain of TCR clone 50027 (TRAV3, TRAJ10)
CAVRDMRAGGGNKRTF

SEQ ID NO: 100054 - protein, 19 aa, Homo sapiens
  CDR3 for beta chain variable domain of TCR clone 50027 (TRBV6-3, TRBJ1-2)
CASSYSKGRTGPPNYGYTF

SEQ ID NO: 100055 - protein, 12 aa, Homo sapiens
  CDR3 for alpha chain variable domain of TCR clone 50028 (TRAV13-1, TRAJ21)
CAAKAGFNKFYF

SEQ ID NO: 100056 - protein, 14 aa, Homo sapiens
  CDR3 for beta chain variable domain of TCR clone 50028 (TRBV5-4, TRBJ1-1)
CASSLDSRRDEAFF

SEQ ID NO: 100057 - protein, 13 aa, Homo sapiens
  CDR3 for alpha chain variable domain of TCR clone 50029 (TRAV1-1, TRAJ9)
CAAKNTGGFKTIS

SEQ ID NO: 100058 - protein, 14 aa, Homo sapiens
  CDR3 for beta chain variable domain of TCR clone 50029 (TRBV20-1, TRBJ2-1)
CSAQIGGSANEQFF

SEQ ID NO: 100059 - protein, 14 aa, Homo sapiens
  CDR3 for alpha chain variable domain of TCR clone 50030 (TRAV1-2, TRAJ8)
CAVREDTGFQKLVF

SEQ ID NO: 100060 - protein, 15 aa, Homo sapiens
  CDR3 for beta chain variable domain of TCR clone 50030 (TRBV7-9, TRBJ1-6)
CASSSPGRGNSTLHF

SEQ ID NO: 100061 - protein, 15 aa, Homo sapiens
  CDR3 for alpha chain variable domain of TCR clone 50031 (TRAV12-1, TRAJ44)
CLADLPTGTASKLTF

SEQ ID NO: 100062 - protein, 13 aa, Homo sapiens
  CDR3 for beta chain variable domain of TCR clone 50031 (TRBV6-5, TRBJ2-5)
CASSPQGGETQYF

SEQ ID NO: 100063 - protein, 14 aa, Homo sapiens
  CDR3 for alpha chain variable domain of TCR clone 50032 (TRAV12-2, TRAJ13)
CAVKKTGGYQKVTF

SEQ ID NO: 100064 - protein, 13 aa, Homo sapiens
  CDR3 for beta chain variable domain of TCR clone 50032 (TRBV7-2, TRBJ2-7)
CASSSPSGSEQYF

SEQ ID NO: 100065 - protein, 17 aa, Homo sapiens
  CDR3 for alpha chain variable domain of TCR clone 50033 (TRAV8-3, TRAJ50)
CAVGAVDTETSYDRVIF

SEQ ID NO: 100066 - protein, 13 aa, Homo sapiens
  CDR3 for beta chain variable domain of TCR clone 50033 (TRBV7-9, TRBJ2-2)
CASSSAGTGELFF

SEQ ID NO: 100067 - protein, 13 aa, Homo sapiens
  CDR3 for alpha chain variable domain of TCR clone 50034 (TRAV21, TRAJ20)
CAVGLRVDYKLSF

SEQ ID NO: 100068 - protein, 15 aa, Homo sapiens
  CDR3 for beta chain variable domain of TCR clone 50034 (TRBV6-1, TRBJ2-2)
CASSAGQGYTGELFF

SEQ ID NO: 100069 - protein, 19 aa, Homo sapiens
  CDR3 for alpha chain variable domain of TCR clone 50035 (TRAV2, TRAJ20)
ILQVREADAAVYRDCKLSF

SEQ ID NO: 100070 - protein, 11 aa, Homo sapiens
  CDR3 for beta chain variable domain of TCR clone 50035 (TRBV12-4, TRBJ2-3)
CASTATDTQYF

SEQ ID NO: 100071 - protein, 16 aa, Homo sapiens
  CDR3 for alpha chain variable domain of TCR clone 50036 (TRAV3, TRAJ37)
CAVRGKGSGNTGKLIF

SEQ ID NO: 100072 - protein, 12 aa, Homo sapiens
  CDR3 for beta chain variable domain of TCR clone 50036 (TRBV10-2, TRBJ2-3)
CASSPESDTQYF

SEQ ID NO: 100073 - protein, 11 aa, Homo sapiens
  CDR3 for alpha chain variable domain of TCR clone 50037 (TRAV1-2, TRAJ20)
CAVANDYKLSF

SEQ ID NO: 100074 - protein, 18 aa, Homo sapiens
  CDR3 for beta chain variable domain of TCR clone 50037 (TRBV20-1, TRBJ2-6)
CSAATTPTHGSGANVLTF

SEQ ID NO: 100075 - protein, 15 aa, Homo sapiens
  CDR3 for alpha chain variable domain of TCR clone 50038 (TRAV12-1, TRAJ44)
SVVFVNTGTASKLTF

SEQ ID NO: 100076 - protein, 17 aa, Homo sapiens
  CDR3 for beta chain variable domain of TCR clone 50038 (TRBV7-8, TRBJ2-6)
CASSAGTGGAGANVLTF

SEQ ID NO: 100077 - protein, 19 aa, Homo sapiens
  CDR3 for alpha chain variable domain of TCR clone 50039 (TRAV1-2, TRAJ26)
CLLPLCCERPDNYGQNFAF

SEQ ID NO: 100078 - protein, 15 aa, Homo sapiens
  CDR3 for beta chain variable domain of TCR clone 50039 (TRBV9, TRBJ1-6)
CASSVAGTGDSPLHF

SEQ ID NO: 100079 - protein, 14 aa, Homo sapiens
  CDR3 for alpha chain variable domain of TCR clone 50040 (TRAV1-2, TRAJ16)
CAVNRFSVGQKLLF

SEQ ID NO: 100080 - protein, 15 aa, Homo sapiens
  CDR3 for beta chain variable domain of TCR clone 50040 (TRBV7-9, TRBJ1-6)
CASSSPGRGNSPLHF

SEQ ID NO: 100081 - protein, 15 aa, Homo sapiens
  CDR3 for alpha chain variable domain of TCR clone 50041 (TRAV21, TRAJ52)
CATRGGGTSYGKLTF

SEQ ID NO: 100082 - protein, 14 aa, Homo sapiens
  CDR3 for beta chain variable domain of TCR clone 50041 (TRBV28, TRBJ2-3)
CASSSAPSTDTRYF

SEQ ID NO: 100083 - protein, 13 aa, Homo sapiens
  CDR3 for alpha chain variable domain of TCR clone 50042 (TRAV20, TRAJ37)
CAGCSCNTGKLIF

SEQ ID NO: 100084 - protein, 11 aa, Homo sapiens
  CDR3 for beta chain variable domain of TCR clone 50042 (TRBV12-4, TRBJ2-3)
CASTATDTQYF

SEQ ID NO: 100085 - protein, 16 aa, Homo sapiens
  CDR3 for alpha chain variable domain of TCR clone 50043 (TRAV30, TRAJ24)
CGTEIVDADSWGKFQF

SEQ ID NO: 100086 - protein, 15 aa, Homo sapiens
  CDR3 for beta chain variable domain of TCR clone 50043 (TRBV20-1, TRBJ2-7)
CSARDQVSGMDEQYF

SEQ ID NO: 100087 - protein, 14 aa, Homo sapiens
  CDR3 for alpha chain variable domain of TCR clone 50044 (TRAV26-2, TRAJ38)
CILYNAGNDRKLIW

SEQ ID NO: 100088 - protein, 14 aa, Homo sapiens
  CDR3 for beta chain variable domain of TCR clone 50044 (TRBV19, TRBJ2-1)
CASPTFVLSGEQFF

SEQ ID NO: 100089 - protein, 11 aa, Homo sapiens
  CDR3 for alpha chain variable domain of TCR clone 50045 (TRAV2, TRAJ13)
CASVGYQKVTF

SEQ ID NO: 100090 - protein, 18 aa, Homo sapiens
  CDR3 for beta chain variable domain of TCR clone 50045 (TRBV19, TRBJ2-6)
CASIGPTSGGSGANVLTF

SEQ ID NO: 100091 - protein, 17 aa, Homo sapiens
  CDR3 for alpha chain variable domain of TCR clone 50046 (TRAV13-1, TRAJ53)
CAASWKSSGGSNYKLTF

SEQ ID NO: 100092 - protein, 19 aa, Homo sapiens
  CDR3 for beta chain variable domain of TCR clone 50046 (TRBV7-9, TRBJ2-1)
CASSHNRGALLCSYNEQFF

SEQ ID NO: 100093 - protein, 12 aa, Homo sapiens
  CDR3 for alpha chain variable domain of TCR clone 50047 (TRAV1-1, TRAJ29)
CAVEFRKHTSCL

SEQ ID NO: 100094 - protein, 14 aa, Homo sapiens
  CDR3 for beta chain variable domain of TCR clone 50047 (TRBV28, TRBJ1-4)
CASSFGTFDEKLFF

SEQ ID NO: 100095 - protein, 10 aa, Homo sapiens
  CDR3 for alpha chain variable domain of TCR clone 50048 (TRAV30, TRAJ48)
CGIGNEKLTF

SEQ ID NO: 100096 - protein, 14 aa, Homo sapiens
  CDR3 for beta chain variable domain of TCR clone 50048 (TRBV7-6, TRBJ2-3)
CASSVAGGTDTRYF

SEQ ID NO: 100097 - protein, 15 aa, Homo sapiens
  CDR3 for alpha chain variable domain of TCR clone 50049 (TRAV26-1, TRAJ29)
RIVRVEGSGNTHLVF

SEQ ID NO: 100098 - protein, 15 aa, Homo sapiens
  CDR3 for beta chain variable domain of TCR clone 50049 (TRBV7-9, TRBJ1-5)
CASSQGHQPNQPQHF

SEQ ID NO: 100099 - protein, 17 aa, Homo sapiens
  CDR3 for alpha chain variable domain of TCR clone 50050 (TRAV3, TRAJ6)
CAVRDGPRAGGSYIPTF

SEQ ID NO: 100100 - protein, 12 aa, Homo sapiens
  CDR3 for beta chain variable domain of TCR clone 50050 (TRBV7-9, TRBJ1-4)
CASSTDREKLFF

SEQ ID NO: 100101 - protein, 15 aa, Homo sapiens
  CDR3 for alpha chain variable domain of TCR clone 50051 (TRAV12-3, TRAJ27)
CAMRAYNTNAGKSTF

SEQ ID NO: 100102 - protein, 13 aa, Homo sapiens
  CDR3 for beta chain variable domain of TCR clone 50051 (TRBV11-2, TRBJ2-5)
CARSRGPSETQYF

SEQ ID NO: 100103 - protein, 12 aa, Homo sapiens
  CDR3 for alpha chain variable domain of TCR clone 50052 (TRAV13-1, TRAJ21)
CAAKEDFNKFYF

SEQ ID NO: 100104 - protein, 14 aa, Homo sapiens
  CDR3 for beta chain variable domain of TCR clone 50052 (TRBV20-1, TRBJ2-7)
CSAPELAGVGEQYF

SEQ ID NO: 100105 - protein, 14 aa, Homo sapiens
  CDR3 for alpha chain variable domain of TCR clone 50053 (TRAV8-1, TRAJ49)
CASFIANTGNQFYF

SEQ ID NO: 100106 - protein, 13 aa, Homo sapiens
  CDR3 for beta chain variable domain of TCR clone 50053 (TRBV11-2, TRBJ2-5)
CASSFSSQETQYF

SEQ ID NO: 100107 - protein, 16 aa, Homo sapiens
  CDR3 for alpha chain variable domain of TCR clone 50054 (TRAV3, TRAJ10)
CAVRDMRAGGGNKLTF

SEQ ID NO: 100108 - protein, 14 aa, Homo sapiens
  CDR3 for beta chain variable domain of TCR clone 50054 (TRBV25-1, TRBJ1-1)
CASTHLGGNTEAVF

SEQ ID NO: 100109 - protein, 18 aa, Homo sapiens
  CDR3 for alpha chain variable domain of TCR clone 50055 (TRAV26-1, TRAJ23)
CIVRVGMEVWNQGGKLIF

SEQ ID NO: 100110 - protein, 16 aa, Homo sapiens
  CDR3 for beta chain variable domain of TCR clone 50055 (TRBV12-4, TRBJ2-5)
CASSFFVRGRQETQYF

SEQ ID NO: 100111 - protein, 14 aa, Homo sapiens
  CDR3 for alpha chain variable domain of TCR clone 50056 (TRAV12-3, TRAJ54)
CAMRIIQGAQKLVF

SEQ ID NO: 100112 - protein, 16 aa, Homo sapiens
  CDR3 for beta chain variable domain of TCR clone 50056 (TRBV28, TRBJ2-1)
CASRVPASGRIGEQSF

SEQ ID NO: 100113 - protein, 14 aa, Homo sapiens
  CDR3 for alpha chain variable domain of TCR clone 50057 (TRAV20, TRAJ22)
CAVALGGSARQLTF

SEQ ID NO: 100114 - protein, 15 aa, Homo sapiens
  CDR3 for beta chain variable domain of TCR clone 50057 (TRBV7-2, TRBJ1-1)
CASSFAGGRDTEAFF

SEQ ID NO: 100115 - protein, 13 aa, Homo sapiens
  CDR3 for alpha chain variable domain of TCR clone 50058 (TRAV2, TRAJ15)
CALASQAGTALIF

SEQ ID NO: 100116 - protein, 16 aa, Homo sapiens
  CDR3 for beta chain variable domain of TCR clone 50058 (TRBV5-1, TRBJ1-1)
CASSSGGNSLNTEAFF

SEQ ID NO: 100117 - protein, 10 aa, Homo sapiens
  CDR3 for alpha chain variable domain of TCR clone 50059 (TRAV12-3, TRAJ49)
CAMNDDQFYF

SEQ ID NO: 100118 - protein, 13 aa, Homo sapiens
  CDR3 for beta chain variable domain of TCR clone 50059 (TRBV12-4, TRBJ1-1)
CASSPRTGFEAFF

SEQ ID NO: 100119 - protein, 13 aa, Homo sapiens
  CDR3 for alpha chain variable domain of TCR clone 50060 (TRAV3, TRAJ4)
CAVRDGGYNKLIF

SEQ ID NO: 100120 - protein, 15 aa, Homo sapiens
  CDR3 for beta chain variable domain of TCR clone 50060 (TRBV5-1, TRBJ2-1)
GASSPPRAPYNEQFF

SEQ ID NO: 100121 - protein, 13 aa, Homo sapiens
  CDR3 for alpha chain variable domain of TCR clone 50061 (TRAV13-1, TRAJ21)
CAASIYNFNKLYF

SEQ ID NO: 100122 - protein, 12 aa, Homo sapiens
  CDR3 for beta chain variable domain of TCR clone 50061 (TRBV11-2, TRBJ2-1)
CASSPGNNEQFF

SEQ ID NO: 100123 - protein, 14 aa, Homo sapiens
  CDR3 for alpha chain variable domain of TCR clone 50062 (TRAV9-2, TRAJ39)
CALYIYNAGNMLTF

SEQ ID NO: 100124 - protein, 14 aa, Homo sapiens
  CDR3 for beta chain variable domain of TCR clone 50062 (TRBV27, TRBJ2-3)
CASSPLGTTDTQYF

SEQ ID NO: 100125 - protein, 14 aa, Homo sapiens
  CDR3 for alpha chain variable domain of TCR clone 50063 (TRAV12-3, TRAJ10)
SQLPLTGGGNKLTF

SEQ ID NO: 100126 - protein, 14 aa, Homo sapiens
  CDR3 for beta chain variable domain of TCR clone 50063 (TRBV20-1, TRBJ2-5)
CSALVPGYQETQYF

SEQ ID NO: 100127 - protein, 12 aa, Homo sapiens
  CDR3 for alpha chain variable domain of TCR clone 50064 (TRAV12-3, TRAJ17)
CAMTLTGNKLTF

SEQ ID NO: 100128 - protein, 16 aa, Homo sapiens
  CDR3 for beta chain variable domain of TCR clone 50064 (TRBV7-2, TRBJ2-3)
CASSLEGAGSGDTQYF

SEQ ID NO: 100129 - protein, 14 aa, Homo sapiens
  CDR3 for alpha chain variable domain of TCR clone 50065 (TRAV20, TRAJ16)
CAVQENSDGQKLPF

SEQ ID NO: 100130 - protein, 13 aa, Homo sapiens
  CDR3 for beta chain variable domain of TCR clone 50065 (TRBV27, TRBJ2-3)
CASSSLPGDTQYF

SEQ ID NO: 100131 - protein, 20 aa, Homo sapiens
  CDR3 for alpha chain variable domain of TCR clone 50066 (TRAV26-1, TRAJ42)
CCVLLHRQTYYGGSQGDLIF

SEQ ID NO: 100132 - protein, 16 aa, Homo sapiens
  CDR3 for beta chain variable domain of TCR clone 50066 (TRBV7-3, TRBJ2-2)
CASSLKRGTLSGELFF

SEQ ID NO: 100133 - protein, 15 aa, Homo sapiens
  CDR3 for alpha chain variable domain of TCR clone 50067 (TRAV13-1, TRAJ17)
CAASIERAAGNKLTF

SEQ ID NO: 100134 - protein, 13 aa, Homo sapiens
  CDR3 for beta chain variable domain of TCR clone 50067 (TRBV10-3, TRBJ2-7)
SASKLAVNYEQYF

SEQ ID NO: 100135 - protein, 13 aa, Homo sapiens
  CDR3 for alpha chain variable domain of TCR clone 50068 (TRAV12-2, TRAJ6)
CAARGGGSYIPTF

SEQ ID NO: 100136 - protein, 12 aa, Homo sapiens
  CDR3 for beta chain variable domain of TCR clone 50068 (TRBV11-2, TRBJ2-1)
CASSPGNNEQFF

SEQ ID NO: 100137 - protein, 15 aa, Homo sapiens
  CDR3 for alpha chain variable domain of TCR clone 50069 (TRAV26-1, TRAJ40)
CIVRVTTSGTYKYIF

SEQ ID NO: 100138 - protein, 14 aa, Homo sapiens
  CDR3 for beta chain variable domain of TCR clone 50069 (TRBV7-9, TRBJ1-4)
CASSTDREKLFLAV

SEQ ID NO: 100139 - protein, 12 aa, Homo sapiens
  CDR3 for alpha chain variable domain of TCR clone 50070 (TRAV1-2, TRAJ29)
CAVPSGNTPLVF

SEQ ID NO: 100140 - protein, 12 aa, Homo sapiens
  CDR3 for beta chain variable domain of TCR clone 50070 (TRBV12-4, TRBJ2-7)
CASSVGGYEQYF

SEQ ID NO: 100141 - protein, 12 aa, Homo sapiens
  CDR3 for alpha chain variable domain of TCR clone 50071 (TRAV35, TRAJ30)
CAGLNRDEKIIF

SEQ ID NO: 100142 - protein, 15 aa, Homo sapiens
  CDR3 for beta chain variable domain of TCR clone 50071 (TRBV18, TRBJ2-3)
CASSPLAGETDTQYF

SEQ ID NO: 100143 - protein, 18 aa, Homo sapiens
  CDR3 for alpha chain variable domain of TCR clone 50072 (TRAV26-2, TRAJ45)
CILRVDKYSGGGANGLTF

SEQ ID NO: 100144 - protein, 16 aa, Homo sapiens
  CDR3 for beta chain variable domain of TCR clone 50072 (TRBV2, TRBJ1-4)
CASNLLQGATNEKLFF

SEQ ID NO: 100145 - protein, 13 aa, Homo sapiens
  CDR3 for alpha chain variable domain of TCR clone 50073 (TRAV12-3, TRAJ13)
CAMTSGGYQKVTF

SEQ ID NO: 100146 - protein, 13 aa, Homo sapiens
  CDR3 for beta chain variable domain of TCR clone 50073 (TRBV20-1, TRBJ2-2)
CGALSGGAGELFF

SEQ ID NO: 100147 - protein, 16 aa, Homo sapiens
  CDR3 for alpha chain variable domain of TCR clone 50074 (TRAV8-6, TRAJ9)
CAVSDALNTGGFKTIF

SEQ ID NO: 100148 - protein, 11 aa, Homo sapiens
  CDR3 for beta chain variable domain of TCR clone 50074 (TRBV12-4, TRBJ2-3)
CASTATDTQYF

SEQ ID NO: 100149 - protein, 19 aa, Homo sapiens
  CDR3 for alpha chain variable domain of TCR clone 50075 (TRAV3, TRAJ6)
CAVRDRNPSRSGGSYIPKF

SEQ ID NO: 100150 - protein, 15 aa, Homo sapiens
  CDR3 for beta chain variable domain of TCR clone 50075 (TRBV18, TRBJ2-7)
CASSPTFMDSYEQYF

SEQ ID NO: 100151 - protein, 15 aa, Homo sapiens
  CDR3 for alpha chain variable domain of TCR clone 50076 (TRAV8-3, TRAJ27)
CAVGPFKTNAGKSTF

SEQ ID NO: 100152 - protein, 15 aa, Homo sapiens
  CDR3 for beta chain variable domain of TCR clone 50076 (TRBV7-2, TRBJ2-1)
CASSSGLAGGNEQFF

SEQ ID NO: 100153 - protein, 14 aa, Homo sapiens
  CDR3 for alpha chain variable domain of TCR clone 50077 (TRAV12-3, TRAJ9)
CAMSPNTGGFKTNF

SEQ ID NO: 100154 - protein, 12 aa, Homo sapiens
  CDR3 for beta chain variable domain of TCR clone 50077 (TRBV19, TRBJ1-5)
CASSIAQQPQHF

SEQ ID NO: 100155 - protein, 17 aa, Homo sapiens
  CDR3 for alpha chain variable domain of TCR clone 50078 (TRAV23/DV6, TRAJ57)
CAASSTLSQGGSEKLVF

SEQ ID NO: 100156 - protein, 14 aa, Homo sapiens
  CDR3 for beta chain variable domain of TCR clone 50078 (TRBV25-1, TRBJ1-1)
CASTHLGGNTEAFC

SEQ ID NO: 100157 - protein, 14 aa, Homo sapiens
  CDR3 for alpha chain variable domain of TCR clone 50079 (TRAV20, TRAJ42)
CAVQAGGSQGNLNF

SEQ ID NO: 100158 - protein, 14 aa, Homo sapiens
  CDR3 for beta chain variable domain of TCR clone 50079 (TRBV28, TRBJ1-2)
CASRIQGANYGYTF

SEQ ID NO: 100159 - protein, 15 aa, Homo sapiens
  CDR3 for alpha chain variable domain of TCR clone 50080 (TRAV3, TRAJ12)
CAVRDTRDSSYKLIF

SEQ ID NO: 100160 - protein, 15 aa, Homo sapiens
  CDR3 for beta chain variable domain of TCR clone 50080 (TRBV27, TRBJ2-7)
CASSLRNEQGYEQYF

SEQ ID NO: 100161 - protein, 14 aa, Homo sapiens
  CDR3 for alpha chain variable domain of TCR clone 50081 (TRAV26-1, TRAJ39)
CIVRGSRAGNMLTF

SEQ ID NO: 100162 - protein, 15 aa, Homo sapiens
  CDR3 for beta chain variable domain of TCR clone 50081 (TRBV28, TRBJ1-5)
CASSQGHQPNQPQHF

SEQ ID NO: 100163 - protein, 14 aa, Homo sapiens
  CDR3 for alpha chain variable domain of TCR clone 50082 (TRAV8-3, TRAJ48)
CCGCGQFGNEKLTF

SEQ ID NO: 100164 - protein, 15 aa, Homo sapiens
  CDR3 for beta chain variable domain of TCR clone 50082 (TRBV28, TRBJ2-4)
CAAGSGTLLMGMQYF

SEQ ID NO: 100165 - protein, 17 aa, Homo sapiens
  CDR3 for alpha chain variable domain of TCR clone 50083 (TRAV13-1, TRAJ52)
CSKNPNAGGTSYGKLTF

SEQ ID NO: 100166 - protein, 15 aa, Homo sapiens
  CDR3 for beta chain variable domain of TCR clone 50083 (TRBV6-1, TRBJ2-3)
CASSERGGITDTQYF

SEQ ID NO: 100167 - protein, 16 aa, Homo sapiens
  CDR3 for alpha chain variable domain of TCR clone 50084 (TRAV12-2, TRAJ10)
CAVNRILTGGGNKLTL

SEQ ID NO: 100168 - protein, 12 aa, Homo sapiens
  CDR3 for beta chain variable domain of TCR clone 50084 (TRBV28, TRBJ2-7)
CASSFSSYEQYF

SEQ ID NO: 100169 - protein, 16 aa, Homo sapiens
  CDR3 for alpha chain variable domain of TCR clone 50085 (TRAV12-2, TRAJ32)
CAVNLGQGGATNKLIF

SEQ ID NO: 100170 - protein, 15 aa, Homo sapiens
  CDR3 for beta chain variable domain of TCR clone 50085 (TRBV20-1, TRBJ2-7)
CSARGSLAGGREQYF

SEQ ID NO: 100171 - protein, 14 aa, Homo sapiens
  CDR3 for alpha chain variable domain of TCR clone 50086 (TRAV1-2, TRAJ8)
CAVREDTGFQKLVF

SEQ ID NO: 100172 - protein, 13 aa, Homo sapiens
  CDR3 for beta chain variable domain of TCR clone 50086 (TRBV18, TRBJ2-5)
CASSPAGKETQYF

SEQ ID NO: 100173 - protein, 15 aa, Homo sapiens
  CDR3 for alpha chain variable domain of TCR clone 50087 (TRAV8-4, TRAJ48)
CAVSAAYCGNEKLTF

SEQ ID NO: 100174 - protein, 12 aa, Homo sapiens
  CDR3 for beta chain variable domain of TCR clone 50087 (TRBV3-1, TRBJ2-5)
CASSQRGETQYF

SEQ ID NO: 100175 - protein, 15 aa, Homo sapiens
  CDR3 for alpha chain variable domain of TCR clone 50088 (TRAV3, TRAJ22)
CAVRDRGGSAKQLTF

SEQ ID NO: 100176 - protein, 13 aa, Homo sapiens
  CDR3 for beta chain variable domain of TCR clone 50088 (TRBV2, TRBJ1-5)
CATAGPGNQPQHF

SEQ ID NO: 100177 - protein, 14 aa, Homo sapiens
  CDR3 for alpha chain variable domain of TCR clone 50089 (TRAV2, TRAJ9)
CAVEDRSGGFKTIF

SEQ ID NO: 100178 - protein, 12 aa, Homo sapiens
  CDR3 for beta chain variable domain of TCR clone 50089 (TRBV7-9, TRBJ2-7)
CASSLGGYEQYF

SEQ ID NO: 100179 - protein, 17 aa, Homo sapiens
  CDR3 for alpha chain variable domain of TCR clone 50090 (TRAV3, TRAJ6)
CAVRDGPRAGGSYIPTF

SEQ ID NO: 100180 - protein, 15 aa, Homo sapiens
  CDR3 for beta chain variable domain of TCR clone 50090 (TRBV7-2, TRBJ2-7)
CASSLLGTGSYEQYF

SEQ ID NO: 100181 - protein, 15 aa, Homo sapiens
  CDR3 for alpha chain variable domain of TCR clone 50091 (TRAV2, TRAJ22)
CAVPSRGGSVRQLTF

SEQ ID NO: 100182 - protein, 11 aa, Homo sapiens
  CDR3 for beta chain variable domain of TCR clone 50091 (TRBV27, TRBJ2-3)
CASSLGDTQYF

SEQ ID NO: 100183 - protein, 14 aa, Homo sapiens
  CDR3 for alpha chain variable domain of TCR clone 50092 (TRAV17, TRAJ12)
CSTDEKDSSYKLIF

SEQ ID NO: 100184 - protein, 16 aa, Homo sapiens
  CDR3 for beta chain variable domain of TCR clone 50092 (TRBV11-2, TRBJ2-1)
CASSPRLAGVYNEQFF

SEQ ID NO: 100185 - protein, 14 aa, Homo sapiens
  CDR3 for alpha chain variable domain of TCR clone 50093 (TRAV29/DV5, TRAJ36)
CAARRKIGANNLFF

SEQ ID NO: 100186 - protein, 15 aa, Homo sapiens
  CDR3 for beta chain variable domain of TCR clone 50093 (TRBV19, TRBJ1-6)
CASSTQGAVGSPLHF

SEQ ID NO: 100187 - protein, 14 aa, Homo sapiens
  CDR3 for alpha chain variable domain of TCR clone 50094 (TRAV12-3, TRAJ43)
CAMSLGGAGTRLTV

SEQ ID NO: 100188 - protein, 14 aa, Homo sapiens
  CDR3 for beta chain variable domain of TCR clone 50094 (TRBV7-9, TRBJ2-7)
CASSPRTGTYEQYF

SEQ ID NO: 100189 - protein, 14 aa, Homo sapiens
  CDR3 for alpha chain variable domain of TCR clone 50095 (TRAV17, TRAJ40)
CATALASGTYKYIF

SEQ ID NO: 100190 - protein, 13 aa, Homo sapiens
  CDR3 for beta chain variable domain of TCR clone 50095 (TRBV27, TRBJ2-1)
CASSSGSYNEQFF

SEQ ID NO: 100191 - protein, 16 aa, Homo sapiens
  CDR3 for alpha chain variable domain of TCR clone 50096 (TRAV20, TRAJ53)
CAVQGNSGGSNYKLTF

SEQ ID NO: 100192 - protein, 13 aa, Homo sapiens
  CDR3 for beta chain variable domain of TCR clone 50096 (TRBV12-5, TRBJ2-3)
CASGDRQSDTQYF

SEQ ID NO: 100193 - protein, 16 aa, Homo sapiens
  CDR3 for alpha chain variable domain of TCR clone 50097 (TRAV20, TRAJ22)
CAVQASSSGSARQLTF

SEQ ID NO: 100194 - protein, 13 aa, Homo sapiens
  CDR3 for beta chain variable domain of TCR clone 50097 (TRBV7-2, TRBJ2-5)
CASGQTSVETQYF

SEQ ID NO: 100195 - protein, 13 aa, Homo sapiens
  CDR3 for alpha chain variable domain of TCR clone 50098 (TRAV17, TRAJ40)
CAGALGGTYKYIF

SEQ ID NO: 100196 - protein, 16 aa, Homo sapiens
  CDR3 for beta chain variable domain of TCR clone 50098 (TRBV11-2, TRBJ1-2)
CASSLDTGGADYGYTL

SEQ ID NO: 100197 - protein, 13 aa, Homo sapiens
  CDR3 for alpha chain variable domain of TCR clone 50099 (TRAV1-1, TRAJ31)
CASYLNNNARPMF

SEQ ID NO: 100198 - protein, 14 aa, Homo sapiens
  CDR3 for beta chain variable domain of TCR clone 50099 (TRBV4-1, TRBJ2-5)
CASSRSGSGETQYF

SEQ ID NO: 100199 - protein, 12 aa, Homo sapiens
  CDR3 for alpha chain variable domain of TCR clone 50100 (TRAV20, TRAJ20)
CAVRFNDYKLSF

SEQ ID NO: 100200 - protein, 14 aa, Homo sapiens
  CDR3 for beta chain variable domain of TCR clone 50100 (TRBV20-1, TRBJ2-1)
CSAQIGGYANEQFF

SEQ ID NO: 100201 - protein, 11 aa, Homo sapiens
  CDR3 for alpha chain variable domain of TCR clone 50101 (TRAV1-1, TRAJ23)
SAVRQGGKLIF

SEQ ID NO: 100202 - protein, 20 aa, Homo sapiens
  CDR3 for beta chain variable domain of TCR clone 50101 (TRBV7-8, TRBJ2-2)
CASSHLFPGPTIHITGELFF

SEQ ID NO: 100203 - protein, 14 aa, Homo sapiens
  CDR3 for alpha chain variable domain of TCR clone 50102 (TRAV12-2, TRAJ13)
CAVKKTGGYQKVTF

SEQ ID NO: 100204 - protein, 13 aa, Homo sapiens
  CDR3 for beta chain variable domain of TCR clone 50102 (TRBV7-9, TRBJ1-2)
CASSLKQNYGYAF

SEQ ID NO: 100205 - protein, 16 aa, Homo sapiens
  CDR3 for alpha chain variable domain of TCR clone 50103 (TRAV3, TRAJ37)
CAVRPHGSGNAGKLIF

SEQ ID NO: 100206 - protein, 17 aa, Homo sapiens
  CDR3 for beta chain variable domain of TCR clone 50103 (TRBV5-1, TRBJ2-5)
RASSPVALGQNQETQYF

SEQ ID NO: 100207 - protein, 11 aa, Homo sapiens
  CDR3 for alpha chain variable domain of TCR clone 50104 (TRAV2, TRAJ33)
CAVDSNYQLIW

SEQ ID NO: 100208 - protein, 14 aa, Homo sapiens
  CDR3 for beta chain variable domain of TCR clone 50104 (TRBV7-3, TRBJ2-2)
CASSSGGYTGELFF

SEQ ID NO: 100209 - protein, 14 aa, Homo sapiens
  CDR3 for alpha chain variable domain of TCR clone 50105 (TRAV1-2, TRAJ16)
CAVDRFSDGQKLLF

SEQ ID NO: 100210 - protein, 15 aa, Homo sapiens
  CDR3 for beta chain variable domain of TCR clone 50105 (TRBV20-1, TRBJ2-7)
CSARDRVSGMDEQYF

SEQ ID NO: 100211 - protein, 15 aa, Homo sapiens
  CDR3 for alpha chain variable domain of TCR clone 50106 (TRAV26-1, TRAJ22)
CIVRVTFWFCKATDL

SEQ ID NO: 100212 - protein, 13 aa, Homo sapiens
  CDR3 for beta chain variable domain of TCR clone 50106 (TRBV7-9, TRBJ1-2)
CASSLKQNYGYTF

SEQ ID NO: 100213 - protein, 14 aa, Homo sapiens
  CDR3 for alpha chain variable domain of TCR clone 50107 (TRAV12-1, TRAJ13)
CVVIDSGGYQKVTF

SEQ ID NO: 100214 - protein, 14 aa, Homo sapiens
  CDR3 for beta chain variable domain of TCR clone 50107 (TRBV4-1, TRBJ2-2)
CASSQAVNTGELFF

SEQ ID NO: 100215 - protein, 17 aa, Homo sapiens
  CDR3 for alpha chain variable domain of TCR clone 50108 (TRAV12-3, TRAJ52)
CNERGGAGGTSYGKLTF

SEQ ID NO: 100216 - protein, 14 aa, Homo sapiens
  CDR3 for beta chain variable domain of TCR clone 50108 (TRBV7-2, TRBJ2-7)
CASRSQGAAYEQYF

SEQ ID NO: 100217 - protein, 11 aa, Homo sapiens
  CDR3 for alpha chain variable domain of TCR clone 50109 (TRAV2, TRAJ33)
CAVDSNYQLIW

SEQ ID NO: 100218 - protein, 14 aa, Homo sapiens
  CDR3 for beta chain variable domain of TCR clone 50109 (TRBV11-2, TRBJ2-5)
CASRPLAGRETQYF

SEQ ID NO: 100219 - protein, 15 aa, Homo sapiens
  CDR3 for alpha chain variable domain of TCR clone 50110 (TRAV20, TRAJ58)
YAVQDLETSGSRLTF

SEQ ID NO: 100220 - protein, 12 aa, Homo sapiens
  CDR3 for beta chain variable domain of TCR clone 50110 (TRBV9, TRBJ2-2)
CASSARTGELFF

SEQ ID NO: 100221 - protein, 18 aa, Homo sapiens
  CDR3 for alpha chain variable domain of TCR clone 50111 (TRAV12-3, TRAJ52)
CAMSRTNAGGTSYGKLTF

SEQ ID NO: 100222 - protein, 14 aa, Homo sapiens
  CDR3 for beta chain variable domain of TCR clone 50111 (TRBV7-9, TRBJ2-1)
CASSPRDSLYEQFF

SEQ ID NO: 100223 - protein, 15 aa, Homo sapiens
  CDR3 for alpha chain variable domain of TCR clone 50112 (TRAV17, TRAJ57)
CATGPSQGGSEKLVF

SEQ ID NO: 100224 - protein, 20 aa, Homo sapiens
  CDR3 for beta chain variable domain of TCR clone 50112 (TRBV28, TRBJ2-1)
CASTPIGRSPGLAGGNEQFF

SEQ ID NO: 100225 - protein, 15 aa, Homo sapiens
  CDR3 for alpha chain variable domain of TCR clone 50113 (TRAV23/DV6, TRAJ37)
CAAGEGASNTGKLIF

SEQ ID NO: 100226 - protein, 17 aa, Homo sapiens
  CDR3 for beta chain variable domain of TCR clone 50113 (TRBV20-1, TRBJ2-7)
CSATRAGGVAGVEEQYF

SEQ ID NO: 100227 - protein, 11 aa, Homo sapiens
  CDR3 for alpha chain variable domain of TCR clone 50114 (TRAV1-1, TRAJ23)
CAVRQGGKLIF

SEQ ID NO: 100228 - protein, 14 aa, Homo sapiens
  CDR3 for beta chain variable domain of TCR clone 50114 (TRBV19, TRBJ2-1)
CASPTLVLSGEQFF

SEQ ID NO: 100229 - protein, 12 aa, Homo sapiens
  CDR3 for alpha chain variable domain of TCR clone 50115 (TRAV12-3, TRAJ17)
CAMTLTGNKLTF

SEQ ID NO: 100230 - protein, 12 aa, Homo sapiens
  CDR3 for beta chain variable domain of TCR clone 50115 (TRBV2, TRBJ2-1)
CACGPPGNEQFF

SEQ ID NO: 100231 - protein, 14 aa, Homo sapiens
  CDR3 for alpha chain variable domain of TCR clone 50116 (TRAV26-1, TRAJ38)
CIADNAGNNRKLIW

SEQ ID NO: 100232 - protein, 15 aa, Homo sapiens
  CDR3 for beta chain variable domain of TCR clone 50116 (TRBV9, TRBJ2-1)
CASSLAGSSYNEQFF

SEQ ID NO: 100233 - protein, 13 aa, Homo sapiens
  CDR3 for alpha chain variable domain of TCR clone 50117 (TRAV20, TRAJ37)
CAGCSSNTGKLNF

SEQ ID NO: 100234 - protein, 11 aa, Homo sapiens
  CDR3 for beta chain variable domain of TCR clone 50117 (TRBV12-4, TRBJ2-3)
CASTATDTQYF

SEQ ID NO: 100235 - protein, 15 aa, Homo sapiens
  CDR3 for alpha chain variable domain of TCR clone 50118 (TRAV8-3, TRAJ11)
CAVGLLNSGYSTLTF

SEQ ID NO: 100236 - protein, 23 aa, Homo sapiens
  CDR3 for beta chain variable domain of TCR clone 50118 (TRBV7-9, TRBJ1-2)
EAQLEKSRLLSDRFSSGEGGYTF

SEQ ID NO: 100237 - protein, 15 aa, Homo sapiens
  CDR3 for alpha chain variable domain of TCR clone 50119 (TRAV38-1, TRAJ37)
CAFIFGSGNTGKLIF

SEQ ID NO: 100238 - protein, 15 aa, Homo sapiens
  CDR3 for beta chain variable domain of TCR clone 50119 (TRBV7-9, TRBJ1-6)
CASSSPGRGNSPLHF

SEQ ID NO: 100239 - protein, 11 aa, Homo sapiens
  CDR3 for alpha chain variable domain of TCR clone 50120 (TRAV35, TRAJ57)
GPQGGSEKLVF

SEQ ID NO: 100240 - protein, 13 aa, Homo sapiens
  CDR3 for beta chain variable domain of TCR clone 50120 (TRBV11-2, TRBJ2-1)
CASSLDLVNEQFF

SEQ ID NO: 100241 - protein, 10 aa, Homo sapiens
  CDR3 for alpha chain variable domain of TCR clone 50121 (TRAV26-1, TRAJ22)
CIVSLNFFWF

SEQ ID NO: 100242 - protein, 15 aa, Homo sapiens
  CDR3 for beta chain variable domain of TCR clone 50121 (TRBV4-2, TRBJ1-2)
CASSQRTGGRDGYSF

SEQ ID NO: 100243 - protein, 14 aa, Homo sapiens
  CDR3 for alpha chain variable domain of TCR clone 50122 (TRAV20, TRAJ42)
CAVQAGGSQGNLIF

SEQ ID NO: 100244 - protein, 14 aa, Homo sapiens
  CDR3 for beta chain variable domain of TCR clone 50122 (TRBV28, TRBJ1-2)
CASRIQVANYGYTF

SEQ ID NO: 100245 - protein, 14 aa, Homo sapiens
  CDR3 for alpha chain variable domain of TCR clone 50123 (TRAV17, TRAJ11)
CATDTSRGYSTLTF

SEQ ID NO: 100246 - protein, 16 aa, Homo sapiens
  CDR3 for beta chain variable domain of TCR clone 50123 (TRBV7-2, TRBJ2-3)
CASSLVGDASTDTQYF

SEQ ID NO: 100247 - protein, 11 aa, Homo sapiens
  CDR3 for alpha chain variable domain of TCR clone 50124 (TRAV1-2, TRAJ20)
CAVSNDYNLSF

SEQ ID NO: 100248 - protein, 16 aa, Homo sapiens
  CDR3 for beta chain variable domain of TCR clone 50124 (TRBV29-1, TRBJ2-6)
CSVEDITYSGANVLTF

SEQ ID NO: 100249 - protein, 14 aa, Homo sapiens
  CDR3 for alpha chain variable domain of TCR clone 50125 (TRAV13-1, TRAJ40)
CAASMTSGTYKYIF

SEQ ID NO: 100250 - protein, 14 aa, Homo sapiens
  CDR3 for beta chain variable domain of TCR clone 50125 (TRBV20-1, TRBJ2-1)
CSAQIGGSANEQFF

SEQ ID NO: 100251 - protein, 14 aa, Homo sapiens
  CDR3 for alpha chain variable domain of TCR clone 50126 (TRAV12-2, TRAJ13)
CAVKKTGGYHKVTF

SEQ ID NO: 100252 - protein, 19 aa, Homo sapiens
  CDR3 for beta chain variable domain of TCR clone 50126 (TRBV25-1, TRBJ2-2)
CAILVYRVDRGRKTGELFF

SEQ ID NO: 100253 - protein, 15 aa, Homo sapiens
  CDR3 for alpha chain variable domain of TCR clone 50127 (TRAV12-3, TRAJ5)
CAMSGLDTGRRALTF

SEQ ID NO: 100254 - protein, 16 aa, Homo sapiens
  CDR3 for beta chain variable domain of TCR clone 50127 (TRBV20-1, TRBJ2-3)
CSARLHSAGAIDTQYF

SEQ ID NO: 100255 - protein, 12 aa, Homo sapiens
  CDR3 for alpha chain variable domain of TCR clone 50128 (TRAV21, TRAJ23)
CAVPNQGGKLIF

SEQ ID NO: 100256 - protein, 15 aa, Homo sapiens
  CDR3 for beta chain variable domain of TCR clone 50128 (TRBV27, TRBJ2-1)
CASSFGAGTGPEQLF

SEQ ID NO: 100257 - protein, 12 aa, Homo sapiens
  CDR3 for alpha chain variable domain of TCR clone 50129 (TRAV12-3, TRAJ34)
CAMGYNTDKLIF

SEQ ID NO: 100258 - protein, 15 aa, Homo sapiens
  CDR3 for beta chain variable domain of TCR clone 50129 (TRBV28, TRBJ2-1)
CASSIIAGGRSGQFF

SEQ ID NO: 100259 - protein, 14 aa, Homo sapiens
  CDR3 for alpha chain variable domain of TCR clone 50130 (TRAV12-2, TRAJ13)
CAVKKTGGYQKVTF

SEQ ID NO: 100260 - protein, 13 aa, Homo sapiens
  CDR3 for beta chain variable domain of TCR clone 50130 (TRBV20-1, TRBJ1-1)
CSARGEGNTEAFF

SEQ ID NO: 100261 - protein, 15 aa, Homo sapiens
  CDR3 for alpha chain variable domain of TCR clone 50131 (TRAV4, TRAJ10)
CLVGDEEGGGNKLTF

SEQ ID NO: 100262 - protein, 17 aa, Homo sapiens
  CDR3 for beta chain variable domain of TCR clone 50131 (TRBV19, TRBJ2-6)
CASSTGQVFSGANDLTF

SEQ ID NO: 100263 - protein, 15 aa, Homo sapiens
  CDR3 for alpha chain variable domain of TCR clone 50132 (TRAV3, TRAJ9)
CAVGDSNTGGFKTIF

SEQ ID NO: 100264 - protein, 16 aa, Homo sapiens
  CDR3 for beta chain variable domain of TCR clone 50132 (TRBV15, TRBJ2-5)
CATSPTTGQGMETQYF

SEQ ID NO: 100265 - protein, 15 aa, Homo sapiens
  CDR3 for alpha chain variable domain of TCR clone 50133 (TRAV17, TRAJ40)
CATVSSTSGTYKYIF

SEQ ID NO: 100266 - protein, 18 aa, Homo sapiens
  CDR3 for beta chain variable domain of TCR clone 50133 (TRBV12-4, TRBJ2-2)
CASSLVAGTRGRTGELFF

SEQ ID NO: 100267 - protein, 11 aa, Homo sapiens
  CDR3 for alpha chain variable domain of TCR clone 50134 (TRAV2, TRAJ23)
CAVETRGKLIF

SEQ ID NO: 100268 - protein, 14 aa, Homo sapiens
  CDR3 for beta chain variable domain of TCR clone 50134 (TRBV2, TRBJ2-3)
CASSEGQSTDTQYF

SEQ ID NO: 100269 - protein, 10 aa, Homo sapiens
  CDR3 for alpha chain variable domain of TCR clone 50135 (TRAV36/DV7, TRAJ49)
CALTGNQFYF

SEQ ID NO: 100270 - protein, 14 aa, Homo sapiens
  CDR3 for beta chain variable domain of TCR clone 50135 (TRBV12-4, TRBJ2-5)
CASSFGASGGTQYF

SEQ ID NO: 100271 - protein, 13 aa, Homo sapiens
  CDR3 for alpha chain variable domain of TCR clone 50136 (TRAV27, TRAJ45)
CRSSGGGADGLTF

SEQ ID NO: 100272 - protein, 17 aa, Homo sapiens
  CDR3 for beta chain variable domain of TCR clone 50136 (TRBV11-2, TRBJ2-1)
CSSSLYPPGVEYNEQFF

SEQ ID NO: 100273 - protein, 15 aa, Homo sapiens
  CDR3 for alpha chain variable domain of TCR clone 50137 (TRAV1-2, TRAJ39)
CAVEGVDNAGNMLTF

SEQ ID NO: 100274 - protein, 13 aa, Homo sapiens
  CDR3 for beta chain variable domain of TCR clone 50137 (TRBV27, TRBJ1-6)
CASRWTGCSPLHF

SEQ ID NO: 100275 - protein, 11 aa, Homo sapiens
  CDR3 for alpha chain variable domain of TCR clone 50138 (TRAV21, TRAJ34)
CAVTNTDKLIF

SEQ ID NO: 100276 - protein, 16 aa, Homo sapiens
  CDR3 for beta chain variable domain of TCR clone 50138 (TRBV18, TRBJ1-1)
CASSPGVGGRRGEAFF

SEQ ID NO: 100277 - protein, 17 aa, Homo sapiens
  CDR3 for alpha chain variable domain of TCR clone 50139 (TRAV23/DV6, TRAJ57)
CAASSTLSQGGSEKLVF

SEQ ID NO: 100278 - protein, 13 aa, Homo sapiens
  CDR3 for beta chain variable domain of TCR clone 50139 (TRBV5-7, TRBJ2-3)
CASSLGRTDTQYF

SEQ ID NO: 100279 - protein, 10 aa, Homo sapiens
  CDR3 for alpha chain variable domain of TCR clone 50140 (TRAV12-3, TRAJ49)
CAMNDDQFYF

SEQ ID NO: 100280 - protein, 14 aa, Homo sapiens
  CDR3 for beta chain variable domain of TCR clone 50140 (TRBV19, TRBJ2-1)
CASPTFVLSGEQFF

SEQ ID NO: 100281 - protein, 15 aa, Homo sapiens
  CDR3 for alpha chain variable domain of TCR clone 50141 (TRAV26-2, TRAJ28)
CILVESGAGSYQLTF

SEQ ID NO: 100282 - protein, 11 aa, Homo sapiens
  CDR3 for beta chain variable domain of TCR clone 50141 (TRBV25-1, TRBJ2-7)
YASSISYEQYF

SEQ ID NO: 100283 - protein, 14 aa, Homo sapiens
  CDR3 for alpha chain variable domain of TCR clone 50142 (TRAV26-1, TRAJ45)
CIEVTGGGADGLTF

SEQ ID NO: 100284 - protein, 13 aa, Homo sapiens
  CDR3 for beta chain variable domain of TCR clone 50142 (TRBV7-6, TRBJ1-2)
CASSLVAYYGYTF

SEQ ID NO: 100285 - protein, 14 aa, Homo sapiens
  CDR3 for alpha chain variable domain of TCR clone 50143 (TRAV38-1, TRAJ45)
CAYYSGGGADGLTF

SEQ ID NO: 100286 - protein, 20 aa, Homo sapiens
  CDR3 for beta chain variable domain of TCR clone 50143 (TRBV28, TRBJ2-1)
CASIPIGRSPGLAGGNEQFF

SEQ ID NO: 100287 - protein, 15 aa, Homo sapiens
  CDR3 for alpha chain variable domain of TCR clone 50144 (TRAV8-3, TRAJ45)
CASSYSGGGADGLTF

SEQ ID NO: 100288 - protein, 13 aa, Homo sapiens
  CDR3 for beta chain variable domain of TCR clone 50144 (TRBV7-9, TRBJ2-7)
CASGFAGAYEQYF

SEQ ID NO: 100289 - protein, 15 aa, Homo sapiens
  CDR3 for alpha chain variable domain of TCR clone 50145 (TRAV12-2, TRAJ53)
CAVNGGGGSNYKLTL

SEQ ID NO: 100290 - protein, 14 aa, Homo sapiens
  CDR3 for beta chain variable domain of TCR clone 50145 (TRBV12-5, TRBJ2-5)
CASGSRTHQETQYF

SEQ ID NO: 100291 - protein, 13 aa, Homo sapiens
  CDR3 for alpha chain variable domain of TCR clone 50146 (TRAV8-4, TRAJ10)
CAAFTGGGKKLTF

SEQ ID NO: 100292 - protein, 15 aa, Homo sapiens
  CDR3 for beta chain variable domain of TCR clone 50146 (TRBV2, TRBJ2-3)
CASSDFEKATDTQYF

SEQ ID NO: 100293 - protein, 14 aa, Homo sapiens
  CDR3 for alpha chain variable domain of TCR clone 50147 (TRAV17, TRAJ57)
CATDPQGGSEKLVF

SEQ ID NO: 100294 - protein, 14 aa, Homo sapiens
  CDR3 for beta chain variable domain of TCR clone 50147 (TRBV7-8, TRBJ2-3)
CASSFPDGQDTQYF

SEQ ID NO: 100295 - protein, 14 aa, Homo sapiens
  CDR3 for alpha chain variable domain of TCR clone 50148 (TRAV1-2, TRAJ6)
YAVSLSGGSYIPTF

SEQ ID NO: 100296 - protein, 15 aa, Homo sapiens
  CDR3 for beta chain variable domain of TCR clone 50148 (TRBV28, TRBJ2-7)
CASSPGGRGFYEQYF

SEQ ID NO: 100297 - protein, 15 aa, Homo sapiens
  CDR3 for alpha chain variable domain of TCR clone 50149 (TRAV21, TRAJ53)
CATLNSGGSNYKLTF

SEQ ID NO: 100298 - protein, 14 aa, Homo sapiens
  CDR3 for beta chain variable domain of TCR clone 50149 (TRBV12-4, TRBJ1-1)
CASSFSQMNTEAFF

SEQ ID NO: 100299 - protein, 15 aa, Homo sapiens
  CDR3 for alpha chain variable domain of TCR clone 50150 (TRAV8-3, TRAJ41)
CAVWSNSNSGYALNF

SEQ ID NO: 100300 - protein, 17 aa, Homo sapiens
  CDR3 for beta chain variable domain of TCR clone 50150 (TRBV25-1, TRBJ2-1)
CASSAYGQGRGVYEQFF

SEQ ID NO: 100301 - protein, 18 aa, Homo sapiens
  CDR3 for alpha chain variable domain of TCR clone 50151 (TRAV21, TRAJ52)
CAVRPSPAGGTSYGKLTF

SEQ ID NO: 100302 - protein, 14 aa, Homo sapiens
  CDR3 for beta chain variable domain of TCR clone 50151 (TRBV7-2, TRBJ2-7)
CASSLYPGRYEQYF

SEQ ID NO: 100303 - protein, 13 aa, Homo sapiens
  CDR3 for alpha chain variable domain of TCR clone 50152 (TRAV8-2, TRAJ43)
CVVSDQGDNDMSF

SEQ ID NO: 100304 - protein, 12 aa, Homo sapiens
  CDR3 for beta chain variable domain of TCR clone 50152 (TRBV7-9, TRBJ2-7)
CASRTGFDEQYF

SEQ ID NO: 100305 - protein, 14 aa, Homo sapiens
  CDR3 for alpha chain variable domain of TCR clone 50153 (TRAV1-2, TRAJ16)
CAVNRSSDGQKLLF

SEQ ID NO: 100306 - protein, 13 aa, Homo sapiens
  CDR3 for beta chain variable domain of TCR clone 50153 (TRBV10-3, TRBJ2-7)
CASKLAVNYEQYF

SEQ ID NO: 100307 - protein, 15 aa, Homo sapiens
  CDR3 for alpha chain variable domain of TCR clone 50154 (TRAV3, TRAJ22)
CAVRDRGGSARQLTF

SEQ ID NO: 100308 - protein, 12 aa, Homo sapiens
  CDR3 for beta chain variable domain of TCR clone 50154 (TRBV28, TRBJ2-3)
CASSLYRDTQYF

SEQ ID NO: 100309 - protein, 15 aa, Homo sapiens
  CDR3 for alpha chain variable domain of TCR clone 50155 (TRAV3, TRAJ22)
CAVRDRGGSARQLTF

SEQ ID NO: 100310 - protein, 18 aa, Homo sapiens
  CDR3 for beta chain variable domain of TCR clone 50155 (TRBV7-2, TRBJ2-3)
CASSLETSRGRKADTQYF

SEQ ID NO: 100311 - protein, 10 aa, Homo sapiens
  CDR3 for alpha chain variable domain of TCR clone 50156 (TRAV8-6, TRAJ42)
GGGSQGNLIF

SEQ ID NO: 100312 - protein, 13 aa, Homo sapiens
  CDR3 for beta chain variable domain of TCR clone 50156 (TRBV7-3, TRBJ1-1)
CASSQDWGAEAFF

SEQ ID NO: 100313 - protein, 11 aa, Homo sapiens
  CDR3 for alpha chain variable domain of TCR clone 50157 (TRAV21, TRAJ34)
CAVTNTDKLIF

SEQ ID NO: 100314 - protein, 15 aa, Homo sapiens
  CDR3 for beta chain variable domain of TCR clone 50157 (TRBV7-9, TRBJ2-2)
CASGPLDTFPGELFF

SEQ ID NO: 100315 - protein, 14 aa, Homo sapiens
  CDR3 for alpha chain variable domain of TCR clone 50158 (TRAV12-2, TRAJ13)
CAVKKTGGYQKVTF

SEQ ID NO: 100316 - protein, 16 aa, Homo sapiens
  CDR3 for beta chain variable domain of TCR clone 50158 (TRBV2, TRBJ2-1)
CASSVGGSLSYNEQFF

SEQ ID NO: 100317 - protein, 12 aa, Homo sapiens
  CDR3 for alpha chain variable domain of TCR clone 50159 (TRAV10, TRAJ9)
CGAYTGGFETIF

SEQ ID NO: 100318 - protein, 13 aa, Homo sapiens
  CDR3 for beta chain variable domain of TCR clone 50159 (TRBV9, TRBJ2-1)
CASSPSGGNEQFF

SEQ ID NO: 100319 - protein, 13 aa, Homo sapiens
  CDR3 for alpha chain variable domain of TCR clone 50160 (TRAV3, TRAJ21)
CAVREPDFNKFSF

SEQ ID NO: 100320 - protein, 13 aa, Homo sapiens
  CDR3 for beta chain variable domain of TCR clone 50160 (TRBV9, TRBJ2-1)
CASSPSGGNEQFF

SEQ ID NO: 100321 - protein, 11 aa, Homo sapiens
  CDR3 for alpha chain variable domain of TCR clone 50161 (TRAV21, TRAJ39)
LLVNAGNMLTF

SEQ ID NO: 100322 - protein, 18 aa, Homo sapiens
  CDR3 for beta chain variable domain of TCR clone 50161 (TRBV7-2, TRBJ2-7)
CASSSSGRGLAGGYEQYF

SEQ ID NO: 100323 - protein, 13 aa, Homo sapiens
  CDR3 for alpha chain variable domain of TCR clone 50162 (TRAV23/DV6, TRAJ22)
CAPWGGSARQLTF

SEQ ID NO: 100324 - protein, 14 aa, Homo sapiens
  CDR3 for beta chain variable domain of TCR clone 50162 (TRBV25-1, TRBJ2-1)
CASSPRGPYNEQFF

SEQ ID NO: 100325 - protein, 21 aa, Homo sapiens
  CDR3 for alpha chain variable domain of TCR clone 50163 (TRAV8-4, TRAJ38)
CARPNAGNNHIQNPDPAVYQL

SEQ ID NO: 100326 - protein, 14 aa, Homo sapiens
  CDR3 for beta chain variable domain of TCR clone 50163 (TRBV7-8, TRBJ2-3)
CASSLEAGTDTQYF

SEQ ID NO: 100327 - protein, 11 aa, Homo sapiens
  CDR3 for alpha chain variable domain of TCR clone 50164 (TRAV17, TRAJ9)
CATTGGFKTLF

SEQ ID NO: 100328 - protein, 14 aa, Homo sapiens
  CDR3 for beta chain variable domain of TCR clone 50164 (TRBV7-9, TRBJ2-2)
CASSGLADTGELFF

SEQ ID NO: 100329 - protein, 14 aa, Homo sapiens
  CDR3 for alpha chain variable domain of TCR clone 50165 (TRAV26-1, TRAJ26)
CIVRATFLGQNFVF

SEQ ID NO: 100330 - protein, 16 aa, Homo sapiens
  CDR3 for beta chain variable domain of TCR clone 50165 (TRBV12-4, TRBJ2-7)
CASRSTGTGPFYEQYF

SEQ ID NO: 100331 - protein, 16 aa, Homo sapiens
  CDR3 for alpha chain variable domain of TCR clone 50166 (TRAV4, TRAJ18)
CCVLLIGGSTLGRLYF

SEQ ID NO: 100332 - protein, 12 aa, Homo sapiens
  CDR3 for beta chain variable domain of TCR clone 50166 (TRBV6-3, TRBJ2-7)
CVSSLTPYEQYF

SEQ ID NO: 100333 - protein, 15 aa, Homo sapiens
  CDR3 for alpha chain variable domain of TCR clone 50167 (TRAV17, TRAJ52)
CATEAGGTSDGKLTF

SEQ ID NO: 100334 - protein, 14 aa, Homo sapiens
  CDR3 for beta chain variable domain of TCR clone 50167 (TRBV28, TRBJ1-5)
CASSLGVLVKPQHF

SEQ ID NO: 100335 - protein, 16 aa, Homo sapiens
  CDR3 for alpha chain variable domain of TCR clone 50168 (TRAV35, TRAJ37)
CWAFLRGSSNTGKLTF

SEQ ID NO: 100336 - protein, 13 aa, Homo sapiens
  CDR3 for beta chain variable domain of TCR clone 50168 (TRBV2, TRBJ1-2)
CASSVRGNYGYTF

SEQ ID NO: 100337 - protein, 12 aa, Homo sapiens
  CDR3 for alpha chain variable domain of TCR clone 50169 (TRAV8-3, TRAJ20)
CAVGANDYKLSF

SEQ ID NO: 100338 - protein, 16 aa, Homo sapiens
  CDR3 for beta chain variable domain of TCR clone 50169 (TRBV19, TRBJ2-2)
RASRSPGTGATGEMFF

SEQ ID NO: 100339 - protein, 13 aa, Homo sapiens
  CDR3 for alpha chain variable domain of TCR clone 50170 (TRAV3, TRAJ8)
CAVRFTGFQKLVF

SEQ ID NO: 100340 - protein, 15 aa, Homo sapiens
  CDR3 for beta chain variable domain of TCR clone 50170 (TRBV20-1, TRBJ2-7)
CSARDRVSGMDERYF

SEQ ID NO: 100341 - protein, 12 aa, Homo sapiens
  CDR3 for alpha chain variable domain of TCR clone 50171 (TRAV13-2, TRAJ23)
CAERHRGGKLIF

SEQ ID NO: 100342 - protein, 16 aa, Homo sapiens
  CDR3 for beta chain variable domain of TCR clone 50171 (TRBV20-1, TRBJ1-4)
CSAPGQGLLTSEKLFF

SEQ ID NO: 100343 - protein, 16 aa, Homo sapiens
  CDR3 for alpha chain variable domain of TCR clone 50172 (TRAV3, TRAJ10)
CAVRDMRAGGGNKLTF

SEQ ID NO: 100344 - protein, 13 aa, Homo sapiens
  CDR3 for beta chain variable domain of TCR clone 50172 (TRBV4-2, TRBJ1-1)
CASSQTGNTEAFF

SEQ ID NO: 100345 - protein, 12 aa, Homo sapiens
  CDR3 for alpha chain variable domain of TCR clone 50173 (TRAV21, TRAJ31)
CAVSPARGRLMF

SEQ ID NO: 100346 - protein, 14 aa, Homo sapiens
  CDR3 for beta chain variable domain of TCR clone 50173 (TRBV28, TRBJ2-7)
CASSLLRIFYEQYF

SEQ ID NO: 100347 - protein, 13 aa, Homo sapiens
  CDR3 for alpha chain variable domain of TCR clone 50174 (TRAV12-3, TRAJ35)
CAMAIGFGNVLHC

SEQ ID NO: 100348 - protein, 15 aa, Homo sapiens
  CDR3 for beta chain variable domain of TCR clone 50174 (TRBV20-1, TRBJ2-1)
CSARGSGAYYNEQFF

SEQ ID NO: 100349 - protein, 16 aa, Homo sapiens
  CDR3 for alpha chain variable domain of TCR clone 50175 (TRAV16, TRAJ57)
CAPYLITQGGSEKLVS

SEQ ID NO: 100350 - protein, 17 aa, Homo sapiens
  CDR3 for beta chain variable domain of TCR clone 50175 (TRBV24-1, TRBJ2-4)
CATSDAEARGVRNIQYF

SEQ ID NO: 100351 - protein, 12 aa, Homo sapiens
  CDR3 for alpha chain variable domain of TCR clone 50176 (TRAV1-1, TRAJ8)
CAGGTGFQKLVF

SEQ ID NO: 100352 - protein, 13 aa, Homo sapiens
  CDR3 for beta chain variable domain of TCR clone 50176 (TRBV19, TRBJ1-2)
CAGSQGQVYGHTF

SEQ ID NO: 100353 - protein, 12 aa, Homo sapiens
  CDR3 for alpha chain variable domain of TCR clone 50177 (TRAV9-2, TRAJ36)
CALKKGANNLFF

SEQ ID NO: 100354 - protein, 16 aa, Homo sapiens
  CDR3 for beta chain variable domain of TCR clone 50177 (TRBV12-5, TRBJ2-5)
CASGPRTSGNQETQYF

SEQ ID NO: 100355 - protein, 14 aa, Homo sapiens
  CDR3 for alpha chain variable domain of TCR clone 50178 (TRAV12-2, TRAJ40)
CAVKIPSGTYKYIF

SEQ ID NO: 100356 - protein, 14 aa, Homo sapiens
  CDR3 for beta chain variable domain of TCR clone 50178 (TRBV20-1, TRBJ1-1)
CSAQTRIGGTEAYF

SEQ ID NO: 100357 - protein, 15 aa, Homo sapiens
  CDR3 for alpha chain variable domain of TCR clone 50179 (TRAV4, TRAJ39)
FLVGPNNNAGNMLTF

SEQ ID NO: 100358 - protein, 13 aa, Homo sapiens
  CDR3 for beta chain variable domain of TCR clone 50179 (TRBV11-2, TRBJ2-5)
CASSSTGEETQYF

SEQ ID NO: 100359 - protein, 16 aa, Homo sapiens
  CDR3 for alpha chain variable domain of TCR clone 50180 (TRAV3, TRAJ37)
CAVRGKGSGNTGKLIF

SEQ ID NO: 100360 - protein, 13 aa, Homo sapiens
  CDR3 for beta chain variable domain of TCR clone 50180 (TRBV7-2, TRBJ2-2)
CASSAVRAGELFF

SEQ ID NO: 100361 - protein, 15 aa, Homo sapiens
  CDR3 for alpha chain variable domain of TCR clone 50181 (TRAV21, TRAJ52)
CAVRGGGTSYGKLTF

SEQ ID NO: 100362 - protein, 15 aa, Homo sapiens
  CDR3 for beta chain variable domain of TCR clone 50181 (TRBV18, TRBJ1-5)
CASSPSDRSNQPQHL

SEQ ID NO: 100363 - protein, 12 aa, Homo sapiens
  CDR3 for alpha chain variable domain of TCR clone 50182 (TRAV13-1, TRAJ49)
CAAPNTGDQFYF

SEQ ID NO: 100364 - protein, 17 aa, Homo sapiens
  CDR3 for beta chain variable domain of TCR clone 50182 (TRBV25-1, TRBJ2-7)
CASSDARVVFSSYEQYF

SEQ ID NO: 100365 - protein, 15 aa, Homo sapiens
  CDR3 for alpha chain variable domain of TCR clone 50183 (TRAV12-3, TRAJ8)
CAMSLLNTGFQKLVF

SEQ ID NO: 100366 - protein, 15 aa, Homo sapiens
  CDR3 for beta chain variable domain of TCR clone 50183 (TRBV20-1, TRBJ2-7)
CSARDRVSGMDEQYF

SEQ ID NO: 100367 - protein, 12 aa, Homo sapiens
  CDR3 for alpha chain variable domain of TCR clone 50184 (TRAV12-1, TRAJ40)
CVFYSGTYKYIF

SEQ ID NO: 100368 - protein, 18 aa, Homo sapiens
  CDR3 for beta chain variable domain of TCR clone 50184 (TRBV12-4, TRBJ2-2)
CASSLVAGTRGRTGGLFF

SEQ ID NO: 100369 - protein, 11 aa, Homo sapiens
  CDR3 for alpha chain variable domain of TCR clone 50185 (TRAV2, TRAJ13)
CASRGYQKVTF

SEQ ID NO: 100370 - protein, 15 aa, Homo sapiens
  CDR3 for beta chain variable domain of TCR clone 50185 (TRBV3-1, TRBJ2-7)
CASSQVRQGAYEQYF

SEQ ID NO: 100371 - protein, 17 aa, Homo sapiens
  CDR3 for alpha chain variable domain of TCR clone 50186 (TRAV3, TRAJ6)
CAVRDGPRAGGSYIPTF

SEQ ID NO: 100372 - protein, 15 aa, Homo sapiens
  CDR3 for beta chain variable domain of TCR clone 50186 (TRBV11-2, TRBJ2-1)
CASSLGTSGLNEQFF

SEQ ID NO: 100373 - protein, 12 aa, Homo sapiens
  CDR3 for alpha chain variable domain of TCR clone 50187 (TRAV13-1, TRAJ48)
CAANFGNEKLTF

SEQ ID NO: 100374 - protein, 15 aa, Homo sapiens
  CDR3 for beta chain variable domain of TCR clone 50187 (TRBV20-1, TRBJ2-7)
CSARDRVSGMDEQYF

SEQ ID NO: 100375 - protein, 13 aa, Homo sapiens
  CDR3 for alpha chain variable domain of TCR clone 50188 (TRAV13-1, TRAJ5)
CAASDTGRRALTF

SEQ ID NO: 100376 - protein, 12 aa, Homo sapiens
  CDR3 for beta chain variable domain of TCR clone 50188 (TRBV28, TRBJ2-3)
CASSLYRDTKYF

SEQ ID NO: 100377 - protein, 13 aa, Homo sapiens
  CDR3 for alpha chain variable domain of TCR clone 50189 (TRAV35, TRAJ57)
CSGSQGGSEKLVF

SEQ ID NO: 100378 - protein, 14 aa, Homo sapiens
  CDR3 for beta chain variable domain of TCR clone 50189 (TRBV25-1, TRBJ1-1)
CASTHLGGNTEAFF

SEQ ID NO: 100379 - protein, 15 aa, Homo sapiens
  CDR3 for alpha chain variable domain of TCR clone 50190 (TRAV12-1, TRAJ9)
CVVSFGDTGGFKTIF

SEQ ID NO: 100380 - protein, 19 aa, Homo sapiens
  CDR3 for beta chain variable domain of TCR clone 50190 (TRBV25-1, TRBJ2-2)
CAILVYRVERGRKTGELFF

SEQ ID NO: 100381 - protein, 16 aa, Homo sapiens
  CDR3 for alpha chain variable domain of TCR clone 50191 (TRAV16, TRAJ4)
CALSRMFSGGYNKLFF

SEQ ID NO: 100382 - protein, 16 aa, Homo sapiens
  CDR3 for beta chain variable domain of TCR clone 50191 (TRBV24-1, TRBJ2-3)
CATSDPGTGATDTQYF

SEQ ID NO: 100383 - protein, 12 aa, Homo sapiens
  CDR3 for alpha chain variable domain of TCR clone 50192 (TRAV2, TRAJ9)
CAVGAGGFKTIF

SEQ ID NO: 100384 - protein, 16 aa, Homo sapiens
  CDR3 for beta chain variable domain of TCR clone 50192 (TRBV13, TRBJ2-2)
CASSPRTGDHTGELFF

SEQ ID NO: 100385 - protein, 13 aa, Homo sapiens
  CDR3 for alpha chain variable domain of TCR clone 50193 (TRAV21, TRAJ15)
CAVANQAGTALLF

SEQ ID NO: 100386 - protein, 14 aa, Homo sapiens
  CDR3 for beta chain variable domain of TCR clone 50193 (TRBV27, TRBJ2-2)
CASSLGAATGELFF

SEQ ID NO: 100387 - protein, 14 aa, Homo sapiens
  CDR3 for alpha chain variable domain of TCR clone 50194 (TRAV12-3, TRAJ10)
SHLPLTEGGNKLTF

SEQ ID NO: 100388 - protein, 17 aa, Homo sapiens
  CDR3 for beta chain variable domain of TCR clone 50194 (TRBV20-1, TRBJ2-1)
CSASSSGLAGSYNEQFF

SEQ ID NO: 100389 - protein, 16 aa, Homo sapiens
  CDR3 for alpha chain variable domain of TCR clone 50195 (TRAV30, TRAJ24)
CGTEIVDADSWGRFQF

SEQ ID NO: 100390 - protein, 14 aa, Homo sapiens
  CDR3 for beta chain variable domain of TCR clone 50195 (TRBV28, TRBJ1-1)
CASSLGQGNTEAFF

SEQ ID NO: 100391 - protein, 15 aa, Homo sapiens
  CDR3 for alpha chain variable domain of TCR clone 50196 (TRAV8-3, TRAJ11)
CAVGLLNSGYSTLTF

SEQ ID NO: 100392 - protein, 16 aa, Homo sapiens
  CDR3 for beta chain variable domain of TCR clone 50196 (TRBV7-9, TRBJ1-2)
SASSLGFSSGEDGYTF

SEQ ID NO: 100393 - protein, 15 aa, Homo sapiens
  CDR3 for alpha chain variable domain of TCR clone 50197 (TRAV12-1, TRAJ45)
RVVLSGGGGADGLTF

SEQ ID NO: 100394 - protein, 12 aa, Homo sapiens
  CDR3 for beta chain variable domain of TCR clone 50197 (TRBV12-5, TRBJ2-5)
CASGQGVETQYF

SEQ ID NO: 100395 - protein, 14 aa, Homo sapiens
  CDR3 for alpha chain variable domain of TCR clone 50198 (TRAV12-2, TRAJ40)
CAVRIPSGTYKYIF

SEQ ID NO: 100396 - protein, 14 aa, Homo sapiens
  CDR3 for beta chain variable domain of TCR clone 50198 (TRBV19, TRBJ2-1)
CASPTFVLSGEQFF

SEQ ID NO: 100397 - protein, 13 aa, Homo sapiens
  CDR3 for alpha chain variable domain of TCR clone 50199 (TRAV12-3, TRAJ22)
CALESGSARQLTF

SEQ ID NO: 100398 - protein, 15 aa, Homo sapiens
  CDR3 for beta chain variable domain of TCR clone 50199 (TRBV4-3, TRBJ2-7)
CASSQGGRGIYEQYF

SEQ ID NO: 100399 - protein, 18 aa, Homo sapiens
  CDR3 for alpha chain variable domain of TCR clone 50200 (TRAV26-2, TRAJ54)
CIPRDVEVGIQGAQKLVF

SEQ ID NO: 100400 - protein, 17 aa, Homo sapiens
  CDR3 for beta chain variable domain of TCR clone 50200 (TRBV20-1, TRBJ1-5)
CSASLSPGQGGNQPQHF

SEQ ID NO: 100401 - protein, 14 aa, Homo sapiens
  CDR3 for alpha chain variable domain of TCR clone 50201 (TRAV35, TRAJ22)
CAGLRPGSARQLTF

SEQ ID NO: 100402 - protein, 15 aa, Homo sapiens
  CDR3 for beta chain variable domain of TCR clone 50201 (TRBV12-3, TRBJ2-5)
CASSPPPGLQETQYF

SEQ ID NO: 100403 - protein, 14 aa, Homo sapiens
  CDR3 for alpha chain variable domain of TCR clone 50202 (TRAV13-1, TRAJ40)
CAASMTSGTYKYIF

SEQ ID NO: 100404 - protein, 14 aa, Homo sapiens
  CDR3 for beta chain variable domain of TCR clone 50202 (TRBV7-6, TRBJ2-3)
CASSLGTVTDTQYF

SEQ ID NO: 100405 - protein, 13 aa, Homo sapiens
  CDR3 for alpha chain variable domain of TCR clone 50203 (TRAV2, TRAJ40)
CAVVTSGTYKYIF

SEQ ID NO: 100406 - protein, 14 aa, Homo sapiens
  CDR3 for beta chain variable domain of TCR clone 50203 (TRBV19, TRBJ2-1)
CASPTFVLTGEQFF

SEQ ID NO: 100407 - protein, 17 aa, Homo sapiens
  CDR3 for alpha chain variable domain of TCR clone 50204 (TRAV3, TRAJ6)
CAVRDGPRAGGSYIPTF

SEQ ID NO: 100408 - protein, 20 aa, Homo sapiens
  CDR3 for beta chain variable domain of TCR clone 50204 (TRBV28, TRBJ2-1)
CDSTPIGRSPGLAGGNEQFF

SEQ ID NO: 100409 - protein, 10 aa, Homo sapiens
  CDR3 for alpha chain variable domain of TCR clone 50205 (TRAV13-2, TRAJ20)
CAENICRLQA

SEQ ID NO: 100410 - protein, 14 aa, Homo sapiens
  CDR3 for beta chain variable domain of TCR clone 50205 (TRBV6-1, TRBJ2-1)
CASAGGAIKNEQFF

SEQ ID NO: 100411 - protein, 14 aa, Homo sapiens
  CDR3 for alpha chain variable domain of TCR clone 50206 (TRAV13-2, TRAJ10)
CAETSTGGGNKLTF

SEQ ID NO: 100412 - protein, 16 aa, Homo sapiens
  CDR3 for beta chain variable domain of TCR clone 50206 (TRBV18, TRBJ2-7)
CASSPRSQGISYEQYF

SEQ ID NO: 100413 - protein, 14 aa, Homo sapiens
  CDR3 for alpha chain variable domain of TCR clone 50207 (TRAV38-1, TRAJ29)
CAFITPSGNTTLVF

SEQ ID NO: 100414 - protein, 14 aa, Homo sapiens
  CDR3 for beta chain variable domain of TCR clone 50207 (TRBV18, TRBJ2-7)
CASSPRGGAYEQYF

SEQ ID NO: 100415 - protein, 14 aa, Homo sapiens
  CDR3 for alpha chain variable domain of TCR clone 50208 (TRAV12-2, TRAJ13)
CAVKKTGGYQKVTF

SEQ ID NO: 100416 - protein, 12 aa, Homo sapiens
  CDR3 for beta chain variable domain of TCR clone 50208 (TRBV12-4, TRBJ1-2)
CASSFIWLHPRF

SEQ ID NO: 100417 - protein, 13 aa, Homo sapiens
  CDR3 for alpha chain variable domain of TCR clone 50209 (TRAV3, TRAJ21)
CAVREPDFNKFYF

SEQ ID NO: 100418 - protein, 15 aa, Homo sapiens
  CDR3 for beta chain variable domain of TCR clone 50209 (TRBV3-1, TRBJ2-7)
CASSQAPSGSYEQYF

SEQ ID NO: 100419 - protein, 13 aa, Homo sapiens
  CDR3 for alpha chain variable domain of TCR clone 50210 (TRAV27, TRAJ45)
CRGSGGGADGLTF

SEQ ID NO: 100420 - protein, 11 aa, Homo sapiens
  CDR3 for beta chain variable domain of TCR clone 50210 (TRBV19, TRBJ1-1)
CASSIGSEAFF

SEQ ID NO: 100421 - protein, 14 aa, Homo sapiens
  CDR3 for alpha chain variable domain of TCR clone 50211 (TRAV3, TRAJ9)
CAVRLNTGGFKTLF

SEQ ID NO: 100422 - protein, 15 aa, Homo sapiens
  CDR3 for beta chain variable domain of TCR clone 50211 (TRBV7-2, TRBJ2-1)
CASSLASGRVNEQFF

SEQ ID NO: 100423 - protein, 15 aa, Homo sapiens
  CDR3 for alpha chain variable domain of TCR clone 50212 (TRAV3, TRAJ5)
CAVRDLDTGRRAPTF

SEQ ID NO: 100424 - protein, 13 aa, Homo sapiens
  CDR3 for beta chain variable domain of TCR clone 50212 (TRBV12-4, TRBJ2-7)
CASSPTETHEQYF

SEQ ID NO: 100425 - protein, 12 aa, Homo sapiens
  CDR3 for alpha chain variable domain of TCR clone 50213 (TRAV13-1, TRAJ3)
CAATGVQQCFQD

SEQ ID NO: 100426 - protein, 16 aa, Homo sapiens
  CDR3 for beta chain variable domain of TCR clone 50213 (TRBV7-3, TRBJ2-2)
RASSLKRGTLSGELFF

SEQ ID NO: 100427 - protein, 17 aa, Homo sapiens
  CDR3 for alpha chain variable domain of TCR clone 50214 (TRAV27, TRAJ42)
CAERVTYYGGSQGNLIF

SEQ ID NO: 100428 - protein, 14 aa, Homo sapiens
  CDR3 for beta chain variable domain of TCR clone 50214 (TRBV6-6, TRBJ2-3)
CASRLQREADTQYF

SEQ ID NO: 100429 - protein, 15 aa, Homo sapiens
  CDR3 for alpha chain variable domain of TCR clone 50215 (TRAV3, TRAJ3)
CAVRDRDSSASKIIF

SEQ ID NO: 100430 - protein, 14 aa, Homo sapiens
  CDR3 for beta chain variable domain of TCR clone 50215 (TRBV7-3, TRBJ2-2)
CASSSGGYTGELFF

SEQ ID NO: 100431 - protein, 17 aa, Homo sapiens
  CDR3 for alpha chain variable domain of TCR clone 50216 (TRAV13-1, TRAJ52)
CAAGRNTGGTSYGKLTF

SEQ ID NO: 100432 - protein, 12 aa, Homo sapiens
  CDR3 for beta chain variable domain of TCR clone 50216 (TRBV29-1, TRBJ1-3)
CSTRDSGNTIYF

SEQ ID NO: 100433 - protein, 17 aa, Homo sapiens
  CDR3 for alpha chain variable domain of TCR clone 50217 (TRAV2, TRAJ22)
ILQVREADAAEQRQLTF

SEQ ID NO: 100434 - protein, 16 aa, Homo sapiens
  CDR3 for beta chain variable domain of TCR clone 50217 (TRBV2, TRBJ2-5)
CASSETQGVGEETRYF

SEQ ID NO: 100435 - protein, 13 aa, Homo sapiens
  CDR3 for alpha chain variable domain of TCR clone 50218 (TRAV12-3, TRAJ13)
CAMTSGGYQKVAF

SEQ ID NO: 100436 - protein, 13 aa, Homo sapiens
  CDR3 for beta chain variable domain of TCR clone 50218 (TRBV20-1, TRBJ2-2)
CSALSGGAGELFF

SEQ ID NO: 100437 - protein, 15 aa, Homo sapiens
  CDR3 for alpha chain variable domain of TCR clone 50219 (TRAV34, TRAJ38)
CGADFTPGNNRKLVW

SEQ ID NO: 100438 - protein, 16 aa, Homo sapiens
  CDR3 for beta chain variable domain of TCR clone 50219 (TRBV12-5, TRBJ2-5)
CASGPRTSGNQETQYF

SEQ ID NO: 100439 - protein, 14 aa, Homo sapiens
  CDR3 for alpha chain variable domain of TCR clone 50220 (TRAV9-2, TRAJ39)
CALYIYNAGNMPTF

SEQ ID NO: 100440 - protein, 14 aa, Homo sapiens
  CDR3 for beta chain variable domain of TCR clone 50220 (TRBV6-1, TRBJ1-3)
CASVQGGGGNTIYF

SEQ ID NO: 100441 - protein, 11 aa, Homo sapiens
  CDR3 for alpha chain variable domain of TCR clone 50221 (TRAV1-2, TRAJ20)
CAVANDYKLSF

SEQ ID NO: 100442 - protein, 18 aa, Homo sapiens
  CDR3 for beta chain variable domain of TCR clone 50221 (TRBV20-1, TRBJ2-6)
CSAETTPIHGSGANVLTF

SEQ ID NO: 100443 - protein, 14 aa, Homo sapiens
  CDR3 for alpha chain variable domain of TCR clone 50222 (TRAV1-2, TRAJ8)
CAVREDTGFQKLVF

SEQ ID NO: 100444 - protein, 11 aa, Homo sapiens
  CDR3 for beta chain variable domain of TCR clone 50222 (TRBV10-3, TRBJ2-1)
CAISDRGLQFF

SEQ ID NO: 100445 - protein, 14 aa, Homo sapiens
  CDR3 for alpha chain variable domain of TCR clone 50223 (TRAV1-2, TRAJ16)
CAVNRFSDGQKLLF

SEQ ID NO: 100446 - protein, 16 aa, Homo sapiens
  CDR3 for beta chain variable domain of TCR clone 50223 (TRBV12-4, TRBJ2-1)
CASSTVGQGNGDEQFF

SEQ ID NO: 100447 - protein, 13 aa, Homo sapiens
  CDR3 for alpha chain variable domain of TCR clone 50224 (TRAV13-2, TRAJ40)
FAEFTSGTYKYIF

SEQ ID NO: 100448 - protein, 14 aa, Homo sapiens
  CDR3 for beta chain variable domain of TCR clone 50224 (TRBV10-2, TRBJ1-5)
CASSSTGRNQPQHF

SEQ ID NO: 100449 - protein, 14 aa, Homo sapiens
  CDR3 for alpha chain variable domain of TCR clone 50225 (TRAV26-1, TRAJ34)
RIVRVAYNTDKLIF

SEQ ID NO: 100450 - protein, 15 aa, Homo sapiens
  CDR3 for beta chain variable domain of TCR clone 50225 (TRBV20-1, TRBJ2-7)
CSARVPAAYFYEQYF

SEQ ID NO: 100451 - protein, 10 aa, Homo sapiens
  CDR3 for alpha chain variable domain of TCR clone 50226 (TRAV23/DV6, TRAJ43)
CAAAVAALEQ

SEQ ID NO: 100452 - protein, 16 aa, Homo sapiens
  CDR3 for beta chain variable domain of TCR clone 50226 (TRBV13, TRBJ2-2)
CASSPRTGEHTGELFF

SEQ ID NO: 100453 - protein, 15 aa, Homo sapiens
  CDR3 for alpha chain variable domain of TCR clone 50227 (TRAV17, TRAJ57)
CATGPSQGGSEKLVF

SEQ ID NO: 100454 - protein, 14 aa, Homo sapiens
  CDR3 for beta chain variable domain of TCR clone 50227 (TRBV12-5, TRBJ2-5)
CDSGSRTHQETQYF

SEQ ID NO: 100455 - protein, 13 aa, Homo sapiens
  CDR3 for alpha chain variable domain of TCR clone 50228 (TRAV13-1, TRAJ6)
CAASKGGSYIPTF

SEQ ID NO: 100456 - protein, 14 aa, Homo sapiens
  CDR3 for beta chain variable domain of TCR clone 50228 (TRBV7-2, TRBJ2-1)
CAGSLGVGYNEQFF

SEQ ID NO: 100457 - protein, 16 aa, Homo sapiens
  CDR3 for alpha chain variable domain of TCR clone 50229 (TRAV16, TRAJ42)
CARKMNYGGSQGNPIF

SEQ ID NO: 100458 - protein, 13 aa, Homo sapiens
  CDR3 for beta chain variable domain of TCR clone 50229 (TRBV20-1, TRBJ2-7)
CSASPPSSYEQYF

SEQ ID NO: 100459 - protein, 18 aa, Homo sapiens
  CDR3 for alpha chain variable domain of TCR clone 50230 (TRAV21, TRAJ52)
CAVRPSPAGGTSYGKLTF

SEQ ID NO: 100460 - protein, 16 aa, Homo sapiens
  CDR3 for beta chain variable domain of TCR clone 50230 (TRBV7-3, TRBJ2-1)
CASSLEGYRAYNEQFF

SEQ ID NO: 100461 - protein, 13 aa, Homo sapiens
  CDR3 for alpha chain variable domain of TCR clone 50231 (TRAV12-2, TRAJ10)
CAAPTGGGNKLTF

SEQ ID NO: 100462 - protein, 11 aa, Homo sapiens
  CDR3 for beta chain variable domain of TCR clone 50231 (TRBV6-1, TRBJ2-1)
CASISSNEQFF

SEQ ID NO: 100463 - protein, 17 aa, Homo sapiens
  CDR3 for alpha chain variable domain of TCR clone 50232 (TRAV13-1, TRAJ5)
CSNPSLSRDTGRKALTF

SEQ ID NO: 100464 - protein, 17 aa, Homo sapiens
  CDR3 for beta chain variable domain of TCR clone 50232 (TRBV24-1, TRBJ2-1)
CATSDVSTSGTYNEQFF

SEQ ID NO: 100465 - protein, 13 aa, Homo sapiens
  CDR3 for alpha chain variable domain of TCR clone 50233 (TRAV2, TRAJ15)
CAVASQAGTALIF

SEQ ID NO: 100466 - protein, 17 aa, Homo sapiens
  CDR3 for beta chain variable domain of TCR clone 50233 (TRBV7-3, TRBJ2-3)
CASSLMKRMRGADTQYF

SEQ ID NO: 100467 - protein, 16 aa, Homo sapiens
  CDR3 for alpha chain variable domain of TCR clone 50234 (TRAV12-3, TRAJ53)
CATSPGSGGSNYKLTF

SEQ ID NO: 100468 - protein, 13 aa, Homo sapiens
  CDR3 for beta chain variable domain of TCR clone 50234 (TRBV7-3, TRBJ1-1)
CASSQDWGAEAFF

SEQ ID NO: 100469 - protein, 14 aa, Homo sapiens
  CDR3 for alpha chain variable domain of TCR clone 50235 (TRAV30, TRAJ33)
CGTVAPRSNYQLIW

SEQ ID NO: 100470 - protein, 14 aa, Homo sapiens
  CDR3 for beta chain variable domain of TCR clone 50235 (TRBV11-2, TRBJ2-5)
CASSRTGGIETQYF

SEQ ID NO: 100471 - protein, 15 aa, Homo sapiens
  CDR3 for alpha chain variable domain of TCR clone 50236 (TRAV12-3, TRAJ10)
CASYILTGRGNKLTF

SEQ ID NO: 100472 - protein, 15 aa, Homo sapiens
  CDR3 for beta chain variable domain of TCR clone 50236 (TRBV7-2, TRBJ1-6)
CASSLGPDRGMPLHF

SEQ ID NO: 100473 - protein, 15 aa, Homo sapiens
  CDR3 for alpha chain variable domain of TCR clone 50237 (TRAV3, TRAJ3)
CAVRDRDSSASKIIF

SEQ ID NO: 100474 - protein, 18 aa, Homo sapiens
  CDR3 for beta chain variable domain of TCR clone 50237 (TRBV25-1, TRBJ1-2)
CASSGLRNGQGLIFGYTF

SEQ ID NO: 100475 - protein, 14 aa, Homo sapiens
  CDR3 for alpha chain variable domain of TCR clone 50238 (TRAV16, TRAJ33)
CALSVMDSNYQLIW

SEQ ID NO: 100476 - protein, 12 aa, Homo sapiens
  CDR3 for beta chain variable domain of TCR clone 50238 (TRBV5-1, TRBJ1-2)
CASSQDTYGYTF

SEQ ID NO: 100477 - protein, 12 aa, Homo sapiens
  CDR3 for alpha chain variable domain of TCR clone 50239 (TRAV8-3, TRAJ20)
CAVGANDYKLSF

SEQ ID NO: 100478 - protein, 16 aa, Homo sapiens
  CDR3 for beta chain variable domain of TCR clone 50239 (TRBV19, TRBJ2-2)
FASRSPGTGATGELFF

SEQ ID NO: 100479 - protein, 20 aa, Homo sapiens
  CDR3 for alpha chain variable domain of TCR clone 50240 (TRAV12-2, TRAJ52)
SPVIQPPTSSRSTSYGKLTF

SEQ ID NO: 100480 - protein, 11 aa, Homo sapiens
  CDR3 for beta chain variable domain of TCR clone 50240 (TRBV11-2, TRBJ2-2)
CASSLPGELFF

SEQ ID NO: 100481 - protein, 16 aa, Homo sapiens
  CDR3 for alpha chain variable domain of TCR clone 50241 (TRAV12-3, TRAJ53)
CAMSPGSGGSNYKLTF

SEQ ID NO: 100482 - protein, 16 aa, Homo sapiens
  CDR3 for beta chain variable domain of TCR clone 50241 (TRBV4-2, TRBJ1-1)
CASSQAGFGRNTEAFF

SEQ ID NO: 100483 - protein, 13 aa, Homo sapiens
  CDR3 for alpha chain variable domain of TCR clone 50242 (TRAV21, TRAJ20)
CAVGLRVAYKLSF

SEQ ID NO: 100484 - protein, 13 aa, Homo sapiens
  CDR3 for beta chain variable domain of TCR clone 50242 (TRBV6-1, TRBJ1-1)
CASSRQGNTEAFF

SEQ ID NO: 100485 - protein, 13 aa, Homo sapiens
  CDR3 for alpha chain variable domain of TCR clone 50243 (TRAV21, TRAJ27)
CAALNTNAGKPTF

SEQ ID NO: 100486 - protein, 14 aa, Homo sapiens
  CDR3 for beta chain variable domain of TCR clone 50243 (TRBV27, TRBJ1-1)
CASSLLSGLSEAFF

SEQ ID NO: 100487 - protein, 15 aa, Homo sapiens
  CDR3 for alpha chain variable domain of TCR clone 50244 (TRAV12-2, TRAJ53)
YAVNGGGGSNYKLTF

SEQ ID NO: 100488 - protein, 17 aa, Homo sapiens
  CDR3 for beta chain variable domain of TCR clone 50244 (TRBV7-3, TRBJ2-3)
CASSLMKRMRGADTQYF

SEQ ID NO: 100489 - protein, 13 aa, Homo sapiens
  CDR3 for alpha chain variable domain of TCR clone 50245 (TRAV12-3, TRAJ33)
CAMSVNSSYQLIW

SEQ ID NO: 100490 - protein, 11 aa, Homo sapiens
  CDR3 for beta chain variable domain of TCR clone 50245 (TRBV7-3, TRBJ2-5)
CASSLSETQYF

SEQ ID NO: 100491 - protein, 11 aa, Homo sapiens
  CDR3 for alpha chain variable domain of TCR clone 50246 (TRAV2, TRAJ21)
CAVFNFNKFYF

SEQ ID NO: 100492 - protein, 14 aa, Homo sapiens
  CDR3 for beta chain variable domain of TCR clone 50246 (TRBV15, TRBJ2-3)
CATRSGTSTYTQYF

SEQ ID NO: 100493 - protein, 11 aa, Homo sapiens
  CDR3 for alpha chain variable domain of TCR clone 50247 (TRAV12-2, TRAJ30)
CAVGRDDKIIF

SEQ ID NO: 100494 - protein, 14 aa, Homo sapiens
  CDR3 for beta chain variable domain of TCR clone 50247 (TRBV6-1, TRBJ1-3)
CASVQGGGGNTMYF

SEQ ID NO: 100495 - protein, 13 aa, Homo sapiens
  CDR3 for alpha chain variable domain of TCR clone 50248 (TRAV20, TRAJ37)
CAGCSSNTGKLIF

SEQ ID NO: 100496 - protein, 17 aa, Homo sapiens
  CDR3 for beta chain variable domain of TCR clone 50248 (TRBV28, TRBJ2-5)
CASSTPEGDALQETQYF

SEQ ID NO: 100497 - protein, 13 aa, Homo sapiens
  CDR3 for alpha chain variable domain of TCR clone 50249 (TRAV23/DV6, TRAJ22)
CAPYSGSARQLTF

SEQ ID NO: 100498 - protein, 15 aa, Homo sapiens
  CDR3 for beta chain variable domain of TCR clone 50249 (TRBV11-2, TRBJ1-6)
CAISLDPWAVSPLHF

SEQ ID NO: 100499 - protein, 13 aa, Homo sapiens
  CDR3 for alpha chain variable domain of TCR clone 50250 (TRAV3, TRAJ21)
CAVREPDFNKFYF

SEQ ID NO: 100500 - protein, 16 aa, Homo sapiens
  CDR3 for beta chain variable domain of TCR clone 50250 (TRBV11-2, TRBJ1-2)
CASSLDTGGADYGYTF

SEQ ID NO: 100501 - protein, 16 aa, Homo sapiens
  CDR3 for alpha chain variable domain of TCR clone 50251 (TRAV20, TRAJ10)
CDVLRGLTGGGNKLTF

SEQ ID NO: 100502 - protein, 14 aa, Homo sapiens
  CDR3 for beta chain variable domain of TCR clone 50251 (TRBV19, TRBJ1-5)
CASRAPDSFLSQHF

SEQ ID NO: 100503 - protein, 16 aa, Homo sapiens
  CDR3 for alpha chain variable domain of TCR clone 50252 (TRAV30, TRAJ24)
CGTEIVDADSWGKFPF

SEQ ID NO: 100504 - protein, 16 aa, Homo sapiens
  CDR3 for beta chain variable domain of TCR clone 50252 (TRBV2, TRBJ1-3)
CASSGGAGRSGNTIYF

SEQ ID NO: 100505 - protein, 11 aa, Homo sapiens
  CDR3 for alpha chain variable domain of TCR clone 50253 (TRAV1-1, TRAJ37)
CAVSPQGKLIF

SEQ ID NO: 100506 - protein, 15 aa, Homo sapiens
  CDR3 for beta chain variable domain of TCR clone 50253 (TRBV27, TRBJ1-2)
CASSLSSAVNYGYTF

SEQ ID NO: 100507 - protein, 13 aa, Homo sapiens
  CDR3 for alpha chain variable domain of TCR clone 50254 (TRAV2, TRAJ15)
CAVASQAGTALIL

SEQ ID NO: 100508 - protein, 17 aa, Homo sapiens
  CDR3 for beta chain variable domain of TCR clone 50254 (TRBV20-1, TRBJ2-2)
CSASGSGQGGLTGELFF

SEQ ID NO: 100509 - protein, 18 aa, Homo sapiens
  CDR3 for alpha chain variable domain of TCR clone 50255 (TRAV21, TRAJ52)
CAVRPSPAGGTSYGKLTF

SEQ ID NO: 100510 - protein, 15 aa, Homo sapiens
  CDR3 for beta chain variable domain of TCR clone 50255 (TRBV11-2, TRBJ1-2)
CASSLEGVQRNGYTF

SEQ ID NO: 100511 - protein, 15 aa, Homo sapiens
  CDR3 for alpha chain variable domain of TCR clone 50256 (TRAV17, TRAJ4)
CATGTWSGGYNKLIF

SEQ ID NO: 100512 - protein, 12 aa, Homo sapiens
  CDR3 for beta chain variable domain of TCR clone 50256 (TRBV18, TRBJ1-4)
CASSPSREKLFF

SEQ ID NO: 100513 - protein, 12 aa, Homo sapiens
  CDR3 for alpha chain variable domain of TCR clone 50257 (TRAV2, TRAJ10)
CAPTGGGNKLTL

SEQ ID NO: 100514 - protein, 14 aa, Homo sapiens
  CDR3 for beta chain variable domain of TCR clone 50257 (TRBV7-2, TRBJ2-2)
CASRGQGAAGELFF

SEQ ID NO: 100515 - protein, 11 aa, Homo sapiens
  CDR3 for alpha chain variable domain of TCR clone 50258 (TRAV3, TRAJ21)
CAVGNFNKFYF

SEQ ID NO: 100516 - protein, 16 aa, Homo sapiens
  CDR3 for beta chain variable domain of TCR clone 50258 (TRBV19, TRBJ2-1)
CASGRAGPSSYNEQFF

SEQ ID NO: 100517 - protein, 14 aa, Homo sapiens
  CDR3 for alpha chain variable domain of TCR clone 50259 (TRAV12-2, TRAJ45)
CAVYSGGGADGLTF

SEQ ID NO: 100518 - protein, 14 aa, Homo sapiens
  CDR3 for beta chain variable domain of TCR clone 50259 (TRBV19, TRBJ1-5)
CASGTEVYNQPQHF

SEQ ID NO: 100519 - protein, 13 aa, Homo sapiens
  CDR3 for alpha chain variable domain of TCR clone 50260 (TRAV16, TRAJ27)
CALSGGNAGKSTF

SEQ ID NO: 100520 - protein, 14 aa, Homo sapiens
  CDR3 for beta chain variable domain of TCR clone 50260 (TRBV19, TRBJ2-1)
CASPTFVLSGEQFF

SEQ ID NO: 100521 - protein, 14 aa, Homo sapiens
  CDR3 for alpha chain variable domain of TCR clone 50261 (TRAV5, TRAJ40)
CAESSGSGTYKYIF

SEQ ID NO: 100522 - protein, 14 aa, Homo sapiens
  CDR3 for beta chain variable domain of TCR clone 50261 (TRBV27, TRBJ2-5)
CASSSLKGWETQYL

SEQ ID NO: 100523 - protein, 16 aa, Homo sapiens
  CDR3 for alpha chain variable domain of TCR clone 50262 (TRAV35, TRAJ28)
CAGQKYSGAGSYQLTF

SEQ ID NO: 100524 - protein, 16 aa, Homo sapiens
  CDR3 for beta chain variable domain of TCR clone 50262 (TRBV7-3, TRBJ2-2)
CASSLKRGTLSGEPFF

SEQ ID NO: 100525 - protein, 12 aa, Homo sapiens
  CDR3 for alpha chain variable domain of TCR clone 50263 (TRAV8-6, TRAJ4)
CAVSDHPNKLIF

SEQ ID NO: 100526 - protein, 12 aa, Homo sapiens
  CDR3 for beta chain variable domain of TCR clone 50263 (TRBV7-9, TRBJ1-5)
CASSPQGQPQHF

SEQ ID NO: 100527 - protein, 14 aa, Homo sapiens
  CDR3 for alpha chain variable domain of TCR clone 50264 (TRAV12-3, TRAJ13)
CAMRNSGGHQKVTF

SEQ ID NO: 100528 - protein, 14 aa, Homo sapiens
  CDR3 for beta chain variable domain of TCR clone 50264 (TRBV4-1, TRBJ1-6)
CASSPGSDSSPLHF

SEQ ID NO: 100529 - protein, 15 aa, Homo sapiens
  CDR3 for alpha chain variable domain of TCR clone 50265 (TRAV8-2, TRAJ16)
CVVSDGFSDGQKLLF

SEQ ID NO: 100530 - protein, 14 aa, Homo sapiens
  CDR3 for beta chain variable domain of TCR clone 50265 (TRBV19, TRBJ2-1)
CASPTFVLSGEQFF

SEQ ID NO: 100531 - protein, 16 aa, Homo sapiens
  CDR3 for alpha chain variable domain of TCR clone 50266 (TRAV3, TRAJ37)
CAVRVRGSGNTGKLIL

SEQ ID NO: 100532 - protein, 13 aa, Homo sapiens
  CDR3 for beta chain variable domain of TCR clone 50266 (TRBV14, TRBJ2-1)
CASSQDRRNEQFF

SEQ ID NO: 100533 - protein, 16 aa, Homo sapiens
  CDR3 for alpha chain variable domain of TCR clone 50267 (TRAV14/DV4, TRAJ15)
CAMREGPAQAGTALIF

SEQ ID NO: 100534 - protein, 12 aa, Homo sapiens
  CDR3 for beta chain variable domain of TCR clone 50267 (TRBV28, TRBJ2-6)
CAIQAGANVLTL

SEQ ID NO: 100535 - protein, 14 aa, Homo sapiens
  CDR3 for alpha chain variable domain of TCR clone 50268 (TRAV36/DV7, TRAJ57)
CAVGFPGGSEKLDF

SEQ ID NO: 100536 - protein, 12 aa, Homo sapiens
  CDR3 for beta chain variable domain of TCR clone 50268 (TRBV19, TRBJ2-7)
CASTSGTYEQYF

SEQ ID NO: 100537 - protein, 12 aa, Homo sapiens
  CDR3 for alpha chain variable domain of TCR clone 50269 (TRAV16, TRAJ9)
CALRAGGFKTIV

SEQ ID NO: 100538 - protein, 13 aa, Homo sapiens
  CDR3 for beta chain variable domain of TCR clone 50269 (TRBV4-3, TRBJ1-1)
CASSQVEGSMAFF

SEQ ID NO: 100539 - protein, 12 aa, Homo sapiens
  CDR3 for alpha chain variable domain of TCR clone 50270 (TRAV12-3, TRAJ17)
CATTLTGNKLTF

SEQ ID NO: 100540 - protein, 12 aa, Homo sapiens
  CDR3 for beta chain variable domain of TCR clone 50270 (TRBV2, TRBJ2-1)
CAYGPPGNEQFF

SEQ ID NO: 100541 - protein, 14 aa, Homo sapiens
  CDR3 for alpha chain variable domain of TCR clone 50271 (TRAV13-1, TRAJ35)
CAASKGGFGNVLHC

SEQ ID NO: 100542 - protein, 17 aa, Homo sapiens
  CDR3 for beta chain variable domain of TCR clone 50271 (TRBV7-3, TRBJ2-3)
CASSLMKRMRGADTQYF

SEQ ID NO: 100543 - protein, 16 aa, Homo sapiens
  CDR3 for alpha chain variable domain of TCR clone 50272 (TRAV3, TRAJ23)
CAVKIGIYNQGGKPIF

SEQ ID NO: 100544 - protein, 17 aa, Homo sapiens
  CDR3 for beta chain variable domain of TCR clone 50272 (TRBV10-3, TRBJ2-6)
CAISESTAPSGANVLTF

SEQ ID NO: 100545 - protein, 12 aa, Homo sapiens
  CDR3 for alpha chain variable domain of TCR clone 50273 (TRAV26-1, TRAJ48)
FIVSGGNEKLTF

SEQ ID NO: 100546 - protein, 13 aa, Homo sapiens
  CDR3 for beta chain variable domain of TCR clone 50273 (TRBV18, TRBJ2-7)
CASFRDSAYEQYF

SEQ ID NO: 100547 - protein, 15 aa, Homo sapiens
  CDR3 for alpha chain variable domain of TCR clone 50274 (TRAV26-2, TRAJ26)
CILRDFDNYGQNFVF

SEQ ID NO: 100548 - protein, 14 aa, Homo sapiens
  CDR3 for beta chain variable domain of TCR clone 50274 (TRBV29-1, TRBJ2-5)
CSCWTPYAGETQYF

SEQ ID NO: 100549 - protein, 17 aa, Homo sapiens
  CDR3 for alpha chain variable domain of TCR clone 50275 (TRAV17, TRAJ52)
CATDRNAGGTSYGKLTF

SEQ ID NO: 100550 - protein, 15 aa, Homo sapiens
  CDR3 for beta chain variable domain of TCR clone 50275 (TRBV28, TRBJ2-7)
CASSPGGRGFYEQYF

SEQ ID NO: 100551 - protein, 12 aa, Homo sapiens
  CDR3 for alpha chain variable domain of TCR clone 50276 (TRAV27, TRAJ20)
CAGASNDYKLSF

SEQ ID NO: 100552 - protein, 16 aa, Homo sapiens
  CDR3 for beta chain variable domain of TCR clone 50276 (TRBV20-1, TRBJ1-4)
CSAPGQGLLTNEKLFF

SEQ ID NO: 100553 - protein, 14 aa, Homo sapiens
  CDR3 for alpha chain variable domain of TCR clone 50277 (TRAV1-2, TRAJ16)
CAVNRFSDGQKLLF

SEQ ID NO: 100554 - protein, 11 aa, Homo sapiens
  CDR3 for beta chain variable domain of TCR clone 50277 (TRBV7-8, TRBJ2-7)
CASSLSREQYF

SEQ ID NO: 100555 - protein, 14 aa, Homo sapiens
  CDR3 for alpha chain variable domain of TCR clone 50278 (TRAV13-1, TRAJ13)
CAASRVGCYQKVTF

SEQ ID NO: 100556 - protein, 17 aa, Homo sapiens
  CDR3 for beta chain variable domain of TCR clone 50278 (TRBV15, TRBJ1-5)
CATSRAPPGTRNQPQHF

SEQ ID NO: 100557 - protein, 14 aa, Homo sapiens
  CDR3 for alpha chain variable domain of TCR clone 50279 (TRAV8-3, TRAJ30)
CAVGDMNRDDKIIS

SEQ ID NO: 100558 - protein, 17 aa, Homo sapiens
  CDR3 for beta chain variable domain of TCR clone 50279 (TRBV19, TRBJ2-2)
CASSRNPGGFGTGELFF

SEQ ID NO: 100559 - protein, 12 aa, Homo sapiens
  CDR3 for alpha chain variable domain of TCR clone 50280 (TRAV8-4, TRAJ37)
CAVRSNTGKLIF

SEQ ID NO: 100560 - protein, 12 aa, Homo sapiens
  CDR3 for beta chain variable domain of TCR clone 50280 (TRBV29-1, TRBJ2-3)
CSVTGGADTQYF

SEQ ID NO: 100561 - protein, 13 aa, Homo sapiens
  CDR3 for alpha chain variable domain of TCR clone 50281 (TRAV36/DV7, TRAJ37)
CAVFSSNTGELIF

SEQ ID NO: 100562 - protein, 12 aa, Homo sapiens
  CDR3 for beta chain variable domain of TCR clone 50281 (TRBV11-2, TRBJ2-2)
CASSLGGGELFF

SEQ ID NO: 100563 - protein, 15 aa, Homo sapiens
  CDR3 for alpha chain variable domain of TCR clone 50282 (TRAV26-1, TRAJ15)
CIVGAANQAGTALIF

SEQ ID NO: 100564 - protein, 15 aa, Homo sapiens
  CDR3 for beta chain variable domain of TCR clone 50282 (TRBV20-1, TRBJ1-1)
CSARSAATSNTEAFF

SEQ ID NO: 100565 - protein, 13 aa, Homo sapiens
  CDR3 for alpha chain variable domain of TCR clone 50283 (TRAV8-3, TRAJ36)
CAVGATGANNLFF

SEQ ID NO: 100566 - protein, 14 aa, Homo sapiens
  CDR3 for beta chain variable domain of TCR clone 50283 (TRBV6-1, TRBJ2-6)
CASQQGAGANVLTF

SEQ ID NO: 100567 - protein, 12 aa, Homo sapiens
  CDR3 for alpha chain variable domain of TCR clone 50284 (TRAV13-2, TRAJ8)
CAPWLGFQKLVF

SEQ ID NO: 100568 - protein, 16 aa, Homo sapiens
  CDR3 for beta chain variable domain of TCR clone 50284 (TRBV20-1, TRBJ1-4)
CSAPGQGLLTNEKLLF

SEQ ID NO: 100569 - protein, 13 aa, Homo sapiens
  CDR3 for alpha chain variable domain of TCR clone 50285 (TRAV23/DV6, TRAJ15)
CAALPAGRHCSDL

SEQ ID NO: 100570 - protein, 14 aa, Homo sapiens
  CDR3 for beta chain variable domain of TCR clone 50285 (TRBV7-9, TRBJ1-2)
CASSRQGANYGYTF

SEQ ID NO: 100571 - protein, 13 aa, Homo sapiens
  CDR3 for alpha chain variable domain of TCR clone 50286 (TRAV17, TRAJ9)
CATDYTGGFKTIF

SEQ ID NO: 100572 - protein, 16 aa, Homo sapiens
  CDR3 for beta chain variable domain of TCR clone 50286 (TRBV2, TRBJ1-4)
CASNLLQGATNEKLFF

SEQ ID NO: 100573 - protein, 14 aa, Homo sapiens
  CDR3 for alpha chain variable domain of TCR clone 50287 (TRAV8-4, TRAJ29)
CAVSAVGGNTPLVF

SEQ ID NO: 100574 - protein, 13 aa, Homo sapiens
  CDR3 for beta chain variable domain of TCR clone 50287 (TRBV12-4, TRBJ2-7)
CASSFQGRYEQYF

SEQ ID NO: 100575 - protein, 15 aa, Homo sapiens
  CDR3 for alpha chain variable domain of TCR clone 50288 (TRAV12-3, TRAJ27)
CAMRAYNTNADKSTF

SEQ ID NO: 100576 - protein, 13 aa, Homo sapiens
  CDR3 for beta chain variable domain of TCR clone 50288 (TRBV11-2, TRBJ2-5)
CASSRGPSETQYF

SEQ ID NO: 100577 - protein, 14 aa, Homo sapiens
  CDR3 for alpha chain variable domain of TCR clone 50289 (TRAV13-1, TRAJ44)
CAAKATGTASKLTF

SEQ ID NO: 100578 - protein, 17 aa, Homo sapiens
  CDR3 for beta chain variable domain of TCR clone 50289 (TRBV7-3, TRBJ2-3)
CASSLMKRMRGADTQYV

SEQ ID NO: 100579 - protein, 15 aa, Homo sapiens
  CDR3 for alpha chain variable domain of TCR clone 50290 (TRAV38-2/DV8, TRAJ42)
CAYRSGRGSQGNLIF

SEQ ID NO: 100580 - protein, 15 aa, Homo sapiens
  CDR3 for beta chain variable domain of TCR clone 50290 (TRBV29-1, TRBJ2-5)
CSADVGLAVGGTQYF

SEQ ID NO: 100581 - protein, 14 aa, Homo sapiens
  CDR3 for alpha chain variable domain of TCR clone 50291 (TRAV12-3, TRAJ10)
SHLPLTGGGNKLTF

SEQ ID NO: 100582 - protein, 12 aa, Homo sapiens
  CDR3 for beta chain variable domain of TCR clone 50291 (TRBV7-9, TRBJ1-4)
CASSTDREKLFF

SEQ ID NO: 100583 - protein, 15 aa, Homo sapiens
  CDR3 for alpha chain variable domain of TCR clone 50292 (TRAV17, TRAJ57)
FATGPSQGGSEKLVF

SEQ ID NO: 100584 - protein, 14 aa, Homo sapiens
  CDR3 for beta chain variable domain of TCR clone 50292 (TRBV12-5, TRBJ2-5)
CASGSRTHQETQYF

SEQ ID NO: 100585 - protein, 16 aa, Homo sapiens
  CDR3 for alpha chain variable domain of TCR clone 50293 (TRAV26-1, TRAJ32)
CIVRTDYGGATNKLIF

SEQ ID NO: 100586 - protein, 14 aa, Homo sapiens
  CDR3 for beta chain variable domain of TCR clone 50293 (TRBV27, TRBJ1-1)
CASSLLSGLSEAFF

SEQ ID NO: 100587 - protein, 14 aa, Homo sapiens
  CDR3 for alpha chain variable domain of TCR clone 50294 (TRAV20, TRAJ56)
CAVQFGGANSKLTF

SEQ ID NO: 100588 - protein, 13 aa, Homo sapiens
  CDR3 for beta chain variable domain of TCR clone 50294 (TRBV7-3, TRBJ1-1)
CASSQDWGAEAFF

SEQ ID NO: 100589 - protein, 14 aa, Homo sapiens
  CDR3 for alpha chain variable domain of TCR clone 50295 (TRAV1-2, TRAJ8)
CAVREDTGFQKLVF

SEQ ID NO: 100590 - protein, 11 aa, Homo sapiens
  CDR3 for beta chain variable domain of TCR clone 50295 (TRBV4-1, TRBJ2-2)
CASEHTGELFF

SEQ ID NO: 100591 - protein, 12 aa, Homo sapiens
  CDR3 for alpha chain variable domain of TCR clone 50296 (TRAV13-1, TRAJ49)
CAAPNTGNQFYF

SEQ ID NO: 100592 - protein, 17 aa, Homo sapiens
  CDR3 for beta chain variable domain of TCR clone 50296 (TRBV25-1, TRBJ2-7)
CACSDARVVFSSYEQYF

SEQ ID NO: 100593 - protein, 14 aa, Homo sapiens
  CDR3 for alpha chain variable domain of TCR clone 50297 (TRAV12-3, TRAJ29)
CAMILLSGNTPLVF

SEQ ID NO: 100594 - protein, 16 aa, Homo sapiens
  CDR3 for beta chain variable domain of TCR clone 50297 (TRBV28, TRBJ2-7)
CASSSRTSGRGYEQYF

SEQ ID NO: 100595 - protein, 13 aa, Homo sapiens
  CDR3 for alpha chain variable domain of TCR clone 50298 (TRAV20, TRAJ11)
CAVQARGYSTLTF

SEQ ID NO: 100596 - protein, 17 aa, Homo sapiens
  CDR3 for beta chain variable domain of TCR clone 50298 (TRBV7-9, TRBJ2-1)
CASSLVASYPSYNEQFF

SEQ ID NO: 100597 - protein, 15 aa, Homo sapiens
  CDR3 for alpha chain variable domain of TCR clone 50299 (TRAV12-3, TRAJ6)
CAMSATSGGSYIPTF

SEQ ID NO: 100598 - protein, 13 aa, Homo sapiens
  CDR3 for beta chain variable domain of TCR clone 50299 (TRBV3-1, TRBJ1-1)
CASSPGVITEAFF

SEQ ID NO: 100599 - protein, 12 aa, Homo sapiens
  CDR3 for alpha chain variable domain of TCR clone 50300 (TRAV21, TRAJ29)
CAVTSGNTPLVF

SEQ ID NO: 100600 - protein, 15 aa, Homo sapiens
  CDR3 for beta chain variable domain of TCR clone 50300 (TRBV12-4, TRBJ1-2)
CASRLGVAGDYGYTF

SEQ ID NO: 100601 - protein, 11 aa, Homo sapiens
  CDR3 for alpha chain variable domain of TCR clone 50301 (TRAV35, TRAJ34)
CWARNTDKLIF

SEQ ID NO: 100602 - protein, 13 aa, Homo sapiens
  CDR3 for beta chain variable domain of TCR clone 50301 (TRBV19, TRBJ2-7)
CASSSDRTYEQYF

SEQ ID NO: 100603 - protein, 14 aa, Homo sapiens
  CDR3 for alpha chain variable domain of TCR clone 50302 (TRAV13-1, TRAJ44)
CAAKATGTASKLTF

SEQ ID NO: 100604 - protein, 17 aa, Homo sapiens
  CDR3 for beta chain variable domain of TCR clone 50302 (TRBV7-3, TRBJ2-3)
FASSLMKRMRGADTQYF

SEQ ID NO: 100605 - protein, 13 aa, Homo sapiens
  CDR3 for alpha chain variable domain of TCR clone 50303 (TRAV8-6, TRAJ49)
CAVIPNTGNQFYF

SEQ ID NO: 100606 - protein, 14 aa, Homo sapiens
  CDR3 for beta chain variable domain of TCR clone 50303 (TRBV5-1, TRBJ2-7)
CASSRGESLYEQYF

SEQ ID NO: 100607 - protein, 13 aa, Homo sapiens
  CDR3 for alpha chain variable domain of TCR clone 50304 (TRAV12-3, TRAJ33)
CAMSVNSNYQLIW

SEQ ID NO: 100608 - protein, 13 aa, Homo sapiens
  CDR3 for beta chain variable domain of TCR clone 50304 (TRBV7-2, TRBJ2-2)
CASNLAVTGELFF

SEQ ID NO: 100609 - protein, 15 aa, Homo sapiens
  CDR3 for alpha chain variable domain of TCR clone 50305 (TRAV26-1, TRAJ22)
CIVRVSFWFCKATDL

SEQ ID NO: 100610 - protein, 15 aa, Homo sapiens
  CDR3 for beta chain variable domain of TCR clone 50305 (TRBV10-2, TRBJ2-6)
CASSEQGTGANVLTF

SEQ ID NO: 100611 - protein, 17 aa, Homo sapiens
  CDR3 for alpha chain variable domain of TCR clone 50306 (TRAV3, TRAJ6)
CAVRDGPRAGGSYIPTF

SEQ ID NO: 100612 - protein, 18 aa, Homo sapiens
  CDR3 for beta chain variable domain of TCR clone 50306 (TRBV7-9, TRBJ2-7)
CASRLTTSGSRTWYEQYF

SEQ ID NO: 100613 - protein, 21 aa, Homo sapiens
  CDR3 for alpha chain variable domain of TCR clone 50307 (TRAV1-1, TRAJ6)
CLLLLRCERLERTGGSYIPTF

SEQ ID NO: 100614 - protein, 15 aa, Homo sapiens
  CDR3 for beta chain variable domain of TCR clone 50307 (TRBV10-2, TRBJ2-7)
CASGASGATSSTSGR

SEQ ID NO: 100615 - protein, 11 aa, Homo sapiens
  CDR3 for alpha chain variable domain of TCR clone 50308 (TRAV2, TRAJ13)
CASVGYQKVTF

SEQ ID NO: 100616 - protein, 16 aa, Homo sapiens
  CDR3 for beta chain variable domain of TCR clone 50308 (TRBV19, TRBJ2-1)
CASSMGGGSSYNEQFF

SEQ ID NO: 100617 - protein, 11 aa, Homo sapiens
  CDR3 for alpha chain variable domain of TCR clone 50309 (TRAV27, TRAJ47)
CAGAYGNKLVF

SEQ ID NO: 100618 - protein, 15 aa, Homo sapiens
  CDR3 for beta chain variable domain of TCR clone 50309 (TRBV9, TRBJ2-7)
CASGPHEQGSYEQYF

SEQ ID NO: 100619 - protein, 16 aa, Homo sapiens
  CDR3 for alpha chain variable domain of TCR clone 50310 (TRAV27, TRAJ52)
CAGAPAGVTSYGKLTF

SEQ ID NO: 100620 - protein, 12 aa, Homo sapiens
  CDR3 for beta chain variable domain of TCR clone 50310 (TRBV27, TRBJ2-1)
CASRGFYNEQFF

SEQ ID NO: 100621 - protein, 13 aa, Homo sapiens
  CDR3 for alpha chain variable domain of TCR clone 50311 (TRAV1-2, TRAJ9)
CAVLNTGGFKTIF

SEQ ID NO: 100622 - protein, 12 aa, Homo sapiens
  CDR3 for beta chain variable domain of TCR clone 50311 (TRBV11-2, TRBJ2-2)
CASSLGGGELFF

SEQ ID NO: 100623 - protein, 14 aa, Homo sapiens
  CDR3 for alpha chain variable domain of TCR clone 50312 (TRAV8-2, TRAJ4)
CVVSPSGGYNKLIF

SEQ ID NO: 100624 - protein, 15 aa, Homo sapiens
  CDR3 for beta chain variable domain of TCR clone 50312 (TRBV4-1, TRBJ1-4)
CASSNTGGTNEKLFF

SEQ ID NO: 100625 - protein, 16 aa, Homo sapiens
  CDR3 for alpha chain variable domain of TCR clone 50313 (TRAV1-2, TRAJ10)
CAVREVLTGGGNKLTF

SEQ ID NO: 100626 - protein, 12 aa, Homo sapiens
  CDR3 for beta chain variable domain of TCR clone 50313 (TRBV7-8, TRBJ2-7)
CASSLGDREQYF

SEQ ID NO: 100627 - protein, 13 aa, Homo sapiens
  CDR3 for alpha chain variable domain of TCR clone 50314 (TRAV8-3, TRAJ36)
CAVGATGANNLFF

SEQ ID NO: 100628 - protein, 15 aa, Homo sapiens
  CDR3 for beta chain variable domain of TCR clone 50314 (TRBV27, TRBJ2-1)
CASSNGGGSSNEQFF

SEQ ID NO: 100629 - protein, 17 aa, Homo sapiens
  CDR3 for alpha chain variable domain of TCR clone 50315 (TRAV21, TRAJ52)
CAVGTNAGGTSYGKLTF

SEQ ID NO: 100630 - protein, 14 aa, Homo sapiens
  CDR3 for beta chain variable domain of TCR clone 50315 (TRBV7-2, TRBJ2-7)
CASRSQGAAYEQYF

SEQ ID NO: 100631 - protein, 14 aa, Homo sapiens
  CDR3 for alpha chain variable domain of TCR clone 50316 (TRAV17, TRAJ57)
CATDPQGGSEKLVF

SEQ ID NO: 100632 - protein, 13 aa, Homo sapiens
  CDR3 for beta chain variable domain of TCR clone 50316 (TRBV19, TRBJ1-2)
CASSVPGQDGYTF

SEQ ID NO: 100633 - protein, 15 aa, Homo sapiens
  CDR3 for alpha chain variable domain of TCR clone 50317 (TRAV8-3, TRAJ45)
CASSYSGGGADGLTF

SEQ ID NO: 100634 - protein, 15 aa, Homo sapiens
  CDR3 for beta chain variable domain of TCR clone 50317 (TRBV28, TRBJ2-1)
CASSIIAGGRSEQFF

SEQ ID NO: 100635 - protein, 23 aa, Homo sapiens
  CDR3 for alpha chain variable domain of TCR clone 50318 (TRAV12-2, TRAJ36)
SLLIRDSQPSDSATLERANNLFF

SEQ ID NO: 100636 - protein, 13 aa, Homo sapiens
  CDR3 for beta chain variable domain of TCR clone 50318 (TRBV6-4, TRBJ1-5)
CASSADLNQPQHF

SEQ ID NO: 100637 - protein, 14 aa, Homo sapiens
  CDR3 for alpha chain variable domain of TCR clone 50319 (TRAV12-1, TRAJ17)
CVVNYKDAGNKLTF

SEQ ID NO: 100638 - protein, 14 aa, Homo sapiens
  CDR3 for beta chain variable domain of TCR clone 50319 (TRBV7-2, TRBJ2-7)
CASRSQGAAYEQYF

SEQ ID NO: 100639 - protein, 17 aa, Homo sapiens
  CDR3 for alpha chain variable domain of TCR clone 50320 (TRAV26-1, TRAJ10)
CIVSFRGLTGGGNKLAF

SEQ ID NO: 100640 - protein, 13 aa, Homo sapiens
  CDR3 for beta chain variable domain of TCR clone 50320 (TRBV20-1, TRBJ2-3)
CSASRQAADTQYF

SEQ ID NO: 100641 - protein, 16 aa, Homo sapiens
  CDR3 for alpha chain variable domain of TCR clone 50321 (TRAV3, TRAJ37)
CAVRGKGSGNTGKLIF

SEQ ID NO: 100642 - protein, 12 aa, Homo sapiens
  CDR3 for beta chain variable domain of TCR clone 50321 (TRBV7-9, TRBJ2-7)
CASSIKREEQYF

SEQ ID NO: 100643 - protein, 13 aa, Homo sapiens
  CDR3 for alpha chain variable domain of TCR clone 50322 (TRAV12-2, TRAJ50)
CAVIVTSYDKVIF

SEQ ID NO: 100644 - protein, 14 aa, Homo sapiens
  CDR3 for beta chain variable domain of TCR clone 50322 (TRBV2, TRBJ2-1)
CASSDRAYYNEQFF

SEQ ID NO: 100645 - protein, 14 aa, Homo sapiens
  CDR3 for alpha chain variable domain of TCR clone 50323 (TRAV8-4, TRAJ9)
CAVTLNTGGFKTIF

SEQ ID NO: 100646 - protein, 15 aa, Homo sapiens
  CDR3 for beta chain variable domain of TCR clone 50323 (TRBV7-9, TRBJ2-2)
CASSPETGAGGELFF

SEQ ID NO: 100647 - protein, 14 aa, Homo sapiens
  CDR3 for alpha chain variable domain of TCR clone 50324 (TRAV16, TRAJ42)
CALLAGGSQGSLIF

SEQ ID NO: 100648 - protein, 13 aa, Homo sapiens
  CDR3 for beta chain variable domain of TCR clone 50324 (TRBV7-9, TRBJ1-2)
CASSLKQNYGYTF

SEQ ID NO: 100649 - protein, 15 aa, Homo sapiens
  CDR3 for alpha chain variable domain of TCR clone 50325 (TRAV27, TRAJ33)
CAGADIMDSNYQLIR

SEQ ID NO: 100650 - protein, 13 aa, Homo sapiens
  CDR3 for beta chain variable domain of TCR clone 50325 (TRBV28, TRBJ1-2)
CASSLQGRGGYTF

SEQ ID NO: 100651 - protein, 19 aa, Homo sapiens
  CDR3 for alpha chain variable domain of TCR clone 50326 (TRAV26-1, TRAJ52)
CIVGAHRNAGGTSYGKLTF

SEQ ID NO: 100652 - protein, 15 aa, Homo sapiens
  CDR3 for beta chain variable domain of TCR clone 50326 (TRBV29-1, TRBJ2-1)
CSGRDRKSSYNEQFF

SEQ ID NO: 100653 - protein, 19 aa, Homo sapiens
  CDR3 for alpha chain variable domain of TCR clone 50327 (TRAV1-2, TRAJ26)
CLLPLCCERPDNHGQNFVF

SEQ ID NO: 100654 - protein, 17 aa, Homo sapiens
  CDR3 for beta chain variable domain of TCR clone 50327 (TRBV28, TRBJ2-5)
CASSRQGGLAGAETQYF

SEQ ID NO: 100655 - protein, 16 aa, Homo sapiens
  CDR3 for alpha chain variable domain of TCR clone 50328 (TRAV27, TRAJ52)
CAGAPAGGTSHGKLTF

SEQ ID NO: 100656 - protein, 12 aa, Homo sapiens
  CDR3 for beta chain variable domain of TCR clone 50328 (TRBV27, TRBJ2-1)
CASRGFYNEQFF

SEQ ID NO: 100657 - protein, 12 aa, Homo sapiens
  CDR3 for alpha chain variable domain of TCR clone 50329 (TRAV12-1, TRAJ34)
CVVAGATDKLIL

SEQ ID NO: 100658 - protein, 12 aa, Homo sapiens
  CDR3 for beta chain variable domain of TCR clone 50329 (TRBV7-9, TRBJ1-1)
CASSLVRGEAFF

SEQ ID NO: 100659 - protein, 11 aa, Homo sapiens
  CDR3 for alpha chain variable domain of TCR clone 50330 (TRAV35, TRAJ34)
CWARNTDMLIF

SEQ ID NO: 100660 - protein, 14 aa, Homo sapiens
  CDR3 for beta chain variable domain of TCR clone 50330 (TRBV5-1, TRBJ2-7)
CASSRGESLYEQYF

SEQ ID NO: 100661 - protein, 12 aa, Homo sapiens
  CDR3 for alpha chain variable domain of TCR clone 50331 (TRAV17, TRAJ20)
CATDSNDYKPSF

SEQ ID NO: 100662 - protein, 17 aa, Homo sapiens
  CDR3 for beta chain variable domain of TCR clone 50331 (TRBV5-1, TRBJ2-2)
CASSLAGLSGGTGELFF

SEQ ID NO: 100663 - protein, 14 aa, Homo sapiens
  CDR3 for alpha chain variable domain of TCR clone 50332 (TRAV26-1, TRAJ38)
CIADNAGNNSKLIW

SEQ ID NO: 100664 - protein, 13 aa, Homo sapiens
  CDR3 for beta chain variable domain of TCR clone 50332 (TRBV7-9, TRBJ1-2)
CASSLKQNYGYTF

SEQ ID NO: 100665 - protein, 16 aa, Homo sapiens
  CDR3 for alpha chain variable domain of TCR clone 50333 (TRAV3, TRAJ10)
CAVRDMRAGGGNKLTF

SEQ ID NO: 100666 - protein, 20 aa, Homo sapiens
  CDR3 for beta chain variable domain of TCR clone 50333 (TRBV11-3, TRBJ2-7)
CASSQRTGGSLRAVLRAGHQ

SEQ ID NO: 100667 - protein, 15 aa, Homo sapiens
  CDR3 for alpha chain variable domain of TCR clone 50334 (TRAV35, TRAJ38)
CAGFSNAGNNRKLIW

SEQ ID NO: 100668 - protein, 17 aa, Homo sapiens
  CDR3 for beta chain variable domain of TCR clone 50334 (TRBV18, TRBJ2-1)
CASSKGLSGGADNEQFF

SEQ ID NO: 100669 - protein, 12 aa, Homo sapiens
  CDR3 for alpha chain variable domain of TCR clone 50335 (TRAV3, TRAJ43)
CAVRDPNNDMLF

SEQ ID NO: 100670 - protein, 15 aa, Homo sapiens
  CDR3 for beta chain variable domain of TCR clone 50335 (TRBV27, TRBJ1-5)
CASSLGTGFDQPQHF

SEQ ID NO: 100671 - protein, 13 aa, Homo sapiens
  CDR3 for alpha chain variable domain of TCR clone 50336 (TRAV13-2, TRAJ48)
CAEMDFGNEKLTF

SEQ ID NO: 100672 - protein, 14 aa, Homo sapiens
  CDR3 for beta chain variable domain of TCR clone 50336 (TRBV7-2, TRBJ2-7)
CASSPKTSFYEQYF

SEQ ID NO: 100673 - protein, 11 aa, Homo sapiens
  CDR3 for alpha chain variable domain of TCR clone 50337 (TRAV1-2, TRAJ20)
CTVANDYKLSF

SEQ ID NO: 100674 - protein, 18 aa, Homo sapiens
  CDR3 for beta chain variable domain of TCR clone 50337 (TRBV20-1, TRBJ2-6)
CSAETTPTHGSGANVLTL

SEQ ID NO: 100675 - protein, 13 aa, Homo sapiens
  CDR3 for alpha chain variable domain of TCR clone 50338 (TRAV8-3, TRAJ4)
WVFYSGGYNKLIF

SEQ ID NO: 100676 - protein, 20 aa, Homo sapiens
  CDR3 for beta chain variable domain of TCR clone 50338 (TRBV7-8, TRBJ2-2)
CASSHLFPGPTIHITGELFF

SEQ ID NO: 100677 - protein, 18 aa, Homo sapiens
  CDR3 for alpha chain variable domain of TCR clone 50339 (TRAV29/DV5, TRAJ52)
CAAGFRGAGGTSYGKPTF

SEQ ID NO: 100678 - protein, 16 aa, Homo sapiens
  CDR3 for beta chain variable domain of TCR clone 50339 (TRBV7-3, TRBJ2-2)
CASSLKRGTLSGELFF

SEQ ID NO: 100679 - protein, 12 aa, Homo sapiens
  CDR3 for alpha chain variable domain of TCR clone 50340 (TRAV12-3, TRAJ17)
CAMTLTGNKLTF

SEQ ID NO: 100680 - protein, 16 aa, Homo sapiens
  CDR3 for beta chain variable domain of TCR clone 50340 (TRBV29-1, TRBJ2-7)
CSVEDAVDGTAYEQYF

SEQ ID NO: 100681 - protein, 13 aa, Homo sapiens
  CDR3 for alpha chain variable domain of TCR clone 50341 (TRAV1-2, TRAJ9)
CAALNTGGFKTIF

SEQ ID NO: 100682 - protein, 13 aa, Homo sapiens
  CDR3 for beta chain variable domain of TCR clone 50341 (TRBV20-1, TRBJ1-1)
CSARGGGNTEAFF

SEQ ID NO: 100683 - protein, 13 aa, Homo sapiens
  CDR3 for alpha chain variable domain of TCR clone 50342 (TRAV12-1, TRAJ40)
CVVPTSGTYKYIF

SEQ ID NO: 100684 - protein, 18 aa, Homo sapiens
  CDR3 for beta chain variable domain of TCR clone 50342 (TRBV7-6, TRBJ2-1)
CASSPRTSGMSSYNEQLF

SEQ ID NO: 100685 - protein, 16 aa, Homo sapiens
  CDR3 for alpha chain variable domain of TCR clone 50343 (TRAV30, TRAJ24)
CGTEIVDADSWGKFQF

SEQ ID NO: 100686 - protein, 15 aa, Homo sapiens
  CDR3 for beta chain variable domain of TCR clone 50343 (TRBV2, TRBJ2-3)
CASSDFEKATDTQYF

SEQ ID NO: 100687 - protein, 12 aa, Homo sapiens
  CDR3 for alpha chain variable domain of TCR clone 50344 (TRAV12-3, TRAJ20)
CAMVRGDYKLSF

SEQ ID NO: 100688 - protein, 15 aa, Homo sapiens
  CDR3 for beta chain variable domain of TCR clone 50344 (TRBV7-9, TRBJ1-6)
CASSSPGRGNSPLHF

SEQ ID NO: 100689 - protein, 13 aa, Homo sapiens
  CDR3 for alpha chain variable domain of TCR clone 50345 (TRAV8-1, TRAJ30)
CAVIMNRDDKIIF

SEQ ID NO: 100690 - protein, 17 aa, Homo sapiens
  CDR3 for beta chain variable domain of TCR clone 50345 (TRBV11-2, TRBJ2-1)
CASSLYPPGVEYNEQFF

SEQ ID NO: 100691 - protein, 13 aa, Homo sapiens
  CDR3 for alpha chain variable domain of TCR clone 50346 (TRAV8-3, TRAJ43)
CAVGQDNNNDMRF

SEQ ID NO: 100692 - protein, 12 aa, Homo sapiens
  CDR3 for beta chain variable domain of TCR clone 50346 (TRBV7-2, TRBJ1-6)
CASSLSSSPLHF

SEQ ID NO: 100693 - protein, 15 aa, Homo sapiens
  CDR3 for alpha chain variable domain of TCR clone 50347 (TRAV12-1, TRAJ42)
CVVKTGGGSQGNLIF

SEQ ID NO: 100694 - protein, 12 aa, Homo sapiens
  CDR3 for beta chain variable domain of TCR clone 50347 (TRBV11-2, TRBJ2-2)
CASSLGGGELFF

SEQ ID NO: 100695 - protein, 17 aa, Homo sapiens
  CDR3 for alpha chain variable domain of TCR clone 50348 (TRAV3, TRAJ42)
CAVRDRDYGGSQGNLIF

SEQ ID NO: 100696 - protein, 15 aa, Homo sapiens
  CDR3 for beta chain variable domain of TCR clone 50348 (TRBV6-6, TRBJ2-7)
CASNYSYGGSYEQYF

SEQ ID NO: 100697 - protein, 14 aa, Homo sapiens
  CDR3 for alpha chain variable domain of TCR clone 50349 (TRAV1-2, TRAJ16)
CAVNRFSDGQKLLF

SEQ ID NO: 100698 - protein, 14 aa, Homo sapiens
  CDR3 for beta chain variable domain of TCR clone 50349 (TRBV13, TRBJ2-5)
CARSLGRGQETQYF

SEQ ID NO: 100699 - protein, 13 aa, Homo sapiens
  CDR3 for alpha chain variable domain of TCR clone 50350 (TRAV12-1, TRAJ11)
CVVTRGGYSTLTF

SEQ ID NO: 100700 - protein, 13 aa, Homo sapiens
  CDR3 for beta chain variable domain of TCR clone 50350 (TRBV20-1, TRBJ1-2)
RSARDQGAYGYTF

SEQ ID NO: 100701 - protein, 14 aa, Homo sapiens
  CDR3 for alpha chain variable domain of TCR clone 50351 (TRAV12-3, TRAJ57)
CAMSAWGGSEKLVF

SEQ ID NO: 100702 - protein, 15 aa, Homo sapiens
  CDR3 for beta chain variable domain of TCR clone 50351 (TRBV7-3, TRBJ2-2)
CQQLKAGTLSGELFF

SEQ ID NO: 100703 - protein, 15 aa, Homo sapiens
  CDR3 for alpha chain variable domain of TCR clone 50352 (TRAV3, TRAJ32)
CAVSSYGGATNELIF

SEQ ID NO: 100704 - protein, 13 aa, Homo sapiens
  CDR3 for beta chain variable domain of TCR clone 50352 (TRBV20-1, TRBJ2-7)
CSARPSTNYEQYF

SEQ ID NO: 100705 - protein, 15 aa, Homo sapiens
  CDR3 for alpha chain variable domain of TCR clone 50353 (TRAV3, TRAJ36)
CAVRASQTGANNLFF

SEQ ID NO: 100706 - protein, 13 aa, Homo sapiens
  CDR3 for beta chain variable domain of TCR clone 50353 (TRBV10-3, TRBJ1-2)
CAISERDSYGDTF

SEQ ID NO: 100707 - protein, 14 aa, Homo sapiens
  CDR3 for alpha chain variable domain of TCR clone 50354 (TRAV35, TRAJ33)
CAGSSQDSNYQLIW

SEQ ID NO: 100708 - protein, 15 aa, Homo sapiens
  CDR3 for beta chain variable domain of TCR clone 50354 (TRBV5-1, TRBJ1-4)
FAPAAWKDGNETLFF

SEQ ID NO: 100709 - protein, 14 aa, Homo sapiens
  CDR3 for alpha chain variable domain of TCR clone 50355 (TRAV12-3, TRAJ10)
SHLPLTGGGNKLTF

SEQ ID NO: 100710 - protein, 12 aa, Homo sapiens
  CDR3 for beta chain variable domain of TCR clone 50355 (TRBV19, TRBJ1-1)
CASSIGTEEAFF

SEQ ID NO: 100711 - protein, 12 aa, Homo sapiens
  CDR3 for alpha chain variable domain of TCR clone 50356 (TRAV8-6, TRAJ43)
CAVSNNNNDMRL

SEQ ID NO: 100712 - protein, 15 aa, Homo sapiens
  CDR3 for beta chain variable domain of TCR clone 50356 (TRBV7-3, TRBJ2-6)
CASSLGGSGANVLTF

SEQ ID NO: 100713 - protein, 18 aa, Homo sapiens
  CDR3 for alpha chain variable domain of TCR clone 50357 (TRAV13-1, TRAJ52)
CAASKRSAGGTSYGKLTF

SEQ ID NO: 100714 - protein, 15 aa, Homo sapiens
  CDR3 for beta chain variable domain of TCR clone 50357 (TRBV20-1, TRBJ1-1)
CSASRGVTGNTGDFF

SEQ ID NO: 100715 - protein, 13 aa, Homo sapiens
  CDR3 for alpha chain variable domain of TCR clone 50358 (TRAV2, TRAJ40)
CAVVTSGTYKYTF

SEQ ID NO: 100716 - protein, 16 aa, Homo sapiens
  CDR3 for beta chain variable domain of TCR clone 50358 (TRBV2, TRBJ2-1)
CASSVGGSLSYNEQFF

SEQ ID NO: 100717 - protein, 12 aa, Homo sapiens
  CDR3 for alpha chain variable domain of TCR clone 50359 (TRAV12-3, TRAJ17)
CAMTLTGNKLTF

SEQ ID NO: 100718 - protein, 16 aa, Homo sapiens
  CDR3 for beta chain variable domain of TCR clone 50359 (TRBV19, TRBJ1-1)
CASSPTRFWPGTEAFF

SEQ ID NO: 100719 - protein, 12 aa, Homo sapiens
  CDR3 for alpha chain variable domain of TCR clone 50360 (TRAV1-1, TRAJ40)
CAVAEGTYKYIF

SEQ ID NO: 100720 - protein, 17 aa, Homo sapiens
  CDR3 for beta chain variable domain of TCR clone 50360 (TRBV7-3, TRBJ2-3)
CASSPRGQGYGTDTQYF

SEQ ID NO: 100721 - protein, 13 aa, Homo sapiens
  CDR3 for alpha chain variable domain of TCR clone 50361 (TRAV8-6, TRAJ6)
CAVGTGGSYIPTF

SEQ ID NO: 100722 - protein, 16 aa, Homo sapiens
  CDR3 for beta chain variable domain of TCR clone 50361 (TRBV13, TRBJ2-2)
CASSPRTGEHTGELFF

SEQ ID NO: 100723 - protein, 12 aa, Homo sapiens
  CDR3 for alpha chain variable domain of TCR clone 50362 (TRAV35, TRAJ39)
LAPNNAGNMLTF

SEQ ID NO: 100724 - protein, 16 aa, Homo sapiens
  CDR3 for beta chain variable domain of TCR clone 50362 (TRBV2, TRBJ2-3)
CASSTSVEGVTDTQHF

SEQ ID NO: 100725 - protein, 14 aa, Homo sapiens
  CDR3 for alpha chain variable domain of TCR clone 50363 (TRAV1-2, TRAJ8)
CAVREDTGSQKLVF

SEQ ID NO: 100726 - protein, 12 aa, Homo sapiens
  CDR3 for beta chain variable domain of TCR clone 50363 (TRBV24-1, TRBJ1-1)
CATLYPDTEAFF

SEQ ID NO: 100727 - protein, 11 aa, Homo sapiens
  CDR3 for alpha chain variable domain of TCR clone 50364 (TRAV21, TRAJ11)
CAVNGYSTLTF

SEQ ID NO: 100728 - protein, 14 aa, Homo sapiens
  CDR3 for beta chain variable domain of TCR clone 50364 (TRBV4-1, TRBJ2-2)
CASSQAVNTGELFF

SEQ ID NO: 100729 - protein, 15 aa, Homo sapiens
  CDR3 for alpha chain variable domain of TCR clone 50365 (TRAV4, TRAJ39)
CLVGPNNNAGDMLTF

SEQ ID NO: 100730 - protein, 13 aa, Homo sapiens
  CDR3 for beta chain variable domain of TCR clone 50365 (TRBV11-2, TRBJ2-5)
CASSSTGEETQYF

SEQ ID NO: 100731 - protein, 14 aa, Homo sapiens
  CDR3 for alpha chain variable domain of TCR clone 50366 (TRAV1-2, TRAJ16)
CAVNRFSDGQKLLF

SEQ ID NO: 100732 - protein, 12 aa, Homo sapiens
  CDR3 for beta chain variable domain of TCR clone 50366 (TRBV24-1, TRBJ1-1)
CATLYPETEAFF

SEQ ID NO: 100733 - protein, 11 aa, Homo sapiens
  CDR3 for alpha chain variable domain of TCR clone 50367 (TRAV21, TRAJ11)
CAVNGYSTLTF

SEQ ID NO: 100734 - protein, 17 aa, Homo sapiens
  CDR3 for beta chain variable domain of TCR clone 50367 (TRBV13, TRBJ2-3)
CASSLSRVAGGRNTQYF

SEQ ID NO: 100735 - protein, 13 aa, Homo sapiens
  CDR3 for alpha chain variable domain of TCR clone 50368 (TRAV12-1, TRAJ40)
CVVPTSGTYKYIF

SEQ ID NO: 100736 - protein, 16 aa, Homo sapiens
  CDR3 for beta chain variable domain of TCR clone 50368 (TRBV7-9, TRBJ1-2)
CASSLGFSSGEGGYTF

SEQ ID NO: 100737 - protein, 12 aa, Homo sapiens
  CDR3 for alpha chain variable domain of TCR clone 50369 (TRAV2, TRAJ10)
CASTGGGNKLTL

SEQ ID NO: 100738 - protein, 14 aa, Homo sapiens
  CDR3 for beta chain variable domain of TCR clone 50369 (TRBV7-2, TRBJ2-2)
CASRGQGAAGELFF

SEQ ID NO: 100739 - protein, 15 aa, Homo sapiens
  CDR3 for alpha chain variable domain of TCR clone 50370 (TRAV27, TRAJ50)
CAGVGRGTSYDKVIF

SEQ ID NO: 100740 - protein, 14 aa, Homo sapiens
  CDR3 for beta chain variable domain of TCR clone 50370 (TRBV7-2, TRBJ1-1)
CASSFHDLNTEAFF

SEQ ID NO: 100741 - protein, 14 aa, Homo sapiens
  CDR3 for alpha chain variable domain of TCR clone 50371 (TRAV1-2, TRAJ29)
CAVRELTSATPLVF

SEQ ID NO: 100742 - protein, 14 aa, Homo sapiens
  CDR3 for beta chain variable domain of TCR clone 50371 (TRBV3-1, TRBJ2-5)
CASGQGPDQETQYF

SEQ ID NO: 100743 - protein, 12 aa, Homo sapiens
  CDR3 for alpha chain variable domain of TCR clone 50372 (TRAV12-1, TRAJ37)
QDGSSNTGKLIF

SEQ ID NO: 100744 - protein, 15 aa, Homo sapiens
  CDR3 for beta chain variable domain of TCR clone 50372 (TRBV27, TRBJ2-1)
CASSFGAGGHNEQFF

SEQ ID NO: 100745 - protein, 13 aa, Homo sapiens
  CDR3 for alpha chain variable domain of TCR clone 50373 (TRAV1-1, TRAJ9)
CAAKNTGGFKTIF

SEQ ID NO: 100746 - protein, 13 aa, Homo sapiens
  CDR3 for beta chain variable domain of TCR clone 50373 (TRBV7-3, TRBJ1-1)
CASSQDWGAEAFF

SEQ ID NO: 100747 - protein, 11 aa, Homo sapiens
  CDR3 for alpha chain variable domain of TCR clone 50374 (TRAV12-1, TRAJ30)
CVVNGQDKIIF

SEQ ID NO: 100748 - protein, 14 aa, Homo sapiens
  CDR3 for beta chain variable domain of TCR clone 50374 (TRBV7-2, TRBJ2-7)
CASRSQGAAYEQYF

SEQ ID NO: 100749 - protein, 14 aa, Homo sapiens
  CDR3 for alpha chain variable domain of TCR clone 50375 (TRAV1-2, TRAJ8)
CAVREDTGFQKLVF

SEQ ID NO: 100750 - protein, 12 aa, Homo sapiens
  CDR3 for beta chain variable domain of TCR clone 50375 (TRBV12-4, TRBJ2-3)
CASSTLPDTQYF

SEQ ID NO: 100751 - protein, 13 aa, Homo sapiens
  CDR3 for alpha chain variable domain of TCR clone 50376 (TRAV13-1, TRAJ5)
CAASDTGRRALTF

SEQ ID NO: 100752 - protein, 14 aa, Homo sapiens
  CDR3 for beta chain variable domain of TCR clone 50376 (TRBV7-2, TRBJ2-7)
CASRSQGAAYEQYF

SEQ ID NO: 100753 - protein, 11 aa, Homo sapiens
  CDR3 for alpha chain variable domain of TCR clone 50377 (TRAV27, TRAJ40)
SLTSGAYKYIF

SEQ ID NO: 100754 - protein, 12 aa, Homo sapiens
  CDR3 for beta chain variable domain of TCR clone 50377 (TRBV18, TRBJ2-3)
CQLNQNTDTQYF

SEQ ID NO: 100755 - protein, 13 aa, Homo sapiens
  CDR3 for alpha chain variable domain of TCR clone 50378 (TRAV13-1, TRAJ40)
CAASTSGTYKYIF

SEQ ID NO: 100756 - protein, 16 aa, Homo sapiens
  CDR3 for beta chain variable domain of TCR clone 50378 (TRBV9, TRBJ2-1)
CASSAYFLGGLSEQFF

SEQ ID NO: 100757 - protein, 12 aa, Homo sapiens
  CDR3 for alpha chain variable domain of TCR clone 50379 (TRAV21, TRAJ33)
CAKMDSNYQLIW

SEQ ID NO: 100758 - protein, 14 aa, Homo sapiens
  CDR3 for beta chain variable domain of TCR clone 50379 (TRBV2, TRBJ2-7)
CASSLTSCGYEQYF

SEQ ID NO: 100759 - protein, 14 aa, Homo sapiens
  CDR3 for alpha chain variable domain of TCR clone 50380 (TRAV12-2, TRAJ13)
CAVKKTGGYQKVTF

SEQ ID NO: 100760 - protein, 18 aa, Homo sapiens
  CDR3 for beta chain variable domain of TCR clone 50380 (TRBV4-1, TRBJ1-4)
CASSPRTGGAWTNEKLFF

SEQ ID NO: 100761 - protein, 11 aa, Homo sapiens
  CDR3 for alpha chain variable domain of TCR clone 50381 (TRAV1-1, TRAJ23)
CAVRQGGKLIF

SEQ ID NO: 100762 - protein, 13 aa, Homo sapiens
  CDR3 for beta chain variable domain of TCR clone 50381 (TRBV15, TRBJ1-6)
CATSGGLNPPLHF

SEQ ID NO: 100763 - protein, 16 aa, Homo sapiens
  CDR3 for alpha chain variable domain of TCR clone 50382 (TRAV12-1, TRAJ22)
CVVNTISSGSARQLTF

SEQ ID NO: 100764 - protein, 13 aa, Homo sapiens
  CDR3 for beta chain variable domain of TCR clone 50382 (TRBV19, TRBJ2-1)
CASNGEVFSEQFF

SEQ ID NO: 100765 - protein, 13 aa, Homo sapiens
  CDR3 for alpha chain variable domain of TCR clone 50383 (TRAV13-1, TRAJ5)
CAARVTGRRVLTF

SEQ ID NO: 100766 - protein, 15 aa, Homo sapiens
  CDR3 for beta chain variable domain of TCR clone 50383 (TRBV7-9, TRBJ2-7)
CASSPGGGLTYEQYF

SEQ ID NO: 100767 - protein, 14 aa, Homo sapiens
  CDR3 for alpha chain variable domain of TCR clone 50384 (TRAV1-2, TRAJ16)
CAVNRFSGGQKLLF

SEQ ID NO: 100768 - protein, 15 aa, Homo sapiens
  CDR3 for beta chain variable domain of TCR clone 50384 (TRBV6-3, TRBJ2-7)
CASSSPGTVFYEQYF

SEQ ID NO: 100769 - protein, 13 aa, Homo sapiens
  CDR3 for alpha chain variable domain of TCR clone 50385 (TRAV12-2, TRAJ18)
CAVRGPTLGRLYF

SEQ ID NO: 100770 - protein, 18 aa, Homo sapiens
  CDR3 for beta chain variable domain of TCR clone 50385 (TRBV27, TRBJ2-3)
CASSLSGTSGRGTDTQYF

SEQ ID NO: 100771 - protein, 15 aa, Homo sapiens
  CDR3 for alpha chain variable domain of TCR clone 50386 (TRAV25, TRAJ53)
CAATGGGGSNYKLTF

SEQ ID NO: 100772 - protein, 19 aa, Homo sapiens
  CDR3 for beta chain variable domain of TCR clone 50386 (TRBV7-2, TRBJ2-3)
CASSFLSRNWGGGTDTRYF

SEQ ID NO: 100773 - protein, 14 aa, Homo sapiens
  CDR3 for alpha chain variable domain of TCR clone 50387 (TRAV26-1, TRAJ39)
CIVRGSRAGNMISF

SEQ ID NO: 100774 - protein, 15 aa, Homo sapiens
  CDR3 for beta chain variable domain of TCR clone 50387 (TRBV7-9, TRBJ1-5)
CASSQGHQPNQPQHF

SEQ ID NO: 100775 - protein, 15 aa, Homo sapiens
  CDR3 for alpha chain variable domain of TCR clone 50388 (TRAV4, TRAJ36)
CLVGDRQTGANNLFF

SEQ ID NO: 100776 - protein, 15 aa, Homo sapiens
  CDR3 for beta chain variable domain of TCR clone 50388 (TRBV7-9, TRBJ1-6)
CASSSPGRGNSPLHF

SEQ ID NO: 100777 - protein, 14 aa, Homo sapiens
  CDR3 for alpha chain variable domain of TCR clone 50389 (TRAV13-1, TRAJ35)
CAASKGGFGNVLHC

SEQ ID NO: 100778 - protein, 15 aa, Homo sapiens
  CDR3 for beta chain variable domain of TCR clone 50389 (TRBV4-1, TRBJ2-5)
CASSQWDLYQETQYF

SEQ ID NO: 100779 - protein, 16 aa, Homo sapiens
  CDR3 for alpha chain variable domain of TCR clone 50390 (TRAV30, TRAJ24)
CGTEIVDADSWGKFQF

SEQ ID NO: 100780 - protein, 12 aa, Homo sapiens
  CDR3 for beta chain variable domain of TCR clone 50390 (TRBV11-2, TRBJ2-2)
CASSLPTGEPFF

SEQ ID NO: 100781 - protein, 14 aa, Homo sapiens
  CDR3 for alpha chain variable domain of TCR clone 50391 (TRAV1-2, TRAJ16)
CAVNRFSDGQKLPF

SEQ ID NO: 100782 - protein, 18 aa, Homo sapiens
  CDR3 for beta chain variable domain of TCR clone 50391 (TRBV20-1, TRBJ2-3)
CSASGLAGGPGTTDTQYF

SEQ ID NO: 100783 - protein, 13 aa, Homo sapiens
  CDR3 for alpha chain variable domain of TCR clone 50392 (TRAV12-1, TRAJ16)
CVVNGPDGQKLLF

SEQ ID NO: 100784 - protein, 13 aa, Homo sapiens
  CDR3 for beta chain variable domain of TCR clone 50392 (TRBV2, TRBJ1-1)
CARNPKGGFHAFF

SEQ ID NO: 100785 - protein, 15 aa, Homo sapiens
  CDR3 for alpha chain variable domain of TCR clone 50393 (TRAV12-3, TRAJ11)
CAMSEENSGYSTLTF

SEQ ID NO: 100786 - protein, 14 aa, Homo sapiens
  CDR3 for beta chain variable domain of TCR clone 50393 (TRBV7-2, TRBJ1-2)
CASSQTGSTYGYTF

SEQ ID NO: 100787 - protein, 13 aa, Homo sapiens
  CDR3 for alpha chain variable domain of TCR clone 50394 (TRAV12-3, TRAJ33)
CAMSVNSNSQLIW

SEQ ID NO: 100788 - protein, 13 aa, Homo sapiens
  CDR3 for beta chain variable domain of TCR clone 50394 (TRBV7-2, TRBJ2-2)
CASSLAVTGELFF

SEQ ID NO: 100789 - protein, 12 aa, Homo sapiens
  CDR3 for alpha chain variable domain of TCR clone 50395 (TRAV12-3, TRAJ17)
CAMTLTGNKLTF

SEQ ID NO: 100790 - protein, 13 aa, Homo sapiens
  CDR3 for beta chain variable domain of TCR clone 50395 (TRBV9, TRBJ2-2)
CASSTFSSGELFF

SEQ ID NO: 100791 - protein, 15 aa, Homo sapiens
  CDR3 for alpha chain variable domain of TCR clone 50396 (TRAV17, TRAJ13)
CATDAGSGGDQKVTF

SEQ ID NO: 100792 - protein, 17 aa, Homo sapiens
  CDR3 for beta chain variable domain of TCR clone 50396 (TRBV11-2, TRBJ2-1)
CASSLYPPGVEYNEQFF

SEQ ID NO: 100793 - protein, 14 aa, Homo sapiens
  CDR3 for alpha chain variable domain of TCR clone 50397 (TRAV38-1, TRAJ40)
CALRPTSGSYKYIF

SEQ ID NO: 100794 - protein, 14 aa, Homo sapiens
  CDR3 for beta chain variable domain of TCR clone 50397 (TRBV25-1, TRBJ1-1)
CASTHLGGNTEAFF

SEQ ID NO: 100795 - protein, 15 aa, Homo sapiens
  CDR3 for alpha chain variable domain of TCR clone 50398 (TRAV3, TRAJ22)
CAVRDRGGSSRQLTF

SEQ ID NO: 100796 - protein, 14 aa, Homo sapiens
  CDR3 for beta chain variable domain of TCR clone 50398 (TRBV19, TRBJ2-1)
CASSRLASINEQFF

SEQ ID NO: 100797 - protein, 14 aa, Homo sapiens
  CDR3 for alpha chain variable domain of TCR clone 50399 (TRAV26-1, TRAJ49)
CIVRPSNTGNQFYF

SEQ ID NO: 100798 - protein, 15 aa, Homo sapiens
  CDR3 for beta chain variable domain of TCR clone 50399 (TRBV19, TRBJ1-1)
CASMGFRDVNTEAFL

SEQ ID NO: 100799 - protein, 14 aa, Homo sapiens
  CDR3 for alpha chain variable domain of TCR clone 50400 (TRAV12-3, TRAJ10)
SHLPLTGGGNKLTF

SEQ ID NO: 100800 - protein, 12 aa, Homo sapiens
  CDR3 for beta chain variable domain of TCR clone 50400 (TRBV7-8, TRBJ2-7)
CASEGGPHGQYF

SEQ ID NO: 100801 - protein, 18 aa, Homo sapiens
  CDR3 for alpha chain variable domain of TCR clone 50401 (TRAV21, TRAJ52)
CTVRPSPAGGTSYGKLTF

SEQ ID NO: 100802 - protein, 15 aa, Homo sapiens
  CDR3 for beta chain variable domain of TCR clone 50401 (TRBV20-1, TRBJ2-7)
CSARDRVSGMDEQYF

SEQ ID NO: 100803 - protein, 14 aa, Homo sapiens
  CDR3 for alpha chain variable domain of TCR clone 50402 (TRAV16, TRAJ17)
CALSGRAAGNKLTL

SEQ ID NO: 100804 - protein, 15 aa, Homo sapiens
  CDR3 for beta chain variable domain of TCR clone 50402 (TRBV3-1, TRBJ1-2)
CASSPTRLPEGGYTF

SEQ ID NO: 100805 - protein, 15 aa, Homo sapiens
  CDR3 for alpha chain variable domain of TCR clone 50403 (TRAV38-2/DV8, TRAJ45)
CAYWDSGGGADGLTF

SEQ ID NO: 100806 - protein, 16 aa, Homo sapiens
  CDR3 for beta chain variable domain of TCR clone 50403 (TRBV19, TRBJ1-1)
CASSPTRSWPGTEAFF

SEQ ID NO: 100807 - protein, 17 aa, Homo sapiens
  CDR3 for alpha chain variable domain of TCR clone 50404 (TRAV13-1, TRAJ52)
CAASSGAGGTSYGKLTF

SEQ ID NO: 100808 - protein, 16 aa, Homo sapiens
  CDR3 for beta chain variable domain of TCR clone 50404 (TRBV7-3, TRBJ2-2)
CASSLKRGTLSGELFF

SEQ ID NO: 100809 - protein, 11 aa, Homo sapiens
  CDR3 for alpha chain variable domain of TCR clone 50405 (TRAV3, TRAJ17)
PRVAAGNKLTF

SEQ ID NO: 100810 - protein, 16 aa, Homo sapiens
  CDR3 for beta chain variable domain of TCR clone 50405 (TRBV7-6, TRBJ2-1)
CASSAPGPSSYNEQFF

SEQ ID NO: 100811 - protein, 14 aa, Homo sapiens
  CDR3 for alpha chain variable domain of TCR clone 50406 (TRAV12-3, TRAJ9)
CAMSVETGGFKTIF

SEQ ID NO: 100812 - protein, 15 aa, Homo sapiens
  CDR3 for beta chain variable domain of TCR clone 50406 (TRBV3-1, TRBJ2-1)
CASSQVVDDGEEQFF

SEQ ID NO: 100813 - protein, 16 aa, Homo sapiens
  CDR3 for alpha chain variable domain of TCR clone 50407 (TRAV3, TRAJ10)
CAVRDMRAGGGNKLTF

SEQ ID NO: 100814 - protein, 14 aa, Homo sapiens
  CDR3 for beta chain variable domain of TCR clone 50407 (TRBV7-2, TRBJ1-1)
CANSFLTGTTEAFF

SEQ ID NO: 100815 - protein, 13 aa, Homo sapiens
  CDR3 for alpha chain variable domain of TCR clone 50408 (TRAV13-2, TRAJ13)
CAERPGGYQKVAF

SEQ ID NO: 100816 - protein, 18 aa, Homo sapiens
  CDR3 for beta chain variable domain of TCR clone 50408 (TRBV7-6, TRBJ2-1)
CASSPRTSGMSSYNEQFF

SEQ ID NO: 100817 - protein, 15 aa, Homo sapiens
  CDR3 for alpha chain variable domain of TCR clone 50409 (TRAV17, TRAJ22)
CATVAPSGSARQLTF

SEQ ID NO: 100818 - protein, 16 aa, Homo sapiens
  CDR3 for beta chain variable domain of TCR clone 50409 (TRBV10-3, TRBJ2-7)
CAISADFADRPYEQYV

SEQ ID NO: 100819 - protein, 11 aa, Homo sapiens
  CDR3 for alpha chain variable domain of TCR clone 50410 (TRAV12-3, TRAJ27)
CAMANAGKSTF

SEQ ID NO: 100820 - protein, 14 aa, Homo sapiens
  CDR3 for beta chain variable domain of TCR clone 50410 (TRBV25-1, TRBJ1-1)
CASTHLGGNTEAFF

SEQ ID NO: 100821 - protein, 15 aa, Homo sapiens
  CDR3 for alpha chain variable domain of TCR clone 50411 (TRAV36/DV7, TRAJ53)
CAGEGSGGSNYKLTF

SEQ ID NO: 100822 - protein, 16 aa, Homo sapiens
  CDR3 for beta chain variable domain of TCR clone 50411 (TRBV27, TRBJ2-2)
CASSLSGFWVTGELFF

SEQ ID NO: 100823 - protein, 15 aa, Homo sapiens
  CDR3 for alpha chain variable domain of TCR clone 50412 (TRAV17, TRAJ57)
CATGPSQGGSEKLVF

SEQ ID NO: 100824 - protein, 12 aa, Homo sapiens
  CDR3 for beta chain variable domain of TCR clone 50412 (TRBV11-2, TRBJ2-1)
CASSPGNNEQFF

SEQ ID NO: 100825 - protein, 14 aa, Homo sapiens
  CDR3 for alpha chain variable domain of TCR clone 50413 (TRAV23/DV6, TRAJ11)
CAASLEPGYSTLTF

SEQ ID NO: 100826 - protein, 13 aa, Homo sapiens
  CDR3 for beta chain variable domain of TCR clone 50413 (TRBV4-1, TRBJ2-5)
CASSLTRGETQYF

SEQ ID NO: 100827 - protein, 13 aa, Homo sapiens
  CDR3 for alpha chain variable domain of TCR clone 50414 (TRAV12-3, TRAJ7)
CAMSASGNKRLAF

SEQ ID NO: 100828 - protein, 14 aa, Homo sapiens
  CDR3 for beta chain variable domain of TCR clone 50414 (TRBV13, TRBJ2-5)
CASSLGPRGETQYF

SEQ ID NO: 100829 - protein, 16 aa, Homo sapiens
  CDR3 for alpha chain variable domain of TCR clone 50415 (TRAV16, TRAJ42)
CALSGYYGGSQGNLIF

SEQ ID NO: 100830 - protein, 14 aa, Homo sapiens
  CDR3 for beta chain variable domain of TCR clone 50415 (TRBV3-1, TRBJ2-5)
CASSQAVRRETQYF

SEQ ID NO: 100831 - protein, 13 aa, Homo sapiens
  CDR3 for alpha chain variable domain of TCR clone 50416 (TRAV16, TRAJ31)
CALSAHNSARLMF

SEQ ID NO: 100832 - protein, 17 aa, Homo sapiens
  CDR3 for beta chain variable domain of TCR clone 50416 (TRBV12-4, TRBJ2-1)
CASSPGLAGGRINEQFF

SEQ ID NO: 100833 - protein, 14 aa, Homo sapiens
  CDR3 for alpha chain variable domain of TCR clone 50417 (TRAV21, TRAJ38)
CAVMGAGNNRKLMW

SEQ ID NO: 100834 - protein, 13 aa, Homo sapiens
  CDR3 for beta chain variable domain of TCR clone 50417 (TRBV7-3, TRBJ2-5)
CASSIGFFETQYF

SEQ ID NO: 100835 - protein, 14 aa, Homo sapiens
  CDR3 for alpha chain variable domain of TCR clone 50418 (TRAV35, TRAJ13)
CAGRSPGGYQKVTL

SEQ ID NO: 100836 - protein, 14 aa, Homo sapiens
  CDR3 for beta chain variable domain of TCR clone 50418 (TRBV19, TRBJ2-2)
CASSMVGLSGKLFF

SEQ ID NO: 100837 - protein, 15 aa, Homo sapiens
  CDR3 for alpha chain variable domain of TCR clone 50419 (TRAV12-3, TRAJ9)
CAMSATTGGSYIPTF

SEQ ID NO: 100838 - protein, 16 aa, Homo sapiens
  CDR3 for beta chain variable domain of TCR clone 50419 (TRBV13, TRBJ2-2)
CASSPRTGEHTGELFF

SEQ ID NO: 100839 - protein, 16 aa, Homo sapiens
  CDR3 for alpha chain variable domain of TCR clone 50420 (TRAV23/DV6, TRAJ9)
CAASIGGNTGGFKTIS

SEQ ID NO: 100840 - protein, 13 aa, Homo sapiens
  CDR3 for beta chain variable domain of TCR clone 50420 (TRBV2, TRBJ1-1)
CASSEGGNTEAFF

SEQ ID NO: 100841 - protein, 15 aa, Homo sapiens
  CDR3 for alpha chain variable domain of TCR clone 50421 (TRAV8-3, TRAJ45)
CASSYSGGGADGLTS

SEQ ID NO: 100842 - protein, 16 aa, Homo sapiens
  CDR3 for beta chain variable domain of TCR clone 50421 (TRBV7-9, TRBJ2-2)
CASSGFGGANTGELFF

SEQ ID NO: 100843 - protein, 13 aa, Homo sapiens
  CDR3 for alpha chain variable domain of TCR clone 50422 (TRAV27, TRAJ8)
CAGGPTGFQKLVF

SEQ ID NO: 100844 - protein, 15 aa, Homo sapiens
  CDR3 for beta chain variable domain of TCR clone 50422 (TRBV4-1, TRBJ1-4)
CASSDTGGTNEKLFF

SEQ ID NO: 100845 - protein, 16 aa, Homo sapiens
  CDR3 for alpha chain variable domain of TCR clone 50423 (TRAV17, TRAJ53)
CATDGGSGGSNYKPTF

SEQ ID NO: 100846 - protein, 14 aa, Homo sapiens
  CDR3 for beta chain variable domain of TCR clone 50423 (TRBV6-1, TRBJ2-2)
CASRELAYTGELFF

SEQ ID NO: 100847 - protein, 14 aa, Homo sapiens
  CDR3 for alpha chain variable domain of TCR clone 50424 (TRAV2, TRAJ41)
CAVGTSNSGYALSF

SEQ ID NO: 100848 - protein, 13 aa, Homo sapiens
  CDR3 for beta chain variable domain of TCR clone 50424 (TRBV4-1, TRBJ2-1)
CASSQEVQYEQFF

SEQ ID NO: 100849 - protein, 13 aa, Homo sapiens
  CDR3 for alpha chain variable domain of TCR clone 50425 (TRAV20, TRAJ40)
CAVPFSGAYKYIF

SEQ ID NO: 100850 - protein, 13 aa, Homo sapiens
  CDR3 for beta chain variable domain of TCR clone 50425 (TRBV15, TRBJ2-5)
CATSQIGEETQYF

SEQ ID NO: 100851 - protein, 13 aa, Homo sapiens
  CDR3 for alpha chain variable domain of TCR clone 50426 (TRAV13-1, TRAJ4)
CAASIGGYNKLIF

SEQ ID NO: 100852 - protein, 16 aa, Homo sapiens
  CDR3 for beta chain variable domain of TCR clone 50426 (TRBV20-1, TRBJ2-1)
CSAPGLAGSYSDEQSF

SEQ ID NO: 100853 - protein, 13 aa, Homo sapiens
  CDR3 for alpha chain variable domain of TCR clone 50427 (TRAV13-1, TRAJ10)
CAATAGGGNKLTF

SEQ ID NO: 100854 - protein, 12 aa, Homo sapiens
  CDR3 for beta chain variable domain of TCR clone 50427 (TRBV7-3, TRBJ2-1)
CASSFQSGPQSF

SEQ ID NO: 100855 - protein, 15 aa, Homo sapiens
  CDR3 for alpha chain variable domain of TCR clone 50428 (TRAV21, TRAJ57)
RAVIITQGGSEKLVF

SEQ ID NO: 100856 - protein, 14 aa, Homo sapiens
  CDR3 for beta chain variable domain of TCR clone 50428 (TRBV5-1, TRBJ2-2)
CASSLIWIPGELFF

SEQ ID NO: 100857 - protein, 12 aa, Homo sapiens
  CDR3 for alpha chain variable domain of TCR clone 50429 (TRAV17, TRAJ57)
CATDGGSEKLIF

SEQ ID NO: 100858 - protein, 13 aa, Homo sapiens
  CDR3 for beta chain variable domain of TCR clone 50429 (TRBV7-9, TRBJ2-7)
CASSFAGAYEQYF

SEQ ID NO: 100859 - protein, 15 aa, Homo sapiens
  CDR3 for alpha chain variable domain of TCR clone 50430 (TRAV17, TRAJ4)
CATGTWSGGYNKLIF

SEQ ID NO: 100860 - protein, 17 aa, Homo sapiens
  CDR3 for beta chain variable domain of TCR clone 50430 (TRBV7-8, TRBJ2-6)
CASSAGTGGAGANVLTF

SEQ ID NO: 100861 - protein, 12 aa, Homo sapiens
  CDR3 for alpha chain variable domain of TCR clone 50431 (TRAV1-1, TRAJ23)
CAVTNQGGKLIF

SEQ ID NO: 100862 - protein, 17 aa, Homo sapiens
  CDR3 for beta chain variable domain of TCR clone 50431 (TRBV5-5, TRBJ1-1)
CASSLRFRGLMNTEAFF

SEQ ID NO: 100863 - protein, 14 aa, Homo sapiens
  CDR3 for alpha chain variable domain of TCR clone 50432 (TRAV3, TRAJ13)
CAVSYSGGYQKVTF

SEQ ID NO: 100864 - protein, 16 aa, Homo sapiens
  CDR3 for beta chain variable domain of TCR clone 50432 (TRBV20-1, TRBJ1-4)
CSAPGQGLLTNEKLFF

SEQ ID NO: 100865 - protein, 14 aa, Homo sapiens
  CDR3 for alpha chain variable domain of TCR clone 50433 (TRAV1-2, TRAJ6)
CAVSLSGGSYTPTF

SEQ ID NO: 100866 - protein, 15 aa, Homo sapiens
  CDR3 for beta chain variable domain of TCR clone 50433 (TRBV28, TRBJ2-7)
CASSPGGRGFYEQYF

SEQ ID NO: 100867 - protein, 17 aa, Homo sapiens
  CDR3 for alpha chain variable domain of TCR clone 50434 (TRAV3, TRAJ6)
CAVRDGPRAGGSYIPTF

SEQ ID NO: 100868 - protein, 11 aa, Homo sapiens
  CDR3 for beta chain variable domain of TCR clone 50434 (TRBV7-2, TRBJ2-7)
CASSSGLWQYF

SEQ ID NO: 100869 - protein, 14 aa, Homo sapiens
  CDR3 for alpha chain variable domain of TCR clone 50435 (TRAV3, TRAJ9)
CAVRLNTEGFKTIF

SEQ ID NO: 100870 - protein, 15 aa, Homo sapiens
  CDR3 for beta chain variable domain of TCR clone 50435 (TRBV7-2, TRBJ2-1)
CASSLASGRVNEQFF

SEQ ID NO: 100871 - protein, 16 aa, Homo sapiens
  CDR3 for alpha chain variable domain of TCR clone 50436 (TRAV17, TRAJ22)
CAMDAISSGSARQLTF

SEQ ID NO: 100872 - protein, 15 aa, Homo sapiens
  CDR3 for beta chain variable domain of TCR clone 50436 (TRBV5-1, TRBJ2-1)
CASSPPRAPYNEQFF

SEQ ID NO: 100873 - protein, 13 aa, Homo sapiens
  CDR3 for alpha chain variable domain of TCR clone 50437 (TRAV8-4, TRAJ48)
CALSLFGNEKLTF

SEQ ID NO: 100874 - protein, 15 aa, Homo sapiens
  CDR3 for beta chain variable domain of TCR clone 50437 (TRBV20-1, TRBJ2-7)
CSARKGLAESYEQYF

SEQ ID NO: 100875 - protein, 12 aa, Homo sapiens
  CDR3 for alpha chain variable domain of TCR clone 50438 (TRAV13-2, TRAJ23)
CAERHRGGKLIF

SEQ ID NO: 100876 - protein, 14 aa, Homo sapiens
  CDR3 for beta chain variable domain of TCR clone 50438 (TRBV6-1, TRBJ1-3)
CASVQGGGGNTMYF

SEQ ID NO: 100877 - protein, 14 aa, Homo sapiens
  CDR3 for alpha chain variable domain of TCR clone 50439 (TRAV1-2, TRAJ8)
CAVREDTGFQKLVF

SEQ ID NO: 100878 - protein, 12 aa, Homo sapiens
  CDR3 for beta chain variable domain of TCR clone 50439 (TRBV5-1, TRBJ2-7)
CASSLDSYEQYF

SEQ ID NO: 100879 - protein, 20 aa, Homo sapiens
  CDR3 for alpha chain variable domain of TCR clone 50440 (TRAV1-1, TRAJ4)
CLLLLRCEGFPSGGYNKLIF

SEQ ID NO: 100880 - protein, 16 aa, Homo sapiens
  CDR3 for beta chain variable domain of TCR clone 50440 (TRBV28, TRBJ1-4)
CASSPPYRGRSEKLFF

SEQ ID NO: 100881 - protein, 17 aa, Homo sapiens
  CDR3 for alpha chain variable domain of TCR clone 50441 (TRAV26-1, TRAJ37)
CIVRVITVSSNTGKLIF

SEQ ID NO: 100882 - protein, 15 aa, Homo sapiens
  CDR3 for beta chain variable domain of TCR clone 50441 (TRBV2, TRBJ2-1)
CASSELAGSYNEQFF

SEQ ID NO: 100883 - protein, 14 aa, Homo sapiens
  CDR3 for alpha chain variable domain of TCR clone 50442 (TRAV26-1, TRAJ39)
CIVRGSRAGNMLTF

SEQ ID NO: 100884 - protein, 16 aa, Homo sapiens
  CDR3 for beta chain variable domain of TCR clone 50442 (TRBV7-3, TRBJ2-2)
CASSLKRGTLSGELFF

SEQ ID NO: 100885 - protein, 16 aa, Homo sapiens
  CDR3 for alpha chain variable domain of TCR clone 50443 (TRAV30, TRAJ24)
CGTEIVDADSWGKFQF

SEQ ID NO: 100886 - protein, 15 aa, Homo sapiens
  CDR3 for beta chain variable domain of TCR clone 50443 (TRBV7-9, TRBJ1-4)
CASSARTGGNEQLFF

SEQ ID NO: 100887 - protein, 14 aa, Homo sapiens
  CDR3 for alpha chain variable domain of TCR clone 50444 (TRAV12-2, TRAJ13)
CAVKKTGGYQKVTF

SEQ ID NO: 100888 - protein, 15 aa, Homo sapiens
  CDR3 for beta chain variable domain of TCR clone 50444 (TRBV20-1, TRBJ2-1)
CSARGIGGTYNEQFL

SEQ ID NO: 100889 - protein, 13 aa, Homo sapiens
  CDR3 for alpha chain variable domain of TCR clone 50445 (TRAV12-3, TRAJ53)
CAMRGGSNYKLTF

SEQ ID NO: 100890 - protein, 13 aa, Homo sapiens
  CDR3 for beta chain variable domain of TCR clone 50445 (TRBV20-1, TRBJ1-1)
CSARVGGNTEAFF

SEQ ID NO: 100891 - protein, 12 aa, Homo sapiens
  CDR3 for alpha chain variable domain of TCR clone 50446 (TRAV8-3, TRAJ26)
CAGDNYGQNFVF

SEQ ID NO: 100892 - protein, 17 aa, Homo sapiens
  CDR3 for beta chain variable domain of TCR clone 50446 (TRBV7-8, TRBJ2-6)
CASSAGTGGAGANGLTF

SEQ ID NO: 100893 - protein, 16 aa, Homo sapiens
  CDR3 for alpha chain variable domain of TCR clone 50447 (TRAV3, TRAJ4)
CAVRPSPSGGYNKLIF

SEQ ID NO: 100894 - protein, 12 aa, Homo sapiens
  CDR3 for beta chain variable domain of TCR clone 50447 (TRBV7-9, TRBJ2-7)
CASSQEVYEQYF

SEQ ID NO: 100895 - protein, 16 aa, Homo sapiens
  CDR3 for alpha chain variable domain of TCR clone 50448 (TRAV13-2, TRAJ32)
CAENMNYGGAKNKLIF

SEQ ID NO: 100896 - protein, 14 aa, Homo sapiens
  CDR3 for beta chain variable domain of TCR clone 50448 (TRBV15, TRBJ2-5)
CATSSTGYQETQYF

SEQ ID NO: 100897 - protein, 13 aa, Homo sapiens
  CDR3 for alpha chain variable domain of TCR clone 50449 (TRAV12-3, TRAJ47)
CAMKREYGNKLVF

SEQ ID NO: 100898 - protein, 17 aa, Homo sapiens
  CDR3 for beta chain variable domain of TCR clone 50449 (TRBV11-2, TRBJ2-1)
CASSLYPPGVEYNEQFF

SEQ ID NO: 100899 - protein, 16 aa, Homo sapiens
  CDR3 for alpha chain variable domain of TCR clone 50450 (TRAV1-1, TRAJ45)
CAMRAYSGGGADGLTF

SEQ ID NO: 100900 - protein, 13 aa, Homo sapiens
  CDR3 for beta chain variable domain of TCR clone 50450 (TRBV20-1, TRBJ1-2)
CSARGTADYGYTF

SEQ ID NO: 100901 - protein, 11 aa, Homo sapiens
  CDR3 for alpha chain variable domain of TCR clone 50451 (TRAV2, TRAJ33)
CAVESNYQLIW

SEQ ID NO: 100902 - protein, 15 aa, Homo sapiens
  CDR3 for beta chain variable domain of TCR clone 50451 (TRBV19, TRBJ1-1)
CDSTSGQIQNTEAFF

SEQ ID NO: 100903 - protein, 14 aa, Homo sapiens
  CDR3 for alpha chain variable domain of TCR clone 50452 (TRAV26-1, TRAJ21)
CIVRPPYNFNKFYF

SEQ ID NO: 100904 - protein, 14 aa, Homo sapiens
  CDR3 for beta chain variable domain of TCR clone 50452 (TRBV4-1, TRBJ2-2)
CASSQAVNTGGLFF

SEQ ID NO: 100905 - protein, 15 aa, Homo sapiens
  CDR3 for alpha chain variable domain of TCR clone 50453 (TRAV8-3, TRAJ11)
CAVGLLNSGYSTLTF

SEQ ID NO: 100906 - protein, 16 aa, Homo sapiens
  CDR3 for beta chain variable domain of TCR clone 50453 (TRBV7-9, TRBJ1-2)
CASSLGFSSEEDGYTF

SEQ ID NO: 100907 - protein, 13 aa, Homo sapiens
  CDR3 for alpha chain variable domain of TCR clone 50454 (TRAV2, TRAJ36)
CAVDQTGANSLFF

SEQ ID NO: 100908 - protein, 12 aa, Homo sapiens
  CDR3 for beta chain variable domain of TCR clone 50454 (TRBV19, TRBJ1-1)
CASMNRYTEAFF

SEQ ID NO: 100909 - protein, 19 aa, Homo sapiens
  CDR3 for alpha chain variable domain of TCR clone 50455 (TRAV8-4, TRAJ16)
CAVSPVGRWPEAALCKGDH

SEQ ID NO: 100910 - protein, 15 aa, Homo sapiens
  CDR3 for beta chain variable domain of TCR clone 50455 (TRBV7-3, TRBJ1-6)
CASSLGRGAGSPLHF

SEQ ID NO: 100911 - protein, 13 aa, Homo sapiens
  CDR3 for alpha chain variable domain of TCR clone 50456 (TRAV13-2, TRAJ48)
CAEMDSGNEKLTF

SEQ ID NO: 100912 - protein, 17 aa, Homo sapiens
  CDR3 for beta chain variable domain of TCR clone 50456 (TRBV7-9, TRBJ1-6)
CASSSPGRGIHPSTLGT

SEQ ID NO: 100913 - protein, 12 aa, Homo sapiens
  CDR3 for alpha chain variable domain of TCR clone 50457 (TRAV21, TRAJ11)
CAATSGYSTLTF

SEQ ID NO: 100914 - protein, 14 aa, Homo sapiens
  CDR3 for beta chain variable domain of TCR clone 50457 (TRBV20-1, TRBJ2-7)
CSTPELAGVGEQYF

SEQ ID NO: 100915 - protein, 12 aa, Homo sapiens
  CDR3 for alpha chain variable domain of TCR clone 50458 (TRAV12-2, TRAJ21)
CAVRYNFNKLYF

SEQ ID NO: 100916 - protein, 14 aa, Homo sapiens
  CDR3 for beta chain variable domain of TCR clone 50458 (TRBV28, TRBJ2-1)
CASSYYTAYNEQFF

SEQ ID NO: 100917 - protein, 16 aa, Homo sapiens
  CDR3 for alpha chain variable domain of TCR clone 50459 (TRAV3, TRAJ37)
CAVRVRGSGNTGKLVF

SEQ ID NO: 100918 - protein, 15 aa, Homo sapiens
  CDR3 for beta chain variable domain of TCR clone 50459 (TRBV3-1, TRBJ2-1)
CASSPRDSGFNEQFF

SEQ ID NO: 100919 - protein, 13 aa, Homo sapiens
  CDR3 for alpha chain variable domain of TCR clone 50460 (TRAV13-1, TRAJ21)
CAASIDNFNKFYF

SEQ ID NO: 100920 - protein, 13 aa, Homo sapiens
  CDR3 for beta chain variable domain of TCR clone 50460 (TRBV27, TRBJ1-4)
CASSLMGDEKLFF

SEQ ID NO: 100921 - protein, 10 aa, Homo sapiens
  CDR3 for alpha chain variable domain of TCR clone 50461 (TRAV13-1, TRAJ27)
FAPLARQINL

SEQ ID NO: 100922 - protein, 13 aa, Homo sapiens
  CDR3 for beta chain variable domain of TCR clone 50461 (TRBV7-3, TRBJ1-1)
CASSQDWGAEAFF

SEQ ID NO: 100923 - protein, 13 aa, Homo sapiens
  CDR3 for alpha chain variable domain of TCR clone 50462 (TRAV36/DV7, TRAJ37)
CAVFSSNTGKLIF

SEQ ID NO: 100924 - protein, 16 aa, Homo sapiens
  CDR3 for beta chain variable domain of TCR clone 50462 (TRBV6-5, TRBJ2-7)
CASSTRTSGAPYEQYF

SEQ ID NO: 100925 - protein, 15 aa, Homo sapiens
  CDR3 for alpha chain variable domain of TCR clone 50463 (TRAV26-1, TRAJ29)
CIVRVEGSGNTPLVF

SEQ ID NO: 100926 - protein, 14 aa, Homo sapiens
  CDR3 for beta chain variable domain of TCR clone 50463 (TRBV25-1, TRBJ1-1)
CASPHLGGNTEAFF

SEQ ID NO: 100927 - protein, 14 aa, Homo sapiens
  CDR3 for alpha chain variable domain of TCR clone 50464 (TRAV12-3, TRAJ54)
CAMSALQGAQKLVF

SEQ ID NO: 100928 - protein, 15 aa, Homo sapiens
  CDR3 for beta chain variable domain of TCR clone 50464 (TRBV19, TRBJ2-4)
CASSTPGIAKNSQYF

SEQ ID NO: 100929 - protein, 13 aa, Homo sapiens
  CDR3 for alpha chain variable domain of TCR clone 50465 (TRAV2, TRAJ5)
CAVPDTGRRALTF

SEQ ID NO: 100930 - protein, 14 aa, Homo sapiens
  CDR3 for beta chain variable domain of TCR clone 50465 (TRBV7-3, TRBJ1-1)
CASSLKGGNTEAFF

SEQ ID NO: 100931 - protein, 10 aa, Homo sapiens
  CDR3 for alpha chain variable domain of TCR clone 50466 (TRAV13-1, TRAJ21)
CAVSLNKFYF

SEQ ID NO: 100932 - protein, 13 aa, Homo sapiens
  CDR3 for beta chain variable domain of TCR clone 50466 (TRBV7-9, TRBJ2-7)
CASSFYGSYEQYF

SEQ ID NO: 100933 - protein, 11 aa, Homo sapiens
  CDR3 for alpha chain variable domain of TCR clone 50467 (TRAV2, TRAJ33)
CAVESNYQLIW

SEQ ID NO: 100934 - protein, 15 aa, Homo sapiens
  CDR3 for beta chain variable domain of TCR clone 50467 (TRBV19, TRBJ1-1)
CSSTSGQIQNTEAFF

SEQ ID NO: 100935 - protein, 15 aa, Homo sapiens
  CDR3 for alpha chain variable domain of TCR clone 50468 (TRAV12-3, TRAJ6)
CAMSATSGGSYIPTF

SEQ ID NO: 100936 - protein, 14 aa, Homo sapiens
  CDR3 for beta chain variable domain of TCR clone 50468 (TRBV28, TRBJ1-2)
CASRIQGANYGYTF

SEQ ID NO: 100937 - protein, 13 aa, Homo sapiens
  CDR3 for alpha chain variable domain of TCR clone 50469 (TRAV20, TRAJ37)
CAGCSSNTGKLIF

SEQ ID NO: 100938 - protein, 14 aa, Homo sapiens
  CDR3 for beta chain variable domain of TCR clone 50469 (TRBV7-2, TRBJ1-1)
CASSFLTGTTEAFF

SEQ ID NO: 100939 - protein, 13 aa, Homo sapiens
  CDR3 for alpha chain variable domain of TCR clone 50470 (TRAV36/DV7, TRAJ49)
CAGDSNTGNQFYF

SEQ ID NO: 100940 - protein, 16 aa, Homo sapiens
  CDR3 for beta chain variable domain of TCR clone 50470 (TRBV29-1, TRBJ2-6)
CSVEDITYSGANVLTF

SEQ ID NO: 100941 - protein, 12 aa, Homo sapiens
  CDR3 for alpha chain variable domain of TCR clone 50471 (TRAV21, TRAJ31)
CAVWGNNTRLMF

SEQ ID NO: 100942 - protein, 16 aa, Homo sapiens
  CDR3 for beta chain variable domain of TCR clone 50471 (TRBV27, TRBJ2-5)
CASSYGPGGQKETQYF

SEQ ID NO: 100943 - protein, 14 aa, Homo sapiens
  CDR3 for alpha chain variable domain of TCR clone 50472 (TRAV12-1, TRAJ9)
CVVTLNTGGFKTIF

SEQ ID NO: 100944 - protein, 11 aa, Homo sapiens
  CDR3 for beta chain variable domain of TCR clone 50472 (TRBV29-1, TRBJ2-5)
CSEDRTGTQYL

SEQ ID NO: 100945 - protein, 14 aa, Homo sapiens
  CDR3 for alpha chain variable domain of TCR clone 50473 (TRAV12-2, TRAJ44)
CAVNPAGTASKLTF

SEQ ID NO: 100946 - protein, 16 aa, Homo sapiens
  CDR3 for beta chain variable domain of TCR clone 50473 (TRBV2, TRBJ2-6)
CASSEVGGAGASVLTF

SEQ ID NO: 100947 - protein, 17 aa, Homo sapiens
  CDR3 for alpha chain variable domain of TCR clone 50474 (TRAV26-1, TRAJ53)
CIVRVDDSGGSNYKLTF

SEQ ID NO: 100948 - protein, 15 aa, Homo sapiens
  CDR3 for beta chain variable domain of TCR clone 50474 (TRBV20-1, TRBJ2-7)
CSARVPAAYFYEQYS

SEQ ID NO: 100949 - protein, 15 aa, Homo sapiens
  CDR3 for alpha chain variable domain of TCR clone 50475 (TRAV20, TRAJ4)
CAVEGSSGGYNKLIF

SEQ ID NO: 100950 - protein, 14 aa, Homo sapiens
  CDR3 for beta chain variable domain of TCR clone 50475 (TRBV7-8, TRBJ2-7)
CASPLGGALGEQYF

SEQ ID NO: 100951 - protein, 15 aa, Homo sapiens
  CDR3 for alpha chain variable domain of TCR clone 50476 (TRAV8-3, TRAJ11)
CAVGLLNSGYSTLTF

SEQ ID NO: 100952 - protein, 14 aa, Homo sapiens
  CDR3 for beta chain variable domain of TCR clone 50476 (TRBV4-1, TRBJ2-5)
CASSRSGSGETQYL

SEQ ID NO: 100953 - protein, 14 aa, Homo sapiens
  CDR3 for alpha chain variable domain of TCR clone 50477 (TRAV1-2, TRAJ8)
CAAREDTGFQKLVF

SEQ ID NO: 100954 - protein, 12 aa, Homo sapiens
  CDR3 for beta chain variable domain of TCR clone 50477 (TRBV2, TRBJ2-1)
CAYGPPGNEQFF

SEQ ID NO: 100955 - protein, 14 aa, Homo sapiens
  CDR3 for alpha chain variable domain of TCR clone 50478 (TRAV17, TRAJ16)
CATADFSDGQKLLF

SEQ ID NO: 100956 - protein, 12 aa, Homo sapiens
  CDR3 for beta chain variable domain of TCR clone 50478 (TRBV24-1, TRBJ1-1)
CAALYPDTEAFF

SEQ ID NO: 100957 - protein, 16 aa, Homo sapiens
  CDR3 for alpha chain variable domain of TCR clone 50479 (TRAV26-1, TRAJ37)
FIVRGDGSGNTGKLIF

SEQ ID NO: 100958 - protein, 17 aa, Homo sapiens
  CDR3 for beta chain variable domain of TCR clone 50479 (TRBV4-1, TRBJ2-7)
CASSRDPLGVRGGEQYF

SEQ ID NO: 100959 - protein, 14 aa, Homo sapiens
  CDR3 for alpha chain variable domain of TCR clone 50480 (TRAV1-2, TRAJ16)
CAVNRFSDGQKLLF

SEQ ID NO: 100960 - protein, 12 aa, Homo sapiens
  CDR3 for beta chain variable domain of TCR clone 50480 (TRBV7-8, TRBJ2-7)
CASEGGPHGQYF

SEQ ID NO: 100961 - protein, 15 aa, Homo sapiens
  CDR3 for alpha chain variable domain of TCR clone 50481 (TRAV12-2, TRAJ36)
CAVGFVRAGANNLFF

SEQ ID NO: 100962 - protein, 15 aa, Homo sapiens
  CDR3 for beta chain variable domain of TCR clone 50481 (TRBV27, TRBJ2-7)
CASSPPGQGTYEQYF

SEQ ID NO: 100963 - protein, 16 aa, Homo sapiens
  CDR3 for alpha chain variable domain of TCR clone 50482 (TRAV38-2/DV8, TRAJ45)
CAYTTTSGGGADGLTF

SEQ ID NO: 100964 - protein, 14 aa, Homo sapiens
  CDR3 for beta chain variable domain of TCR clone 50482 (TRBV7-9, TRBJ2-2)
CASSFGHRTGELFF

SEQ ID NO: 100965 - protein, 13 aa, Homo sapiens
  CDR3 for alpha chain variable domain of TCR clone 50483 (TRAV2, TRAJ15)
CAVASQAGTALIF

SEQ ID NO: 100966 - protein, 13 aa, Homo sapiens
  CDR3 for beta chain variable domain of TCR clone 50483 (TRBV5-5, TRBJ1-2)
CASSFWRGEDYTF

SEQ ID NO: 100967 - protein, 11 aa, Homo sapiens
  CDR3 for alpha chain variable domain of TCR clone 50484 (TRAV3, TRAJ21)
CAVGNFNKFYF

SEQ ID NO: 100968 - protein, 16 aa, Homo sapiens
  CDR3 for beta chain variable domain of TCR clone 50484 (TRBV4-1, TRBJ1-2)
CASSQDAGQVLYGYTF

SEQ ID NO: 100969 - protein, 13 aa, Homo sapiens
  CDR3 for alpha chain variable domain of TCR clone 50485 (TRAV8-6, TRAJ49)
CAVITNTGNQFYF

SEQ ID NO: 100970 - protein, 12 aa, Homo sapiens
  CDR3 for beta chain variable domain of TCR clone 50485 (TRBV11-2, TRBJ2-2)
CASSLGGGEPFF

SEQ ID NO: 100971 - protein, 13 aa, Homo sapiens
  CDR3 for alpha chain variable domain of TCR clone 50486 (TRAV21, TRAJ20)
CAVGVFADYKLSF

SEQ ID NO: 100972 - protein, 14 aa, Homo sapiens
  CDR3 for beta chain variable domain of TCR clone 50486 (TRBV12-5, TRBJ2-5)
CASGSRTHQETQYF

SEQ ID NO: 100973 - protein, 12 aa, Homo sapiens
  CDR3 for alpha chain variable domain of TCR clone 50487 (TRAV13-1, TRAJ21)
CAAKEGFNKFYF

SEQ ID NO: 100974 - protein, 13 aa, Homo sapiens
  CDR3 for beta chain variable domain of TCR clone 50487 (TRBV7-7, TRBJ1-5)
CASSPGKNQPQHF

SEQ ID NO: 100975 - protein, 13 aa, Homo sapiens
  CDR3 for alpha chain variable domain of TCR clone 50488 (TRAV14/DV4, TRAJ23)
CAMREVKGGKLIF

SEQ ID NO: 100976 - protein, 15 aa, Homo sapiens
  CDR3 for beta chain variable domain of TCR clone 50488 (TRBV6-3, TRBJ2-1)
SASSYASDSYNEQFF

SEQ ID NO: 100977 - protein, 16 aa, Homo sapiens
  CDR3 for alpha chain variable domain of TCR clone 50489 (TRAV16, TRAJ4)
CALSRMFSGGYNKLIF

SEQ ID NO: 100978 - protein, 16 aa, Homo sapiens
  CDR3 for beta chain variable domain of TCR clone 50489 (TRBV12-4, TRBJ1-5)
CASSRPVGGPNQPQHF

SEQ ID NO: 100979 - protein, 12 aa, Homo sapiens
  CDR3 for alpha chain variable domain of TCR clone 50490 (TRAV25, TRAJ7)
CAGSYGNNRLAF

SEQ ID NO: 100980 - protein, 12 aa, Homo sapiens
  CDR3 for beta chain variable domain of TCR clone 50490 (TRBV5-1, TRBJ1-2)
CAGSQDTYGYTF

SEQ ID NO: 100981 - protein, 13 aa, Homo sapiens
  CDR3 for alpha chain variable domain of TCR clone 50491 (TRAV27, TRAJ6)
CAGGTRGSYIPTF

SEQ ID NO: 100982 - protein, 14 aa, Homo sapiens
  CDR3 for beta chain variable domain of TCR clone 50491 (TRBV4-1, TRBJ2-2)
CASSQAVNTGELFF

SEQ ID NO: 100983 - protein, 16 aa, Homo sapiens
  CDR3 for alpha chain variable domain of TCR clone 50492 (TRAV30, TRAJ24)
CGTEIVDADSWGKFQF

SEQ ID NO: 100984 - protein, 15 aa, Homo sapiens
  CDR3 for beta chain variable domain of TCR clone 50492 (TRBV18, TRBJ2-1)
CASLPDGGRDNEQFF

SEQ ID NO: 100985 - protein, 16 aa, Homo sapiens
  CDR3 for alpha chain variable domain of TCR clone 50493 (TRAV13-1, TRAJ10)
CAASSHFTGGGNKLTF

SEQ ID NO: 100986 - protein, 15 aa, Homo sapiens
  CDR3 for beta chain variable domain of TCR clone 50493 (TRBV7-9, TRBJ1-6)
CASSSPGRGNSPFHF

SEQ ID NO: 100987 - protein, 12 aa, Homo sapiens
  CDR3 for alpha chain variable domain of TCR clone 50494 (TRAV12-3, TRAJ39)
CAMTQAGNMLTF

SEQ ID NO: 100988 - protein, 14 aa, Homo sapiens
  CDR3 for beta chain variable domain of TCR clone 50494 (TRBV4-2, TRBJ2-1)
CASGLDRAYNEQFF

SEQ ID NO: 100989 - protein, 14 aa, Homo sapiens
  CDR3 for alpha chain variable domain of TCR clone 50495 (TRAV16, TRAJ17)
CALSEGAAGNKLTF

SEQ ID NO: 100990 - protein, 12 aa, Homo sapiens
  CDR3 for beta chain variable domain of TCR clone 50495 (TRBV11-2, TRBJ2-2)
CASSLPTGELFF

SEQ ID NO: 100991 - protein, 14 aa, Homo sapiens
  CDR3 for alpha chain variable domain of TCR clone 50496 (TRAV17, TRAJ16)
CATADFSDGQRLLF

SEQ ID NO: 100992 - protein, 14 aa, Homo sapiens
  CDR3 for beta chain variable domain of TCR clone 50496 (TRBV25-1, TRBJ1-1)
CASTHLGGNTEAFF

SEQ ID NO: 100993 - protein, 14 aa, Homo sapiens
  CDR3 for alpha chain variable domain of TCR clone 50497 (TRAV8-4, TRAJ13)
CAVTLSGGYQKVTF

SEQ ID NO: 100994 - protein, 13 aa, Homo sapiens
  CDR3 for beta chain variable domain of TCR clone 50497 (TRBV7-3, TRBJ1-2)
CASSLKRGYGYTF

SEQ ID NO: 100995 - protein, 12 aa, Homo sapiens
  CDR3 for alpha chain variable domain of TCR clone 50498 (TRAV30, TRAJ43)
CGTEERGKDMRF

SEQ ID NO: 100996 - protein, 13 aa, Homo sapiens
  CDR3 for beta chain variable domain of TCR clone 50498 (TRBV12-4, TRBJ1-2)
CASSSGSKDGYTF

SEQ ID NO: 100997 - protein, 18 aa, Homo sapiens
  CDR3 for alpha chain variable domain of TCR clone 50499 (TRAV21, TRAJ52)
CAVRPSPAGGTSYGKLTF

SEQ ID NO: 100998 - protein, 17 aa, Homo sapiens
  CDR3 for beta chain variable domain of TCR clone 50499 (TRBV13, TRBJ2-3)
CASSLSRVAGGRYTQYF

SEQ ID NO: 100999 - protein, 17 aa, Homo sapiens
  CDR3 for alpha chain variable domain of TCR clone 50500 (TRAV8-3, TRAJ34)
CAIPGKLIFGTGTRLQV

SEQ ID NO: 101000 - protein, 15 aa, Homo sapiens
  CDR3 for beta chain variable domain of TCR clone 50500 (TRBV5-7, TRBJ2-1)
CASSRRLTGDNEQFF

SEQ ID NO: 101001 - protein, 16 aa, Homo sapiens
  CDR3 for alpha chain variable domain of TCR clone 50501 (TRAV12-3, TRAJ53)
CAMSPGSGGSNYKLTF

SEQ ID NO: 101002 - protein, 16 aa, Homo sapiens
  CDR3 for beta chain variable domain of TCR clone 50501 (TRBV11-2, TRBJ1-2)
CASSLDTGGADYGYTF

SEQ ID NO: 101003 - protein, 17 aa, Homo sapiens
  CDR3 for alpha chain variable domain of TCR clone 50502 (TRAV13-1, TRAJ31)
CAPRDRHMFGDGTQLVV

SEQ ID NO: 101004 - protein, 12 aa, Homo sapiens
  CDR3 for beta chain variable domain of TCR clone 50502 (TRBV7-9, TRBJ2-7)
CASSLEGYEQYF

SEQ ID NO: 101005 - protein, 17 aa, Homo sapiens
  CDR3 for alpha chain variable domain of TCR clone 50503 (TRAV3, TRAJ6)
CAVRDGPRAGGSYIPTF

SEQ ID NO: 101006 - protein, 15 aa, Homo sapiens
  CDR3 for beta chain variable domain of TCR clone 50503 (TRBV7-2, TRBJ2-3)
CASSLAGAFIDTQYF

SEQ ID NO: 101007 - protein, 18 aa, Homo sapiens
  CDR3 for alpha chain variable domain of TCR clone 50504 (TRAV17, TRAJ45)
CATSLDLYSGGGADGLTF

SEQ ID NO: 101008 - protein, 15 aa, Homo sapiens
  CDR3 for beta chain variable domain of TCR clone 50504 (TRBV11-3, TRBJ2-1)
CASSKNRGLIYEQFF

SEQ ID NO: 101009 - protein, 12 aa, Homo sapiens
  CDR3 for alpha chain variable domain of TCR clone 50505 (TRAV12-3, TRAJ17)
CAMTITGNKLTF

SEQ ID NO: 101010 - protein, 15 aa, Homo sapiens
  CDR3 for beta chain variable domain of TCR clone 50505 (TRBV20-1, TRBJ2-7)
CSARDRVPGMDEQYF

SEQ ID NO: 101011 - protein, 13 aa, Homo sapiens
  CDR3 for alpha chain variable domain of TCR clone 50506 (TRAV12-2, TRAJ50)
CAVIVTSYDKVIF

SEQ ID NO: 101012 - protein, 14 aa, Homo sapiens
  CDR3 for beta chain variable domain of TCR clone 50506 (TRBV9, TRBJ2-1)
CASSVDPRGKGQFF

SEQ ID NO: 101013 - protein, 11 aa, Homo sapiens
  CDR3 for alpha chain variable domain of TCR clone 50507 (TRAV4, TRAJ23)
CLVAPGGKFIF

SEQ ID NO: 101014 - protein, 15 aa, Homo sapiens
  CDR3 for beta chain variable domain of TCR clone 50507 (TRBV7-2, TRBJ2-1)
CASSFQADEYNEQFF

SEQ ID NO: 101015 - protein, 10 aa, Homo sapiens
  CDR3 for alpha chain variable domain of TCR clone 50508 (TRAV16, TRAJ22)
SAMYLRQLTF

SEQ ID NO: 101016 - protein, 16 aa, Homo sapiens
  CDR3 for beta chain variable domain of TCR clone 50508 (TRBV13, TRBJ2-2)
CASSPRTGEHTGELFF

SEQ ID NO: 101017 - protein, 16 aa, Homo sapiens
  CDR3 for alpha chain variable domain of TCR clone 50509 (TRAV4, TRAJ22)
CLVGDLYSGSARQLTF

SEQ ID NO: 101018 - protein, 16 aa, Homo sapiens
  CDR3 for beta chain variable domain of TCR clone 50509 (TRBV7-9, TRBJ2-1)
CASSDVAGGSYNEQCF

SEQ ID NO: 101019 - protein, 12 aa, Homo sapiens
  CDR3 for alpha chain variable domain of TCR clone 50510 (TRAV21, TRAJ11)
CAATSGYSTLTF

SEQ ID NO: 101020 - protein, 14 aa, Homo sapiens
  CDR3 for beta chain variable domain of TCR clone 50510 (TRBV20-1, TRBJ2-7)
RSAPELAGVGEQYF

SEQ ID NO: 101021 - protein, 10 aa, Homo sapiens
  CDR3 for alpha chain variable domain of TCR clone 50511 (TRAV2, TRAJ34)
CAVVNDKLIF

SEQ ID NO: 101022 - protein, 14 aa, Homo sapiens
  CDR3 for beta chain variable domain of TCR clone 50511 (TRBV11-2, TRBJ2-3)
CAGSRLARTDTQYF

SEQ ID NO: 101023 - protein, 12 aa, Homo sapiens
  CDR3 for alpha chain variable domain of TCR clone 50512 (TRAV2, TRAJ24)
CAATDSLGKFQF

SEQ ID NO: 101024 - protein, 15 aa, Homo sapiens
  CDR3 for beta chain variable domain of TCR clone 50512 (TRBV10-3, TRBJ2-2)
CAIYTGGTGTGELVF

SEQ ID NO: 101025 - protein, 16 aa, Homo sapiens
  CDR3 for alpha chain variable domain of TCR clone 50513 (TRAV4, TRAJ9)
CLVGDPNRPGGFKTIF

SEQ ID NO: 101026 - protein, 14 aa, Homo sapiens
  CDR3 for beta chain variable domain of TCR clone 50513 (TRBV20-1, TRBJ1-1)
CSAQTRIGGTEAFS

SEQ ID NO: 101027 - protein, 14 aa, Homo sapiens
  CDR3 for alpha chain variable domain of TCR clone 50514 (TRAV8-3, TRAJ20)
CAAGPRGNDYKLSF

SEQ ID NO: 101028 - protein, 11 aa, Homo sapiens
  CDR3 for beta chain variable domain of TCR clone 50514 (TRBV10-3, TRBJ2-2)
CATKGTGELFF

SEQ ID NO: 101029 - protein, 16 aa, Homo sapiens
  CDR3 for alpha chain variable domain of TCR clone 50515 (TRAV12-3, TRAJ28)
CAMRANSGAGSYQLTF

SEQ ID NO: 101030 - protein, 16 aa, Homo sapiens
  CDR3 for beta chain variable domain of TCR clone 50515 (TRBV7-2, TRBJ1-3)
CASSRLEASSGNTTYF

SEQ ID NO: 101031 - protein, 14 aa, Homo sapiens
  CDR3 for alpha chain variable domain of TCR clone 50516 (TRAV2, TRAJ20)
CAVEDVVNDYKLSF

SEQ ID NO: 101032 - protein, 13 aa, Homo sapiens
  CDR3 for beta chain variable domain of TCR clone 50516 (TRBV19, TRBJ2-7)
CASRKEGGSEQYF

SEQ ID NO: 101033 - protein, 14 aa, Homo sapiens
  CDR3 for alpha chain variable domain of TCR clone 50517 (TRAV20, TRAJ10)
CAVRVEGGGNKLTF

SEQ ID NO: 101034 - protein, 18 aa, Homo sapiens
  CDR3 for beta chain variable domain of TCR clone 50517 (TRBV24-1, TRBJ2-1)
CATSDLMFLGRGVNEQFF

SEQ ID NO: 101035 - protein, 13 aa, Homo sapiens
  CDR3 for alpha chain variable domain of TCR clone 50518 (TRAV26-1, TRAJ39)
CIVRVEGRQHAHL

SEQ ID NO: 101036 - protein, 15 aa, Homo sapiens
  CDR3 for beta chain variable domain of TCR clone 50518 (TRBV7-9, TRBJ1-5)
CASSQGHQPNQPQHF

SEQ ID NO: 101037 - protein, 11 aa, Homo sapiens
  CDR3 for alpha chain variable domain of TCR clone 50519 (TRAV21, TRAJ34)
CAHYNTDKIIF

SEQ ID NO: 101038 - protein, 13 aa, Homo sapiens
  CDR3 for beta chain variable domain of TCR clone 50519 (TRBV7-6, TRBJ1-2)
CASSLVADYGYTF

SEQ ID NO: 101039 - protein, 13 aa, Homo sapiens
  CDR3 for alpha chain variable domain of TCR clone 50520 (TRAV35, TRAJ42)
CAGFPGGQGNLIF

SEQ ID NO: 101040 - protein, 14 aa, Homo sapiens
  CDR3 for beta chain variable domain of TCR clone 50520 (TRBV19, TRBJ2-1)
CASPTFVLSGEQFF

SEQ ID NO: 101041 - protein, 14 aa, Homo sapiens
  CDR3 for alpha chain variable domain of TCR clone 50521 (TRAV35, TRAJ33)
CAGSSQDSNYQLIW

SEQ ID NO: 101042 - protein, 17 aa, Homo sapiens
  CDR3 for beta chain variable domain of TCR clone 50521 (TRBV13, TRBJ2-3)
CASSLSRVAGGRNTQYF

SEQ ID NO: 101043 - protein, 15 aa, Homo sapiens
  CDR3 for alpha chain variable domain of TCR clone 50522 (TRAV2, TRAJ9)
CAVEDRGTGGFKTIF

SEQ ID NO: 101044 - protein, 15 aa, Homo sapiens
  CDR3 for beta chain variable domain of TCR clone 50522 (TRBV20-1, TRBJ2-7)
CSAESGTSGAYEQYF

SEQ ID NO: 101045 - protein, 14 aa, Homo sapiens
  CDR3 for alpha chain variable domain of TCR clone 50523 (TRAV17, TRAJ16)
CATADFSDGQKLLS

SEQ ID NO: 101046 - protein, 15 aa, Homo sapiens
  CDR3 for beta chain variable domain of TCR clone 50523 (TRBV6-5, TRBJ2-1)
CASSYDAGAGNEQFF

SEQ ID NO: 101047 - protein, 13 aa, Homo sapiens
  CDR3 for alpha chain variable domain of TCR clone 50524 (TRAV30, TRAJ6)
CGFIEGGSYIPIF

SEQ ID NO: 101048 - protein, 13 aa, Homo sapiens
  CDR3 for beta chain variable domain of TCR clone 50524 (TRBV5-4, TRBJ2-5)
CASSPVSQETQYF

SEQ ID NO: 101049 - protein, 13 aa, Homo sapiens
  CDR3 for alpha chain variable domain of TCR clone 50525 (TRAV13-1, TRAJ39)
CAASIWAGNMLTF

SEQ ID NO: 101050 - protein, 16 aa, Homo sapiens
  CDR3 for beta chain variable domain of TCR clone 50525 (TRBV13, TRBJ2-2)
CASSPRTGEHTGELFF

SEQ ID NO: 101051 - protein, 16 aa, Homo sapiens
  CDR3 for alpha chain variable domain of TCR clone 50526 (TRAV38-1, TRAJ37)
CAFKGDGPSNTGKLIF

SEQ ID NO: 101052 - protein, 13 aa, Homo sapiens
  CDR3 for beta chain variable domain of TCR clone 50526 (TRBV12-4, TRBJ2-5)
CASSLFRRETQYF

SEQ ID NO: 101053 - protein, 17 aa, Homo sapiens
  CDR3 for alpha chain variable domain of TCR clone 50527 (TRAV8-1, TRAJ43)
CAVTNDMRFGAGTRLTV

SEQ ID NO: 101054 - protein, 17 aa, Homo sapiens
  CDR3 for beta chain variable domain of TCR clone 50527 (TRBV5-4, TRBJ2-1)
CASSSPGGRGPYNEQFF

SEQ ID NO: 101055 - protein, 15 aa, Homo sapiens
  CDR3 for alpha chain variable domain of TCR clone 50528 (TRAV17, TRAJ13)
CATDAGSGGYQKVTF

SEQ ID NO: 101056 - protein, 17 aa, Homo sapiens
  CDR3 for beta chain variable domain of TCR clone 50528 (TRBV11-2, TRBJ2-1)
CARSLYPPGVEYNEQFF

SEQ ID NO: 101057 - protein, 15 aa, Homo sapiens
  CDR3 for alpha chain variable domain of TCR clone 50529 (TRAV3, TRAJ5)
CAVRDRKTGRRALTF

SEQ ID NO: 101058 - protein, 12 aa, Homo sapiens
  CDR3 for beta chain variable domain of TCR clone 50529 (TRBV7-8, TRBJ2-7)
CASSLGDREQYF

SEQ ID NO: 101059 - protein, 14 aa, Homo sapiens
  CDR3 for alpha chain variable domain of TCR clone 50530 (TRAV12-2, TRAJ40)
CAVKIPSGTYKYIF

SEQ ID NO: 101060 - protein, 15 aa, Homo sapiens
  CDR3 for beta chain variable domain of TCR clone 50530 (TRBV10-2, TRBJ2-6)
CASSEQGTGANVLTF

SEQ ID NO: 101061 - protein, 16 aa, Homo sapiens
  CDR3 for alpha chain variable domain of TCR clone 50531 (TRAV3, TRAJ37)
YAVRGKGSGNTGKLIF

SEQ ID NO: 101062 - protein, 15 aa, Homo sapiens
  CDR3 for beta chain variable domain of TCR clone 50531 (TRBV7-9, TRBJ1-6)
CASSSPGRGNSPLHF

SEQ ID NO: 101063 - protein, 12 aa, Homo sapiens
  CDR3 for alpha chain variable domain of TCR clone 50532 (TRAV8-3, TRAJ41)
CAVALSGYALNF

SEQ ID NO: 101064 - protein, 18 aa, Homo sapiens
  CDR3 for beta chain variable domain of TCR clone 50532 (TRBV20-1, TRBJ2-6)
CSAETTPTHGPGANVLTF

SEQ ID NO: 101065 - protein, 13 aa, Homo sapiens
  CDR3 for alpha chain variable domain of TCR clone 50533 (TRAV3, TRAJ27)
CAVRPLGAGKSTF

SEQ ID NO: 101066 - protein, 13 aa, Homo sapiens
  CDR3 for beta chain variable domain of TCR clone 50533 (TRBV7-9, TRBJ2-3)
CASSHGSTDTQYF

SEQ ID NO: 101067 - protein, 17 aa, Homo sapiens
  CDR3 for alpha chain variable domain of TCR clone 50534 (TRAV36/DV7, TRAJ52)
CAVAQRAGGTSYGKLTF

SEQ ID NO: 101068 - protein, 18 aa, Homo sapiens
  CDR3 for beta chain variable domain of TCR clone 50534 (TRBV11-2, TRBJ2-3)
CASSLGGASRGAPNTQYF

SEQ ID NO: 101069 - protein, 14 aa, Homo sapiens
  CDR3 for alpha chain variable domain of TCR clone 50535 (TRAV1-2, TRAJ28)
CAVPSGAGSYQLTF

SEQ ID NO: 101070 - protein, 14 aa, Homo sapiens
  CDR3 for beta chain variable domain of TCR clone 50535 (TRBV10-2, TRBJ1-5)
CASSSTGRNQPQHF

SEQ ID NO: 101071 - protein, 15 aa, Homo sapiens
  CDR3 for alpha chain variable domain of TCR clone 50536 (TRAV8-4, TRAJ37)
CAVSRGSGNTGKLIF

SEQ ID NO: 101072 - protein, 16 aa, Homo sapiens
  CDR3 for beta chain variable domain of TCR clone 50536 (TRBV7-3, TRBJ2-3)
CASSLSGYRPGDTQYF

SEQ ID NO: 101073 - protein, 15 aa, Homo sapiens
  CDR3 for alpha chain variable domain of TCR clone 50537 (TRAV3, TRAJ4)
CAQNMFSGGYNKLIF

SEQ ID NO: 101074 - protein, 16 aa, Homo sapiens
  CDR3 for beta chain variable domain of TCR clone 50537 (TRBV13, TRBJ2-2)
CASSPRTGEHTGELFF

SEQ ID NO: 101075 - protein, 14 aa, Homo sapiens
  CDR3 for alpha chain variable domain of TCR clone 50538 (TRAV3, TRAJ27)
CAVRDDTNAGKSTF

SEQ ID NO: 101076 - protein, 15 aa, Homo sapiens
  CDR3 for beta chain variable domain of TCR clone 50538 (TRBV7-7, TRBJ2-2)
CAASKLAKNTGELFF

SEQ ID NO: 101077 - protein, 11 aa, Homo sapiens
  CDR3 for alpha chain variable domain of TCR clone 50539 (TRAV12-3, TRAJ43)
CAMSVSNDMRF

SEQ ID NO: 101078 - protein, 16 aa, Homo sapiens
  CDR3 for beta chain variable domain of TCR clone 50539 (TRBV28, TRBJ2-2)
CASSLPLDRDGGELFF

SEQ ID NO: 101079 - protein, 16 aa, Homo sapiens
  CDR3 for alpha chain variable domain of TCR clone 50540 (TRAV21, TRAJ37)
CAVRPRGSSNTGRLIF

SEQ ID NO: 101080 - protein, 13 aa, Homo sapiens
  CDR3 for beta chain variable domain of TCR clone 50540 (TRBV7-9, TRBJ2-3)
CASSPGSTDTQYF

SEQ ID NO: 101081 - protein, 13 aa, Homo sapiens
  CDR3 for alpha chain variable domain of TCR clone 50541 (TRAV13-2, TRAJ40)
CAEFTSGTYKYIF

SEQ ID NO: 101082 - protein, 12 aa, Homo sapiens
  CDR3 for beta chain variable domain of TCR clone 50541 (TRBV7-9, TRBJ2-7)
CASSLEGYEQYF

SEQ ID NO: 101083 - protein, 13 aa, Homo sapiens
  CDR3 for alpha chain variable domain of TCR clone 50542 (TRAV6, TRAJ16)
CALDDSDGQKLLF

SEQ ID NO: 101084 - protein, 17 aa, Homo sapiens
  CDR3 for beta chain variable domain of TCR clone 50542 (TRBV13, TRBJ2-3)
CASSLSRVAGGRNTQYF

SEQ ID NO: 101085 - protein, 15 aa, Homo sapiens
  CDR3 for alpha chain variable domain of TCR clone 50543 (TRAV26-1, TRAJ29)
CIVRVEGSGNTPLVF

SEQ ID NO: 101086 - protein, 14 aa, Homo sapiens
  CDR3 for beta chain variable domain of TCR clone 50543 (TRBV18, TRBJ2-5)
CASSLGVSQETQYF

SEQ ID NO: 101087 - protein, 13 aa, Homo sapiens
  CDR3 for alpha chain variable domain of TCR clone 50544 (TRAV3, TRAJ27)
CAVRPLGAGKSPF

SEQ ID NO: 101088 - protein, 12 aa, Homo sapiens
  CDR3 for beta chain variable domain of TCR clone 50544 (TRBV7-9, TRBJ2-7)
CATRTDAYEQYF

SEQ ID NO: 101089 - protein, 14 aa, Homo sapiens
  CDR3 for alpha chain variable domain of TCR clone 50545 (TRAV13-1, TRAJ44)
CAAKATGTASKLTF

SEQ ID NO: 101090 - protein, 13 aa, Homo sapiens
  CDR3 for beta chain variable domain of TCR clone 50545 (TRBV7-3, TRBJ1-1)
CASSQDWGAEAFF

SEQ ID NO: 101091 - protein, 17 aa, Homo sapiens
  CDR3 for alpha chain variable domain of TCR clone 50546 (TRAV4, TRAJ13)
CLVGVQGSSGGYQKATF

SEQ ID NO: 101092 - protein, 18 aa, Homo sapiens
  CDR3 for beta chain variable domain of TCR clone 50546 (TRBV15, TRBJ2-3)
CATSRDGARSWDTDTQYF

SEQ ID NO: 101093 - protein, 16 aa, Homo sapiens
  CDR3 for alpha chain variable domain of TCR clone 50547 (TRAV8-3, TRAJ18)
CAVALDRGSTPGRLYF

SEQ ID NO: 101094 - protein, 11 aa, Homo sapiens
  CDR3 for beta chain variable domain of TCR clone 50547 (TRBV29-1, TRBJ1-1)
CSVEILTEAFF

SEQ ID NO: 101095 - protein, 18 aa, Homo sapiens
  CDR3 for alpha chain variable domain of TCR clone 50548 (TRAV12-3, TRAJ52)
CAMSVGGAGSTSYGKLTF

SEQ ID NO: 101096 - protein, 15 aa, Homo sapiens
  CDR3 for beta chain variable domain of TCR clone 50548 (TRBV27, TRBJ1-6)
CASSFDRGLGSPLHF

SEQ ID NO: 101097 - protein, 15 aa, Homo sapiens
  CDR3 for alpha chain variable domain of TCR clone 50549 (TRAV14/DV4, TRAJ12)
CAMREERDSSYRLIF

SEQ ID NO: 101098 - protein, 17 aa, Homo sapiens
  CDR3 for beta chain variable domain of TCR clone 50549 (TRBV2, TRBJ2-1)
CASSRPGQGVMVNEQFF

SEQ ID NO: 101099 - protein, 12 aa, Homo sapiens
  CDR3 for alpha chain variable domain of TCR clone 50550 (TRAV17, TRAJ4)
CATDGGHNKLIF

SEQ ID NO: 101100 - protein, 13 aa, Homo sapiens
  CDR3 for beta chain variable domain of TCR clone 50550 (TRBV29-1, TRBJ2-2)
CSTTGVNTGELFF

SEQ ID NO: 101101 - protein, 12 aa, Homo sapiens
  CDR3 for alpha chain variable domain of TCR clone 50551 (TRAV2, TRAJ10)
CASAGGGNKLTF

SEQ ID NO: 101102 - protein, 14 aa, Homo sapiens
  CDR3 for beta chain variable domain of TCR clone 50551 (TRBV7-2, TRBJ2-2)
CASRGQGAAGELFF

SEQ ID NO: 101103 - protein, 15 aa, Homo sapiens
  CDR3 for alpha chain variable domain of TCR clone 50552 (TRAV35, TRAJ58)
CAGRRQETSGSRLTF

SEQ ID NO: 101104 - protein, 12 aa, Homo sapiens
  CDR3 for beta chain variable domain of TCR clone 50552 (TRBV11-2, TRBJ2-1)
CASSPGNNEQFF

SEQ ID NO: 101105 - protein, 18 aa, Homo sapiens
  CDR3 for alpha chain variable domain of TCR clone 50553 (TRAV13-1, TRAJ52)
CAAKNPNAGGTSYGKLTF

SEQ ID NO: 101106 - protein, 12 aa, Homo sapiens
  CDR3 for beta chain variable domain of TCR clone 50553 (TRBV7-8, TRBJ2-7)
CASSLGDREQYF

SEQ ID NO: 101107 - protein, 13 aa, Homo sapiens
  CDR3 for alpha chain variable domain of TCR clone 50554 (TRAV3, TRAJ21)
CAVREPDFNKFYF

SEQ ID NO: 101108 - protein, 14 aa, Homo sapiens
  CDR3 for beta chain variable domain of TCR clone 50554 (TRBV2, TRBJ2-7)
CASSLTSGGYEQYF

SEQ ID NO: 101109 - protein, 15 aa, Homo sapiens
  CDR3 for alpha chain variable domain of TCR clone 50555 (TRAV27, TRAJ38)
CAAPRNAGNNRKLIW

SEQ ID NO: 101110 - protein, 13 aa, Homo sapiens
  CDR3 for beta chain variable domain of TCR clone 50555 (TRBV12-5, TRBJ2-3)
CASGDRQSDTQYF

SEQ ID NO: 101111 - protein, 14 aa, Homo sapiens
  CDR3 for alpha chain variable domain of TCR clone 50556 (TRAV13-1, TRAJ24)
CAASRTDSWGKLQF

SEQ ID NO: 101112 - protein, 15 aa, Homo sapiens
  CDR3 for beta chain variable domain of TCR clone 50556 (TRBV28, TRBJ2-5)
CASSPGQGSIETQYF

SEQ ID NO: 101113 - protein, 15 aa, Homo sapiens
  CDR3 for alpha chain variable domain of TCR clone 50557 (TRAV21, TRAJ24)
CAARSSTDSWGKLQF

SEQ ID NO: 101114 - protein, 15 aa, Homo sapiens
  CDR3 for beta chain variable domain of TCR clone 50557 (TRBV28, TRBJ2-1)
CASSIIAGGRSEQFF

SEQ ID NO: 101115 - protein, 14 aa, Homo sapiens
  CDR3 for alpha chain variable domain of TCR clone 50558 (TRAV1-2, TRAJ8)
CAVREDTGFQKLVF

SEQ ID NO: 101116 - protein, 17 aa, Homo sapiens
  CDR3 for beta chain variable domain of TCR clone 50558 (TRBV4-3, TRBJ1-1)
CASSQDLGPFMNTEAFF

SEQ ID NO: 101117 - protein, 14 aa, Homo sapiens
  CDR3 for alpha chain variable domain of TCR clone 50559 (TRAV27, TRAJ44)
CAASFTGTASKLTF

SEQ ID NO: 101118 - protein, 13 aa, Homo sapiens
  CDR3 for beta chain variable domain of TCR clone 50559 (TRBV12-4, TRBJ1-2)
CASSLRQGKGYTF

SEQ ID NO: 101119 - protein, 15 aa, Homo sapiens
  CDR3 for alpha chain variable domain of TCR clone 50560 (TRAV12-3, TRAJ6)
CAMSATTGGSYIPTF

SEQ ID NO: 101120 - protein, 15 aa, Homo sapiens
  CDR3 for beta chain variable domain of TCR clone 50560 (TRBV7-6, TRBJ1-5)
CASSQSSGINQTQHF

SEQ ID NO: 101121 - protein, 11 aa, Homo sapiens
  CDR3 for alpha chain variable domain of TCR clone 50561 (TRAV3, TRAJ21)
CAVGNFNKFYF

SEQ ID NO: 101122 - protein, 15 aa, Homo sapiens
  CDR3 for beta chain variable domain of TCR clone 50561 (TRBV5-1, TRBJ2-1)
CASSLVANSYSEQFF

SEQ ID NO: 101123 - protein, 12 aa, Homo sapiens
  CDR3 for alpha chain variable domain of TCR clone 50562 (TRAV2, TRAJ34)
CAVERNTDKLIF

SEQ ID NO: 101124 - protein, 14 aa, Homo sapiens
  CDR3 for beta chain variable domain of TCR clone 50562 (TRBV7-9, TRBJ2-1)
CASSDNAGYNEQFF

SEQ ID NO: 101125 - protein, 14 aa, Homo sapiens
  CDR3 for alpha chain variable domain of TCR clone 50563 (TRAV2, TRAJ9)
CAVEDRSGGFKTIF

SEQ ID NO: 101126 - protein, 15 aa, Homo sapiens
  CDR3 for beta chain variable domain of TCR clone 50563 (TRBV27, TRBJ2-1)
CASSNGGGSSNEQFF

SEQ ID NO: 101127 - protein, 14 aa, Homo sapiens
  CDR3 for alpha chain variable domain of TCR clone 50564 (TRAV17, TRAJ16)
CATADFSDGRKLLF

SEQ ID NO: 101128 - protein, 15 aa, Homo sapiens
  CDR3 for beta chain variable domain of TCR clone 50564 (TRBV18, TRBJ2-1)
CASSPPSASYNEQFF

SEQ ID NO: 101129 - protein, 15 aa, Homo sapiens
  CDR3 for alpha chain variable domain of TCR clone 50565 (TRAV3, TRAJ22)
CAVRDRGGSARQLTF

SEQ ID NO: 101130 - protein, 16 aa, Homo sapiens
  CDR3 for beta chain variable domain of TCR clone 50565 (TRBV7-9, TRBJ1-2)
CASSLGFSSGEDGYTF

SEQ ID NO: 101131 - protein, 12 aa, Homo sapiens
  CDR3 for alpha chain variable domain of TCR clone 50566 (TRAV29/DV5, TRAJ34)
CAARHNTDKLIF

SEQ ID NO: 101132 - protein, 16 aa, Homo sapiens
  CDR3 for beta chain variable domain of TCR clone 50566 (TRBV2, TRBJ2-1)
CASRPRSGGPYGEQFF

SEQ ID NO: 101133 - protein, 16 aa, Homo sapiens
  CDR3 for alpha chain variable domain of TCR clone 50567 (TRAV16, TRAJ4)
CALSRMFSGGYNKLIF

SEQ ID NO: 101134 - protein, 15 aa, Homo sapiens
  CDR3 for beta chain variable domain of TCR clone 50567 (TRBV9, TRBJ1-6)
CASSVAGTGDSPLHF

SEQ ID NO: 101135 - protein, 16 aa, Homo sapiens
  CDR3 for alpha chain variable domain of TCR clone 50568 (TRAV8-3, TRAJ10)
CAVGPGVTGGGNKLTF

SEQ ID NO: 101136 - protein, 13 aa, Homo sapiens
  CDR3 for beta chain variable domain of TCR clone 50568 (TRBV18, TRBJ1-1)
RASSPGPSGEAFF

SEQ ID NO: 101137 - protein, 16 aa, Homo sapiens
  CDR3 for alpha chain variable domain of TCR clone 50569 (TRAV30, TRAJ24)
CGTEIVDADSWGKFQF

SEQ ID NO: 101138 - protein, 16 aa, Homo sapiens
  CDR3 for beta chain variable domain of TCR clone 50569 (TRBV19, TRBJ1-1)
CASRVDVTGAAWGAFF

SEQ ID NO: 101139 - protein, 15 aa, Homo sapiens
  CDR3 for alpha chain variable domain of TCR clone 50570 (TRAV27, TRAJ38)
CAGRFNAGNNRKLIW

SEQ ID NO: 101140 - protein, 13 aa, Homo sapiens
  CDR3 for beta chain variable domain of TCR clone 50570 (TRBV20-1, TRBJ1-1)
CSAPLGGGTEAFF

SEQ ID NO: 101141 - protein, 15 aa, Homo sapiens
  CDR3 for alpha chain variable domain of TCR clone 50571 (TRAV12-2, TRAJ53)
CAVNGGGGSNYKLTF

SEQ ID NO: 101142 - protein, 16 aa, Homo sapiens
  CDR3 for beta chain variable domain of TCR clone 50571 (TRBV24-1, TRBJ2-3)
CATSDPGTGATDTQYF

SEQ ID NO: 101143 - protein, 15 aa, Homo sapiens
  CDR3 for alpha chain variable domain of TCR clone 50572 (TRAV8-3, TRAJ27)
CAVGPSKTNAGKSTF

SEQ ID NO: 101144 - protein, 13 aa, Homo sapiens
  CDR3 for beta chain variable domain of TCR clone 50572 (TRBV20-1, TRBJ1-1)
CSARGGGNTEAFF

SEQ ID NO: 101145 - protein, 12 aa, Homo sapiens
  CDR3 for alpha chain variable domain of TCR clone 50573 (TRAV2, TRAJ31)
SAVEDNNARLMF

SEQ ID NO: 101146 - protein, 16 aa, Homo sapiens
  CDR3 for beta chain variable domain of TCR clone 50573 (TRBV10-3, TRBJ2-1)
CAISGVGDGGGGEQFF

SEQ ID NO: 101147 - protein, 12 aa, Homo sapiens
  CDR3 for alpha chain variable domain of TCR clone 50574 (TRAV12-3, TRAJ17)
CAMTLTGNKLTF

SEQ ID NO: 101148 - protein, 15 aa, Homo sapiens
  CDR3 for beta chain variable domain of TCR clone 50574 (TRBV2, TRBJ2-1)
CASSEEREGDNEQFF

SEQ ID NO: 101149 - protein, 13 aa, Homo sapiens
  CDR3 for alpha chain variable domain of TCR clone 50575 (TRAV20, TRAJ54)
CAVQAGGAQKLEF

SEQ ID NO: 101150 - protein, 14 aa, Homo sapiens
  CDR3 for beta chain variable domain of TCR clone 50575 (TRBV20-1, TRBJ2-7)
CSAKTGTGGYEQYF

SEQ ID NO: 101151 - protein, 14 aa, Homo sapiens
  CDR3 for alpha chain variable domain of TCR clone 50576 (TRAV16, TRAJ33)
CALSAMASNYQLIW

SEQ ID NO: 101152 - protein, 12 aa, Homo sapiens
  CDR3 for beta chain variable domain of TCR clone 50576 (TRBV5-1, TRBJ1-2)
CASSQDTYGYTF

SEQ ID NO: 101153 - protein, 16 aa, Homo sapiens
  CDR3 for alpha chain variable domain of TCR clone 50577 (TRAV12-1, TRAJ45)
CVVIRYSGGGADGLTF

SEQ ID NO: 101154 - protein, 12 aa, Homo sapiens
  CDR3 for beta chain variable domain of TCR clone 50577 (TRBV6-5, TRBJ2-2)
CASRQVTGELFF

SEQ ID NO: 101155 - protein, 11 aa, Homo sapiens
  CDR3 for alpha chain variable domain of TCR clone 50578 (TRAV12-3, TRAJ43)
CAMSVSNDMRF

SEQ ID NO: 101156 - protein, 14 aa, Homo sapiens
  CDR3 for beta chain variable domain of TCR clone 50578 (TRBV7-8, TRBJ2-3)
CASRLEAGTDTQYF

SEQ ID NO: 101157 - protein, 12 aa, Homo sapiens
  CDR3 for alpha chain variable domain of TCR clone 50579 (TRAV17, TRAJ4)
CATDGGYNKLIF

SEQ ID NO: 101158 - protein, 15 aa, Homo sapiens
  CDR3 for beta chain variable domain of TCR clone 50579 (TRBV19, TRBJ2-7)
CASSPAGSGEALRYF

SEQ ID NO: 101159 - protein, 14 aa, Homo sapiens
  CDR3 for alpha chain variable domain of TCR clone 50580 (TRAV1-2, TRAJ6)
CAVSLPGGSYIPTF

SEQ ID NO: 101160 - protein, 15 aa, Homo sapiens
  CDR3 for beta chain variable domain of TCR clone 50580 (TRBV28, TRBJ2-7)
CASSPGGRGFYEQHF

SEQ ID NO: 101161 - protein, 14 aa, Homo sapiens
  CDR3 for alpha chain variable domain of TCR clone 50581 (TRAV8-3, TRAJ4)
CAVGAAGGYNKLIF

SEQ ID NO: 101162 - protein, 15 aa, Homo sapiens
  CDR3 for beta chain variable domain of TCR clone 50581 (TRBV12-4, TRBJ2-5)
CASSPPTGLQETQYF

SEQ ID NO: 101163 - protein, 15 aa, Homo sapiens
  CDR3 for alpha chain variable domain of TCR clone 50582 (TRAV1-2, TRAJ26)
CAVRDLITMVRILSL

SEQ ID NO: 101164 - protein, 17 aa, Homo sapiens
  CDR3 for beta chain variable domain of TCR clone 50582 (TRBV28, TRBJ2-5)
CASSRQGGLAGAETQYF

SEQ ID NO: 101165 - protein, 16 aa, Homo sapiens
  CDR3 for alpha chain variable domain of TCR clone 50583 (TRAV38-2/DV8, TRAJ45)
CAYTTTLGGDADGLTF

SEQ ID NO: 101166 - protein, 14 aa, Homo sapiens
  CDR3 for beta chain variable domain of TCR clone 50583 (TRBV7-9, TRBJ2-2)
CASSLGHRTGELFF

SEQ ID NO: 101167 - protein, 12 aa, Homo sapiens
  CDR3 for alpha chain variable domain of TCR clone 50584 (TRAV13-2, TRAJ23)
CAERHRGGKLIF

SEQ ID NO: 101168 - protein, 12 aa, Homo sapiens
  CDR3 for beta chain variable domain of TCR clone 50584 (TRBV7-3, TRBJ2-1)
CASSFINNEQFF

SEQ ID NO: 101169 - protein, 14 aa, Homo sapiens
  CDR3 for alpha chain variable domain of TCR clone 50585 (TRAV13-1, TRAJ44)
RAAKATGTASKLTF

SEQ ID NO: 101170 - protein, 14 aa, Homo sapiens
  CDR3 for beta chain variable domain of TCR clone 50585 (TRBV19, TRBJ2-2)
CASSTLHRSGELFF

SEQ ID NO: 101171 - protein, 10 aa, Homo sapiens
  CDR3 for alpha chain variable domain of TCR clone 50586 (TRAV16, TRAJ22)
SAMYLRQLTF

SEQ ID NO: 101172 - protein, 14 aa, Homo sapiens
  CDR3 for beta chain variable domain of TCR clone 50586 (TRBV19, TRBJ2-1)
CASPTFVLSGEQFF

SEQ ID NO: 101173 - protein, 14 aa, Homo sapiens
  CDR3 for alpha chain variable domain of TCR clone 50587 (TRAV1-2, TRAJ8)
CAVREDTGFQKLVF

SEQ ID NO: 101174 - protein, 11 aa, Homo sapiens
  CDR3 for beta chain variable domain of TCR clone 50587 (TRBV10-3, TRBJ2-7)
CAISEGLEQYF

SEQ ID NO: 101175 - protein, 12 aa, Homo sapiens
  CDR3 for alpha chain variable domain of TCR clone 50588 (TRAV16, TRAJ26)
CALRSYGQNFVF

SEQ ID NO: 101176 - protein, 14 aa, Homo sapiens
  CDR3 for beta chain variable domain of TCR clone 50588 (TRBV10-3, TRBJ2-1)
CAISSDLAYNEQSF

SEQ ID NO: 101177 - protein, 15 aa, Homo sapiens
  CDR3 for alpha chain variable domain of TCR clone 50589 (TRAV21, TRAJ53)
CATLNSGGSNYKLTF

SEQ ID NO: 101178 - protein, 14 aa, Homo sapiens
  CDR3 for beta chain variable domain of TCR clone 50589 (TRBV7-2, TRBJ2-5)
CASSPRGSSETQYF

SEQ ID NO: 101179 - protein, 15 aa, Homo sapiens
  CDR3 for alpha chain variable domain of TCR clone 50590 (TRAV29/DV5, TRAJ24)
CAASGQLTAGGNSSL

SEQ ID NO: 101180 - protein, 12 aa, Homo sapiens
  CDR3 for beta chain variable domain of TCR clone 50590 (TRBV11-2, TRBJ2-2)
CASSLPTGELFF

SEQ ID NO: 101181 - protein, 16 aa, Homo sapiens
  CDR3 for alpha chain variable domain of TCR clone 50591 (TRAV17, TRAJ53)
CATDALSGCSNYKLTF

SEQ ID NO: 101182 - protein, 12 aa, Homo sapiens
  CDR3 for beta chain variable domain of TCR clone 50591 (TRBV5-1, TRBJ2-7)
CASSFRGYEQYF

SEQ ID NO: 101183 - protein, 14 aa, Homo sapiens
  CDR3 for alpha chain variable domain of TCR clone 50592 (TRAV13-1, TRAJ10)
CAAKEPGGGNKLTF

SEQ ID NO: 101184 - protein, 16 aa, Homo sapiens
  CDR3 for beta chain variable domain of TCR clone 50592 (TRBV5-1, TRBJ2-7)
CASSLEGLAGLYEQYF

SEQ ID NO: 101185 - protein, 18 aa, Homo sapiens
  CDR3 for alpha chain variable domain of TCR clone 50593 (TRAV21, TRAJ52)
CAVRPSPAGGTSYGKLTF

SEQ ID NO: 101186 - protein, 17 aa, Homo sapiens
  CDR3 for beta chain variable domain of TCR clone 50593 (TRBV13, TRBJ2-3)
CASTLSRVAGGRNTQYF

SEQ ID NO: 101187 - protein, 14 aa, Homo sapiens
  CDR3 for alpha chain variable domain of TCR clone 50594 (TRAV27, TRAJ22)
CAGVSVLGNRQLTF

SEQ ID NO: 101188 - protein, 17 aa, Homo sapiens
  CDR3 for beta chain variable domain of TCR clone 50594 (TRBV14, TRBJ2-1)
CASSQDRRVTSYNEQFF

SEQ ID NO: 101189 - protein, 12 aa, Homo sapiens
  CDR3 for alpha chain variable domain of TCR clone 50595 (TRAV12-1, TRAJ40)
CVVYSGTYKYIF

SEQ ID NO: 101190 - protein, 18 aa, Homo sapiens
  CDR3 for beta chain variable domain of TCR clone 50595 (TRBV11-2, TRBJ2-3)
CASSLVGASRGAPNTQYF

SEQ ID NO: 101191 - protein, 10 aa, Homo sapiens
  CDR3 for alpha chain variable domain of TCR clone 50596 (TRAV23/DV6, TRAJ57)
CAASSTLSQG

SEQ ID NO: 101192 - protein, 12 aa, Homo sapiens
  CDR3 for beta chain variable domain of TCR clone 50596 (TRBV11-2, TRBJ2-2)
CASSLPTGELFF

SEQ ID NO: 101193 - protein, 14 aa, Homo sapiens
  CDR3 for alpha chain variable domain of TCR clone 50597 (TRAV1-1, TRAJ27)
CAVTYNTNAGKSTF

SEQ ID NO: 101194 - protein, 15 aa, Homo sapiens
  CDR3 for beta chain variable domain of TCR clone 50597 (TRBV7-2, TRBJ2-1)
CASSSGLAGGNEQSF

SEQ ID NO: 101195 - protein, 14 aa, Homo sapiens
  CDR3 for alpha chain variable domain of TCR clone 50598 (TRAV12-1, TRAJ43)
CVVNGRSNNNDMRF

SEQ ID NO: 101196 - protein, 12 aa, Homo sapiens
  CDR3 for beta chain variable domain of TCR clone 50598 (TRBV29-1, TRBJ2-3)
CSATGGADTQYF

SEQ ID NO: 101197 - protein, 13 aa, Homo sapiens
  CDR3 for alpha chain variable domain of TCR clone 50599 (TRAV3, TRAJ29)
CAVRDIIDAPLVF

SEQ ID NO: 101198 - protein, 14 aa, Homo sapiens
  CDR3 for beta chain variable domain of TCR clone 50599 (TRBV27, TRBJ2-1)
CASSATGGYNEQFF

SEQ ID NO: 101199 - protein, 14 aa, Homo sapiens
  CDR3 for alpha chain variable domain of TCR clone 50600 (TRAV16, TRAJ33)
CALSAMDSNYQLIW

SEQ ID NO: 101200 - protein, 12 aa, Homo sapiens
  CDR3 for beta chain variable domain of TCR clone 50600 (TRBV5-1, TRBJ1-2)
CSSSQDTYGYTF

SEQ ID NO: 101201 - protein, 12 aa, Homo sapiens
  CDR3 for alpha chain variable domain of TCR clone 50601 (TRAV17, TRAJ12)
CATLRSSYKLIF

SEQ ID NO: 101202 - protein, 16 aa, Homo sapiens
  CDR3 for beta chain variable domain of TCR clone 50601 (TRBV28, TRBJ2-7)
CASSLFFETGGREQYF

SEQ ID NO: 101203 - protein, 13 aa, Homo sapiens
  CDR3 for alpha chain variable domain of TCR clone 50602 (TRAV13-1, TRAJ5)
CAARVTGRRALTF

SEQ ID NO: 101204 - protein, 15 aa, Homo sapiens
  CDR3 for beta chain variable domain of TCR clone 50602 (TRBV27, TRBJ2-1)
CASSNGGGSSNEQFF

SEQ ID NO: 101205 - protein, 13 aa, Homo sapiens
  CDR3 for alpha chain variable domain of TCR clone 50603 (TRAV2, TRAJ27)
RAVEAPMQANQPL

SEQ ID NO: 101206 - protein, 13 aa, Homo sapiens
  CDR3 for beta chain variable domain of TCR clone 50603 (TRBV10-2, TRBJ2-3)
CASSESGDHTQYF

SEQ ID NO: 101207 - protein, 14 aa, Homo sapiens
  CDR3 for alpha chain variable domain of TCR clone 50604 (TRAV1-2, TRAJ16)
CAVNRFSDGQKLLF

SEQ ID NO: 101208 - protein, 16 aa, Homo sapiens
  CDR3 for beta chain variable domain of TCR clone 50604 (TRBV6-1, TRBJ1-6)
CASSGQLIIHPSTLGM

SEQ ID NO: 101209 - protein, 14 aa, Homo sapiens
  CDR3 for alpha chain variable domain of TCR clone 50605 (TRAV35, TRAJ42)
CAGRYGGSQGNLIF

SEQ ID NO: 101210 - protein, 15 aa, Homo sapiens
  CDR3 for beta chain variable domain of TCR clone 50605 (TRBV7-9, TRBJ2-1)
CASSLGWGRANEQSF

SEQ ID NO: 101211 - protein, 14 aa, Homo sapiens
  CDR3 for alpha chain variable domain of TCR clone 50606 (TRAV26-1, TRAJ48)
CIVRVGFGNEKLTF

SEQ ID NO: 101212 - protein, 15 aa, Homo sapiens
  CDR3 for beta chain variable domain of TCR clone 50606 (TRBV7-9, TRBJ1-6)
CASSSPGRGNSPLHF

SEQ ID NO: 101213 - protein, 14 aa, Homo sapiens
  CDR3 for alpha chain variable domain of TCR clone 50607 (TRAV16, TRAJ37)
CALDISGNTGKLIF

SEQ ID NO: 101214 - protein, 14 aa, Homo sapiens
  CDR3 for beta chain variable domain of TCR clone 50607 (TRBV7-6, TRBJ2-7)
CASSFRQGADEKYF

SEQ ID NO: 101215 - protein, 15 aa, Homo sapiens
  CDR3 for alpha chain variable domain of TCR clone 50608 (TRAV1-2, TRAJ28)
CAVQYSGAGSYQLTF

SEQ ID NO: 101216 - protein, 14 aa, Homo sapiens
  CDR3 for beta chain variable domain of TCR clone 50608 (TRBV7-2, TRBJ2-7)
CASSPKTSFYEQYF

SEQ ID NO: 101217 - protein, 16 aa, Homo sapiens
  CDR3 for alpha chain variable domain of TCR clone 50609 (TRAV3, TRAJ37)
CAVRVRGSGNTVKLIF

SEQ ID NO: 101218 - protein, 11 aa, Homo sapiens
  CDR3 for beta chain variable domain of TCR clone 50609 (TRBV11-2, TRBJ2-2)
CASSLPGELFF

SEQ ID NO: 101219 - protein, 15 aa, Homo sapiens
  CDR3 for alpha chain variable domain of TCR clone 50610 (TRAV13-1, TRAJ15)
CAASIERQAGTALIF

SEQ ID NO: 101220 - protein, 13 aa, Homo sapiens
  CDR3 for beta chain variable domain of TCR clone 50610 (TRBV4-1, TRBJ2-7)
CASSQGQAYEQYF

SEQ ID NO: 101221 - protein, 14 aa, Homo sapiens
  CDR3 for alpha chain variable domain of TCR clone 50611 (TRAV1-2, TRAJ16)
CAVNRFSDGQKLLF

SEQ ID NO: 101222 - protein, 16 aa, Homo sapiens
  CDR3 for beta chain variable domain of TCR clone 50611 (TRBV20-1, TRBJ1-1)
CSARALTQGMNTEAFF

SEQ ID NO: 101223 - protein, 16 aa, Homo sapiens
  CDR3 for alpha chain variable domain of TCR clone 50612 (TRAV13-1, TRAJ45)
CAASWESGGGADGLTF

SEQ ID NO: 101224 - protein, 14 aa, Homo sapiens
  CDR3 for beta chain variable domain of TCR clone 50612 (TRBV12-4, TRBJ1-3)
CASGRTVSGNTIYF

SEQ ID NO: 101225 - protein, 17 aa, Homo sapiens
  CDR3 for alpha chain variable domain of TCR clone 50613 (TRAV3, TRAJ42)
CAVRDRDYGGSQGNLIF

SEQ ID NO: 101226 - protein, 15 aa, Homo sapiens
  CDR3 for beta chain variable domain of TCR clone 50613 (TRBV6-6, TRBJ2-7)
CASSYSYGGSYEQYF

SEQ ID NO: 101227 - protein, 15 aa, Homo sapiens
  CDR3 for alpha chain variable domain of TCR clone 50614 (TRAV8-3, TRAJ45)
CASSYSGGGADGLTF

SEQ ID NO: 101228 - protein, 14 aa, Homo sapiens
  CDR3 for beta chain variable domain of TCR clone 50614 (TRBV4-2, TRBJ2-1)
CASGLDRAYNEQFF

SEQ ID NO: 101229 - protein, 16 aa, Homo sapiens
  CDR3 for alpha chain variable domain of TCR clone 50615 (TRAV8-3, TRAJ44)
CAVGASNTGTASKLTS

SEQ ID NO: 101230 - protein, 15 aa, Homo sapiens
  CDR3 for beta chain variable domain of TCR clone 50615 (TRBV27, TRBJ1-5)
CASTFNRGSNQPQHF

SEQ ID NO: 101231 - protein, 14 aa, Homo sapiens
  CDR3 for alpha chain variable domain of TCR clone 50616 (TRAV26-1, TRAJ45)
CIEVTGGGADGLTF

SEQ ID NO: 101232 - protein, 14 aa, Homo sapiens
  CDR3 for beta chain variable domain of TCR clone 50616 (TRBV4-1, TRBJ2-2)
CASSQAVNTGELFF

SEQ ID NO: 101233 - protein, 19 aa, Homo sapiens
  CDR3 for alpha chain variable domain of TCR clone 50617 (TRAV21, TRAJ20)
SLVAQPPTSVLPNDYKLSF

SEQ ID NO: 101234 - protein, 14 aa, Homo sapiens
  CDR3 for beta chain variable domain of TCR clone 50617 (TRBV7-2, TRBJ1-3)
CASSRLRSGNTIYF

SEQ ID NO: 101235 - protein, 12 aa, Homo sapiens
  CDR3 for alpha chain variable domain of TCR clone 50618 (TRAV17, TRAJ20)
CATDSNGYKLSF

SEQ ID NO: 101236 - protein, 17 aa, Homo sapiens
  CDR3 for beta chain variable domain of TCR clone 50618 (TRBV5-1, TRBJ2-2)
CASSLAGLSGGTGELFF

SEQ ID NO: 101237 - protein, 12 aa, Homo sapiens
  CDR3 for alpha chain variable domain of TCR clone 50619 (TRAV35, TRAJ49)
CAGWNTGNQFYF

SEQ ID NO: 101238 - protein, 15 aa, Homo sapiens
  CDR3 for beta chain variable domain of TCR clone 50619 (TRBV19, TRBJ2-1)
CASIKGRGPYNEQFF

SEQ ID NO: 101239 - protein, 12 aa, Homo sapiens
  CDR3 for alpha chain variable domain of TCR clone 50620 (TRAV24, TRAJ41)
CAPYDSGYALNF

SEQ ID NO: 101240 - protein, 16 aa, Homo sapiens
  CDR3 for beta chain variable domain of TCR clone 50620 (TRBV10-3, TRBJ2-1)
CAISGVGDGGGGEQFF

SEQ ID NO: 101241 - protein, 11 aa, Homo sapiens
  CDR3 for alpha chain variable domain of TCR clone 50621 (TRAV3, TRAJ21)
CAVGNFNKFYF

SEQ ID NO: 101242 - protein, 13 aa, Homo sapiens
  CDR3 for beta chain variable domain of TCR clone 50621 (TRBV4-1, TRBJ2-2)
CASSQVNTGELFF

SEQ ID NO: 101243 - protein, 14 aa, Homo sapiens
  CDR3 for alpha chain variable domain of TCR clone 50622 (TRAV12-3, TRAJ9)
CAMSPNTGGFKTIF

SEQ ID NO: 101244 - protein, 17 aa, Homo sapiens
  CDR3 for beta chain variable domain of TCR clone 50622 (TRBV13, TRBJ2-3)
CASSLSRVAGGRNTQYF

SEQ ID NO: 101245 - protein, 16 aa, Homo sapiens
  CDR3 for alpha chain variable domain of TCR clone 50623 (TRAV3, TRAJ37)
CAVRGKGSGNTGKLIF

SEQ ID NO: 101246 - protein, 15 aa, Homo sapiens
  CDR3 for beta chain variable domain of TCR clone 50623 (TRBV6-3, TRBJ2-7)
CASSSPGTVFYEQYF

SEQ ID NO: 101247 - protein, 15 aa, Homo sapiens
  CDR3 for alpha chain variable domain of TCR clone 50624 (TRAV2, TRAJ9)
CTVEDRGTGGFKTIF

SEQ ID NO: 101248 - protein, 13 aa, Homo sapiens
  CDR3 for beta chain variable domain of TCR clone 50624 (TRBV19, TRBJ1-2)
CASSVPGQDGYTF

SEQ ID NO: 101249 - protein, 15 aa, Homo sapiens
  CDR3 for alpha chain variable domain of TCR clone 50625 (TRAV35, TRAJ40)
CAGVPGASGTYKYIF

SEQ ID NO: 101250 - protein, 16 aa, Homo sapiens
  CDR3 for beta chain variable domain of TCR clone 50625 (TRBV27, TRBJ2-2)
CASSFRGLVRTGELFF

SEQ ID NO: 101251 - protein, 14 aa, Homo sapiens
  CDR3 for alpha chain variable domain of TCR clone 50626 (TRAV13-1, TRAJ44)
CAAEATGTASKLTF

SEQ ID NO: 101252 - protein, 13 aa, Homo sapiens
  CDR3 for beta chain variable domain of TCR clone 50626 (TRBV5-5, TRBJ1-2)
CASSFWRGEDYTF

SEQ ID NO: 101253 - protein, 11 aa, Homo sapiens
  CDR3 for alpha chain variable domain of TCR clone 50627 (TRAV12-3, TRAJ43)
CAMSVSNDMRF

SEQ ID NO: 101254 - protein, 14 aa, Homo sapiens
  CDR3 for beta chain variable domain of TCR clone 50627 (TRBV18, TRBJ2-7)
CASSPRGGAYEQYF

SEQ ID NO: 101255 - protein, 14 aa, Homo sapiens
  CDR3 for alpha chain variable domain of TCR clone 50628 (TRAV12-2, TRAJ5)
SAVNRSTGRRALTF

SEQ ID NO: 101256 - protein, 12 aa, Homo sapiens
  CDR3 for beta chain variable domain of TCR clone 50628 (TRBV19, TRBJ1-5)
CASSIAQQPQHF

SEQ ID NO: 101257 - protein, 11 aa, Homo sapiens
  CDR3 for alpha chain variable domain of TCR clone 50629 (TRAV3, TRAJ21)
CAVGNFNKFYF

SEQ ID NO: 101258 - protein, 18 aa, Homo sapiens
  CDR3 for beta chain variable domain of TCR clone 50629 (TRBV7-9, TRBJ2-1)
CASSLAVSGTSGRNEQFF

SEQ ID NO: 101259 - protein, 15 aa, Homo sapiens
  CDR3 for alpha chain variable domain of TCR clone 50630 (TRAV38-2/DV8, TRAJ31)
CAYRRALNNNARLMF

SEQ ID NO: 101260 - protein, 16 aa, Homo sapiens
  CDR3 for beta chain variable domain of TCR clone 50630 (TRBV2, TRBJ1-1)
CASSPPNRGMNTEAFF

SEQ ID NO: 101261 - protein, 15 aa, Homo sapiens
  CDR3 for alpha chain variable domain of TCR clone 50631 (TRAV13-2, TRAJ53)
CAERGSRGSNYKLTL

SEQ ID NO: 101262 - protein, 14 aa, Homo sapiens
  CDR3 for beta chain variable domain of TCR clone 50631 (TRBV4-1, TRBJ2-2)
CASSQYPDTGELFF

SEQ ID NO: 101263 - protein, 12 aa, Homo sapiens
  CDR3 for alpha chain variable domain of TCR clone 50632 (TRAV16, TRAJ26)
CALRSYCQNFVF

SEQ ID NO: 101264 - protein, 14 aa, Homo sapiens
  CDR3 for beta chain variable domain of TCR clone 50632 (TRBV10-3, TRBJ2-1)
CAISSDLAYNEQFF

SEQ ID NO: 101265 - protein, 18 aa, Homo sapiens
  CDR3 for alpha chain variable domain of TCR clone 50633 (TRAV21, TRAJ52)
CAVRPSPAGGTSYGKLTF

SEQ ID NO: 101266 - protein, 15 aa, Homo sapiens
  CDR3 for beta chain variable domain of TCR clone 50633 (TRBV19, TRBJ1-2)
CASSVGQVLNYGYTF

SEQ ID NO: 101267 - protein, 15 aa, Homo sapiens
  CDR3 for alpha chain variable domain of TCR clone 50634 (TRAV34, TRAJ38)
CGADFAPGNNRKLIW

SEQ ID NO: 101268 - protein, 15 aa, Homo sapiens
  CDR3 for beta chain variable domain of TCR clone 50634 (TRBV6-3, TRBJ2-7)
CASSSPGTVFYEQYF

SEQ ID NO: 101269 - protein, 13 aa, Homo sapiens
  CDR3 for alpha chain variable domain of TCR clone 50635 (TRAV27, TRAJ45)
CRSSGGGADGLTF

SEQ ID NO: 101270 - protein, 20 aa, Homo sapiens
  CDR3 for beta chain variable domain of TCR clone 50635 (TRBV28, TRBJ2-1)
CASTPIGRSPGLAGGNEQFF

SEQ ID NO: 101271 - protein, 15 aa, Homo sapiens
  CDR3 for alpha chain variable domain of TCR clone 50636 (TRAV12-3, TRAJ49)
CAMAVTPNTGKQFYF

SEQ ID NO: 101272 - protein, 18 aa, Homo sapiens
  CDR3 for beta chain variable domain of TCR clone 50636 (TRBV4-1, TRBJ1-5)
CASSQDPRGQGLNQPQHF

SEQ ID NO: 101273 - protein, 12 aa, Homo sapiens
  CDR3 for alpha chain variable domain of TCR clone 50637 (TRAV21, TRAJ29)
CAVTSGNTPLVF

SEQ ID NO: 101274 - protein, 16 aa, Homo sapiens
  CDR3 for beta chain variable domain of TCR clone 50637 (TRBV7-6, TRBJ2-1)
CASSAPGPSSYNEQFF

SEQ ID NO: 101275 - protein, 12 aa, Homo sapiens
  CDR3 for alpha chain variable domain of TCR clone 50638 (TRAV12-1, TRAJ39)
CVVIDAGNMLTF

SEQ ID NO: 101276 - protein, 17 aa, Homo sapiens
  CDR3 for beta chain variable domain of TCR clone 50638 (TRBV7-2, TRBJ2-7)
CASSPLGSSGPSPEQYF

SEQ ID NO: 101277 - protein, 14 aa, Homo sapiens
  CDR3 for alpha chain variable domain of TCR clone 50639 (TRAV8-2, TRAJ37)
CAVSISGNTGKLIF

SEQ ID NO: 101278 - protein, 11 aa, Homo sapiens
  CDR3 for beta chain variable domain of TCR clone 50639 (TRBV18, TRBJ2-5)
CASSPRETQYF

SEQ ID NO: 101279 - protein, 11 aa, Homo sapiens
  CDR3 for alpha chain variable domain of TCR clone 50640 (TRAV30, TRAJ24)
WMLTARGKFQF

SEQ ID NO: 101280 - protein, 14 aa, Homo sapiens
  CDR3 for beta chain variable domain of TCR clone 50640 (TRBV12-5, TRBJ2-5)
CASGSRTHQETQYF

SEQ ID NO: 101281 - protein, 15 aa, Homo sapiens
  CDR3 for alpha chain variable domain of TCR clone 50641 (TRAV23/DV6, TRAJ38)
CAASGGAGNNRKLIW

SEQ ID NO: 101282 - protein, 13 aa, Homo sapiens
  CDR3 for beta chain variable domain of TCR clone 50641 (TRBV7-2, TRBJ1-2)
CASSLPGLYGYTF

SEQ ID NO: 101283 - protein, 13 aa, Homo sapiens
  CDR3 for alpha chain variable domain of TCR clone 50642 (TRAV4, TRAJ9)
CLVAEGGGFKTIF

SEQ ID NO: 101284 - protein, 13 aa, Homo sapiens
  CDR3 for beta chain variable domain of TCR clone 50642 (TRBV7-2, TRBJ2-2)
CASSSVRAGELFF

SEQ ID NO: 101285 - protein, 17 aa, Homo sapiens
  CDR3 for alpha chain variable domain of TCR clone 50643 (TRAV3, TRAJ6)
CAVRDGPRAGGSYIPTF

SEQ ID NO: 101286 - protein, 13 aa, Homo sapiens
  CDR3 for beta chain variable domain of TCR clone 50643 (TRBV19, TRBJ2-7)
CASSIDRTYEQHF

SEQ ID NO: 101287 - protein, 13 aa, Homo sapiens
  CDR3 for alpha chain variable domain of TCR clone 50644 (TRAV12-2, TRAJ12)
CAVNWDSSYKLIF

SEQ ID NO: 101288 - protein, 14 aa, Homo sapiens
  CDR3 for beta chain variable domain of TCR clone 50644 (TRBV18, TRBJ2-7)
CASSPRGGAYEQYF

SEQ ID NO: 101289 - protein, 12 aa, Homo sapiens
  CDR3 for alpha chain variable domain of TCR clone 50645 (TRAV12-2, TRAJ3)
CAVWSSASKVIF

SEQ ID NO: 101290 - protein, 12 aa, Homo sapiens
  CDR3 for beta chain variable domain of TCR clone 50645 (TRBV11-2, TRBJ2-1)
CASSPGNNEQFF

SEQ ID NO: 101291 - protein, 14 aa, Homo sapiens
  CDR3 for alpha chain variable domain of TCR clone 50646 (TRAV8-2, TRAJ11)
CVVSEKSGYSTLTF

SEQ ID NO: 101292 - protein, 16 aa, Homo sapiens
  CDR3 for beta chain variable domain of TCR clone 50646 (TRBV28, TRBJ2-1)
CASSSSEYPRDNEQFF

SEQ ID NO: 101293 - protein, 15 aa, Homo sapiens
  CDR3 for alpha chain variable domain of TCR clone 50647 (TRAV3, TRAJ22)
CAVRDRGGSARQLTF

SEQ ID NO: 101294 - protein, 17 aa, Homo sapiens
  CDR3 for beta chain variable domain of TCR clone 50647 (TRBV13, TRBJ2-3)
CASSLSRVAGGRDTQYF

SEQ ID NO: 101295 - protein, 14 aa, Homo sapiens
  CDR3 for alpha chain variable domain of TCR clone 50648 (TRAV21, TRAJ15)
CAVSLNQAGTALIF

SEQ ID NO: 101296 - protein, 14 aa, Homo sapiens
  CDR3 for beta chain variable domain of TCR clone 50648 (TRBV7-9, TRBJ2-1)
CASSPRDSLYEQFF

SEQ ID NO: 101297 - protein, 10 aa, Homo sapiens
  CDR3 for alpha chain variable domain of TCR clone 50649 (TRAV30, TRAJ24)
WMLSWGKFQF

SEQ ID NO: 101298 - protein, 14 aa, Homo sapiens
  CDR3 for beta chain variable domain of TCR clone 50649 (TRBV12-5, TRBJ2-5)
CASGSRTHQETQYF

SEQ ID NO: 101299 - protein, 16 aa, Homo sapiens
  CDR3 for alpha chain variable domain of TCR clone 50650 (TRAV2, TRAJ4)
CAVEDRFSGGYNKPIF

SEQ ID NO: 101300 - protein, 13 aa, Homo sapiens
  CDR3 for beta chain variable domain of TCR clone 50650 (TRBV7-7, TRBJ2-5)
CASSRSGQETQYF

SEQ ID NO: 101301 - protein, 14 aa, Homo sapiens
  CDR3 for alpha chain variable domain of TCR clone 50651 (TRAV1-2, TRAJ8)
CAVRGDTGFQKLVF

SEQ ID NO: 101302 - protein, 14 aa, Homo sapiens
  CDR3 for beta chain variable domain of TCR clone 50651 (TRBV7-2, TRBJ1-2)
CASSQTGSTYGYTF

SEQ ID NO: 101303 - protein, 14 aa, Homo sapiens
  CDR3 for alpha chain variable domain of TCR clone 50652 (TRAV17, TRAJ39)
CATDPVRAGNMLAF

SEQ ID NO: 101304 - protein, 15 aa, Homo sapiens
  CDR3 for beta chain variable domain of TCR clone 50652 (TRBV13, TRBJ1-5)
CASSFGQGGVQPQHF

SEQ ID NO: 101305 - protein, 12 aa, Homo sapiens
  CDR3 for alpha chain variable domain of TCR clone 50653 (TRAV21, TRAJ31)
CAVRGNNARLMF

SEQ ID NO: 101306 - protein, 16 aa, Homo sapiens
  CDR3 for beta chain variable domain of TCR clone 50653 (TRBV27, TRBJ2-5)
CASSYGPGGQKETQYF

SEQ ID NO: 101307 - protein, 14 aa, Homo sapiens
  CDR3 for alpha chain variable domain of TCR clone 50654 (TRAV38-1, TRAJ29)
CAFITPSGNTPLVF

SEQ ID NO: 101308 - protein, 15 aa, Homo sapiens
  CDR3 for beta chain variable domain of TCR clone 50654 (TRBV27, TRBJ2-3)
CASSLGLAATDTQYF

SEQ ID NO: 101309 - protein, 14 aa, Homo sapiens
  CDR3 for alpha chain variable domain of TCR clone 50655 (TRAV1-2, TRAJ8)
CAVREDTGFQKLVF

SEQ ID NO: 101310 - protein, 14 aa, Homo sapiens
  CDR3 for beta chain variable domain of TCR clone 50655 (TRBV19, TRBJ2-1)
CASGKSTQYNEQFF

SEQ ID NO: 101311 - protein, 10 aa, Homo sapiens
  CDR3 for alpha chain variable domain of TCR clone 50656 (TRAV12-3, TRAJ49)
FAMNDDQFYF

SEQ ID NO: 101312 - protein, 16 aa, Homo sapiens
  CDR3 for beta chain variable domain of TCR clone 50656 (TRBV20-1, TRBJ1-4)
CSAPGQGLLTNEKLFF

SEQ ID NO: 101313 - protein, 13 aa, Homo sapiens
  CDR3 for alpha chain variable domain of TCR clone 50657 (TRAV23/DV6, TRAJ49)
CAVQARTGNQFYF

SEQ ID NO: 101314 - protein, 14 aa, Homo sapiens
  CDR3 for beta chain variable domain of TCR clone 50657 (TRBV5-1, TRBJ1-1)
CASSLQGASTEAFF

SEQ ID NO: 101315 - protein, 18 aa, Homo sapiens
  CDR3 for alpha chain variable domain of TCR clone 50658 (TRAV12-2, )
CAVEDIQNPDPAVYQLRD

SEQ ID NO: 101316 - protein, 13 aa, Homo sapiens
  CDR3 for beta chain variable domain of TCR clone 50658 (TRBV7-3, TRBJ1-1)
CASSQDWGAEAFF

SEQ ID NO: 101317 - protein, 17 aa, Homo sapiens
  CDR3 for alpha chain variable domain of TCR clone 50659 (TRAV27, TRAJ42)
CAERVIYYGGSQGNLIF

SEQ ID NO: 101318 - protein, 15 aa, Homo sapiens
  CDR3 for beta chain variable domain of TCR clone 50659 (TRBV6-1, TRBJ2-1)
CASSELRGQYNEQFF

SEQ ID NO: 101319 - protein, 19 aa, Homo sapiens
  CDR3 for alpha chain variable domain of TCR clone 50660 (TRAV27, TRAJ53)
ASTSVQSRNSGGSHYKLTF

SEQ ID NO: 101320 - protein, 14 aa, Homo sapiens
  CDR3 for beta chain variable domain of TCR clone 50660 (TRBV11-1, TRBJ2-7)
CASTFAVPSYEQYF

SEQ ID NO: 101321 - protein, 14 aa, Homo sapiens
  CDR3 for alpha chain variable domain of TCR clone 50661 (TRAV17, TRAJ49)
CATDARDTGNQFYF

SEQ ID NO: 101322 - protein, 14 aa, Homo sapiens
  CDR3 for beta chain variable domain of TCR clone 50661 (TRBV5-5, TRBJ1-2)
CASSFGQINYGYAF

SEQ ID NO: 101323 - protein, 14 aa, Homo sapiens
  CDR3 for alpha chain variable domain of TCR clone 50662 (TRAV29/DV5, TRAJ34)
CAASASGNTDKLIF

SEQ ID NO: 101324 - protein, 16 aa, Homo sapiens
  CDR3 for beta chain variable domain of TCR clone 50662 (TRBV7-2, TRBJ1-1)
CASSLGAGWTNTEAFF

SEQ ID NO: 101325 - protein, 15 aa, Homo sapiens
  CDR3 for alpha chain variable domain of TCR clone 50663 (TRAV23/DV6, TRAJ37)
CAAGEGSSNTGKLIF

SEQ ID NO: 101326 - protein, 17 aa, Homo sapiens
  CDR3 for beta chain variable domain of TCR clone 50663 (TRBV20-1, TRBJ2-7)
CSATRAGGLAGVEEQYF

SEQ ID NO: 101327 - protein, 13 aa, Homo sapiens
  CDR3 for alpha chain variable domain of TCR clone 50664 (TRAV8-3, TRAJ28)
CAVGAVGSYQLTF

SEQ ID NO: 101328 - protein, 17 aa, Homo sapiens
  CDR3 for beta chain variable domain of TCR clone 50664 (TRBV20-1, TRBJ2-1)
CSASSSGLAGSYNEQFF

SEQ ID NO: 101329 - protein, 14 aa, Homo sapiens
  CDR3 for alpha chain variable domain of TCR clone 50665 (TRAV17, TRAJ12)
CATDEKDSSHKLIF

SEQ ID NO: 101330 - protein, 16 aa, Homo sapiens
  CDR3 for beta chain variable domain of TCR clone 50665 (TRBV11-2, TRBJ2-1)
CASSPRLAGVYNEQFF

SEQ ID NO: 101331 - protein, 14 aa, Homo sapiens
  CDR3 for alpha chain variable domain of TCR clone 50666 (TRAV35, TRAJ33)
CAGSSQDSNYQLIW

SEQ ID NO: 101332 - protein, 12 aa, Homo sapiens
  CDR3 for beta chain variable domain of TCR clone 50666 (TRBV11-2, TRBJ2-2)
CASSLGGGELFF

SEQ ID NO: 101333 - protein, 14 aa, Homo sapiens
  CDR3 for alpha chain variable domain of TCR clone 50667 (TRAV2, TRAJ9)
CAVEDRSGGVKTIF

SEQ ID NO: 101334 - protein, 14 aa, Homo sapiens
  CDR3 for beta chain variable domain of TCR clone 50667 (TRBV18, TRBJ1-5)
CASSRQQRNQPQHF

SEQ ID NO: 101335 - protein, 16 aa, Homo sapiens
  CDR3 for alpha chain variable domain of TCR clone 50668 (TRAV30, TRAJ24)
CGTEIVDADSWGKFQF

SEQ ID NO: 101336 - protein, 14 aa, Homo sapiens
  CDR3 for beta chain variable domain of TCR clone 50668 (TRBV7-9, TRBJ2-5)
CASSLVGGEETQYF

SEQ ID NO: 101337 - protein, 14 aa, Homo sapiens
  CDR3 for alpha chain variable domain of TCR clone 50669 (TRAV23/DV6, TRAJ39)
CAASISNAGNMPTF

SEQ ID NO: 101338 - protein, 14 aa, Homo sapiens
  CDR3 for beta chain variable domain of TCR clone 50669 (TRBV7-3, TRBJ1-1)
CASSLKGGNTEAFF

SEQ ID NO: 101339 - protein, 16 aa, Homo sapiens
  CDR3 for alpha chain variable domain of TCR clone 50670 (TRAV17, TRAJ36)
CATVSLNWGKQPLLWD

SEQ ID NO: 101340 - protein, 13 aa, Homo sapiens
  CDR3 for beta chain variable domain of TCR clone 50670 (TRBV4-1, TRBJ1-1)
CASSQLGTVEAFF

SEQ ID NO: 101341 - protein, 13 aa, Homo sapiens
  CDR3 for alpha chain variable domain of TCR clone 50671 (TRAV2, TRAJ40)
CAVVTSGTYKYIF

SEQ ID NO: 101342 - protein, 17 aa, Homo sapiens
  CDR3 for beta chain variable domain of TCR clone 50671 (TRBV4-1, TRBJ2-3)
CASSQGYVSGGTDTQYF

SEQ ID NO: 101343 - protein, 12 aa, Homo sapiens
  CDR3 for alpha chain variable domain of TCR clone 50672 (TRAV12-2, TRAJ49)
CAVLNTGKQFYF

SEQ ID NO: 101344 - protein, 14 aa, Homo sapiens
  CDR3 for beta chain variable domain of TCR clone 50672 (TRBV5-4, TRBJ2-3)
CASSLGQGADTQYF

SEQ ID NO: 101345 - protein, 17 aa, Homo sapiens
  CDR3 for alpha chain variable domain of TCR clone 50673 (TRAV13-1, TRAJ28)
CAASPPYSGAGSYRLTF

SEQ ID NO: 101346 - protein, 12 aa, Homo sapiens
  CDR3 for beta chain variable domain of TCR clone 50673 (TRBV11-2, TRBJ2-2)
CASSLPTGELFF

SEQ ID NO: 101347 - protein, 12 aa, Homo sapiens
  CDR3 for alpha chain variable domain of TCR clone 50674 (TRAV12-1, TRAJ34)
CVVAGATDKLIF

SEQ ID NO: 101348 - protein, 15 aa, Homo sapiens
  CDR3 for beta chain variable domain of TCR clone 50674 (TRBV2, TRBJ1-2)
CASSEIGGANYGYTF

SEQ ID NO: 101349 - protein, 13 aa, Homo sapiens
  CDR3 for alpha chain variable domain of TCR clone 50675 (TRAV12-2, TRAJ9)
CAVKWAGGFKTIF

SEQ ID NO: 101350 - protein, 12 aa, Homo sapiens
  CDR3 for beta chain variable domain of TCR clone 50675 (TRBV7-9, TRBJ2-7)
CASSLEGYEQYF

SEQ ID NO: 101351 - protein, 13 aa, Homo sapiens
  CDR3 for alpha chain variable domain of TCR clone 50676 (TRAV12-2, TRAJ6)
CAVNVSRKLHTYI

SEQ ID NO: 101352 - protein, 13 aa, Homo sapiens
  CDR3 for beta chain variable domain of TCR clone 50676 (TRBV29-1, TRBJ2-3)
SAALQGGADTQYF

SEQ ID NO: 101353 - protein, 18 aa, Homo sapiens
  CDR3 for alpha chain variable domain of TCR clone 50677 (TRAV3, TRAJ17)
CAVRARRGGRSCRRQANF

SEQ ID NO: 101354 - protein, 14 aa, Homo sapiens
  CDR3 for beta chain variable domain of TCR clone 50677 (TRBV4-1, TRBJ2-2)
CASSQAVNTGELFF

SEQ ID NO: 101355 - protein, 12 aa, Homo sapiens
  CDR3 for alpha chain variable domain of TCR clone 50678 (TRAV13-1, TRAJ21)
RAAKEGFNKFYF

SEQ ID NO: 101356 - protein, 15 aa, Homo sapiens
  CDR3 for beta chain variable domain of TCR clone 50678 (TRBV15, TRBJ1-5)
CATSRDPVSNQPQHF

SEQ ID NO: 101357 - protein, 14 aa, Homo sapiens
  CDR3 for alpha chain variable domain of TCR clone 50679 (TRAV8-3, TRAJ4)
CAVEASGGYNKLIF

SEQ ID NO: 101358 - protein, 17 aa, Homo sapiens
  CDR3 for beta chain variable domain of TCR clone 50679 (TRBV11-2, TRBJ2-1)
CASSLYPPGVEYNEQFF

SEQ ID NO: 101359 - protein, 10 aa, Homo sapiens
  CDR3 for alpha chain variable domain of TCR clone 50680 (TRAV23/DV6, TRAJ21)
CAAAVAALDL

SEQ ID NO: 101360 - protein, 14 aa, Homo sapiens
  CDR3 for beta chain variable domain of TCR clone 50680 (TRBV7-3, TRBJ2-2)
CASSLYPLTGELFF

SEQ ID NO: 101361 - protein, 13 aa, Homo sapiens
  CDR3 for alpha chain variable domain of TCR clone 50681 (TRAV13-1, TRAJ21)
CAASIYNFNKFYF

SEQ ID NO: 101362 - protein, 13 aa, Homo sapiens
  CDR3 for beta chain variable domain of TCR clone 50681 (TRBV27, TRBJ1-4)
CASSLMGEEKLFF

SEQ ID NO: 101363 - protein, 19 aa, Homo sapiens
  CDR3 for alpha chain variable domain of TCR clone 50682 (TRAV26-1, TRAJ52)
FIVRAHRNAGGTSYGKLTF

SEQ ID NO: 101364 - protein, 15 aa, Homo sapiens
  CDR3 for beta chain variable domain of TCR clone 50682 (TRBV12-4, TRBJ2-5)
CASSPPTGLQETQYF

SEQ ID NO: 101365 - protein, 14 aa, Homo sapiens
  CDR3 for alpha chain variable domain of TCR clone 50683 (TRAV1-2, TRAJ16)
CAVSRFSDGQKLLF

SEQ ID NO: 101366 - protein, 16 aa, Homo sapiens
  CDR3 for beta chain variable domain of TCR clone 50683 (TRBV7-3, TRBJ2-2)
CASSLKRGTLSGELFF

SEQ ID NO: 101367 - protein, 13 aa, Homo sapiens
  CDR3 for alpha chain variable domain of TCR clone 50684 (TRAV12-1, TRAJ40)
CVVPTSGTYKYIF

SEQ ID NO: 101368 - protein, 18 aa, Homo sapiens
  CDR3 for beta chain variable domain of TCR clone 50684 (TRBV7-6, TRBJ2-1)
CASSPRTSGMSPYNEQFF

SEQ ID NO: 101369 - protein, 17 aa, Homo sapiens
  CDR3 for alpha chain variable domain of TCR clone 50685 (TRAV38-1, TRAJ28)
CAFMKPTSGAGSYQLPF

SEQ ID NO: 101370 - protein, 15 aa, Homo sapiens
  CDR3 for beta chain variable domain of TCR clone 50685 (TRBV5-1, TRBJ2-4)
CASSLGGGGSYIQYF

SEQ ID NO: 101371 - protein, 11 aa, Homo sapiens
  CDR3 for alpha chain variable domain of TCR clone 50686 (TRAV3, TRAJ33)
CAVRRNYQLIW

SEQ ID NO: 101372 - protein, 11 aa, Homo sapiens
  CDR3 for beta chain variable domain of TCR clone 50686 (TRBV10-3, TRBJ2-7)
CAISEGLEQYF

SEQ ID NO: 101373 - protein, 15 aa, Homo sapiens
  CDR3 for alpha chain variable domain of TCR clone 50687 (TRAV3, TRAJ12)
CAVRDIRDSSYKLIF

SEQ ID NO: 101374 - protein, 16 aa, Homo sapiens
  CDR3 for beta chain variable domain of TCR clone 50687 (TRBV2, TRBJ1-1)
CASSPPNRGMNTEAFF

SEQ ID NO: 101375 - protein, 15 aa, Homo sapiens
  CDR3 for alpha chain variable domain of TCR clone 50688 (TRAV3, TRAJ3)
CAVRDRDSSAPKIIF

SEQ ID NO: 101376 - protein, 18 aa, Homo sapiens
  CDR3 for beta chain variable domain of TCR clone 50688 (TRBV25-1, TRBJ1-2)
CASSGLQNGQGLIFGYAF

SEQ ID NO: 101377 - protein, 15 aa, Homo sapiens
  CDR3 for alpha chain variable domain of TCR clone 50689 (TRAV12-2, TRAJ43)
CAFDMRFGAGTRLTV

SEQ ID NO: 101378 - protein, 12 aa, Homo sapiens
  CDR3 for beta chain variable domain of TCR clone 50689 (TRBV7-9, TRBJ2-7)
CASSFGSYEQYF

SEQ ID NO: 101379 - protein, 14 aa, Homo sapiens
  CDR3 for alpha chain variable domain of TCR clone 50690 (TRAV1-2, TRAJ16)
CAVNRFSDGQKLLF

SEQ ID NO: 101380 - protein, 16 aa, Homo sapiens
  CDR3 for beta chain variable domain of TCR clone 50690 (TRBV27, TRBJ2-5)
CASSYGPGGQKETQYF

SEQ ID NO: 101381 - protein, 14 aa, Homo sapiens
  CDR3 for alpha chain variable domain of TCR clone 50691 (TRAV20, TRAJ56)
CAVQFGGANSKLTF

SEQ ID NO: 101382 - protein, 14 aa, Homo sapiens
  CDR3 for beta chain variable domain of TCR clone 50691 (TRBV4-1, TRBJ2-2)
CASSQAVNTGELFF

SEQ ID NO: 101383 - protein, 13 aa, Homo sapiens
  CDR3 for alpha chain variable domain of TCR clone 50692 (TRAV1-1, TRAJ10)
CAVDSGGYQKVTF

SEQ ID NO: 101384 - protein, 12 aa, Homo sapiens
  CDR3 for beta chain variable domain of TCR clone 50692 (TRBV28, TRBJ2-1)
CASSVQINEQFF

SEQ ID NO: 101385 - protein, 14 aa, Homo sapiens
  CDR3 for alpha chain variable domain of TCR clone 50693 (TRAV12-2, TRAJ15)
CAPHTGQAGTALIF

SEQ ID NO: 101386 - protein, 17 aa, Homo sapiens
  CDR3 for beta chain variable domain of TCR clone 50693 (TRBV5-5, TRBJ1-2)
CASSLGSLDGQSDGYTF

SEQ ID NO: 101387 - protein, 11 aa, Homo sapiens
  CDR3 for alpha chain variable domain of TCR clone 50694 (TRAV4, TRAJ31)
CLVGDNARPMF

SEQ ID NO: 101388 - protein, 14 aa, Homo sapiens
  CDR3 for beta chain variable domain of TCR clone 50694 (TRBV2, TRBJ1-5)
CASSEAAGGQPQHF

SEQ ID NO: 101389 - protein, 15 aa, Homo sapiens
  CDR3 for alpha chain variable domain of TCR clone 50695 (TRAV2, TRAJ22)
CAVPSRGGSARQLTF

SEQ ID NO: 101390 - protein, 14 aa, Homo sapiens
  CDR3 for beta chain variable domain of TCR clone 50695 (TRBV7-6, TRBJ2-3)
CASSLGTVTDMQYF

SEQ ID NO: 101391 - protein, 12 aa, Homo sapiens
  CDR3 for alpha chain variable domain of TCR clone 50696 (TRAV13-1, TRAJ11)
CAGPSGYSTLTF

SEQ ID NO: 101392 - protein, 13 aa, Homo sapiens
  CDR3 for beta chain variable domain of TCR clone 50696 (TRBV12-4, TRBJ2-1)
CASSVSPSNEQFF

SEQ ID NO: 101393 - protein, 11 aa, Homo sapiens
  CDR3 for alpha chain variable domain of TCR clone 50697 (TRAV26-1, TRAJ37)
CIVRVGRKLIF

SEQ ID NO: 101394 - protein, 14 aa, Homo sapiens
  CDR3 for beta chain variable domain of TCR clone 50697 (TRBV12-4, TRBJ1-1)
CASSLGTGGTEAFF

SEQ ID NO: 101395 - protein, 13 aa, Homo sapiens
  CDR3 for alpha chain variable domain of TCR clone 50698 (TRAV3, TRAJ36)
CAVSLGGANNLFF

SEQ ID NO: 101396 - protein, 13 aa, Homo sapiens
  CDR3 for beta chain variable domain of TCR clone 50698 (TRBV19, TRBJ1-2)
CASSVPGQDGYTF

SEQ ID NO: 101397 - protein, 14 aa, Homo sapiens
  CDR3 for alpha chain variable domain of TCR clone 50699 (TRAV1-2, TRAJ8)
CAVREDTGLQKLVF

SEQ ID NO: 101398 - protein, 11 aa, Homo sapiens
  CDR3 for beta chain variable domain of TCR clone 50699 (TRBV11-3, TRBJ2-7)
CASSRTYEQYF

SEQ ID NO: 101399 - protein, 11 aa, Homo sapiens
  CDR3 for alpha chain variable domain of TCR clone 50700 (TRAV1-2, TRAJ11)
CAVRGYSTLTF

SEQ ID NO: 101400 - protein, 15 aa, Homo sapiens
  CDR3 for beta chain variable domain of TCR clone 50700 (TRBV11-3, TRBJ2-3)
CASLKDGREGDTQYF

SEQ ID NO: 101401 - protein, 16 aa, Homo sapiens
  CDR3 for alpha chain variable domain of TCR clone 50701 (TRAV30, TRAJ24)
RGTEIVDADSWGKFQF

SEQ ID NO: 101402 - protein, 13 aa, Homo sapiens
  CDR3 for beta chain variable domain of TCR clone 50701 (TRBV25-1, TRBJ1-1)
CQHPPGGNTEAFF

SEQ ID NO: 101403 - protein, 14 aa, Homo sapiens
  CDR3 for alpha chain variable domain of TCR clone 50702 (TRAV12-1, TRAJ17)
CVVNYKAAGNKLTF

SEQ ID NO: 101404 - protein, 15 aa, Homo sapiens
  CDR3 for beta chain variable domain of TCR clone 50702 (TRBV7-2, TRBJ2-1)
CASTHGTGSYNEQFF

SEQ ID NO: 101405 - protein, 14 aa, Homo sapiens
  CDR3 for alpha chain variable domain of TCR clone 50703 (TRAV12-2, TRAJ17)
CAALFNAAGNKLTF

SEQ ID NO: 101406 - protein, 16 aa, Homo sapiens
  CDR3 for beta chain variable domain of TCR clone 50703 (TRBV20-1, TRBJ2-2)
CSASASGIPGAGELFF

SEQ ID NO: 101407 - protein, 11 aa, Homo sapiens
  CDR3 for alpha chain variable domain of TCR clone 50704 (TRAV21, TRAJ34)
CAHYNTDKLIF

SEQ ID NO: 101408 - protein, 19 aa, Homo sapiens
  CDR3 for beta chain variable domain of TCR clone 50704 (TRBV25-1, TRBJ2-2)
CAILVYRVDRGRKTGELFF

SEQ ID NO: 101409 - protein, 14 aa, Homo sapiens
  CDR3 for alpha chain variable domain of TCR clone 50705 (TRAV2, TRAJ9)
CAVEDRSGGFKTIF

SEQ ID NO: 101410 - protein, 13 aa, Homo sapiens
  CDR3 for beta chain variable domain of TCR clone 50705 (TRBV12-5, TRBJ2-3)
CASGDRQSDTQYF

SEQ ID NO: 101411 - protein, 13 aa, Homo sapiens
  CDR3 for alpha chain variable domain of TCR clone 50706 (TRAV8-1, TRAJ15)
CAVKNQAGTALIF

SEQ ID NO: 101412 - protein, 15 aa, Homo sapiens
  CDR3 for beta chain variable domain of TCR clone 50706 (TRBV7-3, TRBJ2-7)
CASSLTPTGYDEEYF

SEQ ID NO: 101413 - protein, 13 aa, Homo sapiens
  CDR3 for alpha chain variable domain of TCR clone 50707 (TRAV27, TRAJ3)
ASLRGSSDSKIIF

SEQ ID NO: 101414 - protein, 15 aa, Homo sapiens
  CDR3 for beta chain variable domain of TCR clone 50707 (TRBV28, TRBJ1-3)
CASSMGWASGNTIYF

SEQ ID NO: 101415 - protein, 21 aa, Homo sapiens
  CDR3 for alpha chain variable domain of TCR clone 50708 (TRAV1-1, TRAJ6)
CLLLLRCERLERTGGSYIPTF

SEQ ID NO: 101416 - protein, 13 aa, Homo sapiens
  CDR3 for beta chain variable domain of TCR clone 50708 (TRBV10-2, TRBJ2-7)
CASGANGGYEQYF

SEQ ID NO: 101417 - protein, 13 aa, Homo sapiens
  CDR3 for alpha chain variable domain of TCR clone 50709 (TRAV29/DV5, TRAJ48)
CAEMDFGNEKLTF

SEQ ID NO: 101418 - protein, 15 aa, Homo sapiens
  CDR3 for beta chain variable domain of TCR clone 50709 (TRBV7-9, TRBJ1-6)
CASSSPGRGNSPLHF

SEQ ID NO: 101419 - protein, 13 aa, Homo sapiens
  CDR3 for alpha chain variable domain of TCR clone 50710 (TRAV12-1, TRAJ13)
CVVALLGYQKVTF

SEQ ID NO: 101420 - protein, 13 aa, Homo sapiens
  CDR3 for beta chain variable domain of TCR clone 50710 (TRBV20-1, TRBJ2-5)
CSAILTGKETQYF

SEQ ID NO: 101421 - protein, 17 aa, Homo sapiens
  CDR3 for alpha chain variable domain of TCR clone 50711 (TRAV38-1, TRAJ45)
CAFMRSHSGGGADGLTF

SEQ ID NO: 101422 - protein, 15 aa, Homo sapiens
  CDR3 for beta chain variable domain of TCR clone 50711 (TRBV7-2, TRBJ2-3)
CASSLVVRGPYTQYF

SEQ ID NO: 101423 - protein, 18 aa, Homo sapiens
  CDR3 for alpha chain variable domain of TCR clone 50712 (TRAV3, TRAJ17)
CAVRARRGGRSCGQQANF

SEQ ID NO: 101424 - protein, 14 aa, Homo sapiens
  CDR3 for beta chain variable domain of TCR clone 50712 (TRBV4-1, TRBJ2-2)
CASSQAVNTGELFF

SEQ ID NO: 101425 - protein, 14 aa, Homo sapiens
  CDR3 for alpha chain variable domain of TCR clone 50713 (TRAV1-2, TRAJ16)
CAVNRFSDGQQLLF

SEQ ID NO: 101426 - protein, 16 aa, Homo sapiens
  CDR3 for beta chain variable domain of TCR clone 50713 (TRBV20-1, TRBJ1-4)
CSAPGQGLLTNEKLFF

SEQ ID NO: 101427 - protein, 13 aa, Homo sapiens
  CDR3 for alpha chain variable domain of TCR clone 50714 (TRAV27, TRAJ49)
CAPRPYTGNQFYF

SEQ ID NO: 101428 - protein, 16 aa, Homo sapiens
  CDR3 for beta chain variable domain of TCR clone 50714 (TRBV4-1, TRBJ1-2)
CASSQDSGQVLYGYTF

SEQ ID NO: 101429 - protein, 14 aa, Homo sapiens
  CDR3 for alpha chain variable domain of TCR clone 50715 (TRAV29/DV5, TRAJ45)
CAASFRGGADGLTF

SEQ ID NO: 101430 - protein, 19 aa, Homo sapiens
  CDR3 for beta chain variable domain of TCR clone 50715 (TRBV11-2, TRBJ2-2)
LRTRPCISVPAAYPGSCFF

SEQ ID NO: 101431 - protein, 11 aa, Homo sapiens
  CDR3 for alpha chain variable domain of TCR clone 50716 (TRAV2, TRAJ13)
CASGGYQKVTF

SEQ ID NO: 101432 - protein, 14 aa, Homo sapiens
  CDR3 for beta chain variable domain of TCR clone 50716 (TRBV11-2, TRBJ2-3)
CASSRLARTDTQYF

SEQ ID NO: 101433 - protein, 13 aa, Homo sapiens
  CDR3 for alpha chain variable domain of TCR clone 50717 (TRAV21, TRAJ57)
CAVTQGGSEKLVF

SEQ ID NO: 101434 - protein, 16 aa, Homo sapiens
  CDR3 for beta chain variable domain of TCR clone 50717 (TRBV29-1, TRBJ2-7)
CSVEDAEDGTAYEQYC

SEQ ID NO: 101435 - protein, 12 aa, Homo sapiens
  CDR3 for alpha chain variable domain of TCR clone 50718 (TRAV17, TRAJ57)
CATDGGSEKLVF

SEQ ID NO: 101436 - protein, 13 aa, Homo sapiens
  CDR3 for beta chain variable domain of TCR clone 50718 (TRBV7-9, TRBJ2-7)
CASSFEGAYEQYF

SEQ ID NO: 101437 - protein, 12 aa, Homo sapiens
  CDR3 for alpha chain variable domain of TCR clone 50719 (TRAV21, TRAJ49)
CAVNDGGNQFYF

SEQ ID NO: 101438 - protein, 14 aa, Homo sapiens
  CDR3 for beta chain variable domain of TCR clone 50719 (TRBV2, TRBJ2-7)
CASSLTSGGYEQYF

SEQ ID NO: 101439 - protein, 16 aa, Homo sapiens
  CDR3 for alpha chain variable domain of TCR clone 50720 (TRAV8-1, TRAJ39)
CAVNVPSYNAGNMLTF

SEQ ID NO: 101440 - protein, 15 aa, Homo sapiens
  CDR3 for beta chain variable domain of TCR clone 50720 (TRBV4-1, TRBJ2-3)
CASRSTRAGTDKQYF

SEQ ID NO: 101441 - protein, 13 aa, Homo sapiens
  CDR3 for alpha chain variable domain of TCR clone 50721 (TRAV38-1, TRAJ42)
CARWGGSQGNLIF

SEQ ID NO: 101442 - protein, 17 aa, Homo sapiens
  CDR3 for beta chain variable domain of TCR clone 50721 (TRBV20-1, TRBJ2-1)
CSARDSLAGVWDNEQFF

SEQ ID NO: 101443 - protein, 17 aa, Homo sapiens
  CDR3 for alpha chain variable domain of TCR clone 50722 (TRAV38-2/DV8, TRAJ28)
CAYRFAYSGAGSYQLTF

SEQ ID NO: 101444 - protein, 17 aa, Homo sapiens
  CDR3 for beta chain variable domain of TCR clone 50722 (TRBV4-3, TRBJ2-2)
CDSSQDTSARSPGELFF

SEQ ID NO: 101445 - protein, 15 aa, Homo sapiens
  CDR3 for alpha chain variable domain of TCR clone 50723 (TRAV12-1, TRAJ4)
CVVNPFSGGYNKLIF

SEQ ID NO: 101446 - protein, 16 aa, Homo sapiens
  CDR3 for beta chain variable domain of TCR clone 50723 (TRBV5-1, TRBJ1-1)
CASSNTGTEVGTEAFF

SEQ ID NO: 101447 - protein, 13 aa, Homo sapiens
  CDR3 for alpha chain variable domain of TCR clone 50724 (TRAV12-3, TRAJ56)
CALATGANSKLTF

SEQ ID NO: 101448 - protein, 14 aa, Homo sapiens
  CDR3 for beta chain variable domain of TCR clone 50724 (TRBV19, TRBJ2-1)
CASPTFVLSGEQFF

SEQ ID NO: 101449 - protein, 15 aa, Homo sapiens
  CDR3 for alpha chain variable domain of TCR clone 50725 (TRAV3, TRAJ23)
CAVRDRGNQGGKLIF

SEQ ID NO: 101450 - protein, 15 aa, Homo sapiens
  CDR3 for beta chain variable domain of TCR clone 50725 (TRBV7-9, TRBJ1-2)
CASSSVDRSNYGYTF

SEQ ID NO: 101451 - protein, 18 aa, Homo sapiens
  CDR3 for alpha chain variable domain of TCR clone 50726 (TRAV21, TRAJ52)
CAVRPSPVGGTSYGKLTF

SEQ ID NO: 101452 - protein, 15 aa, Homo sapiens
  CDR3 for beta chain variable domain of TCR clone 50726 (TRBV20-1, TRBJ2-7)
CSARKGLAESYEQYF

SEQ ID NO: 101453 - protein, 14 aa, Homo sapiens
  CDR3 for alpha chain variable domain of TCR clone 50727 (TRAV12-2, TRAJ13)
CAVRKTGGYQKVTF

SEQ ID NO: 101454 - protein, 16 aa, Homo sapiens
  CDR3 for beta chain variable domain of TCR clone 50727 (TRBV11-2, TRBJ2-7)
CASSTVTAPKTYEQYF

SEQ ID NO: 101455 - protein, 16 aa, Homo sapiens
  CDR3 for alpha chain variable domain of TCR clone 50728 (TRAV30, TRAJ24)
CGTEIVGAGSWGKFQF

SEQ ID NO: 101456 - protein, 15 aa, Homo sapiens
  CDR3 for beta chain variable domain of TCR clone 50728 (TRBV7-9, TRBJ1-4)
CASSARTGGNEKLFF

SEQ ID NO: 101457 - protein, 15 aa, Homo sapiens
  CDR3 for alpha chain variable domain of TCR clone 50729 (TRAV35, TRAJ40)
CVGQLGTSGTYKYIF

SEQ ID NO: 101458 - protein, 14 aa, Homo sapiens
  CDR3 for beta chain variable domain of TCR clone 50729 (TRBV7-3, TRBJ2-1)
CASSLAGGTNEQFF

SEQ ID NO: 101459 - protein, 15 aa, Homo sapiens
  CDR3 for alpha chain variable domain of TCR clone 50730 (TRAV21, TRAJ53)
CATLNSGGSNYKLTF

SEQ ID NO: 101460 - protein, 16 aa, Homo sapiens
  CDR3 for beta chain variable domain of TCR clone 50730 (TRBV9, TRBJ2-1)
CASSVGGGGNCNEQFF

SEQ ID NO: 101461 - protein, 12 aa, Homo sapiens
  CDR3 for alpha chain variable domain of TCR clone 50731 (TRAV29/DV5, TRAJ15)
CASNQAGTALIF

SEQ ID NO: 101462 - protein, 15 aa, Homo sapiens
  CDR3 for beta chain variable domain of TCR clone 50731 (TRBV24-1, TRBJ1-2)
CATSESPGQAYGYTF

SEQ ID NO: 101463 - protein, 16 aa, Homo sapiens
  CDR3 for alpha chain variable domain of TCR clone 50732 (TRAV20, TRAJ10)
CAVLRGLTGGGNKLTF

SEQ ID NO: 101464 - protein, 14 aa, Homo sapiens
  CDR3 for beta chain variable domain of TCR clone 50732 (TRBV19, TRBJ1-5)
CASRAPDSFLSQHL

SEQ ID NO: 101465 - protein, 17 aa, Homo sapiens
  CDR3 for alpha chain variable domain of TCR clone 50733 (TRAV13-1, TRAJ52)
CAASSGAGGTSYGKLTF

SEQ ID NO: 101466 - protein, 15 aa, Homo sapiens
  CDR3 for beta chain variable domain of TCR clone 50733 (TRBV7-2, TRBJ2-1)
CASSSGLAGGDEQFF

SEQ ID NO: 101467 - protein, 17 aa, Homo sapiens
  CDR3 for alpha chain variable domain of TCR clone 50734 (TRAV3, TRAJ6)
CAVRDGPRAGGSYIPTF

SEQ ID NO: 101468 - protein, 14 aa, Homo sapiens
  CDR3 for beta chain variable domain of TCR clone 50734 (TRBV11-2, TRBJ2-3)
CASSRLVRTDTQYF

SEQ ID NO: 101469 - protein, 13 aa, Homo sapiens
  CDR3 for alpha chain variable domain of TCR clone 50735 (TRAV13-1, TRAJ30)
CAGRVDRDDKIIF

SEQ ID NO: 101470 - protein, 17 aa, Homo sapiens
  CDR3 for beta chain variable domain of TCR clone 50735 (TRBV7-9, TRBJ2-6)
CASSFGAGYSGANVLTF

SEQ ID NO: 101471 - protein, 16 aa, Homo sapiens
  CDR3 for alpha chain variable domain of TCR clone 50736 (TRAV4, TRAJ9)
CLVGDPNRPGGFQTIF

SEQ ID NO: 101472 - protein, 16 aa, Homo sapiens
  CDR3 for beta chain variable domain of TCR clone 50736 (TRBV28, TRBJ1-4)
CASSPPYRGRSEKLFF

SEQ ID NO: 101473 - protein, 12 aa, Homo sapiens
  CDR3 for alpha chain variable domain of TCR clone 50737 (TRAV13-2, TRAJ23)
CAERHRGGKLIF

SEQ ID NO: 101474 - protein, 16 aa, Homo sapiens
  CDR3 for beta chain variable domain of TCR clone 50737 (TRBV7-9, TRBJ1-2)
CASSLGFPSGEDGYTF

SEQ ID NO: 101475 - protein, 12 aa, Homo sapiens
  CDR3 for alpha chain variable domain of TCR clone 50738 (TRAV12-1, TRAJ23)
CVVSIPGGKLIF

SEQ ID NO: 101476 - protein, 15 aa, Homo sapiens
  CDR3 for beta chain variable domain of TCR clone 50738 (TRBV7-2, TRBJ2-7)
CASSLVSSGSYEQYF

SEQ ID NO: 101477 - protein, 14 aa, Homo sapiens
  CDR3 for alpha chain variable domain of TCR clone 50739 (TRAV1-2, TRAJ8)
CAVREDTGFQKLVF

SEQ ID NO: 101478 - protein, 15 aa, Homo sapiens
  CDR3 for beta chain variable domain of TCR clone 50739 (TRBV28, TRBJ2-5)
CASSSGRTIQETQYF

SEQ ID NO: 101479 - protein, 13 aa, Homo sapiens
  CDR3 for alpha chain variable domain of TCR clone 50740 (TRAV26-2, TRAJ43)
CILRAVNNNDMRF

SEQ ID NO: 101480 - protein, 15 aa, Homo sapiens
  CDR3 for beta chain variable domain of TCR clone 50740 (TRBV7-2, TRBJ2-1)
CASTHGTGSYNEQFF

SEQ ID NO: 101481 - protein, 14 aa, Homo sapiens
  CDR3 for alpha chain variable domain of TCR clone 50741 (TRAV1-2, TRAJ16)
CAVNRFSDGQKPLF

SEQ ID NO: 101482 - protein, 20 aa, Homo sapiens
  CDR3 for beta chain variable domain of TCR clone 50741 (TRBV7-8, TRBJ2-2)
CASSHLFPGPTIHITGELFF

SEQ ID NO: 101483 - protein, 15 aa, Homo sapiens
  CDR3 for alpha chain variable domain of TCR clone 50742 (TRAV13-1, TRAJ45)
CAASWSGGGADGLTF

SEQ ID NO: 101484 - protein, 14 aa, Homo sapiens
  CDR3 for beta chain variable domain of TCR clone 50742 (TRBV12-4, TRBJ1-2)
CASSFVGTAYGYTF

SEQ ID NO: 101485 - protein, 14 aa, Homo sapiens
  CDR3 for alpha chain variable domain of TCR clone 50743 (TRAV4, TRAJ13)
CLVDYSGGYQKVTF

SEQ ID NO: 101486 - protein, 13 aa, Homo sapiens
  CDR3 for beta chain variable domain of TCR clone 50743 (TRBV18, TRBJ1-1)
CASSGGRNTEAFF

SEQ ID NO: 101487 - protein, 14 aa, Homo sapiens
  CDR3 for alpha chain variable domain of TCR clone 50744 (TRAV27, TRAJ22)
CAGVSVLGKRQLTF

SEQ ID NO: 101488 - protein, 17 aa, Homo sapiens
  CDR3 for beta chain variable domain of TCR clone 50744 (TRBV14, TRBJ2-1)
CASSQDRRVASYNEQFL

SEQ ID NO: 101489 - protein, 15 aa, Homo sapiens
  CDR3 for alpha chain variable domain of TCR clone 50745 (TRAV12-3, TRAJ27)
CAMRAYNTNAGKSTF

SEQ ID NO: 101490 - protein, 13 aa, Homo sapiens
  CDR3 for beta chain variable domain of TCR clone 50745 (TRBV29-1, TRBJ1-1)
CSVGDSRNTEAFF

SEQ ID NO: 101491 - protein, 15 aa, Homo sapiens
  CDR3 for alpha chain variable domain of TCR clone 50746 (TRAV26-1, TRAJ29)
CIVRVEGSGNTPLVF

SEQ ID NO: 101492 - protein, 15 aa, Homo sapiens
  CDR3 for beta chain variable domain of TCR clone 50746 (TRBV7-9, TRBJ1-5)
CASSQGHQPNPPQHF

SEQ ID NO: 101493 - protein, 13 aa, Homo sapiens
  CDR3 for alpha chain variable domain of TCR clone 50747 (TRAV12-2, TRAJ39)
CAVNNNAGNMLTF

SEQ ID NO: 101494 - protein, 13 aa, Homo sapiens
  CDR3 for beta chain variable domain of TCR clone 50747 (TRBV2, TRBJ1-5)
CATAGPGNQPQHY

SEQ ID NO: 101495 - protein, 13 aa, Homo sapiens
  CDR3 for alpha chain variable domain of TCR clone 50748 (TRAV1-1, TRAJ9)
CAAKNTGGFKTIF

SEQ ID NO: 101496 - protein, 14 aa, Homo sapiens
  CDR3 for beta chain variable domain of TCR clone 50748 (TRBV20-1, TRBJ2-1)
CSAQICGSANEQFF

SEQ ID NO: 101497 - protein, 12 aa, Homo sapiens
  CDR3 for alpha chain variable domain of TCR clone 50749 (TRAV2, TRAJ9)
CAVGAGGFKTIF

SEQ ID NO: 101498 - protein, 11 aa, Homo sapiens
  CDR3 for beta chain variable domain of TCR clone 50749 (TRBV11-2, TRBJ2-2)
CASSLPGELFF

SEQ ID NO: 101499 - protein, 15 aa, Homo sapiens
  CDR3 for alpha chain variable domain of TCR clone 50750 (TRAV8-6, TRAJ11)
CAVNFMNSGYSTLTF

SEQ ID NO: 101500 - protein, 16 aa, Homo sapiens
  CDR3 for beta chain variable domain of TCR clone 50750 (TRBV5-1, TRBJ1-2)
CASSLDVNRGSYGYTF

SEQ ID NO: 101501 - protein, 14 aa, Homo sapiens
  CDR3 for alpha chain variable domain of TCR clone 50751 (TRAV8-4, TRAJ9)
CAVTFNTGGFKTIF

SEQ ID NO: 101502 - protein, 14 aa, Homo sapiens
  CDR3 for beta chain variable domain of TCR clone 50751 (TRBV7-9, TRBJ1-1)
CASTPLQSYTEAFF

SEQ ID NO: 101503 - protein, 14 aa, Homo sapiens
  CDR3 for alpha chain variable domain of TCR clone 50752 (TRAV9-2, TRAJ39)
CALYIYNAGNMLTF

SEQ ID NO: 101504 - protein, 14 aa, Homo sapiens
  CDR3 for beta chain variable domain of TCR clone 50752 (TRBV5-7, TRBJ2-1)
CASSSVANYNEQFF

SEQ ID NO: 101505 - protein, 12 aa, Homo sapiens
  CDR3 for alpha chain variable domain of TCR clone 50753 (TRAV16, TRAJ10)
CSRTGGGNKLTF

SEQ ID NO: 101506 - protein, 15 aa, Homo sapiens
  CDR3 for beta chain variable domain of TCR clone 50753 (TRBV11-3, TRBJ2-1)
CASSLGDSSHNEQFF

SEQ ID NO: 101507 - protein, 11 aa, Homo sapiens
  CDR3 for alpha chain variable domain of TCR clone 50754 (TRAV2, TRAJ13)
CASGGYQKVTF

SEQ ID NO: 101508 - protein, 16 aa, Homo sapiens
  CDR3 for beta chain variable domain of TCR clone 50754 (TRBV19, TRBJ2-1)
CASSKAAPSSYNEQFF

SEQ ID NO: 101509 - protein, 13 aa, Homo sapiens
  CDR3 for alpha chain variable domain of TCR clone 50755 (TRAV12-3, TRAJ43)
CAMIRPNNNDMRF

SEQ ID NO: 101510 - protein, 12 aa, Homo sapiens
  CDR3 for beta chain variable domain of TCR clone 50755 (TRBV11-2, TRBJ2-5)
CASSLGQETQYL

SEQ ID NO: 101511 - protein, 15 aa, Homo sapiens
  CDR3 for alpha chain variable domain of TCR clone 50756 (TRAV27, TRAJ38)
CAARRNAGNNRKLIW

SEQ ID NO: 101512 - protein, 12 aa, Homo sapiens
  CDR3 for beta chain variable domain of TCR clone 50756 (TRBV11-2, TRBJ2-1)
CASSPGNNEQFF

SEQ ID NO: 101513 - protein, 10 aa, Homo sapiens
  CDR3 for alpha chain variable domain of TCR clone 50757 (TRAV16, TRAJ20)
CSKRGLQGSF

SEQ ID NO: 101514 - protein, 13 aa, Homo sapiens
  CDR3 for beta chain variable domain of TCR clone 50757 (TRBV7-3, TRBJ2-1)
CASSLDSYNEQFF

SEQ ID NO: 101515 - protein, 16 aa, Homo sapiens
  CDR3 for alpha chain variable domain of TCR clone 50758 (TRAV8-1, TRAJ39)
CAVNVPSYNAGNMLAF

SEQ ID NO: 101516 - protein, 15 aa, Homo sapiens
  CDR3 for beta chain variable domain of TCR clone 50758 (TRBV4-1, TRBJ2-3)
CASRSTRAGTDTQYF

SEQ ID NO: 101517 - protein, 16 aa, Homo sapiens
  CDR3 for alpha chain variable domain of TCR clone 50759 (TRAV12-2, TRAJ43)
CAGDDMRFGAWTRLTV

SEQ ID NO: 101518 - protein, 16 aa, Homo sapiens
  CDR3 for beta chain variable domain of TCR clone 50759 (TRBV2, TRBJ2-4)
CASSEAPGGEQNIQYF

SEQ ID NO: 101519 - protein, 15 aa, Homo sapiens
  CDR3 for alpha chain variable domain of TCR clone 50760 (TRAV12-3, TRAJ6)
CAMSATTGGSYIPTF

SEQ ID NO: 101520 - protein, 19 aa, Homo sapiens
  CDR3 for beta chain variable domain of TCR clone 50760 (TRBV25-1, TRBJ2-2)
CATLVYRVDRGRKTGELFF

SEQ ID NO: 101521 - protein, 16 aa, Homo sapiens
  CDR3 for alpha chain variable domain of TCR clone 50761 (TRAV30, TRAJ24)
CGTEIVDADSWGKFPF

SEQ ID NO: 101522 - protein, 12 aa, Homo sapiens
  CDR3 for beta chain variable domain of TCR clone 50761 (TRBV11-2, TRBJ2-2)
CASSLGGGELFF

SEQ ID NO: 101523 - protein, 15 aa, Homo sapiens
  CDR3 for alpha chain variable domain of TCR clone 50762 (TRAV8-3, TRAJ45)
CASSYPGGGADGLTF

SEQ ID NO: 101524 - protein, 13 aa, Homo sapiens
  CDR3 for beta chain variable domain of TCR clone 50762 (TRBV10-3, TRBJ2-7)
CASKPAVNYEQYF

SEQ ID NO: 101525 - protein, 11 aa, Homo sapiens
  CDR3 for alpha chain variable domain of TCR clone 50763 (TRAV17, TRAJ9)
CATTGGFKTIF

SEQ ID NO: 101526 - protein, 14 aa, Homo sapiens
  CDR3 for beta chain variable domain of TCR clone 50763 (TRBV7-9, TRBJ2-2)
CASSGLADTGELCF

SEQ ID NO: 101527 - protein, 13 aa, Homo sapiens
  CDR3 for alpha chain variable domain of TCR clone 50764 (TRAV21, TRAJ27)
CAARPGNAGKSAF

SEQ ID NO: 101528 - protein, 14 aa, Homo sapiens
  CDR3 for beta chain variable domain of TCR clone 50764 (TRBV11-2, TRBJ2-7)
CASSLGAGAYEQYF

SEQ ID NO: 101529 - protein, 15 aa, Homo sapiens
  CDR3 for alpha chain variable domain of TCR clone 50765 (TRAV14/DV4, TRAJ26)
CAMREGQNHGQNFVS

SEQ ID NO: 101530 - protein, 13 aa, Homo sapiens
  CDR3 for beta chain variable domain of TCR clone 50765 (TRBV24-1, TRBJ2-2)
CATSDWSTGELFF

SEQ ID NO: 101531 - protein, 12 aa, Homo sapiens
  CDR3 for alpha chain variable domain of TCR clone 50766 (TRAV21, TRAJ23)
CAVGPQGGKLIF

SEQ ID NO: 101532 - protein, 12 aa, Homo sapiens
  CDR3 for beta chain variable domain of TCR clone 50766 (TRBV11-2, TRBJ2-2)
CASSLGGGELFF

SEQ ID NO: 101533 - protein, 15 aa, Homo sapiens
  CDR3 for alpha chain variable domain of TCR clone 50767 (TRAV14/DV4, TRAJ10)
CAMREPTGGGNKLTF

SEQ ID NO: 101534 - protein, 18 aa, Homo sapiens
  CDR3 for beta chain variable domain of TCR clone 50767 (TRBV7-9, TRBJ2-7)
CASSLTTSGSRTWYEQYF

SEQ ID NO: 101535 - protein, 12 aa, Homo sapiens
  CDR3 for alpha chain variable domain of TCR clone 50768 (TRAV17, TRAJ12)
CATVRSSYKLIF

SEQ ID NO: 101536 - protein, 16 aa, Homo sapiens
  CDR3 for beta chain variable domain of TCR clone 50768 (TRBV28, TRBJ2-7)
CASSLFFETGGPEQYF

SEQ ID NO: 101537 - protein, 13 aa, Homo sapiens
  CDR3 for alpha chain variable domain of TCR clone 50769 (TRAV3, TRAJ4)
CAVRDGGYNKLIF

SEQ ID NO: 101538 - protein, 14 aa, Homo sapiens
  CDR3 for beta chain variable domain of TCR clone 50769 (TRBV12-4, TRBJ1-2)
CASSSSAAGSSYAF

SEQ ID NO: 101539 - protein, 14 aa, Homo sapiens
  CDR3 for alpha chain variable domain of TCR clone 50770 (TRAV1-2, TRAJ8)
CAVGEDTGFQKLVF

SEQ ID NO: 101540 - protein, 16 aa, Homo sapiens
  CDR3 for beta chain variable domain of TCR clone 50770 (TRBV12-4, TRBJ1-5)
CASSRPVGGSNQPQHF

SEQ ID NO: 101541 - protein, 14 aa, Homo sapiens
  CDR3 for alpha chain variable domain of TCR clone 50771 (TRAV12-3, TRAJ9)
CAMSPNTGGFKTIF

SEQ ID NO: 101542 - protein, 14 aa, Homo sapiens
  CDR3 for beta chain variable domain of TCR clone 50771 (TRBV12-5, TRBJ2-5)
CASGSRTHQETQYF

SEQ ID NO: 101543 - protein, 15 aa, Homo sapiens
  CDR3 for alpha chain variable domain of TCR clone 50772 (TRAV1-2, TRAJ9)
CAVRDDGTGGFKTIF

SEQ ID NO: 101544 - protein, 14 aa, Homo sapiens
  CDR3 for beta chain variable domain of TCR clone 50772 (TRBV19, TRBJ2-1)
CASPTFVLSGEQFF

SEQ ID NO: 101545 - protein, 16 aa, Homo sapiens
  CDR3 for alpha chain variable domain of TCR clone 50773 (TRAV3, TRAJ21)
CAVRDIERGNFNKFYF

SEQ ID NO: 101546 - protein, 17 aa, Homo sapiens
  CDR3 for beta chain variable domain of TCR clone 50773 (TRBV7-8, TRBJ2-6)
CASSAGTGGAGANVLTF

SEQ ID NO: 101547 - protein, 14 aa, Homo sapiens
  CDR3 for alpha chain variable domain of TCR clone 50774 (TRAV8-3, TRAJ9)
CAVVYNTGGFKTIF

SEQ ID NO: 101548 - protein, 14 aa, Homo sapiens
  CDR3 for beta chain variable domain of TCR clone 50774 (TRBV7-3, TRBJ2-2)
CASSSVGYTGELFF

SEQ ID NO: 101549 - protein, 13 aa, Homo sapiens
  CDR3 for alpha chain variable domain of TCR clone 50775 (TRAV13-1, TRAJ39)
CAASIWAGDMLTL

SEQ ID NO: 101550 - protein, 15 aa, Homo sapiens
  CDR3 for beta chain variable domain of TCR clone 50775 (TRBV7-9, TRBJ1-1)
CASSLLEQGGTEAFF

SEQ ID NO: 101551 - protein, 13 aa, Homo sapiens
  CDR3 for alpha chain variable domain of TCR clone 50776 (TRAV8-3, TRAJ43)
CAVGPDNNNDMRF

SEQ ID NO: 101552 - protein, 12 aa, Homo sapiens
  CDR3 for beta chain variable domain of TCR clone 50776 (TRBV7-2, TRBJ1-6)
CASSLSSSPLHV

SEQ ID NO: 101553 - protein, 14 aa, Homo sapiens
  CDR3 for alpha chain variable domain of TCR clone 50777 (TRAV12-2, TRAJ17)
CAVLFKAAGNKLTF

SEQ ID NO: 101554 - protein, 17 aa, Homo sapiens
  CDR3 for beta chain variable domain of TCR clone 50777 (TRBV20-1, TRBJ2-2)
CSSSGSGQGGLTGELFF

SEQ ID NO: 101555 - protein, 14 aa, Homo sapiens
  CDR3 for alpha chain variable domain of TCR clone 50778 (TRAV17, TRAJ15)
CATDAWQAGTALIF

SEQ ID NO: 101556 - protein, 15 aa, Homo sapiens
  CDR3 for beta chain variable domain of TCR clone 50778 (TRBV7-2, TRBJ2-1)
CASSSGLAGGNEQSF

SEQ ID NO: 101557 - protein, 13 aa, Homo sapiens
  CDR3 for alpha chain variable domain of TCR clone 50779 (TRAV13-1, TRAJ12)
CAASPDSSYKLIF

SEQ ID NO: 101558 - protein, 13 aa, Homo sapiens
  CDR3 for beta chain variable domain of TCR clone 50779 (TRBV7-2, TRBJ2-1)
CASSPGTSNEQFF

SEQ ID NO: 101559 - protein, 17 aa, Homo sapiens
  CDR3 for alpha chain variable domain of TCR clone 50780 (TRAV3, TRAJ42)
CAVRDRDYGGSQGNLIF

SEQ ID NO: 101560 - protein, 15 aa, Homo sapiens
  CDR3 for beta chain variable domain of TCR clone 50780 (TRBV6-6, TRBJ2-7)
CASSYSYGGSYEQCF

SEQ ID NO: 101561 - protein, 12 aa, Homo sapiens
  CDR3 for alpha chain variable domain of TCR clone 50781 (TRAV13-1, TRAJ48)
CAANFGNEKLTF

SEQ ID NO: 101562 - protein, 13 aa, Homo sapiens
  CDR3 for beta chain variable domain of TCR clone 50781 (TRBV4-2, TRBJ1-1)
CASSQAGNTEAFF

SEQ ID NO: 101563 - protein, 15 aa, Homo sapiens
  CDR3 for alpha chain variable domain of TCR clone 50782 (TRAV21, TRAJ53)
CATLNSGGSNYKLTL

SEQ ID NO: 101564 - protein, 16 aa, Homo sapiens
  CDR3 for beta chain variable domain of TCR clone 50782 (TRBV9, TRBJ2-1)
CASSVGGGGNYNEQSF

SEQ ID NO: 101565 - protein, 14 aa, Homo sapiens
  CDR3 for alpha chain variable domain of TCR clone 50783 (TRAV26-1, TRAJ21)
CIVRPPYNFNKFYF

SEQ ID NO: 101566 - protein, 14 aa, Homo sapiens
  CDR3 for beta chain variable domain of TCR clone 50783 (TRBV11-3, TRBJ2-1)
CASGATTSGSIQFF

SEQ ID NO: 101567 - protein, 15 aa, Homo sapiens
  CDR3 for alpha chain variable domain of TCR clone 50784 (TRAV25, TRAJ52)
CAGRPGGTSYGKLTF

SEQ ID NO: 101568 - protein, 17 aa, Homo sapiens
  CDR3 for beta chain variable domain of TCR clone 50784 (TRBV7-8, TRBJ2-6)
CASSAGTGGGGANVLTF

SEQ ID NO: 101569 - protein, 13 aa, Homo sapiens
  CDR3 for alpha chain variable domain of TCR clone 50785 (TRAV29/DV5, TRAJ47)
CAASADYGNKLVF

SEQ ID NO: 101570 - protein, 15 aa, Homo sapiens
  CDR3 for beta chain variable domain of TCR clone 50785 (TRBV7-9, TRBJ1-4)
CASSARTGGNEKLFF

SEQ ID NO: 101571 - protein, 14 aa, Homo sapiens
  CDR3 for alpha chain variable domain of TCR clone 50786 (TRAV2, TRAJ9)
CAVEDRSGGFKTIF

SEQ ID NO: 101572 - protein, 13 aa, Homo sapiens
  CDR3 for beta chain variable domain of TCR clone 50786 (TRBV28, TRBJ2-7)
CASTPGLAGEQYF

SEQ ID NO: 101573 - protein, 14 aa, Homo sapiens
  CDR3 for alpha chain variable domain of TCR clone 50787 (TRAV20, TRAJ44)
CAVQDTGTASKLTF

SEQ ID NO: 101574 - protein, 13 aa, Homo sapiens
  CDR3 for beta chain variable domain of TCR clone 50787 (TRBV29-1, TRBJ1-3)
CSSGTGRGNTIYF

SEQ ID NO: 101575 - protein, 14 aa, Homo sapiens
  CDR3 for alpha chain variable domain of TCR clone 50788 (TRAV12-2, TRAJ45)
CALSERGGADGLTF

SEQ ID NO: 101576 - protein, 14 aa, Homo sapiens
  CDR3 for beta chain variable domain of TCR clone 50788 (TRBV18, TRBJ1-5)
CASSPGNSNQPQHF

SEQ ID NO: 101577 - protein, 13 aa, Homo sapiens
  CDR3 for alpha chain variable domain of TCR clone 50789 (TRAV2, TRAJ40)
CAVVTSGTYKYIF

SEQ ID NO: 101578 - protein, 14 aa, Homo sapiens
  CDR3 for beta chain variable domain of TCR clone 50789 (TRBV20-1, TRBJ2-1)
CSAQIGGSANEQFF

SEQ ID NO: 101579 - protein, 17 aa, Homo sapiens
  CDR3 for alpha chain variable domain of TCR clone 50790 (TRAV38-2/DV8, TRAJ56)
CAYKSEVGTGANSKLTF

SEQ ID NO: 101580 - protein, 14 aa, Homo sapiens
  CDR3 for beta chain variable domain of TCR clone 50790 (TRBV11-1, TRBJ1-1)
CASSLEHPNTEAFF

SEQ ID NO: 101581 - protein, 17 aa, Homo sapiens
  CDR3 for alpha chain variable domain of TCR clone 50791 (TRAV3, TRAJ6)
CAVRDGPRAGGSYIPTF

SEQ ID NO: 101582 - protein, 14 aa, Homo sapiens
  CDR3 for beta chain variable domain of TCR clone 50791 (TRBV5-8, TRBJ2-7)
CASSPKTSFYEQYF

SEQ ID NO: 101583 - protein, 14 aa, Homo sapiens
  CDR3 for alpha chain variable domain of TCR clone 50792 (TRAV17, TRAJ16)
CATADFSDGQKLLF

SEQ ID NO: 101584 - protein, 15 aa, Homo sapiens
  CDR3 for beta chain variable domain of TCR clone 50792 (TRBV18, TRBJ2-1)
CANSPPSASYNEQFF

SEQ ID NO: 101585 - protein, 23 aa, Homo sapiens
  CDR3 for alpha chain variable domain of TCR clone 50793 (TRAV8-3, )
CAVVTTWIPDIQNPDPAVYQLRD

SEQ ID NO: 101586 - protein, 14 aa, Homo sapiens
  CDR3 for beta chain variable domain of TCR clone 50793 (TRBV11-2, TRBJ2-7)
CASSPSTTSYEQYF

SEQ ID NO: 101587 - protein, 13 aa, Homo sapiens
  CDR3 for alpha chain variable domain of TCR clone 50794 (TRAV27, TRAJ49)
CAPRPYTGNQFYF

SEQ ID NO: 101588 - protein, 16 aa, Homo sapiens
  CDR3 for beta chain variable domain of TCR clone 50794 (TRBV4-1, TRBJ1-2)
CASSQDAGQVLYGHTF

SEQ ID NO: 101589 - protein, 14 aa, Homo sapiens
  CDR3 for alpha chain variable domain of TCR clone 50795 (TRAV14/DV4, TRAJ47)
CAMREGRGGNKLVF

SEQ ID NO: 101590 - protein, 14 aa, Homo sapiens
  CDR3 for beta chain variable domain of TCR clone 50795 (TRBV11-3, TRBJ2-7)
CASSPAVPPYEQYF

SEQ ID NO: 101591 - protein, 18 aa, Homo sapiens
  CDR3 for alpha chain variable domain of TCR clone 50796 (TRAV13-1, TRAJ52)
CAASKRSAGGTSYGKLTF

SEQ ID NO: 101592 - protein, 14 aa, Homo sapiens
  CDR3 for beta chain variable domain of TCR clone 50796 (TRBV7-8, TRBJ2-3)
CASSLEAGTDTQYF

SEQ ID NO: 101593 - protein, 15 aa, Homo sapiens
  CDR3 for alpha chain variable domain of TCR clone 50797 (TRAV4, TRAJ28)
CLVEGSGAGSYQLTF

SEQ ID NO: 101594 - protein, 15 aa, Homo sapiens
  CDR3 for beta chain variable domain of TCR clone 50797 (TRBV9, TRBJ2-3)
CASSVRGLTVDTQYF

SEQ ID NO: 101595 - protein, 14 aa, Homo sapiens
  CDR3 for alpha chain variable domain of TCR clone 50798 (TRAV12-2, TRAJ53)
CAVKGGGSNYKLTF

SEQ ID NO: 101596 - protein, 14 aa, Homo sapiens
  CDR3 for beta chain variable domain of TCR clone 50798 (TRBV18, TRBJ2-3)
CASSRDRGTDTQYF

SEQ ID NO: 101597 - protein, 16 aa, Homo sapiens
  CDR3 for alpha chain variable domain of TCR clone 50799 (TRAV1-2, TRAJ6)
CAVRDQGTGGSYIPTF

SEQ ID NO: 101598 - protein, 13 aa, Homo sapiens
  CDR3 for beta chain variable domain of TCR clone 50799 (TRBV12-4, TRBJ1-2)
CASGLRQRKGYTF

SEQ ID NO: 101599 - protein, 14 aa, Homo sapiens
  CDR3 for alpha chain variable domain of TCR clone 50800 (TRAV23/DV6, TRAJ37)
CAASTSSNTGKLIF

SEQ ID NO: 101600 - protein, 14 aa, Homo sapiens
  CDR3 for beta chain variable domain of TCR clone 50800 (TRBV7-7, TRBJ2-2)
CASSRDRSTGELFF

SEQ ID NO: 101601 - protein, 14 aa, Homo sapiens
  CDR3 for alpha chain variable domain of TCR clone 50801 (TRAV1-2, TRAJ16)
CAVNRFSDGQKLLF

SEQ ID NO: 101602 - protein, 18 aa, Homo sapiens
  CDR3 for beta chain variable domain of TCR clone 50801 (TRBV4-2, TRBJ2-6)
CASSQLQGVLTGANVLTF

SEQ ID NO: 101603 - protein, 15 aa, Homo sapiens
  CDR3 for alpha chain variable domain of TCR clone 50802 (TRAV8-4, TRAJ3)
CAVTGENLVPQCFQD

SEQ ID NO: 101604 - protein, 16 aa, Homo sapiens
  CDR3 for beta chain variable domain of TCR clone 50802 (TRBV4-2, TRBJ1-1)
CASSQAGFGMNTEAFF

SEQ ID NO: 101605 - protein, 13 aa, Homo sapiens
  CDR3 for alpha chain variable domain of TCR clone 50803 (TRAV8-3, TRAJ28)
CAVGAVGSYQLTF

SEQ ID NO: 101606 - protein, 16 aa, Homo sapiens
  CDR3 for beta chain variable domain of TCR clone 50803 (TRBV19, TRBJ2-1)
CASSKAGQSSYNEQFF

SEQ ID NO: 101607 - protein, 13 aa, Homo sapiens
  CDR3 for alpha chain variable domain of TCR clone 50804 (TRAV3, TRAJ21)
CAVREPDFNEFYF

SEQ ID NO: 101608 - protein, 14 aa, Homo sapiens
  CDR3 for beta chain variable domain of TCR clone 50804 (TRBV20-1, TRBJ2-3)
CSARGGTSTDTQYF

SEQ ID NO: 101609 - protein, 15 aa, Homo sapiens
  CDR3 for alpha chain variable domain of TCR clone 50805 (TRAV3, TRAJ5)
CAVRDLDTGRRARTF

SEQ ID NO: 101610 - protein, 14 aa, Homo sapiens
  CDR3 for beta chain variable domain of TCR clone 50805 (TRBV25-1, TRBJ1-1)
CASTHLGGNTEAFF

SEQ ID NO: 101611 - protein, 16 aa, Homo sapiens
  CDR3 for alpha chain variable domain of TCR clone 50806 (TRAV17, TRAJ28)
CATDGYSGAGSYQLTF

SEQ ID NO: 101612 - protein, 13 aa, Homo sapiens
  CDR3 for beta chain variable domain of TCR clone 50806 (TRBV7-9, TRBJ1-2)
CASRTGPNYGYTF

SEQ ID NO: 101613 - protein, 13 aa, Homo sapiens
  CDR3 for alpha chain variable domain of TCR clone 50807 (TRAV13-1, TRAJ12)
CAASPDSSYKLIS

SEQ ID NO: 101614 - protein, 16 aa, Homo sapiens
  CDR3 for beta chain variable domain of TCR clone 50807 (TRBV15, TRBJ2-1)
CATSRERLAGAYEQFF

SEQ ID NO: 101615 - protein, 15 aa, Homo sapiens
  CDR3 for alpha chain variable domain of TCR clone 50808 (TRAV21, TRAJ53)
CATLNSGGSNYKLTF

SEQ ID NO: 101616 - protein, 15 aa, Homo sapiens
  CDR3 for beta chain variable domain of TCR clone 50808 (TRBV7-3, TRBJ2-3)
CASSLGLTLGDTQYF

SEQ ID NO: 101617 - protein, 15 aa, Homo sapiens
  CDR3 for alpha chain variable domain of TCR clone 50809 (TRAV8-3, TRAJ11)
CAAGLLNSGYSTLTF

SEQ ID NO: 101618 - protein, 16 aa, Homo sapiens
  CDR3 for beta chain variable domain of TCR clone 50809 (TRBV7-9, TRBJ1-2)
CASSLGFSSGEDGHTF

SEQ ID NO: 101619 - protein, 11 aa, Homo sapiens
  CDR3 for alpha chain variable domain of TCR clone 50810 (TRAV16, TRAJ33)
CAPHSNYQLIW

SEQ ID NO: 101620 - protein, 15 aa, Homo sapiens
  CDR3 for beta chain variable domain of TCR clone 50810 (TRBV4-1, TRBJ2-7)
CASSQQGQGFDEQYF

SEQ ID NO: 101621 - protein, 13 aa, Homo sapiens
  CDR3 for alpha chain variable domain of TCR clone 50811 (TRAV35, TRAJ42)
CAGFPGSQGNIIF

SEQ ID NO: 101622 - protein, 13 aa, Homo sapiens
  CDR3 for beta chain variable domain of TCR clone 50811 (TRBV29-1, TRBJ2-1)
CSVEGGRVNEQFF

SEQ ID NO: 101623 - protein, 15 aa, Homo sapiens
  CDR3 for alpha chain variable domain of TCR clone 50812 (TRAV13-1, TRAJ52)
CAATSPRTSYGKLTF

SEQ ID NO: 101624 - protein, 12 aa, Homo sapiens
  CDR3 for beta chain variable domain of TCR clone 50812 (TRBV19, TRBJ1-1)
CASMNRYTEAFF

SEQ ID NO: 101625 - protein, 18 aa, Homo sapiens
  CDR3 for alpha chain variable domain of TCR clone 50813 (TRAV12-3, TRAJ52)
CAMSRTNAGGTSYGKLTF

SEQ ID NO: 101626 - protein, 17 aa, Homo sapiens
  CDR3 for beta chain variable domain of TCR clone 50813 (TRBV7-3, TRBJ2-3)
CASSLMKMMRGADTQYF

SEQ ID NO: 101627 - protein, 14 aa, Homo sapiens
  CDR3 for alpha chain variable domain of TCR clone 50814 (TRAV1-1, TRAJ27)
CAVIYNTNAGKSTF

SEQ ID NO: 101628 - protein, 13 aa, Homo sapiens
  CDR3 for beta chain variable domain of TCR clone 50814 (TRBV7-9, TRBJ1-2)
CASSLKQNYGDTF

SEQ ID NO: 101629 - protein, 14 aa, Homo sapiens
  CDR3 for alpha chain variable domain of TCR clone 50815 (TRAV17, TRAJ6)
CATDASGGRYIPTF

SEQ ID NO: 101630 - protein, 19 aa, Homo sapiens
  CDR3 for beta chain variable domain of TCR clone 50815 (TRBV4-3, TRBJ2-7)
CASSQEFIGWQVTPYEQYF

SEQ ID NO: 101631 - protein, 14 aa, Homo sapiens
  CDR3 for alpha chain variable domain of TCR clone 50816 (TRAV2, TRAJ9)
CAVEDRNGGFKTIF

SEQ ID NO: 101632 - protein, 19 aa, Homo sapiens
  CDR3 for beta chain variable domain of TCR clone 50816 (TRBV25-1, TRBJ2-2)
CAILVYRVDRGRKTGELFF

SEQ ID NO: 101633 - protein, 16 aa, Homo sapiens
  CDR3 for alpha chain variable domain of TCR clone 50817 (TRAV12-3, TRAJ53)
CAMSPGSGGSNYKLTF

SEQ ID NO: 101634 - protein, 12 aa, Homo sapiens
  CDR3 for beta chain variable domain of TCR clone 50817 (TRBV12-4, TRBJ2-7)
CASSLGGHEQYF

SEQ ID NO: 101635 - protein, 13 aa, Homo sapiens
  CDR3 for alpha chain variable domain of TCR clone 50818 (TRAV17, TRAJ9)
CATDYTGGFKTIF

SEQ ID NO: 101636 - protein, 14 aa, Homo sapiens
  CDR3 for beta chain variable domain of TCR clone 50818 (TRBV2, TRBJ2-7)
CASSLTSGGYEQYF

SEQ ID NO: 101637 - protein, 15 aa, Homo sapiens
  CDR3 for alpha chain variable domain of TCR clone 50819 (TRAV14/DV4, TRAJ15)
CAMREGWQAGTALTF

SEQ ID NO: 101638 - protein, 14 aa, Homo sapiens
  CDR3 for beta chain variable domain of TCR clone 50819 (TRBV19, TRBJ2-5)
CASSMTGQQETQYF

SEQ ID NO: 101639 - protein, 11 aa, Homo sapiens
  CDR3 for alpha chain variable domain of TCR clone 50820 (TRAV2, TRAJ13)
CASGGYQKVTF

SEQ ID NO: 101640 - protein, 15 aa, Homo sapiens
  CDR3 for beta chain variable domain of TCR clone 50820 (TRBV6-1, TRBJ2-2)
CASSRLRGGTGELFF

SEQ ID NO: 101641 - protein, 14 aa, Homo sapiens
  CDR3 for alpha chain variable domain of TCR clone 50821 (TRAV35, TRAJ13)
CAGSPSGGYQKVTF

SEQ ID NO: 101642 - protein, 14 aa, Homo sapiens
  CDR3 for beta chain variable domain of TCR clone 50821 (TRBV12-4, TRBJ1-1)
CASSLGTGGTEAFF

SEQ ID NO: 101643 - protein, 14 aa, Homo sapiens
  CDR3 for alpha chain variable domain of TCR clone 50822 (TRAV13-1, TRAJ44)
CAAKETGTASKLTF

SEQ ID NO: 101644 - protein, 17 aa, Homo sapiens
  CDR3 for beta chain variable domain of TCR clone 50822 (TRBV7-3, TRBJ2-3)
CASSLMKRMRGADTQYF

SEQ ID NO: 101645 - protein, 13 aa, Homo sapiens
  CDR3 for alpha chain variable domain of TCR clone 50823 (TRAV9-2, TRAJ4)
CALKSGGYNKLIF

SEQ ID NO: 101646 - protein, 13 aa, Homo sapiens
  CDR3 for beta chain variable domain of TCR clone 50823 (TRBV10-3, TRBJ2-7)
CASKLAVNYEQYF

SEQ ID NO: 101647 - protein, 14 aa, Homo sapiens
  CDR3 for alpha chain variable domain of TCR clone 50824 (TRAV12-3, TRAJ12)
CAMSEVDSSYKLIF

SEQ ID NO: 101648 - protein, 12 aa, Homo sapiens
  CDR3 for beta chain variable domain of TCR clone 50824 (TRBV18, TRBJ1-4)
CANSPSREKLFF

SEQ ID NO: 101649 - protein, 13 aa, Homo sapiens
  CDR3 for alpha chain variable domain of TCR clone 50825 (TRAV2, TRAJ21)
CAVADLNFNKFYF

SEQ ID NO: 101650 - protein, 15 aa, Homo sapiens
  CDR3 for beta chain variable domain of TCR clone 50825 (TRBV28, TRBJ2-5)
CASSPGQGSIETQYF

SEQ ID NO: 101651 - protein, 11 aa, Homo sapiens
  CDR3 for alpha chain variable domain of TCR clone 50826 (TRAV1-2, TRAJ20)
CAVDNDYKLSF

SEQ ID NO: 101652 - protein, 18 aa, Homo sapiens
  CDR3 for beta chain variable domain of TCR clone 50826 (TRBV20-1, TRBJ2-6)
CSAETTPTHGSGANVLTF

SEQ ID NO: 101653 - protein, 14 aa, Homo sapiens
  CDR3 for alpha chain variable domain of TCR clone 50827 (TRAV2, TRAJ37)
CAVDFTSNTGKLIF

SEQ ID NO: 101654 - protein, 16 aa, Homo sapiens
  CDR3 for beta chain variable domain of TCR clone 50827 (TRBV9, TRBJ2-1)
CASSVGGGGNYNEQFF

SEQ ID NO: 101655 - protein, 10 aa, Homo sapiens
  CDR3 for alpha chain variable domain of TCR clone 50828 (TRAV13-1, TRAJ15)
INQAGTALIF

SEQ ID NO: 101656 - protein, 14 aa, Homo sapiens
  CDR3 for beta chain variable domain of TCR clone 50828 (TRBV7-9, TRBJ2-1)
CASSDNAGYNEQFF

SEQ ID NO: 101657 - protein, 15 aa, Homo sapiens
  CDR3 for alpha chain variable domain of TCR clone 50829 (TRAV35, TRAJ40)
CAGQLGTSGTYKYNF

SEQ ID NO: 101658 - protein, 14 aa, Homo sapiens
  CDR3 for beta chain variable domain of TCR clone 50829 (TRBV7-3, TRBJ2-1)
CASSLAGGTNEQFF

SEQ ID NO: 101659 - protein, 13 aa, Homo sapiens
  CDR3 for alpha chain variable domain of TCR clone 50830 (TRAV13-1, TRAJ21)
CAASIYNFNKFYF

SEQ ID NO: 101660 - protein, 17 aa, Homo sapiens
  CDR3 for beta chain variable domain of TCR clone 50830 (TRBV7-3, TRBJ2-3)
CASSLMKRMRGADTQYF

SEQ ID NO: 101661 - protein, 14 aa, Homo sapiens
  CDR3 for alpha chain variable domain of TCR clone 50831 (TRAV21, TRAJ52)
CGRAGGTSYGKLTS

SEQ ID NO: 101662 - protein, 14 aa, Homo sapiens
  CDR3 for beta chain variable domain of TCR clone 50831 (TRBV19, TRBJ1-2)
CASSVLGYNYGYTF

SEQ ID NO: 101663 - protein, 14 aa, Homo sapiens
  CDR3 for alpha chain variable domain of TCR clone 50832 (TRAV3, TRAJ21)
CAVRDAYNFNKFYL

SEQ ID NO: 101664 - protein, 17 aa, Homo sapiens
  CDR3 for beta chain variable domain of TCR clone 50832 (TRBV20-1, TRBJ1-6)
CSARGGYTFSYNSPLHF

SEQ ID NO: 101665 - protein, 15 aa, Homo sapiens
  CDR3 for alpha chain variable domain of TCR clone 50833 (TRAV25, TRAJ52)
CAGRPGGTSYGKLTF

SEQ ID NO: 101666 - protein, 17 aa, Homo sapiens
  CDR3 for beta chain variable domain of TCR clone 50833 (TRBV7-8, TRBJ2-6)
CASSAGTGGAGANVLNF

SEQ ID NO: 101667 - protein, 15 aa, Homo sapiens
  CDR3 for alpha chain variable domain of TCR clone 50834 (TRAV21, TRAJ45)
CAVSYSGGGADGLTF

SEQ ID NO: 101668 - protein, 13 aa, Homo sapiens
  CDR3 for beta chain variable domain of TCR clone 50834 (TRBV20-1, TRBJ2-5)
CSAATELQETQCF

SEQ ID NO: 101669 - protein, 17 aa, Homo sapiens
  CDR3 for alpha chain variable domain of TCR clone 50835 (TRAV2, TRAJ36)
CAVEDRGNWGKQPLLCD

SEQ ID NO: 101670 - protein, 14 aa, Homo sapiens
  CDR3 for beta chain variable domain of TCR clone 50835 (TRBV7-9, TRBJ2-5)
CASSLDTAQETQYF

SEQ ID NO: 101671 - protein, 14 aa, Homo sapiens
  CDR3 for alpha chain variable domain of TCR clone 50836 (TRAV8-3, TRAJ23)
CAVIIYNKGGKLIF

SEQ ID NO: 101672 - protein, 15 aa, Homo sapiens
  CDR3 for beta chain variable domain of TCR clone 50836 (TRBV18, TRBJ2-1)
CASSPPSASYNEQFF

SEQ ID NO: 101673 - protein, 14 aa, Homo sapiens
  CDR3 for alpha chain variable domain of TCR clone 50837 (TRAV26-2, TRAJ38)
CILYNAGNNRKLIC

SEQ ID NO: 101674 - protein, 14 aa, Homo sapiens
  CDR3 for beta chain variable domain of TCR clone 50837 (TRBV19, TRBJ2-1)
CASPTFVLSGEQFF

SEQ ID NO: 101675 - protein, 14 aa, Homo sapiens
  CDR3 for alpha chain variable domain of TCR clone 50838 (TRAV12-3, TRAJ10)
SHLPLTGGGNKLTF

SEQ ID NO: 101676 - protein, 15 aa, Homo sapiens
  CDR3 for beta chain variable domain of TCR clone 50838 (TRBV11-2, TRBJ2-1)
CASSRNRGLMYEQFF

SEQ ID NO: 101677 - protein, 16 aa, Homo sapiens
  CDR3 for alpha chain variable domain of TCR clone 50839 (TRAV30, TRAJ24)
CGTEIVGADSWGKFQF

SEQ ID NO: 101678 - protein, 15 aa, Homo sapiens
  CDR3 for beta chain variable domain of TCR clone 50839 (TRBV7-9, TRBJ1-4)
CASSARTGGNENLFF

SEQ ID NO: 101679 - protein, 13 aa, Homo sapiens
  CDR3 for alpha chain variable domain of TCR clone 50840 (TRAV12-3, TRAJ13)
CAMSSGGYQKVTF

SEQ ID NO: 101680 - protein, 17 aa, Homo sapiens
  CDR3 for beta chain variable domain of TCR clone 50840 (TRBV4-1, TRBJ1-4)
CASSQEGPRGVEEKLSF

SEQ ID NO: 101681 - protein, 14 aa, Homo sapiens
  CDR3 for alpha chain variable domain of TCR clone 50841 (TRAV26-1, TRAJ39)
CIVRGSRAGNMLTF

SEQ ID NO: 101682 - protein, 15 aa, Homo sapiens
  CDR3 for beta chain variable domain of TCR clone 50841 (TRBV7-9, TRBJ1-5)
CASSQGHQPNQSQHF

SEQ ID NO: 101683 - protein, 16 aa, Homo sapiens
  CDR3 for alpha chain variable domain of TCR clone 50842 (TRAV4, TRAJ22)
CLGGDLYSGSARQLTF

SEQ ID NO: 101684 - protein, 16 aa, Homo sapiens
  CDR3 for beta chain variable domain of TCR clone 50842 (TRBV7-9, TRBJ2-1)
CASSDVAGGSYNEQFF

SEQ ID NO: 101685 - protein, 14 aa, Homo sapiens
  CDR3 for alpha chain variable domain of TCR clone 50843 (TRAV12-2, TRAJ13)
CAVKKTGGYQKVTF

SEQ ID NO: 101686 - protein, 13 aa, Homo sapiens
  CDR3 for beta chain variable domain of TCR clone 50843 (TRBV12-4, TRBJ1-2)
CTSVPEVSYGYTF

SEQ ID NO: 101687 - protein, 15 aa, Homo sapiens
  CDR3 for alpha chain variable domain of TCR clone 50844 (TRAV3, TRAJ5)
CAVRDLDTGRRALTF

SEQ ID NO: 101688 - protein, 13 aa, Homo sapiens
  CDR3 for beta chain variable domain of TCR clone 50844 (TRBV7-3, TRBJ1-1)
CASSQDWGAEAFF

SEQ ID NO: 101689 - protein, 12 aa, Homo sapiens
  CDR3 for alpha chain variable domain of TCR clone 50845 (TRAV12-1, TRAJ15)
CVVNQAGTALIF

SEQ ID NO: 101690 - protein, 14 aa, Homo sapiens
  CDR3 for beta chain variable domain of TCR clone 50845 (TRBV27, TRBJ2-3)
CASSWAGTTDTQYF

SEQ ID NO: 101691 - protein, 13 aa, Homo sapiens
  CDR3 for alpha chain variable domain of TCR clone 50846 (TRAV13-1, TRAJ20)
CAARVSNDYKHSF

SEQ ID NO: 101692 - protein, 12 aa, Homo sapiens
  CDR3 for beta chain variable domain of TCR clone 50846 (TRBV20-1, TRBJ2-1)
CSARLGTDEQFF

SEQ ID NO: 101693 - protein, 17 aa, Homo sapiens
  CDR3 for alpha chain variable domain of TCR clone 50847 (TRAV38-1, TRAJ45)
CAFMKHYMGGGADGLTF

SEQ ID NO: 101694 - protein, 14 aa, Homo sapiens
  CDR3 for beta chain variable domain of TCR clone 50847 (TRBV6-1, TRBJ2-5)
CASSEQGLAGGYTK

SEQ ID NO: 101695 - protein, 13 aa, Homo sapiens
  CDR3 for alpha chain variable domain of TCR clone 50848 (TRAV8-6, TRAJ8)
CAVSNTGFQKLVF

SEQ ID NO: 101696 - protein, 15 aa, Homo sapiens
  CDR3 for beta chain variable domain of TCR clone 50848 (TRBV28, TRBJ2-5)
CASNSGRTIQETQYF

SEQ ID NO: 101697 - protein, 16 aa, Homo sapiens
  CDR3 for alpha chain variable domain of TCR clone 50849 (TRAV17, TRAJ28)
CATASVSVAGSYQLTF

SEQ ID NO: 101698 - protein, 11 aa, Homo sapiens
  CDR3 for beta chain variable domain of TCR clone 50849 (TRBV7-9, TRBJ2-5)
CASSLGETQYF

SEQ ID NO: 101699 - protein, 15 aa, Homo sapiens
  CDR3 for alpha chain variable domain of TCR clone 50850 (TRAV12-3, TRAJ49)
CAMAVTPNTGNQFYF

SEQ ID NO: 101700 - protein, 18 aa, Homo sapiens
  CDR3 for beta chain variable domain of TCR clone 50850 (TRBV4-1, TRBJ1-5)
CVSSQDPRGQGLNQPQHF

SEQ ID NO: 101701 - protein, 13 aa, Homo sapiens
  CDR3 for alpha chain variable domain of TCR clone 50851 (TRAV8-3, TRAJ21)
CAVGAYNFNKFYF

SEQ ID NO: 101702 - protein, 16 aa, Homo sapiens
  CDR3 for beta chain variable domain of TCR clone 50851 (TRBV7-6, TRBJ2-1)
CASSLNEGPSYNEQFF

SEQ ID NO: 101703 - protein, 14 aa, Homo sapiens
  CDR3 for alpha chain variable domain of TCR clone 50852 (TRAV12-2, TRAJ3)
CAVSLYSSASKIIF

SEQ ID NO: 101704 - protein, 14 aa, Homo sapiens
  CDR3 for beta chain variable domain of TCR clone 50852 (TRBV27, TRBJ2-1)
CAGSIAETHNEQFF

SEQ ID NO: 101705 - protein, 16 aa, Homo sapiens
  CDR3 for alpha chain variable domain of TCR clone 50853 (TRAV3, TRAJ18)
CAVRDGRGSTLGRLYF

SEQ ID NO: 101706 - protein, 15 aa, Homo sapiens
  CDR3 for beta chain variable domain of TCR clone 50853 (TRBV7-9, TRBJ1-6)
CASSSPGRGNSPPHF

SEQ ID NO: 101707 - protein, 15 aa, Homo sapiens
  CDR3 for alpha chain variable domain of TCR clone 50854 (TRAV26-1, TRAJ44)
FIVRIGTGTASKLTF

SEQ ID NO: 101708 - protein, 15 aa, Homo sapiens
  CDR3 for beta chain variable domain of TCR clone 50854 (TRBV7-6, TRBJ2-1)
CASSSLAGEGNEQFF

SEQ ID NO: 101709 - protein, 15 aa, Homo sapiens
  CDR3 for alpha chain variable domain of TCR clone 50855 (TRAV26-1, TRAJ22)
CILRVSFWFCKATDL

SEQ ID NO: 101710 - protein, 13 aa, Homo sapiens
  CDR3 for beta chain variable domain of TCR clone 50855 (TRBV7-9, TRBJ1-2)
CASSLKQNYGYTF

SEQ ID NO: 101711 - protein, 14 aa, Homo sapiens
  CDR3 for alpha chain variable domain of TCR clone 50856 (TRAV35, TRAJ42)
CAGRYGGSQGNLIF

SEQ ID NO: 101712 - protein, 17 aa, Homo sapiens
  CDR3 for beta chain variable domain of TCR clone 50856 (TRBV20-1, TRBJ2-2)
CSASGSGQGGLTGELFF

SEQ ID NO: 101713 - protein, 13 aa, Homo sapiens
  CDR3 for alpha chain variable domain of TCR clone 50857 (TRAV2, TRAJ40)
CAVVTSGTYKYIF

SEQ ID NO: 101714 - protein, 14 aa, Homo sapiens
  CDR3 for beta chain variable domain of TCR clone 50857 (TRBV7-3, TRBJ2-1)
CASSLSGSYNEQFF

SEQ ID NO: 101715 - protein, 13 aa, Homo sapiens
  CDR3 for alpha chain variable domain of TCR clone 50858 (TRAV8-3, TRAJ21)
CAVGAYNFNKFYF

SEQ ID NO: 101716 - protein, 16 aa, Homo sapiens
  CDR3 for beta chain variable domain of TCR clone 50858 (TRBV19, TRBJ2-1)
CASSMGGGSSYNEQFL

SEQ ID NO: 101717 - protein, 17 aa, Homo sapiens
  CDR3 for alpha chain variable domain of TCR clone 50859 (TRAV13-1, TRAJ28)
CAASPPYSGAGSYQLTF

SEQ ID NO: 101718 - protein, 17 aa, Homo sapiens
  CDR3 for beta chain variable domain of TCR clone 50859 (TRBV13, TRBJ2-3)
CASSLSRVAGGRNTQYF

SEQ ID NO: 101719 - protein, 10 aa, Homo sapiens
  CDR3 for alpha chain variable domain of TCR clone 50860 (TRAV21, TRAJ31)
CAVDNARLMF

SEQ ID NO: 101720 - protein, 13 aa, Homo sapiens
  CDR3 for beta chain variable domain of TCR clone 50860 (TRBV4-1, TRBJ1-1)
CASSRNMNTEAFF

SEQ ID NO: 101721 - protein, 15 aa, Homo sapiens
  CDR3 for alpha chain variable domain of TCR clone 50861 (TRAV21, TRAJ40)
CAVRPQTSGTYKYII

SEQ ID NO: 101722 - protein, 13 aa, Homo sapiens
  CDR3 for beta chain variable domain of TCR clone 50861 (TRBV7-2, TRBJ2-2)
CASSSVRAGELFF

SEQ ID NO: 101723 - protein, 14 aa, Homo sapiens
  CDR3 for alpha chain variable domain of TCR clone 50862 (TRAV3, TRAJ22)
CAVRDYGSARQLTF

SEQ ID NO: 101724 - protein, 13 aa, Homo sapiens
  CDR3 for beta chain variable domain of TCR clone 50862 (TRBV11-2, TRBJ2-5)
CASSHGAKETQYF

SEQ ID NO: 101725 - protein, 14 aa, Homo sapiens
  CDR3 for alpha chain variable domain of TCR clone 50863 (TRAV12-3, TRAJ10)
SHLPLTGGGNKLTF

SEQ ID NO: 101726 - protein, 12 aa, Homo sapiens
  CDR3 for beta chain variable domain of TCR clone 50863 (TRBV7-9, TRBJ2-7)
CASSIKREEQHF

SEQ ID NO: 101727 - protein, 15 aa, Homo sapiens
  CDR3 for alpha chain variable domain of TCR clone 50864 (TRAV13-1, TRAJ10)
CASTILTGGGNKLTF

SEQ ID NO: 101728 - protein, 15 aa, Homo sapiens
  CDR3 for beta chain variable domain of TCR clone 50864 (TRBV2, TRBJ2-7)
CASTLLGSGATEQYF

SEQ ID NO: 101729 - protein, 13 aa, Homo sapiens
  CDR3 for alpha chain variable domain of TCR clone 50865 (TRAV2, TRAJ29)
CAAGNSGNTPLAF

SEQ ID NO: 101730 - protein, 16 aa, Homo sapiens
  CDR3 for beta chain variable domain of TCR clone 50865 (TRBV7-9, TRBJ1-2)
CASSPGGGAINYGYTF

SEQ ID NO: 101731 - protein, 18 aa, Homo sapiens
  CDR3 for alpha chain variable domain of TCR clone 50866 (TRAV12-3, TRAJ52)
CAMSVGWAGGTSYGKLTF

SEQ ID NO: 101732 - protein, 14 aa, Homo sapiens
  CDR3 for beta chain variable domain of TCR clone 50866 (TRBV7-2, TRBJ2-7)
CASRSQGAAYEQYF

SEQ ID NO: 101733 - protein, 14 aa, Homo sapiens
  CDR3 for alpha chain variable domain of TCR clone 50867 (TRAV2, TRAJ9)
CAVDPNTGGFNTIF

SEQ ID NO: 101734 - protein, 14 aa, Homo sapiens
  CDR3 for beta chain variable domain of TCR clone 50867 (TRBV7-2, TRBJ2-7)
CASSPKTSFYEQYF

SEQ ID NO: 101735 - protein, 15 aa, Homo sapiens
  CDR3 for alpha chain variable domain of TCR clone 50868 (TRAV8-3, TRAJ11)
CAVGLLNSGYSTLTF

SEQ ID NO: 101736 - protein, 16 aa, Homo sapiens
  CDR3 for beta chain variable domain of TCR clone 50868 (TRBV6-1, TRBJ1-2)
CASSGAWQGRSHGYTF

SEQ ID NO: 101737 - protein, 14 aa, Homo sapiens
  CDR3 for alpha chain variable domain of TCR clone 50869 (TRAV23/DV6, TRAJ13)
CAVKKTGGYQKVTF

SEQ ID NO: 101738 - protein, 11 aa, Homo sapiens
  CDR3 for beta chain variable domain of TCR clone 50869 (TRBV11-2, TRBJ2-2)
CASSLPGELFF

SEQ ID NO: 101739 - protein, 15 aa, Homo sapiens
  CDR3 for alpha chain variable domain of TCR clone 50870 (TRAV3, TRAJ4)
CAVRDGTGGYNKLIF

SEQ ID NO: 101740 - protein, 16 aa, Homo sapiens
  CDR3 for beta chain variable domain of TCR clone 50870 (TRBV27, TRBJ2-2)
CAGSSSGVSNTGELFF

SEQ ID NO: 101741 - protein, 16 aa, Homo sapiens
  CDR3 for alpha chain variable domain of TCR clone 50871 (TRAV27, TRAJ53)
CAAPEGSGGSNYKLTF

SEQ ID NO: 101742 - protein, 15 aa, Homo sapiens
  CDR3 for beta chain variable domain of TCR clone 50871 (TRBV20-1, TRBJ1-1)
CSASRGVTGDTEAFF

SEQ ID NO: 101743 - protein, 16 aa, Homo sapiens
  CDR3 for alpha chain variable domain of TCR clone 50872 (TRAV30, TRAJ24)
CGTEIVDADSWGKFQF

SEQ ID NO: 101744 - protein, 15 aa, Homo sapiens
  CDR3 for beta chain variable domain of TCR clone 50872 (TRBV20-1, TRBJ2-7)
CSARDRVSGMDEQYF

SEQ ID NO: 101745 - protein, 17 aa, Homo sapiens
  CDR3 for alpha chain variable domain of TCR clone 50873 (TRAV26-1, TRAJ58)
CIVRVGAEETSGSRLTL

SEQ ID NO: 101746 - protein, 13 aa, Homo sapiens
  CDR3 for beta chain variable domain of TCR clone 50873 (TRBV12-5, TRBJ1-2)
CASGVRTGNGYTF

SEQ ID NO: 101747 - protein, 16 aa, Homo sapiens
  CDR3 for alpha chain variable domain of TCR clone 50874 (TRAV14/DV4, TRAJ15)
CAMREGPAQAGTALIL

SEQ ID NO: 101748 - protein, 12 aa, Homo sapiens
  CDR3 for beta chain variable domain of TCR clone 50874 (TRBV28, TRBJ2-6)
CAIQAGANVLTF

SEQ ID NO: 101749 - protein, 14 aa, Homo sapiens
  CDR3 for alpha chain variable domain of TCR clone 50875 (TRAV35, TRAJ50)
CAGRRKTSYDKVIF

SEQ ID NO: 101750 - protein, 13 aa, Homo sapiens
  CDR3 for beta chain variable domain of TCR clone 50875 (TRBV7-7, TRBJ2-3)
CASSLSRADTQYF

SEQ ID NO: 101751 - protein, 11 aa, Homo sapiens
  CDR3 for alpha chain variable domain of TCR clone 50876 (TRAV2, TRAJ33)
CAVDSNYQLIW

SEQ ID NO: 101752 - protein, 13 aa, Homo sapiens
  CDR3 for beta chain variable domain of TCR clone 50876 (TRBV20-1, TRBJ2-2)
CSALSGGAGELFF

SEQ ID NO: 101753 - protein, 11 aa, Homo sapiens
  CDR3 for alpha chain variable domain of TCR clone 50877 (TRAV2, TRAJ13)
CASGGYQKVTF

SEQ ID NO: 101754 - protein, 16 aa, Homo sapiens
  CDR3 for beta chain variable domain of TCR clone 50877 (TRBV2, TRBJ2-1)
CASSVGGSLSYNEQSF

SEQ ID NO: 101755 - protein, 16 aa, Homo sapiens
  CDR3 for alpha chain variable domain of TCR clone 50878 (TRAV23/DV6, TRAJ52)
CAARPSGGTGYGKLTF

SEQ ID NO: 101756 - protein, 14 aa, Homo sapiens
  CDR3 for beta chain variable domain of TCR clone 50878 (TRBV20-1, TRBJ2-3)
CSARDASSTDTQYF

SEQ ID NO: 101757 - protein, 14 aa, Homo sapiens
  CDR3 for alpha chain variable domain of TCR clone 50879 (TRAV12-3, TRAJ9)
CAMSPNTGGFTTIF

SEQ ID NO: 101758 - protein, 12 aa, Homo sapiens
  CDR3 for beta chain variable domain of TCR clone 50879 (TRBV19, TRBJ1-5)
CASSIAQQPQHF

SEQ ID NO: 101759 - protein, 14 aa, Homo sapiens
  CDR3 for alpha chain variable domain of TCR clone 50880 (TRAV26-1, TRAJ38)
CIADNAGNNRKLIW

SEQ ID NO: 101760 - protein, 12 aa, Homo sapiens
  CDR3 for beta chain variable domain of TCR clone 50880 (TRBV12-5, TRBJ2-5)
CASGQGVETQYF

SEQ ID NO: 101761 - protein, 14 aa, Homo sapiens
  CDR3 for alpha chain variable domain of TCR clone 50881 (TRAV26-1, TRAJ39)
CIVRGSRAGNMLTF

SEQ ID NO: 101762 - protein, 14 aa, Homo sapiens
  CDR3 for beta chain variable domain of TCR clone 50881 (TRBV27, TRBJ1-1)
CASSLLSGLSEAFF

SEQ ID NO: 101763 - protein, 17 aa, Homo sapiens
  CDR3 for alpha chain variable domain of TCR clone 50882 (TRAV3, TRAJ38)
CAVRDCLNAGNSRKLIW

SEQ ID NO: 101764 - protein, 14 aa, Homo sapiens
  CDR3 for beta chain variable domain of TCR clone 50882 (TRBV5-5, TRBJ1-5)
CASSGQGVDQPQHF

SEQ ID NO: 101765 - protein, 13 aa, Homo sapiens
  CDR3 for alpha chain variable domain of TCR clone 50883 (TRAV13-1, TRAJ21)
CAASIYSFNKFYF

SEQ ID NO: 101766 - protein, 15 aa, Homo sapiens
  CDR3 for beta chain variable domain of TCR clone 50883 (TRBV5-5, TRBJ1-5)
CASSLKGGGEQPQHF

SEQ ID NO: 101767 - protein, 18 aa, Homo sapiens
  CDR3 for alpha chain variable domain of TCR clone 50884 (TRAV21, TRAJ52)
CAVRPSPAGGTSYGKLAF

SEQ ID NO: 101768 - protein, 16 aa, Homo sapiens
  CDR3 for beta chain variable domain of TCR clone 50884 (TRBV7-3, TRBJ2-1)
CASSLEGYRSYNEQFF

SEQ ID NO: 101769 - protein, 17 aa, Homo sapiens
  CDR3 for alpha chain variable domain of TCR clone 50885 (TRAV3, TRAJ38)
CAVRDCLNAGNNRKLIG

SEQ ID NO: 101770 - protein, 13 aa, Homo sapiens
  CDR3 for beta chain variable domain of TCR clone 50885 (TRBV23-1, TRBJ1-4)
CASRGKFNEKLFF

SEQ ID NO: 101771 - protein, 13 aa, Homo sapiens
  CDR3 for alpha chain variable domain of TCR clone 50886 (TRAV8-4, TRAJ48)
CAVSLFGHEKLTF

SEQ ID NO: 101772 - protein, 15 aa, Homo sapiens
  CDR3 for beta chain variable domain of TCR clone 50886 (TRBV20-1, TRBJ2-7)
CSARKGLAESYEQYF

SEQ ID NO: 101773 - protein, 14 aa, Homo sapiens
  CDR3 for alpha chain variable domain of TCR clone 50887 (TRAV34, TRAJ44)
CGADGTGTASKLTF

SEQ ID NO: 101774 - protein, 16 aa, Homo sapiens
  CDR3 for beta chain variable domain of TCR clone 50887 (TRBV20-1, TRBJ1-4)
CSAPGQGLLTNEKLFF

SEQ ID NO: 101775 - protein, 13 aa, Homo sapiens
  CDR3 for alpha chain variable domain of TCR clone 50888 (TRAV12-1, TRAJ39)
CVARSGAGNMLTF

SEQ ID NO: 101776 - protein, 11 aa, Homo sapiens
  CDR3 for beta chain variable domain of TCR clone 50888 (TRBV19, TRBJ1-1)
CASSLNSEAFF

SEQ ID NO: 101777 - protein, 18 aa, Homo sapiens
  CDR3 for alpha chain variable domain of TCR clone 50889 (TRAV21, TRAJ52)
CAVRPSPAGGTGYGKLTF

SEQ ID NO: 101778 - protein, 17 aa, Homo sapiens
  CDR3 for beta chain variable domain of TCR clone 50889 (TRBV13, TRBJ2-3)
CASSLSRVAGGRNAQYF

SEQ ID NO: 101779 - protein, 11 aa, Homo sapiens
  CDR3 for alpha chain variable domain of TCR clone 50890 (TRAV2, TRAJ13)
CVSGGYQKVTF

SEQ ID NO: 101780 - protein, 14 aa, Homo sapiens
  CDR3 for beta chain variable domain of TCR clone 50890 (TRBV6-3, TRBJ1-1)
CASSNLLPGAEAFF

SEQ ID NO: 101781 - protein, 15 aa, Homo sapiens
  CDR3 for alpha chain variable domain of TCR clone 50891 (TRAV26-1, TRAJ29)
CIVRVEGSGNTPLVF

SEQ ID NO: 101782 - protein, 14 aa, Homo sapiens
  CDR3 for beta chain variable domain of TCR clone 50891 (TRBV18, TRBJ2-5)
CASSPGESQETQYF

SEQ ID NO: 101783 - protein, 11 aa, Homo sapiens
  CDR3 for alpha chain variable domain of TCR clone 50892 (TRAV2, TRAJ13)
CASGGYQKVTF

SEQ ID NO: 101784 - protein, 16 aa, Homo sapiens
  CDR3 for beta chain variable domain of TCR clone 50892 (TRBV5-1, TRBJ1-1)
CASSSGGNSLNTEAFF

SEQ ID NO: 101785 - protein, 17 aa, Homo sapiens
  CDR3 for alpha chain variable domain of TCR clone 50893 (TRAV3, TRAJ6)
CAVRDGPRAGGSYIPPF

SEQ ID NO: 101786 - protein, 13 aa, Homo sapiens
  CDR3 for beta chain variable domain of TCR clone 50893 (TRBV27, TRBJ2-1)
CASRTLGVGEQFF

SEQ ID NO: 101787 - protein, 12 aa, Homo sapiens
  CDR3 for alpha chain variable domain of TCR clone 50894 (TRAV16, TRAJ10)
CSRTGGGNKLTF

SEQ ID NO: 101788 - protein, 16 aa, Homo sapiens
  CDR3 for beta chain variable domain of TCR clone 50894 (TRBV13, TRBJ2-2)
CASSPRTGEHTGELFF

SEQ ID NO: 101789 - protein, 15 aa, Homo sapiens
  CDR3 for alpha chain variable domain of TCR clone 50895 (TRAV3, TRAJ20)
CAVRDIKWSDYKLSF

SEQ ID NO: 101790 - protein, 15 aa, Homo sapiens
  CDR3 for beta chain variable domain of TCR clone 50895 (TRBV7-9, TRBJ1-6)
CASSSPGRGNSPLHF

SEQ ID NO: 101791 - protein, 14 aa, Homo sapiens
  CDR3 for alpha chain variable domain of TCR clone 50896 (TRAV8-3, TRAJ4)
CAVGAAGGYNKLIF

SEQ ID NO: 101792 - protein, 15 aa, Homo sapiens
  CDR3 for beta chain variable domain of TCR clone 50896 (TRBV28, TRBJ2-5)
CASSPPWSYQETQYF

SEQ ID NO: 101793 - protein, 14 aa, Homo sapiens
  CDR3 for alpha chain variable domain of TCR clone 50897 (TRAV3, TRAJ21)
CAVESQANFNKFYF

SEQ ID NO: 101794 - protein, 16 aa, Homo sapiens
  CDR3 for beta chain variable domain of TCR clone 50897 (TRBV7-9, TRBJ1-2)
CASSLGFSSGEDGYTF

SEQ ID NO: 101795 - protein, 16 aa, Homo sapiens
  CDR3 for alpha chain variable domain of TCR clone 50898 (TRAV20, TRAJ22)
CAVQASSSGSARQLTF

SEQ ID NO: 101796 - protein, 13 aa, Homo sapiens
  CDR3 for beta chain variable domain of TCR clone 50898 (TRBV7-2, TRBJ2-5)
CASSQTSVETQFF

SEQ ID NO: 101797 - protein, 14 aa, Homo sapiens
  CDR3 for alpha chain variable domain of TCR clone 50899 (TRAV1-2, TRAJ8)
CAVREDTGFRKLVF

SEQ ID NO: 101798 - protein, 16 aa, Homo sapiens
  CDR3 for beta chain variable domain of TCR clone 50899 (TRBV7-6, TRBJ2-6)
CASILPGLSGANVLTF

SEQ ID NO: 101799 - protein, 11 aa, Homo sapiens
  CDR3 for alpha chain variable domain of TCR clone 50900 (TRAV1-1, TRAJ23)
CAVRQGGKLIF

SEQ ID NO: 101800 - protein, 20 aa, Homo sapiens
  CDR3 for beta chain variable domain of TCR clone 50900 (TRBV7-8, TRBJ2-2)
CASSHLFPGPTIHITGELCF

SEQ ID NO: 101801 - protein, 15 aa, Homo sapiens
  CDR3 for alpha chain variable domain of TCR clone 50901 (TRAV2, TRAJ28)
CAVPYSGAGSYQLTF

SEQ ID NO: 101802 - protein, 13 aa, Homo sapiens
  CDR3 for beta chain variable domain of TCR clone 50901 (TRBV29-1, TRBJ1-1)
CSVGDSRNTEAFF

SEQ ID NO: 101803 - protein, 19 aa, Homo sapiens
  CDR3 for alpha chain variable domain of TCR clone 50902 (TRAV29/DV5, TRAJ49)
CSVLLCSKITVDTGNQFYF

SEQ ID NO: 101804 - protein, 17 aa, Homo sapiens
  CDR3 for beta chain variable domain of TCR clone 50902 (TRBV13, TRBJ2-3)
CASSLSRVAGGRNTQYF

SEQ ID NO: 101805 - protein, 12 aa, Homo sapiens
  CDR3 for alpha chain variable domain of TCR clone 50903 (TRAV29/DV5, TRAJ49)
CAATDTGNQVYF

SEQ ID NO: 101806 - protein, 12 aa, Homo sapiens
  CDR3 for beta chain variable domain of TCR clone 50903 (TRBV12-4, TRBJ2-7)
CASSLGGYEQYF

SEQ ID NO: 101807 - protein, 13 aa, Homo sapiens
  CDR3 for alpha chain variable domain of TCR clone 50904 (TRAV23/DV6, TRAJ34)
CAAIENNTDKLIF

SEQ ID NO: 101808 - protein, 16 aa, Homo sapiens
  CDR3 for beta chain variable domain of TCR clone 50904 (TRBV13, TRBJ2-2)
CASSPRTGEHTGELFF

SEQ ID NO: 101809 - protein, 13 aa, Homo sapiens
  CDR3 for alpha chain variable domain of TCR clone 50905 (TRAV35, TRAJ42)
CAGSPGSQGNLIF

SEQ ID NO: 101810 - protein, 14 aa, Homo sapiens
  CDR3 for beta chain variable domain of TCR clone 50905 (TRBV19, TRBJ2-1)
CASPTFVLSGEQFF

SEQ ID NO: 101811 - protein, 13 aa, Homo sapiens
  CDR3 for alpha chain variable domain of TCR clone 50906 (TRAV12-2, TRAJ17)
CRAFQTAGNKLTF

SEQ ID NO: 101812 - protein, 11 aa, Homo sapiens
  CDR3 for beta chain variable domain of TCR clone 50906 (TRBV29-1, TRBJ2-5)
CSEDRTGTQYF

SEQ ID NO: 101813 - protein, 14 aa, Homo sapiens
  CDR3 for alpha chain variable domain of TCR clone 50907 (TRAV22, TRAJ6)
CAGVGPGGSYIPTF

SEQ ID NO: 101814 - protein, 14 aa, Homo sapiens
  CDR3 for beta chain variable domain of TCR clone 50907 (TRBV7-2, TRBJ2-7)
CASSPKTSFYEQYF

SEQ ID NO: 101815 - protein, 13 aa, Homo sapiens
  CDR3 for alpha chain variable domain of TCR clone 50908 (TRAV23/DV6, TRAJ16)
CAASISDGQKLLF

SEQ ID NO: 101816 - protein, 15 aa, Homo sapiens
  CDR3 for beta chain variable domain of TCR clone 50908 (TRBV2, TRBJ2-2)
CASSRETVGTGEMFF

SEQ ID NO: 101817 - protein, 15 aa, Homo sapiens
  CDR3 for alpha chain variable domain of TCR clone 50909 (TRAV25, TRAJ52)
CAGTSGGNSYGKLTF

SEQ ID NO: 101818 - protein, 16 aa, Homo sapiens
  CDR3 for beta chain variable domain of TCR clone 50909 (TRBV15, TRBJ1-2)
CATSRGPRTGGGGYTF

SEQ ID NO: 101819 - protein, 13 aa, Homo sapiens
  CDR3 for alpha chain variable domain of TCR clone 50910 (TRAV8-4, TRAJ27)
CAVSPRNACKSTF

SEQ ID NO: 101820 - protein, 17 aa, Homo sapiens
  CDR3 for beta chain variable domain of TCR clone 50910 (TRBV19, TRBJ2-3)
CASSIDPAGGGTDTQYF

SEQ ID NO: 101821 - protein, 13 aa, Homo sapiens
  CDR3 for alpha chain variable domain of TCR clone 50911 (TRAV16, TRAJ27)
CALRRTNAGKSTF

SEQ ID NO: 101822 - protein, 11 aa, Homo sapiens
  CDR3 for beta chain variable domain of TCR clone 50911 (TRBV7-2, TRBJ2-3)
CASSSSDTQYF

SEQ ID NO: 101823 - protein, 14 aa, Homo sapiens
  CDR3 for alpha chain variable domain of TCR clone 50912 (TRAV17, TRAJ12)
CATDEKDSSYKLIF

SEQ ID NO: 101824 - protein, 16 aa, Homo sapiens
  CDR3 for beta chain variable domain of TCR clone 50912 (TRBV11-2, TRBJ2-1)
CASSPRLAGVYNVQFF

SEQ ID NO: 101825 - protein, 16 aa, Homo sapiens
  CDR3 for alpha chain variable domain of TCR clone 50913 (TRAV12-1, TRAJ43)
CVVNPHRFGAGTRLTV

SEQ ID NO: 101826 - protein, 13 aa, Homo sapiens
  CDR3 for beta chain variable domain of TCR clone 50913 (TRBV12-4, TRBJ1-2)
CASSSGPNYGHTF

SEQ ID NO: 101827 - protein, 12 aa, Homo sapiens
  CDR3 for alpha chain variable domain of TCR clone 50914 (TRAV30, TRAJ20)
CGTESNDYKLSL

SEQ ID NO: 101828 - protein, 15 aa, Homo sapiens
  CDR3 for beta chain variable domain of TCR clone 50914 (TRBV20-1, TRBJ2-7)
CSARDRVSGMDEQYF

SEQ ID NO: 101829 - protein, 15 aa, Homo sapiens
  CDR3 for alpha chain variable domain of TCR clone 50915 (TRAV3, TRAJ22)
CAVRDRGGSARQLTF

SEQ ID NO: 101830 - protein, 18 aa, Homo sapiens
  CDR3 for beta chain variable domain of TCR clone 50915 (TRBV7-2, TRBJ2-3)
CASSLKREGSGITDTQYF

SEQ ID NO: 101831 - protein, 13 aa, Homo sapiens
  CDR3 for alpha chain variable domain of TCR clone 50916 (TRAV26-1, TRAJ33)
CIVRAEGNYQLIW

SEQ ID NO: 101832 - protein, 16 aa, Homo sapiens
  CDR3 for beta chain variable domain of TCR clone 50916 (TRBV15, TRBJ2-7)
CATSRDRGRRRGEQYF

SEQ ID NO: 101833 - protein, 14 aa, Homo sapiens
  CDR3 for alpha chain variable domain of TCR clone 50917 (TRAV17, TRAJ57)
CATDPQGGSEKLVF

SEQ ID NO: 101834 - protein, 14 aa, Homo sapiens
  CDR3 for beta chain variable domain of TCR clone 50917 (TRBV13, TRBJ2-5)
CASSLERVGETQYF

SEQ ID NO: 101835 - protein, 16 aa, Homo sapiens
  CDR3 for alpha chain variable domain of TCR clone 50918 (TRAV23/DV6, TRAJ9)
CAASIGGNTGGFKTIL

SEQ ID NO: 101836 - protein, 12 aa, Homo sapiens
  CDR3 for beta chain variable domain of TCR clone 50918 (TRBV6-3, TRBJ2-7)
CASSEPGFEQYF

SEQ ID NO: 101837 - protein, 13 aa, Homo sapiens
  CDR3 for alpha chain variable domain of TCR clone 50919 (TRAV8-3, TRAJ28)
CAVGAVGSCQLTF

SEQ ID NO: 101838 - protein, 16 aa, Homo sapiens
  CDR3 for beta chain variable domain of TCR clone 50919 (TRBV19, TRBJ2-1)
CASSKAGPSSYNEQFF

SEQ ID NO: 101839 - protein, 18 aa, Homo sapiens
  CDR3 for alpha chain variable domain of TCR clone 50920 (TRAV13-1, TRAJ52)
CAASKMSAGGTSYGKLTF

SEQ ID NO: 101840 - protein, 13 aa, Homo sapiens
  CDR3 for beta chain variable domain of TCR clone 50920 (TRBV12-4, TRBJ1-2)
CASSLRQGKGYTF

SEQ ID NO: 101841 - protein, 13 aa, Homo sapiens
  CDR3 for alpha chain variable domain of TCR clone 50921 (TRAV2, TRAJ12)
CAVGADSSYKLIF

SEQ ID NO: 101842 - protein, 13 aa, Homo sapiens
  CDR3 for beta chain variable domain of TCR clone 50921 (TRBV20-1, TRBJ2-1)
CSARSSPGMSSSS

SEQ ID NO: 101843 - protein, 14 aa, Homo sapiens
  CDR3 for alpha chain variable domain of TCR clone 50922 (TRAV26-1, TRAJ39)
CIVRGSRAGNMLTF

SEQ ID NO: 101844 - protein, 15 aa, Homo sapiens
  CDR3 for beta chain variable domain of TCR clone 50922 (TRBV11-3, TRBJ2-3)
CASLKDGREGDTQYF

SEQ ID NO: 101845 - protein, 18 aa, Homo sapiens
  CDR3 for alpha chain variable domain of TCR clone 50923 (TRAV26-1, TRAJ22)
CIVRVALISSGSARHLTF

SEQ ID NO: 101846 - protein, 13 aa, Homo sapiens
  CDR3 for beta chain variable domain of TCR clone 50923 (TRBV13, TRBJ2-5)
CASSPEVGETQYF

SEQ ID NO: 101847 - protein, 11 aa, Homo sapiens
  CDR3 for alpha chain variable domain of TCR clone 50924 (TRAV35, TRAJ30)
CAGPGDDKIIF

SEQ ID NO: 101848 - protein, 14 aa, Homo sapiens
  CDR3 for beta chain variable domain of TCR clone 50924 (TRBV7-6, TRBJ1-6)
CASSQAVGGSPLHF

SEQ ID NO: 101849 - protein, 12 aa, Homo sapiens
  CDR3 for alpha chain variable domain of TCR clone 50925 (TRAV26-2, TRAJ21)
CIPKGNFNKFYF

SEQ ID NO: 101850 - protein, 14 aa, Homo sapiens
  CDR3 for beta chain variable domain of TCR clone 50925 (TRBV7-9, TRBJ1-1)
CASTPLQSYTEAFF

SEQ ID NO: 101851 - protein, 16 aa, Homo sapiens
  CDR3 for alpha chain variable domain of TCR clone 50926 (TRAV30, TRAJ24)
CGTEIVDADSWGKFQC

SEQ ID NO: 101852 - protein, 12 aa, Homo sapiens
  CDR3 for beta chain variable domain of TCR clone 50926 (TRBV11-2, TRBJ2-2)
CASSLPTGELFF

SEQ ID NO: 101853 - protein, 11 aa, Homo sapiens
  CDR3 for alpha chain variable domain of TCR clone 50927 (TRAV12-1, TRAJ3)
CVVSSASKIIF

SEQ ID NO: 101854 - protein, 15 aa, Homo sapiens
  CDR3 for beta chain variable domain of TCR clone 50927 (TRBV20-1, TRBJ2-5)
CSASGISGGGETQYF

SEQ ID NO: 101855 - protein, 11 aa, Homo sapiens
  CDR3 for alpha chain variable domain of TCR clone 50928 (TRAV1-2, TRAJ20)
CAVANDYKLSF

SEQ ID NO: 101856 - protein, 15 aa, Homo sapiens
  CDR3 for beta chain variable domain of TCR clone 50928 (TRBV28, TRBJ1-4)
CASSLGTGTKEKLFF

SEQ ID NO: 101857 - protein, 14 aa, Homo sapiens
  CDR3 for alpha chain variable domain of TCR clone 50929 (TRAV12-2, TRAJ53)
CAVKGGGSNYKLTF

SEQ ID NO: 101858 - protein, 14 aa, Homo sapiens
  CDR3 for beta chain variable domain of TCR clone 50929 (TRBV7-7, TRBJ2-2)
CATRQDPDTGELFF

SEQ ID NO: 101859 - protein, 12 aa, Homo sapiens
  CDR3 for alpha chain variable domain of TCR clone 50930 (TRAV29/DV5, TRAJ34)
CAARHNTDKLIF

SEQ ID NO: 101860 - protein, 12 aa, Homo sapiens
  CDR3 for beta chain variable domain of TCR clone 50930 (TRBV7-6, TRBJ2-3)
CASSTGTDTQYF

SEQ ID NO: 101861 - protein, 14 aa, Homo sapiens
  CDR3 for alpha chain variable domain of TCR clone 50931 (TRAV3, TRAJ28)
CAVRRGAGSYQLTF

SEQ ID NO: 101862 - protein, 16 aa, Homo sapiens
  CDR3 for beta chain variable domain of TCR clone 50931 (TRBV4-1, TRBJ2-7)
CASSQEWTSGPLKQYF

SEQ ID NO: 101863 - protein, 15 aa, Homo sapiens
  CDR3 for alpha chain variable domain of TCR clone 50932 (TRAV12-3, TRAJ6)
CAMSATTGGSYIPTF

SEQ ID NO: 101864 - protein, 13 aa, Homo sapiens
  CDR3 for beta chain variable domain of TCR clone 50932 (TRBV7-9, TRBJ1-2)
CASSVKQNYGYTF

SEQ ID NO: 101865 - protein, 13 aa, Homo sapiens
  CDR3 for alpha chain variable domain of TCR clone 50933 (TRAV12-1, TRAJ40)
CVVPTSGTYKYIF

SEQ ID NO: 101866 - protein, 16 aa, Homo sapiens
  CDR3 for beta chain variable domain of TCR clone 50933 (TRBV7-9, TRBJ1-2)
CASSLGFSAGEDGYTF

SEQ ID NO: 101867 - protein, 13 aa, Homo sapiens
  CDR3 for alpha chain variable domain of TCR clone 50934 (TRAV16, TRAJ34)
CALTGYNTDKLIF

SEQ ID NO: 101868 - protein, 13 aa, Homo sapiens
  CDR3 for beta chain variable domain of TCR clone 50934 (TRBV6-1, TRBJ2-1)
CASREDGGHKQFF

SEQ ID NO: 101869 - protein, 17 aa, Homo sapiens
  CDR3 for alpha chain variable domain of TCR clone 50935 (TRAV12-2, TRAJ52)
RAVNPYAGGTSYGKLTF

SEQ ID NO: 101870 - protein, 16 aa, Homo sapiens
  CDR3 for beta chain variable domain of TCR clone 50935 (TRBV5-5, TRBJ2-2)
CASSGRREGATGELFL

SEQ ID NO: 101871 - protein, 14 aa, Homo sapiens
  CDR3 for alpha chain variable domain of TCR clone 50936 (TRAV9-2, TRAJ39)
CALYIYNAGNMLTF

SEQ ID NO: 101872 - protein, 16 aa, Homo sapiens
  CDR3 for beta chain variable domain of TCR clone 50936 (TRBV28, TRBJ2-1)
CASSSSYSGSLNEQFF

SEQ ID NO: 101873 - protein, 17 aa, Homo sapiens
  CDR3 for alpha chain variable domain of TCR clone 50937 (TRAV3, TRAJ6)
CAVRDGPRAGGSYIPTF

SEQ ID NO: 101874 - protein, 14 aa, Homo sapiens
  CDR3 for beta chain variable domain of TCR clone 50937 (TRBV20-1, TRBJ2-2)
CSAPDTAKTGELFF

SEQ ID NO: 101875 - protein, 13 aa, Homo sapiens
  CDR3 for alpha chain variable domain of TCR clone 50938 (TRAV13-1, TRAJ40)
CAARTSGTYKYIF

SEQ ID NO: 101876 - protein, 17 aa, Homo sapiens
  CDR3 for beta chain variable domain of TCR clone 50938 (TRBV4-1, TRBJ2-3)
CASSQGYVSGSTDTQYF

SEQ ID NO: 101877 - protein, 16 aa, Homo sapiens
  CDR3 for alpha chain variable domain of TCR clone 50939 (TRAV12-2, TRAJ50)
CAVGTATKTPYDKVIF

SEQ ID NO: 101878 - protein, 12 aa, Homo sapiens
  CDR3 for beta chain variable domain of TCR clone 50939 (TRBV12-4, TRBJ1-5)
CASSLGRQPQHF

SEQ ID NO: 101879 - protein, 16 aa, Homo sapiens
  CDR3 for alpha chain variable domain of TCR clone 50940 (TRAV26-1, TRAJ53)
CIVRVAMGGSNYKLTF

SEQ ID NO: 101880 - protein, 12 aa, Homo sapiens
  CDR3 for beta chain variable domain of TCR clone 50940 (TRBV11-2, TRBJ2-2)
CASSLGGGELFF

SEQ ID NO: 101881 - protein, 18 aa, Homo sapiens
  CDR3 for alpha chain variable domain of TCR clone 50941 (TRAV13-1, TRAJ52)
CAAKNPNAGGTSYGKLTF

SEQ ID NO: 101882 - protein, 13 aa, Homo sapiens
  CDR3 for beta chain variable domain of TCR clone 50941 (TRBV27, TRBJ2-1)
CASRTLGVGEQFF

SEQ ID NO: 101883 - protein, 12 aa, Homo sapiens
  CDR3 for alpha chain variable domain of TCR clone 50942 (TRAV12-3, TRAJ17)
CAMTLTGNKLTF

SEQ ID NO: 101884 - protein, 20 aa, Homo sapiens
  CDR3 for beta chain variable domain of TCR clone 50942 (TRBV7-8, TRBJ2-2)
CASSHSFPGPTIHITGELFF

SEQ ID NO: 101885 - protein, 14 aa, Homo sapiens
  CDR3 for alpha chain variable domain of TCR clone 50943 (TRAV17, TRAJ31)
CATVLRNNNARLMF

SEQ ID NO: 101886 - protein, 14 aa, Homo sapiens
  CDR3 for beta chain variable domain of TCR clone 50943 (TRBV12-4, TRBJ2-5)
CASSLWQKQEAQYF

SEQ ID NO: 101887 - protein, 13 aa, Homo sapiens
  CDR3 for alpha chain variable domain of TCR clone 50944 (TRAV8-3, TRAJ43)
CAVVPYDNNDMRF

SEQ ID NO: 101888 - protein, 17 aa, Homo sapiens
  CDR3 for beta chain variable domain of TCR clone 50944 (TRBV7-7, TRBJ1-1)
CASIGDRPNLGVTEAFF

SEQ ID NO: 101889 - protein, 14 aa, Homo sapiens
  CDR3 for alpha chain variable domain of TCR clone 50945 (TRAV3, TRAJ7)
CAVREEAREQQTRF

SEQ ID NO: 101890 - protein, 12 aa, Homo sapiens
  CDR3 for beta chain variable domain of TCR clone 50945 (TRBV7-8, TRBJ2-7)
CASSLGDREQYF

SEQ ID NO: 101891 - protein, 14 aa, Homo sapiens
  CDR3 for alpha chain variable domain of TCR clone 50946 (TRAV12-3, TRAJ10)
SHLPLTGGGNKLTF

SEQ ID NO: 101892 - protein, 13 aa, Homo sapiens
  CDR3 for beta chain variable domain of TCR clone 50946 (TRBV7-7, TRBJ2-5)
CASSRSGKETQYF

SEQ ID NO: 101893 - protein, 12 aa, Homo sapiens
  CDR3 for alpha chain variable domain of TCR clone 50947 (TRAV17, TRAJ34)
CATDAKGDKLIF

SEQ ID NO: 101894 - protein, 20 aa, Homo sapiens
  CDR3 for beta chain variable domain of TCR clone 50947 (TRBV7-8, TRBJ2-2)
CASSHLFPGPTIHITGELFF

SEQ ID NO: 101895 - protein, 13 aa, Homo sapiens
  CDR3 for alpha chain variable domain of TCR clone 50948 (TRAV12-1, TRAJ6)
CVVFPGGSYIPTF

SEQ ID NO: 101896 - protein, 14 aa, Homo sapiens
  CDR3 for beta chain variable domain of TCR clone 50948 (TRBV20-1, TRBJ1-3)
CSASPTGAGNTIYL

SEQ ID NO: 101897 - protein, 13 aa, Homo sapiens
  CDR3 for alpha chain variable domain of TCR clone 50949 (TRAV27, TRAJ6)
CAGGTRGSYIPTF

SEQ ID NO: 101898 - protein, 12 aa, Homo sapiens
  CDR3 for beta chain variable domain of TCR clone 50949 (TRBV19, TRBJ2-1)
CASSMQDTEQFF

SEQ ID NO: 101899 - protein, 11 aa, Homo sapiens
  CDR3 for alpha chain variable domain of TCR clone 50950 (TRAV2, TRAJ23)
CALETRGKLIF

SEQ ID NO: 101900 - protein, 14 aa, Homo sapiens
  CDR3 for beta chain variable domain of TCR clone 50950 (TRBV2, TRBJ2-3)
CASSEGQNTDTQYF

SEQ ID NO: 101901 - protein, 15 aa, Homo sapiens
  CDR3 for alpha chain variable domain of TCR clone 50951 (TRAV12-1, TRAJ44)
CVVFVNTGTASKLTF

SEQ ID NO: 101902 - protein, 12 aa, Homo sapiens
  CDR3 for beta chain variable domain of TCR clone 50951 (TRBV6-3, TRBJ2-7)
CASSLTPYEQYF

SEQ ID NO: 101903 - protein, 14 aa, Homo sapiens
  CDR3 for alpha chain variable domain of TCR clone 50952 (TRAV12-2, TRAJ13)
CAVKKTGGYQKVTF

SEQ ID NO: 101904 - protein, 13 aa, Homo sapiens
  CDR3 for beta chain variable domain of TCR clone 50952 (TRBV10-2, TRBJ2-7)
CASGASGGYEQYF

SEQ ID NO: 101905 - protein, 15 aa, Homo sapiens
  CDR3 for alpha chain variable domain of TCR clone 50953 (TRAV38-1, TRAJ37)
CAFIFGSGNTGKLIF

SEQ ID NO: 101906 - protein, 13 aa, Homo sapiens
  CDR3 for beta chain variable domain of TCR clone 50953 (TRBV12-5, TRBJ2-3)
CASGDRQSDTQYF

SEQ ID NO: 101907 - protein, 15 aa, Homo sapiens
  CDR3 for alpha chain variable domain of TCR clone 50954 (TRAV12-2, TRAJ53)
CAVNGGGGSNYKLTF

SEQ ID NO: 101908 - protein, 15 aa, Homo sapiens
  CDR3 for beta chain variable domain of TCR clone 50954 (TRBV4-1, TRBJ1-4)
CASSDTGGTNEKLFF

SEQ ID NO: 101909 - protein, 11 aa, Homo sapiens
  CDR3 for alpha chain variable domain of TCR clone 50955 (TRAV17, TRAJ9)
CGVTGGFKTIF

SEQ ID NO: 101910 - protein, 14 aa, Homo sapiens
  CDR3 for beta chain variable domain of TCR clone 50955 (TRBV7-9, TRBJ2-2)
CASSLVQDTGELFF

SEQ ID NO: 101911 - protein, 16 aa, Homo sapiens
  CDR3 for alpha chain variable domain of TCR clone 50956 (TRAV20, TRAJ38)
CAVQASNAGNNRKLIW

SEQ ID NO: 101912 - protein, 16 aa, Homo sapiens
  CDR3 for beta chain variable domain of TCR clone 50956 (TRBV7-8, TRBJ2-6)
CASRVGDSSGASVLTF

SEQ ID NO: 101913 - protein, 15 aa, Homo sapiens
  CDR3 for alpha chain variable domain of TCR clone 50957 (TRAV26-1, TRAJ29)
CIVRVEGSGNNPLVF

SEQ ID NO: 101914 - protein, 14 aa, Homo sapiens
  CDR3 for beta chain variable domain of TCR clone 50957 (TRBV18, TRBJ2-5)
CASSPGVSQETQYF

SEQ ID NO: 101915 - protein, 13 aa, Homo sapiens
  CDR3 for alpha chain variable domain of TCR clone 50958 (TRAV13-1, TRAJ11)
CAAVLVGYSTLTF

SEQ ID NO: 101916 - protein, 17 aa, Homo sapiens
  CDR3 for beta chain variable domain of TCR clone 50958 (TRBV25-1, TRBJ2-7)
CASSDARVVFSSYEQYF

SEQ ID NO: 101917 - protein, 12 aa, Homo sapiens
  CDR3 for alpha chain variable domain of TCR clone 50959 (TRAV22, TRAJ29)
CAPPSGNTPLVF

SEQ ID NO: 101918 - protein, 14 aa, Homo sapiens
  CDR3 for beta chain variable domain of TCR clone 50959 (TRBV11-2, TRBJ2-7)
CASSLGAGAYEQCF

SEQ ID NO: 101919 - protein, 15 aa, Homo sapiens
  CDR3 for alpha chain variable domain of TCR clone 50960 (TRAV35, TRAJ58)
CAGRRQETSGSRLTF

SEQ ID NO: 101920 - protein, 14 aa, Homo sapiens
  CDR3 for beta chain variable domain of TCR clone 50960 (TRBV7-6, TRBJ2-3)
CASSLGTVTDTQYF

SEQ ID NO: 101921 - protein, 14 aa, Homo sapiens
  CDR3 for alpha chain variable domain of TCR clone 50961 (TRAV17, TRAJ15)
CATGPNQAGTALIF

SEQ ID NO: 101922 - protein, 15 aa, Homo sapiens
  CDR3 for beta chain variable domain of TCR clone 50961 (TRBV11-2, TRBJ2-2)
CACSSDRVNAGELFF

SEQ ID NO: 101923 - protein, 12 aa, Homo sapiens
  CDR3 for alpha chain variable domain of TCR clone 50962 (TRAV1-2, TRAJ26)
CAVSPYGQNFVF

SEQ ID NO: 101924 - protein, 14 aa, Homo sapiens
  CDR3 for beta chain variable domain of TCR clone 50962 (TRBV5-1, TRBJ2-7)
CASSFAAGVNEQYF

SEQ ID NO: 101925 - protein, 15 aa, Homo sapiens
  CDR3 for alpha chain variable domain of TCR clone 50963 (TRAV17, TRAJ16)
CATALRFSDGQKLLF

SEQ ID NO: 101926 - protein, 15 aa, Homo sapiens
  CDR3 for beta chain variable domain of TCR clone 50963 (TRBV13, TRBJ1-5)
CASSFGQGGVQTQHF

SEQ ID NO: 101927 - protein, 13 aa, Homo sapiens
  CDR3 for alpha chain variable domain of TCR clone 50964 (TRAV22, TRAJ29)
CAVGGSGNTPLVF

SEQ ID NO: 101928 - protein, 13 aa, Homo sapiens
  CDR3 for beta chain variable domain of TCR clone 50964 (TRBV4-2, TRBJ1-1)
CASSQAGNAEAFF

SEQ ID NO: 101929 - protein, 13 aa, Homo sapiens
  CDR3 for alpha chain variable domain of TCR clone 50965 (TRAV21, TRAJ27)
CAARPGNAGKSTF

SEQ ID NO: 101930 - protein, 13 aa, Homo sapiens
  CDR3 for beta chain variable domain of TCR clone 50965 (TRBV7-2, TRBJ2-2)
CASSLAVTGELFF

SEQ ID NO: 101931 - protein, 12 aa, Homo sapiens
  CDR3 for alpha chain variable domain of TCR clone 50966 (TRAV8-3, TRAJ40)
CAVTSGTYKYIL

SEQ ID NO: 101932 - protein, 14 aa, Homo sapiens
  CDR3 for beta chain variable domain of TCR clone 50966 (TRBV12-4, TRBJ2-3)
CASSGQGSTDTQYF

SEQ ID NO: 101933 - protein, 14 aa, Homo sapiens
  CDR3 for alpha chain variable domain of TCR clone 50967 (TRAV13-1, TRAJ26)
CAASSAHDGQNFVF

SEQ ID NO: 101934 - protein, 17 aa, Homo sapiens
  CDR3 for beta chain variable domain of TCR clone 50967 (TRBV25-1, TRBJ2-5)
CASSRRGGRGGQETQYF

SEQ ID NO: 101935 - protein, 15 aa, Homo sapiens
  CDR3 for alpha chain variable domain of TCR clone 50968 (TRAV3, TRAJ4)
CAVRDGTGGYNKLIF

SEQ ID NO: 101936 - protein, 12 aa, Homo sapiens
  CDR3 for beta chain variable domain of TCR clone 50968 (TRBV7-3, TRBJ2-5)
CASSSPGGTQYF

SEQ ID NO: 101937 - protein, 13 aa, Homo sapiens
  CDR3 for alpha chain variable domain of TCR clone 50969 (TRAV2, TRAJ16)
CAVEFGDGQKLPF

SEQ ID NO: 101938 - protein, 14 aa, Homo sapiens
  CDR3 for beta chain variable domain of TCR clone 50969 (TRBV6-3, TRBJ2-5)
CASSYSLREKTQYF

SEQ ID NO: 101939 - protein, 10 aa, Homo sapiens
  CDR3 for alpha chain variable domain of TCR clone 50970 (TRAV38-2/DV8, TRAJ40)
CASGTYKYIF

SEQ ID NO: 101940 - protein, 14 aa, Homo sapiens
  CDR3 for beta chain variable domain of TCR clone 50970 (TRBV11-2, TRBJ1-5)
CASSSRTGNQPQHF

SEQ ID NO: 101941 - protein, 14 aa, Homo sapiens
  CDR3 for alpha chain variable domain of TCR clone 50971 (TRAV3, TRAJ9)
CAVRLSTGGFKTIF

SEQ ID NO: 101942 - protein, 15 aa, Homo sapiens
  CDR3 for beta chain variable domain of TCR clone 50971 (TRBV7-2, TRBJ2-1)
CASSLASGRVNEQFF

SEQ ID NO: 101943 - protein, 15 aa, Homo sapiens
  CDR3 for alpha chain variable domain of TCR clone 50972 (TRAV8-3, TRAJ11)
CAVGLLNSGYSTLTF

SEQ ID NO: 101944 - protein, 17 aa, Homo sapiens
  CDR3 for beta chain variable domain of TCR clone 50972 (TRBV11-2, TRBJ2-1)
CASSLYPPGVEYNEQFF

SEQ ID NO: 101945 - protein, 15 aa, Homo sapiens
  CDR3 for alpha chain variable domain of TCR clone 50973 (TRAV3, TRAJ24)
CAGGMTTDSWGKFQF

SEQ ID NO: 101946 - protein, 17 aa, Homo sapiens
  CDR3 for beta chain variable domain of TCR clone 50973 (TRBV12-4, TRBJ2-3)
CASSPLPAGERTDTQYF

SEQ ID NO: 101947 - protein, 13 aa, Homo sapiens
  CDR3 for alpha chain variable domain of TCR clone 50974 (TRAV27, TRAJ6)
CAGGTRGSYIPTF

SEQ ID NO: 101948 - protein, 15 aa, Homo sapiens
  CDR3 for beta chain variable domain of TCR clone 50974 (TRBV12-4, TRBJ2-5)
CASSPPTGLQETQYF

SEQ ID NO: 101949 - protein, 17 aa, Homo sapiens
  CDR3 for alpha chain variable domain of TCR clone 50975 (TRAV13-1, TRAJ52)
CAAGRNAGGTSYGKLTF

SEQ ID NO: 101950 - protein, 12 aa, Homo sapiens
  CDR3 for beta chain variable domain of TCR clone 50975 (TRBV7-2, TRBJ1-1)
CQQSKGAKVAFF

SEQ ID NO: 101951 - protein, 17 aa, Homo sapiens
  CDR3 for alpha chain variable domain of TCR clone 50976 (TRAV17, TRAJ28)
CATDPRRGGAGSYQLTF

SEQ ID NO: 101952 - protein, 16 aa, Homo sapiens
  CDR3 for beta chain variable domain of TCR clone 50976 (TRBV25-1, TRBJ1-1)
CASSGDRDRGCIEAFF

SEQ ID NO: 101953 - protein, 16 aa, Homo sapiens
  CDR3 for alpha chain variable domain of TCR clone 50977 (TRAV30, TRAJ24)
CGTEIVDADSWGKFQF

SEQ ID NO: 101954 - protein, 15 aa, Homo sapiens
  CDR3 for beta chain variable domain of TCR clone 50977 (TRBV20-1, TRBJ2-6)
CSARDRGPGANDLTF

SEQ ID NO: 101955 - protein, 14 aa, Homo sapiens
  CDR3 for alpha chain variable domain of TCR clone 50978 (TRAV12-3, TRAJ9)
CEMSPNTGGFKTIF

SEQ ID NO: 101956 - protein, 12 aa, Homo sapiens
  CDR3 for beta chain variable domain of TCR clone 50978 (TRBV19, TRBJ1-5)
CASSIAQQPQHF

SEQ ID NO: 101957 - protein, 14 aa, Homo sapiens
  CDR3 for alpha chain variable domain of TCR clone 50979 (TRAV17, TRAJ57)
CATDPQGGSDKLVF

SEQ ID NO: 101958 - protein, 15 aa, Homo sapiens
  CDR3 for beta chain variable domain of TCR clone 50979 (TRBV5-1, TRBJ2-7)
CASSLDLTSSYEQYF

SEQ ID NO: 101959 - protein, 18 aa, Homo sapiens
  CDR3 for alpha chain variable domain of TCR clone 50980 (TRAV13-1, TRAJ52)
CAASKRNAGGTSYGKLTF

SEQ ID NO: 101960 - protein, 13 aa, Homo sapiens
  CDR3 for beta chain variable domain of TCR clone 50980 (TRBV12-4, TRBJ1-2)
CASSLRQGKGYTF

SEQ ID NO: 101961 - protein, 13 aa, Homo sapiens
  CDR3 for alpha chain variable domain of TCR clone 50981 (TRAV12-2, TRAJ20)
CAVYPPNDYKLSF

SEQ ID NO: 101962 - protein, 15 aa, Homo sapiens
  CDR3 for beta chain variable domain of TCR clone 50981 (TRBV6-1, TRBJ2-5)
CASSEGWGIQETQCF

SEQ ID NO: 101963 - protein, 12 aa, Homo sapiens
  CDR3 for alpha chain variable domain of TCR clone 50982 (TRAV26-2, TRAJ47)
CTLVEYGNKLVF

SEQ ID NO: 101964 - protein, 16 aa, Homo sapiens
  CDR3 for beta chain variable domain of TCR clone 50982 (TRBV18, TRBJ1-4)
CASSPLVGDRAEKLFF

SEQ ID NO: 101965 - protein, 14 aa, Homo sapiens
  CDR3 for alpha chain variable domain of TCR clone 50983 (TRAV12-2, TRAJ13)
CAVKKTGGYQKVTF

SEQ ID NO: 101966 - protein, 16 aa, Homo sapiens
  CDR3 for beta chain variable domain of TCR clone 50983 (TRBV2, TRBJ2-1)
CASRSPAGEKYNEQFF

SEQ ID NO: 101967 - protein, 17 aa, Homo sapiens
  CDR3 for alpha chain variable domain of TCR clone 50984 (TRAV3, TRAJ42)
CAVRDRGYGGSQGNLIF

SEQ ID NO: 101968 - protein, 14 aa, Homo sapiens
  CDR3 for beta chain variable domain of TCR clone 50984 (TRBV25-1, TRBJ1-1)
CASTHLGGNTEAFF

SEQ ID NO: 101969 - protein, 16 aa, Homo sapiens
  CDR3 for alpha chain variable domain of TCR clone 50985 (TRAV8-3, TRAJ13)
CVVGAYPSGGYQKVTF

SEQ ID NO: 101970 - protein, 15 aa, Homo sapiens
  CDR3 for beta chain variable domain of TCR clone 50985 (TRBV19, TRBJ1-5)
CASSIVWADNQPQHF

SEQ ID NO: 101971 - protein, 13 aa, Homo sapiens
  CDR3 for alpha chain variable domain of TCR clone 50986 (TRAV22, TRAJ29)
CAVGGSGNTPLVF

SEQ ID NO: 101972 - protein, 13 aa, Homo sapiens
  CDR3 for beta chain variable domain of TCR clone 50986 (TRBV4-2, TRBJ1-1)
CASSQVGNTEAFF

SEQ ID NO: 101973 - protein, 12 aa, Homo sapiens
  CDR3 for alpha chain variable domain of TCR clone 50987 (TRAV35, TRAJ31)
CAAASNNARPMF

SEQ ID NO: 101974 - protein, 14 aa, Homo sapiens
  CDR3 for beta chain variable domain of TCR clone 50987 (TRBV2, TRBJ2-2)
CASSLFGGNGELFF

SEQ ID NO: 101975 - protein, 17 aa, Homo sapiens
  CDR3 for alpha chain variable domain of TCR clone 50988 (TRAV26-1, TRAJ37)
CIVRGITVSSNTGKLIF

SEQ ID NO: 101976 - protein, 11 aa, Homo sapiens
  CDR3 for beta chain variable domain of TCR clone 50988 (TRBV29-1, TRBJ2-5)
CSEDRTGTQYF

SEQ ID NO: 101977 - protein, 10 aa, Homo sapiens
  CDR3 for alpha chain variable domain of TCR clone 50989 (TRAV1-2, TRAJ20)
CACNDYKPSF

SEQ ID NO: 101978 - protein, 16 aa, Homo sapiens
  CDR3 for beta chain variable domain of TCR clone 50989 (TRBV20-1, TRBJ2-1)
CSARDLKQGMNNEQFF

SEQ ID NO: 101979 - protein, 14 aa, Homo sapiens
  CDR3 for alpha chain variable domain of TCR clone 50990 (TRAV4, TRAJ26)
CLVGGDNYGQNFVF

SEQ ID NO: 101980 - protein, 16 aa, Homo sapiens
  CDR3 for beta chain variable domain of TCR clone 50990 (TRBV19, TRBJ2-2)
CASRSPGTGATGELFF

SEQ ID NO: 101981 - protein, 13 aa, Homo sapiens
  CDR3 for alpha chain variable domain of TCR clone 50991 (TRAV35, TRAJ37)
CAGSSGTTGKLIF

SEQ ID NO: 101982 - protein, 16 aa, Homo sapiens
  CDR3 for beta chain variable domain of TCR clone 50991 (TRBV10-3, TRBJ2-1)
CAISLTSGNSYNEQFF

SEQ ID NO: 101983 - protein, 15 aa, Homo sapiens
  CDR3 for alpha chain variable domain of TCR clone 50992 (TRAV20, TRAJ58)
CAVQDLETSGPRLTF

SEQ ID NO: 101984 - protein, 12 aa, Homo sapiens
  CDR3 for beta chain variable domain of TCR clone 50992 (TRBV9, TRBJ2-2)
CASSARTGELFF

SEQ ID NO: 101985 - protein, 11 aa, Homo sapiens
  CDR3 for alpha chain variable domain of TCR clone 50993 (TRAV2, TRAJ13)
CASGGYEKVTF

SEQ ID NO: 101986 - protein, 16 aa, Homo sapiens
  CDR3 for beta chain variable domain of TCR clone 50993 (TRBV6-1, TRBJ2-5)
CASSETLDRGAETQYF

SEQ ID NO: 101987 - protein, 13 aa, Homo sapiens
  CDR3 for alpha chain variable domain of TCR clone 50994 (TRAV21, TRAJ20)
CAVGLRVDYKLSF

SEQ ID NO: 101988 - protein, 15 aa, Homo sapiens
  CDR3 for beta chain variable domain of TCR clone 50994 (TRBV10-2, TRBJ2-6)
CASSEQGTGANVLTF

SEQ ID NO: 101989 - protein, 14 aa, Homo sapiens
  CDR3 for alpha chain variable domain of TCR clone 50995 (TRAV35, TRAJ42)
CAGRYGGSQGNLIF

SEQ ID NO: 101990 - protein, 15 aa, Homo sapiens
  CDR3 for beta chain variable domain of TCR clone 50995 (TRBV28, TRBJ2-1)
CASSIIAGGRSEQFF

SEQ ID NO: 101991 - protein, 15 aa, Homo sapiens
  CDR3 for alpha chain variable domain of TCR clone 50996 (TRAV17, TRAJ35)
CATAFGIGFGNVLHC

SEQ ID NO: 101992 - protein, 15 aa, Homo sapiens
  CDR3 for beta chain variable domain of TCR clone 50996 (TRBV7-9, TRBJ2-7)
CASSLALAEAYEQYF

SEQ ID NO: 101993 - protein, 15 aa, Homo sapiens
  CDR3 for alpha chain variable domain of TCR clone 50997 (TRAV8-3, TRAJ45)
CASSYSGGGADGLTF

SEQ ID NO: 101994 - protein, 16 aa, Homo sapiens
  CDR3 for beta chain variable domain of TCR clone 50997 (TRBV18, TRBJ1-1)
CASSPGVGGRGGEAFF

SEQ ID NO: 101995 - protein, 12 aa, Homo sapiens
  CDR3 for alpha chain variable domain of TCR clone 50998 (TRAV3, TRAJ7)
CADLLCEQQTRF

SEQ ID NO: 101996 - protein, 13 aa, Homo sapiens
  CDR3 for beta chain variable domain of TCR clone 50998 (TRBV7-3, TRBJ2-5)
CASSFRGGETQYF

SEQ ID NO: 101997 - protein, 11 aa, Homo sapiens
  CDR3 for alpha chain variable domain of TCR clone 50999 (TRAV3, TRAJ17)
PRGAAGNKLTS

SEQ ID NO: 101998 - protein, 16 aa, Homo sapiens
  CDR3 for beta chain variable domain of TCR clone 50999 (TRBV7-6, TRBJ2-1)
CASSAPGPSSYNEQFF

SEQ ID NO: 101999 - protein, 17 aa, Homo sapiens
  CDR3 for alpha chain variable domain of TCR clone 51000 (TRAV3, TRAJ12)
CAVGDGGRMDSSYKLIF

SEQ ID NO: 102000 - protein, 14 aa, Homo sapiens
  CDR3 for beta chain variable domain of TCR clone 51000 (TRBV7-9, TRBJ1-2)
CASSRQGANYGYTF

SEQ ID NO: 102001 - protein, 10 aa, Homo sapiens
  CDR3 for alpha chain variable domain of TCR clone 51001 (TRAV12-3, TRAJ49)
CAMNDDQFYF

SEQ ID NO: 102002 - protein, 13 aa, Homo sapiens
  CDR3 for beta chain variable domain of TCR clone 51001 (TRBV12-4, TRBJ1-1)
CASSLGTGFEAFF

SEQ ID NO: 102003 - protein, 12 aa, Homo sapiens
  CDR3 for alpha chain variable domain of TCR clone 51002 (TRAV21, TRAJ31)
CAVWGNNARLMF

SEQ ID NO: 102004 - protein, 16 aa, Homo sapiens
  CDR3 for beta chain variable domain of TCR clone 51002 (TRBV27, TRBJ2-5)
CASSYGPGGQEETQYF

SEQ ID NO: 102005 - protein, 15 aa, Homo sapiens
  CDR3 for alpha chain variable domain of TCR clone 51003 (TRAV3, TRAJ29)
CAVRAPLSGNTPLAF

SEQ ID NO: 102006 - protein, 15 aa, Homo sapiens
  CDR3 for beta chain variable domain of TCR clone 51003 (TRBV28, TRBJ1-1)
CASRIKGGLNTEAFF

SEQ ID NO: 102007 - protein, 14 aa, Homo sapiens
  CDR3 for alpha chain variable domain of TCR clone 51004 (TRAV1-2, TRAJ8)
CAVREDTGFQKLVF

SEQ ID NO: 102008 - protein, 13 aa, Homo sapiens
  CDR3 for beta chain variable domain of TCR clone 51004 (TRBV12-4, TRBJ2-5)
CAGSPGTEETQYF

SEQ ID NO: 102009 - protein, 13 aa, Homo sapiens
  CDR3 for alpha chain variable domain of TCR clone 51005 (TRAV13-1, TRAJ11)
CAAVLAGYSTLTF

SEQ ID NO: 102010 - protein, 17 aa, Homo sapiens
  CDR3 for beta chain variable domain of TCR clone 51005 (TRBV25-1, TRBJ2-7)
CASSDARVVFPSYEQYF

SEQ ID NO: 102011 - protein, 12 aa, Homo sapiens
  CDR3 for alpha chain variable domain of TCR clone 51006 (TRAV8-3, TRAJ26)
CAGDNYGQNFVF

SEQ ID NO: 102012 - protein, 12 aa, Homo sapiens
  CDR3 for beta chain variable domain of TCR clone 51006 (TRBV12-5, TRBJ2-5)
CASGQGVETQYF

SEQ ID NO: 102013 - protein, 13 aa, Homo sapiens
  CDR3 for alpha chain variable domain of TCR clone 51007 (TRAV17, TRAJ9)
CATDYTGGFKTTF

SEQ ID NO: 102014 - protein, 14 aa, Homo sapiens
  CDR3 for beta chain variable domain of TCR clone 51007 (TRBV19, TRBJ2-5)
CASSMTGQQETQYF

SEQ ID NO: 102015 - protein, 14 aa, Homo sapiens
  CDR3 for alpha chain variable domain of TCR clone 51008 (TRAV12-1, TRAJ30)
CVVNIGGREDKIIF

SEQ ID NO: 102016 - protein, 13 aa, Homo sapiens
  CDR3 for beta chain variable domain of TCR clone 51008 (TRBV12-5, TRBJ2-1)
CASGLGRGNEQFF

SEQ ID NO: 102017 - protein, 16 aa, Homo sapiens
  CDR3 for alpha chain variable domain of TCR clone 51009 (TRAV12-2, TRAJ10)
CAVNRVLTGGGNKLTF

SEQ ID NO: 102018 - protein, 12 aa, Homo sapiens
  CDR3 for beta chain variable domain of TCR clone 51009 (TRBV28, TRBJ2-7)
CASRFSSYEQYF

SEQ ID NO: 102019 - protein, 15 aa, Homo sapiens
  CDR3 for alpha chain variable domain of TCR clone 51010 (TRAV8-3, TRAJ11)
CAVGLLNSGYSTLTF

SEQ ID NO: 102020 - protein, 11 aa, Homo sapiens
  CDR3 for beta chain variable domain of TCR clone 51010 (TRBV12-4, TRBJ2-3)
CASTATDTQYF

SEQ ID NO: 102021 - protein, 18 aa, Homo sapiens
  CDR3 for alpha chain variable domain of TCR clone 51011 (TRAV27, TRAJ36)
PSLLIQASTPAGANNLFF

SEQ ID NO: 102022 - protein, 13 aa, Homo sapiens
  CDR3 for beta chain variable domain of TCR clone 51011 (TRBV7-9, TRBJ2-3)
CASSPGSTDTQYF

SEQ ID NO: 102023 - protein, 13 aa, Homo sapiens
  CDR3 for alpha chain variable domain of TCR clone 51012 (TRAV12-1, TRAJ12)
CVVYIESSYKLIF

SEQ ID NO: 102024 - protein, 15 aa, Homo sapiens
  CDR3 for beta chain variable domain of TCR clone 51012 (TRBV2, TRBJ2-5)
CASSSSVAGGETQYF

SEQ ID NO: 102025 - protein, 13 aa, Homo sapiens
  CDR3 for alpha chain variable domain of TCR clone 51013 (TRAV12-3, TRAJ33)
CAMSVNSDYQLIW

SEQ ID NO: 102026 - protein, 13 aa, Homo sapiens
  CDR3 for beta chain variable domain of TCR clone 51013 (TRBV4-1, TRBJ2-2)
CASSQENTGELFF

SEQ ID NO: 102027 - protein, 14 aa, Homo sapiens
  CDR3 for alpha chain variable domain of TCR clone 51014 (TRAV35, TRAJ22)
CAGLRPGSARQLTF

SEQ ID NO: 102028 - protein, 15 aa, Homo sapiens
  CDR3 for beta chain variable domain of TCR clone 51014 (TRBV12-4, TRBJ2-5)
CASSPPTCLQETQYF

SEQ ID NO: 102029 - protein, 12 aa, Homo sapiens
  CDR3 for alpha chain variable domain of TCR clone 51015 (TRAV13-2, TRAJ23)
CAERHRGGKLIF

SEQ ID NO: 102030 - protein, 12 aa, Homo sapiens
  CDR3 for beta chain variable domain of TCR clone 51015 (TRBV12-4, TRBJ2-1)
CASTYVLNEQFF

SEQ ID NO: 102031 - protein, 14 aa, Homo sapiens
  CDR3 for alpha chain variable domain of TCR clone 51016 (TRAV16, TRAJ17)
CALGGRAAGNKLTF

SEQ ID NO: 102032 - protein, 15 aa, Homo sapiens
  CDR3 for beta chain variable domain of TCR clone 51016 (TRBV3-1, TRBJ1-2)
CASSPTRLPEGGYTF

SEQ ID NO: 102033 - protein, 14 aa, Homo sapiens
  CDR3 for alpha chain variable domain of TCR clone 51017 (TRAV8-1, TRAJ5)
CAVRTGTGRRALTF

SEQ ID NO: 102034 - protein, 14 aa, Homo sapiens
  CDR3 for beta chain variable domain of TCR clone 51017 (TRBV7-8, TRBJ2-3)
CASSFPDGQDTQYF

SEQ ID NO: 102035 - protein, 16 aa, Homo sapiens
  CDR3 for alpha chain variable domain of TCR clone 51018 (TRAV3, TRAJ10)
CAVRDMRAGGGNKLTF

SEQ ID NO: 102036 - protein, 13 aa, Homo sapiens
  CDR3 for beta chain variable domain of TCR clone 51018 (TRBV7-8, TRBJ2-7)
CASSLTGGREQYF

SEQ ID NO: 102037 - protein, 14 aa, Homo sapiens
  CDR3 for alpha chain variable domain of TCR clone 51019 (TRAV17, TRAJ22)
CATSPSGSARQLTF

SEQ ID NO: 102038 - protein, 15 aa, Homo sapiens
  CDR3 for beta chain variable domain of TCR clone 51019 (TRBV11-3, TRBJ2-3)
CASLKDGREGDTQYF

SEQ ID NO: 102039 - protein, 16 aa, Homo sapiens
  CDR3 for alpha chain variable domain of TCR clone 51020 (TRAV3, TRAJ23)
CAVKIGIYNQGGKLIF

SEQ ID NO: 102040 - protein, 17 aa, Homo sapiens
  CDR3 for beta chain variable domain of TCR clone 51020 (TRBV10-3, TRBJ2-6)
CAIGESTAPSGANVLTF

SEQ ID NO: 102041 - protein, 14 aa, Homo sapiens
  CDR3 for alpha chain variable domain of TCR clone 51021 (TRAV12-2, TRAJ6)
CASKWGGGSYILTF

SEQ ID NO: 102042 - protein, 13 aa, Homo sapiens
  CDR3 for beta chain variable domain of TCR clone 51021 (TRBV2, TRBJ1-1)
CASSEGGNTEAFF

SEQ ID NO: 102043 - protein, 13 aa, Homo sapiens
  CDR3 for alpha chain variable domain of TCR clone 51022 (TRAV16, TRAJ37)
CALWGSNTGKLIF

SEQ ID NO: 102044 - protein, 15 aa, Homo sapiens
  CDR3 for beta chain variable domain of TCR clone 51022 (TRBV20-1, TRBJ2-1)
CSARGRGLSYNEQFF

SEQ ID NO: 102045 - protein, 10 aa, Homo sapiens
  CDR3 for alpha chain variable domain of TCR clone 51023 (TRAV23/DV6, TRAJ57)
CAASSTLSQG

SEQ ID NO: 102046 - protein, 19 aa, Homo sapiens
  CDR3 for beta chain variable domain of TCR clone 51023 (TRBV25-1, TRBJ2-2)
CAILVYRVDRGRKTGELFF

SEQ ID NO: 102047 - protein, 17 aa, Homo sapiens
  CDR3 for alpha chain variable domain of TCR clone 51024 (TRAV4, TRAJ13)
CLVGVQGSSGGYQKVTF

SEQ ID NO: 102048 - protein, 18 aa, Homo sapiens
  CDR3 for beta chain variable domain of TCR clone 51024 (TRBV15, TRBJ2-3)
CATSRDGARSWDTGTQYF

SEQ ID NO: 102049 - protein, 19 aa, Homo sapiens
  CDR3 for alpha chain variable domain of TCR clone 51025 (TRAV38-1, TRAJ53)
CAFMKHGLESGGSNYKLKF

SEQ ID NO: 102050 - protein, 13 aa, Homo sapiens
  CDR3 for beta chain variable domain of TCR clone 51025 (TRBV19, TRBJ2-7)
CASSPRQSYEQYF

SEQ ID NO: 102051 - protein, 16 aa, Homo sapiens
  CDR3 for alpha chain variable domain of TCR clone 51026 (TRAV14/DV4, TRAJ53)
CAMREDGGGSNYKLTF

SEQ ID NO: 102052 - protein, 18 aa, Homo sapiens
  CDR3 for beta chain variable domain of TCR clone 51026 (TRBV18, TRBJ1-3)
CASSPRGGAGPSGNTIYF

SEQ ID NO: 102053 - protein, 20 aa, Homo sapiens
  CDR3 for alpha chain variable domain of TCR clone 51027 (TRAV26-1, TRAJ42)
CCVLLHRQTYYGGSQGNLIF

SEQ ID NO: 102054 - protein, 16 aa, Homo sapiens
  CDR3 for beta chain variable domain of TCR clone 51027 (TRBV7-3, TRBJ2-2)
CASSLKRGTLSGELFC

SEQ ID NO: 102055 - protein, 16 aa, Homo sapiens
  CDR3 for alpha chain variable domain of TCR clone 51028 (TRAV38-2/DV8, TRAJ47)
CAYRSAIMEYGNKLVL

SEQ ID NO: 102056 - protein, 14 aa, Homo sapiens
  CDR3 for beta chain variable domain of TCR clone 51028 (TRBV19, TRBJ2-7)
CASSIFAGTYEQYF

SEQ ID NO: 102057 - protein, 12 aa, Homo sapiens
  CDR3 for alpha chain variable domain of TCR clone 51029 (TRAV17, TRAJ4)
CATDGGYNKLIF

SEQ ID NO: 102058 - protein, 13 aa, Homo sapiens
  CDR3 for beta chain variable domain of TCR clone 51029 (TRBV29-1, TRBJ2-2)
CGTTGVNTGELFF

SEQ ID NO: 102059 - protein, 12 aa, Homo sapiens
  CDR3 for alpha chain variable domain of TCR clone 51030 (TRAV13-1, TRAJ21)
CAAKEGFNKFYF

SEQ ID NO: 102060 - protein, 15 aa, Homo sapiens
  CDR3 for beta chain variable domain of TCR clone 51030 (TRBV25-1, TRBJ1-4)
CASSPGDSTNEKLVF

SEQ ID NO: 102061 - protein, 14 aa, Homo sapiens
  CDR3 for alpha chain variable domain of TCR clone 51031 (TRAV1-2, TRAJ6)
CAVSLSRGSYIPTF

SEQ ID NO: 102062 - protein, 15 aa, Homo sapiens
  CDR3 for beta chain variable domain of TCR clone 51031 (TRBV28, TRBJ2-7)
CASSPGGRGFYEQYF

SEQ ID NO: 102063 - protein, 13 aa, Homo sapiens
  CDR3 for alpha chain variable domain of TCR clone 51032 (TRAV3, TRAJ20)
CAVRSLNDYKLSF

SEQ ID NO: 102064 - protein, 13 aa, Homo sapiens
  CDR3 for beta chain variable domain of TCR clone 51032 (TRBV11-2, TRBJ1-1)
CASSFTENTEAFF

SEQ ID NO: 102065 - protein, 16 aa, Homo sapiens
  CDR3 for alpha chain variable domain of TCR clone 51033 (TRAV38-1, TRAJ32)
CAFMKGGGGATNKLIF

SEQ ID NO: 102066 - protein, 13 aa, Homo sapiens
  CDR3 for beta chain variable domain of TCR clone 51033 (TRBV20-1, TRBJ2-5)
CSTREAFQETQYF

SEQ ID NO: 102067 - protein, 13 aa, Homo sapiens
  CDR3 for alpha chain variable domain of TCR clone 51034 (TRAV12-1, TRAJ12)
CVVNIESSYKLIF

SEQ ID NO: 102068 - protein, 15 aa, Homo sapiens
  CDR3 for beta chain variable domain of TCR clone 51034 (TRBV2, TRBJ2-5)
CAGSSSVAGGETQYF

SEQ ID NO: 102069 - protein, 17 aa, Homo sapiens
  CDR3 for alpha chain variable domain of TCR clone 51035 (TRAV3, TRAJ6)
CAVRDGPRAGGSYIPTF

SEQ ID NO: 102070 - protein, 15 aa, Homo sapiens
  CDR3 for beta chain variable domain of TCR clone 51035 (TRBV7-6, TRBJ1-2)
CASSSGGRGGYGYTF

SEQ ID NO: 102071 - protein, 15 aa, Homo sapiens
  CDR3 for alpha chain variable domain of TCR clone 51036 (TRAV13-1, TRAJ45)
CAASGSGGGADGLPF

SEQ ID NO: 102072 - protein, 14 aa, Homo sapiens
  CDR3 for beta chain variable domain of TCR clone 51036 (TRBV12-4, TRBJ1-2)
CASSFVGTAYGYTF

SEQ ID NO: 102073 - protein, 14 aa, Homo sapiens
  CDR3 for alpha chain variable domain of TCR clone 51037 (TRAV9-2, TRAJ39)
CALYIYNAGNMLTF

SEQ ID NO: 102074 - protein, 13 aa, Homo sapiens
  CDR3 for beta chain variable domain of TCR clone 51037 (TRBV11-3, TRBJ1-1)
CASSRQPSTEAFF

SEQ ID NO: 102075 - protein, 11 aa, Homo sapiens
  CDR3 for alpha chain variable domain of TCR clone 51038 (TRAV35, TRAJ30)
CAGPGDDKIIF

SEQ ID NO: 102076 - protein, 17 aa, Homo sapiens
  CDR3 for beta chain variable domain of TCR clone 51038 (TRBV7-3, TRBJ2-3)
CASSLMKRMRGADTQYF

SEQ ID NO: 102077 - protein, 14 aa, Homo sapiens
  CDR3 for alpha chain variable domain of TCR clone 51039 (TRAV12-3, TRAJ9)
CAMSPNTGGFKTIF

SEQ ID NO: 102078 - protein, 14 aa, Homo sapiens
  CDR3 for beta chain variable domain of TCR clone 51039 (TRBV7-3, TRBJ1-1)
CASSLKGGNTEAFF

SEQ ID NO: 102079 - protein, 11 aa, Homo sapiens
  CDR3 for alpha chain variable domain of TCR clone 51040 (TRAV2, TRAJ13)
CASGGYQKVTF

SEQ ID NO: 102080 - protein, 13 aa, Homo sapiens
  CDR3 for beta chain variable domain of TCR clone 51040 (TRBV7-2, TRBJ1-5)
CASTPTVNQPQHF

SEQ ID NO: 102081 - protein, 10 aa, Homo sapiens
  CDR3 for alpha chain variable domain of TCR clone 51041 (TRAV8-2, TRAJ29)
CTGGNTPLVF

SEQ ID NO: 102082 - protein, 13 aa, Homo sapiens
  CDR3 for beta chain variable domain of TCR clone 51041 (TRBV12-4, TRBJ2-7)
CASSPTETYEQYF

SEQ ID NO: 102083 - protein, 17 aa, Homo sapiens
  CDR3 for alpha chain variable domain of TCR clone 51042 (TRAV3, TRAJ6)
CAVRDGPRAGGSYRPTF

SEQ ID NO: 102084 - protein, 16 aa, Homo sapiens
  CDR3 for beta chain variable domain of TCR clone 51042 (TRBV7-8, TRBJ2-3)
CASSTEGQRETDTQYF

SEQ ID NO: 102085 - protein, 14 aa, Homo sapiens
  CDR3 for alpha chain variable domain of TCR clone 51043 (TRAV12-2, TRAJ13)
CAVKKTGGYQKVTF

SEQ ID NO: 102086 - protein, 12 aa, Homo sapiens
  CDR3 for beta chain variable domain of TCR clone 51043 (TRBV4-1, TRBJ2-3)
CASSQGTDTQYF

SEQ ID NO: 102087 - protein, 13 aa, Homo sapiens
  CDR3 for alpha chain variable domain of TCR clone 51044 (TRAV35, TRAJ33)
CAGRHDSNYQLIW

SEQ ID NO: 102088 - protein, 19 aa, Homo sapiens
  CDR3 for beta chain variable domain of TCR clone 51044 (TRBV6-3, TRBJ2-1)
CASSYSWTSGRATYDEQFF

SEQ ID NO: 102089 - protein, 15 aa, Homo sapiens
  CDR3 for alpha chain variable domain of TCR clone 51045 (TRAV21, TRAJ52)
CAVRGGGTSYGKLTF

SEQ ID NO: 102090 - protein, 15 aa, Homo sapiens
  CDR3 for beta chain variable domain of TCR clone 51045 (TRBV18, TRBJ1-5)
CASSPSNRSNQPQHF

SEQ ID NO: 102091 - protein, 13 aa, Homo sapiens
  CDR3 for alpha chain variable domain of TCR clone 51046 (TRAV3, TRAJ21)
CAVREPDFNKFYF

SEQ ID NO: 102092 - protein, 15 aa, Homo sapiens
  CDR3 for beta chain variable domain of TCR clone 51046 (TRBV9, TRBJ1-6)
CASSVAGTGDSPPHF

SEQ ID NO: 102093 - protein, 11 aa, Homo sapiens
  CDR3 for alpha chain variable domain of TCR clone 51047 (TRAV17, TRAJ9)
CGFTGSFKTIF

SEQ ID NO: 102094 - protein, 14 aa, Homo sapiens
  CDR3 for beta chain variable domain of TCR clone 51047 (TRBV7-9, TRBJ2-2)
CASSLVQDTGELFF

SEQ ID NO: 102095 - protein, 11 aa, Homo sapiens
  CDR3 for alpha chain variable domain of TCR clone 51048 (TRAV2, TRAJ13)
CASGGYQKVTF

SEQ ID NO: 102096 - protein, 11 aa, Homo sapiens
  CDR3 for beta chain variable domain of TCR clone 51048 (TRBV5-7, TRBJ2-5)
CASSLERTQYF

SEQ ID NO: 102097 - protein, 15 aa, Homo sapiens
  CDR3 for alpha chain variable domain of TCR clone 51049 (TRAV17, TRAJ57)
CATGPSQGGSEKLVL

SEQ ID NO: 102098 - protein, 15 aa, Homo sapiens
  CDR3 for beta chain variable domain of TCR clone 51049 (TRBV6-3, TRBJ2-7)
CASSSPGTVFYEQYF

SEQ ID NO: 102099 - protein, 14 aa, Homo sapiens
  CDR3 for alpha chain variable domain of TCR clone 51050 (TRAV17, TRAJ54)
CATDANQGAQKLVF

SEQ ID NO: 102100 - protein, 23 aa, Homo sapiens
  CDR3 for beta chain variable domain of TCR clone 51050 (TRBV20-1, TRBJ2-6)
CPSRRQQLLHLPVRGSGANVLTF

SEQ ID NO: 102101 - protein, 17 aa, Homo sapiens
  CDR3 for alpha chain variable domain of TCR clone 51051 (TRAV35, TRAJ47)
GLLGCRTHTEYGNKLVF

SEQ ID NO: 102102 - protein, 11 aa, Homo sapiens
  CDR3 for beta chain variable domain of TCR clone 51051 (TRBV29-1, TRBJ1-1)
CSVEVGTRTFF

SEQ ID NO: 102103 - protein, 14 aa, Homo sapiens
  CDR3 for alpha chain variable domain of TCR clone 51052 (TRAV13-1, TRAJ44)
CAAKATGTASKLTF

SEQ ID NO: 102104 - protein, 14 aa, Homo sapiens
  CDR3 for beta chain variable domain of TCR clone 51052 (TRBV7-6, TRBJ2-3)
CASSLGTVTDTQYF

SEQ ID NO: 102105 - protein, 17 aa, Homo sapiens
  CDR3 for alpha chain variable domain of TCR clone 51053 (TRAV3, TRAJ6)
CAVRDGPRAGGSYIPTF

SEQ ID NO: 102106 - protein, 12 aa, Homo sapiens
  CDR3 for beta chain variable domain of TCR clone 51053 (TRBV11-3, TRBJ2-1)
CASSPGNNEQFF

SEQ ID NO: 102107 - protein, 14 aa, Homo sapiens
  CDR3 for alpha chain variable domain of TCR clone 51054 (TRAV8-3, TRAJ4)
CAVGAAGGYNKLIF

SEQ ID NO: 102108 - protein, 15 aa, Homo sapiens
  CDR3 for beta chain variable domain of TCR clone 51054 (TRBV6-5, TRBJ2-1)
CASSYDAGAGNEQFV

SEQ ID NO: 102109 - protein, 12 aa, Homo sapiens
  CDR3 for alpha chain variable domain of TCR clone 51055 (TRAV12-1, TRAJ40)
CVFYSGTYKYIF

SEQ ID NO: 102110 - protein, 18 aa, Homo sapiens
  CDR3 for beta chain variable domain of TCR clone 51055 (TRBV12-4, TRBJ2-2)
CASSLVAGTRGRTGELSF

SEQ ID NO: 102111 - protein, 16 aa, Homo sapiens
  CDR3 for alpha chain variable domain of TCR clone 51056 (TRAV16, TRAJ52)
CALSAAGGTSYGKLTS

SEQ ID NO: 102112 - protein, 17 aa, Homo sapiens
  CDR3 for beta chain variable domain of TCR clone 51056 (TRBV11-2, TRBJ2-1)
CASSLYPPGVEYNEQFF

SEQ ID NO: 102113 - protein, 14 aa, Homo sapiens
  CDR3 for alpha chain variable domain of TCR clone 51057 (TRAV9-2, TRAJ39)
CALYIYNAGNMLTF

SEQ ID NO: 102114 - protein, 16 aa, Homo sapiens
  CDR3 for beta chain variable domain of TCR clone 51057 (TRBV10-3, TRBJ1-6)
CAISERRGQGNSPLHF

SEQ ID NO: 102115 - protein, 18 aa, Homo sapiens
  CDR3 for alpha chain variable domain of TCR clone 51058 (TRAV21, TRAJ52)
CAVRPSPAGGTSYGKLTF

SEQ ID NO: 102116 - protein, 13 aa, Homo sapiens
  CDR3 for beta chain variable domain of TCR clone 51058 (TRBV24-1, TRBJ2-2)
CATSDWSTGELFF

SEQ ID NO: 102117 - protein, 16 aa, Homo sapiens
  CDR3 for alpha chain variable domain of TCR clone 51059 (TRAV3, TRAJ3)
CAVRDRAKSSASKIIF

SEQ ID NO: 102118 - protein, 16 aa, Homo sapiens
  CDR3 for beta chain variable domain of TCR clone 51059 (TRBV20-1, TRBJ2-4)
CSATPLAELAKNIQYF

SEQ ID NO: 102119 - protein, 11 aa, Homo sapiens
  CDR3 for alpha chain variable domain of TCR clone 51060 (TRAV2, TRAJ13)
CASGGYQKVTF

SEQ ID NO: 102120 - protein, 13 aa, Homo sapiens
  CDR3 for beta chain variable domain of TCR clone 51060 (TRBV24-1, TRBJ2-2)
CATSDWSTGELFF

SEQ ID NO: 102121 - protein, 15 aa, Homo sapiens
  CDR3 for alpha chain variable domain of TCR clone 51061 (TRAV26-1, TRAJ22)
CIVRVSFWFCKATDL

SEQ ID NO: 102122 - protein, 15 aa, Homo sapiens
  CDR3 for beta chain variable domain of TCR clone 51061 (TRBV5-1, TRBJ2-3)
CASSVTSGSTDTQYF

SEQ ID NO: 102123 - protein, 12 aa, Homo sapiens
  CDR3 for alpha chain variable domain of TCR clone 51062 (TRAV12-3, TRAJ17)
CAMTLTGNKLTF

SEQ ID NO: 102124 - protein, 15 aa, Homo sapiens
  CDR3 for beta chain variable domain of TCR clone 51062 (TRBV18, TRBJ1-1)
CASSGRTGEVTEAFF

SEQ ID NO: 102125 - protein, 12 aa, Homo sapiens
  CDR3 for alpha chain variable domain of TCR clone 51063 (TRAV1-2, TRAJ26)
CAVRYYGQNFFF

SEQ ID NO: 102126 - protein, 14 aa, Homo sapiens
  CDR3 for beta chain variable domain of TCR clone 51063 (TRBV11-1, TRBJ2-7)
CASSFRQGSYEQYF

SEQ ID NO: 102127 - protein, 10 aa, Homo sapiens
  CDR3 for alpha chain variable domain of TCR clone 51064 (TRAV12-1, TRAJ43)
CVVHNDDMRF

SEQ ID NO: 102128 - protein, 16 aa, Homo sapiens
  CDR3 for beta chain variable domain of TCR clone 51064 (TRBV5-1, TRBJ2-1)
CASSFGVSGSYNEQFF

SEQ ID NO: 102129 - protein, 15 aa, Homo sapiens
  CDR3 for alpha chain variable domain of TCR clone 51065 (TRAV20, TRAJ53)
CAVQASGGSNYKLTF

SEQ ID NO: 102130 - protein, 12 aa, Homo sapiens
  CDR3 for beta chain variable domain of TCR clone 51065 (TRBV7-8, TRBJ2-7)
CTSSLGDREQYF

SEQ ID NO: 102131 - protein, 13 aa, Homo sapiens
  CDR3 for alpha chain variable domain of TCR clone 51066 (TRAV21, TRAJ20)
FAVGLRVDYKLSF

SEQ ID NO: 102132 - protein, 13 aa, Homo sapiens
  CDR3 for beta chain variable domain of TCR clone 51066 (TRBV6-1, TRBJ1-1)
CASSRQGNTEAFF

SEQ ID NO: 102133 - protein, 12 aa, Homo sapiens
  CDR3 for alpha chain variable domain of TCR clone 51067 (TRAV2, TRAJ9)
CAVGAGGFKTIF

SEQ ID NO: 102134 - protein, 19 aa, Homo sapiens
  CDR3 for beta chain variable domain of TCR clone 51067 (TRBV25-1, TRBJ2-2)
CAILVYRVDRGRKTGELFF

SEQ ID NO: 102135 - protein, 12 aa, Homo sapiens
  CDR3 for alpha chain variable domain of TCR clone 51068 (TRAV16, TRAJ10)
CSRTGGGNKLTF

SEQ ID NO: 102136 - protein, 16 aa, Homo sapiens
  CDR3 for beta chain variable domain of TCR clone 51068 (TRBV7-3, TRBJ2-2)
CASSLKRGALSGELFF

SEQ ID NO: 102137 - protein, 17 aa, Homo sapiens
  CDR3 for alpha chain variable domain of TCR clone 51069 (TRAV13-1, TRAJ28)
CAASPPYSGAGSYQLTF

SEQ ID NO: 102138 - protein, 11 aa, Homo sapiens
  CDR3 for beta chain variable domain of TCR clone 51069 (TRBV5-6, TRBJ2-5)
CASSLERTQYF

SEQ ID NO: 102139 - protein, 15 aa, Homo sapiens
  CDR3 for alpha chain variable domain of TCR clone 51070 (TRAV8-3, TRAJ23)
CAGGDRYNQGGKLIF

SEQ ID NO: 102140 - protein, 22 aa, Homo sapiens
  CDR3 for beta chain variable domain of TCR clone 51070 (TRBV29-1, TRBJ2-5)
TVSNMSPEDSSIYLCSAGTQYF

SEQ ID NO: 102141 - protein, 15 aa, Homo sapiens
  CDR3 for alpha chain variable domain of TCR clone 51071 (TRAV17, TRAJ57)
CATGPSQGGSEKLVF

SEQ ID NO: 102142 - protein, 13 aa, Homo sapiens
  CDR3 for beta chain variable domain of TCR clone 51071 (TRBV11-2, TRBJ2-5)
CASSSTGEQTQYF

SEQ ID NO: 102143 - protein, 17 aa, Homo sapiens
  CDR3 for alpha chain variable domain of TCR clone 51072 (TRAV12-2, TRAJ6)
CAPHGPPRAGGSYIPTF

SEQ ID NO: 102144 - protein, 16 aa, Homo sapiens
  CDR3 for beta chain variable domain of TCR clone 51072 (TRBV19, TRBJ2-2)
CASSTARASNTGELFF

SEQ ID NO: 102145 - protein, 12 aa, Homo sapiens
  CDR3 for alpha chain variable domain of TCR clone 51073 (TRAV26-1, TRAJ17)
CIVRSAGNKLTF

SEQ ID NO: 102146 - protein, 15 aa, Homo sapiens
  CDR3 for beta chain variable domain of TCR clone 51073 (TRBV7-6, TRBJ1-2)
CASSSGGRGGYGDTF

SEQ ID NO: 102147 - protein, 14 aa, Homo sapiens
  CDR3 for alpha chain variable domain of TCR clone 51074 (TRAV1-2, TRAJ16)
CAVNRFSDGQQLLF

SEQ ID NO: 102148 - protein, 13 aa, Homo sapiens
  CDR3 for beta chain variable domain of TCR clone 51074 (TRBV4-1, TRBJ2-1)
CASSQAGGDEQFF

SEQ ID NO: 102149 - protein, 11 aa, Homo sapiens
  CDR3 for alpha chain variable domain of TCR clone 51075 (TRAV3, TRAJ17)
PRGAAGNKLTF

SEQ ID NO: 102150 - protein, 16 aa, Homo sapiens
  CDR3 for beta chain variable domain of TCR clone 51075 (TRBV7-6, TRBJ2-1)
CAGSAPGPSSYNEQFF

SEQ ID NO: 102151 - protein, 15 aa, Homo sapiens
  CDR3 for alpha chain variable domain of TCR clone 51076 (TRAV2, TRAJ9)
CAVAALHTGGFKTIF

SEQ ID NO: 102152 - protein, 14 aa, Homo sapiens
  CDR3 for beta chain variable domain of TCR clone 51076 (TRBV7-8, TRBJ2-5)
CASSATGGQETQYF

SEQ ID NO: 102153 - protein, 13 aa, Homo sapiens
  CDR3 for alpha chain variable domain of TCR clone 51077 (TRAV2, TRAJ40)
CAVVTSGTYKYIF

SEQ ID NO: 102154 - protein, 16 aa, Homo sapiens
  CDR3 for beta chain variable domain of TCR clone 51077 (TRBV15, TRBJ1-2)
CATSRGPRTGGGGYTF

SEQ ID NO: 102155 - protein, 14 aa, Homo sapiens
  CDR3 for alpha chain variable domain of TCR clone 51078 (TRAV17, TRAJ6)
CATDASGGSYIPTF

SEQ ID NO: 102156 - protein, 12 aa, Homo sapiens
  CDR3 for beta chain variable domain of TCR clone 51078 (TRBV28, TRBJ2-1)
CASSVQINEQFF

SEQ ID NO: 102157 - protein, 13 aa, Homo sapiens
  CDR3 for alpha chain variable domain of TCR clone 51079 (TRAV27, TRAJ37)
CAGGPSNTGKLIF

SEQ ID NO: 102158 - protein, 15 aa, Homo sapiens
  CDR3 for beta chain variable domain of TCR clone 51079 (TRBV19, TRBJ1-2)
CASSVGQVLNYGYTF

SEQ ID NO: 102159 - protein, 13 aa, Homo sapiens
  CDR3 for alpha chain variable domain of TCR clone 51080 (TRAV26-1, TRAJ33)
CIVKVEGNYQLIW

SEQ ID NO: 102160 - protein, 16 aa, Homo sapiens
  CDR3 for beta chain variable domain of TCR clone 51080 (TRBV15, TRBJ2-7)
CATSRDRGRRRGEQYF

SEQ ID NO: 102161 - protein, 15 aa, Homo sapiens
  CDR3 for alpha chain variable domain of TCR clone 51081 (TRAV20, TRAJ58)
CAVQDLEASGSRLTF

SEQ ID NO: 102162 - protein, 12 aa, Homo sapiens
  CDR3 for beta chain variable domain of TCR clone 51081 (TRBV9, TRBJ2-2)
CASSARTRELFF

SEQ ID NO: 102163 - protein, 16 aa, Homo sapiens
  CDR3 for alpha chain variable domain of TCR clone 51082 (TRAV12-3, TRAJ50)
CAIRDPMKTSYDKVIF

SEQ ID NO: 102164 - protein, 13 aa, Homo sapiens
  CDR3 for beta chain variable domain of TCR clone 51082 (TRBV4-1, TRBJ2-3)
CASSLDFTDTQYF

SEQ ID NO: 102165 - protein, 11 aa, Homo sapiens
  CDR3 for alpha chain variable domain of TCR clone 51083 (TRAV17, TRAJ9)
CATTGGFKTIF

SEQ ID NO: 102166 - protein, 12 aa, Homo sapiens
  CDR3 for beta chain variable domain of TCR clone 51083 (TRBV7-8, TRBJ2-7)
CASSLGDREQYF

SEQ ID NO: 102167 - protein, 14 aa, Homo sapiens
  CDR3 for alpha chain variable domain of TCR clone 51084 (TRAV12-2, TRAJ17)
CAVLFKAAGNKLTF

SEQ ID NO: 102168 - protein, 17 aa, Homo sapiens
  CDR3 for beta chain variable domain of TCR clone 51084 (TRBV11-2, TRBJ2-1)
CASSLSPPGVEYNEQFF

SEQ ID NO: 102169 - protein, 14 aa, Homo sapiens
  CDR3 for alpha chain variable domain of TCR clone 51085 (TRAV36/DV7, TRAJ44)
CCGANTGTASKLTF

SEQ ID NO: 102170 - protein, 16 aa, Homo sapiens
  CDR3 for beta chain variable domain of TCR clone 51085 (TRBV7-9, TRBJ1-2)
CASSLGLSSGEDGYTF

SEQ ID NO: 102171 - protein, 13 aa, Homo sapiens
  CDR3 for alpha chain variable domain of TCR clone 51086 (TRAV21, TRAJ57)
CAVTQGGSEKLVF

SEQ ID NO: 102172 - protein, 15 aa, Homo sapiens
  CDR3 for beta chain variable domain of TCR clone 51086 (TRBV19, TRBJ1-2)
CASSVGQVLNYGYTF

SEQ ID NO: 102173 - protein, 13 aa, Homo sapiens
  CDR3 for alpha chain variable domain of TCR clone 51087 (TRAV12-3, TRAJ33)
CAMSVNSNYQLIW

SEQ ID NO: 102174 - protein, 13 aa, Homo sapiens
  CDR3 for beta chain variable domain of TCR clone 51087 (TRBV11-2, TRBJ2-5)
CASSSTGEETQYF

SEQ ID NO: 102175 - protein, 13 aa, Homo sapiens
  CDR3 for alpha chain variable domain of TCR clone 51088 (TRAV8-6, TRAJ54)
CAVSPQGAQKLVF

SEQ ID NO: 102176 - protein, 14 aa, Homo sapiens
  CDR3 for beta chain variable domain of TCR clone 51088 (TRBV12-4, TRBJ1-1)
CASSLGTGGTEAFF

SEQ ID NO: 102177 - protein, 13 aa, Homo sapiens
  CDR3 for alpha chain variable domain of TCR clone 51089 (TRAV16, TRAJ27)
CALRRTNAGKSTS

SEQ ID NO: 102178 - protein, 15 aa, Homo sapiens
  CDR3 for beta chain variable domain of TCR clone 51089 (TRBV18, TRBJ2-1)
CASSPPSASYNEQFF

SEQ ID NO: 102179 - protein, 12 aa, Homo sapiens
  CDR3 for alpha chain variable domain of TCR clone 51090 (TRAV12-2, TRAJ47)
CAVAEYGNKLVF

SEQ ID NO: 102180 - protein, 14 aa, Homo sapiens
  CDR3 for beta chain variable domain of TCR clone 51090 (TRBV20-1, TRBJ1-1)
CSAMGGTANTEAFL

SEQ ID NO: 102181 - protein, 14 aa, Homo sapiens
  CDR3 for alpha chain variable domain of TCR clone 51091 (TRAV20, TRAJ42)
CAVQAGGSQGNLIF

SEQ ID NO: 102182 - protein, 14 aa, Homo sapiens
  CDR3 for beta chain variable domain of TCR clone 51091 (TRBV28, TRBJ1-2)
CASRIQWANYGYTF

SEQ ID NO: 102183 - protein, 14 aa, Homo sapiens
  CDR3 for alpha chain variable domain of TCR clone 51092 (TRAV13-1, TRAJ44)
CAAKATGTASKLTF

SEQ ID NO: 102184 - protein, 13 aa, Homo sapiens
  CDR3 for beta chain variable domain of TCR clone 51092 (TRBV12-4, TRBJ2-1)
CASSLSPSNEQFF

SEQ ID NO: 102185 - protein, 15 aa, Homo sapiens
  CDR3 for alpha chain variable domain of TCR clone 51093 (TRAV12-1, TRAJ45)
CVVLSGGGGADGLPF

SEQ ID NO: 102186 - protein, 14 aa, Homo sapiens
  CDR3 for beta chain variable domain of TCR clone 51093 (TRBV11-2, TRBJ2-5)
CASSRTGGIETQYF

SEQ ID NO: 102187 - protein, 13 aa, Homo sapiens
  CDR3 for alpha chain variable domain of TCR clone 51094 (TRAV17, TRAJ22)
CAHHSGSARQLTF

SEQ ID NO: 102188 - protein, 14 aa, Homo sapiens
  CDR3 for beta chain variable domain of TCR clone 51094 (TRBV16, TRBJ1-1)
RASSQAGPNTEAFF

SEQ ID NO: 102189 - protein, 23 aa, Homo sapiens
  CDR3 for alpha chain variable domain of TCR clone 51095 (TRAV30, TRAJ43)
CTLRPPSSVTQEPTSAALSDMRF

SEQ ID NO: 102190 - protein, 13 aa, Homo sapiens
  CDR3 for beta chain variable domain of TCR clone 51095 (TRBV12-4, TRBJ2-2)
CASSITGSVELFF

SEQ ID NO: 102191 - protein, 14 aa, Homo sapiens
  CDR3 for alpha chain variable domain of TCR clone 51096 (TRAV16, TRAJ33)
CALSAMDSNYQLIW

SEQ ID NO: 102192 - protein, 15 aa, Homo sapiens
  CDR3 for beta chain variable domain of TCR clone 51096 (TRBV7-2, TRBJ2-3)
CASSSTGLETDTQYF

SEQ ID NO: 102193 - protein, 14 aa, Homo sapiens
  CDR3 for alpha chain variable domain of TCR clone 51097 (TRAV12-2, TRAJ13)
CAVKKTGGYQKVTF

SEQ ID NO: 102194 - protein, 12 aa, Homo sapiens
  CDR3 for beta chain variable domain of TCR clone 51097 (TRBV12-4, TRBJ1-2)
CASSFIWLLLRF

SEQ ID NO: 102195 - protein, 14 aa, Homo sapiens
  CDR3 for alpha chain variable domain of TCR clone 51098 (TRAV35, TRAJ42)
CAGCYGGSQGNLIF

SEQ ID NO: 102196 - protein, 15 aa, Homo sapiens
  CDR3 for beta chain variable domain of TCR clone 51098 (TRBV7-9, TRBJ2-1)
CASSLGWGRANEQFF

SEQ ID NO: 102197 - protein, 14 aa, Homo sapiens
  CDR3 for alpha chain variable domain of TCR clone 51099 (TRAV8-4, TRAJ39)
CAVSLNNAGNMLTF

SEQ ID NO: 102198 - protein, 16 aa, Homo sapiens
  CDR3 for beta chain variable domain of TCR clone 51099 (TRBV13, TRBJ2-7)
CASSSRESGRTYKQYF

SEQ ID NO: 102199 - protein, 13 aa, Homo sapiens
  CDR3 for alpha chain variable domain of TCR clone 51100 (TRAV2, TRAJ40)
CAVVTSGTYKYIF

SEQ ID NO: 102200 - protein, 16 aa, Homo sapiens
  CDR3 for beta chain variable domain of TCR clone 51100 (TRBV19, TRBJ2-2)
CASRSPGTGAAGELFF

SEQ ID NO: 102201 - protein, 12 aa, Homo sapiens
  CDR3 for alpha chain variable domain of TCR clone 51101 (TRAV12-3, TRAJ17)
CATTLTGNKLTF

SEQ ID NO: 102202 - protein, 15 aa, Homo sapiens
  CDR3 for beta chain variable domain of TCR clone 51101 (TRBV28, TRBJ2-3)
CASSPDRQGANTQYF

SEQ ID NO: 102203 - protein, 16 aa, Homo sapiens
  CDR3 for alpha chain variable domain of TCR clone 51102 (TRAV2, TRAJ32)
CAVEDGYGGATNKLIF

SEQ ID NO: 102204 - protein, 13 aa, Homo sapiens
  CDR3 for beta chain variable domain of TCR clone 51102 (TRBV4-1, TRBJ2-2)
CASSQENTGELFF

SEQ ID NO: 102205 - protein, 14 aa, Homo sapiens
  CDR3 for alpha chain variable domain of TCR clone 51103 (TRAV1-2, TRAJ16)
CAVNRFSDGQKLLF

SEQ ID NO: 102206 - protein, 13 aa, Homo sapiens
  CDR3 for beta chain variable domain of TCR clone 51103 (TRBV3-1, TRBJ1-1)
CASSQLQGAEAFF

SEQ ID NO: 102207 - protein, 16 aa, Homo sapiens
  CDR3 for alpha chain variable domain of TCR clone 51104 (TRAV12-3, TRAJ53)
CAMSPGSGGSNYKLTF

SEQ ID NO: 102208 - protein, 11 aa, Homo sapiens
  CDR3 for beta chain variable domain of TCR clone 51104 (TRBV29-1, TRBJ2-7)
CSEDRTGTQYF

SEQ ID NO: 102209 - protein, 16 aa, Homo sapiens
  CDR3 for alpha chain variable domain of TCR clone 51105 (TRAV12-3, TRAJ53)
CAMSPGSGGSNYKLTF

SEQ ID NO: 102210 - protein, 11 aa, Homo sapiens
  CDR3 for beta chain variable domain of TCR clone 51105 (TRBV29-1, TRBJ2-3)
CSEDRTGTQYF

SEQ ID NO: 102211 - protein, 16 aa, Homo sapiens
  CDR3 for alpha chain variable domain of TCR clone 51106 (TRAV12-3, TRAJ53)
CAMSPGSGGSNYKLTF

SEQ ID NO: 102212 - protein, 11 aa, Homo sapiens
  CDR3 for beta chain variable domain of TCR clone 51106 (TRBV29-1, TRBJ2-1)
CSEDRTGTQYF

SEQ ID NO: 102213 - protein, 12 aa, Homo sapiens
  CDR3 for alpha chain variable domain of TCR clone 51107 (TRAV12-3, TRAJ17)
CAMTLTGNKLTF

SEQ ID NO: 102214 - protein, 17 aa, Homo sapiens
  CDR3 for beta chain variable domain of TCR clone 51107 (TRBV7-3, TRBJ2-3)
CASSLMKGMRGADTQYF

SEQ ID NO: 102215 - protein, 17 aa, Homo sapiens
  CDR3 for alpha chain variable domain of TCR clone 51108 (TRAV3, TRAJ42)
CAVRDKDYGGSQGNLIF

SEQ ID NO: 102216 - protein, 15 aa, Homo sapiens
  CDR3 for beta chain variable domain of TCR clone 51108 (TRBV6-6, TRBJ2-7)
CASSYSYGGSYEQYF

SEQ ID NO: 102217 - protein, 11 aa, Homo sapiens
  CDR3 for alpha chain variable domain of TCR clone 51109 (TRAV21, TRAJ27)
CAVRMQANQPL

SEQ ID NO: 102218 - protein, 14 aa, Homo sapiens
  CDR3 for beta chain variable domain of TCR clone 51109 (TRBV7-6, TRBJ2-3)
CASSLGTVTDTQYF

SEQ ID NO: 102219 - protein, 15 aa, Homo sapiens
  CDR3 for alpha chain variable domain of TCR clone 51110 (TRAV13-1, TRAJ52)
CAANAGGTSYGKLTF

SEQ ID NO: 102220 - protein, 11 aa, Homo sapiens
  CDR3 for beta chain variable domain of TCR clone 51110 (TRBV12-4, TRBJ2-3)
CASTATDTQYF

SEQ ID NO: 102221 - protein, 17 aa, Homo sapiens
  CDR3 for alpha chain variable domain of TCR clone 51111 (TRAV23/DV6, TRAJ58)
CAARLLRGETSGSRLTF

SEQ ID NO: 102222 - protein, 16 aa, Homo sapiens
  CDR3 for beta chain variable domain of TCR clone 51111 (TRBV6-1, TRBJ2-5)
CASSETLDRGAETQYF

SEQ ID NO: 102223 - protein, 12 aa, Homo sapiens
  CDR3 for alpha chain variable domain of TCR clone 51112 (TRAV2, TRAJ5)
CALDTGRRALTF

SEQ ID NO: 102224 - protein, 15 aa, Homo sapiens
  CDR3 for beta chain variable domain of TCR clone 51112 (TRBV10-3, TRBJ2-1)
CAISDVQDGAYEQFF

SEQ ID NO: 102225 - protein, 13 aa, Homo sapiens
  CDR3 for alpha chain variable domain of TCR clone 51113 (TRAV2, TRAJ15)
CAVASQAGTALVF

SEQ ID NO: 102226 - protein, 16 aa, Homo sapiens
  CDR3 for beta chain variable domain of TCR clone 51113 (TRBV5-1, TRBJ1-1)
CASSSGGNSLNTEAFF

SEQ ID NO: 102227 - protein, 16 aa, Homo sapiens
  CDR3 for alpha chain variable domain of TCR clone 51114 (TRAV17, TRAJ53)
CATDALSGGSNYKLTF

SEQ ID NO: 102228 - protein, 15 aa, Homo sapiens
  CDR3 for beta chain variable domain of TCR clone 51114 (TRBV7-3, TRBJ2-2)
CASSETGQGTGELFF

SEQ ID NO: 102229 - protein, 11 aa, Homo sapiens
  CDR3 for alpha chain variable domain of TCR clone 51115 (TRAV2, TRAJ33)
CAVDSNYQLIW

SEQ ID NO: 102230 - protein, 14 aa, Homo sapiens
  CDR3 for beta chain variable domain of TCR clone 51115 (TRBV7-9, TRBJ2-1)
CASSPRDSLYEQFF

SEQ ID NO: 102231 - protein, 16 aa, Homo sapiens
  CDR3 for alpha chain variable domain of TCR clone 51116 (TRAV3, TRAJ21)
CAVRYIERGNFNKFYF

SEQ ID NO: 102232 - protein, 13 aa, Homo sapiens
  CDR3 for beta chain variable domain of TCR clone 51116 (TRBV27, TRBJ2-7)
CASSLTTGYEQYF

SEQ ID NO: 102233 - protein, 13 aa, Homo sapiens
  CDR3 for alpha chain variable domain of TCR clone 51117 (TRAV2, TRAJ13)
CAVESGGYQKVTF

SEQ ID NO: 102234 - protein, 12 aa, Homo sapiens
  CDR3 for beta chain variable domain of TCR clone 51117 (TRBV29-1, TRBJ2-3)
CRVTGGADTQYF

SEQ ID NO: 102235 - protein, 12 aa, Homo sapiens
  CDR3 for alpha chain variable domain of TCR clone 51118 (TRAV36/DV7, TRAJ54)
CAVVRGAQKLVF

SEQ ID NO: 102236 - protein, 14 aa, Homo sapiens
  CDR3 for beta chain variable domain of TCR clone 51118 (TRBV7-9, TRBJ1-1)
CASSLKGGNTEAFF

SEQ ID NO: 102237 - protein, 13 aa, Homo sapiens
  CDR3 for alpha chain variable domain of TCR clone 51119 (TRAV23/DV6, TRAJ15)
CAALPAGSNCSDL

SEQ ID NO: 102238 - protein, 14 aa, Homo sapiens
  CDR3 for beta chain variable domain of TCR clone 51119 (TRBV7-9, TRBJ1-2)
CASSRQGANYGYTF

SEQ ID NO: 102239 - protein, 13 aa, Homo sapiens
  CDR3 for alpha chain variable domain of TCR clone 51120 (TRAV35, TRAJ42)
CAGFPRSQGNLIF

SEQ ID NO: 102240 - protein, 14 aa, Homo sapiens
  CDR3 for beta chain variable domain of TCR clone 51120 (TRBV4-1, TRBJ2-2)
CASSQAVNTGELFF

SEQ ID NO: 102241 - protein, 15 aa, Homo sapiens
  CDR3 for alpha chain variable domain of TCR clone 51121 (TRAV38-1, TRAJ37)
CAFIHGSGNTGKLIF

SEQ ID NO: 102242 - protein, 12 aa, Homo sapiens
  CDR3 for beta chain variable domain of TCR clone 51121 (TRBV7-9, TRBJ2-7)
CASSFGSYGQYF

SEQ ID NO: 102243 - protein, 12 aa, Homo sapiens
  CDR3 for alpha chain variable domain of TCR clone 51122 (TRAV29/DV5, TRAJ49)
CAATDTGNQFYL

SEQ ID NO: 102244 - protein, 19 aa, Homo sapiens
  CDR3 for beta chain variable domain of TCR clone 51122 (TRBV25-1, TRBJ2-2)
CAILVYRVDRGRKTGELFF

SEQ ID NO: 102245 - protein, 12 aa, Homo sapiens
  CDR3 for alpha chain variable domain of TCR clone 51123 (TRAV21, TRAJ11)
CAATSGYGTLTF

SEQ ID NO: 102246 - protein, 14 aa, Homo sapiens
  CDR3 for beta chain variable domain of TCR clone 51123 (TRBV20-1, TRBJ2-7)
CSAPELAGVGEQYF

SEQ ID NO: 102247 - protein, 13 aa, Homo sapiens
  CDR3 for alpha chain variable domain of TCR clone 51124 (TRAV12-1, TRAJ11)
CVVNRAGYSTLTF

SEQ ID NO: 102248 - protein, 15 aa, Homo sapiens
  CDR3 for beta chain variable domain of TCR clone 51124 (TRBV7-3, TRBJ2-2)
CASRETGQGTGELFF

SEQ ID NO: 102249 - protein, 12 aa, Homo sapiens
  CDR3 for alpha chain variable domain of TCR clone 51125 (TRAV16, TRAJ21)
CALLGNFNKFYF

SEQ ID NO: 102250 - protein, 15 aa, Homo sapiens
  CDR3 for beta chain variable domain of TCR clone 51125 (TRBV3-1, TRBJ2-2)
CASSQAVRETRELFF

SEQ ID NO: 102251 - protein, 16 aa, Homo sapiens
  CDR3 for alpha chain variable domain of TCR clone 51126 (TRAV8-3, TRAJ44)
CAVGASNTGTASKLTF

SEQ ID NO: 102252 - protein, 15 aa, Homo sapiens
  CDR3 for beta chain variable domain of TCR clone 51126 (TRBV27, TRBJ1-5)
CASTLNRGSNQPQHF

SEQ ID NO: 102253 - protein, 14 aa, Homo sapiens
  CDR3 for alpha chain variable domain of TCR clone 51127 (TRAV1-2, TRAJ8)
CAVREDTGFQKLVF

SEQ ID NO: 102254 - protein, 15 aa, Homo sapiens
  CDR3 for beta chain variable domain of TCR clone 51127 (TRBV7-3, TRBJ2-2)
CAGSETGQGTGELFF

SEQ ID NO: 102255 - protein, 14 aa, Homo sapiens
  CDR3 for alpha chain variable domain of TCR clone 51128 (TRAV12-1, TRAJ8)
CVVNSNTGFQKLVL

SEQ ID NO: 102256 - protein, 17 aa, Homo sapiens
  CDR3 for beta chain variable domain of TCR clone 51128 (TRBV7-8, TRBJ2-6)
CASSAGTGGAGANVLTF

SEQ ID NO: 102257 - protein, 14 aa, Homo sapiens
  CDR3 for alpha chain variable domain of TCR clone 51129 (TRAV1-2, TRAJ16)
CAVNRFSDGQKLLF

SEQ ID NO: 102258 - protein, 13 aa, Homo sapiens
  CDR3 for beta chain variable domain of TCR clone 51129 (TRBV27, TRBJ2-7)
CASSLRHRYEQYF

SEQ ID NO: 102259 - protein, 14 aa, Homo sapiens
  CDR3 for alpha chain variable domain of TCR clone 51130 (TRAV8-3, TRAJ10)
CAVGNAGGGNKLTF

SEQ ID NO: 102260 - protein, 14 aa, Homo sapiens
  CDR3 for beta chain variable domain of TCR clone 51130 (TRBV7-2, TRBJ2-7)
CASSPKTSFYEQYF

SEQ ID NO: 102261 - protein, 14 aa, Homo sapiens
  CDR3 for alpha chain variable domain of TCR clone 51131 (TRAV12-3, TRAJ42)
CAMNYGGSHGNLIF

SEQ ID NO: 102262 - protein, 15 aa, Homo sapiens
  CDR3 for beta chain variable domain of TCR clone 51131 (TRBV5-7, TRBJ1-5)
CASSYGKLWDQPQHF

SEQ ID NO: 102263 - protein, 14 aa, Homo sapiens
  CDR3 for alpha chain variable domain of TCR clone 51132 (TRAV12-1, TRAJ12)
CVVTRMDSSYKLIF

SEQ ID NO: 102264 - protein, 13 aa, Homo sapiens
  CDR3 for beta chain variable domain of TCR clone 51132 (TRBV20-1, TRBJ1-1)
CSARGEGNTEAFF

SEQ ID NO: 102265 - protein, 13 aa, Homo sapiens
  CDR3 for alpha chain variable domain of TCR clone 51133 (TRAV30, TRAJ24)
CGTVTDSWGKLRF

SEQ ID NO: 102266 - protein, 14 aa, Homo sapiens
  CDR3 for beta chain variable domain of TCR clone 51133 (TRBV6-3, TRBJ2-2)
CASTYTPDTGELFF

SEQ ID NO: 102267 - protein, 14 aa, Homo sapiens
  CDR3 for alpha chain variable domain of TCR clone 51134 (TRAV1-1, TRAJ27)
CAVIYNTHAGKSTF

SEQ ID NO: 102268 - protein, 15 aa, Homo sapiens
  CDR3 for beta chain variable domain of TCR clone 51134 (TRBV7-2, TRBJ2-1)
CASSSGLAGGNEQFF

SEQ ID NO: 102269 - protein, 17 aa, Homo sapiens
  CDR3 for alpha chain variable domain of TCR clone 51135 (TRAV3, TRAJ6)
CAVRDGPRAGGSYIPTF

SEQ ID NO: 102270 - protein, 13 aa, Homo sapiens
  CDR3 for beta chain variable domain of TCR clone 51135 (TRBV27, TRBJ2-1)
CASRTLGVGEQFL

SEQ ID NO: 102271 - protein, 19 aa, Homo sapiens
  CDR3 for alpha chain variable domain of TCR clone 51136 (TRAV17, TRAJ17)
CATDGRPGVIKAAGNKLTF

SEQ ID NO: 102272 - protein, 12 aa, Homo sapiens
  CDR3 for beta chain variable domain of TCR clone 51136 (TRBV7-8, TRBJ2-4)
CASSLGGNIQYF

SEQ ID NO: 102273 - protein, 11 aa, Homo sapiens
  CDR3 for alpha chain variable domain of TCR clone 51137 (TRAV21, TRAJ34)
CAHYNTDKLIV

SEQ ID NO: 102274 - protein, 13 aa, Homo sapiens
  CDR3 for beta chain variable domain of TCR clone 51137 (TRBV7-6, TRBJ1-2)
CASSLVADYGYTF

SEQ ID NO: 102275 - protein, 12 aa, Homo sapiens
  CDR3 for alpha chain variable domain of TCR clone 51138 (TRAV16, TRAJ10)
CSRTGGGDKLTF

SEQ ID NO: 102276 - protein, 15 aa, Homo sapiens
  CDR3 for beta chain variable domain of TCR clone 51138 (TRBV6-3, TRBJ2-7)
CASSSPGTVFYGQYF

SEQ ID NO: 102277 - protein, 14 aa, Homo sapiens
  CDR3 for alpha chain variable domain of TCR clone 51139 (TRAV26-1, TRAJ34)
CIVRVAYNTDKLIF

SEQ ID NO: 102278 - protein, 15 aa, Homo sapiens
  CDR3 for beta chain variable domain of TCR clone 51139 (TRBV20-1, TRBJ2-7)
CSVRVPAAYFYEQYF

SEQ ID NO: 102279 - protein, 13 aa, Homo sapiens
  CDR3 for alpha chain variable domain of TCR clone 51140 (TRAV30, TRAJ6)
CGTEAGGSYIPTF

SEQ ID NO: 102280 - protein, 16 aa, Homo sapiens
  CDR3 for beta chain variable domain of TCR clone 51140 (TRBV4-3, TRBJ2-3)
CASSRGLAGEGDTQYF

SEQ ID NO: 102281 - protein, 14 aa, Homo sapiens
  CDR3 for alpha chain variable domain of TCR clone 51141 (TRAV35, TRAJ38)
CAGSNAGSNRKLIW

SEQ ID NO: 102282 - protein, 12 aa, Homo sapiens
  CDR3 for beta chain variable domain of TCR clone 51141 (TRBV19, TRBJ2-7)
CASTDRGYEQYF

SEQ ID NO: 102283 - protein, 15 aa, Homo sapiens
  CDR3 for alpha chain variable domain of TCR clone 51142 (TRAV30, TRAJ32)
CGTEILGGATNKLIF

SEQ ID NO: 102284 - protein, 17 aa, Homo sapiens
  CDR3 for beta chain variable domain of TCR clone 51142 (TRBV5-4, TRBJ2-1)
CASSSAGGRGPYNEHFF

SEQ ID NO: 102285 - protein, 16 aa, Homo sapiens
  CDR3 for alpha chain variable domain of TCR clone 51143 (TRAV16, TRAJ52)
CALSAASGTSYGKLTF

SEQ ID NO: 102286 - protein, 12 aa, Homo sapiens
  CDR3 for beta chain variable domain of TCR clone 51143 (TRBV12-4, TRBJ1-3)
CASSFSGNTIYF

SEQ ID NO: 102287 - protein, 13 aa, Homo sapiens
  CDR3 for alpha chain variable domain of TCR clone 51144 (TRAV27, TRAJ56)
CAGKPGANSKPTF

SEQ ID NO: 102288 - protein, 18 aa, Homo sapiens
  CDR3 for beta chain variable domain of TCR clone 51144 (TRBV11-2, TRBJ2-3)
CASSLGGASRGAPNTQYF

SEQ ID NO: 102289 - protein, 15 aa, Homo sapiens
  CDR3 for alpha chain variable domain of TCR clone 51145 (TRAV27, TRAJ45)
CAPVDSGGGADGLTF

SEQ ID NO: 102290 - protein, 22 aa, Homo sapiens
  CDR3 for beta chain variable domain of TCR clone 51145 (TRBV23-1, TRBJ1-5)
CASSQSRGQGWGAYISTSILVM

SEQ ID NO: 102291 - protein, 14 aa, Homo sapiens
  CDR3 for alpha chain variable domain of TCR clone 51146 (TRAV13-2, TRAJ9)
CAENLETGGFKTIF

SEQ ID NO: 102292 - protein, 13 aa, Homo sapiens
  CDR3 for beta chain variable domain of TCR clone 51146 (TRBV9, TRBJ2-1)
CASSPSGGNEQFF

SEQ ID NO: 102293 - protein, 13 aa, Homo sapiens
  CDR3 for alpha chain variable domain of TCR clone 51147 (TRAV1-1, TRAJ29)
CAATLSGNTPLVF

SEQ ID NO: 102294 - protein, 14 aa, Homo sapiens
  CDR3 for beta chain variable domain of TCR clone 51147 (TRBV12-5, TRBJ2-5)
CASGSRTHQETQYF

SEQ ID NO: 102295 - protein, 13 aa, Homo sapiens
  CDR3 for alpha chain variable domain of TCR clone 51148 (TRAV12-2, TRAJ37)
CAGGSGNTGKLIF

SEQ ID NO: 102296 - protein, 14 aa, Homo sapiens
  CDR3 for beta chain variable domain of TCR clone 51148 (TRBV6-1, TRBJ2-6)
CASQQGAGANVLAF

SEQ ID NO: 102297 - protein, 14 aa, Homo sapiens
  CDR3 for alpha chain variable domain of TCR clone 51149 (TRAV1-1, TRAJ35)
CAVRSIGFGNVLHC

SEQ ID NO: 102298 - protein, 14 aa, Homo sapiens
  CDR3 for beta chain variable domain of TCR clone 51149 (TRBV19, TRBJ2-1)
CASPTFVLSGGQFF

SEQ ID NO: 102299 - protein, 14 aa, Homo sapiens
  CDR3 for alpha chain variable domain of TCR clone 51150 (TRAV26-1, TRAJ49)
CVVRLTNTGNQFYF

SEQ ID NO: 102300 - protein, 11 aa, Homo sapiens
  CDR3 for beta chain variable domain of TCR clone 51150 (TRBV29-1, TRBJ2-5)
CSEDRTGTQYF

SEQ ID NO: 102301 - protein, 14 aa, Homo sapiens
  CDR3 for alpha chain variable domain of TCR clone 51151 (TRAV1-2, TRAJ16)
CAVNRFSDGQKLLF

SEQ ID NO: 102302 - protein, 13 aa, Homo sapiens
  CDR3 for beta chain variable domain of TCR clone 51151 (TRBV19, TRBJ1-2)
CASSVPGQDGCTF

SEQ ID NO: 102303 - protein, 15 aa, Homo sapiens
  CDR3 for alpha chain variable domain of TCR clone 51152 (TRAV1-2, TRAJ24)
CAVRGSTDSWGKFQF

SEQ ID NO: 102304 - protein, 16 aa, Homo sapiens
  CDR3 for beta chain variable domain of TCR clone 51152 (TRBV20-1, TRBJ2-1)
CGAATQGPVSYNEQFF

SEQ ID NO: 102305 - protein, 14 aa, Homo sapiens
  CDR3 for alpha chain variable domain of TCR clone 51153 (TRAV12-2, TRAJ13)
CAVKKTGGYQKVTF

SEQ ID NO: 102306 - protein, 14 aa, Homo sapiens
  CDR3 for beta chain variable domain of TCR clone 51153 (TRBV19, TRBJ2-5)
CASSMTGQQETQYF

SEQ ID NO: 102307 - protein, 12 aa, Homo sapiens
  CDR3 for alpha chain variable domain of TCR clone 51154 (TRAV21, TRAJ31)
CAVCGNNARLMF

SEQ ID NO: 102308 - protein, 16 aa, Homo sapiens
  CDR3 for beta chain variable domain of TCR clone 51154 (TRBV27, TRBJ2-5)
CASSYGPGGQKETQYF

SEQ ID NO: 102309 - protein, 14 aa, Homo sapiens
  CDR3 for alpha chain variable domain of TCR clone 51155 (TRAV13-1, TRAJ44)
CAAKAAGTASKLTF

SEQ ID NO: 102310 - protein, 13 aa, Homo sapiens
  CDR3 for beta chain variable domain of TCR clone 51155 (TRBV5-5, TRBJ1-2)
CASSFWRGEDCTF

SEQ ID NO: 102311 - protein, 14 aa, Homo sapiens
  CDR3 for alpha chain variable domain of TCR clone 51156 (TRAV26-1, TRAJ49)
CIVRLTNTGNQFYF

SEQ ID NO: 102312 - protein, 13 aa, Homo sapiens
  CDR3 for beta chain variable domain of TCR clone 51156 (TRBV4-1, TRBJ2-7)
CASSQGQAYEQYL

SEQ ID NO: 102313 - protein, 16 aa, Homo sapiens
  CDR3 for alpha chain variable domain of TCR clone 51157 (TRAV29/DV5, TRAJ30)
QCTSVQQANRDDKIIF

SEQ ID NO: 102314 - protein, 13 aa, Homo sapiens
  CDR3 for beta chain variable domain of TCR clone 51157 (TRBV12-5, TRBJ2-3)
CASQNRGIDTQYF

SEQ ID NO: 102315 - protein, 13 aa, Homo sapiens
  CDR3 for alpha chain variable domain of TCR clone 51158 (TRAV1-1, TRAJ9)
CAAKNTGGFKTIF

SEQ ID NO: 102316 - protein, 14 aa, Homo sapiens
  CDR3 for beta chain variable domain of TCR clone 51158 (TRBV20-1, TRBJ2-1)
CSAQIGGSATEQFF

SEQ ID NO: 102317 - protein, 13 aa, Homo sapiens
  CDR3 for alpha chain variable domain of TCR clone 51159 (TRAV12-3, TRAJ13)
CAMSSGGYQKVTF

SEQ ID NO: 102318 - protein, 14 aa, Homo sapiens
  CDR3 for beta chain variable domain of TCR clone 51159 (TRBV7-3, TRBJ1-1)
CASSLGTGYTEAFF

SEQ ID NO: 102319 - protein, 13 aa, Homo sapiens
  CDR3 for alpha chain variable domain of TCR clone 51160 (TRAV3, TRAJ20)
CCEAFCNDHKLSF

SEQ ID NO: 102320 - protein, 15 aa, Homo sapiens
  CDR3 for beta chain variable domain of TCR clone 51160 (TRBV19, TRBJ2-6)
CASVRRDSGANVLTF

SEQ ID NO: 102321 - protein, 16 aa, Homo sapiens
  CDR3 for alpha chain variable domain of TCR clone 51161 (TRAV17, TRAJ52)
CATSNAGGTSYGKLTL

SEQ ID NO: 102322 - protein, 13 aa, Homo sapiens
  CDR3 for beta chain variable domain of TCR clone 51161 (TRBV27, TRBJ1-6)
CASSLVLVSPLHF

SEQ ID NO: 102323 - protein, 13 aa, Homo sapiens
  CDR3 for alpha chain variable domain of TCR clone 51162 (TRAV21, TRAJ20)
CAVGLRVDYKLSF

SEQ ID NO: 102324 - protein, 15 aa, Homo sapiens
  CDR3 for beta chain variable domain of TCR clone 51162 (TRBV24-1, TRBJ1-4)
CATSDPQGADEKLFF

SEQ ID NO: 102325 - protein, 13 aa, Homo sapiens
  CDR3 for alpha chain variable domain of TCR clone 51163 (TRAV27, TRAJ41)
CAGEGNSRYALNF

SEQ ID NO: 102326 - protein, 14 aa, Homo sapiens
  CDR3 for beta chain variable domain of TCR clone 51163 (TRBV7-2, TRBJ1-1)
CASSFLTGTTEAFF

SEQ ID NO: 102327 - protein, 17 aa, Homo sapiens
  CDR3 for alpha chain variable domain of TCR clone 51164 (TRAV3, TRAJ42)
CAVRDRDYGGGQGNLIF

SEQ ID NO: 102328 - protein, 13 aa, Homo sapiens
  CDR3 for beta chain variable domain of TCR clone 51164 (TRBV10-3, TRBJ2-7)
CASKLAVNYEQYF

SEQ ID NO: 102329 - protein, 14 aa, Homo sapiens
  CDR3 for alpha chain variable domain of TCR clone 51165 (TRAV12-2, TRAJ17)
CAVLFKAAGNKLTF

SEQ ID NO: 102330 - protein, 11 aa, Homo sapiens
  CDR3 for beta chain variable domain of TCR clone 51165 (TRBV12-4, TRBJ2-3)
CASTATDTQYF

SEQ ID NO: 102331 - protein, 16 aa, Homo sapiens
  CDR3 for alpha chain variable domain of TCR clone 51166 (TRAV3, TRAJ4)
CAVRPSPSGGYNNLIF

SEQ ID NO: 102332 - protein, 12 aa, Homo sapiens
  CDR3 for beta chain variable domain of TCR clone 51166 (TRBV7-9, TRBJ2-7)
CASSQGVYEQYF

SEQ ID NO: 102333 - protein, 10 aa, Homo sapiens
  CDR3 for alpha chain variable domain of TCR clone 51167 (TRAV1-2, TRAJ31)
CAFFDARLMF

SEQ ID NO: 102334 - protein, 14 aa, Homo sapiens
  CDR3 for beta chain variable domain of TCR clone 51167 (TRBV12-4, TRBJ1-3)
CASSLRGSGNTIYF

SEQ ID NO: 102335 - protein, 14 aa, Homo sapiens
  CDR3 for alpha chain variable domain of TCR clone 51168 (TRAV12-3, TRAJ10)
SHLPLTGGGNKLTF

SEQ ID NO: 102336 - protein, 15 aa, Homo sapiens
  CDR3 for beta chain variable domain of TCR clone 51168 (TRBV19, TRBJ2-1)
CASSSPGVPLDEQFF

SEQ ID NO: 102337 - protein, 12 aa, Homo sapiens
  CDR3 for alpha chain variable domain of TCR clone 51169 (TRAV35, TRAJ43)
CAGPDNNNDMRF

SEQ ID NO: 102338 - protein, 13 aa, Homo sapiens
  CDR3 for beta chain variable domain of TCR clone 51169 (TRBV15, TRBJ2-5)
CATSRDREETQYF

SEQ ID NO: 102339 - protein, 15 aa, Homo sapiens
  CDR3 for alpha chain variable domain of TCR clone 51170 (TRAV2, TRAJ22)
CAVPSRGGSARQLSF

SEQ ID NO: 102340 - protein, 11 aa, Homo sapiens
  CDR3 for beta chain variable domain of TCR clone 51170 (TRBV27, TRBJ2-3)
CASSLGDTQYF

SEQ ID NO: 102341 - protein, 15 aa, Homo sapiens
  CDR3 for alpha chain variable domain of TCR clone 51171 (TRAV21, TRAJ53)
CATLNSGGSNYKLTF

SEQ ID NO: 102342 - protein, 14 aa, Homo sapiens
  CDR3 for beta chain variable domain of TCR clone 51171 (TRBV7-2, TRBJ2-7)
CASRSQGAAHEQYF

SEQ ID NO: 102343 - protein, 15 aa, Homo sapiens
  CDR3 for alpha chain variable domain of TCR clone 51172 (TRAV35, TRAJ40)
CAGQLGTSGTYKYIF

SEQ ID NO: 102344 - protein, 16 aa, Homo sapiens
  CDR3 for beta chain variable domain of TCR clone 51172 (TRBV12-5, TRBJ2-5)
CASGPRTSGNQETQYF

SEQ ID NO: 102345 - protein, 19 aa, Homo sapiens
  CDR3 for alpha chain variable domain of TCR clone 51173 (TRAV3, TRAJ6)
CAVRDRNPSRSGGSYIPTI

SEQ ID NO: 102346 - protein, 15 aa, Homo sapiens
  CDR3 for beta chain variable domain of TCR clone 51173 (TRBV18, TRBJ2-7)
CASSPTFMDSYEQYF

SEQ ID NO: 102347 - protein, 16 aa, Homo sapiens
  CDR3 for alpha chain variable domain of TCR clone 51174 (TRAV12-3, TRAJ53)
CAMSPGSGGSNYKLTF

SEQ ID NO: 102348 - protein, 14 aa, Homo sapiens
  CDR3 for beta chain variable domain of TCR clone 51174 (TRBV12-5, TRBJ2-5)
CASDSRTHQETQYF

SEQ ID NO: 102349 - protein, 12 aa, Homo sapiens
  CDR3 for alpha chain variable domain of TCR clone 51175 (TRAV35, TRAJ39)
LAPNNADNMLTF

SEQ ID NO: 102350 - protein, 16 aa, Homo sapiens
  CDR3 for beta chain variable domain of TCR clone 51175 (TRBV2, TRBJ2-3)
CASSTSVEGVTDTQYF

SEQ ID NO: 102351 - protein, 13 aa, Homo sapiens
  CDR3 for alpha chain variable domain of TCR clone 51176 (TRAV35, TRAJ57)
CAGSQGGSEKLVF

SEQ ID NO: 102352 - protein, 12 aa, Homo sapiens
  CDR3 for beta chain variable domain of TCR clone 51176 (TRBV7-3, TRBJ2-5)
RASSPGKETQYF

SEQ ID NO: 102353 - protein, 12 aa, Homo sapiens
  CDR3 for alpha chain variable domain of TCR clone 51177 (TRAV12-1, TRAJ34)
CVVAGATDKLIF

SEQ ID NO: 102354 - protein, 12 aa, Homo sapiens
  CDR3 for beta chain variable domain of TCR clone 51177 (TRBV7-9, TRBJ1-1)
CTSSLVRGEAFF

SEQ ID NO: 102355 - protein, 10 aa, Homo sapiens
  CDR3 for alpha chain variable domain of TCR clone 51178 (TRAV29/DV5, TRAJ7)
CALPAWRLAF

SEQ ID NO: 102356 - protein, 14 aa, Homo sapiens
  CDR3 for beta chain variable domain of TCR clone 51178 (TRBV13, TRBJ2-5)
CASSLGPRGETQYF

SEQ ID NO: 102357 - protein, 15 aa, Homo sapiens
  CDR3 for alpha chain variable domain of TCR clone 51179 (TRAV13-1, TRAJ37)
CAATDGSSNTGKLIF

SEQ ID NO: 102358 - protein, 17 aa, Homo sapiens
  CDR3 for beta chain variable domain of TCR clone 51179 (TRBV2, TRBJ2-3)
CASSAGLAGYIGDTQYF

SEQ ID NO: 102359 - protein, 11 aa, Homo sapiens
  CDR3 for alpha chain variable domain of TCR clone 51180 (TRAV35, TRAJ30)
CAGPGDDKTIF

SEQ ID NO: 102360 - protein, 14 aa, Homo sapiens
  CDR3 for beta chain variable domain of TCR clone 51180 (TRBV7-6, TRBJ1-6)
CASSQAGGGSPLHF

SEQ ID NO: 102361 - protein, 15 aa, Homo sapiens
  CDR3 for alpha chain variable domain of TCR clone 51181 (TRAV12-3, TRAJ49)
CAMAVTPNTGNQFYF

SEQ ID NO: 102362 - protein, 16 aa, Homo sapiens
  CDR3 for beta chain variable domain of TCR clone 51181 (TRBV12-5, TRBJ2-5)
CASGPRTSGNQETQYF

SEQ ID NO: 102363 - protein, 14 aa, Homo sapiens
  CDR3 for alpha chain variable domain of TCR clone 51182 (TRAV12-2, TRAJ44)
CAVSKAGTASKLTF

SEQ ID NO: 102364 - protein, 12 aa, Homo sapiens
  CDR3 for beta chain variable domain of TCR clone 51182 (TRBV19, TRBJ1-4)
CASKDWPRGLFF

SEQ ID NO: 102365 - protein, 13 aa, Homo sapiens
  CDR3 for alpha chain variable domain of TCR clone 51183 (TRAV2, TRAJ29)
CAAGNSGNTPLVF

SEQ ID NO: 102366 - protein, 15 aa, Homo sapiens
  CDR3 for beta chain variable domain of TCR clone 51183 (TRBV7-9, TRBJ1-5)
CASSQGHQPNQPQHF

SEQ ID NO: 102367 - protein, 11 aa, Homo sapiens
  CDR3 for alpha chain variable domain of TCR clone 51184 (TRAV35, TRAJ30)
CAGPRDDKIIF

SEQ ID NO: 102368 - protein, 14 aa, Homo sapiens
  CDR3 for beta chain variable domain of TCR clone 51184 (TRBV7-6, TRBJ1-6)
CASSQAGGGSPLHF

SEQ ID NO: 102369 - protein, 14 aa, Homo sapiens
  CDR3 for alpha chain variable domain of TCR clone 51185 (TRAV12-3, TRAJ10)
SHLPLPGGGNKLTF

SEQ ID NO: 102370 - protein, 16 aa, Homo sapiens
  CDR3 for beta chain variable domain of TCR clone 51185 (TRBV19, TRBJ1-1)
CASRFGGPVTGTEAFF

SEQ ID NO: 102371 - protein, 14 aa, Homo sapiens
  CDR3 for alpha chain variable domain of TCR clone 51186 (TRAV20, TRAJ56)
FAVQFGGANSKLTF

SEQ ID NO: 102372 - protein, 14 aa, Homo sapiens
  CDR3 for beta chain variable domain of TCR clone 51186 (TRBV20-1, TRBJ2-7)
CSAKRGRSSYEQYF

SEQ ID NO: 102373 - protein, 17 aa, Homo sapiens
  CDR3 for alpha chain variable domain of TCR clone 51187 (TRAV8-3, TRAJ50)
CAVGAVDTETSYDKVIF

SEQ ID NO: 102374 - protein, 13 aa, Homo sapiens
  CDR3 for beta chain variable domain of TCR clone 51187 (TRBV7-9, TRBJ2-2)
CASSSAGTGELFL

SEQ ID NO: 102375 - protein, 14 aa, Homo sapiens
  CDR3 for alpha chain variable domain of TCR clone 51188 (TRAV17, TRAJ57)
CATDPQGGSEKLVL

SEQ ID NO: 102376 - protein, 16 aa, Homo sapiens
  CDR3 for beta chain variable domain of TCR clone 51188 (TRBV27, TRBJ2-2)
CASSFRGLVRTGELFF

SEQ ID NO: 102377 - protein, 13 aa, Homo sapiens
  CDR3 for alpha chain variable domain of TCR clone 51189 (TRAV21, TRAJ57)
CAVTQGGSEKLVF

SEQ ID NO: 102378 - protein, 14 aa, Homo sapiens
  CDR3 for beta chain variable domain of TCR clone 51189 (TRBV6-1, TRBJ1-3)
CASVQGGGGNTIYF

SEQ ID NO: 102379 - protein, 14 aa, Homo sapiens
  CDR3 for alpha chain variable domain of TCR clone 51190 (TRAV17, TRAJ57)
CATDPQGGSEKLVF

SEQ ID NO: 102380 - protein, 14 aa, Homo sapiens
  CDR3 for beta chain variable domain of TCR clone 51190 (TRBV5-1, TRBJ2-7)
CASSRGESLYEQYF

SEQ ID NO: 102381 - protein, 13 aa, Homo sapiens
  CDR3 for alpha chain variable domain of TCR clone 51191 (TRAV12-3, TRAJ7)
CAMTPYGNNRLAF

SEQ ID NO: 102382 - protein, 16 aa, Homo sapiens
  CDR3 for beta chain variable domain of TCR clone 51191 (TRBV20-1, TRBJ1-4)
CSARPYGGALNEKLFF

SEQ ID NO: 102383 - protein, 16 aa, Homo sapiens
  CDR3 for alpha chain variable domain of TCR clone 51192 (TRAV3, TRAJ6)
CAVRDEMGRRKLHTYI

SEQ ID NO: 102384 - protein, 15 aa, Homo sapiens
  CDR3 for beta chain variable domain of TCR clone 51192 (TRBV5-1, TRBJ2-7)
CASSLGDFTTYEQYF

SEQ ID NO: 102385 - protein, 20 aa, Homo sapiens
  CDR3 for alpha chain variable domain of TCR clone 51193 (TRAV26-1, TRAJ42)
CCVLLHRQTYYGGSRGNLIF

SEQ ID NO: 102386 - protein, 16 aa, Homo sapiens
  CDR3 for beta chain variable domain of TCR clone 51193 (TRBV7-3, TRBJ2-2)
CASSLKRGTLSGELFF

SEQ ID NO: 102387 - protein, 13 aa, Homo sapiens
  CDR3 for alpha chain variable domain of TCR clone 51194 (TRAV27, TRAJ49)
CAPRPYTGNQFYF

SEQ ID NO: 102388 - protein, 15 aa, Homo sapiens
  CDR3 for beta chain variable domain of TCR clone 51194 (TRBV11-3, TRBJ2-3)
CASLKDGREGDTQYF

SEQ ID NO: 102389 - protein, 15 aa, Homo sapiens
  CDR3 for alpha chain variable domain of TCR clone 51195 (TRAV8-6, TRAJ49)
CAVSRASNTGNQFYF

SEQ ID NO: 102390 - protein, 12 aa, Homo sapiens
  CDR3 for beta chain variable domain of TCR clone 51195 (TRBV18, TRBJ2-3)
CASSPLSDTQYF

SEQ ID NO: 102391 - protein, 15 aa, Homo sapiens
  CDR3 for alpha chain variable domain of TCR clone 51196 (TRAV12-1, TRAJ44)
CVANLPTGTASKLTF

SEQ ID NO: 102392 - protein, 13 aa, Homo sapiens
  CDR3 for beta chain variable domain of TCR clone 51196 (TRBV6-5, TRBJ2-5)
CASSPQGGETQYF

SEQ ID NO: 102393 - protein, 14 aa, Homo sapiens
  CDR3 for alpha chain variable domain of TCR clone 51197 (TRAV12-2, TRAJ6)
CAVIASGGNYIPTF

SEQ ID NO: 102394 - protein, 16 aa, Homo sapiens
  CDR3 for beta chain variable domain of TCR clone 51197 (TRBV7-2, TRBJ2-3)
CASSLAGAGSGDTQYF

SEQ ID NO: 102395 - protein, 13 aa, Homo sapiens
  CDR3 for alpha chain variable domain of TCR clone 51198 (TRAV21, TRAJ27)
FAALPGNAGKSTF

SEQ ID NO: 102396 - protein, 14 aa, Homo sapiens
  CDR3 for beta chain variable domain of TCR clone 51198 (TRBV7-6, TRBJ2-3)
CASSLGTVADTQYF

SEQ ID NO: 102397 - protein, 16 aa, Homo sapiens
  CDR3 for alpha chain variable domain of TCR clone 51199 (TRAV29/DV5, TRAJ36)
CAASAHYRSGANNLFF

SEQ ID NO: 102398 - protein, 13 aa, Homo sapiens
  CDR3 for beta chain variable domain of TCR clone 51199 (TRBV19, TRBJ1-2)
CASSVPGQDGYTF

SEQ ID NO: 102399 - protein, 15 aa, Homo sapiens
  CDR3 for alpha chain variable domain of TCR clone 51200 (TRAV2, TRAJ9)
CAVEDRGTGGFKTIF

SEQ ID NO: 102400 - protein, 16 aa, Homo sapiens
  CDR3 for beta chain variable domain of TCR clone 51200 (TRBV24-1, TRBJ2-3)
CATSDPGTGATATQYF

SEQ ID NO: 102401 - protein, 16 aa, Homo sapiens
  CDR3 for alpha chain variable domain of TCR clone 51201 (TRAV8-3, TRAJ13)
FAVGAYPSGGYQKVTF

SEQ ID NO: 102402 - protein, 15 aa, Homo sapiens
  CDR3 for beta chain variable domain of TCR clone 51201 (TRBV19, TRBJ1-5)
CASSIVWADNQPQHF

SEQ ID NO: 102403 - protein, 13 aa, Homo sapiens
  CDR3 for alpha chain variable domain of TCR clone 51202 (TRAV12-3, TRAJ13)
CAMTSGGYQKVTF

SEQ ID NO: 102404 - protein, 13 aa, Homo sapiens
  CDR3 for beta chain variable domain of TCR clone 51202 (TRBV20-1, TRBJ2-2)
CSALSRGAGELFF

SEQ ID NO: 102405 - protein, 14 aa, Homo sapiens
  CDR3 for alpha chain variable domain of TCR clone 51203 (TRAV3, TRAJ9)
CVVRLNTGGFKTIF

SEQ ID NO: 102406 - protein, 15 aa, Homo sapiens
  CDR3 for beta chain variable domain of TCR clone 51203 (TRBV7-2, TRBJ2-1)
CASSLASGRVNEQFF

SEQ ID NO: 102407 - protein, 16 aa, Homo sapiens
  CDR3 for alpha chain variable domain of TCR clone 51204 (TRAV25, TRAJ24)
CAQRRGTTDSWGKLQF

SEQ ID NO: 102408 - protein, 14 aa, Homo sapiens
  CDR3 for beta chain variable domain of TCR clone 51204 (TRBV6-6, TRBJ1-5)
CASSYGPANQHQHF

SEQ ID NO: 102409 - protein, 11 aa, Homo sapiens
  CDR3 for alpha chain variable domain of TCR clone 51205 (TRAV12-1, TRAJ21)
CVVNNFNKLYF

SEQ ID NO: 102410 - protein, 14 aa, Homo sapiens
  CDR3 for beta chain variable domain of TCR clone 51205 (TRBV18, TRBJ2-7)
CASSPRGGAYEQYF

SEQ ID NO: 102411 - protein, 13 aa, Homo sapiens
  CDR3 for alpha chain variable domain of TCR clone 51206 (TRAV20, TRAJ37)
CAGCSSNTGKLSL

SEQ ID NO: 102412 - protein, 11 aa, Homo sapiens
  CDR3 for beta chain variable domain of TCR clone 51206 (TRBV12-4, TRBJ2-3)
CASTATDTQYF

SEQ ID NO: 102413 - protein, 13 aa, Homo sapiens
  CDR3 for alpha chain variable domain of TCR clone 51207 (TRAV30, TRAJ24)
CGTVTDSWGRLQF

SEQ ID NO: 102414 - protein, 15 aa, Homo sapiens
  CDR3 for beta chain variable domain of TCR clone 51207 (TRBV19, TRBJ1-1)
CASTSGQIQNTEAFF

SEQ ID NO: 102415 - protein, 14 aa, Homo sapiens
  CDR3 for alpha chain variable domain of TCR clone 51208 (TRAV1-2, TRAJ16)
CAVNRFSDGQKLLF

SEQ ID NO: 102416 - protein, 14 aa, Homo sapiens
  CDR3 for beta chain variable domain of TCR clone 51208 (TRBV7-9, TRBJ2-3)
CASSLEDGTDTQYS

SEQ ID NO: 102417 - protein, 11 aa, Homo sapiens
  CDR3 for alpha chain variable domain of TCR clone 51209 (TRAV12-3, TRAJ43)
FAMSVSNDMRF

SEQ ID NO: 102418 - protein, 13 aa, Homo sapiens
  CDR3 for beta chain variable domain of TCR clone 51209 (TRBV20-1, TRBJ1-1)
CSAPLGGGTEAFF

SEQ ID NO: 102419 - protein, 14 aa, Homo sapiens
  CDR3 for alpha chain variable domain of TCR clone 51210 (TRAV26-1, TRAJ5)
CIVRVRFNRRALTF

SEQ ID NO: 102420 - protein, 13 aa, Homo sapiens
  CDR3 for beta chain variable domain of TCR clone 51210 (TRBV2, TRBJ2-7)
CASSVVEAYEQYF

SEQ ID NO: 102421 - protein, 14 aa, Homo sapiens
  CDR3 for alpha chain variable domain of TCR clone 51211 (TRAV29/DV5, TRAJ36)
CAARRKTGANNLFF

SEQ ID NO: 102422 - protein, 14 aa, Homo sapiens
  CDR3 for beta chain variable domain of TCR clone 51211 (TRBV12-5, TRBJ2-5)
CASGSLTHQETQYF

SEQ ID NO: 102423 - protein, 12 aa, Homo sapiens
  CDR3 for alpha chain variable domain of TCR clone 51212 (TRAV1-2, TRAJ9)
CAGYTGGFNTIF

SEQ ID NO: 102424 - protein, 15 aa, Homo sapiens
  CDR3 for beta chain variable domain of TCR clone 51212 (TRBV11-2, TRBJ2-1)
CASSPAGQSLNEQFF

SEQ ID NO: 102425 - protein, 11 aa, Homo sapiens
  CDR3 for alpha chain variable domain of TCR clone 51213 (TRAV12-2, TRAJ29)
CAVTPRSPLVF

SEQ ID NO: 102426 - protein, 16 aa, Homo sapiens
  CDR3 for beta chain variable domain of TCR clone 51213 (TRBV19, TRBJ1-5)
CASSIDRGGPRQPQHF

SEQ ID NO: 102427 - protein, 11 aa, Homo sapiens
  CDR3 for alpha chain variable domain of TCR clone 51214 (TRAV1-2, TRAJ20)
CAVANDYKLSF

SEQ ID NO: 102428 - protein, 18 aa, Homo sapiens
  CDR3 for beta chain variable domain of TCR clone 51214 (TRBV20-1, TRBJ2-6)
CSAESTPTHGSGANVLTF

SEQ ID NO: 102429 - protein, 13 aa, Homo sapiens
  CDR3 for alpha chain variable domain of TCR clone 51215 (TRAV8-3, TRAJ44)
CAVVPGIASKLTF

SEQ ID NO: 102430 - protein, 14 aa, Homo sapiens
  CDR3 for beta chain variable domain of TCR clone 51215 (TRBV11-2, TRBJ2-3)
CASRRLARTDTQYF

SEQ ID NO: 102431 - protein, 12 aa, Homo sapiens
  CDR3 for alpha chain variable domain of TCR clone 51216 (TRAV23/DV6, TRAJ49)
CAARRTGNQFYF

SEQ ID NO: 102432 - protein, 13 aa, Homo sapiens
  CDR3 for beta chain variable domain of TCR clone 51216 (TRBV24-1, TRBJ2-2)
CATSETNTGELFF

SEQ ID NO: 102433 - protein, 14 aa, Homo sapiens
  CDR3 for alpha chain variable domain of TCR clone 51217 (TRAV8-3, TRAJ9)
CAVVYNTGGFKTIF

SEQ ID NO: 102434 - protein, 14 aa, Homo sapiens
  CDR3 for beta chain variable domain of TCR clone 51217 (TRBV19, TRBJ2-1)
CASPTFVLSGEQFF

SEQ ID NO: 102435 - protein, 14 aa, Homo sapiens
  CDR3 for alpha chain variable domain of TCR clone 51218 (TRAV8-4, TRAJ17)
CAVSEGAAGNKLTF

SEQ ID NO: 102436 - protein, 13 aa, Homo sapiens
  CDR3 for beta chain variable domain of TCR clone 51218 (TRBV19, TRBJ2-1)
CTSSMYRVNEQFF

SEQ ID NO: 102437 - protein, 15 aa, Homo sapiens
  CDR3 for alpha chain variable domain of TCR clone 51219 (TRAV3, TRAJ5)
CAVRDLDTGRRALTF

SEQ ID NO: 102438 - protein, 14 aa, Homo sapiens
  CDR3 for beta chain variable domain of TCR clone 51219 (TRBV7-6, TRBJ2-3)
CASSLGTVTDTQYF

SEQ ID NO: 102439 - protein, 12 aa, Homo sapiens
  CDR3 for alpha chain variable domain of TCR clone 51220 (TRAV24, TRAJ41)
CASRNSGYALNF

SEQ ID NO: 102440 - protein, 11 aa, Homo sapiens
  CDR3 for beta chain variable domain of TCR clone 51220 (TRBV29-1, TRBJ2-5)
CSEDRTGTQYF

SEQ ID NO: 102441 - protein, 11 aa, Homo sapiens
  CDR3 for alpha chain variable domain of TCR clone 51221 (TRAV21, TRAJ39)
LLVNAGNMLNF

SEQ ID NO: 102442 - protein, 16 aa, Homo sapiens
  CDR3 for beta chain variable domain of TCR clone 51221 (TRBV9, TRBJ2-7)
CASSVGLGGGTYEQYF

SEQ ID NO: 102443 - protein, 14 aa, Homo sapiens
  CDR3 for alpha chain variable domain of TCR clone 51222 (TRAV26-1, TRAJ34)
CIVRVAYTTDKLIF

SEQ ID NO: 102444 - protein, 15 aa, Homo sapiens
  CDR3 for beta chain variable domain of TCR clone 51222 (TRBV20-1, TRBJ2-7)
CSARVPAAYFYEQYF

SEQ ID NO: 102445 - protein, 13 aa, Homo sapiens
  CDR3 for alpha chain variable domain of TCR clone 51223 (TRAV8-3, TRAJ44)
CAVVPGTASTLTF

SEQ ID NO: 102446 - protein, 14 aa, Homo sapiens
  CDR3 for beta chain variable domain of TCR clone 51223 (TRBV11-2, TRBJ2-3)
CASSRLARTDTQYF

SEQ ID NO: 102447 - protein, 13 aa, Homo sapiens
  CDR3 for alpha chain variable domain of TCR clone 51224 (TRAV2, TRAJ40)
CAVVTSGTYKYIF

SEQ ID NO: 102448 - protein, 12 aa, Homo sapiens
  CDR3 for beta chain variable domain of TCR clone 51224 (TRBV11-2, TRBJ2-1)
CASSPGNNERFF

SEQ ID NO: 102449 - protein, 16 aa, Homo sapiens
  CDR3 for alpha chain variable domain of TCR clone 51225 (TRAV17, TRAJ9)
SATGEWGGTGGFKTIF

SEQ ID NO: 102450 - protein, 15 aa, Homo sapiens
  CDR3 for beta chain variable domain of TCR clone 51225 (TRBV20-1, TRBJ1-2)
CSARDSRGRNYGYTF

SEQ ID NO: 102451 - protein, 14 aa, Homo sapiens
  CDR3 for alpha chain variable domain of TCR clone 51226 (TRAV2, TRAJ9)
CAVEDRSGGFKTIF

SEQ ID NO: 102452 - protein, 11 aa, Homo sapiens
  CDR3 for beta chain variable domain of TCR clone 51226 (TRBV18, TRBJ2-5)
CASSPRETQYF

SEQ ID NO: 102453 - protein, 15 aa, Homo sapiens
  CDR3 for alpha chain variable domain of TCR clone 51227 (TRAV27, TRAJ38)
CAARRNAGNNRKLIW

SEQ ID NO: 102454 - protein, 13 aa, Homo sapiens
  CDR3 for beta chain variable domain of TCR clone 51227 (TRBV12-5, TRBJ2-3)
CASGDPQSDTQYF

SEQ ID NO: 102455 - protein, 15 aa, Homo sapiens
  CDR3 for alpha chain variable domain of TCR clone 51228 (TRAV12-3, TRAJ6)
CAMSATSEGSYIPTF

SEQ ID NO: 102456 - protein, 11 aa, Homo sapiens
  CDR3 for beta chain variable domain of TCR clone 51228 (TRBV20-1, TRBJ1-5)
CSAQGDQPQHF

SEQ ID NO: 102457 - protein, 12 aa, Homo sapiens
  CDR3 for alpha chain variable domain of TCR clone 51229 (TRAV8-3, TRAJ20)
CAVGANDYKLSF

SEQ ID NO: 102458 - protein, 16 aa, Homo sapiens
  CDR3 for beta chain variable domain of TCR clone 51229 (TRBV7-2, TRBJ1-3)
CASSSGRVLSGNTIYF

SEQ ID NO: 102459 - protein, 13 aa, Homo sapiens
  CDR3 for alpha chain variable domain of TCR clone 51230 (TRAV1-2, TRAJ9)
CAALNTGGLKTIF

SEQ ID NO: 102460 - protein, 14 aa, Homo sapiens
  CDR3 for beta chain variable domain of TCR clone 51230 (TRBV13, TRBJ2-3)
CASSSGSPTDTQYF

SEQ ID NO: 102461 - protein, 15 aa, Homo sapiens
  CDR3 for alpha chain variable domain of TCR clone 51231 (TRAV17, TRAJ57)
CATGPSQGGSEKLVF

SEQ ID NO: 102462 - protein, 14 aa, Homo sapiens
  CDR3 for beta chain variable domain of TCR clone 51231 (TRBV4-1, TRBJ2-2)
CASSQAVNTGELFF

SEQ ID NO: 102463 - protein, 11 aa, Homo sapiens
  CDR3 for alpha chain variable domain of TCR clone 51232 (TRAV25, TRAJ49)
CAGGTGNQFHF

SEQ ID NO: 102464 - protein, 12 aa, Homo sapiens
  CDR3 for beta chain variable domain of TCR clone 51232 (TRBV6-5, TRBJ2-1)
CASRNDRGQQFF

SEQ ID NO: 102465 - protein, 18 aa, Homo sapiens
  CDR3 for alpha chain variable domain of TCR clone 51233 (TRAV26-1, TRAJ22)
CIVRVALISSDSARQLTF

SEQ ID NO: 102466 - protein, 13 aa, Homo sapiens
  CDR3 for beta chain variable domain of TCR clone 51233 (TRBV13, TRBJ2-5)
CASSPEVGETQYF

SEQ ID NO: 102467 - protein, 11 aa, Homo sapiens
  CDR3 for alpha chain variable domain of TCR clone 51234 (TRAV1-2, TRAJ20)
CAVANDYKLGF

SEQ ID NO: 102468 - protein, 15 aa, Homo sapiens
  CDR3 for beta chain variable domain of TCR clone 51234 (TRBV2, TRBJ2-1)
CASSELAGSYNEQFF

SEQ ID NO: 102469 - protein, 14 aa, Homo sapiens
  CDR3 for alpha chain variable domain of TCR clone 51235 (TRAV12-3, TRAJ10)
SHLPLTGGGNKLTF

SEQ ID NO: 102470 - protein, 15 aa, Homo sapiens
  CDR3 for beta chain variable domain of TCR clone 51235 (TRBV10-2, TRBJ2-6)
CASSEQGTWANVLTF

SEQ ID NO: 102471 - protein, 13 aa, Homo sapiens
  CDR3 for alpha chain variable domain of TCR clone 51236 (TRAV12-1, TRAJ39)
CVVPQRAGNMLTF

SEQ ID NO: 102472 - protein, 14 aa, Homo sapiens
  CDR3 for beta chain variable domain of TCR clone 51236 (TRBV13, TRBJ2-5)
RASSLERVGETQYF

SEQ ID NO: 102473 - protein, 15 aa, Homo sapiens
  CDR3 for alpha chain variable domain of TCR clone 51237 (TRAV12-3, TRAJ5)
CAMSGLGTGRRALTF

SEQ ID NO: 102474 - protein, 16 aa, Homo sapiens
  CDR3 for beta chain variable domain of TCR clone 51237 (TRBV20-1, TRBJ2-3)
CSASLHSAGAIDTQYF

SEQ ID NO: 102475 - protein, 13 aa, Homo sapiens
  CDR3 for alpha chain variable domain of TCR clone 51238 (TRAV2, TRAJ29)
CAAQNSGNAPLVF

SEQ ID NO: 102476 - protein, 14 aa, Homo sapiens
  CDR3 for beta chain variable domain of TCR clone 51238 (TRBV7-9, TRBJ2-4)
CASSLAMGGNIQYF

SEQ ID NO: 102477 - protein, 16 aa, Homo sapiens
  CDR3 for alpha chain variable domain of TCR clone 51239 (TRAV30, TRAJ24)
CGTEIVDADSWGKFQF

SEQ ID NO: 102478 - protein, 15 aa, Homo sapiens
  CDR3 for beta chain variable domain of TCR clone 51239 (TRBV20-1, TRBJ2-6)
CSARGRGPGANVLTF

SEQ ID NO: 102479 - protein, 14 aa, Homo sapiens
  CDR3 for alpha chain variable domain of TCR clone 51240 (TRAV8-3, TRAJ4)
CAVGAAGGYNKLIF

SEQ ID NO: 102480 - protein, 15 aa, Homo sapiens
  CDR3 for beta chain variable domain of TCR clone 51240 (TRBV6-5, TRBJ2-1)
CASSYDAGAGNEQLL

SEQ ID NO: 102481 - protein, 12 aa, Homo sapiens
  CDR3 for alpha chain variable domain of TCR clone 51241 (TRAV9-2, TRAJ26)
CALRGDGQNFVF

SEQ ID NO: 102482 - protein, 12 aa, Homo sapiens
  CDR3 for beta chain variable domain of TCR clone 51241 (TRBV29-1, TRBJ2-3)
CSVTGGADTQYF

SEQ ID NO: 102483 - protein, 15 aa, Homo sapiens
  CDR3 for alpha chain variable domain of TCR clone 51242 (TRAV12-1, TRAJ52)
CVGNAGGTSYGKLTF

SEQ ID NO: 102484 - protein, 14 aa, Homo sapiens
  CDR3 for beta chain variable domain of TCR clone 51242 (TRBV7-3, TRBJ2-2)
CASSPDPSGRGLFF

SEQ ID NO: 102485 - protein, 14 aa, Homo sapiens
  CDR3 for alpha chain variable domain of TCR clone 51243 (TRAV16, TRAJ33)
CALSAMDSNYQVIW

SEQ ID NO: 102486 - protein, 12 aa, Homo sapiens
  CDR3 for beta chain variable domain of TCR clone 51243 (TRBV5-1, TRBJ1-2)
CASSQDTYGYTF

SEQ ID NO: 102487 - protein, 12 aa, Homo sapiens
  CDR3 for alpha chain variable domain of TCR clone 51244 (TRAV12-3, TRAJ41)
CAMSYSGYALHF

SEQ ID NO: 102488 - protein, 13 aa, Homo sapiens
  CDR3 for beta chain variable domain of TCR clone 51244 (TRBV7-3, TRBJ2-1)
CASSLDSYNEQFF

SEQ ID NO: 102489 - protein, 14 aa, Homo sapiens
  CDR3 for alpha chain variable domain of TCR clone 51245 (TRAV35, TRAJ33)
CAGSSQDSNYQLIW

SEQ ID NO: 102490 - protein, 15 aa, Homo sapiens
  CDR3 for beta chain variable domain of TCR clone 51245 (TRBV5-1, TRBJ1-4)
FAPAAWKDGNDKLFF

SEQ ID NO: 102491 - protein, 13 aa, Homo sapiens
  CDR3 for alpha chain variable domain of TCR clone 51246 (TRAV13-1, TRAJ17)
SIRSKAAGNKLTF

SEQ ID NO: 102492 - protein, 14 aa, Homo sapiens
  CDR3 for beta chain variable domain of TCR clone 51246 (TRBV7-9, TRBJ2-1)
CASSSMVGFGEQFF

SEQ ID NO: 102493 - protein, 15 aa, Homo sapiens
  CDR3 for alpha chain variable domain of TCR clone 51247 (TRAV17, TRAJ4)
CATGTWSGGYNKLIF

SEQ ID NO: 102494 - protein, 15 aa, Homo sapiens
  CDR3 for beta chain variable domain of TCR clone 51247 (TRBV20-1, TRBJ2-7)
CSARDRVSGMDEQYS

SEQ ID NO: 102495 - protein, 19 aa, Homo sapiens
  CDR3 for alpha chain variable domain of TCR clone 51248 (TRAV17, TRAJ40)
TASRAADAASYFCASKYIF

SEQ ID NO: 102496 - protein, 17 aa, Homo sapiens
  CDR3 for beta chain variable domain of TCR clone 51248 (TRBV11-2, TRBJ2-4)
CASSFLALGGAGDIQYF

SEQ ID NO: 102497 - protein, 14 aa, Homo sapiens
  CDR3 for alpha chain variable domain of TCR clone 51249 (TRAV12-2, TRAJ5)
CAVNRSTGRRALTF

SEQ ID NO: 102498 - protein, 12 aa, Homo sapiens
  CDR3 for beta chain variable domain of TCR clone 51249 (TRBV5-1, TRBJ1-1)
CASSFGNTEAFF

SEQ ID NO: 102499 - protein, 14 aa, Homo sapiens
  CDR3 for alpha chain variable domain of TCR clone 51250 (TRAV1-2, TRAJ16)
CAVSRFSDGQKLLF

SEQ ID NO: 102500 - protein, 11 aa, Homo sapiens
  CDR3 for beta chain variable domain of TCR clone 51250 (TRBV4-1, TRBJ2-2)
CASEHTGELFF

SEQ ID NO: 102501 - protein, 14 aa, Homo sapiens
  CDR3 for alpha chain variable domain of TCR clone 51251 (TRAV16, TRAJ33)
CALSAMDSNYQLIW

SEQ ID NO: 102502 - protein, 12 aa, Homo sapiens
  CDR3 for beta chain variable domain of TCR clone 51251 (TRBV5-1, TRBJ1-2)
CASSHDTYGYTF

SEQ ID NO: 102503 - protein, 16 aa, Homo sapiens
  CDR3 for alpha chain variable domain of TCR clone 51252 (TRAV3, TRAJ10)
CAVRDMRAGGGNKLTF

SEQ ID NO: 102504 - protein, 16 aa, Homo sapiens
  CDR3 for beta chain variable domain of TCR clone 51252 (TRBV7-3, TRBJ2-3)
CASSLSGYRPEDTQYF

SEQ ID NO: 102505 - protein, 14 aa, Homo sapiens
  CDR3 for alpha chain variable domain of TCR clone 51253 (TRAV27, TRAJ13)
CAVKKTGGYQKVTF

SEQ ID NO: 102506 - protein, 13 aa, Homo sapiens
  CDR3 for beta chain variable domain of TCR clone 51253 (TRBV12-5, TRBJ2-3)
CASGDRQSDTQYF

SEQ ID NO: 102507 - protein, 11 aa, Homo sapiens
  CDR3 for alpha chain variable domain of TCR clone 51254 (TRAV13-2, TRAJ20)
CAEDMSYKLSF

SEQ ID NO: 102508 - protein, 15 aa, Homo sapiens
  CDR3 for beta chain variable domain of TCR clone 51254 (TRBV28, TRBJ2-3)
CAPTFRDWSTDTQYF

SEQ ID NO: 102509 - protein, 17 aa, Homo sapiens
  CDR3 for alpha chain variable domain of TCR clone 51255 (TRAV3, TRAJ38)
CAVRDCLNAGNNRKLIW

SEQ ID NO: 102510 - protein, 14 aa, Homo sapiens
  CDR3 for beta chain variable domain of TCR clone 51255 (TRBV7-3, TRBJ2-1)
CASSLAGGTNEQFF

SEQ ID NO: 102511 - protein, 11 aa, Homo sapiens
  CDR3 for alpha chain variable domain of TCR clone 51256 (TRAV2, TRAJ13)
CASGGDQKVTF

SEQ ID NO: 102512 - protein, 16 aa, Homo sapiens
  CDR3 for beta chain variable domain of TCR clone 51256 (TRBV6-1, TRBJ2-5)
CASSETLDRGAETQYF

SEQ ID NO: 102513 - protein, 11 aa, Homo sapiens
  CDR3 for alpha chain variable domain of TCR clone 51257 (TRAV3, TRAJ21)
CAVGNFNKFYF

SEQ ID NO: 102514 - protein, 15 aa, Homo sapiens
  CDR3 for beta chain variable domain of TCR clone 51257 (TRBV5-1, TRBJ2-1)
CASSLVANSYNEQFF

SEQ ID NO: 102515 - protein, 11 aa, Homo sapiens
  CDR3 for alpha chain variable domain of TCR clone 51258 (TRAV1-2, TRAJ31)
CAVNNNARLMF

SEQ ID NO: 102516 - protein, 18 aa, Homo sapiens
  CDR3 for beta chain variable domain of TCR clone 51258 (TRBV25-1, TRBJ1-2)
CASSVLQNGQGLIFGYTF

SEQ ID NO: 102517 - protein, 14 aa, Homo sapiens
  CDR3 for alpha chain variable domain of TCR clone 51259 (TRAV12-3, TRAJ10)
SHLPLTGGGNKLTF

SEQ ID NO: 102518 - protein, 14 aa, Homo sapiens
  CDR3 for beta chain variable domain of TCR clone 51259 (TRBV7-8, TRBJ2-7)
CASSPRDRVYEQYF

SEQ ID NO: 102519 - protein, 16 aa, Homo sapiens
  CDR3 for alpha chain variable domain of TCR clone 51260 (TRAV3, TRAJ37)
CAVRPHGSGNTGKPIF

SEQ ID NO: 102520 - protein, 17 aa, Homo sapiens
  CDR3 for beta chain variable domain of TCR clone 51260 (TRBV20-1, TRBJ2-1)
CSASSSGLAGSYNEQFF

SEQ ID NO: 102521 - protein, 13 aa, Homo sapiens
  CDR3 for alpha chain variable domain of TCR clone 51261 (TRAV12-3, TRAJ7)
CAMTPYVNNRLAF

SEQ ID NO: 102522 - protein, 16 aa, Homo sapiens
  CDR3 for beta chain variable domain of TCR clone 51261 (TRBV20-1, TRBJ1-4)
CSARPYGGELNEKLFF

SEQ ID NO: 102523 - protein, 15 aa, Homo sapiens
  CDR3 for alpha chain variable domain of TCR clone 51262 (TRAV3, TRAJ22)
CAVRDRGVSARQLTF

SEQ ID NO: 102524 - protein, 15 aa, Homo sapiens
  CDR3 for beta chain variable domain of TCR clone 51262 (TRBV7-3, TRBJ2-2)
CASSETGQGTGELFF

SEQ ID NO: 102525 - protein, 13 aa, Homo sapiens
  CDR3 for alpha chain variable domain of TCR clone 51263 (TRAV12-2, TRAJ7)
CAVNLYGNNGLAF

SEQ ID NO: 102526 - protein, 14 aa, Homo sapiens
  CDR3 for beta chain variable domain of TCR clone 51263 (TRBV25-1, TRBJ1-2)
CASSEATGPYGYTF

SEQ ID NO: 102527 - protein, 12 aa, Homo sapiens
  CDR3 for alpha chain variable domain of TCR clone 51264 (TRAV27, TRAJ22)
CAGDGAGGEIWF

SEQ ID NO: 102528 - protein, 17 aa, Homo sapiens
  CDR3 for beta chain variable domain of TCR clone 51264 (TRBV5-5, TRBJ1-1)
CASSLRFRGLMNTEAFF

SEQ ID NO: 102529 - protein, 14 aa, Homo sapiens
  CDR3 for alpha chain variable domain of TCR clone 51265 (TRAV26-1, TRAJ38)
CIVVGAGNNRKPIW

SEQ ID NO: 102530 - protein, 12 aa, Homo sapiens
  CDR3 for beta chain variable domain of TCR clone 51265 (TRBV5-1, TRBJ2-5)
CASSWDQETQYF

SEQ ID NO: 102531 - protein, 13 aa, Homo sapiens
  CDR3 for alpha chain variable domain of TCR clone 51266 (TRAV27, TRAJ45)
CMSSGGGADGLAF

SEQ ID NO: 102532 - protein, 17 aa, Homo sapiens
  CDR3 for beta chain variable domain of TCR clone 51266 (TRBV11-2, TRBJ2-1)
CASSLYPPGVEYNKQFF

SEQ ID NO: 102533 - protein, 15 aa, Homo sapiens
  CDR3 for alpha chain variable domain of TCR clone 51267 (TRAV12-1, TRAJ44)
CVADLPTGTASKLAF

SEQ ID NO: 102534 - protein, 13 aa, Homo sapiens
  CDR3 for beta chain variable domain of TCR clone 51267 (TRBV6-5, TRBJ2-5)
CASSPQGGETQYF

SEQ ID NO: 102535 - protein, 14 aa, Homo sapiens
  CDR3 for alpha chain variable domain of TCR clone 51268 (TRAV4, TRAJ17)
CLVGDIAAGNKLTF

SEQ ID NO: 102536 - protein, 15 aa, Homo sapiens
  CDR3 for beta chain variable domain of TCR clone 51268 (TRBV5-5, TRBJ1-5)
CASSSTPGSNQPQHF

SEQ ID NO: 102537 - protein, 13 aa, Homo sapiens
  CDR3 for alpha chain variable domain of TCR clone 51269 (TRAV21, TRAJ15)
CAVANQAGTALIF

SEQ ID NO: 102538 - protein, 14 aa, Homo sapiens
  CDR3 for beta chain variable domain of TCR clone 51269 (TRBV27, TRBJ2-2)
CARSLGAATGELFF

SEQ ID NO: 102539 - protein, 15 aa, Homo sapiens
  CDR3 for alpha chain variable domain of TCR clone 51270 (TRAV26-1, TRAJ29)
FIVRVEGSGNTPLFF

SEQ ID NO: 102540 - protein, 15 aa, Homo sapiens
  CDR3 for beta chain variable domain of TCR clone 51270 (TRBV7-9, TRBJ1-5)
CASSQGHQPNQPQHF

SEQ ID NO: 102541 - protein, 14 aa, Homo sapiens
  CDR3 for alpha chain variable domain of TCR clone 51271 (TRAV27, TRAJ13)
CRSSNSGGYQKVTF

SEQ ID NO: 102542 - protein, 16 aa, Homo sapiens
  CDR3 for beta chain variable domain of TCR clone 51271 (TRBV7-6, TRBJ2-1)
CIAVPAAWGGADGQFF

SEQ ID NO: 102543 - protein, 16 aa, Homo sapiens
  CDR3 for alpha chain variable domain of TCR clone 51272 (TRAV12-2, TRAJ6)
CAAPLAGSGGSYIPTF

SEQ ID NO: 102544 - protein, 10 aa, Homo sapiens
  CDR3 for beta chain variable domain of TCR clone 51272 (TRBV28, TRBJ1-2)
FASSSDRAVF

SEQ ID NO: 102545 - protein, 12 aa, Homo sapiens
  CDR3 for alpha chain variable domain of TCR clone 51273 (TRAV2, TRAJ36)
CAELTGANNLFF

SEQ ID NO: 102546 - protein, 18 aa, Homo sapiens
  CDR3 for beta chain variable domain of TCR clone 51273 (TRBV19, TRBJ1-1)
CASSIDGGDYTGNTEASF

SEQ ID NO: 102547 - protein, 15 aa, Homo sapiens
  CDR3 for alpha chain variable domain of TCR clone 51274 (TRAV38-2/DV8, TRAJ57)
CASARAQGGSEKLVF

SEQ ID NO: 102548 - protein, 17 aa, Homo sapiens
  CDR3 for beta chain variable domain of TCR clone 51274 (TRBV18, TRBJ1-5)
GASSPTMGQGTNQPQHF

SEQ ID NO: 102549 - protein, 14 aa, Homo sapiens
  CDR3 for alpha chain variable domain of TCR clone 51275 (TRAV26-2, TRAJ38)
CILYNAGNNRKLIW

SEQ ID NO: 102550 - protein, 14 aa, Homo sapiens
  CDR3 for beta chain variable domain of TCR clone 51275 (TRBV19, TRBJ2-1)
CASPTLVLSGEQFF

SEQ ID NO: 102551 - protein, 12 aa, Homo sapiens
  CDR3 for alpha chain variable domain of TCR clone 51276 (TRAV3, TRAJ43)
CAVRDPNNDIRF

SEQ ID NO: 102552 - protein, 14 aa, Homo sapiens
  CDR3 for beta chain variable domain of TCR clone 51276 (TRBV5-1, TRBJ2-3)
CASSLFGPTDTQYF

SEQ ID NO: 102553 - protein, 17 aa, Homo sapiens
  CDR3 for alpha chain variable domain of TCR clone 51277 (TRAV12-3, TRAJ6)
CAMSARGGAGGSYIPTF

SEQ ID NO: 102554 - protein, 12 aa, Homo sapiens
  CDR3 for beta chain variable domain of TCR clone 51277 (TRBV12-4, TRBJ2-3)
CASSTLLDTQYF

SEQ ID NO: 102555 - protein, 14 aa, Homo sapiens
  CDR3 for alpha chain variable domain of TCR clone 51278 (TRAV12-2, TRAJ24)
CSVTPADSWGKLQF

SEQ ID NO: 102556 - protein, 12 aa, Homo sapiens
  CDR3 for beta chain variable domain of TCR clone 51278 (TRBV3-1, TRBJ2-1)
CASSQGSSGQFF

SEQ ID NO: 102557 - protein, 17 aa, Homo sapiens
  CDR3 for alpha chain variable domain of TCR clone 51279 (TRAV26-2, TRAJ42)
CILRDVGYGGSQGNLIF

SEQ ID NO: 102558 - protein, 16 aa, Homo sapiens
  CDR3 for beta chain variable domain of TCR clone 51279 (TRBV12-4, TRBJ2-7)
CASSLIGWTGTYEQYF

SEQ ID NO: 102559 - protein, 12 aa, Homo sapiens
  CDR3 for alpha chain variable domain of TCR clone 51280 (TRAV36/DV7, TRAJ40)
CAVGTGTYKYIF

SEQ ID NO: 102560 - protein, 12 aa, Homo sapiens
  CDR3 for beta chain variable domain of TCR clone 51280 (TRBV12-4, TRBJ2-7)
CASSLGGYEQYF

SEQ ID NO: 102561 - protein, 15 aa, Homo sapiens
  CDR3 for alpha chain variable domain of TCR clone 51281 (TRAV17, TRAJ22)
CATAPISGSARQLTF

SEQ ID NO: 102562 - protein, 14 aa, Homo sapiens
  CDR3 for beta chain variable domain of TCR clone 51281 (TRBV7-3, TRBJ2-1)
CASSLAGGTNEQFF

SEQ ID NO: 102563 - protein, 13 aa, Homo sapiens
  CDR3 for alpha chain variable domain of TCR clone 51282 (TRAV2, TRAJ15)
CAVASQAGTALIF

SEQ ID NO: 102564 - protein, 15 aa, Homo sapiens
  CDR3 for beta chain variable domain of TCR clone 51282 (TRBV7-3, TRBJ2-2)
CASSETGQGTGELLF

SEQ ID NO: 102565 - protein, 11 aa, Homo sapiens
  CDR3 for alpha chain variable domain of TCR clone 51283 (TRAV3, TRAJ21)
CAVGNFNKFYF

SEQ ID NO: 102566 - protein, 15 aa, Homo sapiens
  CDR3 for beta chain variable domain of TCR clone 51283 (TRBV29-1, TRBJ2-1)
CSVEGGPASYNEHFF

SEQ ID NO: 102567 - protein, 11 aa, Homo sapiens
  CDR3 for alpha chain variable domain of TCR clone 51284 (TRAV29/DV5, TRAJ21)
CAVGNFNKFYF

SEQ ID NO: 102568 - protein, 16 aa, Homo sapiens
  CDR3 for beta chain variable domain of TCR clone 51284 (TRBV19, TRBJ2-1)
CASSKAGPSSYNEQFF

SEQ ID NO: 102569 - protein, 13 aa, Homo sapiens
  CDR3 for alpha chain variable domain of TCR clone 51285 (TRAV17, TRAJ9)
CATDGTGGFKTIF

SEQ ID NO: 102570 - protein, 14 aa, Homo sapiens
  CDR3 for beta chain variable domain of TCR clone 51285 (TRBV7-3, TRBJ2-2)
CASSSGGYTGELFF

SEQ ID NO: 102571 - protein, 16 aa, Homo sapiens
  CDR3 for alpha chain variable domain of TCR clone 51286 (TRAV12-2, TRAJ28)
RAVITDSGAGSYQLTF

SEQ ID NO: 102572 - protein, 14 aa, Homo sapiens
  CDR3 for beta chain variable domain of TCR clone 51286 (TRBV25-1, TRBJ1-1)
CASTHLGGNTEAFF

SEQ ID NO: 102573 - protein, 10 aa, Homo sapiens
  CDR3 for alpha chain variable domain of TCR clone 51287 (TRAV21, TRAJ49)
CAVTGNQFYF

SEQ ID NO: 102574 - protein, 14 aa, Homo sapiens
  CDR3 for beta chain variable domain of TCR clone 51287 (TRBV7-9, TRBJ2-1)
CASSLGGSLNEQFF

SEQ ID NO: 102575 - protein, 13 aa, Homo sapiens
  CDR3 for alpha chain variable domain of TCR clone 51288 (TRAV13-2, TRAJ53)
CAENMGSYYKLTF

SEQ ID NO: 102576 - protein, 13 aa, Homo sapiens
  CDR3 for beta chain variable domain of TCR clone 51288 (TRBV4-1, TRBJ2-2)
CASSQENTGELFF

SEQ ID NO: 102577 - protein, 12 aa, Homo sapiens
  CDR3 for alpha chain variable domain of TCR clone 51289 (TRAV41, TRAJ58)
CAVETSGYRLTF

SEQ ID NO: 102578 - protein, 15 aa, Homo sapiens
  CDR3 for beta chain variable domain of TCR clone 51289 (TRBV29-1, TRBJ2-6)
CSVGDRGSGANVLTF

SEQ ID NO: 102579 - protein, 10 aa, Homo sapiens
  CDR3 for alpha chain variable domain of TCR clone 51290 (TRAV8-4, TRAJ43)
CAVSADDMGF

SEQ ID NO: 102580 - protein, 15 aa, Homo sapiens
  CDR3 for beta chain variable domain of TCR clone 51290 (TRBV5-1, TRBJ2-3)
CASSVTSGSTDTQYF

SEQ ID NO: 102581 - protein, 14 aa, Homo sapiens
  CDR3 for alpha chain variable domain of TCR clone 51291 (TRAV12-1, TRAJ22)
CVVNAGGSARQLTF

SEQ ID NO: 102582 - protein, 14 aa, Homo sapiens
  CDR3 for beta chain variable domain of TCR clone 51291 (TRBV19, TRBJ2-1)
CASPTFVLSGEQFF

SEQ ID NO: 102583 - protein, 11 aa, Homo sapiens
  CDR3 for alpha chain variable domain of TCR clone 51292 (TRAV1-1, TRAJ9)
CAQRVYWRLQN

SEQ ID NO: 102584 - protein, 15 aa, Homo sapiens
  CDR3 for beta chain variable domain of TCR clone 51292 (TRBV19, TRBJ1-5)
CASSIVWADNQPQHF

SEQ ID NO: 102585 - protein, 14 aa, Homo sapiens
  CDR3 for alpha chain variable domain of TCR clone 51293 (TRAV9-2, TRAJ39)
CALYIYNAGNMLTF

SEQ ID NO: 102586 - protein, 13 aa, Homo sapiens
  CDR3 for beta chain variable domain of TCR clone 51293 (TRBV6-1, TRBJ1-1)
CASSRQGNTEAFF

SEQ ID NO: 102587 - protein, 16 aa, Homo sapiens
  CDR3 for alpha chain variable domain of TCR clone 51294 (TRAV16, TRAJ4)
CALSRMFSGGYNKLIF

SEQ ID NO: 102588 - protein, 16 aa, Homo sapiens
  CDR3 for beta chain variable domain of TCR clone 51294 (TRBV24-1, TRBJ2-3)
CATSDPGTGATDTQYV

SEQ ID NO: 102589 - protein, 15 aa, Homo sapiens
  CDR3 for alpha chain variable domain of TCR clone 51295 (TRAV3, TRAJ47)
CAVRDIVEYGNKLVF

SEQ ID NO: 102590 - protein, 14 aa, Homo sapiens
  CDR3 for beta chain variable domain of TCR clone 51295 (TRBV13, TRBJ2-5)
CASSLERVGETQYF

SEQ ID NO: 102591 - protein, 13 aa, Homo sapiens
  CDR3 for alpha chain variable domain of TCR clone 51296 (TRAV17, TRAJ9)
CATDYTGGFKTIF

SEQ ID NO: 102592 - protein, 16 aa, Homo sapiens
  CDR3 for beta chain variable domain of TCR clone 51296 (TRBV7-7, TRBJ2-1)
CASSLASGTSYNELFF

SEQ ID NO: 102593 - protein, 14 aa, Homo sapiens
  CDR3 for alpha chain variable domain of TCR clone 51297 (TRAV12-3, TRAJ10)
SHLPLTGGGNKLTF

SEQ ID NO: 102594 - protein, 14 aa, Homo sapiens
  CDR3 for beta chain variable domain of TCR clone 51297 (TRBV6-1, TRBJ1-3)
CASVQGGGGNTIDF

SEQ ID NO: 102595 - protein, 13 aa, Homo sapiens
  CDR3 for alpha chain variable domain of TCR clone 51298 (TRAV8-3, TRAJ28)
CAVGAVGSYQLTF

SEQ ID NO: 102596 - protein, 17 aa, Homo sapiens
  CDR3 for beta chain variable domain of TCR clone 51298 (TRBV11-3, TRBJ2-1)
CASSLYPPGVEYNEQFF

SEQ ID NO: 102597 - protein, 13 aa, Homo sapiens
  CDR3 for alpha chain variable domain of TCR clone 51299 (TRAV27, TRAJ56)
CAGKPGANSKLTF

SEQ ID NO: 102598 - protein, 14 aa, Homo sapiens
  CDR3 for beta chain variable domain of TCR clone 51299 (TRBV12-5, TRBJ2-5)
CASGSRTHQETQYF

SEQ ID NO: 102599 - protein, 13 aa, Homo sapiens
  CDR3 for alpha chain variable domain of TCR clone 51300 (TRAV12-3, TRAJ33)
CAMSVNSNYQLIW

SEQ ID NO: 102600 - protein, 13 aa, Homo sapiens
  CDR3 for beta chain variable domain of TCR clone 51300 (TRBV7-2, TRBJ2-2)
CASSLAITGELFF

SEQ ID NO: 102601 - protein, 14 aa, Homo sapiens
  CDR3 for alpha chain variable domain of TCR clone 51301 (TRAV26-1, TRAJ38)
CIADNAGNNRKLIW

SEQ ID NO: 102602 - protein, 17 aa, Homo sapiens
  CDR3 for beta chain variable domain of TCR clone 51301 (TRBV7-9, TRBJ2-3)
CASSPTVAGDVTDTQYF

SEQ ID NO: 102603 - protein, 13 aa, Homo sapiens
  CDR3 for alpha chain variable domain of TCR clone 51302 (TRAV36/DV7, TRAJ37)
CAVFSSNTGKLIF

SEQ ID NO: 102604 - protein, 13 aa, Homo sapiens
  CDR3 for beta chain variable domain of TCR clone 51302 (TRBV4-2, TRBJ1-1)
CASSQAGNTEAFF

SEQ ID NO: 102605 - protein, 14 aa, Homo sapiens
  CDR3 for alpha chain variable domain of TCR clone 51303 (TRAV12-2, TRAJ45)
CAVNSGGGADGLTF

SEQ ID NO: 102606 - protein, 18 aa, Homo sapiens
  CDR3 for beta chain variable domain of TCR clone 51303 (TRBV7-2, TRBJ2-7)
CASSLAQGLRDSSHEQYF

SEQ ID NO: 102607 - protein, 16 aa, Homo sapiens
  CDR3 for alpha chain variable domain of TCR clone 51304 (TRAV12-3, TRAJ53)
CAMSVGSGGSNYKLTF

SEQ ID NO: 102608 - protein, 13 aa, Homo sapiens
  CDR3 for beta chain variable domain of TCR clone 51304 (TRBV7-6, TRBJ1-2)
CASSLVADYGYTL

SEQ ID NO: 102609 - protein, 13 aa, Homo sapiens
  CDR3 for alpha chain variable domain of TCR clone 51305 (TRAV36/DV7, TRAJ54)
CAVDVQGAQKLVF

SEQ ID NO: 102610 - protein, 14 aa, Homo sapiens
  CDR3 for beta chain variable domain of TCR clone 51305 (TRBV19, TRBJ2-7)
CSSNFRDTFTGMYF

SEQ ID NO: 102611 - protein, 14 aa, Homo sapiens
  CDR3 for alpha chain variable domain of TCR clone 51306 (TRAV1-2, TRAJ16)
CAVNRFSDGQKLLF

SEQ ID NO: 102612 - protein, 16 aa, Homo sapiens
  CDR3 for beta chain variable domain of TCR clone 51306 (TRBV20-1, TRBJ1-4)
CSAPGQGLITNEKLFF

SEQ ID NO: 102613 - protein, 14 aa, Homo sapiens
  CDR3 for alpha chain variable domain of TCR clone 51307 (TRAV38-1, TRAJ45)
CASHSGGGADALTF

SEQ ID NO: 102614 - protein, 13 aa, Homo sapiens
  CDR3 for beta chain variable domain of TCR clone 51307 (TRBV10-3, TRBJ1-2)
CAISERDSYGYTF

SEQ ID NO: 102615 - protein, 11 aa, Homo sapiens
  CDR3 for alpha chain variable domain of TCR clone 51308 (TRAV12-1, TRAJ30)
CLVNGQDKIIF

SEQ ID NO: 102616 - protein, 12 aa, Homo sapiens
  CDR3 for beta chain variable domain of TCR clone 51308 (TRBV27, TRBJ2-2)
CASKLFTGELFF

SEQ ID NO: 102617 - protein, 12 aa, Homo sapiens
  CDR3 for alpha chain variable domain of TCR clone 51309 (TRAV16, TRAJ9)
CALSSGGFKTIF

SEQ ID NO: 102618 - protein, 14 aa, Homo sapiens
  CDR3 for beta chain variable domain of TCR clone 51309 (TRBV7-9, TRBJ2-1)
CASSLAGPYNEQYF

SEQ ID NO: 102619 - protein, 12 aa, Homo sapiens
  CDR3 for alpha chain variable domain of TCR clone 51310 (TRAV20, TRAJ56)
CAVTGANSKLTF

SEQ ID NO: 102620 - protein, 14 aa, Homo sapiens
  CDR3 for beta chain variable domain of TCR clone 51310 (TRBV20-1, TRBJ2-5)
CRALVPGYQETQYF

SEQ ID NO: 102621 - protein, 13 aa, Homo sapiens
  CDR3 for alpha chain variable domain of TCR clone 51311 (TRAV3, TRAJ21)
CAVGEPDLNKFYF

SEQ ID NO: 102622 - protein, 12 aa, Homo sapiens
  CDR3 for beta chain variable domain of TCR clone 51311 (TRBV5-1, TRBJ2-4)
LAGEWTKNIQYF

SEQ ID NO: 102623 - protein, 14 aa, Homo sapiens
  CDR3 for alpha chain variable domain of TCR clone 51312 (TRAV8-3, TRAJ35)
CAVVPQGFGNVLHC

SEQ ID NO: 102624 - protein, 14 aa, Homo sapiens
  CDR3 for beta chain variable domain of TCR clone 51312 (TRBV19, TRBJ2-1)
CASPTFVLGGEQFF

SEQ ID NO: 102625 - protein, 13 aa, Homo sapiens
  CDR3 for alpha chain variable domain of TCR clone 51313 (TRAV8-3, TRAJ48)
CAVVPFGNEKLTF

SEQ ID NO: 102626 - protein, 15 aa, Homo sapiens
  CDR3 for beta chain variable domain of TCR clone 51313 (TRBV11-2, TRBJ2-1)
CASSSPSTRYNEQFS

SEQ ID NO: 102627 - protein, 13 aa, Homo sapiens
  CDR3 for alpha chain variable domain of TCR clone 51314 (TRAV17, TRAJ5)
CATDARGRRALTF

SEQ ID NO: 102628 - protein, 14 aa, Homo sapiens
  CDR3 for beta chain variable domain of TCR clone 51314 (TRBV7-9, TRBJ2-7)
CASSLSAATYEQYF

SEQ ID NO: 102629 - protein, 18 aa, Homo sapiens
  CDR3 for alpha chain variable domain of TCR clone 51315 (TRAV12-3, TRAJ52)
CAMSRTNAGGTSYGKLTF

SEQ ID NO: 102630 - protein, 13 aa, Homo sapiens
  CDR3 for beta chain variable domain of TCR clone 51315 (TRBV7-3, TRBJ1-1)
CASSQDWGAEAFF

SEQ ID NO: 102631 - protein, 13 aa, Homo sapiens
  CDR3 for alpha chain variable domain of TCR clone 51316 (TRAV2, TRAJ40)
CAVVTSGTYKFIF

SEQ ID NO: 102632 - protein, 15 aa, Homo sapiens
  CDR3 for beta chain variable domain of TCR clone 51316 (TRBV11-3, TRBJ2-3)
CASLKDGREGDTQYF

SEQ ID NO: 102633 - protein, 15 aa, Homo sapiens
  CDR3 for alpha chain variable domain of TCR clone 51317 (TRAV12-3, TRAJ27)
CAMRAYNTNAGKSTF

SEQ ID NO: 102634 - protein, 13 aa, Homo sapiens
  CDR3 for beta chain variable domain of TCR clone 51317 (TRBV11-2, TRBJ2-5)
CAGSRGPSETQYF

SEQ ID NO: 102635 - protein, 14 aa, Homo sapiens
  CDR3 for alpha chain variable domain of TCR clone 51318 (TRAV26-1, TRAJ34)
CIVRVAYNTDKLIF

SEQ ID NO: 102636 - protein, 15 aa, Homo sapiens
  CDR3 for beta chain variable domain of TCR clone 51318 (TRBV20-1, TRBJ2-7)
CSARVTAAYFYEQYF

SEQ ID NO: 102637 - protein, 13 aa, Homo sapiens
  CDR3 for alpha chain variable domain of TCR clone 51319 (TRAV8-3, TRAJ28)
CAVGAVGSYQLTF

SEQ ID NO: 102638 - protein, 16 aa, Homo sapiens
  CDR3 for beta chain variable domain of TCR clone 51319 (TRBV11-2, TRBJ2-7)
CASSLAPTGVNYEQYF

SEQ ID NO: 102639 - protein, 11 aa, Homo sapiens
  CDR3 for alpha chain variable domain of TCR clone 51320 (TRAV2, TRAJ33)
CAVDSNYQLIW

SEQ ID NO: 102640 - protein, 14 aa, Homo sapiens
  CDR3 for beta chain variable domain of TCR clone 51320 (TRBV11-2, TRBJ2-3)
CASSRLSRTDTQYF

SEQ ID NO: 102641 - protein, 13 aa, Homo sapiens
  CDR3 for alpha chain variable domain of TCR clone 51321 (TRAV38-1, TRAJ42)
CARWGGSQGNLIF

SEQ ID NO: 102642 - protein, 17 aa, Homo sapiens
  CDR3 for beta chain variable domain of TCR clone 51321 (TRBV20-1, TRBJ2-1)
CSARDPLAGVWDNEQFC

SEQ ID NO: 102643 - protein, 19 aa, Homo sapiens
  CDR3 for alpha chain variable domain of TCR clone 51322 (TRAV3, TRAJ6)
CAVRDGPRQEEATYLHLEE

SEQ ID NO: 102644 - protein, 15 aa, Homo sapiens
  CDR3 for beta chain variable domain of TCR clone 51322 (TRBV20-1, TRBJ2-7)
CSARDRVSGMDEQYF

SEQ ID NO: 102645 - protein, 12 aa, Homo sapiens
  CDR3 for alpha chain variable domain of TCR clone 51323 (TRAV12-3, TRAJ17)
CAMTLTGNKLTF

SEQ ID NO: 102646 - protein, 14 aa, Homo sapiens
  CDR3 for beta chain variable domain of TCR clone 51323 (TRBV12-4, TRBJ2-5)
CASSFGASGGTQYF

SEQ ID NO: 102647 - protein, 14 aa, Homo sapiens
  CDR3 for alpha chain variable domain of TCR clone 51324 (TRAV26-1, TRAJ38)
CIADNAGNNRKLIW

SEQ ID NO: 102648 - protein, 14 aa, Homo sapiens
  CDR3 for beta chain variable domain of TCR clone 51324 (TRBV18, TRBJ2-7)
CASSPRGGAYEQYF

SEQ ID NO: 102649 - protein, 14 aa, Homo sapiens
  CDR3 for alpha chain variable domain of TCR clone 51325 (TRAV12-2, TRAJ13)
CAVKKTGGYQKVTF

SEQ ID NO: 102650 - protein, 17 aa, Homo sapiens
  CDR3 for beta chain variable domain of TCR clone 51325 (TRBV11-2, TRBJ2-4)
CASSSVGPGGHRNIQYF

SEQ ID NO: 102651 - protein, 14 aa, Homo sapiens
  CDR3 for alpha chain variable domain of TCR clone 51326 (TRAV12-2, TRAJ13)
CAVKKTGGYQKVTF

SEQ ID NO: 102652 - protein, 16 aa, Homo sapiens
  CDR3 for beta chain variable domain of TCR clone 51326 (TRBV28, TRBJ2-5)
CASSFSPAGGWETQYF

SEQ ID NO: 102653 - protein, 20 aa, Homo sapiens
  CDR3 for alpha chain variable domain of TCR clone 51327 (TRAV26-1, TRAJ42)
CCVLLHRQTYYGGSQGNLIF

SEQ ID NO: 102654 - protein, 16 aa, Homo sapiens
  CDR3 for beta chain variable domain of TCR clone 51327 (TRBV7-3, TRBJ2-2)
CASSLKRGTLSVELFF

SEQ ID NO: 102655 - protein, 15 aa, Homo sapiens
  CDR3 for alpha chain variable domain of TCR clone 51328 (TRAV29/DV5, TRAJ42)
CAAKTDGGSQGNLIF

SEQ ID NO: 102656 - protein, 15 aa, Homo sapiens
  CDR3 for beta chain variable domain of TCR clone 51328 (TRBV5-1, TRBJ2-2)
CASSSQGGSTGELFF

SEQ ID NO: 102657 - protein, 12 aa, Homo sapiens
  CDR3 for alpha chain variable domain of TCR clone 51329 (TRAV20, TRAJ56)
CAVTGADSKLTF

SEQ ID NO: 102658 - protein, 14 aa, Homo sapiens
  CDR3 for beta chain variable domain of TCR clone 51329 (TRBV20-1, TRBJ2-5)
CSALVPGYQETQYS

SEQ ID NO: 102659 - protein, 16 aa, Homo sapiens
  CDR3 for alpha chain variable domain of TCR clone 51330 (TRAV4, TRAJ22)
CLVGDLYSGSARQLTF

SEQ ID NO: 102660 - protein, 18 aa, Homo sapiens
  CDR3 for beta chain variable domain of TCR clone 51330 (TRBV11-2, TRBJ2-3)
CASSLGGASRGAPNTQYF

SEQ ID NO: 102661 - protein, 17 aa, Homo sapiens
  CDR3 for alpha chain variable domain of TCR clone 51331 (TRAV8-3, TRAJ42)
CAVGNPEERRSQGNLIF

SEQ ID NO: 102662 - protein, 13 aa, Homo sapiens
  CDR3 for beta chain variable domain of TCR clone 51331 (TRBV7-3, TRBJ1-1)
CASSQDWGAEAFF

SEQ ID NO: 102663 - protein, 15 aa, Homo sapiens
  CDR3 for alpha chain variable domain of TCR clone 51332 (TRAV12-3, TRAJ47)
CAMSALVEYGNKLVF

SEQ ID NO: 102664 - protein, 14 aa, Homo sapiens
  CDR3 for beta chain variable domain of TCR clone 51332 (TRBV19, TRBJ2-2)
CASSTLHRSGELFF

SEQ ID NO: 102665 - protein, 14 aa, Homo sapiens
  CDR3 for alpha chain variable domain of TCR clone 51333 (TRAV13-1, TRAJ9)
CAASALTGGFETIF

SEQ ID NO: 102666 - protein, 13 aa, Homo sapiens
  CDR3 for beta chain variable domain of TCR clone 51333 (TRBV20-1, TRBJ1-1)
CSAGTVGNTEAFF

SEQ ID NO: 102667 - protein, 12 aa, Homo sapiens
  CDR3 for alpha chain variable domain of TCR clone 51334 (TRAV12-2, TRAJ20)
CAVRPSDYKLSF

SEQ ID NO: 102668 - protein, 13 aa, Homo sapiens
  CDR3 for beta chain variable domain of TCR clone 51334 (TRBV7-3, TRBJ1-1)
CASSQDWGAEAFF

SEQ ID NO: 102669 - protein, 22 aa, Homo sapiens
  CDR3 for alpha chain variable domain of TCR clone 51335 (TRAV3, TRAJ38)
CAVRDCLNAGNNHIQNPDPAVY

SEQ ID NO: 102670 - protein, 19 aa, Homo sapiens
  CDR3 for beta chain variable domain of TCR clone 51335 (TRBV7-2, TRBJ2-3)
CASNFLSRNWGGGTDTQYF

SEQ ID NO: 102671 - protein, 14 aa, Homo sapiens
  CDR3 for alpha chain variable domain of TCR clone 51336 (TRAV1-2, TRAJ16)
CAVNRFSDGQKLLF

SEQ ID NO: 102672 - protein, 15 aa, Homo sapiens
  CDR3 for beta chain variable domain of TCR clone 51336 (TRBV28, TRBJ2-3)
CASSPDRQGANTQYF

SEQ ID NO: 102673 - protein, 13 aa, Homo sapiens
  CDR3 for alpha chain variable domain of TCR clone 51337 (TRAV17, TRAJ54)
CATSWGGAQKLVF

SEQ ID NO: 102674 - protein, 15 aa, Homo sapiens
  CDR3 for beta chain variable domain of TCR clone 51337 (TRBV4-3, TRBJ2-3)
CASSPPLLSTDTQYF

SEQ ID NO: 102675 - protein, 13 aa, Homo sapiens
  CDR3 for alpha chain variable domain of TCR clone 51338 (TRAV27, TRAJ49)
FAPRPYTGNQFYF

SEQ ID NO: 102676 - protein, 16 aa, Homo sapiens
  CDR3 for beta chain variable domain of TCR clone 51338 (TRBV4-1, TRBJ1-2)
CASSQDAGQVLYGYTL

SEQ ID NO: 102677 - protein, 18 aa, Homo sapiens
  CDR3 for alpha chain variable domain of TCR clone 51339 (TRAV26-2, TRAJ45)
CILRVVKYSGGGADGLTF

SEQ ID NO: 102678 - protein, 16 aa, Homo sapiens
  CDR3 for beta chain variable domain of TCR clone 51339 (TRBV2, TRBJ1-4)
CASNLLQGATNEKLFF

SEQ ID NO: 102679 - protein, 11 aa, Homo sapiens
  CDR3 for alpha chain variable domain of TCR clone 51340 (TRAV35, TRAJ30)
CAGPGDDKIIF

SEQ ID NO: 102680 - protein, 14 aa, Homo sapiens
  CDR3 for beta chain variable domain of TCR clone 51340 (TRBV7-6, TRBJ1-6)
CASSQAGGGSPLLF

SEQ ID NO: 102681 - protein, 13 aa, Homo sapiens
  CDR3 for alpha chain variable domain of TCR clone 51341 (TRAV12-3, TRAJ43)
CVMIRPNNNDMRF

SEQ ID NO: 102682 - protein, 12 aa, Homo sapiens
  CDR3 for beta chain variable domain of TCR clone 51341 (TRBV11-2, TRBJ2-5)
CASSLGQETQYF

SEQ ID NO: 102683 - protein, 15 aa, Homo sapiens
  CDR3 for alpha chain variable domain of TCR clone 51342 (TRAV26-1, TRAJ40)
CIDRYATSGTYKYIF

SEQ ID NO: 102684 - protein, 14 aa, Homo sapiens
  CDR3 for beta chain variable domain of TCR clone 51342 (TRBV19, TRBJ2-1)
CASPTFVLSGEQFF

SEQ ID NO: 102685 - protein, 13 aa, Homo sapiens
  CDR3 for alpha chain variable domain of TCR clone 51343 (TRAV12-1, TRAJ38)
CVVPAGNNRKLIW

SEQ ID NO: 102686 - protein, 12 aa, Homo sapiens
  CDR3 for beta chain variable domain of TCR clone 51343 (TRBV5-4, TRBJ2-5)
CASSSTRETQYF

SEQ ID NO: 102687 - protein, 15 aa, Homo sapiens
  CDR3 for alpha chain variable domain of TCR clone 51344 (TRAV17, TRAJ57)
CATGLSQGGSEKLVF

SEQ ID NO: 102688 - protein, 16 aa, Homo sapiens
  CDR3 for beta chain variable domain of TCR clone 51344 (TRBV12-4, TRBJ1-5)
CASSRPVGGSNQPQHF

SEQ ID NO: 102689 - protein, 14 aa, Homo sapiens
  CDR3 for alpha chain variable domain of TCR clone 51345 (TRAV12-2, TRAJ13)
CAVRKTGGYQKVTF

SEQ ID NO: 102690 - protein, 11 aa, Homo sapiens
  CDR3 for beta chain variable domain of TCR clone 51345 (TRBV11-2, TRBJ2-2)
CASSLPGELFF

SEQ ID NO: 102691 - protein, 12 aa, Homo sapiens
  CDR3 for alpha chain variable domain of TCR clone 51346 (TRAV12-1, TRAJ40)
CVVYSGTYKYIF

SEQ ID NO: 102692 - protein, 12 aa, Homo sapiens
  CDR3 for beta chain variable domain of TCR clone 51346 (TRBV7-8, TRBJ2-7)
CASSLGDREQYF

SEQ ID NO: 102693 - protein, 14 aa, Homo sapiens
  CDR3 for alpha chain variable domain of TCR clone 51347 (TRAV12-1, TRAJ29)
CVVNEGSGNTPPVF

SEQ ID NO: 102694 - protein, 13 aa, Homo sapiens
  CDR3 for beta chain variable domain of TCR clone 51347 (TRBV7-9, TRBJ2-3)
CASSPGSTDTQYF

SEQ ID NO: 102695 - protein, 14 aa, Homo sapiens
  CDR3 for alpha chain variable domain of TCR clone 51348 (TRAV12-3, TRAJ10)
SHLPLTGGGNKLTF

SEQ ID NO: 102696 - protein, 16 aa, Homo sapiens
  CDR3 for beta chain variable domain of TCR clone 51348 (TRBV10-3, TRBJ2-1)
CAISGVGGGGGGEQFF

SEQ ID NO: 102697 - protein, 17 aa, Homo sapiens
  CDR3 for alpha chain variable domain of TCR clone 51349 (TRAV3, TRAJ4)
CAVRDIMLSGGYNKLIF

SEQ ID NO: 102698 - protein, 13 aa, Homo sapiens
  CDR3 for beta chain variable domain of TCR clone 51349 (TRBV28, TRBJ2-1)
CASSLIGRDEQFF

SEQ ID NO: 102699 - protein, 16 aa, Homo sapiens
  CDR3 for alpha chain variable domain of TCR clone 51350 (TRAV20, TRAJ10)
CAVLRGLTGGGNKLTF

SEQ ID NO: 102700 - protein, 14 aa, Homo sapiens
  CDR3 for beta chain variable domain of TCR clone 51350 (TRBV19, TRBJ1-5)
CASRALDSFLSQHF

SEQ ID NO: 102701 - protein, 16 aa, Homo sapiens
  CDR3 for alpha chain variable domain of TCR clone 51351 (TRAV14/DV4, TRAJ21)
CAMREGPENNFNKFYF

SEQ ID NO: 102702 - protein, 12 aa, Homo sapiens
  CDR3 for beta chain variable domain of TCR clone 51351 (TRBV29-1, TRBJ2-2)
CSVDKYTGGLFF

SEQ ID NO: 102703 - protein, 16 aa, Homo sapiens
  CDR3 for alpha chain variable domain of TCR clone 51352 (TRAV23/DV6, TRAJ9)
CAASIGGNTGGFKTIF

SEQ ID NO: 102704 - protein, 18 aa, Homo sapiens
  CDR3 for beta chain variable domain of TCR clone 51352 (TRBV7-9, TRBJ2-7)
CASSLTTSGSRMWYEQYF

SEQ ID NO: 102705 - protein, 16 aa, Homo sapiens
  CDR3 for alpha chain variable domain of TCR clone 51353 (TRAV3, TRAJ37)
CAVRGKGSGNTGKLIF

SEQ ID NO: 102706 - protein, 14 aa, Homo sapiens
  CDR3 for beta chain variable domain of TCR clone 51353 (TRBV12-4, TRBJ1-2)
CASSNLRGNYGYTF

SEQ ID NO: 102707 - protein, 13 aa, Homo sapiens
  CDR3 for alpha chain variable domain of TCR clone 51354 (TRAV29/DV5, TRAJ31)
CAASRNNNARLMF

SEQ ID NO: 102708 - protein, 19 aa, Homo sapiens
  CDR3 for beta chain variable domain of TCR clone 51354 (TRBV25-1, TRBJ2-2)
CAILVYRVDRGRKTGELFF

SEQ ID NO: 102709 - protein, 13 aa, Homo sapiens
  CDR3 for alpha chain variable domain of TCR clone 51355 (TRAV21, TRAJ20)
CAVGLRVDYKLIF

SEQ ID NO: 102710 - protein, 13 aa, Homo sapiens
  CDR3 for beta chain variable domain of TCR clone 51355 (TRBV6-1, TRBJ1-1)
CASSRQGNTEAFF

SEQ ID NO: 102711 - protein, 14 aa, Homo sapiens
  CDR3 for alpha chain variable domain of TCR clone 51356 (TRAV26-1, TRAJ39)
CIVRGSRAGNMLTI

SEQ ID NO: 102712 - protein, 15 aa, Homo sapiens
  CDR3 for beta chain variable domain of TCR clone 51356 (TRBV7-9, TRBJ1-5)
CASSQGHQPNQPQHF

SEQ ID NO: 102713 - protein, 12 aa, Homo sapiens
  CDR3 for alpha chain variable domain of TCR clone 51357 (TRAV12-3, TRAJ4)
CAMTGAGTRLAV

SEQ ID NO: 102714 - protein, 15 aa, Homo sapiens
  CDR3 for beta chain variable domain of TCR clone 51357 (TRBV10-2, TRBJ2-6)
CASSEQGTGANVLTF

SEQ ID NO: 102715 - protein, 13 aa, Homo sapiens
  CDR3 for alpha chain variable domain of TCR clone 51358 (TRAV38-1, TRAJ42)
CARWGGSQGNLIF

SEQ ID NO: 102716 - protein, 15 aa, Homo sapiens
  CDR3 for beta chain variable domain of TCR clone 51358 (TRBV28, TRBJ2-1)
CASSIIAGGRSEQFF

SEQ ID NO: 102717 - protein, 15 aa, Homo sapiens
  CDR3 for alpha chain variable domain of TCR clone 51359 (TRAV35, TRAJ40)
CAGQLGTSGTYKYIF

SEQ ID NO: 102718 - protein, 14 aa, Homo sapiens
  CDR3 for beta chain variable domain of TCR clone 51359 (TRBV7-3, TRBJ2-1)
CASSLAWGTNEQFF

SEQ ID NO: 102719 - protein, 12 aa, Homo sapiens
  CDR3 for alpha chain variable domain of TCR clone 51360 (TRAV16, TRAJ10)
CSRTGGGNKLTF

SEQ ID NO: 102720 - protein, 13 aa, Homo sapiens
  CDR3 for beta chain variable domain of TCR clone 51360 (TRBV12-4, TRBJ2-1)
CASSFHSGSEQFF

SEQ ID NO: 102721 - protein, 11 aa, Homo sapiens
  CDR3 for alpha chain variable domain of TCR clone 51361 (TRAV2, TRAJ13)
CASGGYQKVTF

SEQ ID NO: 102722 - protein, 14 aa, Homo sapiens
  CDR3 for beta chain variable domain of TCR clone 51361 (TRBV7-3, TRBJ2-1)
CTSSLAGGTNEQFF

SEQ ID NO: 102723 - protein, 21 aa, Homo sapiens
  CDR3 for alpha chain variable domain of TCR clone 51362 (TRAV1-1, TRAJ6)
CLLLLRCERLERTGGSYIPTF

SEQ ID NO: 102724 - protein, 16 aa, Homo sapiens
  CDR3 for beta chain variable domain of TCR clone 51362 (TRBV12-5, TRBJ2-5)
CASGPRTSGNQETQYF

SEQ ID NO: 102725 - protein, 14 aa, Homo sapiens
  CDR3 for alpha chain variable domain of TCR clone 51363 (TRAV17, TRAJ54)
CATDANQGTQKLVF

SEQ ID NO: 102726 - protein, 12 aa, Homo sapiens
  CDR3 for beta chain variable domain of TCR clone 51363 (TRBV6-3, TRBJ2-1)
CASSGSYNEQFF

SEQ ID NO: 102727 - protein, 16 aa, Homo sapiens
  CDR3 for alpha chain variable domain of TCR clone 51364 (TRAV12-3, TRAJ53)
CAMSPGSGGSNYKLTF

SEQ ID NO: 102728 - protein, 11 aa, Homo sapiens
  CDR3 for beta chain variable domain of TCR clone 51364 (TRBV29-1, TRBJ2-5)
CCEDRTGTQYF

SEQ ID NO: 102729 - protein, 20 aa, Homo sapiens
  CDR3 for alpha chain variable domain of TCR clone 51365 (TRAV12-3, TRAJ41)
SLFIRDSQPSDSATPEALNF

SEQ ID NO: 102730 - protein, 15 aa, Homo sapiens
  CDR3 for beta chain variable domain of TCR clone 51365 (TRBV5-1, TRBJ2-7)
CASSLDLTSSYEQYV

SEQ ID NO: 102731 - protein, 17 aa, Homo sapiens
  CDR3 for alpha chain variable domain of TCR clone 51366 (TRAV23/DV6, TRAJ3)
CSNHFCFGWSSASKIIF

SEQ ID NO: 102732 - protein, 15 aa, Homo sapiens
  CDR3 for beta chain variable domain of TCR clone 51366 (TRBV19, TRBJ1-6)
CASSTQGAVGSPLHS

SEQ ID NO: 102733 - protein, 12 aa, Homo sapiens
  CDR3 for alpha chain variable domain of TCR clone 51367 (TRAV17, TRAJ39)
RATGAAGNMLTF

SEQ ID NO: 102734 - protein, 14 aa, Homo sapiens
  CDR3 for beta chain variable domain of TCR clone 51367 (TRBV7-9, TRBJ1-2)
CASSRQGANYGYTF

SEQ ID NO: 102735 - protein, 17 aa, Homo sapiens
  CDR3 for alpha chain variable domain of TCR clone 51368 (TRAV4, TRAJ18)
CLVGERSVGSTLGRLYF

SEQ ID NO: 102736 - protein, 16 aa, Homo sapiens
  CDR3 for beta chain variable domain of TCR clone 51368 (TRBV4-2, TRBJ1-1)
CASSTSPGRAAPEAFF

SEQ ID NO: 102737 - protein, 13 aa, Homo sapiens
  CDR3 for alpha chain variable domain of TCR clone 51369 (TRAV21, TRAJ27)
CAARPGNAGKPTF

SEQ ID NO: 102738 - protein, 13 aa, Homo sapiens
  CDR3 for beta chain variable domain of TCR clone 51369 (TRBV27, TRBJ2-1)
CASRTLGVGEQFF

SEQ ID NO: 102739 - protein, 14 aa, Homo sapiens
  CDR3 for alpha chain variable domain of TCR clone 51370 (TRAV26-1, TRAJ45)
CIEVTGGGADALTF

SEQ ID NO: 102740 - protein, 13 aa, Homo sapiens
  CDR3 for beta chain variable domain of TCR clone 51370 (TRBV7-6, TRBJ1-2)
CASSLVADYGYTF

SEQ ID NO: 102741 - protein, 19 aa, Homo sapiens
  CDR3 for alpha chain variable domain of TCR clone 51371 (TRAV2, TRAJ20)
ILQVREADAAVYRDCKLSF

SEQ ID NO: 102742 - protein, 17 aa, Homo sapiens
  CDR3 for beta chain variable domain of TCR clone 51371 (TRBV11-2, TRBJ2-1)
CASSLYLPGVEYNEQFF

SEQ ID NO: 102743 - protein, 15 aa, Homo sapiens
  CDR3 for alpha chain variable domain of TCR clone 51372 (TRAV12-2, TRAJ53)
CAVNGGGGSNYKLTF

SEQ ID NO: 102744 - protein, 16 aa, Homo sapiens
  CDR3 for beta chain variable domain of TCR clone 51372 (TRBV11-3, TRBJ2-7)
CASSPHGAGGPYEQYF

SEQ ID NO: 102745 - protein, 16 aa, Homo sapiens
  CDR3 for alpha chain variable domain of TCR clone 51373 (TRAV16, TRAJ52)
CALSGAGGTSYGKLTF

SEQ ID NO: 102746 - protein, 14 aa, Homo sapiens
  CDR3 for beta chain variable domain of TCR clone 51373 (TRBV19, TRBJ1-2)
CASSLQGQAYGYTF

SEQ ID NO: 102747 - protein, 14 aa, Homo sapiens
  CDR3 for alpha chain variable domain of TCR clone 51374 (TRAV12-1, TRAJ12)
CVVTRMDSSYKLIF

SEQ ID NO: 102748 - protein, 13 aa, Homo sapiens
  CDR3 for beta chain variable domain of TCR clone 51374 (TRBV20-1, TRBJ1-1)
CSDRGGGNTEAFF

SEQ ID NO: 102749 - protein, 14 aa, Homo sapiens
  CDR3 for alpha chain variable domain of TCR clone 51375 (TRAV8-3, TRAJ9)
CAVVYNTGGFKTIF

SEQ ID NO: 102750 - protein, 14 aa, Homo sapiens
  CDR3 for beta chain variable domain of TCR clone 51375 (TRBV7-3, TRBJ2-2)
CASSSGGYNGELFF

SEQ ID NO: 102751 - protein, 15 aa, Homo sapiens
  CDR3 for alpha chain variable domain of TCR clone 51376 (TRAV12-3, TRAJ48)
CAMNAKNFGNEKLTF

SEQ ID NO: 102752 - protein, 14 aa, Homo sapiens
  CDR3 for beta chain variable domain of TCR clone 51376 (TRBV2, TRBJ1-6)
CASSESRDNSPLHF

SEQ ID NO: 102753 - protein, 17 aa, Homo sapiens
  CDR3 for alpha chain variable domain of TCR clone 51377 (TRAV26-1, TRAJ37)
CIVRVITVSSNTGKLIF

SEQ ID NO: 102754 - protein, 14 aa, Homo sapiens
  CDR3 for beta chain variable domain of TCR clone 51377 (TRBV7-2, TRBJ2-7)
CASSPKTSFYEQYF

SEQ ID NO: 102755 - protein, 13 aa, Homo sapiens
  CDR3 for alpha chain variable domain of TCR clone 51378 (TRAV27, TRAJ29)
CAGAHSGNTPLAF

SEQ ID NO: 102756 - protein, 14 aa, Homo sapiens
  CDR3 for beta chain variable domain of TCR clone 51378 (TRBV7-9, TRBJ2-7)
CASSIGQGAGEQYF

SEQ ID NO: 102757 - protein, 12 aa, Homo sapiens
  CDR3 for alpha chain variable domain of TCR clone 51379 (TRAV3, TRAJ26)
CAVRDHGQNFVF

SEQ ID NO: 102758 - protein, 16 aa, Homo sapiens
  CDR3 for beta chain variable domain of TCR clone 51379 (TRBV11-2, TRBJ1-2)
CASSPSGREANYGYTF

SEQ ID NO: 102759 - protein, 12 aa, Homo sapiens
  CDR3 for alpha chain variable domain of TCR clone 51380 (TRAV29/DV5, TRAJ34)
CAASDNTDKLIF

SEQ ID NO: 102760 - protein, 13 aa, Homo sapiens
  CDR3 for beta chain variable domain of TCR clone 51380 (TRBV15, TRBJ1-6)
CATSGGLNSPLHF

SEQ ID NO: 102761 - protein, 18 aa, Homo sapiens
  CDR3 for alpha chain variable domain of TCR clone 51381 (TRAV21, TRAJ52)
CAVRPSPAGGTSYGKLTF

SEQ ID NO: 102762 - protein, 12 aa, Homo sapiens
  CDR3 for beta chain variable domain of TCR clone 51381 (TRBV6-3, TRBJ2-7)
CASSLTPYEQYF

SEQ ID NO: 102763 - protein, 13 aa, Homo sapiens
  CDR3 for alpha chain variable domain of TCR clone 51382 (TRAV21, TRAJ57)
CAVTQGGSEKLVF

SEQ ID NO: 102764 - protein, 15 aa, Homo sapiens
  CDR3 for beta chain variable domain of TCR clone 51382 (TRBV12-4, TRBJ2-5)
CASSPPTGLQETQYF

SEQ ID NO: 102765 - protein, 15 aa, Homo sapiens
  CDR3 for alpha chain variable domain of TCR clone 51383 (TRAV17, TRAJ57)
CATGPSQGGSEKLVL

SEQ ID NO: 102766 - protein, 15 aa, Homo sapiens
  CDR3 for beta chain variable domain of TCR clone 51383 (TRBV25-1, TRBJ1-4)
CASSPGDSTNEKLFF

SEQ ID NO: 102767 - protein, 16 aa, Homo sapiens
  CDR3 for alpha chain variable domain of TCR clone 51384 (TRAV3, TRAJ37)
CAVRPHGSGNTGELIF

SEQ ID NO: 102768 - protein, 16 aa, Homo sapiens
  CDR3 for beta chain variable domain of TCR clone 51384 (TRBV9, TRBJ1-2)
CASSVEEKVSPYGYTF

SEQ ID NO: 102769 - protein, 12 aa, Homo sapiens
  CDR3 for alpha chain variable domain of TCR clone 51385 (TRAV25, TRAJ31)
CAGHLNNARLMF

SEQ ID NO: 102770 - protein, 15 aa, Homo sapiens
  CDR3 for beta chain variable domain of TCR clone 51385 (TRBV5-1, TRBJ1-4)
FAPAAWKDGNEKLFF

SEQ ID NO: 102771 - protein, 13 aa, Homo sapiens
  CDR3 for alpha chain variable domain of TCR clone 51386 (TRAV38-1, TRAJ42)
CARWGGSQGNLIF

SEQ ID NO: 102772 - protein, 15 aa, Homo sapiens
  CDR3 for beta chain variable domain of TCR clone 51386 (TRBV2, TRBJ2-7)
CASSEGLARSYEQYF

SEQ ID NO: 102773 - protein, 13 aa, Homo sapiens
  CDR3 for alpha chain variable domain of TCR clone 51387 (TRAV2, TRAJ37)
CAVSSGNTGKLIF

SEQ ID NO: 102774 - protein, 17 aa, Homo sapiens
  CDR3 for beta chain variable domain of TCR clone 51387 (TRBV5-1, TRBJ2-5)
CASSLLGLAANQETQYF

SEQ ID NO: 102775 - protein, 20 aa, Homo sapiens
  CDR3 for alpha chain variable domain of TCR clone 51388 (TRAV12-3, TRAJ42)
SPVIQPPTSVKGGSQGNLIF

SEQ ID NO: 102776 - protein, 18 aa, Homo sapiens
  CDR3 for beta chain variable domain of TCR clone 51388 (TRBV11-2, TRBJ2-3)
CASSLGGASRGAPNTQYF

SEQ ID NO: 102777 - protein, 16 aa, Homo sapiens
  CDR3 for alpha chain variable domain of TCR clone 51389 (TRAV17, TRAJ22)
CATGPISSGSARQLPF

SEQ ID NO: 102778 - protein, 13 aa, Homo sapiens
  CDR3 for beta chain variable domain of TCR clone 51389 (TRBV11-2, TRBJ2-1)
CASSLGLAGGRFF

SEQ ID NO: 102779 - protein, 16 aa, Homo sapiens
  CDR3 for alpha chain variable domain of TCR clone 51390 (TRAV3, TRAJ10)
CAVRDMRAGGGNKITF

SEQ ID NO: 102780 - protein, 15 aa, Homo sapiens
  CDR3 for beta chain variable domain of TCR clone 51390 (TRBV9, TRBJ1-6)
CASSVAGTGDSPLHF

SEQ ID NO: 102781 - protein, 16 aa, Homo sapiens
  CDR3 for alpha chain variable domain of TCR clone 51391 (TRAV30, TRAJ24)
CGTEVVDADGWGKFQF

SEQ ID NO: 102782 - protein, 14 aa, Homo sapiens
  CDR3 for beta chain variable domain of TCR clone 51391 (TRBV12-5, TRBJ2-5)
CASGSRTHQETQYF

SEQ ID NO: 102783 - protein, 14 aa, Homo sapiens
  CDR3 for alpha chain variable domain of TCR clone 51392 (TRAV16, TRAJ33)
CALSAMDSNYQLIW

SEQ ID NO: 102784 - protein, 12 aa, Homo sapiens
  CDR3 for beta chain variable domain of TCR clone 51392 (TRBV5-1, TRBJ1-2)
CASSQDTYDYTF

SEQ ID NO: 102785 - protein, 14 aa, Homo sapiens
  CDR3 for alpha chain variable domain of TCR clone 51393 (TRAV13-1, TRAJ44)
RAAKATGTASKLTF

SEQ ID NO: 102786 - protein, 17 aa, Homo sapiens
  CDR3 for beta chain variable domain of TCR clone 51393 (TRBV7-3, TRBJ2-3)
CASSLMKRMRGADTQYF

SEQ ID NO: 102787 - protein, 15 aa, Homo sapiens
  CDR3 for alpha chain variable domain of TCR clone 51394 (TRAV12-2, TRAJ53)
CAVNGGGGCNYKLTF

SEQ ID NO: 102788 - protein, 17 aa, Homo sapiens
  CDR3 for beta chain variable domain of TCR clone 51394 (TRBV7-3, TRBJ2-3)
CASSLMKRMRGADTQYF

SEQ ID NO: 102789 - protein, 14 aa, Homo sapiens
  CDR3 for alpha chain variable domain of TCR clone 51395 (TRAV12-2, TRAJ13)
CAVKKTGGYQKVTF

SEQ ID NO: 102790 - protein, 14 aa, Homo sapiens
  CDR3 for beta chain variable domain of TCR clone 51395 (TRBV12-4, TRBJ2-2)
CASNQGANTGELFF

SEQ ID NO: 102791 - protein, 15 aa, Homo sapiens
  CDR3 for alpha chain variable domain of TCR clone 51396 (TRAV21, TRAJ40)
CAVRPQTSGTYKYIF

SEQ ID NO: 102792 - protein, 13 aa, Homo sapiens
  CDR3 for beta chain variable domain of TCR clone 51396 (TRBV7-2, TRBJ2-2)
CASSSVRAGEPFF

SEQ ID NO: 102793 - protein, 14 aa, Homo sapiens
  CDR3 for alpha chain variable domain of TCR clone 51397 (TRAV23/DV6, TRAJ4)
CAAPSSGGYNKLIF

SEQ ID NO: 102794 - protein, 15 aa, Homo sapiens
  CDR3 for beta chain variable domain of TCR clone 51397 (TRBV7-9, TRBJ1-5)
CASSQGHQPNQPQHF

SEQ ID NO: 102795 - protein, 15 aa, Homo sapiens
  CDR3 for alpha chain variable domain of TCR clone 51398 (TRAV27, TRAJ38)
CAARRNAGNNRKLIW

SEQ ID NO: 102796 - protein, 13 aa, Homo sapiens
  CDR3 for beta chain variable domain of TCR clone 51398 (TRBV12-5, TRBJ2-3)
CASGDRQADTQYF

SEQ ID NO: 102797 - protein, 17 aa, Homo sapiens
  CDR3 for alpha chain variable domain of TCR clone 51399 (TRAV3, TRAJ42)
CAVRDRDYGGSQGNLIF

SEQ ID NO: 102798 - protein, 15 aa, Homo sapiens
  CDR3 for beta chain variable domain of TCR clone 51399 (TRBV6-6, TRBJ2-7)
CASSYSYGSSYEQYF

SEQ ID NO: 102799 - protein, 17 aa, Homo sapiens
  CDR3 for alpha chain variable domain of TCR clone 51400 (TRAV8-6, TRAJ58)
CAVSSWVGETSGSRLTF

SEQ ID NO: 102800 - protein, 14 aa, Homo sapiens
  CDR3 for beta chain variable domain of TCR clone 51400 (TRBV4-2, TRBJ2-1)
CTSGMDRAYNEQFF

SEQ ID NO: 102801 - protein, 13 aa, Homo sapiens
  CDR3 for alpha chain variable domain of TCR clone 51401 (TRAV13-2, TRAJ48)
CAEMDFGDEKLTF

SEQ ID NO: 102802 - protein, 14 aa, Homo sapiens
  CDR3 for beta chain variable domain of TCR clone 51401 (TRBV19, TRBJ1-5)
CASGTEVYNQPQHF

SEQ ID NO: 102803 - protein, 16 aa, Homo sapiens
  CDR3 for alpha chain variable domain of TCR clone 51402 (TRAV20, TRAJ10)
CAVLRGLTGGGSKLTL

SEQ ID NO: 102804 - protein, 14 aa, Homo sapiens
  CDR3 for beta chain variable domain of TCR clone 51402 (TRBV19, TRBJ1-5)
RASRAPDSFLSQHF

SEQ ID NO: 102805 - protein, 14 aa, Homo sapiens
  CDR3 for alpha chain variable domain of TCR clone 51403 (TRAV8-3, TRAJ4)
CAVGAAGGYNKLIF

SEQ ID NO: 102806 - protein, 13 aa, Homo sapiens
  CDR3 for beta chain variable domain of TCR clone 51403 (TRBV20-1, TRBJ1-1)
CSARGGGNTEAFF

SEQ ID NO: 102807 - protein, 11 aa, Homo sapiens
  CDR3 for alpha chain variable domain of TCR clone 51404 (TRAV12-2, TRAJ3)
CAVKRASKIIF

SEQ ID NO: 102808 - protein, 14 aa, Homo sapiens
  CDR3 for beta chain variable domain of TCR clone 51404 (TRBV4-1, TRBJ2-2)
CASSQAVNTGELFF

SEQ ID NO: 102809 - protein, 14 aa, Homo sapiens
  CDR3 for alpha chain variable domain of TCR clone 51405 (TRAV13-1, TRAJ40)
CAARSTSGTYKYIL

SEQ ID NO: 102810 - protein, 15 aa, Homo sapiens
  CDR3 for beta chain variable domain of TCR clone 51405 (TRBV18, TRBJ1-5)
CASSETGGNNQPQHF

SEQ ID NO: 102811 - protein, 14 aa, Homo sapiens
  CDR3 for alpha chain variable domain of TCR clone 51406 (TRAV26-1, TRAJ45)
CIVRVVGGAEGLTF

SEQ ID NO: 102812 - protein, 16 aa, Homo sapiens
  CDR3 for beta chain variable domain of TCR clone 51406 (TRBV7-9, TRBJ1-1)
CASSLTQVRSNTEAFF

SEQ ID NO: 102813 - protein, 13 aa, Homo sapiens
  CDR3 for alpha chain variable domain of TCR clone 51407 (TRAV3, TRAJ21)
CAVREPAFNKFYF

SEQ ID NO: 102814 - protein, 18 aa, Homo sapiens
  CDR3 for beta chain variable domain of TCR clone 51407 (TRBV11-2, TRBJ2-3)
CASSLGGASRGAPNTQYF

SEQ ID NO: 102815 - protein, 14 aa, Homo sapiens
  CDR3 for alpha chain variable domain of TCR clone 51408 (TRAV38-1, TRAJ45)
CASHSGGVADGLTF

SEQ ID NO: 102816 - protein, 13 aa, Homo sapiens
  CDR3 for beta chain variable domain of TCR clone 51408 (TRBV10-3, TRBJ1-2)
CAISERDSYGYTF

SEQ ID NO: 102817 - protein, 12 aa, Homo sapiens
  CDR3 for alpha chain variable domain of TCR clone 51409 (TRAV13-1, TRAJ21)
CATTINFNKFYF

SEQ ID NO: 102818 - protein, 14 aa, Homo sapiens
  CDR3 for beta chain variable domain of TCR clone 51409 (TRBV7-2, TRBJ2-7)
CASSPKTSFYEQYL

SEQ ID NO: 102819 - protein, 14 aa, Homo sapiens
  CDR3 for alpha chain variable domain of TCR clone 51410 (TRAV8-4, TRAJ13)
CAVTLSGGYQKATF

SEQ ID NO: 102820 - protein, 16 aa, Homo sapiens
  CDR3 for beta chain variable domain of TCR clone 51410 (TRBV19, TRBJ2-2)
CASRSPGTGATGELFF

SEQ ID NO: 102821 - protein, 12 aa, Homo sapiens
  CDR3 for alpha chain variable domain of TCR clone 51411 (TRAV12-3, TRAJ17)
CAMTLTGNKLTF

SEQ ID NO: 102822 - protein, 12 aa, Homo sapiens
  CDR3 for beta chain variable domain of TCR clone 51411 (TRBV12-4, TRBJ1-3)
CASSFSGNTIYF

SEQ ID NO: 102823 - protein, 13 aa, Homo sapiens
  CDR3 for alpha chain variable domain of TCR clone 51412 (TRAV1-1, TRAJ23)
CAVLANQGGKLIF

SEQ ID NO: 102824 - protein, 16 aa, Homo sapiens
  CDR3 for beta chain variable domain of TCR clone 51412 (TRBV5-5, TRBJ1-2)
CASSPTWGRGLYGYTF

SEQ ID NO: 102825 - protein, 14 aa, Homo sapiens
  CDR3 for alpha chain variable domain of TCR clone 51413 (TRAV12-3, TRAJ10)
SHLPLTGGGNKLTF

SEQ ID NO: 102826 - protein, 17 aa, Homo sapiens
  CDR3 for beta chain variable domain of TCR clone 51413 (TRBV25-1, TRBJ2-1)
CASSAYGQGRGVYEQFF

SEQ ID NO: 102827 - protein, 12 aa, Homo sapiens
  CDR3 for alpha chain variable domain of TCR clone 51414 (TRAV13-1, TRAJ21)
CAAKKGLNKFYF

SEQ ID NO: 102828 - protein, 14 aa, Homo sapiens
  CDR3 for beta chain variable domain of TCR clone 51414 (TRBV5-4, TRBJ1-1)
CASSLDSRRDEAFF

SEQ ID NO: 102829 - protein, 14 aa, Homo sapiens
  CDR3 for alpha chain variable domain of TCR clone 51415 (TRAV8-1, TRAJ34)
CALPRGTTSSSLGL

SEQ ID NO: 102830 - protein, 15 aa, Homo sapiens
  CDR3 for beta chain variable domain of TCR clone 51415 (TRBV20-1, TRBJ2-7)
CSARDRVSGMDEQYF

SEQ ID NO: 102831 - protein, 12 aa, Homo sapiens
  CDR3 for alpha chain variable domain of TCR clone 51416 (TRAV2, TRAJ10)
CASTGGGNKLTF

SEQ ID NO: 102832 - protein, 20 aa, Homo sapiens
  CDR3 for beta chain variable domain of TCR clone 51416 (TRBV7-8, TRBJ2-2)
CAWSHLFPGPTIHITGELFF

SEQ ID NO: 102833 - protein, 13 aa, Homo sapiens
  CDR3 for alpha chain variable domain of TCR clone 51417 (TRAV2, TRAJ40)
CAMVTSGTYKYIF

SEQ ID NO: 102834 - protein, 14 aa, Homo sapiens
  CDR3 for beta chain variable domain of TCR clone 51417 (TRBV19, TRBJ2-1)
CASPTFVSSGEQFF

SEQ ID NO: 102835 - protein, 17 aa, Homo sapiens
  CDR3 for alpha chain variable domain of TCR clone 51418 (TRAV26-1, TRAJ22)
CIVRVPSHSGPARQLTF

SEQ ID NO: 102836 - protein, 16 aa, Homo sapiens
  CDR3 for beta chain variable domain of TCR clone 51418 (TRBV28, TRBJ2-1)
CASRRSGRVVGNEQFF

SEQ ID NO: 102837 - protein, 15 aa, Homo sapiens
  CDR3 for alpha chain variable domain of TCR clone 51419 (TRAV8-4, TRAJ11)
CAVSRALSGYSTPTF

SEQ ID NO: 102838 - protein, 13 aa, Homo sapiens
  CDR3 for beta chain variable domain of TCR clone 51419 (TRBV10-3, TRBJ2-7)
CASKLAVNYEQYF

SEQ ID NO: 102839 - protein, 13 aa, Homo sapiens
  CDR3 for alpha chain variable domain of TCR clone 51420 (TRAV12-2, TRAJ42)
CAVKRGSQGNLIF

SEQ ID NO: 102840 - protein, 12 aa, Homo sapiens
  CDR3 for beta chain variable domain of TCR clone 51420 (TRBV5-7, TRBJ1-2)
CASSLVQNGCTF

SEQ ID NO: 102841 - protein, 13 aa, Homo sapiens
  CDR3 for alpha chain variable domain of TCR clone 51421 (TRAV8-3, TRAJ48)
CAVVPFGNEKFTF

SEQ ID NO: 102842 - protein, 15 aa, Homo sapiens
  CDR3 for beta chain variable domain of TCR clone 51421 (TRBV11-2, TRBJ2-1)
CASSSPSTRYNEQFF

SEQ ID NO: 102843 - protein, 13 aa, Homo sapiens
  CDR3 for alpha chain variable domain of TCR clone 51422 (TRAV21, TRAJ27)
CAARPGNAGKSTF

SEQ ID NO: 102844 - protein, 14 aa, Homo sapiens
  CDR3 for beta chain variable domain of TCR clone 51422 (TRBV7-6, TRBJ2-3)
CASSLGTLTDTQYF

SEQ ID NO: 102845 - protein, 13 aa, Homo sapiens
  CDR3 for alpha chain variable domain of TCR clone 51423 (TRAV12-2, TRAJ50)
CAVIVTSYDKVIF

SEQ ID NO: 102846 - protein, 14 aa, Homo sapiens
  CDR3 for beta chain variable domain of TCR clone 51423 (TRBV9, TRBJ2-1)
CASSVDPRGKEQLF

SEQ ID NO: 102847 - protein, 12 aa, Homo sapiens
  CDR3 for alpha chain variable domain of TCR clone 51424 (TRAV36/DV7, TRAJ54)
CAVVLGAQKLVF

SEQ ID NO: 102848 - protein, 14 aa, Homo sapiens
  CDR3 for beta chain variable domain of TCR clone 51424 (TRBV7-3, TRBJ1-1)
CASSLKGGNTEAFF

SEQ ID NO: 102849 - protein, 16 aa, Homo sapiens
  CDR3 for alpha chain variable domain of TCR clone 51425 (TRAV30, TRAJ24)
CGTEIVDADSCGKFQF

SEQ ID NO: 102850 - protein, 17 aa, Homo sapiens
  CDR3 for beta chain variable domain of TCR clone 51425 (TRBV20-1, TRBJ2-2)
CSASGSGQGGLTGELFF

SEQ ID NO: 102851 - protein, 12 aa, Homo sapiens
  CDR3 for alpha chain variable domain of TCR clone 51426 (TRAV13-1, TRAJ53)
CAAGGSNYKLTF

SEQ ID NO: 102852 - protein, 11 aa, Homo sapiens
  CDR3 for beta chain variable domain of TCR clone 51426 (TRBV2, TRBJ1-1)
CASREGTEAVF

SEQ ID NO: 102853 - protein, 17 aa, Homo sapiens
  CDR3 for alpha chain variable domain of TCR clone 51427 (TRAV3, )
CAVSSNSGYPEPSPCRV

SEQ ID NO: 102854 - protein, 13 aa, Homo sapiens
  CDR3 for beta chain variable domain of TCR clone 51427 (TRBV20-1, TRBJ2-2)
CSALSGGAGELFF

SEQ ID NO: 102855 - protein, 11 aa, Homo sapiens
  CDR3 for alpha chain variable domain of TCR clone 51428 (TRAV21, TRAJ9)
CAVPGGFETIF

SEQ ID NO: 102856 - protein, 12 aa, Homo sapiens
  CDR3 for beta chain variable domain of TCR clone 51428 (TRBV20-1, TRBJ2-3)
CSARVGTDTQYF

SEQ ID NO: 102857 - protein, 15 aa, Homo sapiens
  CDR3 for alpha chain variable domain of TCR clone 51429 (TRAV9-2, TRAJ9)
CALSLTNTGGFKTVF

SEQ ID NO: 102858 - protein, 13 aa, Homo sapiens
  CDR3 for beta chain variable domain of TCR clone 51429 (TRBV7-3, TRBJ2-5)
CASSFRGGETQYF

SEQ ID NO: 102859 - protein, 15 aa, Homo sapiens
  CDR3 for alpha chain variable domain of TCR clone 51430 (TRAV12-1, TRAJ37)
CVVNLPTSNTGKLIF

SEQ ID NO: 102860 - protein, 16 aa, Homo sapiens
  CDR3 for beta chain variable domain of TCR clone 51430 (TRBV2, TRBJ2-1)
CASWSPAGGKYNEQFF

SEQ ID NO: 102861 - protein, 11 aa, Homo sapiens
  CDR3 for alpha chain variable domain of TCR clone 51431 (TRAV35, TRAJ30)
CAPGGDDKIIF

SEQ ID NO: 102862 - protein, 15 aa, Homo sapiens
  CDR3 for beta chain variable domain of TCR clone 51431 (TRBV20-1, TRBJ2-7)
CSARDRVSGMDEQHF

SEQ ID NO: 102863 - protein, 15 aa, Homo sapiens
  CDR3 for alpha chain variable domain of TCR clone 51432 (TRAV12-1, TRAJ9)
CAVSFGDTGGFKTIF

SEQ ID NO: 102864 - protein, 12 aa, Homo sapiens
  CDR3 for beta chain variable domain of TCR clone 51432 (TRBV11-3, TRBJ1-1)
CASSHRQGEAFF

SEQ ID NO: 102865 - protein, 12 aa, Homo sapiens
  CDR3 for alpha chain variable domain of TCR clone 51433 (TRAV21, TRAJ29)
CAVTSGNTPLVL

SEQ ID NO: 102866 - protein, 15 aa, Homo sapiens
  CDR3 for beta chain variable domain of TCR clone 51433 (TRBV12-4, TRBJ1-2)
CASRLGVAGNYGYTF

SEQ ID NO: 102867 - protein, 13 aa, Homo sapiens
  CDR3 for alpha chain variable domain of TCR clone 51434 (TRAV8-6, TRAJ49)
CAVITNTGNQFYF

SEQ ID NO: 102868 - protein, 15 aa, Homo sapiens
  CDR3 for beta chain variable domain of TCR clone 51434 (TRBV27, TRBJ2-1)
CASSNGGGSSNEQFF

SEQ ID NO: 102869 - protein, 14 aa, Homo sapiens
  CDR3 for alpha chain variable domain of TCR clone 51435 (TRAV17, TRAJ16)
CATADFSDGQKLLF

SEQ ID NO: 102870 - protein, 15 aa, Homo sapiens
  CDR3 for beta chain variable domain of TCR clone 51435 (TRBV18, TRBJ2-1)
CASSPPSDPYNEQFF

SEQ ID NO: 102871 - protein, 16 aa, Homo sapiens
  CDR3 for alpha chain variable domain of TCR clone 51436 (TRAV3, TRAJ10)
CAVRDMRAGGGNKLTF

SEQ ID NO: 102872 - protein, 15 aa, Homo sapiens
  CDR3 for beta chain variable domain of TCR clone 51436 (TRBV20-1, TRBJ2-7)
CSARVPAAYFYEQCF

SEQ ID NO: 102873 - protein, 14 aa, Homo sapiens
  CDR3 for alpha chain variable domain of TCR clone 51437 (TRAV26-1, TRAJ17)
CIVRVAAAGNKLTF

SEQ ID NO: 102874 - protein, 15 aa, Homo sapiens
  CDR3 for beta chain variable domain of TCR clone 51437 (TRBV20-1, TRBJ2-1)
CSARGIGGTYNEQFF

SEQ ID NO: 102875 - protein, 16 aa, Homo sapiens
  CDR3 for alpha chain variable domain of TCR clone 51438 (TRAV26-2, TRAJ23)
CIVRVERYNQGGKLIF

SEQ ID NO: 102876 - protein, 15 aa, Homo sapiens
  CDR3 for beta chain variable domain of TCR clone 51438 (TRBV18, TRBJ2-7)
CASSPRGGKGYEQYF

SEQ ID NO: 102877 - protein, 17 aa, Homo sapiens
  CDR3 for alpha chain variable domain of TCR clone 51439 (TRAV35, TRAJ52)
SAGQLAAGGTSYGKLTF

SEQ ID NO: 102878 - protein, 12 aa, Homo sapiens
  CDR3 for beta chain variable domain of TCR clone 51439 (TRBV20-1, TRBJ2-7)
CSAGRRQSEQYF

SEQ ID NO: 102879 - protein, 12 aa, Homo sapiens
  CDR3 for alpha chain variable domain of TCR clone 51440 (TRAV12-1, TRAJ34)
CVVAGATDKLIF

SEQ ID NO: 102880 - protein, 12 aa, Homo sapiens
  CDR3 for beta chain variable domain of TCR clone 51440 (TRBV11-2, TRBJ2-2)
CASSLGGGELFF

SEQ ID NO: 102881 - protein, 15 aa, Homo sapiens
  CDR3 for alpha chain variable domain of TCR clone 51441 (TRAV21, TRAJ53)
CATLNSGGSNYKLTF

SEQ ID NO: 102882 - protein, 15 aa, Homo sapiens
  CDR3 for beta chain variable domain of TCR clone 51441 (TRBV20-1, TRBJ2-7)
CSARDRVSGMNEQYF

SEQ ID NO: 102883 - protein, 16 aa, Homo sapiens
  CDR3 for alpha chain variable domain of TCR clone 51442 (TRAV12-2, TRAJ32)
CAVNLGQGGATNKLIF

SEQ ID NO: 102884 - protein, 15 aa, Homo sapiens
  CDR3 for beta chain variable domain of TCR clone 51442 (TRBV20-1, TRBJ2-7)
CSARGPLAGGKEQYF

SEQ ID NO: 102885 - protein, 12 aa, Homo sapiens
  CDR3 for alpha chain variable domain of TCR clone 51443 (TRAV13-1, TRAJ40)
CAANSGTYKYIF

SEQ ID NO: 102886 - protein, 13 aa, Homo sapiens
  CDR3 for beta chain variable domain of TCR clone 51443 (TRBV6-1, TRBJ1-2)
CASSELTGYGYTF

SEQ ID NO: 102887 - protein, 13 aa, Homo sapiens
  CDR3 for alpha chain variable domain of TCR clone 51444 (TRAV36/DV7, TRAJ38)
CVANAGNNRKMIW

SEQ ID NO: 102888 - protein, 14 aa, Homo sapiens
  CDR3 for beta chain variable domain of TCR clone 51444 (TRBV7-2, TRBJ2-7)
CASSLRWEVNEQYF

SEQ ID NO: 102889 - protein, 11 aa, Homo sapiens
  CDR3 for alpha chain variable domain of TCR clone 51445 (TRAV23/DV6, TRAJ49)
CAARAGNQFYF

SEQ ID NO: 102890 - protein, 15 aa, Homo sapiens
  CDR3 for beta chain variable domain of TCR clone 51445 (TRBV19, TRBJ1-5)
CASSINFNQPSILVM

SEQ ID NO: 102891 - protein, 14 aa, Homo sapiens
  CDR3 for alpha chain variable domain of TCR clone 51446 (TRAV1-2, TRAJ16)
CAVNRFSDGQKLLF

SEQ ID NO: 102892 - protein, 13 aa, Homo sapiens
  CDR3 for beta chain variable domain of TCR clone 51446 (TRBV10-3, TRBJ2-7)
CAISEKGGYEQYF

SEQ ID NO: 102893 - protein, 12 aa, Homo sapiens
  CDR3 for alpha chain variable domain of TCR clone 51447 (TRAV2, TRAJ10)
CASTGGGNKLTF

SEQ ID NO: 102894 - protein, 14 aa, Homo sapiens
  CDR3 for beta chain variable domain of TCR clone 51447 (TRBV19, TRBJ2-1)
CASPTFVLSGEQFF

SEQ ID NO: 102895 - protein, 14 aa, Homo sapiens
  CDR3 for alpha chain variable domain of TCR clone 51448 (TRAV23/DV6, TRAJ42)
CAASYGGSQGNLIF

SEQ ID NO: 102896 - protein, 16 aa, Homo sapiens
  CDR3 for beta chain variable domain of TCR clone 51448 (TRBV6-1, TRBJ2-5)
CASSETLDRGAETQYF

SEQ ID NO: 102897 - protein, 14 aa, Homo sapiens
  CDR3 for alpha chain variable domain of TCR clone 51449 (TRAV17, TRAJ34)
CATDSLEGTDKLIF

SEQ ID NO: 102898 - protein, 13 aa, Homo sapiens
  CDR3 for beta chain variable domain of TCR clone 51449 (TRBV11-2, TRBJ2-7)
CASSGTRPYKQYF

SEQ ID NO: 102899 - protein, 18 aa, Homo sapiens
  CDR3 for alpha chain variable domain of TCR clone 51450 (TRAV13-1, TRAJ52)
CAASKRSAGGTSYGKLTF

SEQ ID NO: 102900 - protein, 15 aa, Homo sapiens
  CDR3 for beta chain variable domain of TCR clone 51450 (TRBV20-1, TRBJ1-5)
CSAFKNGQRNQPQHF

SEQ ID NO: 102901 - protein, 13 aa, Homo sapiens
  CDR3 for alpha chain variable domain of TCR clone 51451 (TRAV1-2, TRAJ9)
CAALNTGGFKTIF

SEQ ID NO: 102902 - protein, 13 aa, Homo sapiens
  CDR3 for beta chain variable domain of TCR clone 51451 (TRBV19, TRBJ1-2)
CASSVPGQEGYTF

SEQ ID NO: 102903 - protein, 11 aa, Homo sapiens
  CDR3 for alpha chain variable domain of TCR clone 51452 (TRAV3, TRAJ49)
CAPITGNQFYF

SEQ ID NO: 102904 - protein, 14 aa, Homo sapiens
  CDR3 for beta chain variable domain of TCR clone 51452 (TRBV19, TRBJ2-2)
CASSTLHRSGELFF

SEQ ID NO: 102905 - protein, 13 aa, Homo sapiens
  CDR3 for alpha chain variable domain of TCR clone 51453 (TRAV17, TRAJ40)
CAGALGGTYKYIF

SEQ ID NO: 102906 - protein, 16 aa, Homo sapiens
  CDR3 for beta chain variable domain of TCR clone 51453 (TRBV7-2, TRBJ1-4)
CASSLAPGRMDEKLFF

SEQ ID NO: 102907 - protein, 13 aa, Homo sapiens
  CDR3 for alpha chain variable domain of TCR clone 51454 (TRAV39, TRAJ58)
CAGEETRGSRLTF

SEQ ID NO: 102908 - protein, 13 aa, Homo sapiens
  CDR3 for beta chain variable domain of TCR clone 51454 (TRBV15, TRBJ2-7)
CATSTTGHYEQYF

SEQ ID NO: 102909 - protein, 13 aa, Homo sapiens
  CDR3 for alpha chain variable domain of TCR clone 51455 (TRAV13-2, TRAJ53)
CAENMGSNYKLTF

SEQ ID NO: 102910 - protein, 13 aa, Homo sapiens
  CDR3 for beta chain variable domain of TCR clone 51455 (TRBV10-3, TRBJ2-7)
RASKLAVNYEQYF

SEQ ID NO: 102911 - protein, 13 aa, Homo sapiens
  CDR3 for alpha chain variable domain of TCR clone 51456 (TRAV12-3, TRAJ6)
CANPSEGSYIPTF

SEQ ID NO: 102912 - protein, 14 aa, Homo sapiens
  CDR3 for beta chain variable domain of TCR clone 51456 (TRBV19, TRBJ1-1)
CASSRDRDATEAFF

SEQ ID NO: 102913 - protein, 11 aa, Homo sapiens
  CDR3 for alpha chain variable domain of TCR clone 51457 (TRAV3, TRAJ21)
CAVGNFNKSYF

SEQ ID NO: 102914 - protein, 13 aa, Homo sapiens
  CDR3 for beta chain variable domain of TCR clone 51457 (TRBV4-2, TRBJ2-1)
CASSPGTYNEQFF

SEQ ID NO: 102915 - protein, 12 aa, Homo sapiens
  CDR3 for alpha chain variable domain of TCR clone 51458 (TRAV13-1, TRAJ20)
CAASRGDYKLSF

SEQ ID NO: 102916 - protein, 13 aa, Homo sapiens
  CDR3 for beta chain variable domain of TCR clone 51458 (TRBV7-3, TRBJ1-1)
CASSQDWGAEAFF

SEQ ID NO: 102917 - protein, 14 aa, Homo sapiens
  CDR3 for alpha chain variable domain of TCR clone 51459 (TRAV1-2, TRAJ16)
CAVNRFSDGQKLLF

SEQ ID NO: 102918 - protein, 14 aa, Homo sapiens
  CDR3 for beta chain variable domain of TCR clone 51459 (TRBV6-1, TRBJ1-6)
CASSGTAYNSHLHF

SEQ ID NO: 102919 - protein, 14 aa, Homo sapiens
  CDR3 for alpha chain variable domain of TCR clone 51460 (TRAV4, TRAJ26)
CLVGPHNYGQNFVF

SEQ ID NO: 102920 - protein, 17 aa, Homo sapiens
  CDR3 for beta chain variable domain of TCR clone 51460 (TRBV24-1, TRBJ2-1)
CATSDVSTSGTYSEQFF

SEQ ID NO: 102921 - protein, 23 aa, Homo sapiens
  CDR3 for alpha chain variable domain of TCR clone 51461 (TRAV12-2, TRAJ36)
SLLIRDSQPSDSATLERANNLFF

SEQ ID NO: 102922 - protein, 13 aa, Homo sapiens
  CDR3 for beta chain variable domain of TCR clone 51461 (TRBV18, TRBJ2-5)
CASSLQGQETQYF

SEQ ID NO: 102923 - protein, 13 aa, Homo sapiens
  CDR3 for alpha chain variable domain of TCR clone 51462 (TRAV17, TRAJ9)
CATFLTGGFKTIF

SEQ ID NO: 102924 - protein, 14 aa, Homo sapiens
  CDR3 for beta chain variable domain of TCR clone 51462 (TRBV5-5, TRBJ1-5)
CASSGQGVDQPQHF

SEQ ID NO: 102925 - protein, 15 aa, Homo sapiens
  CDR3 for alpha chain variable domain of TCR clone 51463 (TRAV27, TRAJ38)
CAARRNAGNNRKLTW

SEQ ID NO: 102926 - protein, 15 aa, Homo sapiens
  CDR3 for beta chain variable domain of TCR clone 51463 (TRBV9, TRBJ1-6)
CASSVAGTGDSPLHF

SEQ ID NO: 102927 - protein, 13 aa, Homo sapiens
  CDR3 for alpha chain variable domain of TCR clone 51464 (TRAV13-2, TRAJ48)
CAEMDFGNEKLTF

SEQ ID NO: 102928 - protein, 15 aa, Homo sapiens
  CDR3 for beta chain variable domain of TCR clone 51464 (TRBV7-9, TRBJ1-6)
CASSSPGHGNSPLHF

SEQ ID NO: 102929 - protein, 14 aa, Homo sapiens
  CDR3 for alpha chain variable domain of TCR clone 51465 (TRAV30, TRAJ33)
CGTVAPRSNYQLIW

SEQ ID NO: 102930 - protein, 16 aa, Homo sapiens
  CDR3 for beta chain variable domain of TCR clone 51465 (TRBV3-1, TRBJ2-5)
CASSPGQFNGFETQYF

SEQ ID NO: 102931 - protein, 14 aa, Homo sapiens
  CDR3 for alpha chain variable domain of TCR clone 51466 (TRAV26-1, TRAJ45)
CIEVTGGGADGLTF

SEQ ID NO: 102932 - protein, 13 aa, Homo sapiens
  CDR3 for beta chain variable domain of TCR clone 51466 (TRBV7-6, TRBJ1-2)
CARSLVADYGYTF

SEQ ID NO: 102933 - protein, 14 aa, Homo sapiens
  CDR3 for alpha chain variable domain of TCR clone 51467 (TRAV16, TRAJ33)
CALSAMDSNYQLIW

SEQ ID NO: 102934 - protein, 16 aa, Homo sapiens
  CDR3 for beta chain variable domain of TCR clone 51467 (TRBV12-4, TRBJ2-3)
CASSFPSNTNADTQCF

SEQ ID NO: 102935 - protein, 12 aa, Homo sapiens
  CDR3 for alpha chain variable domain of TCR clone 51468 (TRAV8-3, TRAJ41)
CAVALSGYALNF

SEQ ID NO: 102936 - protein, 18 aa, Homo sapiens
  CDR3 for beta chain variable domain of TCR clone 51468 (TRBV20-1, TRBJ2-6)
CSVETTPTHGSGANVLTF

SEQ ID NO: 102937 - protein, 10 aa, Homo sapiens
  CDR3 for alpha chain variable domain of TCR clone 51469 (TRAV38-2/DV8, TRAJ40)
CASGTYKYIF

SEQ ID NO: 102938 - protein, 14 aa, Homo sapiens
  CDR3 for beta chain variable domain of TCR clone 51469 (TRBV7-9, TRBJ2-1)
CASSPRDSPYEQFF

SEQ ID NO: 102939 - protein, 14 aa, Homo sapiens
  CDR3 for alpha chain variable domain of TCR clone 51470 (TRAV1-2, TRAJ8)
CAVREDTGFQKLVF

SEQ ID NO: 102940 - protein, 17 aa, Homo sapiens
  CDR3 for beta chain variable domain of TCR clone 51470 (TRBV11-2, TRBJ2-1)
CASSLSPPGVEYNEQFF

SEQ ID NO: 102941 - protein, 14 aa, Homo sapiens
  CDR3 for alpha chain variable domain of TCR clone 51471 (TRAV26-1, TRAJ16)
CIVRVPSDGRKLLF

SEQ ID NO: 102942 - protein, 17 aa, Homo sapiens
  CDR3 for beta chain variable domain of TCR clone 51471 (TRBV20-1, TRBJ2-1)
CSASSSGLAGSYNEQFF

SEQ ID NO: 102943 - protein, 12 aa, Homo sapiens
  CDR3 for alpha chain variable domain of TCR clone 51472 (TRAV17, TRAJ12)
CATLRSSYKLIF

SEQ ID NO: 102944 - protein, 16 aa, Homo sapiens
  CDR3 for beta chain variable domain of TCR clone 51472 (TRBV28, TRBJ2-7)
CASSLFFDTGGPEQYF

SEQ ID NO: 102945 - protein, 14 aa, Homo sapiens
  CDR3 for alpha chain variable domain of TCR clone 51473 (TRAV3, TRAJ21)
CAVRDKYNLNKFYF

SEQ ID NO: 102946 - protein, 14 aa, Homo sapiens
  CDR3 for beta chain variable domain of TCR clone 51473 (TRBV27, TRBJ2-3)
CASRDSPITDTQYF

SEQ ID NO: 102947 - protein, 14 aa, Homo sapiens
  CDR3 for alpha chain variable domain of TCR clone 51474 (TRAV1-2, TRAJ27)
CAVRSGTNAGKSTF

SEQ ID NO: 102948 - protein, 15 aa, Homo sapiens
  CDR3 for beta chain variable domain of TCR clone 51474 (TRBV18, TRBJ2-7)
CASTPLQGRTYEQYF

SEQ ID NO: 102949 - protein, 14 aa, Homo sapiens
  CDR3 for alpha chain variable domain of TCR clone 51475 (TRAV12-2, TRAJ13)
CAVKKTGGYQNVTF

SEQ ID NO: 102950 - protein, 12 aa, Homo sapiens
  CDR3 for beta chain variable domain of TCR clone 51475 (TRBV12-4, TRBJ1-2)
CASSFIWLHLRF

SEQ ID NO: 102951 - protein, 15 aa, Homo sapiens
  CDR3 for alpha chain variable domain of TCR clone 51476 (TRAV3, TRAJ4)
WAVRDGTGGYNKLIF

SEQ ID NO: 102952 - protein, 16 aa, Homo sapiens
  CDR3 for beta chain variable domain of TCR clone 51476 (TRBV27, TRBJ2-2)
CASSSSGVSNTGELFF

SEQ ID NO: 102953 - protein, 16 aa, Homo sapiens
  CDR3 for alpha chain variable domain of TCR clone 51477 (TRAV3, TRAJ37)
CAVRGKGSGTTGKLIF

SEQ ID NO: 102954 - protein, 13 aa, Homo sapiens
  CDR3 for beta chain variable domain of TCR clone 51477 (TRBV14, TRBJ2-7)
CASSQDRRYEQYF

SEQ ID NO: 102955 - protein, 14 aa, Homo sapiens
  CDR3 for alpha chain variable domain of TCR clone 51478 (TRAV12-2, TRAJ17)
CAVNIKAAGNKLTL

SEQ ID NO: 102956 - protein, 13 aa, Homo sapiens
  CDR3 for beta chain variable domain of TCR clone 51478 (TRBV4-1, TRBJ2-2)
CASSQENTGELFF

SEQ ID NO: 102957 - protein, 14 aa, Homo sapiens
  CDR3 for alpha chain variable domain of TCR clone 51479 (TRAV8-2, TRAJ11)
CVVSEKSGYSTLTF

SEQ ID NO: 102958 - protein, 16 aa, Homo sapiens
  CDR3 for beta chain variable domain of TCR clone 51479 (TRBV28, TRBJ2-1)
CASISPEYPRDNEQFF

SEQ ID NO: 102959 - protein, 15 aa, Homo sapiens
  CDR3 for alpha chain variable domain of TCR clone 51480 (TRAV9-2, TRAJ28)
CALSISGAGSYQLTF

SEQ ID NO: 102960 - protein, 14 aa, Homo sapiens
  CDR3 for beta chain variable domain of TCR clone 51480 (TRBV7-3, TRBJ1-1)
CASSLKGGNTEAFF

SEQ ID NO: 102961 - protein, 14 aa, Homo sapiens
  CDR3 for alpha chain variable domain of TCR clone 51481 (TRAV16, TRAJ37)
CALDISGNTGKLIF

SEQ ID NO: 102962 - protein, 13 aa, Homo sapiens
  CDR3 for beta chain variable domain of TCR clone 51481 (TRBV19, TRBJ1-2)
CASSQGQVYGYTF

SEQ ID NO: 102963 - protein, 16 aa, Homo sapiens
  CDR3 for alpha chain variable domain of TCR clone 51482 (TRAV26-1, TRAJ38)
CIVRVELGGNNRNLIW

SEQ ID NO: 102964 - protein, 14 aa, Homo sapiens
  CDR3 for beta chain variable domain of TCR clone 51482 (TRBV5-1, TRBJ2-3)
CASSPGLAADTQYF

SEQ ID NO: 102965 - protein, 11 aa, Homo sapiens
  CDR3 for alpha chain variable domain of TCR clone 51483 (TRAV16, TRAJ33)
CALHSNYQLIW

SEQ ID NO: 102966 - protein, 12 aa, Homo sapiens
  CDR3 for beta chain variable domain of TCR clone 51483 (TRBV5-1, TRBJ2-7)
CASSFRGYEQYF

SEQ ID NO: 102967 - protein, 14 aa, Homo sapiens
  CDR3 for alpha chain variable domain of TCR clone 51484 (TRAV1-2, TRAJ8)
CAVREDTGFQKLVF

SEQ ID NO: 102968 - protein, 14 aa, Homo sapiens
  CDR3 for beta chain variable domain of TCR clone 51484 (TRBV15, TRBJ2-3)
CATRSGTSTDTQYS

SEQ ID NO: 102969 - protein, 19 aa, Homo sapiens
  CDR3 for alpha chain variable domain of TCR clone 51485 (TRAV1-1, TRAJ6)
CAVRDLRGQEKATYLHLEE

SEQ ID NO: 102970 - protein, 13 aa, Homo sapiens
  CDR3 for beta chain variable domain of TCR clone 51485 (TRBV10-2, TRBJ2-7)
CASGASGGYEQYF

SEQ ID NO: 102971 - protein, 13 aa, Homo sapiens
  CDR3 for alpha chain variable domain of TCR clone 51486 (TRAV8-3, TRAJ48)
CCGCNLGNEKLTF

SEQ ID NO: 102972 - protein, 12 aa, Homo sapiens
  CDR3 for beta chain variable domain of TCR clone 51486 (TRBV7-2, TRBJ2-5)
CASSQYQETQCF

SEQ ID NO: 102973 - protein, 15 aa, Homo sapiens
  CDR3 for alpha chain variable domain of TCR clone 51487 (TRAV17, TRAJ57)
CATGPSQGGSEKLVF

SEQ ID NO: 102974 - protein, 15 aa, Homo sapiens
  CDR3 for beta chain variable domain of TCR clone 51487 (TRBV18, TRBJ1-5)
CASSPSDRSNQPQHF

SEQ ID NO: 102975 - protein, 15 aa, Homo sapiens
  CDR3 for alpha chain variable domain of TCR clone 51488 (TRAV21, TRAJ24)
CAAWSSTDSWGKLQF

SEQ ID NO: 102976 - protein, 19 aa, Homo sapiens
  CDR3 for beta chain variable domain of TCR clone 51488 (TRBV14, TRBJ2-1)
CASSQDQLWEAPEYNEQFF

SEQ ID NO: 102977 - protein, 11 aa, Homo sapiens
  CDR3 for alpha chain variable domain of TCR clone 51489 (TRAV3, TRAJ21)
CAVGNFNKFYF

SEQ ID NO: 102978 - protein, 15 aa, Homo sapiens
  CDR3 for beta chain variable domain of TCR clone 51489 (TRBV13, TRBJ1-5)
CASSFGQGGVQPQHF

SEQ ID NO: 102979 - protein, 14 aa, Homo sapiens
  CDR3 for alpha chain variable domain of TCR clone 51490 (TRAV12-2, TRAJ17)
CAVLFKAAGNKLTF

SEQ ID NO: 102980 - protein, 14 aa, Homo sapiens
  CDR3 for beta chain variable domain of TCR clone 51490 (TRBV19, TRBJ2-1)
CASSKDRGQDEQFF

SEQ ID NO: 102981 - protein, 18 aa, Homo sapiens
  CDR3 for alpha chain variable domain of TCR clone 51491 (TRAV26-1, TRAJ23)
CIVRVGLEVWNQGGKLIF

SEQ ID NO: 102982 - protein, 16 aa, Homo sapiens
  CDR3 for beta chain variable domain of TCR clone 51491 (TRBV12-4, TRBJ2-5)
WASSFFVRGRQETQYF

SEQ ID NO: 102983 - protein, 17 aa, Homo sapiens
  CDR3 for alpha chain variable domain of TCR clone 51492 (TRAV12-2, TRAJ22)
CAVNRIPSSGSARQLTF

SEQ ID NO: 102984 - protein, 13 aa, Homo sapiens
  CDR3 for beta chain variable domain of TCR clone 51492 (TRBV11-3, TRBJ1-1)
CASSSNRDTEAFF

SEQ ID NO: 102985 - protein, 13 aa, Homo sapiens
  CDR3 for alpha chain variable domain of TCR clone 51493 (TRAV20, TRAJ49)
CAVQVRTGNQFYF

SEQ ID NO: 102986 - protein, 14 aa, Homo sapiens
  CDR3 for beta chain variable domain of TCR clone 51493 (TRBV5-1, TRBJ1-1)
CASSLQGASTEAFF

SEQ ID NO: 102987 - protein, 14 aa, Homo sapiens
  CDR3 for alpha chain variable domain of TCR clone 51494 (TRAV39, TRAJ57)
CAVEGQGGSEKLVF

SEQ ID NO: 102988 - protein, 16 aa, Homo sapiens
  CDR3 for beta chain variable domain of TCR clone 51494 (TRBV9, TRBJ2-1)
CASSVGGGGNYNEQFF

SEQ ID NO: 102989 - protein, 13 aa, Homo sapiens
  CDR3 for alpha chain variable domain of TCR clone 51495 (TRAV12-3, TRAJ40)
CAMSDSGTYNYIF

SEQ ID NO: 102990 - protein, 14 aa, Homo sapiens
  CDR3 for beta chain variable domain of TCR clone 51495 (TRBV7-2, TRBJ1-5)
CASSTQGAGQPQHF

SEQ ID NO: 102991 - protein, 11 aa, Homo sapiens
  CDR3 for alpha chain variable domain of TCR clone 51496 (TRAV21, TRAJ9)
CAVPGGFKTIF

SEQ ID NO: 102992 - protein, 12 aa, Homo sapiens
  CDR3 for beta chain variable domain of TCR clone 51496 (TRBV20-1, TRBJ2-3)
CSAMVGTDTQYF

SEQ ID NO: 102993 - protein, 14 aa, Homo sapiens
  CDR3 for alpha chain variable domain of TCR clone 51497 (TRAV2, TRAJ9)
CAVEDRSGGFKTIF

SEQ ID NO: 102994 - protein, 16 aa, Homo sapiens
  CDR3 for beta chain variable domain of TCR clone 51497 (TRBV7-3, TRBJ2-2)
CASSLRRGTLSGELFF

SEQ ID NO: 102995 - protein, 14 aa, Homo sapiens
  CDR3 for alpha chain variable domain of TCR clone 51498 (TRAV12-2, TRAJ40)
CAVKIPSGTYKYIF

SEQ ID NO: 102996 - protein, 12 aa, Homo sapiens
  CDR3 for beta chain variable domain of TCR clone 51498 (TRBV14, TRBJ1-1)
CASSQLKGLAFF

SEQ ID NO: 102997 - protein, 12 aa, Homo sapiens
  CDR3 for alpha chain variable domain of TCR clone 51499 (TRAV8-3, TRAJ41)
CAVGTLGYALNF

SEQ ID NO: 102998 - protein, 16 aa, Homo sapiens
  CDR3 for beta chain variable domain of TCR clone 51499 (TRBV7-6, TRBJ2-3)
CASSDSRGEGTDTQYF

SEQ ID NO: 102999 - protein, 15 aa, Homo sapiens
  CDR3 for alpha chain variable domain of TCR clone 51500 (TRAV40, TRAJ45)
CLLGDLGGGADGLTF

SEQ ID NO: 103000 - protein, 13 aa, Homo sapiens
  CDR3 for beta chain variable domain of TCR clone 51500 (TRBV7-9, TRBJ1-2)
CDSSLKQNYGYTF

SEQ ID NO: 103001 - protein, 14 aa, Homo sapiens
  CDR3 for alpha chain variable domain of TCR clone 51501 (TRAV12-3, TRAJ10)
SHLPLTGGGNKLTF

SEQ ID NO: 103002 - protein, 15 aa, Homo sapiens
  CDR3 for beta chain variable domain of TCR clone 51501 (TRBV7-3, TRBJ2-2)
CASSETGQGTGELSF

SEQ ID NO: 103003 - protein, 23 aa, Homo sapiens
  CDR3 for alpha chain variable domain of TCR clone 51502 (TRAV1-1, TRAJ29)
LLQELQMKDSASYFLGGNTHLVF

SEQ ID NO: 103004 - protein, 13 aa, Homo sapiens
  CDR3 for beta chain variable domain of TCR clone 51502 (TRBV25-1, TRBJ2-7)
CASSEDGDYEQYF

SEQ ID NO: 103005 - protein, 15 aa, Homo sapiens
  CDR3 for alpha chain variable domain of TCR clone 51503 (TRAV3, TRAJ5)
CAVRDLDTGRRALTF

SEQ ID NO: 103006 - protein, 12 aa, Homo sapiens
  CDR3 for beta chain variable domain of TCR clone 51503 (TRBV12-4, TRBJ2-7)
CQQSTETYEQYF

SEQ ID NO: 103007 - protein, 14 aa, Homo sapiens
  CDR3 for alpha chain variable domain of TCR clone 51504 (TRAV12-2, TRAJ32)
FAHPESGATNKLIF

SEQ ID NO: 103008 - protein, 14 aa, Homo sapiens
  CDR3 for beta chain variable domain of TCR clone 51504 (TRBV4-2, TRBJ2-3)
CASRETRAPGMQYF

SEQ ID NO: 103009 - protein, 14 aa, Homo sapiens
  CDR3 for alpha chain variable domain of TCR clone 51505 (TRAV20, TRAJ42)
CAVQAGGSQGNLIF

SEQ ID NO: 103010 - protein, 14 aa, Homo sapiens
  CDR3 for beta chain variable domain of TCR clone 51505 (TRBV28, TRBJ1-2)
CASRIQGANYGYTC

SEQ ID NO: 103011 - protein, 14 aa, Homo sapiens
  CDR3 for alpha chain variable domain of TCR clone 51506 (TRAV2, TRAJ9)
CAVEDRSGGFKTIF

SEQ ID NO: 103012 - protein, 14 aa, Homo sapiens
  CDR3 for beta chain variable domain of TCR clone 51506 (TRBV6-3, TRBJ2-2)
CASTYTPDTGELFF

SEQ ID NO: 103013 - protein, 15 aa, Homo sapiens
  CDR3 for alpha chain variable domain of TCR clone 51507 (TRAV25, TRAJ52)
CAGRPGGTSYGKLTF

SEQ ID NO: 103014 - protein, 17 aa, Homo sapiens
  CDR3 for beta chain variable domain of TCR clone 51507 (TRBV7-8, TRBJ2-6)
CASSAGTGGAVANVLTF

SEQ ID NO: 103015 - protein, 12 aa, Homo sapiens
  CDR3 for alpha chain variable domain of TCR clone 51508 (TRAV13-1, TRAJ40)
CAASWATYKYIF

SEQ ID NO: 103016 - protein, 15 aa, Homo sapiens
  CDR3 for beta chain variable domain of TCR clone 51508 (TRBV7-8, TRBJ2-1)
CASSSRLAANNEQFF

SEQ ID NO: 103017 - protein, 15 aa, Homo sapiens
  CDR3 for alpha chain variable domain of TCR clone 51509 (TRAV38-1, TRAJ37)
CAFIFGSGNTGKLIF

SEQ ID NO: 103018 - protein, 13 aa, Homo sapiens
  CDR3 for beta chain variable domain of TCR clone 51509 (TRBV7-9, TRBJ1-2)
CASSLKQNYGYTF

SEQ ID NO: 103019 - protein, 10 aa, Homo sapiens
  CDR3 for alpha chain variable domain of TCR clone 51510 (TRAV21, TRAJ34)
CAADTDKLIF

SEQ ID NO: 103020 - protein, 14 aa, Homo sapiens
  CDR3 for beta chain variable domain of TCR clone 51510 (TRBV5-4, TRBJ1-2)
CASSSSGRYVGYTF

SEQ ID NO: 103021 - protein, 15 aa, Homo sapiens
  CDR3 for alpha chain variable domain of TCR clone 51511 (TRAV16, TRAJ53)
CALIDSGGSNYKLTF

SEQ ID NO: 103022 - protein, 15 aa, Homo sapiens
  CDR3 for beta chain variable domain of TCR clone 51511 (TRBV7-2, TRBJ1-2)
CASSPRAGWNYGYAF

SEQ ID NO: 103023 - protein, 15 aa, Homo sapiens
  CDR3 for alpha chain variable domain of TCR clone 51512 (TRAV3, TRAJ22)
CAVRDRGGSASQLTF

SEQ ID NO: 103024 - protein, 15 aa, Homo sapiens
  CDR3 for beta chain variable domain of TCR clone 51512 (TRBV7-3, TRBJ2-2)
CASSETGQGTGELFF

SEQ ID NO: 103025 - protein, 14 aa, Homo sapiens
  CDR3 for alpha chain variable domain of TCR clone 51513 (TRAV1-1, TRAJ28)
YAAPSGAGSYQLTF

SEQ ID NO: 103026 - protein, 15 aa, Homo sapiens
  CDR3 for beta chain variable domain of TCR clone 51513 (TRBV7-2, TRBJ1-2)
CASSLVSGGDYGYTF

SEQ ID NO: 103027 - protein, 16 aa, Homo sapiens
  CDR3 for alpha chain variable domain of TCR clone 51514 (TRAV3, TRAJ18)
CAVRDGRGSTLGRLYF

SEQ ID NO: 103028 - protein, 15 aa, Homo sapiens
  CDR3 for beta chain variable domain of TCR clone 51514 (TRBV18, TRBJ1-2)
CASSPGNGLGYGYTF

SEQ ID NO: 103029 - protein, 16 aa, Homo sapiens
  CDR3 for alpha chain variable domain of TCR clone 51515 (TRAV12-2, TRAJ28)
CAVITDSGAGSYHLTF

SEQ ID NO: 103030 - protein, 14 aa, Homo sapiens
  CDR3 for beta chain variable domain of TCR clone 51515 (TRBV25-1, TRBJ1-1)
CASTHLGGNTEAFF

SEQ ID NO: 103031 - protein, 14 aa, Homo sapiens
  CDR3 for alpha chain variable domain of TCR clone 51516 (TRAV38-1, TRAJ49)
CAFMPRNTGNQFYF

SEQ ID NO: 103032 - protein, 15 aa, Homo sapiens
  CDR3 for beta chain variable domain of TCR clone 51516 (TRBV7-2, TRBJ2-1)
CASSSGLAGGNEQFF

SEQ ID NO: 103033 - protein, 11 aa, Homo sapiens
  CDR3 for alpha chain variable domain of TCR clone 51517 (TRAV12-2, TRAJ31)
CAVTGWARLMF

SEQ ID NO: 103034 - protein, 15 aa, Homo sapiens
  CDR3 for beta chain variable domain of TCR clone 51517 (TRBV19, TRBJ2-7)
CASSIGGGLVNEQYF

SEQ ID NO: 103035 - protein, 12 aa, Homo sapiens
  CDR3 for alpha chain variable domain of TCR clone 51518 (TRAV1-1, TRAJ9)
CALDTGGFKTIF

SEQ ID NO: 103036 - protein, 14 aa, Homo sapiens
  CDR3 for beta chain variable domain of TCR clone 51518 (TRBV7-8, TRBJ2-5)
CASSATGGQETQYF

SEQ ID NO: 103037 - protein, 13 aa, Homo sapiens
  CDR3 for alpha chain variable domain of TCR clone 51519 (TRAV3, TRAJ21)
CAVREPDFNKFYF

SEQ ID NO: 103038 - protein, 16 aa, Homo sapiens
  CDR3 for beta chain variable domain of TCR clone 51519 (TRBV5-1, TRBJ1-1)
CASSSGGNSLNTEAFF

SEQ ID NO: 103039 - protein, 14 aa, Homo sapiens
  CDR3 for alpha chain variable domain of TCR clone 51520 (TRAV17, TRAJ39)
CATDPVRAGNMLTF

SEQ ID NO: 103040 - protein, 15 aa, Homo sapiens
  CDR3 for beta chain variable domain of TCR clone 51520 (TRBV13, TRBJ1-5)
CASSLGQGGVQPQHF

SEQ ID NO: 103041 - protein, 15 aa, Homo sapiens
  CDR3 for alpha chain variable domain of TCR clone 51521 (TRAV26-1, TRAJ29)
CIVRVEGSGNTPLVF

SEQ ID NO: 103042 - protein, 15 aa, Homo sapiens
  CDR3 for beta chain variable domain of TCR clone 51521 (TRBV7-9, TRBJ1-5)
CASSQRHQPNQPQHF

SEQ ID NO: 103043 - protein, 11 aa, Homo sapiens
  CDR3 for alpha chain variable domain of TCR clone 51522 (TRAV3, TRAJ21)
CAVGNFNKFYF

SEQ ID NO: 103044 - protein, 14 aa, Homo sapiens
  CDR3 for beta chain variable domain of TCR clone 51522 (TRBV29-1, TRBJ2-2)
CSGRVSGNTGELFF

SEQ ID NO: 103045 - protein, 12 aa, Homo sapiens
  CDR3 for alpha chain variable domain of TCR clone 51523 (TRAV35, TRAJ49)
CAGGNTGNQFYF

SEQ ID NO: 103046 - protein, 16 aa, Homo sapiens
  CDR3 for beta chain variable domain of TCR clone 51523 (TRBV5-1, TRBJ2-2)
CASSLWDTTNTGELFF

SEQ ID NO: 103047 - protein, 14 aa, Homo sapiens
  CDR3 for alpha chain variable domain of TCR clone 51524 (TRAV12-2, TRAJ17)
CAVLFKAAGNKLTF

SEQ ID NO: 103048 - protein, 19 aa, Homo sapiens
  CDR3 for beta chain variable domain of TCR clone 51524 (TRBV18, TRBJ2-1)
CASSPTGGLLAGVYNEQFF

SEQ ID NO: 103049 - protein, 15 aa, Homo sapiens
  CDR3 for alpha chain variable domain of TCR clone 51525 (TRAV12-1, TRAJ53)
CVVNRSGGSNYKLTF

SEQ ID NO: 103050 - protein, 19 aa, Homo sapiens
  CDR3 for beta chain variable domain of TCR clone 51525 (TRBV6-3, TRBJ2-7)
CASSYRTGLAGGVSGEQYF

SEQ ID NO: 103051 - protein, 18 aa, Homo sapiens
  CDR3 for alpha chain variable domain of TCR clone 51526 (TRAV3, TRAJ17)
CAVRARRGGRSCRQQANF

SEQ ID NO: 103052 - protein, 14 aa, Homo sapiens
  CDR3 for beta chain variable domain of TCR clone 51526 (TRBV4-1, TRBJ2-2)
CASSQAVNTGGLFF

SEQ ID NO: 103053 - protein, 12 aa, Homo sapiens
  CDR3 for alpha chain variable domain of TCR clone 51527 (TRAV21, TRAJ11)
CAVRGGNSTLTF

SEQ ID NO: 103054 - protein, 13 aa, Homo sapiens
  CDR3 for beta chain variable domain of TCR clone 51527 (TRBV7-9, TRBJ1-2)
CASSLKQNYGYTF

SEQ ID NO: 103055 - protein, 14 aa, Homo sapiens
  CDR3 for alpha chain variable domain of TCR clone 51528 (TRAV12-2, TRAJ45)
CAVNIGGGADGLTF

SEQ ID NO: 103056 - protein, 13 aa, Homo sapiens
  CDR3 for beta chain variable domain of TCR clone 51528 (TRBV19, TRBJ2-2)
CASSIWGTGELFF

SEQ ID NO: 103057 - protein, 12 aa, Homo sapiens
  CDR3 for alpha chain variable domain of TCR clone 51529 (TRAV12-1, TRAJ40)
CVFYSGTYKYIF

SEQ ID NO: 103058 - protein, 18 aa, Homo sapiens
  CDR3 for beta chain variable domain of TCR clone 51529 (TRBV12-4, TRBJ2-2)
CASSLVAGTRGRAGELFF

SEQ ID NO: 103059 - protein, 14 aa, Homo sapiens
  CDR3 for alpha chain variable domain of TCR clone 51530 (TRAV16, TRAJ42)
CALLAGGSQGNLIL

SEQ ID NO: 103060 - protein, 13 aa, Homo sapiens
  CDR3 for beta chain variable domain of TCR clone 51530 (TRBV7-9, TRBJ1-2)
CASSLKQNYGYTF

SEQ ID NO: 103061 - protein, 13 aa, Homo sapiens
  CDR3 for alpha chain variable domain of TCR clone 51531 (TRAV12-2, TRAJ37)
CAGGSGNTGKLIF

SEQ ID NO: 103062 - protein, 12 aa, Homo sapiens
  CDR3 for beta chain variable domain of TCR clone 51531 (TRBV2, TRBJ2-1)
CAYGPPGNEQFF

SEQ ID NO: 103063 - protein, 17 aa, Homo sapiens
  CDR3 for alpha chain variable domain of TCR clone 51532 (TRAV13-1, TRAJ52)
CAAGRNAGGTSYGKLTF

SEQ ID NO: 103064 - protein, 14 aa, Homo sapiens
  CDR3 for beta chain variable domain of TCR clone 51532 (TRBV7-9, TRBJ2-5)
CASSLDTAQETQYF

SEQ ID NO: 103065 - protein, 14 aa, Homo sapiens
  CDR3 for alpha chain variable domain of TCR clone 51533 (TRAV8-4, TRAJ9)
CAVRISTGGFKTIF

SEQ ID NO: 103066 - protein, 15 aa, Homo sapiens
  CDR3 for beta chain variable domain of TCR clone 51533 (TRBV10-2, TRBJ2-6)
CASSEQGTGANVLTF

SEQ ID NO: 103067 - protein, 16 aa, Homo sapiens
  CDR3 for alpha chain variable domain of TCR clone 51534 (TRAV8-3, TRAJ22)
CAVGLLGPGSARQLTF

SEQ ID NO: 103068 - protein, 14 aa, Homo sapiens
  CDR3 for beta chain variable domain of TCR clone 51534 (TRBV11-2, TRBJ2-7)
CASSLELEGYEQYF

SEQ ID NO: 103069 - protein, 11 aa, Homo sapiens
  CDR3 for alpha chain variable domain of TCR clone 51535 (TRAV8-6, TRAJ42)
CAVRGRKPMKS

SEQ ID NO: 103070 - protein, 13 aa, Homo sapiens
  CDR3 for beta chain variable domain of TCR clone 51535 (TRBV7-3, TRBJ1-1)
CASSQDWGAEAFF

SEQ ID NO: 103071 - protein, 11 aa, Homo sapiens
  CDR3 for alpha chain variable domain of TCR clone 51536 (TRAV3, TRAJ21)
CAVGNFNKFYF

SEQ ID NO: 103072 - protein, 12 aa, Homo sapiens
  CDR3 for beta chain variable domain of TCR clone 51536 (TRBV19, TRBJ2-1)
CASSRQGAEQFF

SEQ ID NO: 103073 - protein, 15 aa, Homo sapiens
  CDR3 for alpha chain variable domain of TCR clone 51537 (TRAV4, TRAJ39)
CLVGPNNNAGNMLTF

SEQ ID NO: 103074 - protein, 13 aa, Homo sapiens
  CDR3 for beta chain variable domain of TCR clone 51537 (TRBV11-2, TRBJ2-5)
CASSSTGEETQYS

SEQ ID NO: 103075 - protein, 13 aa, Homo sapiens
  CDR3 for alpha chain variable domain of TCR clone 51538 (TRAV9-2, TRAJ49)
CALIQIGGNQFYF

SEQ ID NO: 103076 - protein, 16 aa, Homo sapiens
  CDR3 for beta chain variable domain of TCR clone 51538 (TRBV20-1, TRBJ1-4)
CSAPGQGLLTNEKLFF

SEQ ID NO: 103077 - protein, 11 aa, Homo sapiens
  CDR3 for alpha chain variable domain of TCR clone 51539 (TRAV17, TRAJ9)
CGFTGGFKTIF

SEQ ID NO: 103078 - protein, 14 aa, Homo sapiens
  CDR3 for beta chain variable domain of TCR clone 51539 (TRBV7-9, TRBJ2-2)
CASSLVHDTGELFF

SEQ ID NO: 103079 - protein, 15 aa, Homo sapiens
  CDR3 for alpha chain variable domain of TCR clone 51540 (TRAV12-3, TRAJ42)
CAMITSVGSQGNLIF

SEQ ID NO: 103080 - protein, 16 aa, Homo sapiens
  CDR3 for beta chain variable domain of TCR clone 51540 (TRBV7-9, TRBJ2-1)
CASSLGTGWDYNEQFF

SEQ ID NO: 103081 - protein, 13 aa, Homo sapiens
  CDR3 for alpha chain variable domain of TCR clone 51541 (TRAV13-1, TRAJ39)
CSKYSSAGNMLTF

SEQ ID NO: 103082 - protein, 16 aa, Homo sapiens
  CDR3 for beta chain variable domain of TCR clone 51541 (TRBV20-1, TRBJ1-4)
CSAPGQGLLTNEKLFF

SEQ ID NO: 103083 - protein, 17 aa, Homo sapiens
  CDR3 for alpha chain variable domain of TCR clone 51542 (TRAV13-1, TRAJ52)
CAASSGAGGTSYGKLTF

SEQ ID NO: 103084 - protein, 14 aa, Homo sapiens
  CDR3 for beta chain variable domain of TCR clone 51542 (TRBV4-1, TRBJ2-2)
CASSQAVNTGELFF

SEQ ID NO: 103085 - protein, 14 aa, Homo sapiens
  CDR3 for alpha chain variable domain of TCR clone 51543 (TRAV12-3, TRAJ53)
CGATSGGSNYKLKF

SEQ ID NO: 103086 - protein, 13 aa, Homo sapiens
  CDR3 for beta chain variable domain of TCR clone 51543 (TRBV19, TRBJ1-5)
CASSTQDGQPQHF

SEQ ID NO: 103087 - protein, 18 aa, Homo sapiens
  CDR3 for alpha chain variable domain of TCR clone 51544 (TRAV21, TRAJ52)
CAVRPSPAGGTSYGKLTF

SEQ ID NO: 103088 - protein, 13 aa, Homo sapiens
  CDR3 for beta chain variable domain of TCR clone 51544 (TRBV20-1, TRBJ1-1)
CSARVGGNTEASF

SEQ ID NO: 103089 - protein, 15 aa, Homo sapiens
  CDR3 for alpha chain variable domain of TCR clone 51545 (TRAV26-1, TRAJ3)
CIVRSGYSSASKIIF

SEQ ID NO: 103090 - protein, 17 aa, Homo sapiens
  CDR3 for beta chain variable domain of TCR clone 51545 (TRBV24-1, TRBJ2-1)
CATSDVSTSGTYNEQFF

SEQ ID NO: 103091 - protein, 10 aa, Homo sapiens
  CDR3 for alpha chain variable domain of TCR clone 51546 (TRAV1-2, TRAJ20)
CVPNDYKLSF

SEQ ID NO: 103092 - protein, 14 aa, Homo sapiens
  CDR3 for beta chain variable domain of TCR clone 51546 (TRBV12-5, TRBJ2-5)
CASGSRIHQETQYF

SEQ ID NO: 103093 - protein, 16 aa, Homo sapiens
  CDR3 for alpha chain variable domain of TCR clone 51547 (TRAV3, TRAJ28)
CAVLPRPGAGSYQLTF

SEQ ID NO: 103094 - protein, 13 aa, Homo sapiens
  CDR3 for beta chain variable domain of TCR clone 51547 (TRBV12-4, TRBJ2-5)
CASRLAVQETQYF

SEQ ID NO: 103095 - protein, 15 aa, Homo sapiens
  CDR3 for alpha chain variable domain of TCR clone 51548 (TRAV17, TRAJ57)
CATGPSQGGSEKLVF

SEQ ID NO: 103096 - protein, 12 aa, Homo sapiens
  CDR3 for beta chain variable domain of TCR clone 51548 (TRBV12-4, TRBJ2-7)
CASSLGGYEQYL

SEQ ID NO: 103097 - protein, 13 aa, Homo sapiens
  CDR3 for alpha chain variable domain of TCR clone 51549 (TRAV9-2, TRAJ53)
CALSGGSNYKLTF

SEQ ID NO: 103098 - protein, 16 aa, Homo sapiens
  CDR3 for beta chain variable domain of TCR clone 51549 (TRBV20-1, TRBJ2-1)
CSAPTWTSGSYNEQFF

SEQ ID NO: 103099 - protein, 18 aa, Homo sapiens
  CDR3 for alpha chain variable domain of TCR clone 51550 (TRAV13-1, TRAJ52)
CAAKNPNAGGTSDGKLTF

SEQ ID NO: 103100 - protein, 15 aa, Homo sapiens
  CDR3 for beta chain variable domain of TCR clone 51550 (TRBV6-1, TRBJ2-3)
CASSERGGITDTQYF

SEQ ID NO: 103101 - protein, 15 aa, Homo sapiens
  CDR3 for alpha chain variable domain of TCR clone 51551 (TRAV26-1, TRAJ29)
CIVRVEGSGNTPLVF

SEQ ID NO: 103102 - protein, 14 aa, Homo sapiens
  CDR3 for beta chain variable domain of TCR clone 51551 (TRBV19, TRBJ2-1)
CARGARSFQWEQFF

SEQ ID NO: 103103 - protein, 15 aa, Homo sapiens
  CDR3 for alpha chain variable domain of TCR clone 51552 (TRAV12-2, TRAJ6)
CAMSATTGGSYIPTF

SEQ ID NO: 103104 - protein, 16 aa, Homo sapiens
  CDR3 for beta chain variable domain of TCR clone 51552 (TRBV20-1, TRBJ1-2)
CSASMGQGVANYGYTF

SEQ ID NO: 103105 - protein, 13 aa, Homo sapiens
  CDR3 for alpha chain variable domain of TCR clone 51553 (TRAV8-3, TRAJ28)
CAVGAVGSYQLTF

SEQ ID NO: 103106 - protein, 10 aa, Homo sapiens
  CDR3 for beta chain variable domain of TCR clone 51553 (TRBV25-1, TRBJ1-1)
PTWGNTEAFF

SEQ ID NO: 103107 - protein, 10 aa, Homo sapiens
  CDR3 for alpha chain variable domain of TCR clone 51554 (TRAV8-4, TRAJ43)
CAVSADDMRF

SEQ ID NO: 103108 - protein, 13 aa, Homo sapiens
  CDR3 for beta chain variable domain of TCR clone 51554 (TRBV7-9, TRBJ1-2)
CASSLKQNYGYTF

SEQ ID NO: 103109 - protein, 16 aa, Homo sapiens
  CDR3 for alpha chain variable domain of TCR clone 51555 (TRAV3, TRAJ21)
CAVRDIERGNFNKFYF

SEQ ID NO: 103110 - protein, 16 aa, Homo sapiens
  CDR3 for beta chain variable domain of TCR clone 51555 (TRBV12-4, TRBJ1-5)
CVSSRPVGGSNQPQHF

SEQ ID NO: 103111 - protein, 14 aa, Homo sapiens
  CDR3 for alpha chain variable domain of TCR clone 51556 (TRAV26-1, TRAJ45)
CIVRVVGGADGHTF

SEQ ID NO: 103112 - protein, 16 aa, Homo sapiens
  CDR3 for beta chain variable domain of TCR clone 51556 (TRBV7-9, TRBJ1-1)
CASSLTQVRSNTEAFF

SEQ ID NO: 103113 - protein, 16 aa, Homo sapiens
  CDR3 for alpha chain variable domain of TCR clone 51557 (TRAV26-1, TRAJ37)
CIVRGDGSVNTGKLIF

SEQ ID NO: 103114 - protein, 17 aa, Homo sapiens
  CDR3 for beta chain variable domain of TCR clone 51557 (TRBV4-1, TRBJ2-7)
CASSRDPLGVRGGEQYF

SEQ ID NO: 103115 - protein, 11 aa, Homo sapiens
  CDR3 for alpha chain variable domain of TCR clone 51558 (TRAV21, TRAJ34)
CAPLDTDKLIF

SEQ ID NO: 103116 - protein, 16 aa, Homo sapiens
  CDR3 for beta chain variable domain of TCR clone 51558 (TRBV5-1, TRBJ2-3)
CASGLAGDRGTDTQYF

SEQ ID NO: 103117 - protein, 14 aa, Homo sapiens
  CDR3 for alpha chain variable domain of TCR clone 51559 (TRAV6, TRAJ6)
CALPTSGGSYIPTL

SEQ ID NO: 103118 - protein, 17 aa, Homo sapiens
  CDR3 for beta chain variable domain of TCR clone 51559 (TRBV5-1, TRBJ2-5)
CASSPVALGQNQETQYF

SEQ ID NO: 103119 - protein, 10 aa, Homo sapiens
  CDR3 for alpha chain variable domain of TCR clone 51560 (TRAV1-2, TRAJ20)
CALNDYKLSL

SEQ ID NO: 103120 - protein, 16 aa, Homo sapiens
  CDR3 for beta chain variable domain of TCR clone 51560 (TRBV20-1, TRBJ1-1)
CSARALTQGMNTEAFF

SEQ ID NO: 103121 - protein, 14 aa, Homo sapiens
  CDR3 for alpha chain variable domain of TCR clone 51561 (TRAV12-2, TRAJ24)
CAVTPADSWGKLQF

SEQ ID NO: 103122 - protein, 12 aa, Homo sapiens
  CDR3 for beta chain variable domain of TCR clone 51561 (TRBV3-1, TRBJ2-1)
GASSQGSSGQFF

SEQ ID NO: 103123 - protein, 17 aa, Homo sapiens
  CDR3 for alpha chain variable domain of TCR clone 51562 (TRAV3, TRAJ42)
CAVRDRDYGGSQGNLIF

SEQ ID NO: 103124 - protein, 16 aa, Homo sapiens
  CDR3 for beta chain variable domain of TCR clone 51562 (TRBV7-2, TRBJ2-7)
CASSFPLAGGPLEQYF

SEQ ID NO: 103125 - protein, 15 aa, Homo sapiens
  CDR3 for alpha chain variable domain of TCR clone 51563 (TRAV27, TRAJ38)
CAARRNAGNNRKRIW

SEQ ID NO: 103126 - protein, 13 aa, Homo sapiens
  CDR3 for beta chain variable domain of TCR clone 51563 (TRBV12-5, TRBJ2-3)
CASGDRQSDTQYL

SEQ ID NO: 103127 - protein, 13 aa, Homo sapiens
  CDR3 for alpha chain variable domain of TCR clone 51564 (TRAV12-2, TRAJ4)
CAGFSGGYNKLIF

SEQ ID NO: 103128 - protein, 15 aa, Homo sapiens
  CDR3 for beta chain variable domain of TCR clone 51564 (TRBV6-3, TRBJ2-7)
CASSSPGTVFYEQYF

SEQ ID NO: 103129 - protein, 11 aa, Homo sapiens
  CDR3 for alpha chain variable domain of TCR clone 51565 (TRAV12-1, TRAJ35)
SGEGFGNVLHC

SEQ ID NO: 103130 - protein, 12 aa, Homo sapiens
  CDR3 for beta chain variable domain of TCR clone 51565 (TRBV19, TRBJ1-5)
CASSIAQQPQHF

SEQ ID NO: 103131 - protein, 12 aa, Homo sapiens
  CDR3 for alpha chain variable domain of TCR clone 51566 (TRAV13-1, TRAJ45)
CAASGQEEVLTD

SEQ ID NO: 103132 - protein, 12 aa, Homo sapiens
  CDR3 for beta chain variable domain of TCR clone 51566 (TRBV11-2, TRBJ2-2)
CASSLGGGELFF

SEQ ID NO: 103133 - protein, 20 aa, Homo sapiens
  CDR3 for alpha chain variable domain of TCR clone 51567 (TRAV26-1, TRAJ42)
CCVLLHRQTYDGGSQGNLIF

SEQ ID NO: 103134 - protein, 16 aa, Homo sapiens
  CDR3 for beta chain variable domain of TCR clone 51567 (TRBV7-3, TRBJ2-2)
CASSLKRGTLSGELFF

SEQ ID NO: 103135 - protein, 15 aa, Homo sapiens
  CDR3 for alpha chain variable domain of TCR clone 51568 (TRAV12-3, TRAJ6)
CAMSATTGGSYIPTF

SEQ ID NO: 103136 - protein, 14 aa, Homo sapiens
  CDR3 for beta chain variable domain of TCR clone 51568 (TRBV13, TRBJ2-7)
CASSLKGASYEQYF

SEQ ID NO: 103137 - protein, 14 aa, Homo sapiens
  CDR3 for alpha chain variable domain of TCR clone 51569 (TRAV21, TRAJ38)
CAVMGAGNNRTLIW

SEQ ID NO: 103138 - protein, 13 aa, Homo sapiens
  CDR3 for beta chain variable domain of TCR clone 51569 (TRBV7-3, TRBJ2-5)
CASSIGFFETQYF

SEQ ID NO: 103139 - protein, 18 aa, Homo sapiens
  CDR3 for alpha chain variable domain of TCR clone 51570 (TRAV21, TRAJ52)
CAVRPSPEGGTSYGKLTF

SEQ ID NO: 103140 - protein, 13 aa, Homo sapiens
  CDR3 for beta chain variable domain of TCR clone 51570 (TRBV7-3, TRBJ1-1)
CASSQDWGAEAFF

SEQ ID NO: 103141 - protein, 14 aa, Homo sapiens
  CDR3 for alpha chain variable domain of TCR clone 51571 (TRAV17, TRAJ34)
CATDSLEGTDKLIF

SEQ ID NO: 103142 - protein, 14 aa, Homo sapiens
  CDR3 for beta chain variable domain of TCR clone 51571 (TRBV25-1, TRBJ2-7)
CASSEYGRGYEQYF

SEQ ID NO: 103143 - protein, 14 aa, Homo sapiens
  CDR3 for alpha chain variable domain of TCR clone 51572 (TRAV12-2, TRAJ17)
CAVLFKAAGNKLTF

SEQ ID NO: 103144 - protein, 17 aa, Homo sapiens
  CDR3 for beta chain variable domain of TCR clone 51572 (TRBV20-1, TRBJ2-2)
CSASGSGKGGLTGELFF

SEQ ID NO: 103145 - protein, 12 aa, Homo sapiens
  CDR3 for alpha chain variable domain of TCR clone 51573 (TRAV27, TRAJ35)
CAGADFGNVLHC

SEQ ID NO: 103146 - protein, 16 aa, Homo sapiens
  CDR3 for beta chain variable domain of TCR clone 51573 (TRBV6-1, TRBJ2-1)
CACILRQGSSYNEQFF

SEQ ID NO: 103147 - protein, 12 aa, Homo sapiens
  CDR3 for alpha chain variable domain of TCR clone 51574 (TRAV13-1, TRAJ49)
CAAPNTGNQFSF

SEQ ID NO: 103148 - protein, 17 aa, Homo sapiens
  CDR3 for beta chain variable domain of TCR clone 51574 (TRBV25-1, TRBJ2-7)
CASSDARVVFSSYEQYF

SEQ ID NO: 103149 - protein, 14 aa, Homo sapiens
  CDR3 for alpha chain variable domain of TCR clone 51575 (TRAV1-2, TRAJ8)
CAVRDDTGFQKLVF

SEQ ID NO: 103150 - protein, 14 aa, Homo sapiens
  CDR3 for beta chain variable domain of TCR clone 51575 (TRBV7-9, TRBJ1-1)
CASTPLQSYTEAFF

SEQ ID NO: 103151 - protein, 15 aa, Homo sapiens
  CDR3 for alpha chain variable domain of TCR clone 51576 (TRAV3, TRAJ22)
CAARDRGGSARQLTF

SEQ ID NO: 103152 - protein, 13 aa, Homo sapiens
  CDR3 for beta chain variable domain of TCR clone 51576 (TRBV12-4, TRBJ1-2)
CASSLRQGKGYTF

SEQ ID NO: 103153 - protein, 11 aa, Homo sapiens
  CDR3 for alpha chain variable domain of TCR clone 51577 (TRAV12-2, TRAJ36)
CAVDEANNLFF

SEQ ID NO: 103154 - protein, 13 aa, Homo sapiens
  CDR3 for beta chain variable domain of TCR clone 51577 (TRBV28, TRBJ2-5)
CAGVSRGEETQYF

SEQ ID NO: 103155 - protein, 15 aa, Homo sapiens
  CDR3 for alpha chain variable domain of TCR clone 51578 (TRAV12-3, TRAJ6)
CAVSATTGGSYIPTF

SEQ ID NO: 103156 - protein, 13 aa, Homo sapiens
  CDR3 for beta chain variable domain of TCR clone 51578 (TRBV6-3, TRBJ2-7)
CASSFSGGYEQYF

SEQ ID NO: 103157 - protein, 16 aa, Homo sapiens
  CDR3 for alpha chain variable domain of TCR clone 51579 (TRAV30, TRAJ24)
CGTEIVDADSWGKFQF

SEQ ID NO: 103158 - protein, 12 aa, Homo sapiens
  CDR3 for beta chain variable domain of TCR clone 51579 (TRBV11-2, TRBJ2-2)
RASSLPTGELFF

SEQ ID NO: 103159 - protein, 11 aa, Homo sapiens
  CDR3 for alpha chain variable domain of TCR clone 51580 (TRAV2, TRAJ13)
CASGGYQKVTF

SEQ ID NO: 103160 - protein, 13 aa, Homo sapiens
  CDR3 for beta chain variable domain of TCR clone 51580 (TRBV11-2, TRBJ2-5)
CASGHGAKETQYF

SEQ ID NO: 103161 - protein, 16 aa, Homo sapiens
  CDR3 for alpha chain variable domain of TCR clone 51581 (TRAV13-1, TRAJ48)
CSKYRESNFGNEKLTF

SEQ ID NO: 103162 - protein, 17 aa, Homo sapiens
  CDR3 for beta chain variable domain of TCR clone 51581 (TRBV28, TRBJ2-1)
CASSFARQALTYNEQFF

SEQ ID NO: 103163 - protein, 17 aa, Homo sapiens
  CDR3 for alpha chain variable domain of TCR clone 51582 (TRAV3, TRAJ6)
CAVRDGPRAGGSYIPTF

SEQ ID NO: 103164 - protein, 20 aa, Homo sapiens
  CDR3 for beta chain variable domain of TCR clone 51582 (TRBV28, TRBJ2-1)
CASTPIGRSPGLAGGNEQFC

SEQ ID NO: 103165 - protein, 14 aa, Homo sapiens
  CDR3 for alpha chain variable domain of TCR clone 51583 (TRAV1-2, TRAJ16)
CAVNRFSDGQKLLF

SEQ ID NO: 103166 - protein, 17 aa, Homo sapiens
  CDR3 for beta chain variable domain of TCR clone 51583 (TRBV15, TRBJ1-5)
CATSRVKGIYSNQPQHF

SEQ ID NO: 103167 - protein, 23 aa, Homo sapiens
  CDR3 for alpha chain variable domain of TCR clone 51584 (TRAV8-6, )
CAVRNAGSNHIQNPDPAVYQLRD

SEQ ID NO: 103168 - protein, 15 aa, Homo sapiens
  CDR3 for beta chain variable domain of TCR clone 51584 (TRBV4-1, TRBJ2-2)
CASSEGQGITGELFF

SEQ ID NO: 103169 - protein, 15 aa, Homo sapiens
  CDR3 for alpha chain variable domain of TCR clone 51585 (TRAV8-3, TRAJ6)
CAVGPLGGGSYIPTF

SEQ ID NO: 103170 - protein, 14 aa, Homo sapiens
  CDR3 for beta chain variable domain of TCR clone 51585 (TRBV19, TRBJ2-2)
CASSTGQGTGELFF

SEQ ID NO: 103171 - protein, 15 aa, Homo sapiens
  CDR3 for alpha chain variable domain of TCR clone 51586 (TRAV8-1, TRAJ6)
CAVNAGAGGSYIPTF

SEQ ID NO: 103172 - protein, 14 aa, Homo sapiens
  CDR3 for beta chain variable domain of TCR clone 51586 (TRBV25-1, TRBJ1-6)
CASSLSTDISPLHF

SEQ ID NO: 103173 - protein, 10 aa, Homo sapiens
  CDR3 for alpha chain variable domain of TCR clone 51587 (TRAV1-2, TRAJ20)
CALNDYKLSF

SEQ ID NO: 103174 - protein, 11 aa, Homo sapiens
  CDR3 for beta chain variable domain of TCR clone 51587 (TRBV11-2, TRBJ1-1)
CASSINTEAFF

SEQ ID NO: 103175 - protein, 15 aa, Homo sapiens
  CDR3 for alpha chain variable domain of TCR clone 51588 (TRAV4, TRAJ26)
CLVGDMNNYGQNFVF

SEQ ID NO: 103176 - protein, 16 aa, Homo sapiens
  CDR3 for beta chain variable domain of TCR clone 51588 (TRBV28, TRBJ1-4)
CASSSRTGAANEKLFL

SEQ ID NO: 103177 - protein, 14 aa, Homo sapiens
  CDR3 for alpha chain variable domain of TCR clone 51589 (TRAV4, TRAJ9)
CLVGSGTGGFKTIF

SEQ ID NO: 103178 - protein, 14 aa, Homo sapiens
  CDR3 for beta chain variable domain of TCR clone 51589 (TRBV7-3, TRBJ2-1)
CASSLAGGTNEQFF

SEQ ID NO: 103179 - protein, 17 aa, Homo sapiens
  CDR3 for alpha chain variable domain of TCR clone 51590 (TRAV3, TRAJ6)
CAVRDGPRAGGSYIPTF

SEQ ID NO: 103180 - protein, 14 aa, Homo sapiens
  CDR3 for beta chain variable domain of TCR clone 51590 (TRBV11-2, TRBJ2-7)
CASSLGAGAYEQYF

SEQ ID NO: 103181 - protein, 11 aa, Homo sapiens
  CDR3 for alpha chain variable domain of TCR clone 51591 (TRAV26-1, TRAJ37)
CIVRAGRKLIF

SEQ ID NO: 103182 - protein, 16 aa, Homo sapiens
  CDR3 for beta chain variable domain of TCR clone 51591 (TRBV7-3, TRBJ2-6)
CASSLTLAGGANVLTF

SEQ ID NO: 103183 - protein, 11 aa, Homo sapiens
  CDR3 for alpha chain variable domain of TCR clone 51592 (TRAV21, TRAJ34)
CTHYNTDKLIF

SEQ ID NO: 103184 - protein, 13 aa, Homo sapiens
  CDR3 for beta chain variable domain of TCR clone 51592 (TRBV7-6, TRBJ1-2)
CASSLVADYGYTF

SEQ ID NO: 103185 - protein, 18 aa, Homo sapiens
  CDR3 for alpha chain variable domain of TCR clone 51593 (TRAV13-1, TRAJ52)
CAAKNPNAGGTSYGKLTF

SEQ ID NO: 103186 - protein, 14 aa, Homo sapiens
  CDR3 for beta chain variable domain of TCR clone 51593 (TRBV7-3, TRBJ2-1)
CASSLAGGTNGQFF

SEQ ID NO: 103187 - protein, 14 aa, Homo sapiens
  CDR3 for alpha chain variable domain of TCR clone 51594 (TRAV1-2, TRAJ8)
CAVREDTGFQKLVF

SEQ ID NO: 103188 - protein, 16 aa, Homo sapiens
  CDR3 for beta chain variable domain of TCR clone 51594 (TRBV7-3, TRBJ2-2)
CASSLKRGTLSGKLFF

SEQ ID NO: 103189 - protein, 13 aa, Homo sapiens
  CDR3 for alpha chain variable domain of TCR clone 51595 (TRAV13-1, TRAJ21)
CAASIYNFNKFYF

SEQ ID NO: 103190 - protein, 15 aa, Homo sapiens
  CDR3 for beta chain variable domain of TCR clone 51595 (TRBV19, TRBJ1-5)
CASSIVWADNQPQHF

SEQ ID NO: 103191 - protein, 15 aa, Homo sapiens
  CDR3 for alpha chain variable domain of TCR clone 51596 (TRAV14/DV4, TRAJ33)
CAMREGRDSNYQLIR

SEQ ID NO: 103192 - protein, 16 aa, Homo sapiens
  CDR3 for beta chain variable domain of TCR clone 51596 (TRBV12-5, TRBJ2-5)
CASGPRTSGNQETQYF

SEQ ID NO: 103193 - protein, 13 aa, Homo sapiens
  CDR3 for alpha chain variable domain of TCR clone 51597 (TRAV2, TRAJ12)
CAVGADSSYKLIF

SEQ ID NO: 103194 - protein, 13 aa, Homo sapiens
  CDR3 for beta chain variable domain of TCR clone 51597 (TRBV20-1, TRBJ2-1)
CSARSSPRDEKFF

SEQ ID NO: 103195 - protein, 18 aa, Homo sapiens
  CDR3 for alpha chain variable domain of TCR clone 51598 (TRAV13-1, TRAJ52)
CAAKNPNAGGTSYGKLTF

SEQ ID NO: 103196 - protein, 17 aa, Homo sapiens
  CDR3 for beta chain variable domain of TCR clone 51598 (TRBV7-7, TRBJ2-2)
CASSSVPAGGEIGELFF

SEQ ID NO: 103197 - protein, 10 aa, Homo sapiens
  CDR3 for alpha chain variable domain of TCR clone 51599 (TRAV12-1, TRAJ37)
ARGNTGKLIF

SEQ ID NO: 103198 - protein, 15 aa, Homo sapiens
  CDR3 for beta chain variable domain of TCR clone 51599 (TRBV7-2, TRBJ2-3)
CASSLEQEGTDTQYF

SEQ ID NO: 103199 - protein, 14 aa, Homo sapiens
  CDR3 for alpha chain variable domain of TCR clone 51600 (TRAV13-1, TRAJ44)
CAATATGTASKLTF

SEQ ID NO: 103200 - protein, 13 aa, Homo sapiens
  CDR3 for beta chain variable domain of TCR clone 51600 (TRBV5-5, TRBJ1-2)
CASSFWRGEDYTF

SEQ ID NO: 103201 - protein, 13 aa, Homo sapiens
  CDR3 for alpha chain variable domain of TCR clone 51601 (TRAV35, TRAJ57)
CAGSQGGSEKLVF

SEQ ID NO: 103202 - protein, 14 aa, Homo sapiens
  CDR3 for beta chain variable domain of TCR clone 51601 (TRBV25-1, TRBJ1-1)
CASTHLGGNNEAFF

SEQ ID NO: 103203 - protein, 21 aa, Homo sapiens
  CDR3 for alpha chain variable domain of TCR clone 51602 (TRAV2, TRAJ10)
CCLLLCCGGSTVTGGGNKLTF

SEQ ID NO: 103204 - protein, 16 aa, Homo sapiens
  CDR3 for beta chain variable domain of TCR clone 51602 (TRBV18, TRBJ1-5)
CASSPSTGNSNQPQHF

SEQ ID NO: 103205 - protein, 11 aa, Homo sapiens
  CDR3 for alpha chain variable domain of TCR clone 51603 (TRAV13-2, TRAJ23)
CAESPRGKLIF

SEQ ID NO: 103206 - protein, 13 aa, Homo sapiens
  CDR3 for beta chain variable domain of TCR clone 51603 (TRBV7-9, TRBJ1-2)
CASSLKQNYGYTF

SEQ ID NO: 103207 - protein, 16 aa, Homo sapiens
  CDR3 for alpha chain variable domain of TCR clone 51604 (TRAV16, TRAJ4)
YALSRMFSGGYNKLIF

SEQ ID NO: 103208 - protein, 16 aa, Homo sapiens
  CDR3 for beta chain variable domain of TCR clone 51604 (TRBV24-1, TRBJ2-3)
CATSDPGTGATDTQYF

SEQ ID NO: 103209 - protein, 14 aa, Homo sapiens
  CDR3 for alpha chain variable domain of TCR clone 51605 (TRAV3, TRAJ36)
CAVRDGTGANNLFF

SEQ ID NO: 103210 - protein, 16 aa, Homo sapiens
  CDR3 for beta chain variable domain of TCR clone 51605 (TRBV20-1, TRBJ2-6)
CSAREGPGVGANDLTF

SEQ ID NO: 103211 - protein, 16 aa, Homo sapiens
  CDR3 for alpha chain variable domain of TCR clone 51606 (TRAV30, TRAJ24)
FSTEIVDADSWGKFQF

SEQ ID NO: 103212 - protein, 13 aa, Homo sapiens
  CDR3 for beta chain variable domain of TCR clone 51606 (TRBV18, TRBJ1-2)
CASSASATEGYTF

SEQ ID NO: 103213 - protein, 12 aa, Homo sapiens
  CDR3 for alpha chain variable domain of TCR clone 51607 (TRAV3, TRAJ20)
CAVRDGDYKLSF

SEQ ID NO: 103214 - protein, 15 aa, Homo sapiens
  CDR3 for beta chain variable domain of TCR clone 51607 (TRBV7-9, TRBJ1-5)
CASSQGHQPNQPQHF

SEQ ID NO: 103215 - protein, 11 aa, Homo sapiens
  CDR3 for alpha chain variable domain of TCR clone 51608 (TRAV12-3, TRAJ43)
CAMSVSNDMRF

SEQ ID NO: 103216 - protein, 14 aa, Homo sapiens
  CDR3 for beta chain variable domain of TCR clone 51608 (TRBV7-2, TRBJ2-7)
CASRSQGAAYEQYF

SEQ ID NO: 103217 - protein, 13 aa, Homo sapiens
  CDR3 for alpha chain variable domain of TCR clone 51609 (TRAV27, TRAJ3)
ASLRGSNASKIIF

SEQ ID NO: 103218 - protein, 15 aa, Homo sapiens
  CDR3 for beta chain variable domain of TCR clone 51609 (TRBV28, TRBJ1-3)
CASSMGWASGNTIYF

SEQ ID NO: 103219 - protein, 16 aa, Homo sapiens
  CDR3 for alpha chain variable domain of TCR clone 51610 (TRAV30, TRAJ24)
CGTEIVDADSWGKFQF

SEQ ID NO: 103220 - protein, 15 aa, Homo sapiens
  CDR3 for beta chain variable domain of TCR clone 51610 (TRBV27, TRBJ2-3)
CASSLGLAATDTQYF

SEQ ID NO: 103221 - protein, 14 aa, Homo sapiens
  CDR3 for alpha chain variable domain of TCR clone 51611 (TRAV23/DV6, TRAJ4)
CAAPSSGGSNKLIF

SEQ ID NO: 103222 - protein, 16 aa, Homo sapiens
  CDR3 for beta chain variable domain of TCR clone 51611 (TRBV19, TRBJ1-1)
CASRFGGPVTGTEAFF

SEQ ID NO: 103223 - protein, 12 aa, Homo sapiens
  CDR3 for alpha chain variable domain of TCR clone 51612 (TRAV8-3, TRAJ20)
CAVGANDYKLSF

SEQ ID NO: 103224 - protein, 16 aa, Homo sapiens
  CDR3 for beta chain variable domain of TCR clone 51612 (TRBV19, TRBJ2-2)
CPSRSPGTGATGELFF

SEQ ID NO: 103225 - protein, 14 aa, Homo sapiens
  CDR3 for alpha chain variable domain of TCR clone 51613 (TRAV8-3, TRAJ9)
CAVVYNTGGFKTIF

SEQ ID NO: 103226 - protein, 13 aa, Homo sapiens
  CDR3 for beta chain variable domain of TCR clone 51613 (TRBV7-3, TRBJ2-2)
CQQLRRIHRGAVF

SEQ ID NO: 103227 - protein, 15 aa, Homo sapiens
  CDR3 for alpha chain variable domain of TCR clone 51614 (TRAV2, TRAJ28)
CAVPYSGAGSYKLTF

SEQ ID NO: 103228 - protein, 17 aa, Homo sapiens
  CDR3 for beta chain variable domain of TCR clone 51614 (TRBV20-1, TRBJ2-4)
CSARDWASGGRENIQYF

SEQ ID NO: 103229 - protein, 16 aa, Homo sapiens
  CDR3 for alpha chain variable domain of TCR clone 51615 (TRAV3, TRAJ10)
CAVRDMRAGGGNKLTV

SEQ ID NO: 103230 - protein, 15 aa, Homo sapiens
  CDR3 for beta chain variable domain of TCR clone 51615 (TRBV11-2, TRBJ1-6)
CASTGFGTAVSPLHF

SEQ ID NO: 103231 - protein, 15 aa, Homo sapiens
  CDR3 for alpha chain variable domain of TCR clone 51616 (TRAV21, TRAJ53)
CATLNRGGSNYKLTF

SEQ ID NO: 103232 - protein, 15 aa, Homo sapiens
  CDR3 for beta chain variable domain of TCR clone 51616 (TRBV27, TRBJ2-1)
CASSNGGGSSNEQFF

SEQ ID NO: 103233 - protein, 14 aa, Homo sapiens
  CDR3 for alpha chain variable domain of TCR clone 51617 (TRAV12-2, TRAJ40)
CAVKIPSGTYKYIF

SEQ ID NO: 103234 - protein, 13 aa, Homo sapiens
  CDR3 for beta chain variable domain of TCR clone 51617 (TRBV7-6, TRBJ1-2)
CASSLVADYGYTF

SEQ ID NO: 103235 - protein, 13 aa, Homo sapiens
  CDR3 for alpha chain variable domain of TCR clone 51618 (TRAV30, TRAJ6)
CGFIAGGSYIPTF

SEQ ID NO: 103236 - protein, 13 aa, Homo sapiens
  CDR3 for beta chain variable domain of TCR clone 51618 (TRBV5-4, TRBJ2-5)
CASSPVSQETQYF

SEQ ID NO: 103237 - protein, 14 aa, Homo sapiens
  CDR3 for alpha chain variable domain of TCR clone 51619 (TRAV12-2, TRAJ5)
CAVNRSTGRRALTF

SEQ ID NO: 103238 - protein, 13 aa, Homo sapiens
  CDR3 for beta chain variable domain of TCR clone 51619 (TRBV6-5, TRBJ2-6)
CASSTSGPLRLDF

SEQ ID NO: 103239 - protein, 16 aa, Homo sapiens
  CDR3 for alpha chain variable domain of TCR clone 51620 (TRAV17, TRAJ21)
CATDTETTSTNFTLDL

SEQ ID NO: 103240 - protein, 15 aa, Homo sapiens
  CDR3 for beta chain variable domain of TCR clone 51620 (TRBV7-8, TRBJ2-1)
CASSPSGTIYNEQFF

SEQ ID NO: 103241 - protein, 16 aa, Homo sapiens
  CDR3 for alpha chain variable domain of TCR clone 51621 (TRAV30, TRAJ24)
CGTEIVDADSWGKFQF

SEQ ID NO: 103242 - protein, 13 aa, Homo sapiens
  CDR3 for beta chain variable domain of TCR clone 51621 (TRBV19, TRBJ2-5)
CASSIPYGETQYF

SEQ ID NO: 103243 - protein, 15 aa, Homo sapiens
  CDR3 for alpha chain variable domain of TCR clone 51622 (TRAV8-2, TRAJ27)
CVVSDRGTNAGKSTF

SEQ ID NO: 103244 - protein, 15 aa, Homo sapiens
  CDR3 for beta chain variable domain of TCR clone 51622 (TRBV9, TRBJ2-1)
CASSLAGSSYNEQFF

SEQ ID NO: 103245 - protein, 15 aa, Homo sapiens
  CDR3 for alpha chain variable domain of TCR clone 51623 (TRAV17, TRAJ4)
RATGTWSGGYNKLIF

SEQ ID NO: 103246 - protein, 13 aa, Homo sapiens
  CDR3 for beta chain variable domain of TCR clone 51623 (TRBV6-6, TRBJ2-7)
CASSPKHLAEQYF

SEQ ID NO: 103247 - protein, 10 aa, Homo sapiens
  CDR3 for alpha chain variable domain of TCR clone 51624 (TRAV12-2, TRAJ48)
CAVTSEKLTF

SEQ ID NO: 103248 - protein, 17 aa, Homo sapiens
  CDR3 for beta chain variable domain of TCR clone 51624 (TRBV11-1, TRBJ2-7)
CASSLTGSFGLNYEQYF

SEQ ID NO: 103249 - protein, 11 aa, Homo sapiens
  CDR3 for alpha chain variable domain of TCR clone 51625 (TRAV12-3, TRAJ49)
CALQGGNQFYF

SEQ ID NO: 103250 - protein, 13 aa, Homo sapiens
  CDR3 for beta chain variable domain of TCR clone 51625 (TRBV4-1, TRBJ1-1)
CASSQLGTGEAFF

SEQ ID NO: 103251 - protein, 21 aa, Homo sapiens
  CDR3 for alpha chain variable domain of TCR clone 51626 (TRAV12-1, TRAJ37)
CVVNGGLWQHRQTNLWARDNF

SEQ ID NO: 103252 - protein, 12 aa, Homo sapiens
  CDR3 for beta chain variable domain of TCR clone 51626 (TRBV20-1, TRBJ1-2)
CSAPGFNYGDTF

SEQ ID NO: 103253 - protein, 15 aa, Homo sapiens
  CDR3 for alpha chain variable domain of TCR clone 51627 (TRAV27, TRAJ38)
CAARRNAGNNRKLIW

SEQ ID NO: 103254 - protein, 13 aa, Homo sapiens
  CDR3 for beta chain variable domain of TCR clone 51627 (TRBV24-1, TRBJ2-2)
CATSDWSTGELFF

SEQ ID NO: 103255 - protein, 13 aa, Homo sapiens
  CDR3 for alpha chain variable domain of TCR clone 51628 (TRAV12-3, TRAJ7)
CAMSASGKNRLAF

SEQ ID NO: 103256 - protein, 14 aa, Homo sapiens
  CDR3 for beta chain variable domain of TCR clone 51628 (TRBV13, TRBJ2-5)
CASSLGPRGETQYF

SEQ ID NO: 103257 - protein, 11 aa, Homo sapiens
  CDR3 for alpha chain variable domain of TCR clone 51629 (TRAV12-3, TRAJ41)
CAMNAREALNF

SEQ ID NO: 103258 - protein, 11 aa, Homo sapiens
  CDR3 for beta chain variable domain of TCR clone 51629 (TRBV10-3, TRBJ2-7)
CAISEGLEQYF

SEQ ID NO: 103259 - protein, 14 aa, Homo sapiens
  CDR3 for alpha chain variable domain of TCR clone 51630 (TRAV35, TRAJ42)
CAGPKGGSQGNLIF

SEQ ID NO: 103260 - protein, 16 aa, Homo sapiens
  CDR3 for beta chain variable domain of TCR clone 51630 (TRBV4-2, TRBJ2-3)
CASSQELAGDTDTQYF

SEQ ID NO: 103261 - protein, 14 aa, Homo sapiens
  CDR3 for alpha chain variable domain of TCR clone 51631 (TRAV12-3, TRAJ10)
SHLPLTGGGNKLTF

SEQ ID NO: 103262 - protein, 13 aa, Homo sapiens
  CDR3 for beta chain variable domain of TCR clone 51631 (TRBV9, TRBJ2-1)
CASGPSGGNEQFF

SEQ ID NO: 103263 - protein, 13 aa, Homo sapiens
  CDR3 for alpha chain variable domain of TCR clone 51632 (TRAV1-1, TRAJ6)
CAVRLGGSYIPTF

SEQ ID NO: 103264 - protein, 13 aa, Homo sapiens
  CDR3 for beta chain variable domain of TCR clone 51632 (TRBV7-3, TRBJ1-1)
CASSQDWGAEAFF

SEQ ID NO: 103265 - protein, 17 aa, Homo sapiens
  CDR3 for alpha chain variable domain of TCR clone 51633 (TRAV26-1, TRAJ53)
CIVRVDDSGGSNYKLTF

SEQ ID NO: 103266 - protein, 18 aa, Homo sapiens
  CDR3 for beta chain variable domain of TCR clone 51633 (TRBV11-2, TRBJ2-3)
CASSLGGASRGAPNTQYF

SEQ ID NO: 103267 - protein, 13 aa, Homo sapiens
  CDR3 for alpha chain variable domain of TCR clone 51634 (TRAV2, TRAJ15)
CAVASQAGTALIF

SEQ ID NO: 103268 - protein, 15 aa, Homo sapiens
  CDR3 for beta chain variable domain of TCR clone 51634 (TRBV28, TRBJ2-5)
CASSPGQGSIETQYF

SEQ ID NO: 103269 - protein, 14 aa, Homo sapiens
  CDR3 for alpha chain variable domain of TCR clone 51635 (TRAV1-2, TRAJ8)
CAVREDTGFQKLVF

SEQ ID NO: 103270 - protein, 15 aa, Homo sapiens
  CDR3 for beta chain variable domain of TCR clone 51635 (TRBV12-3, TRBJ2-5)
CASSPPPGLQETQYF

SEQ ID NO: 103271 - protein, 12 aa, Homo sapiens
  CDR3 for alpha chain variable domain of TCR clone 51636 (TRAV2, TRAJ31)
CAVEDNNARLMF

SEQ ID NO: 103272 - protein, 13 aa, Homo sapiens
  CDR3 for beta chain variable domain of TCR clone 51636 (TRBV12-4, TRBJ2-5)
CASSPGTEETQYF

SEQ ID NO: 103273 - protein, 12 aa, Homo sapiens
  CDR3 for alpha chain variable domain of TCR clone 51637 (TRAV13-1, TRAJ9)
CASHTGGFKTTF

SEQ ID NO: 103274 - protein, 18 aa, Homo sapiens
  CDR3 for beta chain variable domain of TCR clone 51637 (TRBV11-2, TRBJ2-3)
CASSLGGASRGAPNTQYF

SEQ ID NO: 103275 - protein, 13 aa, Homo sapiens
  CDR3 for alpha chain variable domain of TCR clone 51638 (TRAV2, TRAJ40)
CAVVTSGTYKYIF

SEQ ID NO: 103276 - protein, 16 aa, Homo sapiens
  CDR3 for beta chain variable domain of TCR clone 51638 (TRBV18, TRBJ1-5)
CASSPYRVEGNQPQHF

SEQ ID NO: 103277 - protein, 16 aa, Homo sapiens
  CDR3 for alpha chain variable domain of TCR clone 51639 (TRAV12-2, TRAJ45)
CAVKRNPGGGADGLTF

SEQ ID NO: 103278 - protein, 12 aa, Homo sapiens
  CDR3 for beta chain variable domain of TCR clone 51639 (TRBV6-1, TRBJ2-5)
CASSEGREAQYF

SEQ ID NO: 103279 - protein, 13 aa, Homo sapiens
  CDR3 for alpha chain variable domain of TCR clone 51640 (TRAV13-1, TRAJ21)
CAASIYNFNKFYF

SEQ ID NO: 103280 - protein, 13 aa, Homo sapiens
  CDR3 for beta chain variable domain of TCR clone 51640 (TRBV27, TRBJ1-4)
CASSLMGDEILFF

SEQ ID NO: 103281 - protein, 13 aa, Homo sapiens
  CDR3 for alpha chain variable domain of TCR clone 51641 (TRAV12-3, TRAJ47)
CAMKKEYGNKLVF

SEQ ID NO: 103282 - protein, 17 aa, Homo sapiens
  CDR3 for beta chain variable domain of TCR clone 51641 (TRBV13, TRBJ2-3)
CASSLSRVAGGRNTQYF

SEQ ID NO: 103283 - protein, 17 aa, Homo sapiens
  CDR3 for alpha chain variable domain of TCR clone 51642 (TRAV36/DV7, TRAJ52)
CAVAQRAGGTSYGKLTF

SEQ ID NO: 103284 - protein, 14 aa, Homo sapiens
  CDR3 for beta chain variable domain of TCR clone 51642 (TRBV6-1, TRBJ1-3)
CASVQGGGGNTMYF

SEQ ID NO: 103285 - protein, 11 aa, Homo sapiens
  CDR3 for alpha chain variable domain of TCR clone 51643 (TRAV1-1, TRAJ16)
CAAGDGQKLLF

SEQ ID NO: 103286 - protein, 15 aa, Homo sapiens
  CDR3 for beta chain variable domain of TCR clone 51643 (TRBV28, TRBJ1-2)
CASIPQGSDDYGYAF

SEQ ID NO: 103287 - protein, 13 aa, Homo sapiens
  CDR3 for alpha chain variable domain of TCR clone 51644 (TRAV27, TRAJ45)
CRSSVGGADGLTF

SEQ ID NO: 103288 - protein, 15 aa, Homo sapiens
  CDR3 for beta chain variable domain of TCR clone 51644 (TRBV12-4, TRBJ2-5)
CASSPPTGLQETQYF

SEQ ID NO: 103289 - protein, 12 aa, Homo sapiens
  CDR3 for alpha chain variable domain of TCR clone 51645 (TRAV12-3, TRAJ17)
CAMTLTDNKLTF

SEQ ID NO: 103290 - protein, 15 aa, Homo sapiens
  CDR3 for beta chain variable domain of TCR clone 51645 (TRBV6-3, TRBJ2-7)
CASSSPGTVFYEQYF

SEQ ID NO: 103291 - protein, 14 aa, Homo sapiens
  CDR3 for alpha chain variable domain of TCR clone 51646 (TRAV1-2, TRAJ8)
CAVREDTGFQKLVF

SEQ ID NO: 103292 - protein, 15 aa, Homo sapiens
  CDR3 for beta chain variable domain of TCR clone 51646 (TRBV6-6, TRBJ1-1)
CASSPRGDVETEAFF

SEQ ID NO: 103293 - protein, 14 aa, Homo sapiens
  CDR3 for alpha chain variable domain of TCR clone 51647 (TRAV25, TRAJ42)
CAENYGGSQGNLIF

SEQ ID NO: 103294 - protein, 13 aa, Homo sapiens
  CDR3 for beta chain variable domain of TCR clone 51647 (TRBV19, TRBJ2-2)
CASSQRSTGELFF

SEQ ID NO: 103295 - protein, 14 aa, Homo sapiens
  CDR3 for alpha chain variable domain of TCR clone 51648 (TRAV16, TRAJ15)
CALSFNQAGTALIF

SEQ ID NO: 103296 - protein, 16 aa, Homo sapiens
  CDR3 for beta chain variable domain of TCR clone 51648 (TRBV9, TRBJ2-7)
CASNAGPDRSPYEQYF

SEQ ID NO: 103297 - protein, 22 aa, Homo sapiens
  CDR3 for alpha chain variable domain of TCR clone 51649 (TRAV3, TRAJ38)
CAVRDCLNAGNNHIQNPDPAVY

SEQ ID NO: 103298 - protein, 14 aa, Homo sapiens
  CDR3 for beta chain variable domain of TCR clone 51649 (TRBV5-5, TRBJ1-5)
CASIGQGVDQPQHF

SEQ ID NO: 103299 - protein, 18 aa, Homo sapiens
  CDR3 for alpha chain variable domain of TCR clone 51650 (TRAV13-1, TRAJ52)
CAAKNPNAGGTSYGKLTF

SEQ ID NO: 103300 - protein, 14 aa, Homo sapiens
  CDR3 for beta chain variable domain of TCR clone 51650 (TRBV7-3, TRBJ2-1)
CASSFAGGTNEQFF

SEQ ID NO: 103301 - protein, 11 aa, Homo sapiens
  CDR3 for alpha chain variable domain of TCR clone 51651 (TRAV20, TRAJ23)
CACNQGGKLIF

SEQ ID NO: 103302 - protein, 16 aa, Homo sapiens
  CDR3 for beta chain variable domain of TCR clone 51651 (TRBV7-8, TRBJ2-5)
CASSFGGRPAQETQYF

SEQ ID NO: 103303 - protein, 18 aa, Homo sapiens
  CDR3 for alpha chain variable domain of TCR clone 51652 (TRAV12-3, TRAJ52)
CAVSRTNAGGTSYGKLTF

SEQ ID NO: 103304 - protein, 17 aa, Homo sapiens
  CDR3 for beta chain variable domain of TCR clone 51652 (TRBV7-3, TRBJ2-3)
CASSLMKRMRGADTQYF

SEQ ID NO: 103305 - protein, 13 aa, Homo sapiens
  CDR3 for alpha chain variable domain of TCR clone 51653 (TRAV20, TRAJ31)
CAVQAIGGARLMF

SEQ ID NO: 103306 - protein, 13 aa, Homo sapiens
  CDR3 for beta chain variable domain of TCR clone 51653 (TRBV7-3, TRBJ1-1)
CASSQDWGAEAFF

SEQ ID NO: 103307 - protein, 14 aa, Homo sapiens
  CDR3 for alpha chain variable domain of TCR clone 51654 (TRAV17, TRAJ31)
CATVLRNNNARLMF

SEQ ID NO: 103308 - protein, 14 aa, Homo sapiens
  CDR3 for beta chain variable domain of TCR clone 51654 (TRBV12-4, TRBJ2-5)
CDSSLWQKQETQYF

SEQ ID NO: 103309 - protein, 15 aa, Homo sapiens
  CDR3 for alpha chain variable domain of TCR clone 51655 (TRAV23/DV6, TRAJ13)
CAAWPGGGGYQKVTF

SEQ ID NO: 103310 - protein, 17 aa, Homo sapiens
  CDR3 for beta chain variable domain of TCR clone 51655 (TRBV19, TRBJ2-7)
CASSIYFYDSYPYEQYF

SEQ ID NO: 103311 - protein, 16 aa, Homo sapiens
  CDR3 for alpha chain variable domain of TCR clone 51656 (TRAV13-1, TRAJ48)
CAASIFGNFGNEKLTF

SEQ ID NO: 103312 - protein, 12 aa, Homo sapiens
  CDR3 for beta chain variable domain of TCR clone 51656 (TRBV11-2, TRBJ2-1)
CASSPGNNEQFF

SEQ ID NO: 103313 - protein, 11 aa, Homo sapiens
  CDR3 for alpha chain variable domain of TCR clone 51657 (TRAV12-3, TRAJ17)
CNDAYRQQANF

SEQ ID NO: 103314 - protein, 15 aa, Homo sapiens
  CDR3 for beta chain variable domain of TCR clone 51657 (TRBV20-1, TRBJ2-7)
CSARDRVSGMDEQYF

SEQ ID NO: 103315 - protein, 19 aa, Homo sapiens
  CDR3 for alpha chain variable domain of TCR clone 51658 (TRAV26-1, TRAJ52)
CIVRAHRNAGGTGYGKLTF

SEQ ID NO: 103316 - protein, 15 aa, Homo sapiens
  CDR3 for beta chain variable domain of TCR clone 51658 (TRBV12-4, TRBJ2-5)
CASSPPTGLQETQYF

SEQ ID NO: 103317 - protein, 13 aa, Homo sapiens
  CDR3 for alpha chain variable domain of TCR clone 51659 (TRAV13-2, TRAJ11)
CAENYSRYSTLTF

SEQ ID NO: 103318 - protein, 13 aa, Homo sapiens
  CDR3 for beta chain variable domain of TCR clone 51659 (TRBV12-4, TRBJ1-4)
CASSMGHNEKLFF

SEQ ID NO: 103319 - protein, 17 aa, Homo sapiens
  CDR3 for alpha chain variable domain of TCR clone 51660 (TRAV26-2, TRAJ42)
CILRDVGYGGSQGNLIF

SEQ ID NO: 103320 - protein, 16 aa, Homo sapiens
  CDR3 for beta chain variable domain of TCR clone 51660 (TRBV12-4, TRBJ2-7)
RASSLIGGTGTYEQYF

SEQ ID NO: 103321 - protein, 16 aa, Homo sapiens
  CDR3 for alpha chain variable domain of TCR clone 51661 (TRAV35, TRAJ28)
CAGQEYSGAGSYQLTF

SEQ ID NO: 103322 - protein, 16 aa, Homo sapiens
  CDR3 for beta chain variable domain of TCR clone 51661 (TRBV7-3, TRBJ2-2)
CASSLKRGTLSGELFF

SEQ ID NO: 103323 - protein, 10 aa, Homo sapiens
  CDR3 for alpha chain variable domain of TCR clone 51662 (TRAV23/DV6, TRAJ57)
CAASSTLSQG

SEQ ID NO: 103324 - protein, 13 aa, Homo sapiens
  CDR3 for beta chain variable domain of TCR clone 51662 (TRBV19, TRBJ1-2)
CASSVPGQDGYTF

SEQ ID NO: 103325 - protein, 16 aa, Homo sapiens
  CDR3 for alpha chain variable domain of TCR clone 51663 (TRAV8-6, TRAJ4)
CAVCPTFSGGYNKLIF

SEQ ID NO: 103326 - protein, 14 aa, Homo sapiens
  CDR3 for beta chain variable domain of TCR clone 51663 (TRBV29-1, TRBJ2-2)
CSVVTSGAPGELFF

SEQ ID NO: 103327 - protein, 14 aa, Homo sapiens
  CDR3 for alpha chain variable domain of TCR clone 51664 (TRAV3, TRAJ7)
CAVREEERERQTRF

SEQ ID NO: 103328 - protein, 15 aa, Homo sapiens
  CDR3 for beta chain variable domain of TCR clone 51664 (TRBV20-1, TRBJ1-5)
CSAFKNGQRNQPQHF

SEQ ID NO: 103329 - protein, 14 aa, Homo sapiens
  CDR3 for alpha chain variable domain of TCR clone 51665 (TRAV27, TRAJ22)
CAGLPSGSARQLTF

SEQ ID NO: 103330 - protein, 14 aa, Homo sapiens
  CDR3 for beta chain variable domain of TCR clone 51665 (TRBV7-8, TRBJ2-3)
CASSLEAGTDTQYF

SEQ ID NO: 103331 - protein, 16 aa, Homo sapiens
  CDR3 for alpha chain variable domain of TCR clone 51666 (TRAV20, TRAJ22)
CAVQASSSGSARQLTF

SEQ ID NO: 103332 - protein, 13 aa, Homo sapiens
  CDR3 for beta chain variable domain of TCR clone 51666 (TRBV7-2, TRBJ2-5)
CASSQTSVEAQYF

SEQ ID NO: 103333 - protein, 13 aa, Homo sapiens
  CDR3 for alpha chain variable domain of TCR clone 51667 (TRAV12-3, TRAJ44)
CARTTGTASKLTF

SEQ ID NO: 103334 - protein, 13 aa, Homo sapiens
  CDR3 for beta chain variable domain of TCR clone 51667 (TRBV7-9, TRBJ1-2)
CASSLKQNYGYTF

SEQ ID NO: 103335 - protein, 16 aa, Homo sapiens
  CDR3 for alpha chain variable domain of TCR clone 51668 (TRAV30, TRAJ24)
CGTEIVDADSWGKFQF

SEQ ID NO: 103336 - protein, 14 aa, Homo sapiens
  CDR3 for beta chain variable domain of TCR clone 51668 (TRBV12-4, TRBJ2-1)
CASSLGQGASEQFF

SEQ ID NO: 103337 - protein, 15 aa, Homo sapiens
  CDR3 for alpha chain variable domain of TCR clone 51669 (TRAV12-3, TRAJ6)
CAMSATTGGSYIPTF

SEQ ID NO: 103338 - protein, 12 aa, Homo sapiens
  CDR3 for beta chain variable domain of TCR clone 51669 (TRBV5-7, TRBJ2-7)
CASSVQGGEQYF

SEQ ID NO: 103339 - protein, 14 aa, Homo sapiens
  CDR3 for alpha chain variable domain of TCR clone 51670 (TRAV9-2, TRAJ39)
CALYIYNAGNMLTF

SEQ ID NO: 103340 - protein, 15 aa, Homo sapiens
  CDR3 for beta chain variable domain of TCR clone 51670 (TRBV11-2, TRBJ2-2)
CASSSDRVNAGELFF

SEQ ID NO: 103341 - protein, 17 aa, Homo sapiens
  CDR3 for alpha chain variable domain of TCR clone 51671 (TRAV26-1, TRAJ58)
CIVRVGAEGTSGSRLTF

SEQ ID NO: 103342 - protein, 18 aa, Homo sapiens
  CDR3 for beta chain variable domain of TCR clone 51671 (TRBV7-9, TRBJ2-7)
CASSLTTSGSRTWYEQYF

SEQ ID NO: 103343 - protein, 15 aa, Homo sapiens
  CDR3 for alpha chain variable domain of TCR clone 51672 (TRAV21, TRAJ57)
CAVIITQGGSEKLVF

SEQ ID NO: 103344 - protein, 13 aa, Homo sapiens
  CDR3 for beta chain variable domain of TCR clone 51672 (TRBV7-9, TRBJ1-2)
CASSLKQNYGYTF

SEQ ID NO: 103345 - protein, 14 aa, Homo sapiens
  CDR3 for alpha chain variable domain of TCR clone 51673 (TRAV13-1, TRAJ39)
CVASKNNAGNMLTF

SEQ ID NO: 103346 - protein, 14 aa, Homo sapiens
  CDR3 for beta chain variable domain of TCR clone 51673 (TRBV20-1, TRBJ2-7)
CSAPELAGVGEQYF

SEQ ID NO: 103347 - protein, 14 aa, Homo sapiens
  CDR3 for alpha chain variable domain of TCR clone 51674 (TRAV1-2, TRAJ8)
CAVREDTGFQKLVF

SEQ ID NO: 103348 - protein, 16 aa, Homo sapiens
  CDR3 for beta chain variable domain of TCR clone 51674 (TRBV11-2, TRBJ2-1)
CASSVTADFSYNEQFF

SEQ ID NO: 103349 - protein, 14 aa, Homo sapiens
  CDR3 for alpha chain variable domain of TCR clone 51675 (TRAV16, TRAJ33)
CALSAMDSDYQLIW

SEQ ID NO: 103350 - protein, 16 aa, Homo sapiens
  CDR3 for beta chain variable domain of TCR clone 51675 (TRBV25-1, TRBJ2-7)
CASSELTGGGIYEQYF

SEQ ID NO: 103351 - protein, 13 aa, Homo sapiens
  CDR3 for alpha chain variable domain of TCR clone 51676 (TRAV13-1, TRAJ9)
CAASGTGSFKTIF

SEQ ID NO: 103352 - protein, 13 aa, Homo sapiens
  CDR3 for beta chain variable domain of TCR clone 51676 (TRBV12-4, TRBJ2-7)
CASSLERVREQYF

SEQ ID NO: 103353 - protein, 15 aa, Homo sapiens
  CDR3 for alpha chain variable domain of TCR clone 51677 (TRAV8-4, TRAJ37)
CAVSRGSGNTGKLIF

SEQ ID NO: 103354 - protein, 15 aa, Homo sapiens
  CDR3 for beta chain variable domain of TCR clone 51677 (TRBV5-1, TRBJ2-7)
CAGSLDLTSSYEQYF

SEQ ID NO: 103355 - protein, 13 aa, Homo sapiens
  CDR3 for alpha chain variable domain of TCR clone 51678 (TRAV30, TRAJ24)
CGTVTDSWGKLQF

SEQ ID NO: 103356 - protein, 14 aa, Homo sapiens
  CDR3 for beta chain variable domain of TCR clone 51678 (TRBV6-3, TRBJ2-2)
CASTYTPDTEELFF

SEQ ID NO: 103357 - protein, 14 aa, Homo sapiens
  CDR3 for alpha chain variable domain of TCR clone 51679 (TRAV12-3, TRAJ10)
SHLPLTGGGNKLTF

SEQ ID NO: 103358 - protein, 22 aa, Homo sapiens
  CDR3 for beta chain variable domain of TCR clone 51679 (TRBV19, TRBJ2-1)
CASSVRDRVTGTSGRIYNEQFF

SEQ ID NO: 103359 - protein, 14 aa, Homo sapiens
  CDR3 for alpha chain variable domain of TCR clone 51680 (TRAV1-2, TRAJ27)
CAVRSGTNAGKSTF

SEQ ID NO: 103360 - protein, 15 aa, Homo sapiens
  CDR3 for beta chain variable domain of TCR clone 51680 (TRBV18, TRBJ2-7)
RASSPLQGRTYEQYF

SEQ ID NO: 103361 - protein, 15 aa, Homo sapiens
  CDR3 for alpha chain variable domain of TCR clone 51681 (TRAV3, TRAJ27)
CAVRDPLTNAGKSTF

SEQ ID NO: 103362 - protein, 15 aa, Homo sapiens
  CDR3 for beta chain variable domain of TCR clone 51681 (TRBV28, TRBJ2-1)
CSSSIIAGGRSEQFF

SEQ ID NO: 103363 - protein, 12 aa, Homo sapiens
  CDR3 for alpha chain variable domain of TCR clone 51682 (TRAV12-3, TRAJ20)
CAMVRGDYKLSF

SEQ ID NO: 103364 - protein, 14 aa, Homo sapiens
  CDR3 for beta chain variable domain of TCR clone 51682 (TRBV20-1, TRBJ2-7)
CSAIPREASYEQYF

SEQ ID NO: 103365 - protein, 15 aa, Homo sapiens
  CDR3 for alpha chain variable domain of TCR clone 51683 (TRAV3, TRAJ20)
CAVRDIKLSDYKLSF

SEQ ID NO: 103366 - protein, 15 aa, Homo sapiens
  CDR3 for beta chain variable domain of TCR clone 51683 (TRBV7-9, TRBJ1-6)
CASSSPGRGNSPIHF

SEQ ID NO: 103367 - protein, 13 aa, Homo sapiens
  CDR3 for alpha chain variable domain of TCR clone 51684 (TRAV12-2, TRAJ52)
CNAGGTSYGKLTF

SEQ ID NO: 103368 - protein, 22 aa, Homo sapiens
  CDR3 for beta chain variable domain of TCR clone 51684 (TRBV6-4, TRBJ2-6)
CASSETGRGGQRPDFRGRQQAD

SEQ ID NO: 103369 - protein, 15 aa, Homo sapiens
  CDR3 for alpha chain variable domain of TCR clone 51685 (TRAV12-3, TRAJ49)
CAMAVAPNTGNQFYF

SEQ ID NO: 103370 - protein, 18 aa, Homo sapiens
  CDR3 for beta chain variable domain of TCR clone 51685 (TRBV4-1, TRBJ1-5)
CASSQNPRGQGLNQPQHF

SEQ ID NO: 103371 - protein, 11 aa, Homo sapiens
  CDR3 for alpha chain variable domain of TCR clone 51686 (TRAV17, TRAJ9)
CATTGGFKTIF

SEQ ID NO: 103372 - protein, 14 aa, Homo sapiens
  CDR3 for beta chain variable domain of TCR clone 51686 (TRBV7-9, TRBJ2-2)
CASSGLSDTGELFF

SEQ ID NO: 103373 - protein, 23 aa, Homo sapiens
  CDR3 for alpha chain variable domain of TCR clone 51687 (TRAV8-4, TRAJ6)
CAVSAPSGEATYLHLEEEPALLF

SEQ ID NO: 103374 - protein, 15 aa, Homo sapiens
  CDR3 for beta chain variable domain of TCR clone 51687 (TRBV2, TRBJ2-1)
CASSEARSAYNEQFF

SEQ ID NO: 103375 - protein, 17 aa, Homo sapiens
  CDR3 for alpha chain variable domain of TCR clone 51688 (TRAV40, TRAJ45)
SSGSPMYSGGGADGLTF

SEQ ID NO: 103376 - protein, 14 aa, Homo sapiens
  CDR3 for beta chain variable domain of TCR clone 51688 (TRBV18, TRBJ2-7)
CASSPRGGAYEQYF

SEQ ID NO: 103377 - protein, 16 aa, Homo sapiens
  CDR3 for alpha chain variable domain of TCR clone 51689 (TRAV4, TRAJ22)
CLVGDLYSGSARKLTF

SEQ ID NO: 103378 - protein, 16 aa, Homo sapiens
  CDR3 for beta chain variable domain of TCR clone 51689 (TRBV7-9, TRBJ2-1)
CASSDVAGGSYNEQFF

SEQ ID NO: 103379 - protein, 15 aa, Homo sapiens
  CDR3 for alpha chain variable domain of TCR clone 51690 (TRAV29/DV5, TRAJ57)
CAASLLRGGSEKLVF

SEQ ID NO: 103380 - protein, 15 aa, Homo sapiens
  CDR3 for beta chain variable domain of TCR clone 51690 (TRBV5-1, TRBJ1-3)
CASSLEGGSGKTIYF

SEQ ID NO: 103381 - protein, 13 aa, Homo sapiens
  CDR3 for alpha chain variable domain of TCR clone 51691 (TRAV27, TRAJ41)
CAGEGNSGYALNF

SEQ ID NO: 103382 - protein, 16 aa, Homo sapiens
  CDR3 for beta chain variable domain of TCR clone 51691 (TRBV7-2, TRBJ1-1)
CASSFLQGRLKLSLDK

SEQ ID NO: 103383 - protein, 17 aa, Homo sapiens
  CDR3 for alpha chain variable domain of TCR clone 51692 (TRAV3, TRAJ7)
CAVRDMSPLEGTTDSLL

SEQ ID NO: 103384 - protein, 17 aa, Homo sapiens
  CDR3 for beta chain variable domain of TCR clone 51692 (TRBV15, TRBJ1-2)
CVTSGREIDVVNYGYTF

SEQ ID NO: 103385 - protein, 13 aa, Homo sapiens
  CDR3 for alpha chain variable domain of TCR clone 51693 (TRAV3, TRAJ21)
CSVREPDFNKFYF

SEQ ID NO: 103386 - protein, 17 aa, Homo sapiens
  CDR3 for beta chain variable domain of TCR clone 51693 (TRBV7-8, TRBJ2-6)
CASSAGTGGAGANVLTF

SEQ ID NO: 103387 - protein, 18 aa, Homo sapiens
  CDR3 for alpha chain variable domain of TCR clone 51694 (TRAV26-1, TRAJ22)
CIVRVSFWFCKATDLLIW

SEQ ID NO: 103388 - protein, 16 aa, Homo sapiens
  CDR3 for beta chain variable domain of TCR clone 51694 (TRBV24-1, TRBJ2-3)
CATSDPGTGATDTQYF

SEQ ID NO: 103389 - protein, 13 aa, Homo sapiens
  CDR3 for alpha chain variable domain of TCR clone 51695 (TRAV16, TRAJ28)
CALTGAGSYQLTF

SEQ ID NO: 103390 - protein, 14 aa, Homo sapiens
  CDR3 for beta chain variable domain of TCR clone 51695 (TRBV18, TRBJ2-5)
CASSPGVSQETQYF

SEQ ID NO: 103391 - protein, 12 aa, Homo sapiens
  CDR3 for alpha chain variable domain of TCR clone 51696 (TRAV12-3, TRAJ40)
CAMSSGTYKYIF

SEQ ID NO: 103392 - protein, 15 aa, Homo sapiens
  CDR3 for beta chain variable domain of TCR clone 51696 (TRBV7-3, TRBJ2-2)
CASSATGQGTGELFF

SEQ ID NO: 103393 - protein, 14 aa, Homo sapiens
  CDR3 for alpha chain variable domain of TCR clone 51697 (TRAV8-1, TRAJ5)
CAVRTDTGRRELTF

SEQ ID NO: 103394 - protein, 12 aa, Homo sapiens
  CDR3 for beta chain variable domain of TCR clone 51697 (TRBV11-2, TRBJ2-1)
CASSPGNNEQFF

SEQ ID NO: 103395 - protein, 12 aa, Homo sapiens
  CDR3 for alpha chain variable domain of TCR clone 51698 (TRAV1-1, TRAJ39)
CAVPVVGNMLTF

SEQ ID NO: 103396 - protein, 15 aa, Homo sapiens
  CDR3 for beta chain variable domain of TCR clone 51698 (TRBV19, TRBJ1-6)
CAGSTQGAVGSPLHF

SEQ ID NO: 103397 - protein, 13 aa, Homo sapiens
  CDR3 for alpha chain variable domain of TCR clone 51699 (TRAV13-1, TRAJ48)
CAAASFGNEKLTF

SEQ ID NO: 103398 - protein, 14 aa, Homo sapiens
  CDR3 for beta chain variable domain of TCR clone 51699 (TRBV18, TRBJ2-1)
CASSPGISETEQFF

SEQ ID NO: 103399 - protein, 14 aa, Homo sapiens
  CDR3 for alpha chain variable domain of TCR clone 51700 (TRAV35, TRAJ50)
CAGHRRTSYDKVIS

SEQ ID NO: 103400 - protein, 13 aa, Homo sapiens
  CDR3 for beta chain variable domain of TCR clone 51700 (TRBV7-7, TRBJ2-3)
CASSLSRADTQYF

SEQ ID NO: 103401 - protein, 16 aa, Homo sapiens
  CDR3 for alpha chain variable domain of TCR clone 51701 (TRAV26-1, TRAJ37)
CIVRGDGSGNTVKLIF

SEQ ID NO: 103402 - protein, 17 aa, Homo sapiens
  CDR3 for beta chain variable domain of TCR clone 51701 (TRBV4-1, TRBJ2-7)
CASSRDPLGVRGGEQYF

SEQ ID NO: 103403 - protein, 14 aa, Homo sapiens
  CDR3 for alpha chain variable domain of TCR clone 51702 (TRAV29/DV5, TRAJ33)
CAASADDSNYQLIW

SEQ ID NO: 103404 - protein, 15 aa, Homo sapiens
  CDR3 for beta chain variable domain of TCR clone 51702 (TRBV6-1, TRBJ2-2)
CASSARFANTGELFF

SEQ ID NO: 103405 - protein, 13 aa, Homo sapiens
  CDR3 for alpha chain variable domain of TCR clone 51703 (TRAV3, TRAJ21)
CAVREPDFNKFYF

SEQ ID NO: 103406 - protein, 15 aa, Homo sapiens
  CDR3 for beta chain variable domain of TCR clone 51703 (TRBV7-9, TRBJ1-1)
CASSDSLGENTEAFF

SEQ ID NO: 103407 - protein, 15 aa, Homo sapiens
  CDR3 for alpha chain variable domain of TCR clone 51704 (TRAV2, TRAJ37)
CAAEDGSSNTGKLIF

SEQ ID NO: 103408 - protein, 13 aa, Homo sapiens
  CDR3 for beta chain variable domain of TCR clone 51704 (TRBV20-1, TRBJ1-6)
CSTFREGNSPLHF

SEQ ID NO: 103409 - protein, 12 aa, Homo sapiens
  CDR3 for alpha chain variable domain of TCR clone 51705 (TRAV30, TRAJ39)
CGRGNAGNMLTF

SEQ ID NO: 103410 - protein, 12 aa, Homo sapiens
  CDR3 for beta chain variable domain of TCR clone 51705 (TRBV12-4, TRBJ2-1)
CASRQTENEQFF

SEQ ID NO: 103411 - protein, 14 aa, Homo sapiens
  CDR3 for alpha chain variable domain of TCR clone 51706 (TRAV29/DV5, TRAJ13)
CAARRKTGANNLFF

SEQ ID NO: 103412 - protein, 15 aa, Homo sapiens
  CDR3 for beta chain variable domain of TCR clone 51706 (TRBV7-9, TRBJ2-7)
CASSSSGLAVYEQYF

SEQ ID NO: 103413 - protein, 15 aa, Homo sapiens
  CDR3 for alpha chain variable domain of TCR clone 51707 (TRAV8-3, TRAJ45)
RASSYSGGGADGLTF

SEQ ID NO: 103414 - protein, 17 aa, Homo sapiens
  CDR3 for beta chain variable domain of TCR clone 51707 (TRBV7-8, TRBJ1-2)
CASSLRPLQGHLYGYTF

SEQ ID NO: 103415 - protein, 13 aa, Homo sapiens
  CDR3 for alpha chain variable domain of TCR clone 51708 (TRAV8-6, TRAJ21)
CAVSPSSLNKFYF

SEQ ID NO: 103416 - protein, 14 aa, Homo sapiens
  CDR3 for beta chain variable domain of TCR clone 51708 (TRBV7-9, TRBJ2-5)
CASSLDTAQETQYV

SEQ ID NO: 103417 - protein, 14 aa, Homo sapiens
  CDR3 for alpha chain variable domain of TCR clone 51709 (TRAV23/DV6, TRAJ11)
CAASLESGHSTLTF

SEQ ID NO: 103418 - protein, 13 aa, Homo sapiens
  CDR3 for beta chain variable domain of TCR clone 51709 (TRBV4-1, TRBJ2-5)
CASSLTRGETQYF

SEQ ID NO: 103419 - protein, 14 aa, Homo sapiens
  CDR3 for alpha chain variable domain of TCR clone 51710 (TRAV17, TRAJ57)
CATDPQGGSEKLVF

SEQ ID NO: 103420 - protein, 14 aa, Homo sapiens
  CDR3 for beta chain variable domain of TCR clone 51710 (TRBV11-2, TRBJ2-5)
CASSRTGGIETQYF

SEQ ID NO: 103421 - protein, 12 aa, Homo sapiens
  CDR3 for alpha chain variable domain of TCR clone 51711 (TRAV5, TRAJ27)
CAEITNAGKSTF

SEQ ID NO: 103422 - protein, 16 aa, Homo sapiens
  CDR3 for beta chain variable domain of TCR clone 51711 (TRBV12-4, TRBJ1-5)
CASSRPVGGSNQPQHF

SEQ ID NO: 103423 - protein, 16 aa, Homo sapiens
  CDR3 for alpha chain variable domain of TCR clone 51712 (TRAV8-6, TRAJ37)
CAVSGLGSSNTGKLIF

SEQ ID NO: 103424 - protein, 15 aa, Homo sapiens
  CDR3 for beta chain variable domain of TCR clone 51712 (TRBV20-1, TRBJ1-5)
CSARSGPSMNQTQHF

SEQ ID NO: 103425 - protein, 11 aa, Homo sapiens
  CDR3 for alpha chain variable domain of TCR clone 51713 (TRAV21, TRAJ34)
CAVTNTNKLIF

SEQ ID NO: 103426 - protein, 12 aa, Homo sapiens
  CDR3 for beta chain variable domain of TCR clone 51713 (TRBV7-8, TRBJ2-7)
CASSLGDREQYF

SEQ ID NO: 103427 - protein, 14 aa, Homo sapiens
  CDR3 for alpha chain variable domain of TCR clone 51714 (TRAV1-2, TRAJ16)
CAVNRLSDGQKLLF

SEQ ID NO: 103428 - protein, 14 aa, Homo sapiens
  CDR3 for beta chain variable domain of TCR clone 51714 (TRBV7-9, TRBJ2-3)
CASSLEDGTDTQYF

SEQ ID NO: 103429 - protein, 14 aa, Homo sapiens
  CDR3 for alpha chain variable domain of TCR clone 51715 (TRAV1-2, TRAJ8)
CAVGEDTGFQKLVF

SEQ ID NO: 103430 - protein, 13 aa, Homo sapiens
  CDR3 for beta chain variable domain of TCR clone 51715 (TRBV12-4, TRBJ1-2)
CASSLRQGKGYTF

SEQ ID NO: 103431 - protein, 13 aa, Homo sapiens
  CDR3 for alpha chain variable domain of TCR clone 51716 (TRAV39, TRAJ49)
CAVDRNTGNQFYL

SEQ ID NO: 103432 - protein, 14 aa, Homo sapiens
  CDR3 for beta chain variable domain of TCR clone 51716 (TRBV4-1, TRBJ1-1)
CASSRSGQSFEAFF

SEQ ID NO: 103433 - protein, 13 aa, Homo sapiens
  CDR3 for alpha chain variable domain of TCR clone 51717 (TRAV16, TRAJ27)
CALRRTNAGKSTF

SEQ ID NO: 103434 - protein, 15 aa, Homo sapiens
  CDR3 for beta chain variable domain of TCR clone 51717 (TRBV18, TRBJ2-1)
CASSPPSAPYNEQFF

SEQ ID NO: 103435 - protein, 12 aa, Homo sapiens
  CDR3 for alpha chain variable domain of TCR clone 51718 (TRAV13-2, TRAJ23)
CAERHRGGKLIF

SEQ ID NO: 103436 - protein, 14 aa, Homo sapiens
  CDR3 for beta chain variable domain of TCR clone 51718 (TRBV12-4, TRBJ1-1)
CASSLGTGGTEAFF

SEQ ID NO: 103437 - protein, 15 aa, Homo sapiens
  CDR3 for alpha chain variable domain of TCR clone 51719 (TRAV3, TRAJ45)
CAVRAPWGGADGLTF

SEQ ID NO: 103438 - protein, 16 aa, Homo sapiens
  CDR3 for beta chain variable domain of TCR clone 51719 (TRBV6-1, TRBJ2-2)
CASSFGQGANTGELFF

SEQ ID NO: 103439 - protein, 14 aa, Homo sapiens
  CDR3 for alpha chain variable domain of TCR clone 51720 (TRAV29/DV5, TRAJ49)
CAASAQNTGNQFYF

SEQ ID NO: 103440 - protein, 15 aa, Homo sapiens
  CDR3 for beta chain variable domain of TCR clone 51720 (TRBV28, TRBJ2-4)
RAAGSGTLLMGIQYF

SEQ ID NO: 103441 - protein, 17 aa, Homo sapiens
  CDR3 for alpha chain variable domain of TCR clone 51721 (TRAV3, TRAJ42)
CAVRDRDYGGSQGNLIF

SEQ ID NO: 103442 - protein, 15 aa, Homo sapiens
  CDR3 for beta chain variable domain of TCR clone 51721 (TRBV6-6, TRBJ2-7)
FASSYSYGGSYEQYF

SEQ ID NO: 103443 - protein, 11 aa, Homo sapiens
  CDR3 for alpha chain variable domain of TCR clone 51722 (TRAV35, TRAJ34)
CWARNTDKLIF

SEQ ID NO: 103444 - protein, 16 aa, Homo sapiens
  CDR3 for beta chain variable domain of TCR clone 51722 (TRBV11-2, TRBJ1-1)
CASSLRQGGEHSKAFF

SEQ ID NO: 103445 - protein, 17 aa, Homo sapiens
  CDR3 for alpha chain variable domain of TCR clone 51723 (TRAV17, TRAJ28)
CATDPRRGGAGSYHLTF

SEQ ID NO: 103446 - protein, 16 aa, Homo sapiens
  CDR3 for beta chain variable domain of TCR clone 51723 (TRBV25-1, TRBJ1-1)
CASSGDRDRGRIEAFF

SEQ ID NO: 103447 - protein, 19 aa, Homo sapiens
  CDR3 for alpha chain variable domain of TCR clone 51724 (TRAV26-1, TRAJ52)
CIVRAHRNAGGTSHGKLTF

SEQ ID NO: 103448 - protein, 15 aa, Homo sapiens
  CDR3 for beta chain variable domain of TCR clone 51724 (TRBV29-1, TRBJ2-1)
CSGRDRKSSYNEQFF

SEQ ID NO: 103449 - protein, 12 aa, Homo sapiens
  CDR3 for alpha chain variable domain of TCR clone 51725 (TRAV21, TRAJ23)
CAVMLQGGKLIF

SEQ ID NO: 103450 - protein, 14 aa, Homo sapiens
  CDR3 for beta chain variable domain of TCR clone 51725 (TRBV7-9, TRBJ1-4)
CAITEGEANENLFF

SEQ ID NO: 103451 - protein, 15 aa, Homo sapiens
  CDR3 for alpha chain variable domain of TCR clone 51726 (TRAV23/DV6, TRAJ40)
CAAWPGGGGYQKVTF

SEQ ID NO: 103452 - protein, 15 aa, Homo sapiens
  CDR3 for beta chain variable domain of TCR clone 51726 (TRBV7-9, TRBJ2-7)
CASSPGGGLTYEQYF

SEQ ID NO: 103453 - protein, 18 aa, Homo sapiens
  CDR3 for alpha chain variable domain of TCR clone 51727 (TRAV21, TRAJ52)
CAVRPSPAGGTSYGKLTF

SEQ ID NO: 103454 - protein, 15 aa, Homo sapiens
  CDR3 for beta chain variable domain of TCR clone 51727 (TRBV4-1, TRBJ2-7)
CASSQNTGRLYEQYF

SEQ ID NO: 103455 - protein, 11 aa, Homo sapiens
  CDR3 for alpha chain variable domain of TCR clone 51728 (TRAV21, TRAJ23)
CAPQRRGKLIF

SEQ ID NO: 103456 - protein, 14 aa, Homo sapiens
  CDR3 for beta chain variable domain of TCR clone 51728 (TRBV12-4, TRBJ1-1)
CASTWTGHDAEAFF

SEQ ID NO: 103457 - protein, 12 aa, Homo sapiens
  CDR3 for alpha chain variable domain of TCR clone 51729 (TRAV3, TRAJ43)
CAVRDPNNDMRF

SEQ ID NO: 103458 - protein, 14 aa, Homo sapiens
  CDR3 for beta chain variable domain of TCR clone 51729 (TRBV25-1, TRBJ1-1)
CASTHLGGNTEAFF

SEQ ID NO: 103459 - protein, 14 aa, Homo sapiens
  CDR3 for alpha chain variable domain of TCR clone 51730 (TRAV26-1, TRAJ38)
CIADNAGNNRKLIC

SEQ ID NO: 103460 - protein, 17 aa, Homo sapiens
  CDR3 for beta chain variable domain of TCR clone 51730 (TRBV7-9, TRBJ2-3)
CASSPTVAGDLTDTQYF

SEQ ID NO: 103461 - protein, 14 aa, Homo sapiens
  CDR3 for alpha chain variable domain of TCR clone 51731 (TRAV17, TRAJ32)
CAADPGGATNKLIF

SEQ ID NO: 103462 - protein, 14 aa, Homo sapiens
  CDR3 for beta chain variable domain of TCR clone 51731 (TRBV2, TRBJ1-5)
CASSENRGGQPQHF

SEQ ID NO: 103463 - protein, 13 aa, Homo sapiens
  CDR3 for alpha chain variable domain of TCR clone 51732 (TRAV21, TRAJ57)
CAVTQGGPEKLVF

SEQ ID NO: 103464 - protein, 11 aa, Homo sapiens
  CDR3 for beta chain variable domain of TCR clone 51732 (TRBV11-2, TRBJ2-2)
CASSLPGELFF

SEQ ID NO: 103465 - protein, 11 aa, Homo sapiens
  CDR3 for alpha chain variable domain of TCR clone 51733 (TRAV1-2, TRAJ20)
CAVANDYKLSF

SEQ ID NO: 103466 - protein, 15 aa, Homo sapiens
  CDR3 for beta chain variable domain of TCR clone 51733 (TRBV27, TRBJ2-1)
CASSNGGGSSNEQFF

SEQ ID NO: 103467 - protein, 14 aa, Homo sapiens
  CDR3 for alpha chain variable domain of TCR clone 51734 (TRAV12-2, TRAJ40)
CAAKIPSGTYKYIF

SEQ ID NO: 103468 - protein, 14 aa, Homo sapiens
  CDR3 for beta chain variable domain of TCR clone 51734 (TRBV20-1, TRBJ1-1)
CSAQTRIGGAEAFF

SEQ ID NO: 103469 - protein, 14 aa, Homo sapiens
  CDR3 for alpha chain variable domain of TCR clone 51735 (TRAV17, TRAJ34)
CATDSLEGTDKLIF

SEQ ID NO: 103470 - protein, 14 aa, Homo sapiens
  CDR3 for beta chain variable domain of TCR clone 51735 (TRBV11-2, TRBJ2-5)
CASRPLAGRETQYF

SEQ ID NO: 103471 - protein, 10 aa, Homo sapiens
  CDR3 for alpha chain variable domain of TCR clone 51736 (TRAV26-1, TRAJ40)
CIAGTYKYIF

SEQ ID NO: 103472 - protein, 15 aa, Homo sapiens
  CDR3 for beta chain variable domain of TCR clone 51736 (TRBV19, TRBJ2-1)
CASSSPGVPLDEQIF

SEQ ID NO: 103473 - protein, 15 aa, Homo sapiens
  CDR3 for alpha chain variable domain of TCR clone 51737 (TRAV12-3, TRAJ6)
CAMSATTGGSYIPTF

SEQ ID NO: 103474 - protein, 13 aa, Homo sapiens
  CDR3 for beta chain variable domain of TCR clone 51737 (TRBV20-1, TRBJ1-1)
CSARVGGNTEAFF

SEQ ID NO: 103475 - protein, 10 aa, Homo sapiens
  CDR3 for alpha chain variable domain of TCR clone 51738 (TRAV1-2, TRAJ23)
CAGQGGKLIF

SEQ ID NO: 103476 - protein, 13 aa, Homo sapiens
  CDR3 for beta chain variable domain of TCR clone 51738 (TRBV7-7, TRBJ2-3)
CASSLSRADTQYL

SEQ ID NO: 103477 - protein, 11 aa, Homo sapiens
  CDR3 for alpha chain variable domain of TCR clone 51739 (TRAV21, TRAJ9)
CAVPGGFKTIF

SEQ ID NO: 103478 - protein, 12 aa, Homo sapiens
  CDR3 for beta chain variable domain of TCR clone 51739 (TRBV20-1, TRBJ2-3)
CSAGVGTDTQYF

SEQ ID NO: 103479 - protein, 16 aa, Homo sapiens
  CDR3 for alpha chain variable domain of TCR clone 51740 (TRAV3, TRAJ5)
CAVRNLMDTGRKALTF

SEQ ID NO: 103480 - protein, 16 aa, Homo sapiens
  CDR3 for beta chain variable domain of TCR clone 51740 (TRBV4-2, TRBJ2-7)
CASSQEGLANSYEQYF

SEQ ID NO: 103481 - protein, 15 aa, Homo sapiens
  CDR3 for alpha chain variable domain of TCR clone 51741 (TRAV26-1, TRAJ40)
CIVRVTTSGTYKYIF

SEQ ID NO: 103482 - protein, 12 aa, Homo sapiens
  CDR3 for beta chain variable domain of TCR clone 51741 (TRBV7-9, TRBJ1-4)
CASSTDREKPFF

SEQ ID NO: 103483 - protein, 15 aa, Homo sapiens
  CDR3 for alpha chain variable domain of TCR clone 51742 (TRAV27, TRAJ38)
CAGRFNAGNNRKLLW

SEQ ID NO: 103484 - protein, 13 aa, Homo sapiens
  CDR3 for beta chain variable domain of TCR clone 51742 (TRBV20-1, TRBJ1-1)
CSARVGGNTEAFF

SEQ ID NO: 103485 - protein, 14 aa, Homo sapiens
  CDR3 for alpha chain variable domain of TCR clone 51743 (TRAV12-1, TRAJ42)
CVVVYGGSQGNLIF

SEQ ID NO: 103486 - protein, 12 aa, Homo sapiens
  CDR3 for beta chain variable domain of TCR clone 51743 (TRBV11-2, TRBJ2-4)
CASSSASGSEYF

SEQ ID NO: 103487 - protein, 16 aa, Homo sapiens
  CDR3 for alpha chain variable domain of TCR clone 51744 (TRAV21, TRAJ52)
CAVTNAGGTSYGKLIF

SEQ ID NO: 103488 - protein, 11 aa, Homo sapiens
  CDR3 for beta chain variable domain of TCR clone 51744 (TRBV2, TRBJ1-1)
CASREGTEAFF

SEQ ID NO: 103489 - protein, 18 aa, Homo sapiens
  CDR3 for alpha chain variable domain of TCR clone 51745 (TRAV26-2, TRAJ54)
CILRDVEVGIQGAQKLVF

SEQ ID NO: 103490 - protein, 12 aa, Homo sapiens
  CDR3 for beta chain variable domain of TCR clone 51745 (TRBV29-1, TRBJ2-3)
CSVTGGADTQYF

SEQ ID NO: 103491 - protein, 13 aa, Homo sapiens
  CDR3 for alpha chain variable domain of TCR clone 51746 (TRAV12-1, TRAJ33)
CGDAPDSNYQLIW

SEQ ID NO: 103492 - protein, 12 aa, Homo sapiens
  CDR3 for beta chain variable domain of TCR clone 51746 (TRBV11-2, TRBJ2-2)
CASSLGGGELFL

SEQ ID NO: 103493 - protein, 16 aa, Homo sapiens
  CDR3 for alpha chain variable domain of TCR clone 51747 (TRAV5, TRAJ4)
CAENPLFSGGYNKLIF

SEQ ID NO: 103494 - protein, 14 aa, Homo sapiens
  CDR3 for beta chain variable domain of TCR clone 51747 (TRBV10-3, TRBJ1-1)
CAISDTDRGVEAFF

SEQ ID NO: 103495 - protein, 16 aa, Homo sapiens
  CDR3 for alpha chain variable domain of TCR clone 51748 (TRAV12-3, TRAJ53)
CAMSPGSGGSNYKLTF

SEQ ID NO: 103496 - protein, 15 aa, Homo sapiens
  CDR3 for beta chain variable domain of TCR clone 51748 (TRBV5-1, TRBJ2-3)
CASSVTSGSTDTQYF

SEQ ID NO: 103497 - protein, 15 aa, Homo sapiens
  CDR3 for alpha chain variable domain of TCR clone 51749 (TRAV2, TRAJ13)
CAVEPEFWGLPESYL

SEQ ID NO: 103498 - protein, 14 aa, Homo sapiens
  CDR3 for beta chain variable domain of TCR clone 51749 (TRBV28, TRBJ1-5)
CASSGQALYQPQHS

SEQ ID NO: 103499 - protein, 14 aa, Homo sapiens
  CDR3 for alpha chain variable domain of TCR clone 51750 (TRAV12-2, TRAJ45)
CAVYSGGGAGGLTF

SEQ ID NO: 103500 - protein, 15 aa, Homo sapiens
  CDR3 for beta chain variable domain of TCR clone 51750 (TRBV4-1, TRBJ1-4)
CASSDTGGTNEKLFF

SEQ ID NO: 103501 - protein, 16 aa, Homo sapiens
  CDR3 for alpha chain variable domain of TCR clone 51751 (TRAV27, TRAJ53)
CAAPEGSGGSNHKLTF

SEQ ID NO: 103502 - protein, 15 aa, Homo sapiens
  CDR3 for beta chain variable domain of TCR clone 51751 (TRBV20-1, TRBJ1-1)
CSASRGVTGNTEAFF

SEQ ID NO: 103503 - protein, 13 aa, Homo sapiens
  CDR3 for alpha chain variable domain of TCR clone 51752 (TRAV1-2, TRAJ9)
CAALNTGGFKTIF

SEQ ID NO: 103504 - protein, 19 aa, Homo sapiens
  CDR3 for beta chain variable domain of TCR clone 51752 (TRBV19, TRBJ2-2)
CASTRPGLAGGRVTGELFF

SEQ ID NO: 103505 - protein, 14 aa, Homo sapiens
  CDR3 for alpha chain variable domain of TCR clone 51753 (TRAV12-2, TRAJ17)
CGVLFKAAGNKLTF

SEQ ID NO: 103506 - protein, 17 aa, Homo sapiens
  CDR3 for beta chain variable domain of TCR clone 51753 (TRBV20-1, TRBJ2-2)
CSASGSGQGGLTGELFF

SEQ ID NO: 103507 - protein, 15 aa, Homo sapiens
  CDR3 for alpha chain variable domain of TCR clone 51754 (TRAV12-1, TRAJ44)
CVVDTPQGTASKLTL

SEQ ID NO: 103508 - protein, 13 aa, Homo sapiens
  CDR3 for beta chain variable domain of TCR clone 51754 (TRBV27, TRBJ2-1)
CASSSGSYNEQFF

SEQ ID NO: 103509 - protein, 17 aa, Homo sapiens
  CDR3 for alpha chain variable domain of TCR clone 51755 (TRAV35, TRAJ28)
CAGLQVYSGAGSYQLTF

SEQ ID NO: 103510 - protein, 15 aa, Homo sapiens
  CDR3 for beta chain variable domain of TCR clone 51755 (TRBV2, TRBJ1-2)
CASSESGGANYGYTF

SEQ ID NO: 103511 - protein, 10 aa, Homo sapiens
  CDR3 for alpha chain variable domain of TCR clone 51756 (TRAV26-1, TRAJ40)
CIAGTYKYIF

SEQ ID NO: 103512 - protein, 15 aa, Homo sapiens
  CDR3 for beta chain variable domain of TCR clone 51756 (TRBV19, TRBJ2-1)
CDSSSPGVPLDEQFF

SEQ ID NO: 103513 - protein, 14 aa, Homo sapiens
  CDR3 for alpha chain variable domain of TCR clone 51757 (TRAV26-1, TRAJ49)
CIVRLTNTGNQFYF

SEQ ID NO: 103514 - protein, 13 aa, Homo sapiens
  CDR3 for beta chain variable domain of TCR clone 51757 (TRBV4-1, TRBJ2-7)
CASSQGQAYKQYF

SEQ ID NO: 103515 - protein, 13 aa, Homo sapiens
  CDR3 for alpha chain variable domain of TCR clone 51758 (TRAV3, TRAJ41)
CAVSSNYGYALNF

SEQ ID NO: 103516 - protein, 12 aa, Homo sapiens
  CDR3 for beta chain variable domain of TCR clone 51758 (TRBV2, TRBJ2-1)
CASRPGPREQFF

SEQ ID NO: 103517 - protein, 12 aa, Homo sapiens
  CDR3 for alpha chain variable domain of TCR clone 51759 (TRAV8-3, TRAJ34)
WASGYNTDKPIF

SEQ ID NO: 103518 - protein, 13 aa, Homo sapiens
  CDR3 for beta chain variable domain of TCR clone 51759 (TRBV6-4, TRBJ2-3)
CASSVSWADTQYF

SEQ ID NO: 103519 - protein, 18 aa, Homo sapiens
  CDR3 for alpha chain variable domain of TCR clone 51760 (TRAV13-1, TRAJ52)
CAAKNPNAGGTSYGKLTF

SEQ ID NO: 103520 - protein, 12 aa, Homo sapiens
  CDR3 for beta chain variable domain of TCR clone 51760 (TRBV7-9, TRBJ2-7)
CASRTGFDEQYF

SEQ ID NO: 103521 - protein, 14 aa, Homo sapiens
  CDR3 for alpha chain variable domain of TCR clone 51761 (TRAV12-3, TRAJ9)
CVMSPNTGGFKTIF

SEQ ID NO: 103522 - protein, 12 aa, Homo sapiens
  CDR3 for beta chain variable domain of TCR clone 51761 (TRBV19, TRBJ1-5)
CASSIAQQPQHF

SEQ ID NO: 103523 - protein, 18 aa, Homo sapiens
  CDR3 for alpha chain variable domain of TCR clone 51762 (TRAV21, TRAJ52)
CAVRPSPAGGTRYGKLTF

SEQ ID NO: 103524 - protein, 13 aa, Homo sapiens
  CDR3 for beta chain variable domain of TCR clone 51762 (TRBV7-3, TRBJ1-1)
CASSQDWGAEAFF

SEQ ID NO: 103525 - protein, 16 aa, Homo sapiens
  CDR3 for alpha chain variable domain of TCR clone 51763 (TRAV30, TRAJ24)
CGTEIVDADSWGNSSL

SEQ ID NO: 103526 - protein, 17 aa, Homo sapiens
  CDR3 for beta chain variable domain of TCR clone 51763 (TRBV7-3, TRBJ2-3)
CASSLMKRMRGADTQYF

SEQ ID NO: 103527 - protein, 15 aa, Homo sapiens
  CDR3 for alpha chain variable domain of TCR clone 51764 (TRAV26-1, TRAJ29)
CIVRVEGSGNTPLVF

SEQ ID NO: 103528 - protein, 14 aa, Homo sapiens
  CDR3 for beta chain variable domain of TCR clone 51764 (TRBV18, TRBJ2-5)
CPSSPGVSQETQYF

SEQ ID NO: 103529 - protein, 15 aa, Homo sapiens
  CDR3 for alpha chain variable domain of TCR clone 51765 (TRAV12-2, TRAJ8)
CAVREENTGFQKLVF

SEQ ID NO: 103530 - protein, 14 aa, Homo sapiens
  CDR3 for beta chain variable domain of TCR clone 51765 (TRBV9, TRBJ1-3)
CASSVVGDGNTTYF

SEQ ID NO: 103531 - protein, 16 aa, Homo sapiens
  CDR3 for alpha chain variable domain of TCR clone 51766 (TRAV12-2, TRAJ32)
CAVNLGKGGATNKLIF

SEQ ID NO: 103532 - protein, 15 aa, Homo sapiens
  CDR3 for beta chain variable domain of TCR clone 51766 (TRBV20-1, TRBJ2-7)
CSARGPLAGGREQYF

SEQ ID NO: 103533 - protein, 17 aa, Homo sapiens
  CDR3 for alpha chain variable domain of TCR clone 51767 (TRAV27, TRAJ26)
CAGARAPLDNYGQNFIF

SEQ ID NO: 103534 - protein, 15 aa, Homo sapiens
  CDR3 for beta chain variable domain of TCR clone 51767 (TRBV11-2, TRBJ2-5)
CASSPRSGGLETQYF

SEQ ID NO: 103535 - protein, 16 aa, Homo sapiens
  CDR3 for alpha chain variable domain of TCR clone 51768 (TRAV30, TRAJ24)
CGTEIVDAVSWGKFQF

SEQ ID NO: 103536 - protein, 16 aa, Homo sapiens
  CDR3 for beta chain variable domain of TCR clone 51768 (TRBV2, TRBJ1-3)
CASSGGAGRSGNTIYF

SEQ ID NO: 103537 - protein, 15 aa, Homo sapiens
  CDR3 for alpha chain variable domain of TCR clone 51769 (TRAV8-4, TRAJ48)
CAVSAAYFGNEKLTF

SEQ ID NO: 103538 - protein, 12 aa, Homo sapiens
  CDR3 for beta chain variable domain of TCR clone 51769 (TRBV3-1, TRBJ2-5)
CDSSQRGETQYF

SEQ ID NO: 103539 - protein, 15 aa, Homo sapiens
  CDR3 for alpha chain variable domain of TCR clone 51770 (TRAV26-1, TRAJ22)
CIVRVSFWFCKATDL

SEQ ID NO: 103540 - protein, 15 aa, Homo sapiens
  CDR3 for beta chain variable domain of TCR clone 51770 (TRBV4-1, TRBJ2-7)
CASSQQGQGFDEQYF

SEQ ID NO: 103541 - protein, 13 aa, Homo sapiens
  CDR3 for alpha chain variable domain of TCR clone 51771 (TRAV20, TRAJ37)
CAGCSSNTGKLIF

SEQ ID NO: 103542 - protein, 17 aa, Homo sapiens
  CDR3 for beta chain variable domain of TCR clone 51771 (TRBV7-9, TRBJ1-1)
CASSSPPGQGQNTEAFF

SEQ ID NO: 103543 - protein, 16 aa, Homo sapiens
  CDR3 for alpha chain variable domain of TCR clone 51772 (TRAV21, TRAJ22)
CCATGPLSGSARQLTF

SEQ ID NO: 103544 - protein, 13 aa, Homo sapiens
  CDR3 for beta chain variable domain of TCR clone 51772 (TRBV11-2, TRBJ2-5)
CASGHGAKETQYF

SEQ ID NO: 103545 - protein, 18 aa, Homo sapiens
  CDR3 for alpha chain variable domain of TCR clone 51773 (TRAV26-2, TRAJ54)
CILRDVEVGIQGAQKLVF

SEQ ID NO: 103546 - protein, 14 aa, Homo sapiens
  CDR3 for beta chain variable domain of TCR clone 51773 (TRBV11-2, TRBJ1-3)
CASSLAVPGNTIYF

SEQ ID NO: 103547 - protein, 12 aa, Homo sapiens
  CDR3 for alpha chain variable domain of TCR clone 51774 (TRAV3, TRAJ26)
CAVGDYGQNFVF

SEQ ID NO: 103548 - protein, 16 aa, Homo sapiens
  CDR3 for beta chain variable domain of TCR clone 51774 (TRBV11-2, TRBJ1-2)
CASSPSGREANYGYTF

SEQ ID NO: 103549 - protein, 13 aa, Homo sapiens
  CDR3 for alpha chain variable domain of TCR clone 51775 (TRAV8-3, TRAJ4)
WVVYSGGYNKLIF

SEQ ID NO: 103550 - protein, 14 aa, Homo sapiens
  CDR3 for beta chain variable domain of TCR clone 51775 (TRBV7-9, TRBJ2-3)
CASSLEDGTDTQYF

SEQ ID NO: 103551 - protein, 14 aa, Homo sapiens
  CDR3 for alpha chain variable domain of TCR clone 51776 (TRAV12-3, TRAJ10)
SHLPLTGGGNKLTF

SEQ ID NO: 103552 - protein, 12 aa, Homo sapiens
  CDR3 for beta chain variable domain of TCR clone 51776 (TRBV7-9, TRBJ2-7)
CASSIKREEQCF

SEQ ID NO: 103553 - protein, 13 aa, Homo sapiens
  CDR3 for alpha chain variable domain of TCR clone 51777 (TRAV20, TRAJ21)
CAVEGYSFNKFYF

SEQ ID NO: 103554 - protein, 14 aa, Homo sapiens
  CDR3 for beta chain variable domain of TCR clone 51777 (TRBV12-5, TRBJ2-5)
CASGSRTHQETQYF

SEQ ID NO: 103555 - protein, 13 aa, Homo sapiens
  CDR3 for alpha chain variable domain of TCR clone 51778 (TRAV2, TRAJ23)
CAVMGNQGGKLIF

SEQ ID NO: 103556 - protein, 14 aa, Homo sapiens
  CDR3 for beta chain variable domain of TCR clone 51778 (TRBV11-2, TRBJ2-1)
CASSRAPSYNEQFF

SEQ ID NO: 103557 - protein, 12 aa, Homo sapiens
  CDR3 for alpha chain variable domain of TCR clone 51779 (TRAV1-2, TRAJ11)
CAVRGGYSTLTF

SEQ ID NO: 103558 - protein, 16 aa, Homo sapiens
  CDR3 for beta chain variable domain of TCR clone 51779 (TRBV7-9, TRBJ2-1)
CASSSPQGTTRNEHFF

SEQ ID NO: 103559 - protein, 12 aa, Homo sapiens
  CDR3 for alpha chain variable domain of TCR clone 51780 (TRAV12-1, TRAJ40)
CVLYSGTYKYIF

SEQ ID NO: 103560 - protein, 12 aa, Homo sapiens
  CDR3 for beta chain variable domain of TCR clone 51780 (TRBV7-3, TRBJ2-1)
CASSFINNEQFF

SEQ ID NO: 103561 - protein, 15 aa, Homo sapiens
  CDR3 for alpha chain variable domain of TCR clone 51781 (TRAV26-1, TRAJ40)
CIVRVTNSGTYKYIF

SEQ ID NO: 103562 - protein, 12 aa, Homo sapiens
  CDR3 for beta chain variable domain of TCR clone 51781 (TRBV7-9, TRBJ1-4)
CASSTDREKLFF

SEQ ID NO: 103563 - protein, 12 aa, Homo sapiens
  CDR3 for alpha chain variable domain of TCR clone 51782 (TRAV13-1, TRAJ21)
CVAKEGFNKFYF

SEQ ID NO: 103564 - protein, 14 aa, Homo sapiens
  CDR3 for beta chain variable domain of TCR clone 51782 (TRBV7-2, TRBJ2-7)
CASSPKTSFYEQYF

SEQ ID NO: 103565 - protein, 16 aa, Homo sapiens
  CDR3 for alpha chain variable domain of TCR clone 51783 (TRAV30, TRAJ24)
CGTEIVDADSWGKFQF

SEQ ID NO: 103566 - protein, 15 aa, Homo sapiens
  CDR3 for beta chain variable domain of TCR clone 51783 (TRBV15, TRBJ1-1)
CATSLQGGRNTEAFF

SEQ ID NO: 103567 - protein, 15 aa, Homo sapiens
  CDR3 for alpha chain variable domain of TCR clone 51784 (TRAV8-3, TRAJ11)
CAVVLLNSGYSTLTF

SEQ ID NO: 103568 - protein, 16 aa, Homo sapiens
  CDR3 for beta chain variable domain of TCR clone 51784 (TRBV7-9, TRBJ1-2)
CASSLGFSSGEDGYTF

SEQ ID NO: 103569 - protein, 12 aa, Homo sapiens
  CDR3 for alpha chain variable domain of TCR clone 51785 (TRAV16, TRAJ10)
CSRTGEGNKLTF

SEQ ID NO: 103570 - protein, 15 aa, Homo sapiens
  CDR3 for beta chain variable domain of TCR clone 51785 (TRBV11-3, TRBJ2-3)
CASLKDGREGDTQYF

SEQ ID NO: 103571 - protein, 19 aa, Homo sapiens
  CDR3 for alpha chain variable domain of TCR clone 51786 (TRAV2, TRAJ20)
ILQVREADAAVYRDCKLSF

SEQ ID NO: 103572 - protein, 15 aa, Homo sapiens
  CDR3 for beta chain variable domain of TCR clone 51786 (TRBV28, TRBJ2-5)
CASSPPWSYQETQYF

SEQ ID NO: 103573 - protein, 12 aa, Homo sapiens
  CDR3 for alpha chain variable domain of TCR clone 51787 (TRAV3, TRAJ39)
CAVIEWSNMLTF

SEQ ID NO: 103574 - protein, 16 aa, Homo sapiens
  CDR3 for beta chain variable domain of TCR clone 51787 (TRBV12-5, TRBJ2-5)
CASGPRTSGNQETQYF

SEQ ID NO: 103575 - protein, 14 aa, Homo sapiens
  CDR3 for alpha chain variable domain of TCR clone 51788 (TRAV1-2, TRAJ16)
CAVNRFSDGQKLLF

SEQ ID NO: 103576 - protein, 13 aa, Homo sapiens
  CDR3 for beta chain variable domain of TCR clone 51788 (TRBV12-4, TRBJ1-5)
CACSPDRAQPQHF

SEQ ID NO: 103577 - protein, 13 aa, Homo sapiens
  CDR3 for alpha chain variable domain of TCR clone 51789 (TRAV20, TRAJ26)
CAVPTSYGQNLVF

SEQ ID NO: 103578 - protein, 16 aa, Homo sapiens
  CDR3 for beta chain variable domain of TCR clone 51789 (TRBV28, TRBJ2-7)
CASSSPQGRDVYEQYF

SEQ ID NO: 103579 - protein, 16 aa, Homo sapiens
  CDR3 for alpha chain variable domain of TCR clone 51790 (TRAV8-1, TRAJ18)
CAVNAGRGPTLGRLYF

SEQ ID NO: 103580 - protein, 15 aa, Homo sapiens
  CDR3 for beta chain variable domain of TCR clone 51790 (TRBV7-2, TRBJ2-5)
CASTPRGASGETQYF

SEQ ID NO: 103581 - protein, 15 aa, Homo sapiens
  CDR3 for alpha chain variable domain of TCR clone 51791 (TRAV3, TRAJ22)
CAVRDRGGSARQLTF

SEQ ID NO: 103582 - protein, 12 aa, Homo sapiens
  CDR3 for beta chain variable domain of TCR clone 51791 (TRBV12-4, TRBJ1-2)
CASSFIWRHLRF

SEQ ID NO: 103583 - protein, 17 aa, Homo sapiens
  CDR3 for alpha chain variable domain of TCR clone 51792 (TRAV3, TRAJ12)
CAGRDGGRMDSSYKLIF

SEQ ID NO: 103584 - protein, 16 aa, Homo sapiens
  CDR3 for beta chain variable domain of TCR clone 51792 (TRBV9, TRBJ2-2)
CASSAMGKGNTGELFF

SEQ ID NO: 103585 - protein, 15 aa, Homo sapiens
  CDR3 for alpha chain variable domain of TCR clone 51793 (TRAV8-4, TRAJ7)
CAVSGGNYGNKRLAF

SEQ ID NO: 103586 - protein, 11 aa, Homo sapiens
  CDR3 for beta chain variable domain of TCR clone 51793 (TRBV20-1, TRBJ2-1)
CSLSSGSEQFF

SEQ ID NO: 103587 - protein, 14 aa, Homo sapiens
  CDR3 for alpha chain variable domain of TCR clone 51794 (TRAV1-2, TRAJ16)
CAVNRFSDGQKRLF

SEQ ID NO: 103588 - protein, 16 aa, Homo sapiens
  CDR3 for beta chain variable domain of TCR clone 51794 (TRBV20-1, TRBJ1-4)
CSAPGQGLLTNEKLFF

SEQ ID NO: 103589 - protein, 20 aa, Homo sapiens
  CDR3 for alpha chain variable domain of TCR clone 51795 (TRAV12-2, TRAJ52)
SPVIQPPARAGGTSYGKLTF

SEQ ID NO: 103590 - protein, 13 aa, Homo sapiens
  CDR3 for beta chain variable domain of TCR clone 51795 (TRBV5-5, TRBJ2-2)
CASTLGGAGELFF

SEQ ID NO: 103591 - protein, 17 aa, Homo sapiens
  CDR3 for alpha chain variable domain of TCR clone 51796 (TRAV13-1, TRAJ28)
CAASPPYSGAGSYQLTF

SEQ ID NO: 103592 - protein, 15 aa, Homo sapiens
  CDR3 for beta chain variable domain of TCR clone 51796 (TRBV4-3, TRBJ2-1)
CASSQGLAGSTEQFF

SEQ ID NO: 103593 - protein, 15 aa, Homo sapiens
  CDR3 for alpha chain variable domain of TCR clone 51797 (TRAV2, TRAJ15)
CAVEDRGQAGTALIL

SEQ ID NO: 103594 - protein, 13 aa, Homo sapiens
  CDR3 for beta chain variable domain of TCR clone 51797 (TRBV12-4, TRBJ2-5)
CASSLGGSRTQYF

SEQ ID NO: 103595 - protein, 12 aa, Homo sapiens
  CDR3 for alpha chain variable domain of TCR clone 51798 (TRAV12-3, TRAJ41)
CAMSYSGYALNF

SEQ ID NO: 103596 - protein, 13 aa, Homo sapiens
  CDR3 for beta chain variable domain of TCR clone 51798 (TRBV27, TRBJ1-4)
CASSLMGDEKLFF

SEQ ID NO: 103597 - protein, 14 aa, Homo sapiens
  CDR3 for alpha chain variable domain of TCR clone 51799 (TRAV12-2, TRAJ13)
CAVKKTGGYQKVTF

SEQ ID NO: 103598 - protein, 15 aa, Homo sapiens
  CDR3 for beta chain variable domain of TCR clone 51799 (TRBV4-1, TRBJ2-7)
CASSQNTGRLYEQYF

SEQ ID NO: 103599 - protein, 14 aa, Homo sapiens
  CDR3 for alpha chain variable domain of TCR clone 51800 (TRAV12-2, TRAJ17)
CAVLFKAAGNKLTF

SEQ ID NO: 103600 - protein, 17 aa, Homo sapiens
  CDR3 for beta chain variable domain of TCR clone 51800 (TRBV7-3, TRBJ2-3)
CASSLMKRMRGADTQYF

SEQ ID NO: 103601 - protein, 16 aa, Homo sapiens
  CDR3 for alpha chain variable domain of TCR clone 51801 (TRAV3, TRAJ18)
CAVRDGRGSTLGRLYF

SEQ ID NO: 103602 - protein, 15 aa, Homo sapiens
  CDR3 for beta chain variable domain of TCR clone 51801 (TRBV7-9, TRBJ1-6)
CASSSPGRGNSPLHV

SEQ ID NO: 103603 - protein, 10 aa, Homo sapiens
  CDR3 for alpha chain variable domain of TCR clone 51802 (TRAV26-1, TRAJ22)
CIVSLNFFWF

SEQ ID NO: 103604 - protein, 14 aa, Homo sapiens
  CDR3 for beta chain variable domain of TCR clone 51802 (TRBV19, TRBJ2-1)
CASPTFVLSGEQFF

SEQ ID NO: 103605 - protein, 11 aa, Homo sapiens
  CDR3 for alpha chain variable domain of TCR clone 51803 (TRAV17, TRAJ43)
CATPRSNDMRF

SEQ ID NO: 103606 - protein, 15 aa, Homo sapiens
  CDR3 for beta chain variable domain of TCR clone 51803 (TRBV7-2, TRBJ1-1)
CASSFAGDRDTEAFF

SEQ ID NO: 103607 - protein, 12 aa, Homo sapiens
  CDR3 for alpha chain variable domain of TCR clone 51804 (TRAV25, TRAJ11)
CAGASGYSTLTF

SEQ ID NO: 103608 - protein, 14 aa, Homo sapiens
  CDR3 for beta chain variable domain of TCR clone 51804 (TRBV5-8, TRBJ2-3)
CGSSLGQGTDTQYF

SEQ ID NO: 103609 - protein, 15 aa, Homo sapiens
  CDR3 for alpha chain variable domain of TCR clone 51805 (TRAV38-1, TRAJ37)
CAFIHGSGNTGKLIF

SEQ ID NO: 103610 - protein, 12 aa, Homo sapiens
  CDR3 for beta chain variable domain of TCR clone 51805 (TRBV7-9, TRBJ2-7)
CANSFGSYEQYF

SEQ ID NO: 103611 - protein, 13 aa, Homo sapiens
  CDR3 for alpha chain variable domain of TCR clone 51806 (TRAV16, TRAJ27)
FALRRTNAGKSTF

SEQ ID NO: 103612 - protein, 15 aa, Homo sapiens
  CDR3 for beta chain variable domain of TCR clone 51806 (TRBV18, TRBJ2-1)
CASSPPSASYNEQFF

SEQ ID NO: 103613 - protein, 12 aa, Homo sapiens
  CDR3 for alpha chain variable domain of TCR clone 51807 (TRAV29/DV5, TRAJ41)
CAASDSGYALNF

SEQ ID NO: 103614 - protein, 14 aa, Homo sapiens
  CDR3 for beta chain variable domain of TCR clone 51807 (TRBV2, TRBJ1-5)
CASRAGEGDQPQHF

SEQ ID NO: 103615 - protein, 11 aa, Homo sapiens
  CDR3 for alpha chain variable domain of TCR clone 51808 (TRAV3, TRAJ21)
CAVGNFNKFYF

SEQ ID NO: 103616 - protein, 14 aa, Homo sapiens
  CDR3 for beta chain variable domain of TCR clone 51808 (TRBV6-6, TRBJ2-7)
CASSDSGAGYEQYF

SEQ ID NO: 103617 - protein, 12 aa, Homo sapiens
  CDR3 for alpha chain variable domain of TCR clone 51809 (TRAV13-1, TRAJ11)
CAGPSGYSTLTL

SEQ ID NO: 103618 - protein, 13 aa, Homo sapiens
  CDR3 for beta chain variable domain of TCR clone 51809 (TRBV12-4, TRBJ1-5)
CASSPDRAQPQHF

SEQ ID NO: 103619 - protein, 18 aa, Homo sapiens
  CDR3 for alpha chain variable domain of TCR clone 51810 (TRAV12-3, TRAJ52)
CAMSVGGAGGTSYGKLTF

SEQ ID NO: 103620 - protein, 14 aa, Homo sapiens
  CDR3 for beta chain variable domain of TCR clone 51810 (TRBV19, TRBJ2-2)
CASSGQGIAGELFF

SEQ ID NO: 103621 - protein, 12 aa, Homo sapiens
  CDR3 for alpha chain variable domain of TCR clone 51811 (TRAV13-1, TRAJ49)
CAASPMGNQCYF

SEQ ID NO: 103622 - protein, 13 aa, Homo sapiens
  CDR3 for beta chain variable domain of TCR clone 51811 (TRBV20-1, TRBJ2-2)
CSASAAGTGELFF

SEQ ID NO: 103623 - protein, 12 aa, Homo sapiens
  CDR3 for alpha chain variable domain of TCR clone 51812 (TRAV12-1, TRAJ40)
CVVYSGAYKYIF

SEQ ID NO: 103624 - protein, 14 aa, Homo sapiens
  CDR3 for beta chain variable domain of TCR clone 51812 (TRBV7-9, TRBJ2-5)
CASSLDTAQETQYF

SEQ ID NO: 103625 - protein, 12 aa, Homo sapiens
  CDR3 for alpha chain variable domain of TCR clone 51813 (TRAV21, TRAJ11)
CAATSGYSTLTF

SEQ ID NO: 103626 - protein, 14 aa, Homo sapiens
  CDR3 for beta chain variable domain of TCR clone 51813 (TRBV20-1, TRBJ2-7)
CSAPELEGVGEQYF

SEQ ID NO: 103627 - protein, 13 aa, Homo sapiens
  CDR3 for alpha chain variable domain of TCR clone 51814 (TRAV1-2, TRAJ9)
CAALNTGGFKTIF

SEQ ID NO: 103628 - protein, 15 aa, Homo sapiens
  CDR3 for beta chain variable domain of TCR clone 51814 (TRBV25-1, TRBJ1-4)
CASSPGDSTNEKLFF

SEQ ID NO: 103629 - protein, 15 aa, Homo sapiens
  CDR3 for alpha chain variable domain of TCR clone 51815 (TRAV26-2, TRAJ57)
CILRDIWGGSEKLVF

SEQ ID NO: 103630 - protein, 15 aa, Homo sapiens
  CDR3 for beta chain variable domain of TCR clone 51815 (TRBV2, TRBJ2-1)
CASDIGLAGEGEQFF

SEQ ID NO: 103631 - protein, 14 aa, Homo sapiens
  CDR3 for alpha chain variable domain of TCR clone 51816 (TRAV12-2, TRAJ13)
CAVKKTGGYQKVTF

SEQ ID NO: 103632 - protein, 15 aa, Homo sapiens
  CDR3 for beta chain variable domain of TCR clone 51816 (TRBV7-2, TRBJ2-3)
CASSSTGLETDTQYF

SEQ ID NO: 103633 - protein, 16 aa, Homo sapiens
  CDR3 for alpha chain variable domain of TCR clone 51817 (TRAV12-1, TRAJ43)
CVVNPHRFGAGTRLTG

SEQ ID NO: 103634 - protein, 13 aa, Homo sapiens
  CDR3 for beta chain variable domain of TCR clone 51817 (TRBV20-1, TRBJ1-1)
CSARGGGNTEAFF

SEQ ID NO: 103635 - protein, 13 aa, Homo sapiens
  CDR3 for alpha chain variable domain of TCR clone 51818 (TRAV13-1, TRAJ6)
CAASKGGSYIPTF

SEQ ID NO: 103636 - protein, 14 aa, Homo sapiens
  CDR3 for beta chain variable domain of TCR clone 51818 (TRBV7-2, TRBJ2-1)
CASSLGVGYNEQLF

SEQ ID NO: 103637 - protein, 15 aa, Homo sapiens
  CDR3 for alpha chain variable domain of TCR clone 51819 (TRAV12-2, TRAJ52)
CNGGAGGTSYGKLTF

SEQ ID NO: 103638 - protein, 13 aa, Homo sapiens
  CDR3 for beta chain variable domain of TCR clone 51819 (TRBV20-1, TRBJ2-5)
CSARGDYQETQYF

SEQ ID NO: 103639 - protein, 22 aa, Homo sapiens
  CDR3 for alpha chain variable domain of TCR clone 51820 (TRAV3, )
CAVRDCLNAGNNHIQNPDPAVY

SEQ ID NO: 103640 - protein, 19 aa, Homo sapiens
  CDR3 for beta chain variable domain of TCR clone 51820 (TRBV7-2, TRBJ2-3)
CASSFLSRNWGGGTDTQYS

SEQ ID NO: 103641 - protein, 16 aa, Homo sapiens
  CDR3 for alpha chain variable domain of TCR clone 51821 (TRAV3, TRAJ42)
CAVRDIEGGSQGNLIF

SEQ ID NO: 103642 - protein, 14 aa, Homo sapiens
  CDR3 for beta chain variable domain of TCR clone 51821 (TRBV18, TRBJ1-1)
CASSPPTGRIEAFF

SEQ ID NO: 103643 - protein, 15 aa, Homo sapiens
  CDR3 for alpha chain variable domain of TCR clone 51822 (TRAV17, TRAJ4)
CATGTWAGGYNKLIF

SEQ ID NO: 103644 - protein, 13 aa, Homo sapiens
  CDR3 for beta chain variable domain of TCR clone 51822 (TRBV6-6, TRBJ2-7)
CASSPKHLAEQYF

SEQ ID NO: 103645 - protein, 12 aa, Homo sapiens
  CDR3 for alpha chain variable domain of TCR clone 51823 (TRAV3, TRAJ26)
CTVRDYGQNFVF

SEQ ID NO: 103646 - protein, 16 aa, Homo sapiens
  CDR3 for beta chain variable domain of TCR clone 51823 (TRBV11-2, TRBJ1-2)
CASSPSGREANYGYTF

SEQ ID NO: 103647 - protein, 13 aa, Homo sapiens
  CDR3 for alpha chain variable domain of TCR clone 51824 (TRAV3, TRAJ4)
CSVRDGGYNKLIF

SEQ ID NO: 103648 - protein, 15 aa, Homo sapiens
  CDR3 for beta chain variable domain of TCR clone 51824 (TRBV5-1, TRBJ2-1)
CASSPPRAPYNEQFF

SEQ ID NO: 103649 - protein, 14 aa, Homo sapiens
  CDR3 for alpha chain variable domain of TCR clone 51825 (TRAV1-1, TRAJ33)
CAVRPEDSNYQLVW

SEQ ID NO: 103650 - protein, 15 aa, Homo sapiens
  CDR3 for beta chain variable domain of TCR clone 51825 (TRBV20-1, TRBJ2-1)
CSARSPGGPGNEQFF

SEQ ID NO: 103651 - protein, 17 aa, Homo sapiens
  CDR3 for alpha chain variable domain of TCR clone 51826 (TRAV13-1, TRAJ31)
CAPRDRLMFGDGTQLVV

SEQ ID NO: 103652 - protein, 15 aa, Homo sapiens
  CDR3 for beta chain variable domain of TCR clone 51826 (TRBV9, TRBJ1-2)
CASSVIGQANYGYTF

SEQ ID NO: 103653 - protein, 14 aa, Homo sapiens
  CDR3 for alpha chain variable domain of TCR clone 51827 (TRAV16, TRAJ33)
CALSAMDSNYQLIC

SEQ ID NO: 103654 - protein, 15 aa, Homo sapiens
  CDR3 for beta chain variable domain of TCR clone 51827 (TRBV28, TRBJ2-7)
CASSLEAYPIYEQYF

SEQ ID NO: 103655 - protein, 16 aa, Homo sapiens
  CDR3 for alpha chain variable domain of TCR clone 51828 (TRAV13-1, TRAJ18)
CAASRMRGSTLGRLYF

SEQ ID NO: 103656 - protein, 16 aa, Homo sapiens
  CDR3 for beta chain variable domain of TCR clone 51828 (TRBV27, TRBJ1-1)
CASSSRGRTGYTEVFF

SEQ ID NO: 103657 - protein, 14 aa, Homo sapiens
  CDR3 for alpha chain variable domain of TCR clone 51829 (TRAV1-2, TRAJ6)
CAVRSSGGSYIPTF

SEQ ID NO: 103658 - protein, 13 aa, Homo sapiens
  CDR3 for beta chain variable domain of TCR clone 51829 (TRBV20-1, TRBJ1-1)
CSARGGGNTEAFF

SEQ ID NO: 103659 - protein, 17 aa, Homo sapiens
  CDR3 for alpha chain variable domain of TCR clone 51830 (TRAV3, TRAJ38)
CAVRDCLDAGNNRKLIW

SEQ ID NO: 103660 - protein, 15 aa, Homo sapiens
  CDR3 for beta chain variable domain of TCR clone 51830 (TRBV27, TRBJ2-1)
CASSNGGGSSNEQFF

SEQ ID NO: 103661 - protein, 13 aa, Homo sapiens
  CDR3 for alpha chain variable domain of TCR clone 51831 (TRAV27, TRAJ45)
CRSSGGGADGLTF

SEQ ID NO: 103662 - protein, 16 aa, Homo sapiens
  CDR3 for beta chain variable domain of TCR clone 51831 (TRBV7-9, TRBJ2-3)
CASSPWREVGTDTQYF

SEQ ID NO: 103663 - protein, 13 aa, Homo sapiens
  CDR3 for alpha chain variable domain of TCR clone 51832 (TRAV12-1, TRAJ13)
CVVALLGSQKVTF

SEQ ID NO: 103664 - protein, 13 aa, Homo sapiens
  CDR3 for beta chain variable domain of TCR clone 51832 (TRBV20-1, TRBJ2-5)
CSAILTGQETQYF

SEQ ID NO: 103665 - protein, 18 aa, Homo sapiens
  CDR3 for alpha chain variable domain of TCR clone 51833 (TRAV9-2, TRAJ52)
CALSRHNTGGTSYGKLTF

SEQ ID NO: 103666 - protein, 13 aa, Homo sapiens
  CDR3 for beta chain variable domain of TCR clone 51833 (TRBV7-9, TRBJ1-2)
CASSLKQNYGYTF

SEQ ID NO: 103667 - protein, 13 aa, Homo sapiens
  CDR3 for alpha chain variable domain of TCR clone 51834 (TRAV27, TRAJ41)
CAGEGNSGYALNF

SEQ ID NO: 103668 - protein, 18 aa, Homo sapiens
  CDR3 for beta chain variable domain of TCR clone 51834 (TRBV11-2, TRBJ2-3)
CASSLGGASRGAPNTQYF

SEQ ID NO: 103669 - protein, 14 aa, Homo sapiens
  CDR3 for alpha chain variable domain of TCR clone 51835 (TRAV21, TRAJ35)
CAVMPIGFGNVLHC

SEQ ID NO: 103670 - protein, 15 aa, Homo sapiens
  CDR3 for beta chain variable domain of TCR clone 51835 (TRBV7-9, TRBJ1-4)
CASSARTGGNEKLFF

SEQ ID NO: 103671 - protein, 14 aa, Homo sapiens
  CDR3 for alpha chain variable domain of TCR clone 51836 (TRAV12-3, TRAJ10)
SHLPLTGGGNKLTF

SEQ ID NO: 103672 - protein, 14 aa, Homo sapiens
  CDR3 for beta chain variable domain of TCR clone 51836 (TRBV6-1, TRBJ1-3)
CASVKGGGGNTIYF

SEQ ID NO: 103673 - protein, 16 aa, Homo sapiens
  CDR3 for alpha chain variable domain of TCR clone 51837 (TRAV4, TRAJ9)
CLVGDPNRPGGFKTIF

SEQ ID NO: 103674 - protein, 16 aa, Homo sapiens
  CDR3 for beta chain variable domain of TCR clone 51837 (TRBV28, TRBJ1-4)
CASSPPYRGRSEKLSF

SEQ ID NO: 103675 - protein, 15 aa, Homo sapiens
  CDR3 for alpha chain variable domain of TCR clone 51838 (TRAV3, TRAJ22)
CAVRDRGGSARQLTF

SEQ ID NO: 103676 - protein, 15 aa, Homo sapiens
  CDR3 for beta chain variable domain of TCR clone 51838 (TRBV7-8, TRBJ2-1)
CASSLADSLYNEQFL

SEQ ID NO: 103677 - protein, 14 aa, Homo sapiens
  CDR3 for alpha chain variable domain of TCR clone 51839 (TRAV38-1, TRAJ29)
YAFITPSGNTPLVF

SEQ ID NO: 103678 - protein, 14 aa, Homo sapiens
  CDR3 for beta chain variable domain of TCR clone 51839 (TRBV18, TRBJ2-7)
CASSPRGGAYEQYF

SEQ ID NO: 103679 - protein, 23 aa, Homo sapiens
  CDR3 for alpha chain variable domain of TCR clone 51840 (TRAV26-1, )
CIADDAGNNHIQNPDPAVYQLRD

SEQ ID NO: 103680 - protein, 12 aa, Homo sapiens
  CDR3 for beta chain variable domain of TCR clone 51840 (TRBV11-2, TRBJ2-2)
CASSLGGGELFF

SEQ ID NO: 103681 - protein, 12 aa, Homo sapiens
  CDR3 for alpha chain variable domain of TCR clone 51841 (TRAV17, TRAJ39)
CATGAAGNVLTF

SEQ ID NO: 103682 - protein, 14 aa, Homo sapiens
  CDR3 for beta chain variable domain of TCR clone 51841 (TRBV7-9, TRBJ1-2)
CASSRQGANYGYTF

SEQ ID NO: 103683 - protein, 14 aa, Homo sapiens
  CDR3 for alpha chain variable domain of TCR clone 51842 (TRAV17, TRAJ31)
CATVLRNNNARLMF

SEQ ID NO: 103684 - protein, 14 aa, Homo sapiens
  CDR3 for beta chain variable domain of TCR clone 51842 (TRBV12-4, TRBJ2-5)
CASSLWQKQETQHF

SEQ ID NO: 103685 - protein, 14 aa, Homo sapiens
  CDR3 for alpha chain variable domain of TCR clone 51843 (TRAV1-2, TRAJ8)
CAVREDTGFQKLVF

SEQ ID NO: 103686 - protein, 14 aa, Homo sapiens
  CDR3 for beta chain variable domain of TCR clone 51843 (TRBV23-1, TRBJ2-5)
CASSFLRSQETQYF

SEQ ID NO: 103687 - protein, 14 aa, Homo sapiens
  CDR3 for alpha chain variable domain of TCR clone 51844 (TRAV1-1, TRAJ27)
CAVIYNTNAGKSTF

SEQ ID NO: 103688 - protein, 15 aa, Homo sapiens
  CDR3 for beta chain variable domain of TCR clone 51844 (TRBV7-2, TRBJ2-1)
GASSSGLAGGNEQFF

SEQ ID NO: 103689 - protein, 15 aa, Homo sapiens
  CDR3 for alpha chain variable domain of TCR clone 51845 (TRAV17, TRAJ23)
CATDAEDNRGGKLIF

SEQ ID NO: 103690 - protein, 12 aa, Homo sapiens
  CDR3 for beta chain variable domain of TCR clone 51845 (TRBV2, TRBJ2-1)
CAKREGYNEQFF

SEQ ID NO: 103691 - protein, 14 aa, Homo sapiens
  CDR3 for alpha chain variable domain of TCR clone 51846 (TRAV26-2, TRAJ23)
CYRTLYNQGGKLIF

SEQ ID NO: 103692 - protein, 15 aa, Homo sapiens
  CDR3 for beta chain variable domain of TCR clone 51846 (TRBV20-1, TRBJ2-7)
CSARDRVSEMDEQYF

SEQ ID NO: 103693 - protein, 13 aa, Homo sapiens
  CDR3 for alpha chain variable domain of TCR clone 51847 (TRAV35, TRAJ42)
CAGFPGSQGNLIF

SEQ ID NO: 103694 - protein, 16 aa, Homo sapiens
  CDR3 for beta chain variable domain of TCR clone 51847 (TRBV6-1, TRBJ2-1)
CASILRQGSSYNEQFF

SEQ ID NO: 103695 - protein, 12 aa, Homo sapiens
  CDR3 for alpha chain variable domain of TCR clone 51848 (TRAV21, TRAJ58)
CALSASGSRLTF

SEQ ID NO: 103696 - protein, 13 aa, Homo sapiens
  CDR3 for beta chain variable domain of TCR clone 51848 (TRBV5-7, TRBJ1-2)
CASSLGVFNGYTV

SEQ ID NO: 103697 - protein, 16 aa, Homo sapiens
  CDR3 for alpha chain variable domain of TCR clone 51849 (TRAV8-3, TRAJ10)
CAVGPLLTGGGNKLTF

SEQ ID NO: 103698 - protein, 16 aa, Homo sapiens
  CDR3 for beta chain variable domain of TCR clone 51849 (TRBV7-2, TRBJ2-5)
CASSSKWLSGQETQYF

SEQ ID NO: 103699 - protein, 13 aa, Homo sapiens
  CDR3 for alpha chain variable domain of TCR clone 51850 (TRAV2, TRAJ40)
CAVVTSGTYKYIF

SEQ ID NO: 103700 - protein, 15 aa, Homo sapiens
  CDR3 for beta chain variable domain of TCR clone 51850 (TRBV20-1, TRBJ1-1)
CSASRGVTGNTEAFF

SEQ ID NO: 103701 - protein, 13 aa, Homo sapiens
  CDR3 for alpha chain variable domain of TCR clone 51851 (TRAV35, TRAJ42)
CAGFPGSQGNLIF

SEQ ID NO: 103702 - protein, 13 aa, Homo sapiens
  CDR3 for beta chain variable domain of TCR clone 51851 (TRBV7-2, TRBJ2-2)
CASSLAVTGELFF

SEQ ID NO: 103703 - protein, 17 aa, Homo sapiens
  CDR3 for alpha chain variable domain of TCR clone 51852 (TRAV23/DV6, TRAJ57)
CAASSTLSQGGSEKLVF

SEQ ID NO: 103704 - protein, 14 aa, Homo sapiens
  CDR3 for beta chain variable domain of TCR clone 51852 (TRBV19, TRBJ2-1)
CASPTFVLSGEQFF

SEQ ID NO: 103705 - protein, 15 aa, Homo sapiens
  CDR3 for alpha chain variable domain of TCR clone 51853 (TRAV3, TRAJ22)
CAVRDRGGSARQLTF

SEQ ID NO: 103706 - protein, 15 aa, Homo sapiens
  CDR3 for beta chain variable domain of TCR clone 51853 (TRBV7-3, TRBJ2-1)
CASSPTGGGGVEQFF

SEQ ID NO: 103707 - protein, 13 aa, Homo sapiens
  CDR3 for alpha chain variable domain of TCR clone 51854 (TRAV13-2, TRAJ8)
CAFMYTGFQKLVF

SEQ ID NO: 103708 - protein, 17 aa, Homo sapiens
  CDR3 for beta chain variable domain of TCR clone 51854 (TRBV28, TRBJ2-1)
CASSSARQALTYNEQFF

SEQ ID NO: 103709 - protein, 14 aa, Homo sapiens
  CDR3 for alpha chain variable domain of TCR clone 51855 (TRAV1-2, TRAJ8)
CAVGEDTGFQKLVF

SEQ ID NO: 103710 - protein, 12 aa, Homo sapiens
  CDR3 for beta chain variable domain of TCR clone 51855 (TRBV2, TRBJ2-1)
CAYGPPGNEQFF

SEQ ID NO: 103711 - protein, 14 aa, Homo sapiens
  CDR3 for alpha chain variable domain of TCR clone 51856 (TRAV16, TRAJ33)
FALSAMDSNYQLIW

SEQ ID NO: 103712 - protein, 15 aa, Homo sapiens
  CDR3 for beta chain variable domain of TCR clone 51856 (TRBV28, TRBJ2-7)
CASSLEAYPIYEQYF

SEQ ID NO: 103713 - protein, 11 aa, Homo sapiens
  CDR3 for alpha chain variable domain of TCR clone 51857 (TRAV2, TRAJ33)
CAVDSNYQLIW

SEQ ID NO: 103714 - protein, 16 aa, Homo sapiens
  CDR3 for beta chain variable domain of TCR clone 51857 (TRBV19, TRBJ1-1)
CASRFGGPVTGTEAFF

SEQ ID NO: 103715 - protein, 12 aa, Homo sapiens
  CDR3 for alpha chain variable domain of TCR clone 51858 (TRAV12-2, TRAJ29)
CAWDSGNTPLVF

SEQ ID NO: 103716 - protein, 11 aa, Homo sapiens
  CDR3 for beta chain variable domain of TCR clone 51858 (TRBV2, TRBJ2-3)
CASSATDTQYF

SEQ ID NO: 103717 - protein, 15 aa, Homo sapiens
  CDR3 for alpha chain variable domain of TCR clone 51859 (TRAV8-3, TRAJ27)
CAVGPSKTNAGKLTF

SEQ ID NO: 103718 - protein, 15 aa, Homo sapiens
  CDR3 for beta chain variable domain of TCR clone 51859 (TRBV7-2, TRBJ2-1)
CASSSGLAGGNEQFF

SEQ ID NO: 103719 - protein, 14 aa, Homo sapiens
  CDR3 for alpha chain variable domain of TCR clone 51860 (TRAV35, TRAJ22)
CAGLRPGSARQLTF

SEQ ID NO: 103720 - protein, 14 aa, Homo sapiens
  CDR3 for beta chain variable domain of TCR clone 51860 (TRBV6-1, TRBJ1-3)
CASVQGGGGNTIYF

SEQ ID NO: 103721 - protein, 14 aa, Homo sapiens
  CDR3 for alpha chain variable domain of TCR clone 51861 (TRAV1-2, TRAJ16)
CAVNRFSDGQELLF

SEQ ID NO: 103722 - protein, 13 aa, Homo sapiens
  CDR3 for beta chain variable domain of TCR clone 51861 (TRBV20-1, TRBJ2-2)
CSALSGGAGELFF

SEQ ID NO: 103723 - protein, 16 aa, Homo sapiens
  CDR3 for alpha chain variable domain of TCR clone 51862 (TRAV30, TRAJ24)
CGTEIVDADSWGKFKF

SEQ ID NO: 103724 - protein, 17 aa, Homo sapiens
  CDR3 for beta chain variable domain of TCR clone 51862 (TRBV20-1, TRBJ2-1)
CSARDRRRASSYNEQFF

SEQ ID NO: 103725 - protein, 15 aa, Homo sapiens
  CDR3 for alpha chain variable domain of TCR clone 51863 (TRAV2, TRAJ18)
CAVEDRGSTLGRLYF

SEQ ID NO: 103726 - protein, 14 aa, Homo sapiens
  CDR3 for beta chain variable domain of TCR clone 51863 (TRBV5-1, TRBJ2-7)
CASSATGGYDEQYF

SEQ ID NO: 103727 - protein, 11 aa, Homo sapiens
  CDR3 for alpha chain variable domain of TCR clone 51864 (TRAV13-1, TRAJ8)
CAARGIQKLVF

SEQ ID NO: 103728 - protein, 16 aa, Homo sapiens
  CDR3 for beta chain variable domain of TCR clone 51864 (TRBV19, TRBJ1-5)
CASSTRGTRSNQPQHF

SEQ ID NO: 103729 - protein, 12 aa, Homo sapiens
  CDR3 for alpha chain variable domain of TCR clone 51865 (TRAV12-1, TRAJ40)
CVVYSGTYKYIF

SEQ ID NO: 103730 - protein, 13 aa, Homo sapiens
  CDR3 for beta chain variable domain of TCR clone 51865 (TRBV12-4, TRBJ1-2)
CASSSGLTVISTF

SEQ ID NO: 103731 - protein, 12 aa, Homo sapiens
  CDR3 for alpha chain variable domain of TCR clone 51866 (TRAV12-1, TRAJ40)
CVFYSGTYKYIF

SEQ ID NO: 103732 - protein, 13 aa, Homo sapiens
  CDR3 for beta chain variable domain of TCR clone 51866 (TRBV4-2, TRBJ1-1)
CASSQAGNTEAFF

SEQ ID NO: 103733 - protein, 14 aa, Homo sapiens
  CDR3 for alpha chain variable domain of TCR clone 51867 (TRAV1-2, TRAJ8)
CAVREDTGFQKLVF

SEQ ID NO: 103734 - protein, 15 aa, Homo sapiens
  CDR3 for beta chain variable domain of TCR clone 51867 (TRBV7-9, TRBJ1-1)
CASSHRGTVNTEASF

SEQ ID NO: 103735 - protein, 12 aa, Homo sapiens
  CDR3 for alpha chain variable domain of TCR clone 51868 (TRAV38-1, TRAJ34)
CAFMKETDKLIF

SEQ ID NO: 103736 - protein, 17 aa, Homo sapiens
  CDR3 for beta chain variable domain of TCR clone 51868 (TRBV7-8, TRBJ2-6)
CASSAGTGGAGANILTF

SEQ ID NO: 103737 - protein, 11 aa, Homo sapiens
  CDR3 for alpha chain variable domain of TCR clone 51869 (TRAV21, TRAJ11)
CAVNGYSTLTF

SEQ ID NO: 103738 - protein, 11 aa, Homo sapiens
  CDR3 for beta chain variable domain of TCR clone 51869 (TRBV11-2, TRBJ2-7)
CASSSDYEQYL

SEQ ID NO: 103739 - protein, 14 aa, Homo sapiens
  CDR3 for alpha chain variable domain of TCR clone 51870 (TRAV1-2, TRAJ6)
CAVGASGGSYIPTF

SEQ ID NO: 103740 - protein, 17 aa, Homo sapiens
  CDR3 for beta chain variable domain of TCR clone 51870 (TRBV18, TRBJ2-2)
CASSPSDPWQNTGELFF

SEQ ID NO: 103741 - protein, 12 aa, Homo sapiens
  CDR3 for alpha chain variable domain of TCR clone 51871 (TRAV8-3, TRAJ20)
YAVGANDYKLSF

SEQ ID NO: 103742 - protein, 16 aa, Homo sapiens
  CDR3 for beta chain variable domain of TCR clone 51871 (TRBV19, TRBJ2-2)
CASRSPGTGATGELFF

SEQ ID NO: 103743 - protein, 14 aa, Homo sapiens
  CDR3 for alpha chain variable domain of TCR clone 51872 (TRAV12-2, TRAJ13)
CAVKKTGGYQKVTF

SEQ ID NO: 103744 - protein, 15 aa, Homo sapiens
  CDR3 for beta chain variable domain of TCR clone 51872 (TRBV7-2, TRBJ2-1)
CPSSLASGRVNEQFF

SEQ ID NO: 103745 - protein, 15 aa, Homo sapiens
  CDR3 for alpha chain variable domain of TCR clone 51873 (TRAV3, TRAJ5)
CAVRDLDTGRRALTF

SEQ ID NO: 103746 - protein, 15 aa, Homo sapiens
  CDR3 for beta chain variable domain of TCR clone 51873 (TRBV5-1, TRBJ2-3)
CTSSVTSGSTDTQYF

SEQ ID NO: 103747 - protein, 12 aa, Homo sapiens
  CDR3 for alpha chain variable domain of TCR clone 51874 (TRAV12-3, TRAJ17)
CAMTLTGNKLNF

SEQ ID NO: 103748 - protein, 15 aa, Homo sapiens
  CDR3 for beta chain variable domain of TCR clone 51874 (TRBV20-1, TRBJ2-7)
CSARDWVSGMDEQYF

SEQ ID NO: 103749 - protein, 14 aa, Homo sapiens
  CDR3 for alpha chain variable domain of TCR clone 51875 (TRAV1-2, TRAJ8)
CAVREDTGFQQLVF

SEQ ID NO: 103750 - protein, 15 aa, Homo sapiens
  CDR3 for beta chain variable domain of TCR clone 51875 (TRBV27, TRBJ2-1)
CASSNGGGSSNEQFF

SEQ ID NO: 103751 - protein, 18 aa, Homo sapiens
  CDR3 for alpha chain variable domain of TCR clone 51876 (TRAV21, TRAJ52)
CAVRPSPAGGTSYGKLTF

SEQ ID NO: 103752 - protein, 15 aa, Homo sapiens
  CDR3 for beta chain variable domain of TCR clone 51876 (TRBV2, TRBJ2-7)
CASSEGLARSYEQYF

SEQ ID NO: 103753 - protein, 15 aa, Homo sapiens
  CDR3 for alpha chain variable domain of TCR clone 51877 (TRAV24, TRAJ28)
CARLWDGAGSYQLTF

SEQ ID NO: 103754 - protein, 14 aa, Homo sapiens
  CDR3 for beta chain variable domain of TCR clone 51877 (TRBV9, TRBJ2-7)
CASSVGVGSYEQYF

SEQ ID NO: 103755 - protein, 15 aa, Homo sapiens
  CDR3 for alpha chain variable domain of TCR clone 51878 (TRAV21, TRAJ53)
CATLNSGGSNYKLTF

SEQ ID NO: 103756 - protein, 16 aa, Homo sapiens
  CDR3 for beta chain variable domain of TCR clone 51878 (TRBV9, TRBJ2-1)
CSSSVGGGGNYNEQFF

SEQ ID NO: 103757 - protein, 15 aa, Homo sapiens
  CDR3 for alpha chain variable domain of TCR clone 51879 (TRAV17, TRAJ57)
CATGPSQGGSEKLVY

SEQ ID NO: 103758 - protein, 11 aa, Homo sapiens
  CDR3 for beta chain variable domain of TCR clone 51879 (TRBV29-1, TRBJ2-5)
CSEDRTGTQYF

SEQ ID NO: 103759 - protein, 14 aa, Homo sapiens
  CDR3 for alpha chain variable domain of TCR clone 51880 (TRAV4, TRAJ9)
CLVGSGTGGFKTIF

SEQ ID NO: 103760 - protein, 15 aa, Homo sapiens
  CDR3 for beta chain variable domain of TCR clone 51880 (TRBV7-2, TRBJ2-1)
CANSLASGRVNEQFF

SEQ ID NO: 103761 - protein, 14 aa, Homo sapiens
  CDR3 for alpha chain variable domain of TCR clone 51881 (TRAV20, TRAJ29)
CAVQAWVGNTHLVF

SEQ ID NO: 103762 - protein, 15 aa, Homo sapiens
  CDR3 for beta chain variable domain of TCR clone 51881 (TRBV29-1, TRBJ2-7)
CSVEFFDRGSYEQYF

SEQ ID NO: 103763 - protein, 13 aa, Homo sapiens
  CDR3 for alpha chain variable domain of TCR clone 51882 (TRAV20, TRAJ37)
CAGCSSNTGKLIF

SEQ ID NO: 103764 - protein, 21 aa, Homo sapiens
  CDR3 for beta chain variable domain of TCR clone 51882 (TRBV4-2, TRBJ2-3)
PCSQKTRPCIPVPAAPDTQYF

SEQ ID NO: 103765 - protein, 15 aa, Homo sapiens
  CDR3 for alpha chain variable domain of TCR clone 51883 (TRAV8-3, TRAJ45)
CASSYSGGGADGLTF

SEQ ID NO: 103766 - protein, 13 aa, Homo sapiens
  CDR3 for beta chain variable domain of TCR clone 51883 (TRBV10-3, TRBJ2-7)
CASKLAVNYAQYF

SEQ ID NO: 103767 - protein, 14 aa, Homo sapiens
  CDR3 for alpha chain variable domain of TCR clone 51884 (TRAV1-2, TRAJ16)
CAVNRFSDGQKLLF

SEQ ID NO: 103768 - protein, 13 aa, Homo sapiens
  CDR3 for beta chain variable domain of TCR clone 51884 (TRBV24-1, TRBJ1-4)
CATNNGRSEKLFF

SEQ ID NO: 103769 - protein, 13 aa, Homo sapiens
  CDR3 for alpha chain variable domain of TCR clone 51885 (TRAV23/DV6, TRAJ58)
CAAREIGGSRLTF

SEQ ID NO: 103770 - protein, 15 aa, Homo sapiens
  CDR3 for beta chain variable domain of TCR clone 51885 (TRBV19, TRBJ1-1)
CASTSGQIQNTEAFF

SEQ ID NO: 103771 - protein, 14 aa, Homo sapiens
  CDR3 for alpha chain variable domain of TCR clone 51886 (TRAV38-1, TRAJ45)
CAYHSGGGADGLTF

SEQ ID NO: 103772 - protein, 15 aa, Homo sapiens
  CDR3 for beta chain variable domain of TCR clone 51886 (TRBV11-2, TRBJ2-1)
CASSKNRGLIYEQFF

SEQ ID NO: 103773 - protein, 13 aa, Homo sapiens
  CDR3 for alpha chain variable domain of TCR clone 51887 (TRAV13-2, TRAJ13)
CAERPGGYQKVTF

SEQ ID NO: 103774 - protein, 15 aa, Homo sapiens
  CDR3 for beta chain variable domain of TCR clone 51887 (TRBV6-3, TRBJ2-7)
CASSSPGTVFYEQYF

SEQ ID NO: 103775 - protein, 12 aa, Homo sapiens
  CDR3 for alpha chain variable domain of TCR clone 51888 (TRAV13-2, TRAJ23)
CAERHRGGKLVF

SEQ ID NO: 103776 - protein, 16 aa, Homo sapiens
  CDR3 for beta chain variable domain of TCR clone 51888 (TRBV20-1, TRBJ1-4)
CSAPGQGLLTNEKLFF

SEQ ID NO: 103777 - protein, 14 aa, Homo sapiens
  CDR3 for alpha chain variable domain of TCR clone 51889 (TRAV12-1, TRAJ33)
CVVSPEDSNYQLIW

SEQ ID NO: 103778 - protein, 11 aa, Homo sapiens
  CDR3 for beta chain variable domain of TCR clone 51889 (TRBV7-6, TRBJ2-1)
CASSNYGEQFF

SEQ ID NO: 103779 - protein, 17 aa, Homo sapiens
  CDR3 for alpha chain variable domain of TCR clone 51890 (TRAV16, TRAJ58)
CITVLSNGEASGSRLTF

SEQ ID NO: 103780 - protein, 17 aa, Homo sapiens
  CDR3 for beta chain variable domain of TCR clone 51890 (TRBV18, TRBJ2-1)
CASSKGLSGGADNGQFF

SEQ ID NO: 103781 - protein, 14 aa, Homo sapiens
  CDR3 for alpha chain variable domain of TCR clone 51891 (TRAV1-2, TRAJ16)
CAVNRFSDGQKLLF

SEQ ID NO: 103782 - protein, 16 aa, Homo sapiens
  CDR3 for beta chain variable domain of TCR clone 51891 (TRBV20-1, TRBJ1-4)
CSAPGQGLLTSEKLFF

SEQ ID NO: 103783 - protein, 14 aa, Homo sapiens
  CDR3 for alpha chain variable domain of TCR clone 51892 (TRAV8-2, TRAJ37)
CVVSISGNTGKLIF

SEQ ID NO: 103784 - protein, 13 aa, Homo sapiens
  CDR3 for beta chain variable domain of TCR clone 51892 (TRBV10-3, TRBJ2-7)
CASKLAVNYEQYF

SEQ ID NO: 103785 - protein, 14 aa, Homo sapiens
  CDR3 for alpha chain variable domain of TCR clone 51893 (TRAV12-2, TRAJ40)
CAVKIPSGTYKYIF

SEQ ID NO: 103786 - protein, 15 aa, Homo sapiens
  CDR3 for beta chain variable domain of TCR clone 51893 (TRBV20-1, TRBJ1-4)
CSAGREWGVNEKLFF

SEQ ID NO: 103787 - protein, 12 aa, Homo sapiens
  CDR3 for alpha chain variable domain of TCR clone 51894 (TRAV8-3, TRAJ20)
CAVGANDYRLSF

SEQ ID NO: 103788 - protein, 15 aa, Homo sapiens
  CDR3 for beta chain variable domain of TCR clone 51894 (TRBV15, TRBJ1-2)
CATSRVRASGSGYTF

SEQ ID NO: 103789 - protein, 14 aa, Homo sapiens
  CDR3 for alpha chain variable domain of TCR clone 51895 (TRAV2, TRAJ9)
CAVDPNTGGFKTIF

SEQ ID NO: 103790 - protein, 13 aa, Homo sapiens
  CDR3 for beta chain variable domain of TCR clone 51895 (TRBV20-1, TRBJ2-1)
SSASTGTSNEQFF

SEQ ID NO: 103791 - protein, 16 aa, Homo sapiens
  CDR3 for alpha chain variable domain of TCR clone 51896 (TRAV8-3, TRAJ13)
CAVGAYPSGGCQKVTF

SEQ ID NO: 103792 - protein, 15 aa, Homo sapiens
  CDR3 for beta chain variable domain of TCR clone 51896 (TRBV19, TRBJ1-5)
CASSIVWADNQPQHF

SEQ ID NO: 103793 - protein, 15 aa, Homo sapiens
  CDR3 for alpha chain variable domain of TCR clone 51897 (TRAV25, TRAJ53)
CAATGGGGSNYKLTF

SEQ ID NO: 103794 - protein, 17 aa, Homo sapiens
  CDR3 for beta chain variable domain of TCR clone 51897 (TRBV13, TRBJ2-3)
CASSLSRVAGGRNTQYF

SEQ ID NO: 103795 - protein, 13 aa, Homo sapiens
  CDR3 for alpha chain variable domain of TCR clone 51898 (TRAV29/DV5, TRAJ13)
CAAVSGGYQKVTF

SEQ ID NO: 103796 - protein, 14 aa, Homo sapiens
  CDR3 for beta chain variable domain of TCR clone 51898 (TRBV6-6, TRBJ1-3)
CASSRQGSGNTIYF

SEQ ID NO: 103797 - protein, 13 aa, Homo sapiens
  CDR3 for alpha chain variable domain of TCR clone 51899 (TRAV1-2, TRAJ20)
CAVPRSNDYKLSF

SEQ ID NO: 103798 - protein, 14 aa, Homo sapiens
  CDR3 for beta chain variable domain of TCR clone 51899 (TRBV20-1, TRBJ2-7)
CSARYGTTCYEQYF

SEQ ID NO: 103799 - protein, 12 aa, Homo sapiens
  CDR3 for alpha chain variable domain of TCR clone 51900 (TRAV10, TRAJ34)
CVVSGKHRQAHL

SEQ ID NO: 103800 - protein, 14 aa, Homo sapiens
  CDR3 for beta chain variable domain of TCR clone 51900 (TRBV19, TRBJ2-1)
CASPTFVLSGEQLF

SEQ ID NO: 103801 - protein, 16 aa, Homo sapiens
  CDR3 for alpha chain variable domain of TCR clone 51901 (TRAV16, TRAJ24)
CALRGGSTDSWGKLQF

SEQ ID NO: 103802 - protein, 15 aa, Homo sapiens
  CDR3 for beta chain variable domain of TCR clone 51901 (TRBV27, TRBJ2-1)
CASSNGGGSSNEQFF

SEQ ID NO: 103803 - protein, 16 aa, Homo sapiens
  CDR3 for alpha chain variable domain of TCR clone 51902 (TRAV1-2, TRAJ10)
CAVRGVLTGGGNKLTF

SEQ ID NO: 103804 - protein, 12 aa, Homo sapiens
  CDR3 for beta chain variable domain of TCR clone 51902 (TRBV7-8, TRBJ2-7)
CDSSLGDREQYF

SEQ ID NO: 103805 - protein, 17 aa, Homo sapiens
  CDR3 for alpha chain variable domain of TCR clone 51903 (TRAV3, TRAJ38)
CAVRGCLNAGNNRKLIW

SEQ ID NO: 103806 - protein, 16 aa, Homo sapiens
  CDR3 for beta chain variable domain of TCR clone 51903 (TRBV20-1, TRBJ1-4)
CSAPGQGLLTNEKLFF

SEQ ID NO: 103807 - protein, 14 aa, Homo sapiens
  CDR3 for alpha chain variable domain of TCR clone 51904 (TRAV12-2, TRAJ13)
CAVKKTGGYQEVTF

SEQ ID NO: 103808 - protein, 14 aa, Homo sapiens
  CDR3 for beta chain variable domain of TCR clone 51904 (TRBV10-3, TRBJ2-1)
CAISSDLAYNEQFF

SEQ ID NO: 103809 - protein, 13 aa, Homo sapiens
  CDR3 for alpha chain variable domain of TCR clone 51905 (TRAV8-1, TRAJ13)
CAVSKGGYQKVTF

SEQ ID NO: 103810 - protein, 18 aa, Homo sapiens
  CDR3 for beta chain variable domain of TCR clone 51905 (TRBV11-2, TRBJ2-7)
CASSWRTVQTGKSYEQYF

SEQ ID NO: 103811 - protein, 14 aa, Homo sapiens
  CDR3 for alpha chain variable domain of TCR clone 51906 (TRAV21, TRAJ32)
CCGDYGGATNKLIF

SEQ ID NO: 103812 - protein, 13 aa, Homo sapiens
  CDR3 for beta chain variable domain of TCR clone 51906 (TRBV2, TRBJ1-6)
CASGRGGISTLHF

SEQ ID NO: 103813 - protein, 14 aa, Homo sapiens
  CDR3 for alpha chain variable domain of TCR clone 51907 (TRAV12-2, TRAJ17)
CAVLFKAAGKKLTF

SEQ ID NO: 103814 - protein, 12 aa, Homo sapiens
  CDR3 for beta chain variable domain of TCR clone 51907 (TRBV19, TRBJ1-5)
CASSIAQQPQHF

SEQ ID NO: 103815 - protein, 15 aa, Homo sapiens
  CDR3 for alpha chain variable domain of TCR clone 51908 (TRAV1-2, TRAJ38)
CAVSENAGSNRKLIW

SEQ ID NO: 103816 - protein, 16 aa, Homo sapiens
  CDR3 for beta chain variable domain of TCR clone 51908 (TRBV4-1, TRBJ2-7)
CASSLTAGQATYEQYF

SEQ ID NO: 103817 - protein, 14 aa, Homo sapiens
  CDR3 for alpha chain variable domain of TCR clone 51909 (TRAV12-2, TRAJ17)
CAVLFKAAGNKLTF

SEQ ID NO: 103818 - protein, 14 aa, Homo sapiens
  CDR3 for beta chain variable domain of TCR clone 51909 (TRBV12-5, TRBJ2-5)
CASGSQTHQETQYF

SEQ ID NO: 103819 - protein, 14 aa, Homo sapiens
  CDR3 for alpha chain variable domain of TCR clone 51910 (TRAV17, TRAJ57)
CATDPQGGSEKLVF

SEQ ID NO: 103820 - protein, 16 aa, Homo sapiens
  CDR3 for beta chain variable domain of TCR clone 51910 (TRBV19, TRBJ2-1)
CASSKAGPSSYNEQFF

SEQ ID NO: 103821 - protein, 15 aa, Homo sapiens
  CDR3 for alpha chain variable domain of TCR clone 51911 (TRAV12-3, TRAJ6)
CAMSATPGGSYIPTF

SEQ ID NO: 103822 - protein, 11 aa, Homo sapiens
  CDR3 for beta chain variable domain of TCR clone 51911 (TRBV20-1, TRBJ1-5)
CSAQGDQPQHF

SEQ ID NO: 103823 - protein, 14 aa, Homo sapiens
  CDR3 for alpha chain variable domain of TCR clone 51912 (TRAV26-1, TRAJ57)
CIRAGQGGSEKLVF

SEQ ID NO: 103824 - protein, 13 aa, Homo sapiens
  CDR3 for beta chain variable domain of TCR clone 51912 (TRBV19, TRBJ2-7)
CASSPTTSYEQYF

SEQ ID NO: 103825 - protein, 14 aa, Homo sapiens
  CDR3 for alpha chain variable domain of TCR clone 51913 (TRAV12-2, TRAJ36)
CAMKISTGANNLFF

SEQ ID NO: 103826 - protein, 14 aa, Homo sapiens
  CDR3 for beta chain variable domain of TCR clone 51913 (TRBV25-1, TRBJ1-2)
CASSDTTGVVGYTF

SEQ ID NO: 103827 - protein, 13 aa, Homo sapiens
  CDR3 for alpha chain variable domain of TCR clone 51914 (TRAV12-1, TRAJ13)
CVVALLGYHKVTF

SEQ ID NO: 103828 - protein, 13 aa, Homo sapiens
  CDR3 for beta chain variable domain of TCR clone 51914 (TRBV20-1, TRBJ2-5)
CSAILTGQETQYF

SEQ ID NO: 103829 - protein, 13 aa, Homo sapiens
  CDR3 for alpha chain variable domain of TCR clone 51915 (TRAV1-2, TRAJ13)
CAVNSGGYQKVTF

SEQ ID NO: 103830 - protein, 12 aa, Homo sapiens
  CDR3 for beta chain variable domain of TCR clone 51915 (TRBV11-2, TRBJ2-2)
CASSLGGGELFF

SEQ ID NO: 103831 - protein, 14 aa, Homo sapiens
  CDR3 for alpha chain variable domain of TCR clone 51916 (TRAV12-2, TRAJ45)
CAVNIGGGADGLTF

SEQ ID NO: 103832 - protein, 13 aa, Homo sapiens
  CDR3 for beta chain variable domain of TCR clone 51916 (TRBV19, TRBJ2-2)
CASGVWSTGELFF

SEQ ID NO: 103833 - protein, 15 aa, Homo sapiens
  CDR3 for alpha chain variable domain of TCR clone 51917 (TRAV3, TRAJ3)
CAVRDRRSRASKIIF

SEQ ID NO: 103834 - protein, 13 aa, Homo sapiens
  CDR3 for beta chain variable domain of TCR clone 51917 (TRBV9, TRBJ2-5)
CASSPAGLGTQYF

SEQ ID NO: 103835 - protein, 15 aa, Homo sapiens
  CDR3 for alpha chain variable domain of TCR clone 51918 (TRAV12-3, TRAJ52)
CNGGAGGTSYGKLTF

SEQ ID NO: 103836 - protein, 19 aa, Homo sapiens
  CDR3 for beta chain variable domain of TCR clone 51918 (TRBV14, TRBJ2-1)
ISVPAASGTPIRDSDEQFF

SEQ ID NO: 103837 - protein, 14 aa, Homo sapiens
  CDR3 for alpha chain variable domain of TCR clone 51919 (TRAV21, TRAJ10)
CAVALTGGGNKPTF

SEQ ID NO: 103838 - protein, 13 aa, Homo sapiens
  CDR3 for beta chain variable domain of TCR clone 51919 (TRBV7-2, TRBJ1-6)
CASSLGSNSPLHF

SEQ ID NO: 103839 - protein, 12 aa, Homo sapiens
  CDR3 for alpha chain variable domain of TCR clone 51920 (TRAV13-1, TRAJ49)
CSASPMGNQFYF

SEQ ID NO: 103840 - protein, 17 aa, Homo sapiens
  CDR3 for beta chain variable domain of TCR clone 51920 (TRBV11-2, TRBJ2-1)
CASSLYPPGVEYNEQFF

SEQ ID NO: 103841 - protein, 17 aa, Homo sapiens
  CDR3 for alpha chain variable domain of TCR clone 51921 (TRAV3, TRAJ42)
CAVRDRDYGGSQGNLIF

SEQ ID NO: 103842 - protein, 12 aa, Homo sapiens
  CDR3 for beta chain variable domain of TCR clone 51921 (TRBV20-1, TRBJ1-3)
CSATVSGNTIYF

SEQ ID NO: 103843 - protein, 14 aa, Homo sapiens
  CDR3 for alpha chain variable domain of TCR clone 51922 (TRAV8-3, TRAJ9)
CAVVYNTGGVKTIF

SEQ ID NO: 103844 - protein, 14 aa, Homo sapiens
  CDR3 for beta chain variable domain of TCR clone 51922 (TRBV7-3, TRBJ2-2)
CASSSGGYTGELFF

SEQ ID NO: 103845 - protein, 10 aa, Homo sapiens
  CDR3 for alpha chain variable domain of TCR clone 51923 (TRAV8-4, TRAJ43)
CAGSADDMRF

SEQ ID NO: 103846 - protein, 11 aa, Homo sapiens
  CDR3 for beta chain variable domain of TCR clone 51923 (TRBV12-4, TRBJ2-3)
CASTATDTQYF

SEQ ID NO: 103847 - protein, 20 aa, Homo sapiens
  CDR3 for alpha chain variable domain of TCR clone 51924 (TRAV25, TRAJ21)
TATRTTDVGTYPLSFNKFYF

SEQ ID NO: 103848 - protein, 14 aa, Homo sapiens
  CDR3 for beta chain variable domain of TCR clone 51924 (TRBV20-1, TRBJ2-7)
CSAPELAGVGEQYF

SEQ ID NO: 103849 - protein, 13 aa, Homo sapiens
  CDR3 for alpha chain variable domain of TCR clone 51925 (TRAV20, TRAJ37)
CAGCSSNSGKLIF

SEQ ID NO: 103850 - protein, 11 aa, Homo sapiens
  CDR3 for beta chain variable domain of TCR clone 51925 (TRBV12-4, TRBJ2-3)
CASTATDTQYF

SEQ ID NO: 103851 - protein, 13 aa, Homo sapiens
  CDR3 for alpha chain variable domain of TCR clone 51926 (TRAV27, TRAJ41)
CAGEGNSGYALNL

SEQ ID NO: 103852 - protein, 14 aa, Homo sapiens
  CDR3 for beta chain variable domain of TCR clone 51926 (TRBV25-1, TRBJ1-1)
CASTHLGGNTEAFF

SEQ ID NO: 103853 - protein, 21 aa, Homo sapiens
  CDR3 for alpha chain variable domain of TCR clone 51927 (TRAV12-1, TRAJ32)
SSVIQPPTSMNYGGATNKLIF

SEQ ID NO: 103854 - protein, 18 aa, Homo sapiens
  CDR3 for beta chain variable domain of TCR clone 51927 (TRBV20-1, TRBJ2-3)
CSASGLAGGPGTTGTQYF

SEQ ID NO: 103855 - protein, 11 aa, Homo sapiens
  CDR3 for alpha chain variable domain of TCR clone 51928 (TRAV12-2, TRAJ39)
CAVNNMLTFGG

SEQ ID NO: 103856 - protein, 16 aa, Homo sapiens
  CDR3 for beta chain variable domain of TCR clone 51928 (TRBV5-3, TRBJ2-2)
CASSFGTGTNTGELFF

SEQ ID NO: 103857 - protein, 13 aa, Homo sapiens
  CDR3 for alpha chain variable domain of TCR clone 51929 (TRAV2, TRAJ21)
CAVEDLNFIKFYF

SEQ ID NO: 103858 - protein, 15 aa, Homo sapiens
  CDR3 for beta chain variable domain of TCR clone 51929 (TRBV28, TRBJ2-5)
CASSPGQGSIETQYF

SEQ ID NO: 103859 - protein, 14 aa, Homo sapiens
  CDR3 for alpha chain variable domain of TCR clone 51930 (TRAV29/DV5, TRAJ49)
CASSLSNTGNQFYF

SEQ ID NO: 103860 - protein, 15 aa, Homo sapiens
  CDR3 for beta chain variable domain of TCR clone 51930 (TRBV20-1, TRBJ2-1)
CSARGIGGTYNEQFF

SEQ ID NO: 103861 - protein, 17 aa, Homo sapiens
  CDR3 for alpha chain variable domain of TCR clone 51931 (TRAV3, TRAJ28)
CAVREAYSGAGSYQLTF

SEQ ID NO: 103862 - protein, 18 aa, Homo sapiens
  CDR3 for beta chain variable domain of TCR clone 51931 (TRBV27, TRBJ2-1)
CAYGNRAVGVGSKNEQFF

SEQ ID NO: 103863 - protein, 11 aa, Homo sapiens
  CDR3 for alpha chain variable domain of TCR clone 51932 (TRAV1-2, TRAJ20)
CAVANDYKLSF

SEQ ID NO: 103864 - protein, 18 aa, Homo sapiens
  CDR3 for beta chain variable domain of TCR clone 51932 (TRBV20-1, TRBJ2-6)
CSAETTPPHGSGANVLTF

SEQ ID NO: 103865 - protein, 19 aa, Homo sapiens
  CDR3 for alpha chain variable domain of TCR clone 51933 (TRAV26-1, TRAJ52)
CIVRAHRNAGGTSYGKLTF

SEQ ID NO: 103866 - protein, 14 aa, Homo sapiens
  CDR3 for beta chain variable domain of TCR clone 51933 (TRBV7-9, TRBJ2-7)
CASSIGQGAGEQYF

SEQ ID NO: 103867 - protein, 12 aa, Homo sapiens
  CDR3 for alpha chain variable domain of TCR clone 51934 (TRAV2, TRAJ3)
CAVRSSASKIIF

SEQ ID NO: 103868 - protein, 15 aa, Homo sapiens
  CDR3 for beta chain variable domain of TCR clone 51934 (TRBV23-1, TRBJ2-7)
CASRLDSVTGSTSGR

SEQ ID NO: 103869 - protein, 14 aa, Homo sapiens
  CDR3 for alpha chain variable domain of TCR clone 51935 (TRAV17, TRAJ6)
CATPAMGGSYIPTF

SEQ ID NO: 103870 - protein, 14 aa, Homo sapiens
  CDR3 for beta chain variable domain of TCR clone 51935 (TRBV4-2, TRBJ1-2)
CASSPGGSNYGYTF

SEQ ID NO: 103871 - protein, 12 aa, Homo sapiens
  CDR3 for alpha chain variable domain of TCR clone 51936 (TRAV3, TRAJ20)
CAVRDPDYKLSF

SEQ ID NO: 103872 - protein, 14 aa, Homo sapiens
  CDR3 for beta chain variable domain of TCR clone 51936 (TRBV20-1, TRBJ2-1)
CSAQIGGSANEQFF

SEQ ID NO: 103873 - protein, 12 aa, Homo sapiens
  CDR3 for alpha chain variable domain of TCR clone 51937 (TRAV1-1, TRAJ43)
CAPRVSSNDMRF

SEQ ID NO: 103874 - protein, 13 aa, Homo sapiens
  CDR3 for beta chain variable domain of TCR clone 51937 (TRBV12-4, TRBJ1-2)
CASSLRQGKGYTF

SEQ ID NO: 103875 - protein, 13 aa, Homo sapiens
  CDR3 for alpha chain variable domain of TCR clone 51938 (TRAV8-3, TRAJ28)
CAVGAVGSYQLTF

SEQ ID NO: 103876 - protein, 15 aa, Homo sapiens
  CDR3 for beta chain variable domain of TCR clone 51938 (TRBV7-9, TRBJ1-5)
CASSQGYQPNQPQHF

SEQ ID NO: 103877 - protein, 16 aa, Homo sapiens
  CDR3 for alpha chain variable domain of TCR clone 51939 (TRAV12-3, TRAJ53)
CAMGVGSGGSNYKLTF

SEQ ID NO: 103878 - protein, 11 aa, Homo sapiens
  CDR3 for beta chain variable domain of TCR clone 51939 (TRBV29-1, TRBJ2-5)
CSVASGETQYF

SEQ ID NO: 103879 - protein, 13 aa, Homo sapiens
  CDR3 for alpha chain variable domain of TCR clone 51940 (TRAV26-1, TRAJ36)
CIVVGTGANNLFF

SEQ ID NO: 103880 - protein, 13 aa, Homo sapiens
  CDR3 for beta chain variable domain of TCR clone 51940 (TRBV14, TRBJ2-7)
CASSQDRRYEQYF

SEQ ID NO: 103881 - protein, 10 aa, Homo sapiens
  CDR3 for alpha chain variable domain of TCR clone 51941 (TRAV13-1, TRAJ43)
CAAGKNDMRF

SEQ ID NO: 103882 - protein, 13 aa, Homo sapiens
  CDR3 for beta chain variable domain of TCR clone 51941 (TRBV20-1, TRBJ1-5)
CSARTGVNQPQHF

SEQ ID NO: 103883 - protein, 13 aa, Homo sapiens
  CDR3 for alpha chain variable domain of TCR clone 51942 (TRAV21, TRAJ27)
CAARPGNAGKSTF

SEQ ID NO: 103884 - protein, 14 aa, Homo sapiens
  CDR3 for beta chain variable domain of TCR clone 51942 (TRBV11-2, TRBJ2-7)
FASSLGAGAYEQYF

SEQ ID NO: 103885 - protein, 16 aa, Homo sapiens
  CDR3 for alpha chain variable domain of TCR clone 51943 (TRAV2, TRAJ20)
TTVLWSFRSNDHKLSF

SEQ ID NO: 103886 - protein, 12 aa, Homo sapiens
  CDR3 for beta chain variable domain of TCR clone 51943 (TRBV7-6, TRBJ2-3)
CASSTGTDTQYF

SEQ ID NO: 103887 - protein, 18 aa, Homo sapiens
  CDR3 for alpha chain variable domain of TCR clone 51944 (TRAV21, TRAJ52)
CAVRPSPAGGTSYGKLTF

SEQ ID NO: 103888 - protein, 13 aa, Homo sapiens
  CDR3 for beta chain variable domain of TCR clone 51944 (TRBV7-3, TRBJ1-1)
CASSQYLGAEAFF

SEQ ID NO: 103889 - protein, 21 aa, Homo sapiens
  CDR3 for alpha chain variable domain of TCR clone 51945 (TRAV26-1, TRAJ38)
CIADNAGNNHIQNPDPAAYQL

SEQ ID NO: 103890 - protein, 13 aa, Homo sapiens
  CDR3 for beta chain variable domain of TCR clone 51945 (TRBV20-1, TRBJ1-1)
CSARGGGNTEAFF

SEQ ID NO: 103891 - protein, 13 aa, Homo sapiens
  CDR3 for alpha chain variable domain of TCR clone 51946 (TRAV29/DV5, TRAJ47)
CAASAEYGKKLVF

SEQ ID NO: 103892 - protein, 15 aa, Homo sapiens
  CDR3 for beta chain variable domain of TCR clone 51946 (TRBV7-9, TRBJ1-4)
CASSARTGGNEKLFF

SEQ ID NO: 103893 - protein, 14 aa, Homo sapiens
  CDR3 for alpha chain variable domain of TCR clone 51947 (TRAV16, TRAJ37)
CALDISGNTGKLIF

SEQ ID NO: 103894 - protein, 13 aa, Homo sapiens
  CDR3 for beta chain variable domain of TCR clone 51947 (TRBV27, TRBJ1-1)
CASSLSIGAEAFF

SEQ ID NO: 103895 - protein, 14 aa, Homo sapiens
  CDR3 for alpha chain variable domain of TCR clone 51948 (TRAV1-2, TRAJ16)
CAVNRFSGGQKLLF

SEQ ID NO: 103896 - protein, 16 aa, Homo sapiens
  CDR3 for beta chain variable domain of TCR clone 51948 (TRBV19, TRBJ2-1)
CASSEILAGDGNEQFF

SEQ ID NO: 103897 - protein, 12 aa, Homo sapiens
  CDR3 for alpha chain variable domain of TCR clone 51949 (TRAV17, TRAJ57)
CATGGGSEKLVF

SEQ ID NO: 103898 - protein, 12 aa, Homo sapiens
  CDR3 for beta chain variable domain of TCR clone 51949 (TRBV29-1, TRBJ2-2)
CSVDKYTGELFF

SEQ ID NO: 103899 - protein, 18 aa, Homo sapiens
  CDR3 for alpha chain variable domain of TCR clone 51950 (TRAV12-3, TRAJ52)
CAMSRTNAGGTSYGKLTF

SEQ ID NO: 103900 - protein, 17 aa, Homo sapiens
  CDR3 for beta chain variable domain of TCR clone 51950 (TRBV7-3, TRBJ2-3)
CASSLMKRMRGAYTQYF

SEQ ID NO: 103901 - protein, 15 aa, Homo sapiens
  CDR3 for alpha chain variable domain of TCR clone 51951 (TRAV2, TRAJ15)
CAVEDREQAGTALIF

SEQ ID NO: 103902 - protein, 13 aa, Homo sapiens
  CDR3 for beta chain variable domain of TCR clone 51951 (TRBV19, TRBJ2-7)
CASSTSGSYEQYF

SEQ ID NO: 103903 - protein, 12 aa, Homo sapiens
  CDR3 for alpha chain variable domain of TCR clone 51952 (TRAV26-1, TRAJ36)
RIVRVRADNLFF

SEQ ID NO: 103904 - protein, 13 aa, Homo sapiens
  CDR3 for beta chain variable domain of TCR clone 51952 (TRBV11-2, TRBJ2-5)
CASSRGPSETQYF

SEQ ID NO: 103905 - protein, 14 aa, Homo sapiens
  CDR3 for alpha chain variable domain of TCR clone 51953 (TRAV16, TRAJ26)
CALSSANYGQNFVF

SEQ ID NO: 103906 - protein, 16 aa, Homo sapiens
  CDR3 for beta chain variable domain of TCR clone 51953 (TRBV20-1, TRBJ1-4)
CSAPGQGLLTNDKLFF

SEQ ID NO: 103907 - protein, 12 aa, Homo sapiens
  CDR3 for alpha chain variable domain of TCR clone 51954 (TRAV13-1, TRAJ21)
CAAKEGFSKFYF

SEQ ID NO: 103908 - protein, 17 aa, Homo sapiens
  CDR3 for beta chain variable domain of TCR clone 51954 (TRBV19, TRBJ2-7)
CASSISFYDSYPYEQYF

SEQ ID NO: 103909 - protein, 12 aa, Homo sapiens
  CDR3 for alpha chain variable domain of TCR clone 51955 (TRAV12-3, TRAJ17)
CAMTLTGNKLTF

SEQ ID NO: 103910 - protein, 14 aa, Homo sapiens
  CDR3 for beta chain variable domain of TCR clone 51955 (TRBV5-7, TRBJ2-3)
CASSPGLEIDTQYF

SEQ ID NO: 103911 - protein, 15 aa, Homo sapiens
  CDR3 for alpha chain variable domain of TCR clone 51956 (TRAV16, TRAJ12)
CSKWPLRDSSYKLIF

SEQ ID NO: 103912 - protein, 12 aa, Homo sapiens
  CDR3 for beta chain variable domain of TCR clone 51956 (TRBV7-9, TRBJ1-1)
CASSLVRGEAFF

SEQ ID NO: 103913 - protein, 15 aa, Homo sapiens
  CDR3 for alpha chain variable domain of TCR clone 51957 (TRAV17, TRAJ4)
CATGTWSGGYNKLIF

SEQ ID NO: 103914 - protein, 13 aa, Homo sapiens
  CDR3 for beta chain variable domain of TCR clone 51957 (TRBV6-6, TRBJ2-7)
CASSPKHPAEQYF

SEQ ID NO: 103915 - protein, 16 aa, Homo sapiens
  CDR3 for alpha chain variable domain of TCR clone 51958 (TRAV30, TRAJ24)
CGTEVVDADSWGKFQF

SEQ ID NO: 103916 - protein, 12 aa, Homo sapiens
  CDR3 for beta chain variable domain of TCR clone 51958 (TRBV11-2, TRBJ2-2)
CASSLGGGELFF

SEQ ID NO: 103917 - protein, 16 aa, Homo sapiens
  CDR3 for alpha chain variable domain of TCR clone 51959 (TRAV3, TRAJ18)
CAVRDGRGSTLGRLYF

SEQ ID NO: 103918 - protein, 15 aa, Homo sapiens
  CDR3 for beta chain variable domain of TCR clone 51959 (TRBV7-9, TRBJ1-6)
CASSSPGRGNSPFHF

SEQ ID NO: 103919 - protein, 14 aa, Homo sapiens
  CDR3 for alpha chain variable domain of TCR clone 51960 (TRAV17, TRAJ57)
CATDPQGGSEKLVF

SEQ ID NO: 103920 - protein, 16 aa, Homo sapiens
  CDR3 for beta chain variable domain of TCR clone 51960 (TRBV20-1, TRBJ1-4)
CSATGQGLLTNEKLFF

SEQ ID NO: 103921 - protein, 15 aa, Homo sapiens
  CDR3 for alpha chain variable domain of TCR clone 51961 (TRAV26-1, TRAJ29)
CIVRVEGSGSTPLVL

SEQ ID NO: 103922 - protein, 14 aa, Homo sapiens
  CDR3 for beta chain variable domain of TCR clone 51961 (TRBV18, TRBJ2-5)
CASSPGVSQETQYF

SEQ ID NO: 103923 - protein, 11 aa, Homo sapiens
  CDR3 for alpha chain variable domain of TCR clone 51962 (TRAV35, TRAJ34)
CWARNTDKLIF

SEQ ID NO: 103924 - protein, 14 aa, Homo sapiens
  CDR3 for beta chain variable domain of TCR clone 51962 (TRBV5-1, TRBJ2-7)
CASSRGESLYEQYS

SEQ ID NO: 103925 - protein, 15 aa, Homo sapiens
  CDR3 for alpha chain variable domain of TCR clone 51963 (TRAV27, TRAJ17)
CRSTMIRAAGNKLTF

SEQ ID NO: 103926 - protein, 13 aa, Homo sapiens
  CDR3 for beta chain variable domain of TCR clone 51963 (TRBV18, TRBJ2-7)
CASQSGGGYEQYF

SEQ ID NO: 103927 - protein, 16 aa, Homo sapiens
  CDR3 for alpha chain variable domain of TCR clone 51964 (TRAV17, TRAJ52)
CATSNAGGTSYGKLTF

SEQ ID NO: 103928 - protein, 14 aa, Homo sapiens
  CDR3 for beta chain variable domain of TCR clone 51964 (TRBV6-3, TRBJ1-1)
CASSYQRRDTEAFF

SEQ ID NO: 103929 - protein, 17 aa, Homo sapiens
  CDR3 for alpha chain variable domain of TCR clone 51965 (TRAV3, TRAJ42)
CAVRDRDYGGSQGNLIF

SEQ ID NO: 103930 - protein, 15 aa, Homo sapiens
  CDR3 for beta chain variable domain of TCR clone 51965 (TRBV6-6, TRBJ2-7)
CASSYSYGGSYDQYF

SEQ ID NO: 103931 - protein, 13 aa, Homo sapiens
  CDR3 for alpha chain variable domain of TCR clone 51966 (TRAV35, TRAJ42)
CARFPGSQGNLIF

SEQ ID NO: 103932 - protein, 13 aa, Homo sapiens
  CDR3 for beta chain variable domain of TCR clone 51966 (TRBV29-1, TRBJ2-1)
CSVEGGRVNEQFF

SEQ ID NO: 103933 - protein, 14 aa, Homo sapiens
  CDR3 for alpha chain variable domain of TCR clone 51967 (TRAV1-2, TRAJ16)
CAVNRFSDGQKLLF

SEQ ID NO: 103934 - protein, 13 aa, Homo sapiens
  CDR3 for beta chain variable domain of TCR clone 51967 (TRBV20-1, TRBJ1-1)
CSARGGGNAEAFF

SEQ ID NO: 103935 - protein, 14 aa, Homo sapiens
  CDR3 for alpha chain variable domain of TCR clone 51968 (TRAV13-1, TRAJ9)
CAASALTGGFKTIF

SEQ ID NO: 103936 - protein, 14 aa, Homo sapiens
  CDR3 for beta chain variable domain of TCR clone 51968 (TRBV6-1, TRBJ1-3)
CASVQGGGGNTIYF

SEQ ID NO: 103937 - protein, 14 aa, Homo sapiens
  CDR3 for alpha chain variable domain of TCR clone 51969 (TRAV17, TRAJ39)
CATDPVRAGNILTF

SEQ ID NO: 103938 - protein, 15 aa, Homo sapiens
  CDR3 for beta chain variable domain of TCR clone 51969 (TRBV13, TRBJ1-5)
CASSFGQGGVQPQHF

SEQ ID NO: 103939 - protein, 17 aa, Homo sapiens
  CDR3 for alpha chain variable domain of TCR clone 51970 (TRAV3, TRAJ6)
CAVRDGPRAGGSYIPTF

SEQ ID NO: 103940 - protein, 20 aa, Homo sapiens
  CDR3 for beta chain variable domain of TCR clone 51970 (TRBV28, TRBJ2-1)
CASTPIGRSQGLAGGNEQFF

SEQ ID NO: 103941 - protein, 13 aa, Homo sapiens
  CDR3 for alpha chain variable domain of TCR clone 51971 (TRAV29/DV5, TRAJ54)
CAAHLQGAQKLVF

SEQ ID NO: 103942 - protein, 16 aa, Homo sapiens
  CDR3 for beta chain variable domain of TCR clone 51971 (TRBV27, TRBJ1-5)
CASSLSGGASNQPQHF

SEQ ID NO: 103943 - protein, 14 aa, Homo sapiens
  CDR3 for alpha chain variable domain of TCR clone 51972 (TRAV12-3, TRAJ10)
SHLPLTGGGNKLTF

SEQ ID NO: 103944 - protein, 14 aa, Homo sapiens
  CDR3 for beta chain variable domain of TCR clone 51972 (TRBV20-1, TRBJ2-1)
CSAQIGGSANEQFF

SEQ ID NO: 103945 - protein, 15 aa, Homo sapiens
  CDR3 for alpha chain variable domain of TCR clone 51973 (TRAV17, TRAJ57)
CATGPSQGGSEKLVF

SEQ ID NO: 103946 - protein, 15 aa, Homo sapiens
  CDR3 for beta chain variable domain of TCR clone 51973 (TRBV25-1, TRBJ1-4)
CARSPGDSTNEKLFF

SEQ ID NO: 103947 - protein, 13 aa, Homo sapiens
  CDR3 for alpha chain variable domain of TCR clone 51974 (TRAV1-2, TRAJ20)
CAVRDGNDYKLSF

SEQ ID NO: 103948 - protein, 14 aa, Homo sapiens
  CDR3 for beta chain variable domain of TCR clone 51974 (TRBV7-2, TRBJ2-3)
CPQLRGGGRDTQYF

SEQ ID NO: 103949 - protein, 12 aa, Homo sapiens
  CDR3 for alpha chain variable domain of TCR clone 51975 (TRAV17, TRAJ12)
CATLRSSYKLIF

SEQ ID NO: 103950 - protein, 15 aa, Homo sapiens
  CDR3 for beta chain variable domain of TCR clone 51975 (TRBV28, TRBJ2-1)
CASSIIAGGRSEQFF

SEQ ID NO: 103951 - protein, 15 aa, Homo sapiens
  CDR3 for alpha chain variable domain of TCR clone 51976 (TRAV27, TRAJ38)
CAARRNAGNNRKPIW

SEQ ID NO: 103952 - protein, 13 aa, Homo sapiens
  CDR3 for beta chain variable domain of TCR clone 51976 (TRBV28, TRBJ2-5)
CAGVSRGEETQYF

SEQ ID NO: 103953 - protein, 12 aa, Homo sapiens
  CDR3 for alpha chain variable domain of TCR clone 51977 (TRAV1-1, TRAJ39)
CAVPVVGNMLTF

SEQ ID NO: 103954 - protein, 13 aa, Homo sapiens
  CDR3 for beta chain variable domain of TCR clone 51977 (TRBV7-8, TRBJ1-2)
CASSAQSYYGYTF

SEQ ID NO: 103955 - protein, 15 aa, Homo sapiens
  CDR3 for alpha chain variable domain of TCR clone 51978 (TRAV38-2/DV8, TRAJ45)
CAYWDSGGGADGLTF

SEQ ID NO: 103956 - protein, 15 aa, Homo sapiens
  CDR3 for beta chain variable domain of TCR clone 51978 (TRBV7-9, TRBJ1-5)
CASSQGHQPNQPQHF

SEQ ID NO: 103957 - protein, 11 aa, Homo sapiens
  CDR3 for alpha chain variable domain of TCR clone 51979 (TRAV1-2, TRAJ20)
CAVANDYKLSF

SEQ ID NO: 103958 - protein, 18 aa, Homo sapiens
  CDR3 for beta chain variable domain of TCR clone 51979 (TRBV20-1, TRBJ2-6)
CSAETTPTHGSGASVLTF

SEQ ID NO: 103959 - protein, 11 aa, Homo sapiens
  CDR3 for alpha chain variable domain of TCR clone 51980 (TRAV2, TRAJ33)
CAVDSNYQLIW

SEQ ID NO: 103960 - protein, 15 aa, Homo sapiens
  CDR3 for beta chain variable domain of TCR clone 51980 (TRBV19, TRBJ1-2)
CTSSVGQVLNYGYTF

SEQ ID NO: 103961 - protein, 13 aa, Homo sapiens
  CDR3 for alpha chain variable domain of TCR clone 51981 (TRAV29/DV5, TRAJ31)
CAASRNNNSRLMF

SEQ ID NO: 103962 - protein, 12 aa, Homo sapiens
  CDR3 for beta chain variable domain of TCR clone 51981 (TRBV11-2, TRBJ2-1)
CASSPGNNEQFF

SEQ ID NO: 103963 - protein, 14 aa, Homo sapiens
  CDR3 for alpha chain variable domain of TCR clone 51982 (TRAV1-2, TRAJ8)
CAVREDTGFQKLVF

SEQ ID NO: 103964 - protein, 17 aa, Homo sapiens
  CDR3 for beta chain variable domain of TCR clone 51982 (TRBV4-1, TRBJ2-7)
CASSRDPLGVRGGEQYF

SEQ ID NO: 103965 - protein, 12 aa, Homo sapiens
  CDR3 for alpha chain variable domain of TCR clone 51983 (TRAV12-3, TRAJ17)
CAMTLTGNKLTF

SEQ ID NO: 103966 - protein, 17 aa, Homo sapiens
  CDR3 for beta chain variable domain of TCR clone 51983 (TRBV25-1, TRBJ2-7)
CASSDARVVFSSYEQYF

SEQ ID NO: 103967 - protein, 14 aa, Homo sapiens
  CDR3 for alpha chain variable domain of TCR clone 51984 (TRAV17, TRAJ31)
CATVLRNNNARLMF

SEQ ID NO: 103968 - protein, 14 aa, Homo sapiens
  CDR3 for beta chain variable domain of TCR clone 51984 (TRBV12-4, TRBJ2-5)
CASSLWQKQENQYF

SEQ ID NO: 103969 - protein, 15 aa, Homo sapiens
  CDR3 for alpha chain variable domain of TCR clone 51985 (TRAV21, TRAJ53)
CATLNSGGSNYNLTF

SEQ ID NO: 103970 - protein, 16 aa, Homo sapiens
  CDR3 for beta chain variable domain of TCR clone 51985 (TRBV9, TRBJ2-1)
CASSVGGGGNYNEQFF

SEQ ID NO: 103971 - protein, 15 aa, Homo sapiens
  CDR3 for alpha chain variable domain of TCR clone 51986 (TRAV29/DV5, TRAJ57)
CAASLLRGGSEKLVF

SEQ ID NO: 103972 - protein, 13 aa, Homo sapiens
  CDR3 for beta chain variable domain of TCR clone 51986 (TRBV7-3, TRBJ1-1)
CASSQDWGAEAFF

SEQ ID NO: 103973 - protein, 14 aa, Homo sapiens
  CDR3 for alpha chain variable domain of TCR clone 51987 (TRAV1-2, TRAJ16)
CAVNRFSDGQKLLF

SEQ ID NO: 103974 - protein, 12 aa, Homo sapiens
  CDR3 for beta chain variable domain of TCR clone 51987 (TRBV11-2, TRBJ2-2)
RASSLGGGELFF

SEQ ID NO: 103975 - protein, 14 aa, Homo sapiens
  CDR3 for alpha chain variable domain of TCR clone 51988 (TRAV8-4, TRAJ54)
CAVSEVLGAQKPVF

SEQ ID NO: 103976 - protein, 13 aa, Homo sapiens
  CDR3 for beta chain variable domain of TCR clone 51988 (TRBV27, TRBJ2-7)
CASSFVSSYEQYF

SEQ ID NO: 103977 - protein, 15 aa, Homo sapiens
  CDR3 for alpha chain variable domain of TCR clone 51989 (TRAV29/DV5, TRAJ53)
CAARYSGGSNYKLTF

SEQ ID NO: 103978 - protein, 15 aa, Homo sapiens
  CDR3 for beta chain variable domain of TCR clone 51989 (TRBV28, TRBJ2-1)
CASSLGTRLYNEQFL

SEQ ID NO: 103979 - protein, 14 aa, Homo sapiens
  CDR3 for alpha chain variable domain of TCR clone 51990 (TRAV12-1, TRAJ3)
CGAARYSSASKIIF

SEQ ID NO: 103980 - protein, 15 aa, Homo sapiens
  CDR3 for beta chain variable domain of TCR clone 51990 (TRBV7-2, TRBJ2-6)
CASSREGSGANVLTS

SEQ ID NO: 103981 - protein, 13 aa, Homo sapiens
  CDR3 for alpha chain variable domain of TCR clone 51991 (TRAV13-1, TRAJ21)
CAASIYNFNNFYF

SEQ ID NO: 103982 - protein, 13 aa, Homo sapiens
  CDR3 for beta chain variable domain of TCR clone 51991 (TRBV27, TRBJ1-4)
CASSLMGDEKLFF

SEQ ID NO: 103983 - protein, 13 aa, Homo sapiens
  CDR3 for alpha chain variable domain of TCR clone 51992 (TRAV21, TRAJ27)
CAARPGNAGKSTF

SEQ ID NO: 103984 - protein, 17 aa, Homo sapiens
  CDR3 for beta chain variable domain of TCR clone 51992 (TRBV13, TRBJ2-3)
CARSLSRVAGGRNTQYF

SEQ ID NO: 103985 - protein, 14 aa, Homo sapiens
  CDR3 for alpha chain variable domain of TCR clone 51993 (TRAV38-1, TRAJ40)
CALRPTSGTYKYIF

SEQ ID NO: 103986 - protein, 15 aa, Homo sapiens
  CDR3 for beta chain variable domain of TCR clone 51993 (TRBV5-1, TRBJ1-4)
CASSSWTGREEKLFF

SEQ ID NO: 103987 - protein, 13 aa, Homo sapiens
  CDR3 for alpha chain variable domain of TCR clone 51994 (TRAV21, TRAJ20)
CAVGLRVDYKLSF

SEQ ID NO: 103988 - protein, 13 aa, Homo sapiens
  CDR3 for beta chain variable domain of TCR clone 51994 (TRBV20-1, TRBJ2-7)
CSAQTGLSYEQYF

SEQ ID NO: 103989 - protein, 15 aa, Homo sapiens
  CDR3 for alpha chain variable domain of TCR clone 51995 (TRAV12-2, TRAJ53)
CAVNGGGGSNYKLTF

SEQ ID NO: 103990 - protein, 17 aa, Homo sapiens
  CDR3 for beta chain variable domain of TCR clone 51995 (TRBV7-3, TRBJ2-3)
CASSLMKRMWGADTQYF

SEQ ID NO: 103991 - protein, 15 aa, Homo sapiens
  CDR3 for alpha chain variable domain of TCR clone 51996 (TRAV13-1, TRAJ57)
CAASDTQGGSEKLVF

SEQ ID NO: 103992 - protein, 16 aa, Homo sapiens
  CDR3 for beta chain variable domain of TCR clone 51996 (TRBV19, TRBJ2-1)
CASSKAGPSSYNEQFF

SEQ ID NO: 103993 - protein, 15 aa, Homo sapiens
  CDR3 for alpha chain variable domain of TCR clone 51997 (TRAV26-1, TRAJ29)
CIVRVEGSGNTPLAF

SEQ ID NO: 103994 - protein, 15 aa, Homo sapiens
  CDR3 for beta chain variable domain of TCR clone 51997 (TRBV28, TRBJ2-5)
CASSPGQGSIETQYF

SEQ ID NO: 103995 - protein, 14 aa, Homo sapiens
  CDR3 for alpha chain variable domain of TCR clone 51998 (TRAV26-1, TRAJ21)
CIVRVGHNFNKFYF

SEQ ID NO: 103996 - protein, 14 aa, Homo sapiens
  CDR3 for beta chain variable domain of TCR clone 51998 (TRBV28, TRBJ2-3)
CASSWRGRADTQYF

SEQ ID NO: 103997 - protein, 22 aa, Homo sapiens
  CDR3 for alpha chain variable domain of TCR clone 51999 (TRAV12-1, )
CVVLRGIPDIQNPDPAVYQLRD

SEQ ID NO: 103998 - protein, 14 aa, Homo sapiens
  CDR3 for beta chain variable domain of TCR clone 51999 (TRBV7-9, TRBJ2-5)
CASSLDTAQETQYF

SEQ ID NO: 103999 - protein, 16 aa, Homo sapiens
  CDR3 for alpha chain variable domain of TCR clone 52000 (TRAV26-1, TRAJ53)
CIVRVAMGGSNYKLTF

SEQ ID NO: 104000 - protein, 12 aa, Homo sapiens
  CDR3 for beta chain variable domain of TCR clone 52000 (TRBV7-9, TRBJ1-5)
CASSPQGQPQNF

SEQ ID NO: 104001 - protein, 14 aa, Homo sapiens
  CDR3 for alpha chain variable domain of TCR clone 52001 (TRAV21, TRAJ21)
CAVKGFGNFNKFYF

SEQ ID NO: 104002 - protein, 13 aa, Homo sapiens
  CDR3 for beta chain variable domain of TCR clone 52001 (TRBV18, TRBJ1-1)
CASSPEAKPEAFF

SEQ ID NO: 104003 - protein, 12 aa, Homo sapiens
  CDR3 for alpha chain variable domain of TCR clone 52002 (TRAV17, TRAJ20)
CATDSKDYKLSF

SEQ ID NO: 104004 - protein, 17 aa, Homo sapiens
  CDR3 for beta chain variable domain of TCR clone 52002 (TRBV5-1, TRBJ2-2)
CASSLAGLSGGTGELFF

SEQ ID NO: 104005 - protein, 13 aa, Homo sapiens
  CDR3 for alpha chain variable domain of TCR clone 52003 (TRAV12-2, TRAJ18)
CAVRGSTLGRLYF

SEQ ID NO: 104006 - protein, 16 aa, Homo sapiens
  CDR3 for beta chain variable domain of TCR clone 52003 (TRBV13, TRBJ2-2)
CASSPRTGEHTGELFF

SEQ ID NO: 104007 - protein, 14 aa, Homo sapiens
  CDR3 for alpha chain variable domain of TCR clone 52004 (TRAV26-1, TRAJ49)
CIVRLTNTGNQFSF

SEQ ID NO: 104008 - protein, 13 aa, Homo sapiens
  CDR3 for beta chain variable domain of TCR clone 52004 (TRBV4-1, TRBJ2-7)
CASSQGQAYEQYF

SEQ ID NO: 104009 - protein, 14 aa, Homo sapiens
  CDR3 for alpha chain variable domain of TCR clone 52005 (TRAV1-2, TRAJ16)
CAVNRFSDGQKLLF

SEQ ID NO: 104010 - protein, 16 aa, Homo sapiens
  CDR3 for beta chain variable domain of TCR clone 52005 (TRBV20-1, TRBJ1-4)
CSAPGQGLLTDEKLFF

SEQ ID NO: 104011 - protein, 18 aa, Homo sapiens
  CDR3 for alpha chain variable domain of TCR clone 52006 (TRAV9-2, TRAJ52)
CALSRHNAGGTSYGKLTF

SEQ ID NO: 104012 - protein, 14 aa, Homo sapiens
  CDR3 for beta chain variable domain of TCR clone 52006 (TRBV11-2, TRBJ2-5)
CASSRTGGIETQYF

SEQ ID NO: 104013 - protein, 13 aa, Homo sapiens
  CDR3 for alpha chain variable domain of TCR clone 52007 (TRAV17, TRAJ40)
CAGALGGTYKYIF

SEQ ID NO: 104014 - protein, 16 aa, Homo sapiens
  CDR3 for beta chain variable domain of TCR clone 52007 (TRBV7-2, TRBJ1-4)
RASSLAPGRRDEKLFF

SEQ ID NO: 104015 - protein, 12 aa, Homo sapiens
  CDR3 for alpha chain variable domain of TCR clone 52008 (TRAV13-1, TRAJ9)
RASHTGGFKTIF

SEQ ID NO: 104016 - protein, 18 aa, Homo sapiens
  CDR3 for beta chain variable domain of TCR clone 52008 (TRBV11-2, TRBJ2-3)
CASSLGGASRGAPNTQYF

SEQ ID NO: 104017 - protein, 14 aa, Homo sapiens
  CDR3 for alpha chain variable domain of TCR clone 52009 (TRAV36/DV7, TRAJ44)
CCGANTGTASKLTF

SEQ ID NO: 104018 - protein, 16 aa, Homo sapiens
  CDR3 for beta chain variable domain of TCR clone 52009 (TRBV7-9, TRBJ1-2)
CASSLGFSSGEGGYTF

SEQ ID NO: 104019 - protein, 15 aa, Homo sapiens
  CDR3 for alpha chain variable domain of TCR clone 52010 (TRAV8-3, TRAJ45)
CASSYPGGGADGLTF

SEQ ID NO: 104020 - protein, 15 aa, Homo sapiens
  CDR3 for beta chain variable domain of TCR clone 52010 (TRBV27, TRBJ1-4)
CASSPRHATNEKLFF

SEQ ID NO: 104021 - protein, 15 aa, Homo sapiens
  CDR3 for alpha chain variable domain of TCR clone 52011 (TRAV8-3, TRAJ45)
CASSYSGGGADGLTL

SEQ ID NO: 104022 - protein, 17 aa, Homo sapiens
  CDR3 for beta chain variable domain of TCR clone 52011 (TRBV7-8, TRBJ1-2)
CASSLRPLQGHLYGYTF

SEQ ID NO: 104023 - protein, 13 aa, Homo sapiens
  CDR3 for alpha chain variable domain of TCR clone 52012 (TRAV3, TRAJ21)
CAVREPDFNKFYF

SEQ ID NO: 104024 - protein, 14 aa, Homo sapiens
  CDR3 for beta chain variable domain of TCR clone 52012 (TRBV7-3, TRBJ1-1)
CASSLKGGNTEAFF

SEQ ID NO: 104025 - protein, 13 aa, Homo sapiens
  CDR3 for alpha chain variable domain of TCR clone 52013 (TRAV20, TRAJ37)
CAGCSSNTGKLIF

SEQ ID NO: 104026 - protein, 15 aa, Homo sapiens
  CDR3 for beta chain variable domain of TCR clone 52013 (TRBV5-1, TRBJ2-3)
CASSVTSGSTDTQYF

SEQ ID NO: 104027 - protein, 10 aa, Homo sapiens
  CDR3 for alpha chain variable domain of TCR clone 52014 (TRAV23/DV6, TRAJ45)
TGGGADGLTF

SEQ ID NO: 104028 - protein, 17 aa, Homo sapiens
  CDR3 for beta chain variable domain of TCR clone 52014 (TRBV11-2, TRBJ2-1)
CASSLYPPGVEYNEQFF

SEQ ID NO: 104029 - protein, 17 aa, Homo sapiens
  CDR3 for alpha chain variable domain of TCR clone 52015 (TRAV8-6, TRAJ8)
CAVKEGIENAGFQKLVF

SEQ ID NO: 104030 - protein, 12 aa, Homo sapiens
  CDR3 for beta chain variable domain of TCR clone 52015 (TRBV19, TRBJ1-4)
CASKDWPGGLFF

SEQ ID NO: 104031 - protein, 19 aa, Homo sapiens
  CDR3 for alpha chain variable domain of TCR clone 52016 (TRAV16, TRAJ26)
CALTRWSESCLWSRNQIVR

SEQ ID NO: 104032 - protein, 15 aa, Homo sapiens
  CDR3 for beta chain variable domain of TCR clone 52016 (TRBV6-3, TRBJ2-7)
CASSSPRTVFYEQYF

SEQ ID NO: 104033 - protein, 14 aa, Homo sapiens
  CDR3 for alpha chain variable domain of TCR clone 52017 (TRAV12-2, TRAJ9)
CAVDMEGGGFKTIF

SEQ ID NO: 104034 - protein, 14 aa, Homo sapiens
  CDR3 for beta chain variable domain of TCR clone 52017 (TRBV2, TRBJ2-5)
CASSEVLAQETQYF

SEQ ID NO: 104035 - protein, 12 aa, Homo sapiens
  CDR3 for alpha chain variable domain of TCR clone 52018 (TRAV21, TRAJ33)
CAKMDSNYQLIW

SEQ ID NO: 104036 - protein, 14 aa, Homo sapiens
  CDR3 for beta chain variable domain of TCR clone 52018 (TRBV2, TRBJ2-7)
CASSLTSGGYEQYS

SEQ ID NO: 104037 - protein, 12 aa, Homo sapiens
  CDR3 for alpha chain variable domain of TCR clone 52019 (TRAV13-1, TRAJ49)
CAASIRSNKFYF

SEQ ID NO: 104038 - protein, 14 aa, Homo sapiens
  CDR3 for beta chain variable domain of TCR clone 52019 (TRBV7-2, TRBJ2-1)
CASSPGLAGNEQFF

SEQ ID NO: 104039 - protein, 13 aa, Homo sapiens
  CDR3 for alpha chain variable domain of TCR clone 52020 (TRAV38-2/DV8, TRAJ56)
CTYQSRANSKLTF

SEQ ID NO: 104040 - protein, 16 aa, Homo sapiens
  CDR3 for beta chain variable domain of TCR clone 52020 (TRBV28, TRBJ1-1)
CASSSGGQPVATEAFF

SEQ ID NO: 104041 - protein, 14 aa, Homo sapiens
  CDR3 for alpha chain variable domain of TCR clone 52021 (TRAV38-1, TRAJ29)
CAFITPSGNTPLAF

SEQ ID NO: 104042 - protein, 15 aa, Homo sapiens
  CDR3 for beta chain variable domain of TCR clone 52021 (TRBV5-1, TRBJ2-1)
CASSPPRAPYNEQFF

SEQ ID NO: 104043 - protein, 14 aa, Homo sapiens
  CDR3 for alpha chain variable domain of TCR clone 52022 (TRAV17, TRAJ57)
CATDPQGGSEKLVF

SEQ ID NO: 104044 - protein, 13 aa, Homo sapiens
  CDR3 for beta chain variable domain of TCR clone 52022 (TRBV7-3, TRBJ1-2)
CASSLKRGYGYTF

SEQ ID NO: 104045 - protein, 14 aa, Homo sapiens
  CDR3 for alpha chain variable domain of TCR clone 52023 (TRAV17, TRAJ57)
CATDASGGSEKLVL

SEQ ID NO: 104046 - protein, 14 aa, Homo sapiens
  CDR3 for beta chain variable domain of TCR clone 52023 (TRBV4-2, TRBJ2-1)
CASGLDRAYNEQFF

SEQ ID NO: 104047 - protein, 13 aa, Homo sapiens
  CDR3 for alpha chain variable domain of TCR clone 52024 (TRAV21, TRAJ27)
CAARPGNAGKSTF

SEQ ID NO: 104048 - protein, 14 aa, Homo sapiens
  CDR3 for beta chain variable domain of TCR clone 52024 (TRBV7-6, TRBJ2-3)
CASSLGTVTDTQSF

SEQ ID NO: 104049 - protein, 11 aa, Homo sapiens
  CDR3 for alpha chain variable domain of TCR clone 52025 (TRAV12-2, TRAJ31)
CAILNNARLMF

SEQ ID NO: 104050 - protein, 16 aa, Homo sapiens
  CDR3 for beta chain variable domain of TCR clone 52025 (TRBV13, TRBJ2-2)
CASSPRTGEHTGELFI

SEQ ID NO: 104051 - protein, 17 aa, Homo sapiens
  CDR3 for alpha chain variable domain of TCR clone 52026 (TRAV8-6, TRAJ58)
CAVSSWVGETSGSRLTF

SEQ ID NO: 104052 - protein, 14 aa, Homo sapiens
  CDR3 for beta chain variable domain of TCR clone 52026 (TRBV4-2, TRBJ2-3)
CASRETRAPGMQYF

SEQ ID NO: 104053 - protein, 19 aa, Homo sapiens
  CDR3 for alpha chain variable domain of TCR clone 52027 (TRAV26-1, TRAJ52)
CIVRAHRNAGGTSYGKLTF

SEQ ID NO: 104054 - protein, 15 aa, Homo sapiens
  CDR3 for beta chain variable domain of TCR clone 52027 (TRBV29-1, TRBJ2-1)
CSGSDRKSSYNEQFF

SEQ ID NO: 104055 - protein, 14 aa, Homo sapiens
  CDR3 for alpha chain variable domain of TCR clone 52028 (TRAV12-2, TRAJ24)
CAVTPADSCGKLQF

SEQ ID NO: 104056 - protein, 12 aa, Homo sapiens
  CDR3 for beta chain variable domain of TCR clone 52028 (TRBV3-1, TRBJ2-1)
CASSQGSSGQFF

SEQ ID NO: 104057 - protein, 11 aa, Homo sapiens
  CDR3 for alpha chain variable domain of TCR clone 52029 (TRAV12-3, TRAJ49)
CAANTGNQVYF

SEQ ID NO: 104058 - protein, 12 aa, Homo sapiens
  CDR3 for beta chain variable domain of TCR clone 52029 (TRBV6-3, TRBJ2-7)
CASSEPGFEQYF

SEQ ID NO: 104059 - protein, 14 aa, Homo sapiens
  CDR3 for alpha chain variable domain of TCR clone 52030 (TRAV1-2, TRAJ8)
CAVREDTGFQKLVF

SEQ ID NO: 104060 - protein, 16 aa, Homo sapiens
  CDR3 for beta chain variable domain of TCR clone 52030 (TRBV11-2, TRBJ1-2)
CASSLDTGGADYGYTF

SEQ ID NO: 104061 - protein, 16 aa, Homo sapiens
  CDR3 for alpha chain variable domain of TCR clone 52031 (TRAV3, TRAJ10)
CAVRDMYAGGGNKLTF

SEQ ID NO: 104062 - protein, 16 aa, Homo sapiens
  CDR3 for beta chain variable domain of TCR clone 52031 (TRBV6-3, TRBJ1-2)
CASSYSRRASNYGYTF

SEQ ID NO: 104063 - protein, 11 aa, Homo sapiens
  CDR3 for alpha chain variable domain of TCR clone 52032 (TRAV3, TRAJ13)
CAVTSYQKVTF

SEQ ID NO: 104064 - protein, 15 aa, Homo sapiens
  CDR3 for beta chain variable domain of TCR clone 52032 (TRBV7-9, TRBJ2-7)
CASSSSGLAVCEQYF

SEQ ID NO: 104065 - protein, 14 aa, Homo sapiens
  CDR3 for alpha chain variable domain of TCR clone 52033 (TRAV21, TRAJ45)
CAVSSGGGADGLTF

SEQ ID NO: 104066 - protein, 17 aa, Homo sapiens
  CDR3 for beta chain variable domain of TCR clone 52033 (TRBV7-3, TRBJ2-3)
CASSLMKRMRGADTQYF

SEQ ID NO: 104067 - protein, 23 aa, Homo sapiens
  CDR3 for alpha chain variable domain of TCR clone 52034 (TRAV26-1, TRAJ38)
CIADNAGNNHIQNPDPTVYQLRD

SEQ ID NO: 104068 - protein, 13 aa, Homo sapiens
  CDR3 for beta chain variable domain of TCR clone 52034 (TRBV20-1, TRBJ1-1)
CSARGGGNTEAFF

SEQ ID NO: 104069 - protein, 13 aa, Homo sapiens
  CDR3 for alpha chain variable domain of TCR clone 52035 (TRAV3, TRAJ20)
CAVRSLNDYKLSF

SEQ ID NO: 104070 - protein, 14 aa, Homo sapiens
  CDR3 for beta chain variable domain of TCR clone 52035 (TRBV4-2, TRBJ2-1)
CASGLDRAYNEQFF

SEQ ID NO: 104071 - protein, 11 aa, Homo sapiens
  CDR3 for alpha chain variable domain of TCR clone 52036 (TRAV8-6, TRAJ42)
RGGGSQGNLIF

SEQ ID NO: 104072 - protein, 13 aa, Homo sapiens
  CDR3 for beta chain variable domain of TCR clone 52036 (TRBV7-3, TRBJ1-1)
CASSQDWGAEAFF

SEQ ID NO: 104073 - protein, 14 aa, Homo sapiens
  CDR3 for alpha chain variable domain of TCR clone 52037 (TRAV12-2, TRAJ24)
CAVTPADGWGKSQF

SEQ ID NO: 104074 - protein, 12 aa, Homo sapiens
  CDR3 for beta chain variable domain of TCR clone 52037 (TRBV3-1, TRBJ2-1)
CASSQGSSGQFF

SEQ ID NO: 104075 - protein, 15 aa, Homo sapiens
  CDR3 for alpha chain variable domain of TCR clone 52038 (TRAV3, TRAJ20)
CAVRDIKLSDYKLSF

SEQ ID NO: 104076 - protein, 15 aa, Homo sapiens
  CDR3 for beta chain variable domain of TCR clone 52038 (TRBV7-9, TRBJ1-6)
CASSSPGRGNTPLHF

SEQ ID NO: 104077 - protein, 15 aa, Homo sapiens
  CDR3 for alpha chain variable domain of TCR clone 52039 (TRAV17, TRAJ57)
CATGPSLGGSEKLVF

SEQ ID NO: 104078 - protein, 16 aa, Homo sapiens
  CDR3 for beta chain variable domain of TCR clone 52039 (TRBV12-4, TRBJ1-5)
CASSRPVGGSNQPQHF

SEQ ID NO: 104079 - protein, 14 aa, Homo sapiens
  CDR3 for alpha chain variable domain of TCR clone 52040 (TRAV13-1, TRAJ6)
CAASITGGSYIPTF

SEQ ID NO: 104080 - protein, 13 aa, Homo sapiens
  CDR3 for beta chain variable domain of TCR clone 52040 (TRBV4-2, TRBJ1-1)
CASSQAGNTEAFF

SEQ ID NO: 104081 - protein, 15 aa, Homo sapiens
  CDR3 for alpha chain variable domain of TCR clone 52041 (TRAV26-1, TRAJ42)
CIVRVKGGSQGNLIF

SEQ ID NO: 104082 - protein, 13 aa, Homo sapiens
  CDR3 for beta chain variable domain of TCR clone 52041 (TRBV19, TRBJ2-2)
CHHGTCEHRGAVF

SEQ ID NO: 104083 - protein, 18 aa, Homo sapiens
  CDR3 for alpha chain variable domain of TCR clone 52042 (TRAV13-1, TRAJ52)
CAAIKRSAGGTSYGKLTF

SEQ ID NO: 104084 - protein, 13 aa, Homo sapiens
  CDR3 for beta chain variable domain of TCR clone 52042 (TRBV12-4, TRBJ1-2)
CASSLRQGKGYTF

SEQ ID NO: 104085 - protein, 14 aa, Homo sapiens
  CDR3 for alpha chain variable domain of TCR clone 52043 (TRAV21, TRAJ35)
CAVMPIGFGNVLHC

SEQ ID NO: 104086 - protein, 15 aa, Homo sapiens
  CDR3 for beta chain variable domain of TCR clone 52043 (TRBV20-1, TRBJ2-7)
CSARDRVSGMDEQYF

SEQ ID NO: 104087 - protein, 15 aa, Homo sapiens
  CDR3 for alpha chain variable domain of TCR clone 52044 (TRAV26-1, TRAJ48)
CIVRVGDFGNEKLTF

SEQ ID NO: 104088 - protein, 16 aa, Homo sapiens
  CDR3 for beta chain variable domain of TCR clone 52044 (TRBV4-1, TRBJ2-3)
CASSHRAGGLTDTQYF

SEQ ID NO: 104089 - protein, 14 aa, Homo sapiens
  CDR3 for alpha chain variable domain of TCR clone 52045 (TRAV1-2, TRAJ8)
CAVREDTGFQKLVF

SEQ ID NO: 104090 - protein, 14 aa, Homo sapiens
  CDR3 for beta chain variable domain of TCR clone 52045 (TRBV25-1, TRBJ1-1)
FASTHLGGNTEAFF

SEQ ID NO: 104091 - protein, 15 aa, Homo sapiens
  CDR3 for alpha chain variable domain of TCR clone 52046 (TRAV25, TRAJ52)
CAGRPGGTSYGKLTF

SEQ ID NO: 104092 - protein, 13 aa, Homo sapiens
  CDR3 for beta chain variable domain of TCR clone 52046 (TRBV5-1, TRBJ1-5)
CASSLAQDQPQHF

SEQ ID NO: 104093 - protein, 16 aa, Homo sapiens
  CDR3 for alpha chain variable domain of TCR clone 52047 (TRAV3, TRAJ10)
CAVRGMRAGGGNKLTF

SEQ ID NO: 104094 - protein, 19 aa, Homo sapiens
  CDR3 for beta chain variable domain of TCR clone 52047 (TRBV6-3, TRBJ1-2)
CASSYSKGRTGPPNYGYTF

SEQ ID NO: 104095 - protein, 12 aa, Homo sapiens
  CDR3 for alpha chain variable domain of TCR clone 52048 (TRAV12-2, TRAJ21)
CAVRYNFNKFYF

SEQ ID NO: 104096 - protein, 13 aa, Homo sapiens
  CDR3 for beta chain variable domain of TCR clone 52048 (TRBV4-1, TRBJ2-1)
CASSQAGGDEQFF

SEQ ID NO: 104097 - protein, 11 aa, Homo sapiens
  CDR3 for alpha chain variable domain of TCR clone 52049 (TRAV4, TRAJ23)
RLVAPGGKLIF

SEQ ID NO: 104098 - protein, 15 aa, Homo sapiens
  CDR3 for beta chain variable domain of TCR clone 52049 (TRBV7-2, TRBJ2-1)
CASSFQADEYNEQFF

SEQ ID NO: 104099 - protein, 12 aa, Homo sapiens
  CDR3 for alpha chain variable domain of TCR clone 52050 (TRAV17, TRAJ39)
CATGAAGNMLTF

SEQ ID NO: 104100 - protein, 14 aa, Homo sapiens
  CDR3 for beta chain variable domain of TCR clone 52050 (TRBV7-9, TRBJ1-2)
CASSRQRANYGYTF

SEQ ID NO: 104101 - protein, 14 aa, Homo sapiens
  CDR3 for alpha chain variable domain of TCR clone 52051 (TRAV29/DV5, TRAJ45)
CAASFRGGADGLTF

SEQ ID NO: 104102 - protein, 11 aa, Homo sapiens
  CDR3 for beta chain variable domain of TCR clone 52051 (TRBV11-2, TRBJ2-2)
CASSLPGELFF

SEQ ID NO: 104103 - protein, 12 aa, Homo sapiens
  CDR3 for alpha chain variable domain of TCR clone 52052 (TRAV12-3, TRAJ20)
CAMVRGDYQLSF

SEQ ID NO: 104104 - protein, 16 aa, Homo sapiens
  CDR3 for beta chain variable domain of TCR clone 52052 (TRBV6-5, TRBJ2-1)
CASSYSLSGGYNEQFF

SEQ ID NO: 104105 - protein, 13 aa, Homo sapiens
  CDR3 for alpha chain variable domain of TCR clone 52053 (TRAV9-2, TRAJ49)
CALRHFAGNQFYF

SEQ ID NO: 104106 - protein, 16 aa, Homo sapiens
  CDR3 for beta chain variable domain of TCR clone 52053 (TRBV7-9, TRBJ2-1)
CASSPRLGSSYNEQFF

SEQ ID NO: 104107 - protein, 12 aa, Homo sapiens
  CDR3 for alpha chain variable domain of TCR clone 52054 (TRAV12-2, TRAJ16)
CAVNPDGQKLLF

SEQ ID NO: 104108 - protein, 12 aa, Homo sapiens
  CDR3 for beta chain variable domain of TCR clone 52054 (TRBV5-7, TRBJ2-7)
CASSVQGGEQYF

SEQ ID NO: 104109 - protein, 14 aa, Homo sapiens
  CDR3 for alpha chain variable domain of TCR clone 52055 (TRAV1-2, TRAJ6)
CAVSLSGGSYIPTF

SEQ ID NO: 104110 - protein, 15 aa, Homo sapiens
  CDR3 for beta chain variable domain of TCR clone 52055 (TRBV28, TRBJ2-7)
CASSPGGRGFYEQYS

SEQ ID NO: 104111 - protein, 14 aa, Homo sapiens
  CDR3 for alpha chain variable domain of TCR clone 52056 (TRAV17, TRAJ31)
CATDAEDNNARLMF

SEQ ID NO: 104112 - protein, 13 aa, Homo sapiens
  CDR3 for beta chain variable domain of TCR clone 52056 (TRBV20-1, TRBJ2-3)
RSARLAGTDTQYF

SEQ ID NO: 104113 - protein, 11 aa, Homo sapiens
  CDR3 for alpha chain variable domain of TCR clone 52057 (TRAV21, TRAJ34)
CAVTNTDKLIF

SEQ ID NO: 104114 - protein, 13 aa, Homo sapiens
  CDR3 for beta chain variable domain of TCR clone 52057 (TRBV19, TRBJ1-2)
CASSVPGQDGYTF

SEQ ID NO: 104115 - protein, 12 aa, Homo sapiens
  CDR3 for alpha chain variable domain of TCR clone 52058 (TRAV27, TRAJ42)
CAGGGSQGNLIF

SEQ ID NO: 104116 - protein, 13 aa, Homo sapiens
  CDR3 for beta chain variable domain of TCR clone 52058 (TRBV19, TRBJ2-7)
CASSIRSPYEQYF

SEQ ID NO: 104117 - protein, 11 aa, Homo sapiens
  CDR3 for alpha chain variable domain of TCR clone 52059 (TRAV4, TRAJ23)
CLVAPGGKLIF

SEQ ID NO: 104118 - protein, 15 aa, Homo sapiens
  CDR3 for beta chain variable domain of TCR clone 52059 (TRBV7-2, TRBJ2-1)
CASCFQADEYNEQFF

SEQ ID NO: 104119 - protein, 15 aa, Homo sapiens
  CDR3 for alpha chain variable domain of TCR clone 52060 (TRAV8-3, TRAJ41)
CAVGSNSNSGYALNF

SEQ ID NO: 104120 - protein, 13 aa, Homo sapiens
  CDR3 for beta chain variable domain of TCR clone 52060 (TRBV7-9, TRBJ1-2)
CASSLKQNYGYTF

SEQ ID NO: 104121 - protein, 12 aa, Homo sapiens
  CDR3 for alpha chain variable domain of TCR clone 52061 (TRAV13-1, TRAJ36)
WRGGAGANNLFF

SEQ ID NO: 104122 - protein, 16 aa, Homo sapiens
  CDR3 for beta chain variable domain of TCR clone 52061 (TRBV7-9, TRBJ2-5)
CASRLEIGTQKETQYF

SEQ ID NO: 104123 - protein, 13 aa, Homo sapiens
  CDR3 for alpha chain variable domain of TCR clone 52062 (TRAV20, TRAJ31)
CAVQAIGCARLMF

SEQ ID NO: 104124 - protein, 14 aa, Homo sapiens
  CDR3 for beta chain variable domain of TCR clone 52062 (TRBV2, TRBJ1-5)
CASSGTVSNQPQHF

SEQ ID NO: 104125 - protein, 17 aa, Homo sapiens
  CDR3 for alpha chain variable domain of TCR clone 52063 (TRAV8-6, TRAJ58)
CAVSSWVGETSGSRLTF

SEQ ID NO: 104126 - protein, 11 aa, Homo sapiens
  CDR3 for beta chain variable domain of TCR clone 52063 (TRBV29-1, TRBJ2-5)
CSEDRTGTQYF

SEQ ID NO: 104127 - protein, 15 aa, Homo sapiens
  CDR3 for alpha chain variable domain of TCR clone 52064 (TRAV2, TRAJ22)
CAVPSRGGSARQLTF

SEQ ID NO: 104128 - protein, 11 aa, Homo sapiens
  CDR3 for beta chain variable domain of TCR clone 52064 (TRBV27, TRBJ2-3)
CASGLGDTQYF

SEQ ID NO: 104129 - protein, 12 aa, Homo sapiens
  CDR3 for alpha chain variable domain of TCR clone 52065 (TRAV12-2, TRAJ10)
WGVTGGGNKLTF

SEQ ID NO: 104130 - protein, 14 aa, Homo sapiens
  CDR3 for beta chain variable domain of TCR clone 52065 (TRBV7-2, TRBJ1-1)
CASSFLTGTTEAFF

SEQ ID NO: 104131 - protein, 11 aa, Homo sapiens
  CDR3 for alpha chain variable domain of TCR clone 52066 (TRAV17, TRAJ36)
CAPTGANNHFF

SEQ ID NO: 104132 - protein, 12 aa, Homo sapiens
  CDR3 for beta chain variable domain of TCR clone 52066 (TRBV29-1, TRBJ2-3)
CSVTGGADTQYF

SEQ ID NO: 104133 - protein, 14 aa, Homo sapiens
  CDR3 for alpha chain variable domain of TCR clone 52067 (TRAV9-2, TRAJ39)
CALYIYNAGNMLTF

SEQ ID NO: 104134 - protein, 13 aa, Homo sapiens
  CDR3 for beta chain variable domain of TCR clone 52067 (TRBV2, TRBJ2-7)
CASSVGGSGEQYF

SEQ ID NO: 104135 - protein, 12 aa, Homo sapiens
  CDR3 for alpha chain variable domain of TCR clone 52068 (TRAV12-3, TRAJ17)
CAMTLTGNNLTF

SEQ ID NO: 104136 - protein, 15 aa, Homo sapiens
  CDR3 for beta chain variable domain of TCR clone 52068 (TRBV20-1, TRBJ2-7)
CSARYRVSGMDEQYF

SEQ ID NO: 104137 - protein, 12 aa, Homo sapiens
  CDR3 for alpha chain variable domain of TCR clone 52069 (TRAV8-4, TRAJ37)
CAKSSNTGKLIF

SEQ ID NO: 104138 - protein, 15 aa, Homo sapiens
  CDR3 for beta chain variable domain of TCR clone 52069 (TRBV5-1, TRBJ2-3)
CASSYTSGSADTQYF

SEQ ID NO: 104139 - protein, 13 aa, Homo sapiens
  CDR3 for alpha chain variable domain of TCR clone 52070 (TRAV3, TRAJ21)
CAVREPDFSKFYF

SEQ ID NO: 104140 - protein, 15 aa, Homo sapiens
  CDR3 for beta chain variable domain of TCR clone 52070 (TRBV9, TRBJ1-6)
CASSVAGTGDSPLHF

SEQ ID NO: 104141 - protein, 10 aa, Homo sapiens
  CDR3 for alpha chain variable domain of TCR clone 52071 (TRAV12-1, TRAJ37)
ARGNTGKLIF

SEQ ID NO: 104142 - protein, 15 aa, Homo sapiens
  CDR3 for beta chain variable domain of TCR clone 52071 (TRBV7-2, TRBJ2-3)
CASSLEQGGTDTQYL

SEQ ID NO: 104143 - protein, 11 aa, Homo sapiens
  CDR3 for alpha chain variable domain of TCR clone 52072 (TRAV2, TRAJ13)
CASGGYQKVTF

SEQ ID NO: 104144 - protein, 14 aa, Homo sapiens
  CDR3 for beta chain variable domain of TCR clone 52072 (TRBV12-4, TRBJ1-2)
CASSSSAAGSSYTF

SEQ ID NO: 104145 - protein, 17 aa, Homo sapiens
  CDR3 for alpha chain variable domain of TCR clone 52073 (TRAV3, TRAJ6)
CAVRDGPRAGGSYIPTF

SEQ ID NO: 104146 - protein, 14 aa, Homo sapiens
  CDR3 for beta chain variable domain of TCR clone 52073 (TRBV24-1, TRBJ1-1)
CATSIPRGDTEAFF

SEQ ID NO: 104147 - protein, 14 aa, Homo sapiens
  CDR3 for alpha chain variable domain of TCR clone 52074 (TRAV13-1, TRAJ48)
CAASTDFGNEKLTF

SEQ ID NO: 104148 - protein, 15 aa, Homo sapiens
  CDR3 for beta chain variable domain of TCR clone 52074 (TRBV10-2, TRBJ2-5)
CASKPEDRRQGTQYF

SEQ ID NO: 104149 - protein, 16 aa, Homo sapiens
  CDR3 for alpha chain variable domain of TCR clone 52075 (TRAV27, TRAJ13)
CAGAKSDSGGYQKVTF

SEQ ID NO: 104150 - protein, 14 aa, Homo sapiens
  CDR3 for beta chain variable domain of TCR clone 52075 (TRBV7-8, TRBJ2-3)
CASSLEAGTDTQYF

SEQ ID NO: 104151 - protein, 14 aa, Homo sapiens
  CDR3 for alpha chain variable domain of TCR clone 52076 (TRAV26-1, TRAJ21)
CIVRPPYNFNKFYF

SEQ ID NO: 104152 - protein, 16 aa, Homo sapiens
  CDR3 for beta chain variable domain of TCR clone 52076 (TRBV20-1, TRBJ1-1)
CSARDRTLSMNTEAFF

SEQ ID NO: 104153 - protein, 14 aa, Homo sapiens
  CDR3 for alpha chain variable domain of TCR clone 52077 (TRAV16, TRAJ26)
CITLLSAYGQNFVF

SEQ ID NO: 104154 - protein, 14 aa, Homo sapiens
  CDR3 for beta chain variable domain of TCR clone 52077 (TRBV7-2, TRBJ2-7)
CASRSQGAAYEQYF

SEQ ID NO: 104155 - protein, 14 aa, Homo sapiens
  CDR3 for alpha chain variable domain of TCR clone 52078 (TRAV1-2, TRAJ8)
CAVREDTGFQKLVF

SEQ ID NO: 104156 - protein, 14 aa, Homo sapiens
  CDR3 for beta chain variable domain of TCR clone 52078 (TRBV7-9, TRBJ1-1)
CASTPLQSYTEALF

SEQ ID NO: 104157 - protein, 13 aa, Homo sapiens
  CDR3 for alpha chain variable domain of TCR clone 52079 (TRAV20, TRAJ35)
CAVQEGFGNVLHC

SEQ ID NO: 104158 - protein, 14 aa, Homo sapiens
  CDR3 for beta chain variable domain of TCR clone 52079 (TRBV5-1, TRBJ1-1)
CASSSATGGTEAFF

SEQ ID NO: 104159 - protein, 14 aa, Homo sapiens
  CDR3 for alpha chain variable domain of TCR clone 52080 (TRAV16, TRAJ17)
CAPRIKAAGNKLTF

SEQ ID NO: 104160 - protein, 17 aa, Homo sapiens
  CDR3 for beta chain variable domain of TCR clone 52080 (TRBV7-2, TRBJ2-3)
CASSSYSGARRADTQYF

SEQ ID NO: 104161 - protein, 10 aa, Homo sapiens
  CDR3 for alpha chain variable domain of TCR clone 52081 (TRAV16, TRAJ26)
CAPEELWSEF

SEQ ID NO: 104162 - protein, 12 aa, Homo sapiens
  CDR3 for beta chain variable domain of TCR clone 52081 (TRBV7-8, TRBJ2-7)
CASSLGDREQYF

SEQ ID NO: 104163 - protein, 14 aa, Homo sapiens
  CDR3 for alpha chain variable domain of TCR clone 52082 (TRAV12-2, TRAJ13)
CPVKKTGGYQKVTF

SEQ ID NO: 104164 - protein, 15 aa, Homo sapiens
  CDR3 for beta chain variable domain of TCR clone 52082 (TRBV27, TRBJ2-1)
CASSNGGGSSNEQFF

SEQ ID NO: 104165 - protein, 14 aa, Homo sapiens
  CDR3 for alpha chain variable domain of TCR clone 52083 (TRAV13-2, TRAJ22)
CADGTLGSARQLTF

SEQ ID NO: 104166 - protein, 16 aa, Homo sapiens
  CDR3 for beta chain variable domain of TCR clone 52083 (TRBV19, TRBJ2-1)
CASSSRGTRSYNEQFF

SEQ ID NO: 104167 - protein, 14 aa, Homo sapiens
  CDR3 for alpha chain variable domain of TCR clone 52084 (TRAV1-2, TRAJ8)
CAVGEDTGFQKLVF

SEQ ID NO: 104168 - protein, 15 aa, Homo sapiens
  CDR3 for beta chain variable domain of TCR clone 52084 (TRBV7-9, TRBJ1-1)
CASSHRGTVNTEAFF

SEQ ID NO: 104169 - protein, 12 aa, Homo sapiens
  CDR3 for alpha chain variable domain of TCR clone 52085 (TRAV2, TRAJ31)
CAVEVNNARLMF

SEQ ID NO: 104170 - protein, 16 aa, Homo sapiens
  CDR3 for beta chain variable domain of TCR clone 52085 (TRBV10-3, TRBJ2-1)
CAISGVGDGGGGEQFF

SEQ ID NO: 104171 - protein, 11 aa, Homo sapiens
  CDR3 for alpha chain variable domain of TCR clone 52086 (TRAV8-1, TRAJ43)
CAVTNDMRFVA

SEQ ID NO: 104172 - protein, 17 aa, Homo sapiens
  CDR3 for beta chain variable domain of TCR clone 52086 (TRBV5-4, TRBJ2-1)
CASSSAGGRGPYNEQFF

SEQ ID NO: 104173 - protein, 14 aa, Homo sapiens
  CDR3 for alpha chain variable domain of TCR clone 52087 (TRAV12-2, TRAJ13)
CAVKKTGGYQKVTF

SEQ ID NO: 104174 - protein, 15 aa, Homo sapiens
  CDR3 for beta chain variable domain of TCR clone 52087 (TRBV5-1, TRBJ2-2)
CASSSQGGNTGELFF

SEQ ID NO: 104175 - protein, 12 aa, Homo sapiens
  CDR3 for alpha chain variable domain of TCR clone 52088 (TRAV1-1, TRAJ9)
CAVDTGGFKTIF

SEQ ID NO: 104176 - protein, 14 aa, Homo sapiens
  CDR3 for beta chain variable domain of TCR clone 52088 (TRBV7-8, TRBJ2-5)
CASSDTGGQETQYF

SEQ ID NO: 104177 - protein, 16 aa, Homo sapiens
  CDR3 for alpha chain variable domain of TCR clone 52089 (TRAV30, TRAJ24)
CGTEIVDADSWGKFQF

SEQ ID NO: 104178 - protein, 19 aa, Homo sapiens
  CDR3 for beta chain variable domain of TCR clone 52089 (TRBV25-1, TRBJ2-2)
CAILVYRMDRGRKTGELFF

SEQ ID NO: 104179 - protein, 15 aa, Homo sapiens
  CDR3 for alpha chain variable domain of TCR clone 52090 (TRAV26-1, TRAJ40)
CIVRVTTSGTYKYIF

SEQ ID NO: 104180 - protein, 12 aa, Homo sapiens
  CDR3 for beta chain variable domain of TCR clone 52090 (TRBV7-9, TRBJ1-4)
CASSTDRGKLFF

SEQ ID NO: 104181 - protein, 12 aa, Homo sapiens
  CDR3 for alpha chain variable domain of TCR clone 52091 (TRAV13-1, TRAJ21)
CVAFFNFNKFYF

SEQ ID NO: 104182 - protein, 14 aa, Homo sapiens
  CDR3 for beta chain variable domain of TCR clone 52091 (TRBV4-1, TRBJ2-7)
CASRLTSGSYEQYF

SEQ ID NO: 104183 - protein, 18 aa, Homo sapiens
  CDR3 for alpha chain variable domain of TCR clone 52092 (TRAV36/DV7, )
CALTYIQNPDPAVYQLRD

SEQ ID NO: 104184 - protein, 13 aa, Homo sapiens
  CDR3 for beta chain variable domain of TCR clone 52092 (TRBV4-1, TRBJ2-7)
CASSQGQAYEQYF

SEQ ID NO: 104185 - protein, 14 aa, Homo sapiens
  CDR3 for alpha chain variable domain of TCR clone 52093 (TRAV17, TRAJ6)
CATDASGGSYIPTL

SEQ ID NO: 104186 - protein, 19 aa, Homo sapiens
  CDR3 for beta chain variable domain of TCR clone 52093 (TRBV4-3, TRBJ2-7)
CASSQEFIGWQVTPYEQYF

SEQ ID NO: 104187 - protein, 15 aa, Homo sapiens
  CDR3 for alpha chain variable domain of TCR clone 52094 (TRAV8-3, TRAJ41)
CAVGSNTNSGYALNF

SEQ ID NO: 104188 - protein, 17 aa, Homo sapiens
  CDR3 for beta chain variable domain of TCR clone 52094 (TRBV25-1, TRBJ2-1)
CASSAYGQGRGVYEQFF

SEQ ID NO: 104189 - protein, 16 aa, Homo sapiens
  CDR3 for alpha chain variable domain of TCR clone 52095 (TRAV30, TRAJ24)
CGTEIVDADSWGKFQF

SEQ ID NO: 104190 - protein, 13 aa, Homo sapiens
  CDR3 for beta chain variable domain of TCR clone 52095 (TRBV19, TRBJ1-3)
CASRLSLGNTIYF

SEQ ID NO: 104191 - protein, 14 aa, Homo sapiens
  CDR3 for alpha chain variable domain of TCR clone 52096 (TRAV20, TRAJ29)
CAVQAWVGNTPLVF

SEQ ID NO: 104192 - protein, 16 aa, Homo sapiens
  CDR3 for beta chain variable domain of TCR clone 52096 (TRBV7-9, TRBJ2-3)
CASSPWREVGTDTQYF

SEQ ID NO: 104193 - protein, 13 aa, Homo sapiens
  CDR3 for alpha chain variable domain of TCR clone 52097 (TRAV35, TRAJ42)
CAVFPGSQGNLIF

SEQ ID NO: 104194 - protein, 14 aa, Homo sapiens
  CDR3 for beta chain variable domain of TCR clone 52097 (TRBV19, TRBJ2-1)
CASPTFVLSGEQFF

SEQ ID NO: 104195 - protein, 17 aa, Homo sapiens
  CDR3 for alpha chain variable domain of TCR clone 52098 (TRAV13-1, TRAJ52)
CAASSGAGGTSYGKLTF

SEQ ID NO: 104196 - protein, 12 aa, Homo sapiens
  CDR3 for beta chain variable domain of TCR clone 52098 (TRBV11-2, TRBJ2-2)
CASSLGGGELFI

SEQ ID NO: 104197 - protein, 11 aa, Homo sapiens
  CDR3 for alpha chain variable domain of TCR clone 52099 (TRAV12-3, TRAJ27)
CAMANTGKSTF

SEQ ID NO: 104198 - protein, 13 aa, Homo sapiens
  CDR3 for beta chain variable domain of TCR clone 52099 (TRBV20-1, TRBJ1-1)
CSARVGGNTEAFF

SEQ ID NO: 104199 - protein, 16 aa, Homo sapiens
  CDR3 for alpha chain variable domain of TCR clone 52100 (TRAV3, TRAJ37)
CAVRGKGSGNTGELIF

SEQ ID NO: 104200 - protein, 15 aa, Homo sapiens
  CDR3 for beta chain variable domain of TCR clone 52100 (TRBV7-3, TRBJ2-2)
CASSETGQGTGELFF

SEQ ID NO: 104201 - protein, 19 aa, Homo sapiens
  CDR3 for alpha chain variable domain of TCR clone 52101 (TRAV13-1, TRAJ52)
CAASSSPNAGGTSYGKLTF

SEQ ID NO: 104202 - protein, 14 aa, Homo sapiens
  CDR3 for beta chain variable domain of TCR clone 52101 (TRBV6-1, TRBJ1-3)
CASVQGGGGNTIYF

SEQ ID NO: 104203 - protein, 16 aa, Homo sapiens
  CDR3 for alpha chain variable domain of TCR clone 52102 (TRAV12-3, TRAJ53)
CAMSPGSGGSNYKLKF

SEQ ID NO: 104204 - protein, 15 aa, Homo sapiens
  CDR3 for beta chain variable domain of TCR clone 52102 (TRBV25-1, TRBJ1-4)
CASSKRIATNEKLFF

SEQ ID NO: 104205 - protein, 14 aa, Homo sapiens
  CDR3 for alpha chain variable domain of TCR clone 52103 (TRAV21, TRAJ35)
CAVMPIGFGNVLHC

SEQ ID NO: 104206 - protein, 12 aa, Homo sapiens
  CDR3 for beta chain variable domain of TCR clone 52103 (TRBV7-9, TRBJ2-7)
WASSIKREEQYF

SEQ ID NO: 104207 - protein, 18 aa, Homo sapiens
  CDR3 for alpha chain variable domain of TCR clone 52104 (TRAV21, TRAJ52)
CAVRPSPAGGTSYGELTF

SEQ ID NO: 104208 - protein, 17 aa, Homo sapiens
  CDR3 for beta chain variable domain of TCR clone 52104 (TRBV13, TRBJ2-3)
RASSLSRVAGGRNTQYF

SEQ ID NO: 104209 - protein, 12 aa, Homo sapiens
  CDR3 for alpha chain variable domain of TCR clone 52105 (TRAV8-4, TRAJ49)
CAVSEAGNQFYF

SEQ ID NO: 104210 - protein, 14 aa, Homo sapiens
  CDR3 for beta chain variable domain of TCR clone 52105 (TRBV7-7, TRBJ2-2)
CASSMGQNTGELFF

SEQ ID NO: 104211 - protein, 14 aa, Homo sapiens
  CDR3 for alpha chain variable domain of TCR clone 52106 (TRAV17, TRAJ12)
CATDKKDSSYKLIF

SEQ ID NO: 104212 - protein, 16 aa, Homo sapiens
  CDR3 for beta chain variable domain of TCR clone 52106 (TRBV11-2, TRBJ2-1)
CASSPRLAGVYNEQFF

SEQ ID NO: 104213 - protein, 10 aa, Homo sapiens
  CDR3 for alpha chain variable domain of TCR clone 52107 (TRAV13-1, TRAJ26)
CAPCGQNFVF

SEQ ID NO: 104214 - protein, 15 aa, Homo sapiens
  CDR3 for beta chain variable domain of TCR clone 52107 (TRBV28, TRBJ2-3)
CASSQELGGTDTQYF

SEQ ID NO: 104215 - protein, 14 aa, Homo sapiens
  CDR3 for alpha chain variable domain of TCR clone 52108 (TRAV38-1, TRAJ45)
CAYYSGGGADGLSF

SEQ ID NO: 104216 - protein, 20 aa, Homo sapiens
  CDR3 for beta chain variable domain of TCR clone 52108 (TRBV28, TRBJ2-1)
CASTPIGRSPGLAGGNEQFF

SEQ ID NO: 104217 - protein, 15 aa, Homo sapiens
  CDR3 for alpha chain variable domain of TCR clone 52109 (TRAV27, TRAJ38)
CAARRNAGNNRKLIW

SEQ ID NO: 104218 - protein, 14 aa, Homo sapiens
  CDR3 for beta chain variable domain of TCR clone 52109 (TRBV2, TRBJ2-7)
CASSLTSGGYEQYF

SEQ ID NO: 104219 - protein, 14 aa, Homo sapiens
  CDR3 for alpha chain variable domain of TCR clone 52110 (TRAV8-3, TRAJ9)
CAVVYNTGGFKTLF

SEQ ID NO: 104220 - protein, 14 aa, Homo sapiens
  CDR3 for beta chain variable domain of TCR clone 52110 (TRBV7-3, TRBJ2-2)
CASSSGGYTGELFF

SEQ ID NO: 104221 - protein, 16 aa, Homo sapiens
  CDR3 for alpha chain variable domain of TCR clone 52111 (TRAV30, TRAJ24)
CGTEIVDADSWGKFQF

SEQ ID NO: 104222 - protein, 15 aa, Homo sapiens
  CDR3 for beta chain variable domain of TCR clone 52111 (TRBV7-9, TRBJ1-4)
CASSARTGGNEKLFS

SEQ ID NO: 104223 - protein, 15 aa, Homo sapiens
  CDR3 for alpha chain variable domain of TCR clone 52112 (TRAV8-3, TRAJ45)
CASSYSGGGADGLTF

SEQ ID NO: 104224 - protein, 13 aa, Homo sapiens
  CDR3 for beta chain variable domain of TCR clone 52112 (TRBV10-3, TRBJ2-7)
CPSKLAVNYEQYF

SEQ ID NO: 104225 - protein, 14 aa, Homo sapiens
  CDR3 for alpha chain variable domain of TCR clone 52113 (TRAV21, TRAJ38)
CAVMGAGNNRKLIW

SEQ ID NO: 104226 - protein, 13 aa, Homo sapiens
  CDR3 for beta chain variable domain of TCR clone 52113 (TRBV7-3, TRBJ2-5)
CASSTGFFETQYF

SEQ ID NO: 104227 - protein, 16 aa, Homo sapiens
  CDR3 for alpha chain variable domain of TCR clone 52114 (TRAV8-3, TRAJ13)
CAVGAYPSGGYQKVTF

SEQ ID NO: 104228 - protein, 13 aa, Homo sapiens
  CDR3 for beta chain variable domain of TCR clone 52114 (TRBV7-3, TRBJ1-1)
CASSQDWGAEAFF

SEQ ID NO: 104229 - protein, 12 aa, Homo sapiens
  CDR3 for alpha chain variable domain of TCR clone 52115 (TRAV3, TRAJ43)
CAVRGPNNDMRF

SEQ ID NO: 104230 - protein, 14 aa, Homo sapiens
  CDR3 for beta chain variable domain of TCR clone 52115 (TRBV7-2, TRBJ2-7)
CASSPKTSFYEQYF

SEQ ID NO: 104231 - protein, 13 aa, Homo sapiens
  CDR3 for alpha chain variable domain of TCR clone 52116 (TRAV21, TRAJ36)
CAVIKTGANHLFF

SEQ ID NO: 104232 - protein, 13 aa, Homo sapiens
  CDR3 for beta chain variable domain of TCR clone 52116 (TRBV29-1, TRBJ2-3)
CSATRGGRDTQYF

SEQ ID NO: 104233 - protein, 14 aa, Homo sapiens
  CDR3 for alpha chain variable domain of TCR clone 52117 (TRAV12-3, TRAJ10)
SHLPLTGGGNKLTF

SEQ ID NO: 104234 - protein, 13 aa, Homo sapiens
  CDR3 for beta chain variable domain of TCR clone 52117 (TRBV19, TRBJ2-7)
CASSIDRTYEQYF

SEQ ID NO: 104235 - protein, 16 aa, Homo sapiens
  CDR3 for alpha chain variable domain of TCR clone 52118 (TRAV17, TRAJ28)
CATASVSGAGSYRLTF

SEQ ID NO: 104236 - protein, 14 aa, Homo sapiens
  CDR3 for beta chain variable domain of TCR clone 52118 (TRBV19, TRBJ2-1)
CASEVTGARNEQFF

SEQ ID NO: 104237 - protein, 13 aa, Homo sapiens
  CDR3 for alpha chain variable domain of TCR clone 52119 (TRAV17, TRAJ9)
CATDYTGGFKTIF

SEQ ID NO: 104238 - protein, 14 aa, Homo sapiens
  CDR3 for beta chain variable domain of TCR clone 52119 (TRBV19, TRBJ2-5)
CASSMTGKQETQYF

SEQ ID NO: 104239 - protein, 16 aa, Homo sapiens
  CDR3 for alpha chain variable domain of TCR clone 52120 (TRAV17, TRAJ53)
CATDALSGGSNYKLTF

SEQ ID NO: 104240 - protein, 14 aa, Homo sapiens
  CDR3 for beta chain variable domain of TCR clone 52120 (TRBV19, TRBJ2-1)
CASPTFVLSGEQFF

SEQ ID NO: 104241 - protein, 12 aa, Homo sapiens
  CDR3 for alpha chain variable domain of TCR clone 52121 (TRAV8-3, TRAJ26)
CAGDNYGQNFVF

SEQ ID NO: 104242 - protein, 15 aa, Homo sapiens
  CDR3 for beta chain variable domain of TCR clone 52121 (TRBV11-2, TRBJ2-1)
CAGSLGTSGLNEQFF

SEQ ID NO: 104243 - protein, 12 aa, Homo sapiens
  CDR3 for alpha chain variable domain of TCR clone 52122 (TRAV12-3, TRAJ34)
CAMGYNTDKLIF

SEQ ID NO: 104244 - protein, 14 aa, Homo sapiens
  CDR3 for beta chain variable domain of TCR clone 52122 (TRBV4-1, TRBJ2-2)
CASSQAVNTGELVF

SEQ ID NO: 104245 - protein, 11 aa, Homo sapiens
  CDR3 for alpha chain variable domain of TCR clone 52123 (TRAV21, TRAJ13)
CASGGYQKVTF

SEQ ID NO: 104246 - protein, 14 aa, Homo sapiens
  CDR3 for beta chain variable domain of TCR clone 52123 (TRBV7-3, TRBJ2-1)
CASSLAGGTNEQFF

SEQ ID NO: 104247 - protein, 12 aa, Homo sapiens
  CDR3 for alpha chain variable domain of TCR clone 52124 (TRAV21, TRAJ56)
CAVGVNRSKLTF

SEQ ID NO: 104248 - protein, 14 aa, Homo sapiens
  CDR3 for beta chain variable domain of TCR clone 52124 (TRBV5-5, TRBJ2-7)
CASSLGQGTYEQYF

SEQ ID NO: 104249 - protein, 14 aa, Homo sapiens
  CDR3 for alpha chain variable domain of TCR clone 52125 (TRAV12-2, TRAJ13)
CAVKKTGGYQKVTF

SEQ ID NO: 104250 - protein, 12 aa, Homo sapiens
  CDR3 for beta chain variable domain of TCR clone 52125 (TRBV24-1, TRBJ1-1)
CATSDSDRGAFF

SEQ ID NO: 104251 - protein, 14 aa, Homo sapiens
  CDR3 for alpha chain variable domain of TCR clone 52126 (TRAV23/DV6, TRAJ4)
CAAPSSGGYNKLVF

SEQ ID NO: 104252 - protein, 16 aa, Homo sapiens
  CDR3 for beta chain variable domain of TCR clone 52126 (TRBV19, TRBJ1-1)
CASRFGGPVTGTEAFF

SEQ ID NO: 104253 - protein, 14 aa, Homo sapiens
  CDR3 for alpha chain variable domain of TCR clone 52127 (TRAV23/DV6, TRAJ6)
CAASRSGGSYIPTF

SEQ ID NO: 104254 - protein, 17 aa, Homo sapiens
  CDR3 for beta chain variable domain of TCR clone 52127 (TRBV20-1, TRBJ2-1)
CSASASGLAGSCNEQFF

SEQ ID NO: 104255 - protein, 11 aa, Homo sapiens
  CDR3 for alpha chain variable domain of TCR clone 52128 (TRAV27, TRAJ47)
CRSNQGNKLAF

SEQ ID NO: 104256 - protein, 16 aa, Homo sapiens
  CDR3 for beta chain variable domain of TCR clone 52128 (TRBV7-9, TRBJ2-1)
CASSDVAGGSYNEQFF

SEQ ID NO: 104257 - protein, 15 aa, Homo sapiens
  CDR3 for alpha chain variable domain of TCR clone 52129 (TRAV12-3, TRAJ6)
CAMSATTGGSYIPTF

SEQ ID NO: 104258 - protein, 15 aa, Homo sapiens
  CDR3 for beta chain variable domain of TCR clone 52129 (TRBV28, TRBJ2-5)
CVSSPPWSYQETQYF

SEQ ID NO: 104259 - protein, 13 aa, Homo sapiens
  CDR3 for alpha chain variable domain of TCR clone 52130 (TRAV12-2, TRAJ42)
CAVKRGSQGNLIF

SEQ ID NO: 104260 - protein, 12 aa, Homo sapiens
  CDR3 for beta chain variable domain of TCR clone 52130 (TRBV5-7, TRBJ1-2)
CASSVVQNGYTF

SEQ ID NO: 104261 - protein, 10 aa, Homo sapiens
  CDR3 for alpha chain variable domain of TCR clone 52131 (TRAV2, TRAJ33)
CCGSNYQLIW

SEQ ID NO: 104262 - protein, 15 aa, Homo sapiens
  CDR3 for beta chain variable domain of TCR clone 52131 (TRBV19, TRBJ1-1)
CASTSGQIQNTEAFF

SEQ ID NO: 104263 - protein, 16 aa, Homo sapiens
  CDR3 for alpha chain variable domain of TCR clone 52132 (TRAV1-2, TRAJ10)
SAVRGVLTGGGNKLTF

SEQ ID NO: 104264 - protein, 12 aa, Homo sapiens
  CDR3 for beta chain variable domain of TCR clone 52132 (TRBV7-8, TRBJ2-7)
CASSLGDREQYF

SEQ ID NO: 104265 - protein, 14 aa, Homo sapiens
  CDR3 for alpha chain variable domain of TCR clone 52133 (TRAV2, TRAJ22)
CAVGRGGSARHLTF

SEQ ID NO: 104266 - protein, 12 aa, Homo sapiens
  CDR3 for beta chain variable domain of TCR clone 52133 (TRBV19, TRBJ2-1)
CASSMQDTEQFF

SEQ ID NO: 104267 - protein, 11 aa, Homo sapiens
  CDR3 for alpha chain variable domain of TCR clone 52134 (TRAV2, TRAJ13)
CASGGYQKDTF

SEQ ID NO: 104268 - protein, 16 aa, Homo sapiens
  CDR3 for beta chain variable domain of TCR clone 52134 (TRBV6-1, TRBJ2-5)
CASSETLDRGAETQYF

SEQ ID NO: 104269 - protein, 13 aa, Homo sapiens
  CDR3 for alpha chain variable domain of TCR clone 52135 (TRAV26-1, TRAJ34)
CIVRPWITDKLIF

SEQ ID NO: 104270 - protein, 14 aa, Homo sapiens
  CDR3 for beta chain variable domain of TCR clone 52135 (TRBV7-2, TRBJ2-7)
CASSPKTSFYEQYF

SEQ ID NO: 104271 - protein, 13 aa, Homo sapiens
  CDR3 for alpha chain variable domain of TCR clone 52136 (TRAV21, TRAJ45)
CAVMGGGADGLTF

SEQ ID NO: 104272 - protein, 11 aa, Homo sapiens
  CDR3 for beta chain variable domain of TCR clone 52136 (TRBV19, TRBJ1-1)
CASSIGSEAFF

SEQ ID NO: 104273 - protein, 13 aa, Homo sapiens
  CDR3 for alpha chain variable domain of TCR clone 52137 (TRAV8-3, TRAJ28)
CAVGAVGIYQLTF

SEQ ID NO: 104274 - protein, 15 aa, Homo sapiens
  CDR3 for beta chain variable domain of TCR clone 52137 (TRBV7-9, TRBJ1-5)
CASSQGHQPNQPQHF

SEQ ID NO: 104275 - protein, 17 aa, Homo sapiens
  CDR3 for alpha chain variable domain of TCR clone 52138 (TRAV3, TRAJ12)
CAVRDGGRMDSSYKLIF

SEQ ID NO: 104276 - protein, 13 aa, Homo sapiens
  CDR3 for beta chain variable domain of TCR clone 52138 (TRBV15, TRBJ1-6)
CATSGGLNSPLHC

SEQ ID NO: 104277 - protein, 14 aa, Homo sapiens
  CDR3 for alpha chain variable domain of TCR clone 52139 (TRAV12-3, TRAJ10)
SHLPLTGGGNKLTF

SEQ ID NO: 104278 - protein, 13 aa, Homo sapiens
  CDR3 for beta chain variable domain of TCR clone 52139 (TRBV11-1, TRBJ1-1)
CASSLSIGAEAFF

SEQ ID NO: 104279 - protein, 14 aa, Homo sapiens
  CDR3 for alpha chain variable domain of TCR clone 52140 (TRAV12-2, TRAJ17)
CAVLFKAAGNKLTF

SEQ ID NO: 104280 - protein, 17 aa, Homo sapiens
  CDR3 for beta chain variable domain of TCR clone 52140 (TRBV20-1, TRBJ2-2)
CCASGSGQGGLTGELFF

SEQ ID NO: 104281 - protein, 13 aa, Homo sapiens
  CDR3 for alpha chain variable domain of TCR clone 52141 (TRAV3, TRAJ27)
CAVRPLGAGKSTF

SEQ ID NO: 104282 - protein, 15 aa, Homo sapiens
  CDR3 for beta chain variable domain of TCR clone 52141 (TRBV27, TRBJ2-7)
CASSTAGTGSYEQYF

SEQ ID NO: 104283 - protein, 14 aa, Homo sapiens
  CDR3 for alpha chain variable domain of TCR clone 52142 (TRAV12-3, TRAJ29)
CAMILLSGNTHLVF

SEQ ID NO: 104284 - protein, 16 aa, Homo sapiens
  CDR3 for beta chain variable domain of TCR clone 52142 (TRBV28, TRBJ2-7)
CASSSGTSGRGYEQYF

SEQ ID NO: 104285 - protein, 15 aa, Homo sapiens
  CDR3 for alpha chain variable domain of TCR clone 52143 (TRAV27, TRAJ38)
CAARRNAGNNRKLIW

SEQ ID NO: 104286 - protein, 15 aa, Homo sapiens
  CDR3 for beta chain variable domain of TCR clone 52143 (TRBV11-3, TRBJ2-3)
CASLKDGREGDTQYF

SEQ ID NO: 104287 - protein, 12 aa, Homo sapiens
  CDR3 for alpha chain variable domain of TCR clone 52144 (TRAV2, TRAJ31)
CAVEDNNARLMF

SEQ ID NO: 104288 - protein, 16 aa, Homo sapiens
  CDR3 for beta chain variable domain of TCR clone 52144 (TRBV10-3, TRBJ2-1)
CAIIGVGDGGGGEQFF

SEQ ID NO: 104289 - protein, 17 aa, Homo sapiens
  CDR3 for alpha chain variable domain of TCR clone 52145 (TRAV12-2, TRAJ6)
CAPQGPPRAGGSHIPTF

SEQ ID NO: 104290 - protein, 16 aa, Homo sapiens
  CDR3 for beta chain variable domain of TCR clone 52145 (TRBV19, TRBJ2-2)
CASSTARASNTGELFF

SEQ ID NO: 104291 - protein, 17 aa, Homo sapiens
  CDR3 for alpha chain variable domain of TCR clone 52146 (TRAV12-3, TRAJ42)
CVVMRMNYGGSQGNLIF

SEQ ID NO: 104292 - protein, 13 aa, Homo sapiens
  CDR3 for beta chain variable domain of TCR clone 52146 (TRBV7-2, TRBJ1-1)
CASSLARPAEAFF

SEQ ID NO: 104293 - protein, 12 aa, Homo sapiens
  CDR3 for alpha chain variable domain of TCR clone 52147 (TRAV25, TRAJ7)
CAGSYGNNRLAF

SEQ ID NO: 104294 - protein, 19 aa, Homo sapiens
  CDR3 for beta chain variable domain of TCR clone 52147 (TRBV6-5, TRBJ1-6)
CASSHGTGRVRSYNSPLHF

SEQ ID NO: 104295 - protein, 17 aa, Homo sapiens
  CDR3 for alpha chain variable domain of TCR clone 52148 (TRAV3, TRAJ6)
CAVGDGPRAGGSYIPTF

SEQ ID NO: 104296 - protein, 13 aa, Homo sapiens
  CDR3 for beta chain variable domain of TCR clone 52148 (TRBV19, TRBJ1-1)
CASSITGESEAFF

SEQ ID NO: 104297 - protein, 14 aa, Homo sapiens
  CDR3 for alpha chain variable domain of TCR clone 52149 (TRAV1-2, TRAJ8)
CAVREDTGFQKLVF

SEQ ID NO: 104298 - protein, 15 aa, Homo sapiens
  CDR3 for beta chain variable domain of TCR clone 52149 (TRBV4-1, TRBJ2-7)
CASSQNTGRLYGQYF

SEQ ID NO: 104299 - protein, 14 aa, Homo sapiens
  CDR3 for alpha chain variable domain of TCR clone 52150 (TRAV12-3, TRAJ9)
CAMSPNTGGFKTIF

SEQ ID NO: 104300 - protein, 12 aa, Homo sapiens
  CDR3 for beta chain variable domain of TCR clone 52150 (TRBV19, TRBJ1-5)
CTSSIAQQPQHF

SEQ ID NO: 104301 - protein, 14 aa, Homo sapiens
  CDR3 for alpha chain variable domain of TCR clone 52151 (TRAV8-2, TRAJ3)
CVVSPSGGYNKLIF

SEQ ID NO: 104302 - protein, 14 aa, Homo sapiens
  CDR3 for beta chain variable domain of TCR clone 52151 (TRBV19, TRBJ2-5)
CASSSSGIQETQYF

SEQ ID NO: 104303 - protein, 11 aa, Homo sapiens
  CDR3 for alpha chain variable domain of TCR clone 52152 (TRAV12-1, TRAJ3)
CVVSSASKIIF

SEQ ID NO: 104304 - protein, 20 aa, Homo sapiens
  CDR3 for beta chain variable domain of TCR clone 52152 (TRBV28, TRBJ2-1)
CASTPIGRSPGLAGGNEQFF

SEQ ID NO: 104305 - protein, 15 aa, Homo sapiens
  CDR3 for alpha chain variable domain of TCR clone 52153 (TRAV3, TRAJ45)
CAVRTPWGGADGLTF

SEQ ID NO: 104306 - protein, 16 aa, Homo sapiens
  CDR3 for beta chain variable domain of TCR clone 52153 (TRBV6-1, TRBJ2-2)
CASSFGQGANTGELLF

SEQ ID NO: 104307 - protein, 14 aa, Homo sapiens
  CDR3 for alpha chain variable domain of TCR clone 52154 (TRAV12-2, TRAJ13)
CAVKKTGGYQKVTF

SEQ ID NO: 104308 - protein, 14 aa, Homo sapiens
  CDR3 for beta chain variable domain of TCR clone 52154 (TRBV5-5, TRBJ2-7)
CAGSLGQGTYEQYF

SEQ ID NO: 104309 - protein, 15 aa, Homo sapiens
  CDR3 for alpha chain variable domain of TCR clone 52155 (TRAV26-1, TRAJ48)
CIARRSWFGNEKLTF

SEQ ID NO: 104310 - protein, 12 aa, Homo sapiens
  CDR3 for beta chain variable domain of TCR clone 52155 (TRBV19, TRBJ2-5)
CASSISEETQYF

SEQ ID NO: 104311 - protein, 14 aa, Homo sapiens
  CDR3 for alpha chain variable domain of TCR clone 52156 (TRAV1-2, TRAJ16)
CAVNRFSDGQKPLF

SEQ ID NO: 104312 - protein, 15 aa, Homo sapiens
  CDR3 for beta chain variable domain of TCR clone 52156 (TRBV29-1, TRBJ2-7)
CSVEFFDRGSYEQYF

SEQ ID NO: 104313 - protein, 14 aa, Homo sapiens
  CDR3 for alpha chain variable domain of TCR clone 52157 (TRAV14/DV4, TRAJ26)
CAMREGTYGQNFVF

SEQ ID NO: 104314 - protein, 16 aa, Homo sapiens
  CDR3 for beta chain variable domain of TCR clone 52157 (TRBV5-1, TRBJ2-2)
CASSSRTGGRTGELFF

SEQ ID NO: 104315 - protein, 13 aa, Homo sapiens
  CDR3 for alpha chain variable domain of TCR clone 52158 (TRAV27, TRAJ41)
CAGEGNSGYALNF

SEQ ID NO: 104316 - protein, 14 aa, Homo sapiens
  CDR3 for beta chain variable domain of TCR clone 52158 (TRBV7-6, TRBJ2-3)
CASSLGTVTDTQYF

SEQ ID NO: 104317 - protein, 13 aa, Homo sapiens
  CDR3 for alpha chain variable domain of TCR clone 52159 (TRAV38-2/DV8, TRAJ34)
CAYSTWNTDKLIF

SEQ ID NO: 104318 - protein, 18 aa, Homo sapiens
  CDR3 for beta chain variable domain of TCR clone 52159 (TRBV6-6, TRBJ1-3)
CASSYSKWDSISGNTIYF

SEQ ID NO: 104319 - protein, 21 aa, Homo sapiens
  CDR3 for alpha chain variable domain of TCR clone 52160 (TRAV12-1, TRAJ32)
SSVIQPPTSMNYGGATNKLIF

SEQ ID NO: 104320 - protein, 15 aa, Homo sapiens
  CDR3 for beta chain variable domain of TCR clone 52160 (TRBV7-9, TRBJ2-2)
CASGPLDTFPGGLFF

SEQ ID NO: 104321 - protein, 15 aa, Homo sapiens
  CDR3 for alpha chain variable domain of TCR clone 52161 (TRAV26-2, TRAJ39)
CSLRGNNNAGNMLTF

SEQ ID NO: 104322 - protein, 18 aa, Homo sapiens
  CDR3 for beta chain variable domain of TCR clone 52161 (TRBV4-1, TRBJ1-4)
CASSPRAGGAWTNEKLFF

SEQ ID NO: 104323 - protein, 12 aa, Homo sapiens
  CDR3 for alpha chain variable domain of TCR clone 52162 (TRAV21, TRAJ49)
CAVTSTGNQFYF

SEQ ID NO: 104324 - protein, 17 aa, Homo sapiens
  CDR3 for beta chain variable domain of TCR clone 52162 (TRBV13, TRBJ2-3)
CASSLSRVAGGRNTQYF

SEQ ID NO: 104325 - protein, 16 aa, Homo sapiens
  CDR3 for alpha chain variable domain of TCR clone 52163 (TRAV30, TRAJ24)
CGTEIVDADSWGKFQF

SEQ ID NO: 104326 - protein, 14 aa, Homo sapiens
  CDR3 for beta chain variable domain of TCR clone 52163 (TRBV12-5, TRBJ2-1)
CASGLKGSNDEQFF

SEQ ID NO: 104327 - protein, 12 aa, Homo sapiens
  CDR3 for alpha chain variable domain of TCR clone 52164 (TRAV21, TRAJ10)
CSRTGGGNKLTF

SEQ ID NO: 104328 - protein, 12 aa, Homo sapiens
  CDR3 for beta chain variable domain of TCR clone 52164 (TRBV11-3, TRBJ1-1)
CASSHRQGEAFF

SEQ ID NO: 104329 - protein, 14 aa, Homo sapiens
  CDR3 for alpha chain variable domain of TCR clone 52165 (TRAV12-2, TRAJ32)
CAHPESGATNKLVF

SEQ ID NO: 104330 - protein, 14 aa, Homo sapiens
  CDR3 for beta chain variable domain of TCR clone 52165 (TRBV4-2, TRBJ2-3)
CASRETRAPGMQYF

SEQ ID NO: 104331 - protein, 15 aa, Homo sapiens
  CDR3 for alpha chain variable domain of TCR clone 52166 (TRAV12-2, TRAJ9)
CAVNNERTGGFQTIF

SEQ ID NO: 104332 - protein, 14 aa, Homo sapiens
  CDR3 for beta chain variable domain of TCR clone 52166 (TRBV4-1, TRBJ1-4)
CASSQERKNEKLFF

SEQ ID NO: 104333 - protein, 13 aa, Homo sapiens
  CDR3 for alpha chain variable domain of TCR clone 52167 (TRAV12-1, TRAJ6)
CVVFPGGSYIPTF

SEQ ID NO: 104334 - protein, 15 aa, Homo sapiens
  CDR3 for beta chain variable domain of TCR clone 52167 (TRBV27, TRBJ2-1)
CASSNGGGSSNEQFF

SEQ ID NO: 104335 - protein, 11 aa, Homo sapiens
  CDR3 for alpha chain variable domain of TCR clone 52168 (TRAV21, TRAJ11)
FAVNGYSTLTF

SEQ ID NO: 104336 - protein, 11 aa, Homo sapiens
  CDR3 for beta chain variable domain of TCR clone 52168 (TRBV19, TRBJ1-1)
CASSIGSEAFF

SEQ ID NO: 104337 - protein, 12 aa, Homo sapiens
  CDR3 for alpha chain variable domain of TCR clone 52169 (TRAV13-1, TRAJ21)
CAAKEGFNKFYF

SEQ ID NO: 104338 - protein, 15 aa, Homo sapiens
  CDR3 for beta chain variable domain of TCR clone 52169 (TRBV25-1, TRBJ1-4)
CASSPGDSTNDKLFF

SEQ ID NO: 104339 - protein, 20 aa, Homo sapiens
  CDR3 for alpha chain variable domain of TCR clone 52170 (TRAV12-1, TRAJ42)
SSVIQPPTSVKGGSQGNLIF

SEQ ID NO: 104340 - protein, 18 aa, Homo sapiens
  CDR3 for beta chain variable domain of TCR clone 52170 (TRBV11-2, TRBJ2-3)
CASSLEGASRGAPNTQYF

SEQ ID NO: 104341 - protein, 15 aa, Homo sapiens
  CDR3 for alpha chain variable domain of TCR clone 52171 (TRAV8-3, TRAJ45)
CASSYSGGGADGLTF

SEQ ID NO: 104342 - protein, 16 aa, Homo sapiens
  CDR3 for beta chain variable domain of TCR clone 52171 (TRBV7-9, TRBJ2-2)
CASSGFGGADTGELFF

SEQ ID NO: 104343 - protein, 16 aa, Homo sapiens
  CDR3 for alpha chain variable domain of TCR clone 52172 (TRAV35, TRAJ37)
CWAFLRGSSNTGKLIL

SEQ ID NO: 104344 - protein, 13 aa, Homo sapiens
  CDR3 for beta chain variable domain of TCR clone 52172 (TRBV2, TRBJ1-2)
CASSVRGNYGYTF

SEQ ID NO: 104345 - protein, 15 aa, Homo sapiens
  CDR3 for alpha chain variable domain of TCR clone 52173 (TRAV27, TRAJ38)
CAARRNAGNNRKLIW

SEQ ID NO: 104346 - protein, 15 aa, Homo sapiens
  CDR3 for beta chain variable domain of TCR clone 52173 (TRBV7-3, TRBJ2-1)
CASSPTGGGEVEQFF

SEQ ID NO: 104347 - protein, 11 aa, Homo sapiens
  CDR3 for alpha chain variable domain of TCR clone 52174 (TRAV13-1, TRAJ20)
CAASNDYKLSL

SEQ ID NO: 104348 - protein, 15 aa, Homo sapiens
  CDR3 for beta chain variable domain of TCR clone 52174 (TRBV6-3, TRBJ2-7)
CASSSPGTVFYEQYF

SEQ ID NO: 104349 - protein, 12 aa, Homo sapiens
  CDR3 for alpha chain variable domain of TCR clone 52175 (TRAV12-3, TRAJ17)
CAMTLTGNKLTF

SEQ ID NO: 104350 - protein, 14 aa, Homo sapiens
  CDR3 for beta chain variable domain of TCR clone 52175 (TRBV11-3, TRBJ2-1)
CASSATTSGSIQFF

SEQ ID NO: 104351 - protein, 13 aa, Homo sapiens
  CDR3 for alpha chain variable domain of TCR clone 52176 (TRAV16, TRAJ52)
CALRGTSYGKLTF

SEQ ID NO: 104352 - protein, 18 aa, Homo sapiens
  CDR3 for beta chain variable domain of TCR clone 52176 (TRBV13, TRBJ2-6)
CASSPMTSGGSGANDLTF

SEQ ID NO: 104353 - protein, 14 aa, Homo sapiens
  CDR3 for alpha chain variable domain of TCR clone 52177 (TRAV3, TRAJ40)
CAVRDMTGTYKYIF

SEQ ID NO: 104354 - protein, 16 aa, Homo sapiens
  CDR3 for beta chain variable domain of TCR clone 52177 (TRBV18, TRBJ2-7)
CARSPGRAGGAYEQYF

SEQ ID NO: 104355 - protein, 13 aa, Homo sapiens
  CDR3 for alpha chain variable domain of TCR clone 52178 (TRAV16, TRAJ34)
CALALYNTDKLIF

SEQ ID NO: 104356 - protein, 12 aa, Homo sapiens
  CDR3 for beta chain variable domain of TCR clone 52178 (TRBV11-2, TRBJ2-2)
CASSLPTGELFF

SEQ ID NO: 104357 - protein, 12 aa, Homo sapiens
  CDR3 for alpha chain variable domain of TCR clone 52179 (TRAV27, TRAJ41)
SAGRNSGYALNF

SEQ ID NO: 104358 - protein, 13 aa, Homo sapiens
  CDR3 for beta chain variable domain of TCR clone 52179 (TRBV12-4, TRBJ1-1)
CASSPGTGFEAFF

SEQ ID NO: 104359 - protein, 12 aa, Homo sapiens
  CDR3 for alpha chain variable domain of TCR clone 52180 (TRAV13-1, TRAJ49)
CSASIRSNQFYF

SEQ ID NO: 104360 - protein, 14 aa, Homo sapiens
  CDR3 for beta chain variable domain of TCR clone 52180 (TRBV7-2, TRBJ2-1)
CASSPGLAGNEQFF

SEQ ID NO: 104361 - protein, 15 aa, Homo sapiens
  CDR3 for alpha chain variable domain of TCR clone 52181 (TRAV29/DV5, TRAJ28)
CAAGYSGAGSYQLTF

SEQ ID NO: 104362 - protein, 18 aa, Homo sapiens
  CDR3 for beta chain variable domain of TCR clone 52181 (TRBV3-1, TRBJ1-2)
CASSQGVIGWDGDYGYTF

SEQ ID NO: 104363 - protein, 14 aa, Homo sapiens
  CDR3 for alpha chain variable domain of TCR clone 52182 (TRAV12-3, TRAJ42)
CAMNYGGSQGNLIF

SEQ ID NO: 104364 - protein, 15 aa, Homo sapiens
  CDR3 for beta chain variable domain of TCR clone 52182 (TRBV5-7, TRBJ1-5)
CASSYGKLWDKPQHF

SEQ ID NO: 104365 - protein, 14 aa, Homo sapiens
  CDR3 for alpha chain variable domain of TCR clone 52183 (TRAV35, TRAJ13)
CAGSPSGVYQKVTF

SEQ ID NO: 104366 - protein, 13 aa, Homo sapiens
  CDR3 for beta chain variable domain of TCR clone 52183 (TRBV29-1, TRBJ1-1)
CSVGDSRNTEAFF

SEQ ID NO: 104367 - protein, 14 aa, Homo sapiens
  CDR3 for alpha chain variable domain of TCR clone 52184 (TRAV29/DV5, TRAJ48)
CAAMAHFGNEKLTF

SEQ ID NO: 104368 - protein, 15 aa, Homo sapiens
  CDR3 for beta chain variable domain of TCR clone 52184 (TRBV7-2, TRBJ2-1)
CASTHGTGIYNEQFF

SEQ ID NO: 104369 - protein, 10 aa, Homo sapiens
  CDR3 for alpha chain variable domain of TCR clone 52185 (TRAV12-3, TRAJ49)
CAMNDDQFYF

SEQ ID NO: 104370 - protein, 13 aa, Homo sapiens
  CDR3 for beta chain variable domain of TCR clone 52185 (TRBV12-4, TRBJ1-1)
CASSPGTGFEALF

SEQ ID NO: 104371 - protein, 14 aa, Homo sapiens
  CDR3 for alpha chain variable domain of TCR clone 52186 (TRAV17, TRAJ57)
CATDPQGGSEKLVF

SEQ ID NO: 104372 - protein, 16 aa, Homo sapiens
  CDR3 for beta chain variable domain of TCR clone 52186 (TRBV2, TRBJ2-3)
CASSTSVEGVTDTQYF

SEQ ID NO: 104373 - protein, 13 aa, Homo sapiens
  CDR3 for alpha chain variable domain of TCR clone 52187 (TRAV21, TRAJ27)
FAARPGNAGKSTF

SEQ ID NO: 104374 - protein, 13 aa, Homo sapiens
  CDR3 for beta chain variable domain of TCR clone 52187 (TRBV13, TRBJ2-1)
CASILGGRGEQFF

SEQ ID NO: 104375 - protein, 15 aa, Homo sapiens
  CDR3 for alpha chain variable domain of TCR clone 52188 (TRAV12-2, TRAJ20)
CAVKGGFGAGTAVTV

SEQ ID NO: 104376 - protein, 13 aa, Homo sapiens
  CDR3 for beta chain variable domain of TCR clone 52188 (TRBV12-4, TRBJ2-7)
CASSPGQLYEQYF

SEQ ID NO: 104377 - protein, 17 aa, Homo sapiens
  CDR3 for alpha chain variable domain of TCR clone 52189 (TRAV3, TRAJ6)
CAVRDGPRAGGSYIPTF

SEQ ID NO: 104378 - protein, 15 aa, Homo sapiens
  CDR3 for beta chain variable domain of TCR clone 52189 (TRBV19, TRBJ2-1)
CASSSPGVPLDEQFF

SEQ ID NO: 104379 - protein, 14 aa, Homo sapiens
  CDR3 for alpha chain variable domain of TCR clone 52190 (TRAV17, TRAJ54)
CSTDANQGAQKLVF

SEQ ID NO: 104380 - protein, 12 aa, Homo sapiens
  CDR3 for beta chain variable domain of TCR clone 52190 (TRBV6-3, TRBJ2-1)
CASSGSYNEQFF

SEQ ID NO: 104381 - protein, 13 aa, Homo sapiens
  CDR3 for alpha chain variable domain of TCR clone 52191 (TRAV3, TRAJ27)
CAVRPLGVGKSTF

SEQ ID NO: 104382 - protein, 13 aa, Homo sapiens
  CDR3 for beta chain variable domain of TCR clone 52191 (TRBV7-9, TRBJ2-3)
CASSPGSTDTQYF

SEQ ID NO: 104383 - protein, 13 aa, Homo sapiens
  CDR3 for alpha chain variable domain of TCR clone 52192 (TRAV8-6, TRAJ49)
CAVITNTGNQFYF

SEQ ID NO: 104384 - protein, 11 aa, Homo sapiens
  CDR3 for beta chain variable domain of TCR clone 52192 (TRBV29-1, TRBJ2-5)
CSEDRTGTQYF

SEQ ID NO: 104385 - protein, 14 aa, Homo sapiens
  CDR3 for alpha chain variable domain of TCR clone 52193 (TRAV12-1, TRAJ9)
CVVTGYTGGFKTIF

SEQ ID NO: 104386 - protein, 15 aa, Homo sapiens
  CDR3 for beta chain variable domain of TCR clone 52193 (TRBV20-1, TRBJ1-1)
CSARAGGTLKLSLDK

SEQ ID NO: 104387 - protein, 12 aa, Homo sapiens
  CDR3 for alpha chain variable domain of TCR clone 52194 (TRAV38-1, TRAJ32)
CAPLGATNKLIF

SEQ ID NO: 104388 - protein, 14 aa, Homo sapiens
  CDR3 for beta chain variable domain of TCR clone 52194 (TRBV29-1, TRBJ2-5)
CSVETSGSGETQYL

SEQ ID NO: 104389 - protein, 11 aa, Homo sapiens
  CDR3 for alpha chain variable domain of TCR clone 52195 (TRAV26-1, TRAJ27)
CIDPNAGKSTF

SEQ ID NO: 104390 - protein, 18 aa, Homo sapiens
  CDR3 for beta chain variable domain of TCR clone 52195 (TRBV7-9, TRBJ2-6)
CASSFPGAGIAGANVLTF

SEQ ID NO: 104391 - protein, 12 aa, Homo sapiens
  CDR3 for alpha chain variable domain of TCR clone 52196 (TRAV29/DV5, TRAJ41)
CAAISSGYALNF

SEQ ID NO: 104392 - protein, 17 aa, Homo sapiens
  CDR3 for beta chain variable domain of TCR clone 52196 (TRBV18, TRBJ2-1)
CASPKGLSGGADNEQFF

SEQ ID NO: 104393 - protein, 13 aa, Homo sapiens
  CDR3 for alpha chain variable domain of TCR clone 52197 (TRAV8-3, TRAJ6)
CAVGSGGSYILTF

SEQ ID NO: 104394 - protein, 14 aa, Homo sapiens
  CDR3 for beta chain variable domain of TCR clone 52197 (TRBV11-2, TRBJ1-1)
CASSTQRGRTEAFF

SEQ ID NO: 104395 - protein, 12 aa, Homo sapiens
  CDR3 for alpha chain variable domain of TCR clone 52198 (TRAV12-2, TRAJ17)
CAMTLTGNKLTF

SEQ ID NO: 104396 - protein, 13 aa, Homo sapiens
  CDR3 for beta chain variable domain of TCR clone 52198 (TRBV12-4, TRBJ1-1)
CASSPGTGFEAFF

SEQ ID NO: 104397 - protein, 10 aa, Homo sapiens
  CDR3 for alpha chain variable domain of TCR clone 52199 (TRAV21, TRAJ43)
CAVRIGDMRF

SEQ ID NO: 104398 - protein, 13 aa, Homo sapiens
  CDR3 for beta chain variable domain of TCR clone 52199 (TRBV20-1, TRBJ2-7)
RSAPGLADYEQYF

SEQ ID NO: 104399 - protein, 14 aa, Homo sapiens
  CDR3 for alpha chain variable domain of TCR clone 52200 (TRAV8-2, TRAJ4)
CVVSPSGGYNKLIF

SEQ ID NO: 104400 - protein, 14 aa, Homo sapiens
  CDR3 for beta chain variable domain of TCR clone 52200 (TRBV5-4, TRBJ2-2)
CASRLDGGTGELFF

SEQ ID NO: 104401 - protein, 20 aa, Homo sapiens
  CDR3 for alpha chain variable domain of TCR clone 52201 (TRAV1-2, TRAJ34)
LLKELQMKDSASPNTDKLIF

SEQ ID NO: 104402 - protein, 16 aa, Homo sapiens
  CDR3 for beta chain variable domain of TCR clone 52201 (TRBV12-5, TRBJ2-5)
CASGPRTSGNQETQYF

SEQ ID NO: 104403 - protein, 12 aa, Homo sapiens
  CDR3 for alpha chain variable domain of TCR clone 52202 (TRAV12-3, TRAJ17)
CAMTLTGNKLTF

SEQ ID NO: 104404 - protein, 13 aa, Homo sapiens
  CDR3 for beta chain variable domain of TCR clone 52202 (TRBV27, TRBJ2-1)
RASRTLGVGEQFF

SEQ ID NO: 104405 - protein, 11 aa, Homo sapiens
  CDR3 for alpha chain variable domain of TCR clone 52203 (TRAV2, TRAJ13)
CASGGYKKVTF

SEQ ID NO: 104406 - protein, 16 aa, Homo sapiens
  CDR3 for beta chain variable domain of TCR clone 52203 (TRBV6-1, TRBJ2-5)
CASSETLDRGAETQYF

SEQ ID NO: 104407 - protein, 13 aa, Homo sapiens
  CDR3 for alpha chain variable domain of TCR clone 52204 (TRAV1-1, TRAJ9)
CAPKNTGGFKTIF

SEQ ID NO: 104408 - protein, 14 aa, Homo sapiens
  CDR3 for beta chain variable domain of TCR clone 52204 (TRBV20-1, TRBJ2-1)
CSAQIGGSANEQFF

SEQ ID NO: 104409 - protein, 15 aa, Homo sapiens
  CDR3 for alpha chain variable domain of TCR clone 52205 (TRAV12-3, TRAJ6)
CAMSATSGGSYIPTF

SEQ ID NO: 104410 - protein, 15 aa, Homo sapiens
  CDR3 for beta chain variable domain of TCR clone 52205 (TRBV27, TRBJ2-3)
CASSSLAGVIDTQYF

SEQ ID NO: 104411 - protein, 15 aa, Homo sapiens
  CDR3 for alpha chain variable domain of TCR clone 52206 (TRAV21, TRAJ13)
CAVGPTSGGYQKVTF

SEQ ID NO: 104412 - protein, 18 aa, Homo sapiens
  CDR3 for beta chain variable domain of TCR clone 52206 (TRBV11-3, TRBJ2-1)
CASSSYPGGRDSYNEQFF

SEQ ID NO: 104413 - protein, 16 aa, Homo sapiens
  CDR3 for alpha chain variable domain of TCR clone 52207 (TRAV27, TRAJ13)
CAGAKSDSGGYQKVTF

SEQ ID NO: 104414 - protein, 16 aa, Homo sapiens
  CDR3 for beta chain variable domain of TCR clone 52207 (TRBV6-1, TRBJ2-5)
CASSETLDRGAETQYF

SEQ ID NO: 104415 - protein, 13 aa, Homo sapiens
  CDR3 for alpha chain variable domain of TCR clone 52208 (TRAV13-1, TRAJ17)
CAASRAAGNKLTF

SEQ ID NO: 104416 - protein, 15 aa, Homo sapiens
  CDR3 for beta chain variable domain of TCR clone 52208 (TRBV7-9, TRBJ1-6)
CASSSPGRGNSPLHF

SEQ ID NO: 104417 - protein, 11 aa, Homo sapiens
  CDR3 for alpha chain variable domain of TCR clone 52209 (TRAV3, TRAJ21)
CAVGNFNRFYF

SEQ ID NO: 104418 - protein, 14 aa, Homo sapiens
  CDR3 for beta chain variable domain of TCR clone 52209 (TRBV20-1, TRBJ2-2)
CSAPDTANTGELFF

SEQ ID NO: 104419 - protein, 14 aa, Homo sapiens
  CDR3 for alpha chain variable domain of TCR clone 52210 (TRAV13-1, TRAJ44)
CAAKATGTASKLTF

SEQ ID NO: 104420 - protein, 16 aa, Homo sapiens
  CDR3 for beta chain variable domain of TCR clone 52210 (TRBV15, TRBJ1-2)
CATSRGPRTGGGGYAF

SEQ ID NO: 104421 - protein, 13 aa, Homo sapiens
  CDR3 for alpha chain variable domain of TCR clone 52211 (TRAV17, TRAJ9)
CATDYTGGFRTIF

SEQ ID NO: 104422 - protein, 15 aa, Homo sapiens
  CDR3 for beta chain variable domain of TCR clone 52211 (TRBV6-3, TRBJ2-7)
CASSSPGTVFYEQYF

SEQ ID NO: 104423 - protein, 12 aa, Homo sapiens
  CDR3 for alpha chain variable domain of TCR clone 52212 (TRAV8-3, TRAJ20)
CAVGANDYKLSF

SEQ ID NO: 104424 - protein, 15 aa, Homo sapiens
  CDR3 for beta chain variable domain of TCR clone 52212 (TRBV7-9, TRBJ1-4)
CASSRTGGFNEKLFF

SEQ ID NO: 104425 - protein, 14 aa, Homo sapiens
  CDR3 for alpha chain variable domain of TCR clone 52213 (TRAV35, TRAJ22)
CAGLRPGSARQLTF

SEQ ID NO: 104426 - protein, 15 aa, Homo sapiens
  CDR3 for beta chain variable domain of TCR clone 52213 (TRBV12-4, TRBJ2-5)
CAISPPTGLQETQYF

SEQ ID NO: 104427 - protein, 13 aa, Homo sapiens
  CDR3 for alpha chain variable domain of TCR clone 52214 (TRAV1-2, TRAJ9)
CAVLDTGGFKTIF

SEQ ID NO: 104428 - protein, 14 aa, Homo sapiens
  CDR3 for beta chain variable domain of TCR clone 52214 (TRBV20-1, TRBJ2-3)
CSARGGTSTDTQYF

SEQ ID NO: 104429 - protein, 11 aa, Homo sapiens
  CDR3 for alpha chain variable domain of TCR clone 52215 (TRAV2, TRAJ21)
CAVFNFNKFYF

SEQ ID NO: 104430 - protein, 15 aa, Homo sapiens
  CDR3 for beta chain variable domain of TCR clone 52215 (TRBV20-1, TRBJ2-7)
CSARDRVSGMDEQYF

SEQ ID NO: 104431 - protein, 15 aa, Homo sapiens
  CDR3 for alpha chain variable domain of TCR clone 52216 (TRAV17, TRAJ6)
CATDLPSGGSYIPTF

SEQ ID NO: 104432 - protein, 16 aa, Homo sapiens
  CDR3 for beta chain variable domain of TCR clone 52216 (TRBV4-1, TRBJ2-7)
CASGQDPTGYSYEQYF

SEQ ID NO: 104433 - protein, 15 aa, Homo sapiens
  CDR3 for alpha chain variable domain of TCR clone 52217 (TRAV3, TRAJ4)
CAVRDGTGGYNKLIF

SEQ ID NO: 104434 - protein, 13 aa, Homo sapiens
  CDR3 for beta chain variable domain of TCR clone 52217 (TRBV12-5, TRBJ1-2)
CASGVRTGNGYAF

SEQ ID NO: 104435 - protein, 14 aa, Homo sapiens
  CDR3 for alpha chain variable domain of TCR clone 52218 (TRAV12-2, TRAJ13)
CAVKKTGGYQKGTF

SEQ ID NO: 104436 - protein, 12 aa, Homo sapiens
  CDR3 for beta chain variable domain of TCR clone 52218 (TRBV12-4, TRBJ1-2)
CASSFIWLHLRF

SEQ ID NO: 104437 - protein, 15 aa, Homo sapiens
  CDR3 for alpha chain variable domain of TCR clone 52219 (TRAV12-2, TRAJ43)
CAFDMPFGAGTRLTV

SEQ ID NO: 104438 - protein, 18 aa, Homo sapiens
  CDR3 for beta chain variable domain of TCR clone 52219 (TRBV20-1, TRBJ2-3)
CSASGLAGGPGTTDTQYF

SEQ ID NO: 104439 - protein, 14 aa, Homo sapiens
  CDR3 for alpha chain variable domain of TCR clone 52220 (TRAV12-3, TRAJ22)
CAMSLFVSARQLTF

SEQ ID NO: 104440 - protein, 11 aa, Homo sapiens
  CDR3 for beta chain variable domain of TCR clone 52220 (TRBV12-4, TRBJ2-2)
CASSSAGELFF

SEQ ID NO: 104441 - protein, 14 aa, Homo sapiens
  CDR3 for alpha chain variable domain of TCR clone 52221 (TRAV1-2, TRAJ16)
CAVNRFPDGQKLLF

SEQ ID NO: 104442 - protein, 12 aa, Homo sapiens
  CDR3 for beta chain variable domain of TCR clone 52221 (TRBV28, TRBJ2-6)
CAIQAGANVLTF

SEQ ID NO: 104443 - protein, 11 aa, Homo sapiens
  CDR3 for alpha chain variable domain of TCR clone 52222 (TRAV12-2, TRAJ43)
CAAYNNNNMRF

SEQ ID NO: 104444 - protein, 14 aa, Homo sapiens
  CDR3 for beta chain variable domain of TCR clone 52222 (TRBV7-8, TRBJ1-2)
CASSAGTAIYGYTF

SEQ ID NO: 104445 - protein, 13 aa, Homo sapiens
  CDR3 for alpha chain variable domain of TCR clone 52223 (TRAV27, TRAJ41)
CAGEGNSGYALNF

SEQ ID NO: 104446 - protein, 14 aa, Homo sapiens
  CDR3 for beta chain variable domain of TCR clone 52223 (TRBV7-2, TRBJ1-1)
CASSFLTVTTEAFF

SEQ ID NO: 104447 - protein, 16 aa, Homo sapiens
  CDR3 for alpha chain variable domain of TCR clone 52224 (TRAV3, TRAJ18)
CAVRDGRGSTLGRRYF

SEQ ID NO: 104448 - protein, 17 aa, Homo sapiens
  CDR3 for beta chain variable domain of TCR clone 52224 (TRBV5-1, TRBJ2-3)
CASSKIGLADRTDTQYF

SEQ ID NO: 104449 - protein, 15 aa, Homo sapiens
  CDR3 for alpha chain variable domain of TCR clone 52225 (TRAV20, TRAJ43)
CAVQAGKSSNKDMRF

SEQ ID NO: 104450 - protein, 14 aa, Homo sapiens
  CDR3 for beta chain variable domain of TCR clone 52225 (TRBV27, TRBJ2-1)
CASRHLGGGKEQFF

SEQ ID NO: 104451 - protein, 14 aa, Homo sapiens
  CDR3 for alpha chain variable domain of TCR clone 52226 (TRAV1-2, TRAJ16)
CAVNRFSDGQKLLF

SEQ ID NO: 104452 - protein, 15 aa, Homo sapiens
  CDR3 for beta chain variable domain of TCR clone 52226 (TRBV7-9, TRBJ1-6)
CASSSPGRGNSPLDF

SEQ ID NO: 104453 - protein, 13 aa, Homo sapiens
  CDR3 for alpha chain variable domain of TCR clone 52227 (TRAV8-3, TRAJ48)
CAVVPFGNEKLTF

SEQ ID NO: 104454 - protein, 15 aa, Homo sapiens
  CDR3 for beta chain variable domain of TCR clone 52227 (TRBV11-2, TRBJ2-1)
CASSSPPTRYNEQFF

SEQ ID NO: 104455 - protein, 14 aa, Homo sapiens
  CDR3 for alpha chain variable domain of TCR clone 52228 (TRAV12-2, TRAJ40)
CAVKIPSGTYKYIF

SEQ ID NO: 104456 - protein, 15 aa, Homo sapiens
  CDR3 for beta chain variable domain of TCR clone 52228 (TRBV28, TRBJ2-1)
CASSGLAEVDNEQFF

SEQ ID NO: 104457 - protein, 13 aa, Homo sapiens
  CDR3 for alpha chain variable domain of TCR clone 52229 (TRAV26-1, )
CIVSHRVEGCWNQ

SEQ ID NO: 104458 - protein, 14 aa, Homo sapiens
  CDR3 for beta chain variable domain of TCR clone 52229 (TRBV20-1, TRBJ2-7)
CSAWTALSSYEQYF

SEQ ID NO: 104459 - protein, 13 aa, Homo sapiens
  CDR3 for alpha chain variable domain of TCR clone 52230 (TRAV17, TRAJ9)
CATAYTGGFKTIF

SEQ ID NO: 104460 - protein, 14 aa, Homo sapiens
  CDR3 for beta chain variable domain of TCR clone 52230 (TRBV19, TRBJ2-5)
CASSMTGQQETQYF

SEQ ID NO: 104461 - protein, 12 aa, Homo sapiens
  CDR3 for alpha chain variable domain of TCR clone 52231 (TRAV21, TRAJ49)
CAVNDGGNQFYF

SEQ ID NO: 104462 - protein, 14 aa, Homo sapiens
  CDR3 for beta chain variable domain of TCR clone 52231 (TRBV12-5, TRBJ2-5)
CASGSRTHQETQYS

SEQ ID NO: 104463 - protein, 17 aa, Homo sapiens
  CDR3 for alpha chain variable domain of TCR clone 52232 (TRAV3, TRAJ13)
CTVRDMRRTGGYQKVTF

SEQ ID NO: 104464 - protein, 14 aa, Homo sapiens
  CDR3 for beta chain variable domain of TCR clone 52232 (TRBV5-1, TRBJ2-7)
CASSLTGSGYEQYF

SEQ ID NO: 104465 - protein, 14 aa, Homo sapiens
  CDR3 for alpha chain variable domain of TCR clone 52233 (TRAV12-2, TRAJ5)
CAVNRSTGRRALTF

SEQ ID NO: 104466 - protein, 15 aa, Homo sapiens
  CDR3 for beta chain variable domain of TCR clone 52233 (TRBV6-3, TRBJ2-7)
CASSSPGTVFYEQYF

SEQ ID NO: 104467 - protein, 11 aa, Homo sapiens
  CDR3 for alpha chain variable domain of TCR clone 52234 (TRAV2, TRAJ13)
CASGGYQKVTF

SEQ ID NO: 104468 - protein, 14 aa, Homo sapiens
  CDR3 for beta chain variable domain of TCR clone 52234 (TRBV7-3, TRBJ2-7)
CASSYDQDYYEQYL

SEQ ID NO: 104469 - protein, 14 aa, Homo sapiens
  CDR3 for alpha chain variable domain of TCR clone 52235 (TRAV1-2, TRAJ16)
CAVNRFSDGHKLLF

SEQ ID NO: 104470 - protein, 13 aa, Homo sapiens
  CDR3 for beta chain variable domain of TCR clone 52235 (TRBV19, TRBJ1-2)
CASSVPGQDGYTF

SEQ ID NO: 104471 - protein, 15 aa, Homo sapiens
  CDR3 for alpha chain variable domain of TCR clone 52236 (TRAV2, TRAJ24)
CAVVRLKNSWGKLQF

SEQ ID NO: 104472 - protein, 16 aa, Homo sapiens
  CDR3 for beta chain variable domain of TCR clone 52236 (TRBV7-7, TRBJ2-3)
CASSPGTSGSTDPQYF

SEQ ID NO: 104473 - protein, 16 aa, Homo sapiens
  CDR3 for alpha chain variable domain of TCR clone 52237 (TRAV16, TRAJ4)
CITMLPFSGGYNKLIF

SEQ ID NO: 104474 - protein, 14 aa, Homo sapiens
  CDR3 for beta chain variable domain of TCR clone 52237 (TRBV19, TRBJ2-7)
CASSMGQGAIEQYF

SEQ ID NO: 104475 - protein, 12 aa, Homo sapiens
  CDR3 for alpha chain variable domain of TCR clone 52238 (TRAV35, TRAJ30)
CAGQLADDKIIF

SEQ ID NO: 104476 - protein, 17 aa, Homo sapiens
  CDR3 for beta chain variable domain of TCR clone 52238 (TRBV4-2, TRBJ2-5)
CANSPGRWRNFQETQYF

SEQ ID NO: 104477 - protein, 15 aa, Homo sapiens
  CDR3 for alpha chain variable domain of TCR clone 52239 (TRAV12-2, TRAJ10)
CREQGTHGRGNKLTF

SEQ ID NO: 104478 - protein, 12 aa, Homo sapiens
  CDR3 for beta chain variable domain of TCR clone 52239 (TRBV28, TRBJ2-7)
CASSFSSYEQYF

SEQ ID NO: 104479 - protein, 16 aa, Homo sapiens
  CDR3 for alpha chain variable domain of TCR clone 52240 (TRAV3, TRAJ6)
CAVRDGVGRRKLHTYI

SEQ ID NO: 104480 - protein, 15 aa, Homo sapiens
  CDR3 for beta chain variable domain of TCR clone 52240 (TRBV5-1, TRBJ2-7)
CASSLGDFTTYEQYF

SEQ ID NO: 104481 - protein, 13 aa, Homo sapiens
  CDR3 for alpha chain variable domain of TCR clone 52241 (TRAV29/DV5, TRAJ53)
CSKRGGSNYKLTF

SEQ ID NO: 104482 - protein, 17 aa, Homo sapiens
  CDR3 for beta chain variable domain of TCR clone 52241 (TRBV7-8, TRBJ2-6)
CASSAGTGGAGANVLTF

SEQ ID NO: 104483 - protein, 11 aa, Homo sapiens
  CDR3 for alpha chain variable domain of TCR clone 52242 (TRAV12-1, TRAJ26)
CVVAYGQNFVF

SEQ ID NO: 104484 - protein, 16 aa, Homo sapiens
  CDR3 for beta chain variable domain of TCR clone 52242 (TRBV12-5, TRBJ2-5)
CASGPRTSGNQETQYF

SEQ ID NO: 104485 - protein, 13 aa, Homo sapiens
  CDR3 for alpha chain variable domain of TCR clone 52243 (TRAV12-3, TRAJ9)
CAMRNTGGFKTIF

SEQ ID NO: 104486 - protein, 15 aa, Homo sapiens
  CDR3 for beta chain variable domain of TCR clone 52243 (TRBV9, TRBJ1-6)
CASSVAGTGDSPLHF

SEQ ID NO: 104487 - protein, 14 aa, Homo sapiens
  CDR3 for alpha chain variable domain of TCR clone 52244 (TRAV13-1, TRAJ35)
CAASKGGFGNVLHF

SEQ ID NO: 104488 - protein, 14 aa, Homo sapiens
  CDR3 for beta chain variable domain of TCR clone 52244 (TRBV4-1, TRBJ2-2)
CASSQAVNTGELFF

SEQ ID NO: 104489 - protein, 16 aa, Homo sapiens
  CDR3 for alpha chain variable domain of TCR clone 52245 (TRAV17, TRAJ9)
CATGEWGGTGGFKTTF

SEQ ID NO: 104490 - protein, 12 aa, Homo sapiens
  CDR3 for beta chain variable domain of TCR clone 52245 (TRBV11-2, TRBJ2-1)
CASSPGNNEQFF

SEQ ID NO: 104491 - protein, 12 aa, Homo sapiens
  CDR3 for alpha chain variable domain of TCR clone 52246 (TRAV13-1, TRAJ5)
CAAKAGRRALTF

SEQ ID NO: 104492 - protein, 14 aa, Homo sapiens
  CDR3 for beta chain variable domain of TCR clone 52246 (TRBV6-1, TRBJ2-5)
CASGGAGIQGTQYF

SEQ ID NO: 104493 - protein, 15 aa, Homo sapiens
  CDR3 for alpha chain variable domain of TCR clone 52247 (TRAV8-4, TRAJ6)
CAVSAPSGGSYIPTF

SEQ ID NO: 104494 - protein, 15 aa, Homo sapiens
  CDR3 for beta chain variable domain of TCR clone 52247 (TRBV7-3, TRBJ2-2)
CASKANGANTGGLFF

SEQ ID NO: 104495 - protein, 15 aa, Homo sapiens
  CDR3 for alpha chain variable domain of TCR clone 52248 (TRAV12-2, TRAJ43)
CAFDMRFGAGTRMTV

SEQ ID NO: 104496 - protein, 18 aa, Homo sapiens
  CDR3 for beta chain variable domain of TCR clone 52248 (TRBV20-1, TRBJ2-3)
CSASGLAGGPGTTDTQYF

SEQ ID NO: 104497 - protein, 10 aa, Homo sapiens
  CDR3 for alpha chain variable domain of TCR clone 52249 (TRAV21, TRAJ24)
CAGIRLRSTD

SEQ ID NO: 104498 - protein, 15 aa, Homo sapiens
  CDR3 for beta chain variable domain of TCR clone 52249 (TRBV7-2, TRBJ2-3)
CASSPRGLSTDTQYF

SEQ ID NO: 104499 - protein, 16 aa, Homo sapiens
  CDR3 for alpha chain variable domain of TCR clone 52250 (TRAV21, TRAJ33)
CAVSPASMDSNYQLIW

SEQ ID NO: 104500 - protein, 17 aa, Homo sapiens
  CDR3 for beta chain variable domain of TCR clone 52250 (TRBV2, TRBJ1-4)
CASSKRESTQGEEKLFF

SEQ ID NO: 104501 - protein, 20 aa, Homo sapiens
  CDR3 for alpha chain variable domain of TCR clone 52251 (TRAV1-1, TRAJ4)
CLLLLRCEGFLSGGYNKLIF

SEQ ID NO: 104502 - protein, 16 aa, Homo sapiens
  CDR3 for beta chain variable domain of TCR clone 52251 (TRBV28, TRBJ1-4)
CASSSPYRGRSEKLFF

SEQ ID NO: 104503 - protein, 15 aa, Homo sapiens
  CDR3 for alpha chain variable domain of TCR clone 52252 (TRAV26-1, TRAJ40)
CIVRAVPSGTYKYIF

SEQ ID NO: 104504 - protein, 14 aa, Homo sapiens
  CDR3 for beta chain variable domain of TCR clone 52252 (TRBV19, TRBJ2-1)
RASKDPGLANEQFF

SEQ ID NO: 104505 - protein, 13 aa, Homo sapiens
  CDR3 for alpha chain variable domain of TCR clone 52253 (TRAV8-4, TRAJ10)
CAAFTGGGNKLTF

SEQ ID NO: 104506 - protein, 15 aa, Homo sapiens
  CDR3 for beta chain variable domain of TCR clone 52253 (TRBV2, TRBJ2-3)
CASSDFEKATDTRYF

SEQ ID NO: 104507 - protein, 14 aa, Homo sapiens
  CDR3 for alpha chain variable domain of TCR clone 52254 (TRAV1-1, TRAJ27)
CPVIYNTNAGKSTF

SEQ ID NO: 104508 - protein, 15 aa, Homo sapiens
  CDR3 for beta chain variable domain of TCR clone 52254 (TRBV7-2, TRBJ2-1)
CASSSGLAGGNEQFF

SEQ ID NO: 104509 - protein, 16 aa, Homo sapiens
  CDR3 for alpha chain variable domain of TCR clone 52255 (TRAV26-1, TRAJ53)
CIVRVAMGGSNYKLTF

SEQ ID NO: 104510 - protein, 18 aa, Homo sapiens
  CDR3 for beta chain variable domain of TCR clone 52255 (TRBV28, TRBJ2-7)
CASSLFLRQGAPSSTSGR

SEQ ID NO: 104511 - protein, 16 aa, Homo sapiens
  CDR3 for alpha chain variable domain of TCR clone 52256 (TRAV30, TRAJ24)
CGTEIVDADSWGKFQF

SEQ ID NO: 104512 - protein, 13 aa, Homo sapiens
  CDR3 for beta chain variable domain of TCR clone 52256 (TRBV12-4, TRBJ2-7)
CASSRQASYEQYF

SEQ ID NO: 104513 - protein, 14 aa, Homo sapiens
  CDR3 for alpha chain variable domain of TCR clone 52257 (TRAV9-2, TRAJ39)
CALYICNAGNMLTF

SEQ ID NO: 104514 - protein, 14 aa, Homo sapiens
  CDR3 for beta chain variable domain of TCR clone 52257 (TRBV25-1, TRBJ1-1)
CASTHLGGNTEAFF

SEQ ID NO: 104515 - protein, 15 aa, Homo sapiens
  CDR3 for alpha chain variable domain of TCR clone 52258 (TRAV8-3, TRAJ41)
RAVGSNSNSGYALNF

SEQ ID NO: 104516 - protein, 17 aa, Homo sapiens
  CDR3 for beta chain variable domain of TCR clone 52258 (TRBV25-1, TRBJ2-1)
CASSAYGQGRGVYEQFF

SEQ ID NO: 104517 - protein, 12 aa, Homo sapiens
  CDR3 for alpha chain variable domain of TCR clone 52259 (TRAV13-1, TRAJ21)
CAAKEGFNKFYF

SEQ ID NO: 104518 - protein, 13 aa, Homo sapiens
  CDR3 for beta chain variable domain of TCR clone 52259 (TRBV7-6, TRBJ1-2)
CASSLVADYGYTF

SEQ ID NO: 104519 - protein, 12 aa, Homo sapiens
  CDR3 for alpha chain variable domain of TCR clone 52260 (TRAV17, TRAJ30)
CVPERRDDKIIF

SEQ ID NO: 104520 - protein, 15 aa, Homo sapiens
  CDR3 for beta chain variable domain of TCR clone 52260 (TRBV20-1, TRBJ2-7)
CSARDRVSGMDEQYF

SEQ ID NO: 104521 - protein, 15 aa, Homo sapiens
  CDR3 for alpha chain variable domain of TCR clone 52261 (TRAV38-1, TRAJ37)
CAFIHGSGNTGKLIF

SEQ ID NO: 104522 - protein, 13 aa, Homo sapiens
  CDR3 for beta chain variable domain of TCR clone 52261 (TRBV7-3, TRBJ1-1)
CASSQDWGAEAFF

SEQ ID NO: 104523 - protein, 13 aa, Homo sapiens
  CDR3 for alpha chain variable domain of TCR clone 52262 (TRAV3, TRAJ29)
CAVRDIIYTPLVF

SEQ ID NO: 104524 - protein, 14 aa, Homo sapiens
  CDR3 for beta chain variable domain of TCR clone 52262 (TRBV27, TRBJ2-1)
CASSATGGYNEQFF

SEQ ID NO: 104525 - protein, 14 aa, Homo sapiens
  CDR3 for alpha chain variable domain of TCR clone 52263 (TRAV12-1, TRAJ17)
CVVNYKAAGNKLTF

SEQ ID NO: 104526 - protein, 14 aa, Homo sapiens
  CDR3 for beta chain variable domain of TCR clone 52263 (TRBV7-6, TRBJ2-7)
CASSFRQGADEQYF

SEQ ID NO: 104527 - protein, 16 aa, Homo sapiens
  CDR3 for alpha chain variable domain of TCR clone 52264 (TRAV12-3, TRAJ53)
CAMSPGSGGSNYKLTF

SEQ ID NO: 104528 - protein, 20 aa, Homo sapiens
  CDR3 for beta chain variable domain of TCR clone 52264 (TRBV7-8, TRBJ2-2)
CASSHLFPGPTTHITGELFF

SEQ ID NO: 104529 - protein, 17 aa, Homo sapiens
  CDR3 for alpha chain variable domain of TCR clone 52265 (TRAV2, TRAJ36)
CAAEDRGNWGKQPLLWD

SEQ ID NO: 104530 - protein, 14 aa, Homo sapiens
  CDR3 for beta chain variable domain of TCR clone 52265 (TRBV7-9, TRBJ2-5)
CASSLDTAQETQYF

SEQ ID NO: 104531 - protein, 14 aa, Homo sapiens
  CDR3 for alpha chain variable domain of TCR clone 52266 (TRAV17, TRAJ16)
CATADFSDGQKLLF

SEQ ID NO: 104532 - protein, 19 aa, Homo sapiens
  CDR3 for beta chain variable domain of TCR clone 52266 (TRBV19, TRBJ2-5)
CASSIGQVTDFFLGETQYF

SEQ ID NO: 104533 - protein, 12 aa, Homo sapiens
  CDR3 for alpha chain variable domain of TCR clone 52267 (TRAV3, TRAJ20)
CAVRDLDYKLSF

SEQ ID NO: 104534 - protein, 13 aa, Homo sapiens
  CDR3 for beta chain variable domain of TCR clone 52267 (TRBV9, TRBJ2-7)
CASSVGQGGEQYF

SEQ ID NO: 104535 - protein, 12 aa, Homo sapiens
  CDR3 for alpha chain variable domain of TCR clone 52268 (TRAV29/DV5, TRAJ49)
CAATATGNQFYF

SEQ ID NO: 104536 - protein, 19 aa, Homo sapiens
  CDR3 for beta chain variable domain of TCR clone 52268 (TRBV25-1, TRBJ2-2)
CAILVYRVDRGRKTGELFF

SEQ ID NO: 104537 - protein, 13 aa, Homo sapiens
  CDR3 for alpha chain variable domain of TCR clone 52269 (TRAV21, TRAJ27)
CAARPGNAGKSTF

SEQ ID NO: 104538 - protein, 14 aa, Homo sapiens
  CDR3 for beta chain variable domain of TCR clone 52269 (TRBV18, TRBJ2-5)
CASSPGVSQETQYF

SEQ ID NO: 104539 - protein, 13 aa, Homo sapiens
  CDR3 for alpha chain variable domain of TCR clone 52270 (TRAV21, TRAJ27)
CAARPGNAGKSTL

SEQ ID NO: 104540 - protein, 14 aa, Homo sapiens
  CDR3 for beta chain variable domain of TCR clone 52270 (TRBV7-6, TRBJ2-3)
CDSSLGTVTDTQYF

SEQ ID NO: 104541 - protein, 12 aa, Homo sapiens
  CDR3 for alpha chain variable domain of TCR clone 52271 (TRAV35, TRAJ28)
GVGGAGSYQLTF

SEQ ID NO: 104542 - protein, 15 aa, Homo sapiens
  CDR3 for beta chain variable domain of TCR clone 52271 (TRBV27, TRBJ2-1)
CASSNGGGSSNEQFF

SEQ ID NO: 104543 - protein, 15 aa, Homo sapiens
  CDR3 for alpha chain variable domain of TCR clone 52272 (TRAV12-3, TRAJ27)
CAIRAYNTNAGKSTF

SEQ ID NO: 104544 - protein, 13 aa, Homo sapiens
  CDR3 for beta chain variable domain of TCR clone 52272 (TRBV11-2, TRBJ2-5)
CASSRGPSETQYF

SEQ ID NO: 104545 - protein, 16 aa, Homo sapiens
  CDR3 for alpha chain variable domain of TCR clone 52273 (TRAV8-3, TRAJ10)
CAVGPGVTGGGNKLPF

SEQ ID NO: 104546 - protein, 13 aa, Homo sapiens
  CDR3 for beta chain variable domain of TCR clone 52273 (TRBV18, TRBJ1-1)
CASSPGPSGEAFF

SEQ ID NO: 104547 - protein, 14 aa, Homo sapiens
  CDR3 for alpha chain variable domain of TCR clone 52274 (TRAV20, TRAJ22)
CAVQVSGSARQLTF

SEQ ID NO: 104548 - protein, 13 aa, Homo sapiens
  CDR3 for beta chain variable domain of TCR clone 52274 (TRBV20-1, TRBJ2-5)
CSAREGGKETQYV

SEQ ID NO: 104549 - protein, 14 aa, Homo sapiens
  CDR3 for alpha chain variable domain of TCR clone 52275 (TRAV2, TRAJ9)
CAVEDRSGGFKTIF

SEQ ID NO: 104550 - protein, 17 aa, Homo sapiens
  CDR3 for beta chain variable domain of TCR clone 52275 (TRBV4-1, TRBJ2-7)
CASSRDPLGVRGGEQHF

SEQ ID NO: 104551 - protein, 15 aa, Homo sapiens
  CDR3 for alpha chain variable domain of TCR clone 52276 (TRAV12-2, TRAJ32)
CAVNHYGGATNKLIF

SEQ ID NO: 104552 - protein, 16 aa, Homo sapiens
  CDR3 for beta chain variable domain of TCR clone 52276 (TRBV28, TRBJ2-2)
CASSLEGGSNTGELFF

SEQ ID NO: 104553 - protein, 14 aa, Homo sapiens
  CDR3 for alpha chain variable domain of TCR clone 52277 (TRAV1-2, TRAJ16)
CAVNRFSDGQKLLF

SEQ ID NO: 104554 - protein, 13 aa, Homo sapiens
  CDR3 for beta chain variable domain of TCR clone 52277 (TRBV19, TRBJ2-7)
CASQSYGAGEQYF

SEQ ID NO: 104555 - protein, 13 aa, Homo sapiens
  CDR3 for alpha chain variable domain of TCR clone 52278 (TRAV38-1, TRAJ42)
CARWGGSQGNLIL

SEQ ID NO: 104556 - protein, 10 aa, Homo sapiens
  CDR3 for beta chain variable domain of TCR clone 52278 (TRBV2, TRBJ2-5)
CASSAATQYF

SEQ ID NO: 104557 - protein, 15 aa, Homo sapiens
  CDR3 for alpha chain variable domain of TCR clone 52279 (TRAV8-3, TRAJ32)
CAVGPYGGATNELIF

SEQ ID NO: 104558 - protein, 14 aa, Homo sapiens
  CDR3 for beta chain variable domain of TCR clone 52279 (TRBV29-1, TRBJ2-2)
CSVLAETNTGELFF

SEQ ID NO: 104559 - protein, 14 aa, Homo sapiens
  CDR3 for alpha chain variable domain of TCR clone 52280 (TRAV29/DV5, TRAJ45)
CAASFRGGADGLTF

SEQ ID NO: 104560 - protein, 11 aa, Homo sapiens
  CDR3 for beta chain variable domain of TCR clone 52280 (TRBV11-2, TRBJ2-2)
CASILPGELFF

SEQ ID NO: 104561 - protein, 15 aa, Homo sapiens
  CDR3 for alpha chain variable domain of TCR clone 52281 (TRAV8-3, TRAJ20)
CAVEAKGSNDYKLSF

SEQ ID NO: 104562 - protein, 14 aa, Homo sapiens
  CDR3 for beta chain variable domain of TCR clone 52281 (TRBV6-1, TRBJ1-3)
CASVQGGGGNTIYF

SEQ ID NO: 104563 - protein, 13 aa, Homo sapiens
  CDR3 for alpha chain variable domain of TCR clone 52282 (TRAV12-3, TRAJ56)
CALATGANSKLTF

SEQ ID NO: 104564 - protein, 12 aa, Homo sapiens
  CDR3 for beta chain variable domain of TCR clone 52282 (TRBV10-2, TRBJ2-3)
CASSPESDTQCF

SEQ ID NO: 104565 - protein, 15 aa, Homo sapiens
  CDR3 for alpha chain variable domain of TCR clone 52283 (TRAV12-2, TRAJ43)
CAFDMRFGAGTRLTV

SEQ ID NO: 104566 - protein, 14 aa, Homo sapiens
  CDR3 for beta chain variable domain of TCR clone 52283 (TRBV4-1, TRBJ2-3)
CASSQDIMWDTQYF

SEQ ID NO: 104567 - protein, 15 aa, Homo sapiens
  CDR3 for alpha chain variable domain of TCR clone 52284 (TRAV25, TRAJ52)
CAGRPGGTSYGKLTF

SEQ ID NO: 104568 - protein, 14 aa, Homo sapiens
  CDR3 for beta chain variable domain of TCR clone 52284 (TRBV7-8, TRBJ2-3)
CASSLEAGTDTQYF

SEQ ID NO: 104569 - protein, 14 aa, Homo sapiens
  CDR3 for alpha chain variable domain of TCR clone 52285 (TRAV1-2, TRAJ8)
CAVREDTGFQKLVF

SEQ ID NO: 104570 - protein, 16 aa, Homo sapiens
  CDR3 for beta chain variable domain of TCR clone 52285 (TRBV6-6, TRBJ2-1)
CASSYSFSGSYNEQFF

SEQ ID NO: 104571 - protein, 11 aa, Homo sapiens
  CDR3 for alpha chain variable domain of TCR clone 52286 (TRAV1-2, TRAJ20)
CAVASDYKLSF

SEQ ID NO: 104572 - protein, 16 aa, Homo sapiens
  CDR3 for beta chain variable domain of TCR clone 52286 (TRBV4-3, TRBJ1-6)
CASSQDPGVYNSPLHF

SEQ ID NO: 104573 - protein, 11 aa, Homo sapiens
  CDR3 for alpha chain variable domain of TCR clone 52287 (TRAV3, TRAJ21)
CAVGNFNKFYF

SEQ ID NO: 104574 - protein, 16 aa, Homo sapiens
  CDR3 for beta chain variable domain of TCR clone 52287 (TRBV19, TRBJ2-1)
CASSKGDRAPTMSSSS

SEQ ID NO: 104575 - protein, 18 aa, Homo sapiens
  CDR3 for alpha chain variable domain of TCR clone 52288 (TRAV26-2, TRAJ45)
CILRVDKYSGGGADGLTF

SEQ ID NO: 104576 - protein, 15 aa, Homo sapiens
  CDR3 for beta chain variable domain of TCR clone 52288 (TRBV9, TRBJ1-6)
CASSVAGTGDSPLHF

SEQ ID NO: 104577 - protein, 16 aa, Homo sapiens
  CDR3 for alpha chain variable domain of TCR clone 52289 (TRAV1-2, TRAJ10)
CAVRGVLTGGGNELTF

SEQ ID NO: 104578 - protein, 13 aa, Homo sapiens
  CDR3 for beta chain variable domain of TCR clone 52289 (TRBV12-4, TRBJ1-1)
CASSPGTGFEAFF

SEQ ID NO: 104579 - protein, 14 aa, Homo sapiens
  CDR3 for alpha chain variable domain of TCR clone 52290 (TRAV8-1, TRAJ5)
CAVRTDTGRRALTF

SEQ ID NO: 104580 - protein, 14 aa, Homo sapiens
  CDR3 for beta chain variable domain of TCR clone 52290 (TRBV25-1, TRBJ1-1)
CASTHLGGNTEAFF

SEQ ID NO: 104581 - protein, 19 aa, Homo sapiens
  CDR3 for alpha chain variable domain of TCR clone 52291 (TRAV3, TRAJ6)
CAVRDRNPSRSGGNYIPTF

SEQ ID NO: 104582 - protein, 15 aa, Homo sapiens
  CDR3 for beta chain variable domain of TCR clone 52291 (TRBV18, TRBJ2-7)
CASSPTFMDSYEQYF

SEQ ID NO: 104583 - protein, 16 aa, Homo sapiens
  CDR3 for alpha chain variable domain of TCR clone 52292 (TRAV3, TRAJ3)
CAVRDRAKSSASKIIF

SEQ ID NO: 104584 - protein, 13 aa, Homo sapiens
  CDR3 for beta chain variable domain of TCR clone 52292 (TRBV10-3, TRBJ2-7)
CASKLAVDYEQYF

SEQ ID NO: 104585 - protein, 13 aa, Homo sapiens
  CDR3 for alpha chain variable domain of TCR clone 52293 (TRAV36/DV7, TRAJ53)
CALSGGSNCKLTF

SEQ ID NO: 104586 - protein, 13 aa, Homo sapiens
  CDR3 for beta chain variable domain of TCR clone 52293 (TRBV28, TRBJ2-7)
CASSLPSRYEQYF

SEQ ID NO: 104587 - protein, 17 aa, Homo sapiens
  CDR3 for alpha chain variable domain of TCR clone 52294 (TRAV3, TRAJ42)
CAVRDRDYGGSQGNLIF

SEQ ID NO: 104588 - protein, 13 aa, Homo sapiens
  CDR3 for beta chain variable domain of TCR clone 52294 (TRBV7-9, TRBJ2-3)
CASSPGSTDTQYF

SEQ ID NO: 104589 - protein, 15 aa, Homo sapiens
  CDR3 for alpha chain variable domain of TCR clone 52295 (TRAV2, TRAJ9)
CAVEDRGTGVFKTIF

SEQ ID NO: 104590 - protein, 16 aa, Homo sapiens
  CDR3 for beta chain variable domain of TCR clone 52295 (TRBV24-1, TRBJ2-3)
CATSDPGTGATDTQYF

SEQ ID NO: 104591 - protein, 12 aa, Homo sapiens
  CDR3 for alpha chain variable domain of TCR clone 52296 (TRAV13-1, TRAJ27)
CAAHTNAGKSTF

SEQ ID NO: 104592 - protein, 13 aa, Homo sapiens
  CDR3 for beta chain variable domain of TCR clone 52296 (TRBV7-2, TRBJ2-2)
CASSLAVTGELFF

SEQ ID NO: 104593 - protein, 15 aa, Homo sapiens
  CDR3 for alpha chain variable domain of TCR clone 52297 (TRAV38-2/DV8, TRAJ57)
CAYKSGLGGSEKLAF

SEQ ID NO: 104594 - protein, 16 aa, Homo sapiens
  CDR3 for beta chain variable domain of TCR clone 52297 (TRBV28, TRBJ1-5)
CASSFRGGYSNQPQHF

SEQ ID NO: 104595 - protein, 13 aa, Homo sapiens
  CDR3 for alpha chain variable domain of TCR clone 52298 (TRAV1-2, TRAJ20)
CAVRDGNDYKLSF

SEQ ID NO: 104596 - protein, 16 aa, Homo sapiens
  CDR3 for beta chain variable domain of TCR clone 52298 (TRBV12-5, TRBJ2-5)
CASGPRTGGNQETQYF

SEQ ID NO: 104597 - protein, 17 aa, Homo sapiens
  CDR3 for alpha chain variable domain of TCR clone 52299 (TRAV35, TRAJ38)
CAGQLQRDAGNNRKLIW

SEQ ID NO: 104598 - protein, 15 aa, Homo sapiens
  CDR3 for beta chain variable domain of TCR clone 52299 (TRBV7-9, TRBJ2-1)
CASSLGLAGGTEQFF

SEQ ID NO: 104599 - protein, 15 aa, Homo sapiens
  CDR3 for alpha chain variable domain of TCR clone 52300 (TRAV8-3, TRAJ45)
CASTYSGGGADGLTF

SEQ ID NO: 104600 - protein, 13 aa, Homo sapiens
  CDR3 for beta chain variable domain of TCR clone 52300 (TRBV10-3, TRBJ2-7)
CASKLAVNYEQYF

SEQ ID NO: 104601 - protein, 15 aa, Homo sapiens
  CDR3 for alpha chain variable domain of TCR clone 52301 (TRAV8-3, TRAJ11)
CAVGLLNSGYSTLTF

SEQ ID NO: 104602 - protein, 16 aa, Homo sapiens
  CDR3 for beta chain variable domain of TCR clone 52301 (TRBV7-2, TRBJ1-4)
CASSLAPGRRDEKLFF

SEQ ID NO: 104603 - protein, 15 aa, Homo sapiens
  CDR3 for alpha chain variable domain of TCR clone 52302 (TRAV3, TRAJ29)
CAVGAPLSGNTPLVF

SEQ ID NO: 104604 - protein, 15 aa, Homo sapiens
  CDR3 for beta chain variable domain of TCR clone 52302 (TRBV28, TRBJ1-1)
CASRIKGGLNTEAFF

SEQ ID NO: 104605 - protein, 11 aa, Homo sapiens
  CDR3 for alpha chain variable domain of TCR clone 52303 (TRAV12-1, TRAJ21)
CVVNNFNKLYF

SEQ ID NO: 104606 - protein, 14 aa, Homo sapiens
  CDR3 for beta chain variable domain of TCR clone 52303 (TRBV15, TRBJ1-5)
CTTSREQSNQPQHF

SEQ ID NO: 104607 - protein, 12 aa, Homo sapiens
  CDR3 for alpha chain variable domain of TCR clone 52304 (TRAV12-3, TRAJ20)
CAMVRGDYKLCF

SEQ ID NO: 104608 - protein, 12 aa, Homo sapiens
  CDR3 for beta chain variable domain of TCR clone 52304 (TRBV6-1, TRBJ2-7)
CASSDYSYEQYF

SEQ ID NO: 104609 - protein, 16 aa, Homo sapiens
  CDR3 for alpha chain variable domain of TCR clone 52305 (TRAV3, TRAJ3)
CAVRDRAKSSAPKIIF

SEQ ID NO: 104610 - protein, 16 aa, Homo sapiens
  CDR3 for beta chain variable domain of TCR clone 52305 (TRBV20-1, TRBJ2-4)
CSATSLAELAKNIQYF

SEQ ID NO: 104611 - protein, 14 aa, Homo sapiens
  CDR3 for alpha chain variable domain of TCR clone 52306 (TRAV13-1, TRAJ44)
CAAKATGTASKLTF

SEQ ID NO: 104612 - protein, 14 aa, Homo sapiens
  CDR3 for beta chain variable domain of TCR clone 52306 (TRBV19, TRBJ2-2)
CASSTPHRSGELFF

SEQ ID NO: 104613 - protein, 17 aa, Homo sapiens
  CDR3 for alpha chain variable domain of TCR clone 52307 (TRAV3, TRAJ6)
CAVRDGPRAGGSYIPTF

SEQ ID NO: 104614 - protein, 14 aa, Homo sapiens
  CDR3 for beta chain variable domain of TCR clone 52307 (TRBV7-3, TRBJ2-1)
CASSLAGGTNEQFF

SEQ ID NO: 104615 - protein, 11 aa, Homo sapiens
  CDR3 for alpha chain variable domain of TCR clone 52308 (TRAV35, TRAJ52)
CAGTPKGKLTF

SEQ ID NO: 104616 - protein, 14 aa, Homo sapiens
  CDR3 for beta chain variable domain of TCR clone 52308 (TRBV4-2, TRBJ2-1)
CASGLDRAYNEQFF

SEQ ID NO: 104617 - protein, 12 aa, Homo sapiens
  CDR3 for alpha chain variable domain of TCR clone 52309 (TRAV12-3, TRAJ4)
RAMTGAGTRLAV

SEQ ID NO: 104618 - protein, 14 aa, Homo sapiens
  CDR3 for beta chain variable domain of TCR clone 52309 (TRBV10-3, TRBJ1-1)
CAISDTDRGVEAFF

SEQ ID NO: 104619 - protein, 13 aa, Homo sapiens
  CDR3 for alpha chain variable domain of TCR clone 52310 (TRAV27, TRAJ6)
CAGGTRGSYIPTF

SEQ ID NO: 104620 - protein, 13 aa, Homo sapiens
  CDR3 for beta chain variable domain of TCR clone 52310 (TRBV4-1, TRBJ2-2)
CASSQGNTGELFF

SEQ ID NO: 104621 - protein, 13 aa, Homo sapiens
  CDR3 for alpha chain variable domain of TCR clone 52311 (TRAV3, TRAJ28)
CACSGAGSYQLTF

SEQ ID NO: 104622 - protein, 11 aa, Homo sapiens
  CDR3 for beta chain variable domain of TCR clone 52311 (TRBV6-9, TRBJ2-7)
CAGRVASEQYF

SEQ ID NO: 104623 - protein, 11 aa, Homo sapiens
  CDR3 for alpha chain variable domain of TCR clone 52312 (TRAV21, TRAJ34)
CAHYNTDKLIF

SEQ ID NO: 104624 - protein, 16 aa, Homo sapiens
  CDR3 for beta chain variable domain of TCR clone 52312 (TRBV10-2, TRBJ1-1)
RASSEFGEGASTEAFF

SEQ ID NO: 104625 - protein, 12 aa, Homo sapiens
  CDR3 for alpha chain variable domain of TCR clone 52313 (TRAV1-1, TRAJ8)
CAGGTGFQKLVF

SEQ ID NO: 104626 - protein, 15 aa, Homo sapiens
  CDR3 for beta chain variable domain of TCR clone 52313 (TRBV7-9, TRBJ1-4)
SASSRTGGFNEKLFF

SEQ ID NO: 104627 - protein, 23 aa, Homo sapiens
  CDR3 for alpha chain variable domain of TCR clone 52314 (TRAV26-1, TRAJ38)
CIADNAGNNHIQNPDPAVYQLRD

SEQ ID NO: 104628 - protein, 13 aa, Homo sapiens
  CDR3 for beta chain variable domain of TCR clone 52314 (TRBV20-1, TRBJ1-1)
CSARGGGSTEAFL

SEQ ID NO: 104629 - protein, 14 aa, Homo sapiens
  CDR3 for alpha chain variable domain of TCR clone 52315 (TRAV20, TRAJ42)
CAVQEGGSQGNLIF

SEQ ID NO: 104630 - protein, 14 aa, Homo sapiens
  CDR3 for beta chain variable domain of TCR clone 52315 (TRBV28, TRBJ1-2)
CASRIQGANYGYTF

SEQ ID NO: 104631 - protein, 13 aa, Homo sapiens
  CDR3 for alpha chain variable domain of TCR clone 52316 (TRAV21, TRAJ27)
CAALNTNAGKSTF

SEQ ID NO: 104632 - protein, 15 aa, Homo sapiens
  CDR3 for beta chain variable domain of TCR clone 52316 (TRBV20-1, TRBJ2-7)
CSARRGLAESYEQYF

SEQ ID NO: 104633 - protein, 10 aa, Homo sapiens
  CDR3 for alpha chain variable domain of TCR clone 52317 (TRAV26-1, TRAJ40)
CIAGTYKYIF

SEQ ID NO: 104634 - protein, 17 aa, Homo sapiens
  CDR3 for beta chain variable domain of TCR clone 52317 (TRBV11-2, TRBJ2-1)
CTSSLYPPGVEYNEQFF

SEQ ID NO: 104635 - protein, 16 aa, Homo sapiens
  CDR3 for alpha chain variable domain of TCR clone 52318 (TRAV26-1, TRAJ37)
CIVRGDGSGSTGKLIF

SEQ ID NO: 104636 - protein, 17 aa, Homo sapiens
  CDR3 for beta chain variable domain of TCR clone 52318 (TRBV4-1, TRBJ2-7)
CASSRDPLGVRGGEQYF

SEQ ID NO: 104637 - protein, 14 aa, Homo sapiens
  CDR3 for alpha chain variable domain of TCR clone 52319 (TRAV2, TRAJ37)
CAVDFTSNTGKLIF

SEQ ID NO: 104638 - protein, 15 aa, Homo sapiens
  CDR3 for beta chain variable domain of TCR clone 52319 (TRBV20-1, TRBJ1-1)
CSASRGETGNTEAFF

SEQ ID NO: 104639 - protein, 17 aa, Homo sapiens
  CDR3 for alpha chain variable domain of TCR clone 52320 (TRAV3, TRAJ42)
CAVRDRDYGGSKGNLIF

SEQ ID NO: 104640 - protein, 14 aa, Homo sapiens
  CDR3 for beta chain variable domain of TCR clone 52320 (TRBV25-1, TRBJ1-1)
CASTHLGGNTEAFF

SEQ ID NO: 104641 - protein, 16 aa, Homo sapiens
  CDR3 for alpha chain variable domain of TCR clone 52321 (TRAV12-3, TRAJ53)
CAMGPGSGGSNYKLTF

SEQ ID NO: 104642 - protein, 15 aa, Homo sapiens
  CDR3 for beta chain variable domain of TCR clone 52321 (TRBV18, TRBJ2-7)
CASSPSSTGNYEQYF

SEQ ID NO: 104643 - protein, 14 aa, Homo sapiens
  CDR3 for alpha chain variable domain of TCR clone 52322 (TRAV1-2, TRAJ8)
CAVREDTGSQKLVF

SEQ ID NO: 104644 - protein, 17 aa, Homo sapiens
  CDR3 for beta chain variable domain of TCR clone 52322 (TRBV11-2, TRBJ2-1)
CASSLYPPGVEYNEQFF

SEQ ID NO: 104645 - protein, 15 aa, Homo sapiens
  CDR3 for alpha chain variable domain of TCR clone 52323 (TRAV17, TRAJ57)
CATGPSQGGSEKLVF

SEQ ID NO: 104646 - protein, 14 aa, Homo sapiens
  CDR3 for beta chain variable domain of TCR clone 52323 (TRBV12-5, TRBJ2-5)
CASGSRTHQATQYF

SEQ ID NO: 104647 - protein, 13 aa, Homo sapiens
  CDR3 for alpha chain variable domain of TCR clone 52324 (TRAV3, TRAJ41)
CAVSSNSGYALDF

SEQ ID NO: 104648 - protein, 12 aa, Homo sapiens
  CDR3 for beta chain variable domain of TCR clone 52324 (TRBV2, TRBJ2-1)
CASRPGPREQFF

SEQ ID NO: 104649 - protein, 16 aa, Homo sapiens
  CDR3 for alpha chain variable domain of TCR clone 52325 (TRAV30, TRAJ24)
CGTAMVDADSWGKFQF

SEQ ID NO: 104650 - protein, 14 aa, Homo sapiens
  CDR3 for beta chain variable domain of TCR clone 52325 (TRBV12-5, TRBJ2-5)
CASGSRTHQETQYF

SEQ ID NO: 104651 - protein, 14 aa, Homo sapiens
  CDR3 for alpha chain variable domain of TCR clone 52326 (TRAV12-3, TRAJ9)
CAMSPNTGDFKTIF

SEQ ID NO: 104652 - protein, 12 aa, Homo sapiens
  CDR3 for beta chain variable domain of TCR clone 52326 (TRBV19, TRBJ1-5)
CASSIAQQPQHF

SEQ ID NO: 104653 - protein, 20 aa, Homo sapiens
  CDR3 for alpha chain variable domain of TCR clone 52327 (TRAV26-1, TRAJ42)
CCVLLHRQTYYGGSQGNLIF

SEQ ID NO: 104654 - protein, 16 aa, Homo sapiens
  CDR3 for beta chain variable domain of TCR clone 52327 (TRBV7-3, TRBJ2-2)
CASSLKRGTLSGELCF

SEQ ID NO: 104655 - protein, 12 aa, Homo sapiens
  CDR3 for alpha chain variable domain of TCR clone 52328 (TRAV16, TRAJ10)
CSRTGGGNKLTF

SEQ ID NO: 104656 - protein, 14 aa, Homo sapiens
  CDR3 for beta chain variable domain of TCR clone 52328 (TRBV7-9, TRBJ2-7)
CASSLQQGGYEQYF

SEQ ID NO: 104657 - protein, 14 aa, Homo sapiens
  CDR3 for alpha chain variable domain of TCR clone 52329 (TRAV29/DV5, TRAJ36)
CAARRKTGANNLFF

SEQ ID NO: 104658 - protein, 14 aa, Homo sapiens
  CDR3 for beta chain variable domain of TCR clone 52329 (TRBV12-5, TRBJ2-5)
CASGSRTHLETQYF

SEQ ID NO: 104659 - protein, 12 aa, Homo sapiens
  CDR3 for alpha chain variable domain of TCR clone 52330 (TRAV1-2, TRAJ20)
CAVISNDYKLSF

SEQ ID NO: 104660 - protein, 12 aa, Homo sapiens
  CDR3 for beta chain variable domain of TCR clone 52330 (TRBV11-2, TRBJ2-2)
CASSLGGGELFF

SEQ ID NO: 104661 - protein, 16 aa, Homo sapiens
  CDR3 for alpha chain variable domain of TCR clone 52331 (TRAV12-3, TRAJ53)
CAMSPGSGGSNYILTF

SEQ ID NO: 104662 - protein, 17 aa, Homo sapiens
  CDR3 for beta chain variable domain of TCR clone 52331 (TRBV28, TRBJ2-5)
CASSTPEGDALQETQYF

SEQ ID NO: 104663 - protein, 14 aa, Homo sapiens
  CDR3 for alpha chain variable domain of TCR clone 52332 (TRAV12-2, TRAJ13)
CAVKKTGGYQKVTF

SEQ ID NO: 104664 - protein, 15 aa, Homo sapiens
  CDR3 for beta chain variable domain of TCR clone 52332 (TRBV28, TRBJ2-5)
CASSPGQGSIETQYF

SEQ ID NO: 104665 - protein, 11 aa, Homo sapiens
  CDR3 for alpha chain variable domain of TCR clone 52333 (TRAV3, TRAJ17)
PRGAAGNKLTF

SEQ ID NO: 104666 - protein, 15 aa, Homo sapiens
  CDR3 for beta chain variable domain of TCR clone 52333 (TRBV19, TRBJ2-1)
CASSSPGVPLDEQFF

SEQ ID NO: 104667 - protein, 17 aa, Homo sapiens
  CDR3 for alpha chain variable domain of TCR clone 52334 (TRAV13-1, TRAJ52)
CAAGRNAGGTSYGKLTF

SEQ ID NO: 104668 - protein, 12 aa, Homo sapiens
  CDR3 for beta chain variable domain of TCR clone 52334 (TRBV29-1, TRBJ1-3)
CSTRDSGNTMYF

SEQ ID NO: 104669 - protein, 16 aa, Homo sapiens
  CDR3 for alpha chain variable domain of TCR clone 52335 (TRAV30, TRAJ24)
CGTEIVDADGWGKFQF

SEQ ID NO: 104670 - protein, 17 aa, Homo sapiens
  CDR3 for beta chain variable domain of TCR clone 52335 (TRBV13, TRBJ2-3)
CASSLSRVAGGRNTQYF

SEQ ID NO: 104671 - protein, 13 aa, Homo sapiens
  CDR3 for alpha chain variable domain of TCR clone 52336 (TRAV6, TRAJ20)
CALAVSNDYKLSF

SEQ ID NO: 104672 - protein, 16 aa, Homo sapiens
  CDR3 for beta chain variable domain of TCR clone 52336 (TRBV7-9, TRBJ2-1)
CASSDVAGGSYNKQFF

SEQ ID NO: 104673 - protein, 14 aa, Homo sapiens
  CDR3 for alpha chain variable domain of TCR clone 52337 (TRAV12-1, TRAJ30)
WVVNIGGRDDKIIF

SEQ ID NO: 104674 - protein, 13 aa, Homo sapiens
  CDR3 for beta chain variable domain of TCR clone 52337 (TRBV12-5, TRBJ2-1)
CASGLGRGNEQFF

SEQ ID NO: 104675 - protein, 14 aa, Homo sapiens
  CDR3 for alpha chain variable domain of TCR clone 52338 (TRAV12-1, TRAJ17)
CVVNYKAAGNKLTF

SEQ ID NO: 104676 - protein, 17 aa, Homo sapiens
  CDR3 for beta chain variable domain of TCR clone 52338 (TRBV20-1, TRBJ2-1)
CSASSSGLAGSYNQQFF

SEQ ID NO: 104677 - protein, 13 aa, Homo sapiens
  CDR3 for alpha chain variable domain of TCR clone 52339 (TRAV13-1, TRAJ5)
CAARVTGRRARTF

SEQ ID NO: 104678 - protein, 15 aa, Homo sapiens
  CDR3 for beta chain variable domain of TCR clone 52339 (TRBV7-9, TRBJ2-7)
CASSPGGGLTYEQYF

SEQ ID NO: 104679 - protein, 14 aa, Homo sapiens
  CDR3 for alpha chain variable domain of TCR clone 52340 (TRAV17, TRAJ6)
CATNPAGGSYIPTF

SEQ ID NO: 104680 - protein, 17 aa, Homo sapiens
  CDR3 for beta chain variable domain of TCR clone 52340 (TRBV7-3, TRBJ2-3)
CASSLMKRMRGADTQYF

SEQ ID NO: 104681 - protein, 14 aa, Homo sapiens
  CDR3 for alpha chain variable domain of TCR clone 52341 (TRAV12-3, TRAJ15)
CAMIPPQAGTALIF

SEQ ID NO: 104682 - protein, 14 aa, Homo sapiens
  CDR3 for beta chain variable domain of TCR clone 52341 (TRBV20-1, TRBJ2-2)
CSARKRLETGELFF

SEQ ID NO: 104683 - protein, 11 aa, Homo sapiens
  CDR3 for alpha chain variable domain of TCR clone 52342 (TRAV27, TRAJ20)
CAGLNDHKLSF

SEQ ID NO: 104684 - protein, 14 aa, Homo sapiens
  CDR3 for beta chain variable domain of TCR clone 52342 (TRBV6-1, TRBJ1-1)
CASTPLQMNTEAFF

SEQ ID NO: 104685 - protein, 13 aa, Homo sapiens
  CDR3 for alpha chain variable domain of TCR clone 52343 (TRAV3, TRAJ27)
CAVRPLGAGKSTF

SEQ ID NO: 104686 - protein, 12 aa, Homo sapiens
  CDR3 for beta chain variable domain of TCR clone 52343 (TRBV7-9, TRBJ2-7)
CASSLEGYEQYF

SEQ ID NO: 104687 - protein, 13 aa, Homo sapiens
  CDR3 for alpha chain variable domain of TCR clone 52344 (TRAV1-2, TRAJ9)
CAALNTGGFKTIF

SEQ ID NO: 104688 - protein, 14 aa, Homo sapiens
  CDR3 for beta chain variable domain of TCR clone 52344 (TRBV13, TRBJ2-3)
CASSSESPTDTQYF

SEQ ID NO: 104689 - protein, 15 aa, Homo sapiens
  CDR3 for alpha chain variable domain of TCR clone 52345 (TRAV27, TRAJ38)
CAARRNAGNNRKLIW

SEQ ID NO: 104690 - protein, 17 aa, Homo sapiens
  CDR3 for beta chain variable domain of TCR clone 52345 (TRBV20-1, TRBJ2-2)
CSASGSGQGGLTGELFF

SEQ ID NO: 104691 - protein, 14 aa, Homo sapiens
  CDR3 for alpha chain variable domain of TCR clone 52346 (TRAV12-1, TRAJ9)
CVVTGDTGGFKTIF

SEQ ID NO: 104692 - protein, 16 aa, Homo sapiens
  CDR3 for beta chain variable domain of TCR clone 52346 (TRBV29-1, TRBJ1-2)
CSVEANRDIANYGYAF

SEQ ID NO: 104693 - protein, 11 aa, Homo sapiens
  CDR3 for alpha chain variable domain of TCR clone 52347 (TRAV1-2, TRAJ40)
CAVLGTYKYIF

SEQ ID NO: 104694 - protein, 16 aa, Homo sapiens
  CDR3 for beta chain variable domain of TCR clone 52347 (TRBV29-1, TRBJ2-7)
CSVEVVGTSGSYEQYF

SEQ ID NO: 104695 - protein, 14 aa, Homo sapiens
  CDR3 for alpha chain variable domain of TCR clone 52348 (TRAV1-2, TRAJ8)
RAVREDTGFQKLVF

SEQ ID NO: 104696 - protein, 15 aa, Homo sapiens
  CDR3 for beta chain variable domain of TCR clone 52348 (TRBV7-9, TRBJ1-4)
CASSARTGGNEKLFF

SEQ ID NO: 104697 - protein, 20 aa, Homo sapiens
  CDR3 for alpha chain variable domain of TCR clone 52349 (TRAV30, TRAJ24)
ELTSVAQRLWMLTAGGKFQF

SEQ ID NO: 104698 - protein, 14 aa, Homo sapiens
  CDR3 for beta chain variable domain of TCR clone 52349 (TRBV12-5, TRBJ2-5)
CASGSRTHQETQYF

SEQ ID NO: 104699 - protein, 11 aa, Homo sapiens
  CDR3 for alpha chain variable domain of TCR clone 52350 (TRAV23/DV6, TRAJ17)
CKWAAGNKLTF

SEQ ID NO: 104700 - protein, 14 aa, Homo sapiens
  CDR3 for beta chain variable domain of TCR clone 52350 (TRBV6-1, TRBJ2-7)
CASSGGSYLHEQYF

SEQ ID NO: 104701 - protein, 15 aa, Homo sapiens
  CDR3 for alpha chain variable domain of TCR clone 52351 (TRAV26-1, TRAJ40)
FIVRAVPSGTYKYIF

SEQ ID NO: 104702 - protein, 14 aa, Homo sapiens
  CDR3 for beta chain variable domain of TCR clone 52351 (TRBV19, TRBJ2-1)
CASKDPGLANEQFF

SEQ ID NO: 104703 - protein, 14 aa, Homo sapiens
  CDR3 for alpha chain variable domain of TCR clone 52352 (TRAV8-6, TRAJ8)
CAANENTGFQKLVF

SEQ ID NO: 104704 - protein, 11 aa, Homo sapiens
  CDR3 for beta chain variable domain of TCR clone 52352 (TRBV29-1, TRBJ2-5)
CSEDRTGTQYF

SEQ ID NO: 104705 - protein, 11 aa, Homo sapiens
  CDR3 for alpha chain variable domain of TCR clone 52353 (TRAV35, TRAJ30)
CAGPGDDKIIF

SEQ ID NO: 104706 - protein, 14 aa, Homo sapiens
  CDR3 for beta chain variable domain of TCR clone 52353 (TRBV7-6, TRBJ1-6)
CASSQAGGGPPLHF

SEQ ID NO: 104707 - protein, 11 aa, Homo sapiens
  CDR3 for alpha chain variable domain of TCR clone 52354 (TRAV13-1, TRAJ33)
CAANSNYQLIW

SEQ ID NO: 104708 - protein, 14 aa, Homo sapiens
  CDR3 for beta chain variable domain of TCR clone 52354 (TRBV20-1, TRBJ2-1)
CSAQIGGSADEQFF

SEQ ID NO: 104709 - protein, 14 aa, Homo sapiens
  CDR3 for alpha chain variable domain of TCR clone 52355 (TRAV12-1, TRAJ17)
CVVNIKAAGNKLTF

SEQ ID NO: 104710 - protein, 15 aa, Homo sapiens
  CDR3 for beta chain variable domain of TCR clone 52355 (TRBV9, TRBJ1-6)
CASSVAGTGDSPLHF

SEQ ID NO: 104711 - protein, 12 aa, Homo sapiens
  CDR3 for alpha chain variable domain of TCR clone 52356 (TRAV20, TRAJ56)
CTVTGANSKLTF

SEQ ID NO: 104712 - protein, 14 aa, Homo sapiens
  CDR3 for beta chain variable domain of TCR clone 52356 (TRBV20-1, TRBJ2-5)
CSALVPGYQETQYF

SEQ ID NO: 104713 - protein, 14 aa, Homo sapiens
  CDR3 for alpha chain variable domain of TCR clone 52357 (TRAV2, TRAJ9)
CAVEDRSGGFKTIF

SEQ ID NO: 104714 - protein, 15 aa, Homo sapiens
  CDR3 for beta chain variable domain of TCR clone 52357 (TRBV7-2, TRBJ2-1)
CASSSGLAGGNEQSF

SEQ ID NO: 104715 - protein, 15 aa, Homo sapiens
  CDR3 for alpha chain variable domain of TCR clone 52358 (TRAV13-1, TRAJ57)
CAASNNQGGSEKLVF

SEQ ID NO: 104716 - protein, 16 aa, Homo sapiens
  CDR3 for beta chain variable domain of TCR clone 52358 (TRBV19, TRBJ2-1)
CASSKAGPSSYNEQFF

SEQ ID NO: 104717 - protein, 14 aa, Homo sapiens
  CDR3 for alpha chain variable domain of TCR clone 52359 (TRAV26-1, TRAJ49)
CIVRLTNTGNQFCF

SEQ ID NO: 104718 - protein, 11 aa, Homo sapiens
  CDR3 for beta chain variable domain of TCR clone 52359 (TRBV29-1, TRBJ2-5)
CSEDRTGTQYF

SEQ ID NO: 104719 - protein, 17 aa, Homo sapiens
  CDR3 for alpha chain variable domain of TCR clone 52360 (TRAV2, TRAJ22)
ILQVREADAAEQRQLTF

SEQ ID NO: 104720 - protein, 16 aa, Homo sapiens
  CDR3 for beta chain variable domain of TCR clone 52360 (TRBV2, TRBJ2-5)
CASSETQGFGEETQYF

SEQ ID NO: 104721 - protein, 14 aa, Homo sapiens
  CDR3 for alpha chain variable domain of TCR clone 52361 (TRAV23/DV6, TRAJ37)
CAASTSSNPGKLIF

SEQ ID NO: 104722 - protein, 13 aa, Homo sapiens
  CDR3 for beta chain variable domain of TCR clone 52361 (TRBV7-7, TRBJ1-1)
CASSLGANTEAFF

SEQ ID NO: 104723 - protein, 14 aa, Homo sapiens
  CDR3 for alpha chain variable domain of TCR clone 52362 (TRAV1-2, TRAJ16)
CAVNRFSDVQKLLF

SEQ ID NO: 104724 - protein, 15 aa, Homo sapiens
  CDR3 for beta chain variable domain of TCR clone 52362 (TRBV29-1, TRBJ2-7)
CSVEFFDRGSYEQYF

SEQ ID NO: 104725 - protein, 14 aa, Homo sapiens
  CDR3 for alpha chain variable domain of TCR clone 52363 (TRAV8-2, TRAJ37)
CVVSISGNTGKLIF

SEQ ID NO: 104726 - protein, 15 aa, Homo sapiens
  CDR3 for beta chain variable domain of TCR clone 52363 (TRBV7-9, TRBJ1-4)
CASSARTGGNEKLFF

SEQ ID NO: 104727 - protein, 15 aa, Homo sapiens
  CDR3 for alpha chain variable domain of TCR clone 52364 (TRAV17, TRAJ56)
CATDANTGANSKLTF

SEQ ID NO: 104728 - protein, 12 aa, Homo sapiens
  CDR3 for beta chain variable domain of TCR clone 52364 (TRBV7-8, TRBJ2-7)
CTSSLGDREQYF

SEQ ID NO: 104729 - protein, 13 aa, Homo sapiens
  CDR3 for alpha chain variable domain of TCR clone 52365 (TRAV17, TRAJ40)
CAGALGGTYKYIF

SEQ ID NO: 104730 - protein, 14 aa, Homo sapiens
  CDR3 for beta chain variable domain of TCR clone 52365 (TRBV4-1, TRBJ2-2)
CASSQAVNTGELFF

SEQ ID NO: 104731 - protein, 11 aa, Homo sapiens
  CDR3 for alpha chain variable domain of TCR clone 52366 (TRAV2, TRAJ21)
CAVFNFNKFYF

SEQ ID NO: 104732 - protein, 14 aa, Homo sapiens
  CDR3 for beta chain variable domain of TCR clone 52366 (TRBV15, TRBJ2-3)
CATRSGTSTDTQYV

SEQ ID NO: 104733 - protein, 15 aa, Homo sapiens
  CDR3 for alpha chain variable domain of TCR clone 52367 (TRAV26-2, TRAJ26)
CILRDFDNYGQNFVF

SEQ ID NO: 104734 - protein, 14 aa, Homo sapiens
  CDR3 for beta chain variable domain of TCR clone 52367 (TRBV11-2, TRBJ1-2)
CASSLGTANYGYTF

SEQ ID NO: 104735 - protein, 14 aa, Homo sapiens
  CDR3 for alpha chain variable domain of TCR clone 52368 (TRAV29/DV5, TRAJ48)
CAAMALFGNEKLTF

SEQ ID NO: 104736 - protein, 15 aa, Homo sapiens
  CDR3 for beta chain variable domain of TCR clone 52368 (TRBV7-2, TRBJ2-1)
CASTHGTGIYNEQLF

SEQ ID NO: 104737 - protein, 14 aa, Homo sapiens
  CDR3 for alpha chain variable domain of TCR clone 52369 (TRAV12-2, TRAJ40)
CAVKIPSGTYKYIF

SEQ ID NO: 104738 - protein, 12 aa, Homo sapiens
  CDR3 for beta chain variable domain of TCR clone 52369 (TRBV5-1, TRBJ1-2)
CASSQDTYGYTF

SEQ ID NO: 104739 - protein, 13 aa, Homo sapiens
  CDR3 for alpha chain variable domain of TCR clone 52370 (TRAV12-2, TRAJ52)
CAVSGTSDGKLTF

SEQ ID NO: 104740 - protein, 17 aa, Homo sapiens
  CDR3 for beta chain variable domain of TCR clone 52370 (TRBV11-2, TRBJ2-1)
CASSLYPPGVEYNEQFF

SEQ ID NO: 104741 - protein, 15 aa, Homo sapiens
  CDR3 for alpha chain variable domain of TCR clone 52371 (TRAV3, TRAJ5)
CAVRDLDTGRRAHTF

SEQ ID NO: 104742 - protein, 13 aa, Homo sapiens
  CDR3 for beta chain variable domain of TCR clone 52371 (TRBV12-4, TRBJ2-7)
CASSPTETYEQYF

SEQ ID NO: 104743 - protein, 15 aa, Homo sapiens
  CDR3 for alpha chain variable domain of TCR clone 52372 (TRAV12-2, TRAJ52)
PPTSFRSTSYGKLTF

SEQ ID NO: 104744 - protein, 11 aa, Homo sapiens
  CDR3 for beta chain variable domain of TCR clone 52372 (TRBV11-2, TRBJ2-2)
CASSLPGELFF

SEQ ID NO: 104745 - protein, 15 aa, Homo sapiens
  CDR3 for alpha chain variable domain of TCR clone 52373 (TRAV27, TRAJ10)
CAGARLTGGGNKLTF

SEQ ID NO: 104746 - protein, 15 aa, Homo sapiens
  CDR3 for beta chain variable domain of TCR clone 52373 (TRBV27, TRBJ1-4)
CASGAQQDLNEKLFF

SEQ ID NO: 104747 - protein, 15 aa, Homo sapiens
  CDR3 for alpha chain variable domain of TCR clone 52374 (TRAV12-2, TRAJ53)
CAVNGGGGSNYKLTF

SEQ ID NO: 104748 - protein, 13 aa, Homo sapiens
  CDR3 for beta chain variable domain of TCR clone 52374 (TRBV3-1, TRBJ1-1)
CASSPGVTTEAFF

SEQ ID NO: 104749 - protein, 14 aa, Homo sapiens
  CDR3 for alpha chain variable domain of TCR clone 52375 (TRAV20, TRAJ22)
CAVALGGSARQLTF

SEQ ID NO: 104750 - protein, 15 aa, Homo sapiens
  CDR3 for beta chain variable domain of TCR clone 52375 (TRBV7-2, TRBJ1-1)
CASSFAGERDTEAFF

SEQ ID NO: 104751 - protein, 15 aa, Homo sapiens
  CDR3 for alpha chain variable domain of TCR clone 52376 (TRAV12-3, TRAJ49)
CAMAVTPNTGNQFYF

SEQ ID NO: 104752 - protein, 18 aa, Homo sapiens
  CDR3 for beta chain variable domain of TCR clone 52376 (TRBV4-1, TRBJ1-5)
CASSQDPRGQGLDQPQHF

SEQ ID NO: 104753 - protein, 10 aa, Homo sapiens
  CDR3 for alpha chain variable domain of TCR clone 52377 (TRAV12-1, TRAJ49)
CVVNPNQFYF

SEQ ID NO: 104754 - protein, 14 aa, Homo sapiens
  CDR3 for beta chain variable domain of TCR clone 52377 (TRBV7-2, TRBJ2-7)
CASSPKTSFYEQYF

SEQ ID NO: 104755 - protein, 13 aa, Homo sapiens
  CDR3 for alpha chain variable domain of TCR clone 52378 (TRAV8-3, TRAJ44)
CAVVPGTASKLTF

SEQ ID NO: 104756 - protein, 16 aa, Homo sapiens
  CDR3 for beta chain variable domain of TCR clone 52378 (TRBV20-1, TRBJ1-4)
CSAPGQGLLTNEKLFF

SEQ ID NO: 104757 - protein, 15 aa, Homo sapiens
  CDR3 for alpha chain variable domain of TCR clone 52379 (TRAV8-3, TRAJ27)
CAVGPSKTKAGKSTF

SEQ ID NO: 104758 - protein, 15 aa, Homo sapiens
  CDR3 for beta chain variable domain of TCR clone 52379 (TRBV7-2, TRBJ2-1)
CASSSGLAGGNEQFF

SEQ ID NO: 104759 - protein, 14 aa, Homo sapiens
  CDR3 for alpha chain variable domain of TCR clone 52380 (TRAV1-2, TRAJ16)
CAVYRFSDGQKLLF

SEQ ID NO: 104760 - protein, 15 aa, Homo sapiens
  CDR3 for beta chain variable domain of TCR clone 52380 (TRBV9, TRBJ1-6)
CASSVAGTGDSPLHF

SEQ ID NO: 104761 - protein, 12 aa, Homo sapiens
  CDR3 for alpha chain variable domain of TCR clone 52381 (TRAV2, TRAJ9)
CAVGAGGYKTIF

SEQ ID NO: 104762 - protein, 16 aa, Homo sapiens
  CDR3 for beta chain variable domain of TCR clone 52381 (TRBV13, TRBJ2-2)
CASSPRTGEHTGELFF

SEQ ID NO: 104763 - protein, 15 aa, Homo sapiens
  CDR3 for alpha chain variable domain of TCR clone 52382 (TRAV4, TRAJ10)
CLVGDEEGGGSKLTF

SEQ ID NO: 104764 - protein, 17 aa, Homo sapiens
  CDR3 for beta chain variable domain of TCR clone 52382 (TRBV19, TRBJ2-6)
CASSTGQVFSGANVLTF

SEQ ID NO: 104765 - protein, 15 aa, Homo sapiens
  CDR3 for alpha chain variable domain of TCR clone 52383 (TRAV23/DV6, TRAJ33)
CAASDSGGGNYQLIW

SEQ ID NO: 104766 - protein, 14 aa, Homo sapiens
  CDR3 for beta chain variable domain of TCR clone 52383 (TRBV7-2, TRBJ2-7)
CASSLYPGRYEQYF

SEQ ID NO: 104767 - protein, 18 aa, Homo sapiens
  CDR3 for alpha chain variable domain of TCR clone 52384 (TRAV3, TRAJ32)
CAVRDIRGYGGSTNKLIF

SEQ ID NO: 104768 - protein, 15 aa, Homo sapiens
  CDR3 for beta chain variable domain of TCR clone 52384 (TRBV12-4, TRBJ2-2)
CASSLGVRHTGELFF

SEQ ID NO: 104769 - protein, 13 aa, Homo sapiens
  CDR3 for alpha chain variable domain of TCR clone 52385 (TRAV16, TRAJ10)
CALPTGGGNKLTF

SEQ ID NO: 104770 - protein, 12 aa, Homo sapiens
  CDR3 for beta chain variable domain of TCR clone 52385 (TRBV28, TRBJ2-7)
CASTGNHYEQYF

SEQ ID NO: 104771 - protein, 15 aa, Homo sapiens
  CDR3 for alpha chain variable domain of TCR clone 52386 (TRAV29/DV5, TRAJ24)
CAAGGATDSWGKFQF

SEQ ID NO: 104772 - protein, 20 aa, Homo sapiens
  CDR3 for beta chain variable domain of TCR clone 52386 (TRBV11-2, TRBJ2-2)
LRARPCISVPAASLPGSCFF

SEQ ID NO: 104773 - protein, 15 aa, Homo sapiens
  CDR3 for alpha chain variable domain of TCR clone 52387 (TRAV1-2, TRAJ35)
CAVRDPGGFGNALHC

SEQ ID NO: 104774 - protein, 14 aa, Homo sapiens
  CDR3 for beta chain variable domain of TCR clone 52387 (TRBV5-1, TRBJ2-1)
CASSLDDRFDEQFF

SEQ ID NO: 104775 - protein, 16 aa, Homo sapiens
  CDR3 for alpha chain variable domain of TCR clone 52388 (TRAV14/DV4, TRAJ15)
CAMREGPAQAGTAPIF

SEQ ID NO: 104776 - protein, 12 aa, Homo sapiens
  CDR3 for beta chain variable domain of TCR clone 52388 (TRBV28, TRBJ2-6)
CAIQAGANVLTF

SEQ ID NO: 104777 - protein, 16 aa, Homo sapiens
  CDR3 for alpha chain variable domain of TCR clone 52389 (TRAV8-3, TRAJ52)
CAVQPAGGTSYGKLTF

SEQ ID NO: 104778 - protein, 15 aa, Homo sapiens
  CDR3 for beta chain variable domain of TCR clone 52389 (TRBV11-3, TRBJ2-7)
CASSLAGGVATEQYF

SEQ ID NO: 104779 - protein, 14 aa, Homo sapiens
  CDR3 for alpha chain variable domain of TCR clone 52390 (TRAV12-2, TRAJ45)
CAVNIQGKADGLTF

SEQ ID NO: 104780 - protein, 13 aa, Homo sapiens
  CDR3 for beta chain variable domain of TCR clone 52390 (TRBV9, TRBJ2-1)
CASSSDSYNEQFF

SEQ ID NO: 104781 - protein, 14 aa, Homo sapiens
  CDR3 for alpha chain variable domain of TCR clone 52391 (TRAV9-2, TRAJ39)
CALYIYNAGNMPTF

SEQ ID NO: 104782 - protein, 14 aa, Homo sapiens
  CDR3 for beta chain variable domain of TCR clone 52391 (TRBV12-5, TRBJ2-5)
CASGSRTHQETQYF

SEQ ID NO: 104783 - protein, 16 aa, Homo sapiens
  CDR3 for alpha chain variable domain of TCR clone 52392 (TRAV30, TRAJ24)
CGTEIVDADSWGKFQF

SEQ ID NO: 104784 - protein, 14 aa, Homo sapiens
  CDR3 for beta chain variable domain of TCR clone 52392 (TRBV13, TRBJ2-1)
CASSPRPRYNGQFF

SEQ ID NO: 104785 - protein, 14 aa, Homo sapiens
  CDR3 for alpha chain variable domain of TCR clone 52393 (TRAV8-4, TRAJ13)
CAVTLSGGYQKVNF

SEQ ID NO: 104786 - protein, 14 aa, Homo sapiens
  CDR3 for beta chain variable domain of TCR clone 52393 (TRBV7-2, TRBJ1-2)
CASSQTGSTYGYTF

SEQ ID NO: 104787 - protein, 16 aa, Homo sapiens
  CDR3 for alpha chain variable domain of TCR clone 52394 (TRAV3, TRAJ37)
CAVRVRCSGNTGKLIF

SEQ ID NO: 104788 - protein, 11 aa, Homo sapiens
  CDR3 for beta chain variable domain of TCR clone 52394 (TRBV11-2, TRBJ2-2)
CASSLPGELFF

SEQ ID NO: 104789 - protein, 12 aa, Homo sapiens
  CDR3 for alpha chain variable domain of TCR clone 52395 (TRAV13-1, TRAJ21)
CAAKEGFNKFYF

SEQ ID NO: 104790 - protein, 18 aa, Homo sapiens
  CDR3 for beta chain variable domain of TCR clone 52395 (TRBV20-1, TRBJ2-6)
RSAETTPTHGSGANVLTF

SEQ ID NO: 104791 - protein, 12 aa, Homo sapiens
  CDR3 for alpha chain variable domain of TCR clone 52396 (TRAV20, TRAJ33)
CAVRGSNYQLIR

SEQ ID NO: 104792 - protein, 15 aa, Homo sapiens
  CDR3 for beta chain variable domain of TCR clone 52396 (TRBV11-3, TRBJ2-3)
CASLKDGREGDTQYF

SEQ ID NO: 104793 - protein, 13 aa, Homo sapiens
  CDR3 for alpha chain variable domain of TCR clone 52397 (TRAV13-1, TRAJ49)
CSAMLYTGNQFYF

SEQ ID NO: 104794 - protein, 15 aa, Homo sapiens
  CDR3 for beta chain variable domain of TCR clone 52397 (TRBV12-4, TRBJ1-5)
CASTRGSGFGQPQHF

SEQ ID NO: 104795 - protein, 14 aa, Homo sapiens
  CDR3 for alpha chain variable domain of TCR clone 52398 (TRAV13-1, TRAJ40)
CAARSTSGIYKYIF

SEQ ID NO: 104796 - protein, 15 aa, Homo sapiens
  CDR3 for beta chain variable domain of TCR clone 52398 (TRBV18, TRBJ1-5)
CASSETGGNNQPQHF

SEQ ID NO: 104797 - protein, 13 aa, Homo sapiens
  CDR3 for alpha chain variable domain of TCR clone 52399 (TRAV13-1, TRAJ39)
CAASIWAGNMITF

SEQ ID NO: 104798 - protein, 15 aa, Homo sapiens
  CDR3 for beta chain variable domain of TCR clone 52399 (TRBV7-9, TRBJ1-1)
CASSLLEQGGTEAFF

SEQ ID NO: 104799 - protein, 13 aa, Homo sapiens
  CDR3 for alpha chain variable domain of TCR clone 52400 (TRAV20, TRAJ37)
CAGCSSNTGKLIF

SEQ ID NO: 104800 - protein, 14 aa, Homo sapiens
  CDR3 for beta chain variable domain of TCR clone 52400 (TRBV7-6, TRBJ2-3)
CASSLGTVTDTQYF

SEQ ID NO: 104801 - protein, 17 aa, Homo sapiens
  CDR3 for alpha chain variable domain of TCR clone 52401 (TRAV26-1, TRAJ53)
CIVRVDDGGGSNYKLTF

SEQ ID NO: 104802 - protein, 15 aa, Homo sapiens
  CDR3 for beta chain variable domain of TCR clone 52401 (TRBV20-1, TRBJ2-7)
CSARVPAAYFYEQYF

SEQ ID NO: 104803 - protein, 15 aa, Homo sapiens
  CDR3 for alpha chain variable domain of TCR clone 52402 (TRAV3, TRAJ20)
CAVRDIKLSDYKLSF

SEQ ID NO: 104804 - protein, 15 aa, Homo sapiens
  CDR3 for beta chain variable domain of TCR clone 52402 (TRBV7-9, TRBJ1-6)
CASSSPRRGNSPLHF

SEQ ID NO: 104805 - protein, 16 aa, Homo sapiens
  CDR3 for alpha chain variable domain of TCR clone 52403 (TRAV1-2, TRAJ6)
CAVRNIASGGSYIPTF

SEQ ID NO: 104806 - protein, 15 aa, Homo sapiens
  CDR3 for beta chain variable domain of TCR clone 52403 (TRBV15, TRBJ1-5)
CATSGDPVSNQPQHF

SEQ ID NO: 104807 - protein, 13 aa, Homo sapiens
  CDR3 for alpha chain variable domain of TCR clone 52404 (TRAV35, TRAJ36)
CAGPRIGANNLCF

SEQ ID NO: 104808 - protein, 15 aa, Homo sapiens
  CDR3 for beta chain variable domain of TCR clone 52404 (TRBV28, TRBJ2-5)
CASSPPWSYQETQYF

SEQ ID NO: 104809 - protein, 14 aa, Homo sapiens
  CDR3 for alpha chain variable domain of TCR clone 52405 (TRAV1-2, TRAJ16)
CAVNRFSDGQKLLF

SEQ ID NO: 104810 - protein, 16 aa, Homo sapiens
  CDR3 for beta chain variable domain of TCR clone 52405 (TRBV12-5, TRBJ2-5)
CASGPRTSGNQETQHF

SEQ ID NO: 104811 - protein, 13 aa, Homo sapiens
  CDR3 for alpha chain variable domain of TCR clone 52406 (TRAV26-1, TRAJ48)
CIVRVVGDEKLTF

SEQ ID NO: 104812 - protein, 17 aa, Homo sapiens
  CDR3 for beta chain variable domain of TCR clone 52406 (TRBV11-2, TRBJ2-1)
CASSLYPPGVEYNEQFF

SEQ ID NO: 104813 - protein, 10 aa, Homo sapiens
  CDR3 for alpha chain variable domain of TCR clone 52407 (TRAV1-2, TRAJ34)
CAVNTDKLIF

SEQ ID NO: 104814 - protein, 16 aa, Homo sapiens
  CDR3 for beta chain variable domain of TCR clone 52407 (TRBV10-2, TRBJ2-7)
CASSESPGSSGFEQYF

SEQ ID NO: 104815 - protein, 15 aa, Homo sapiens
  CDR3 for alpha chain variable domain of TCR clone 52408 (TRAV26-1, TRAJ39)
CIVRPGNNAGNMLTF

SEQ ID NO: 104816 - protein, 13 aa, Homo sapiens
  CDR3 for beta chain variable domain of TCR clone 52408 (TRBV20-1, TRBJ2-7)
CSAAGTSYSEQYF

SEQ ID NO: 104817 - protein, 18 aa, Homo sapiens
  CDR3 for alpha chain variable domain of TCR clone 52409 (TRAV12-3, TRAJ52)
CAMSRTNAGGTSYGKLTF

SEQ ID NO: 104818 - protein, 17 aa, Homo sapiens
  CDR3 for beta chain variable domain of TCR clone 52409 (TRBV7-3, TRBJ2-3)
CASSFMKRMRGADTQYF

SEQ ID NO: 104819 - protein, 11 aa, Homo sapiens
  CDR3 for alpha chain variable domain of TCR clone 52410 (TRAV21, TRAJ34)
CAPLDTDKLIF

SEQ ID NO: 104820 - protein, 16 aa, Homo sapiens
  CDR3 for beta chain variable domain of TCR clone 52410 (TRBV5-1, TRBJ2-3)
GASSLAGDRGTDTQYF

SEQ ID NO: 104821 - protein, 15 aa, Homo sapiens
  CDR3 for alpha chain variable domain of TCR clone 52411 (TRAV13-2, TRAJ10)
CAEIDFTGGGNKLTF

SEQ ID NO: 104822 - protein, 14 aa, Homo sapiens
  CDR3 for beta chain variable domain of TCR clone 52411 (TRBV7-2, TRBJ2-7)
CASRSQGAAYEQYF

SEQ ID NO: 104823 - protein, 15 aa, Homo sapiens
  CDR3 for alpha chain variable domain of TCR clone 52412 (TRAV21, TRAJ17)
CAVDEQKAAGNKLTF

SEQ ID NO: 104824 - protein, 12 aa, Homo sapiens
  CDR3 for beta chain variable domain of TCR clone 52412 (TRBV11-2, TRBJ2-1)
CASSPGNNEQFL

SEQ ID NO: 104825 - protein, 16 aa, Homo sapiens
  CDR3 for alpha chain variable domain of TCR clone 52413 (TRAV8-3, TRAJ10)
CAVGPILTGGGNNLTF

SEQ ID NO: 104826 - protein, 16 aa, Homo sapiens
  CDR3 for beta chain variable domain of TCR clone 52413 (TRBV7-2, TRBJ2-5)
CASSSKWLSGQETQYF

SEQ ID NO: 104827 - protein, 20 aa, Homo sapiens
  CDR3 for alpha chain variable domain of TCR clone 52414 (TRAV1-1, TRAJ4)
CLLLLRCEGFLSGGYNKLIF

SEQ ID NO: 104828 - protein, 16 aa, Homo sapiens
  CDR3 for beta chain variable domain of TCR clone 52414 (TRBV28, TRBJ1-4)
CAGSPPYRGRSEKLFF

SEQ ID NO: 104829 - protein, 23 aa, Homo sapiens
  CDR3 for alpha chain variable domain of TCR clone 52415 (TRAV26-1, TRAJ38)
CIADNAGNNHIQNPDPAVYQLRE

SEQ ID NO: 104830 - protein, 15 aa, Homo sapiens
  CDR3 for beta chain variable domain of TCR clone 52415 (TRBV27, TRBJ2-1)
CASSNGGGSSNEQFF

SEQ ID NO: 104831 - protein, 19 aa, Homo sapiens
  CDR3 for alpha chain variable domain of TCR clone 52416 (TRAV38-1, TRAJ53)
CAFMKHGLESGGSNYKLTL

SEQ ID NO: 104832 - protein, 13 aa, Homo sapiens
  CDR3 for beta chain variable domain of TCR clone 52416 (TRBV19, TRBJ2-7)
CASSPRQSYEQYF

SEQ ID NO: 104833 - protein, 15 aa, Homo sapiens
  CDR3 for alpha chain variable domain of TCR clone 52417 (TRAV13-1, TRAJ17)
CAASIERAAGNKLTF

SEQ ID NO: 104834 - protein, 13 aa, Homo sapiens
  CDR3 for beta chain variable domain of TCR clone 52417 (TRBV18, TRBJ2-7)
CASQSGGGYEQYF

SEQ ID NO: 104835 - protein, 14 aa, Homo sapiens
  CDR3 for alpha chain variable domain of TCR clone 52418 (TRAV3, TRAJ9)
CAVRLNTGGFKTIF

SEQ ID NO: 104836 - protein, 15 aa, Homo sapiens
  CDR3 for beta chain variable domain of TCR clone 52418 (TRBV7-8, TRBJ2-1)
CASSLASGRVNEQFF

SEQ ID NO: 104837 - protein, 15 aa, Homo sapiens
  CDR3 for alpha chain variable domain of TCR clone 52419 (TRAV38-1, TRAJ37)
CAFIHGSGHTGKLIF

SEQ ID NO: 104838 - protein, 12 aa, Homo sapiens
  CDR3 for beta chain variable domain of TCR clone 52419 (TRBV7-9, TRBJ2-7)
CASSFGSYEQYF

SEQ ID NO: 104839 - protein, 11 aa, Homo sapiens
  CDR3 for alpha chain variable domain of TCR clone 52420 (TRAV2, TRAJ33)
CAVESNYQLIW

SEQ ID NO: 104840 - protein, 15 aa, Homo sapiens
  CDR3 for beta chain variable domain of TCR clone 52420 (TRBV19, TRBJ1-1)
CASTSGQFQNTEAFF

SEQ ID NO: 104841 - protein, 14 aa, Homo sapiens
  CDR3 for alpha chain variable domain of TCR clone 52421 (TRAV21, TRAJ35)
CVVMPIGFGNVLHC

SEQ ID NO: 104842 - protein, 12 aa, Homo sapiens
  CDR3 for beta chain variable domain of TCR clone 52421 (TRBV7-9, TRBJ2-7)
CASSIKREEQYF

SEQ ID NO: 104843 - protein, 14 aa, Homo sapiens
  CDR3 for alpha chain variable domain of TCR clone 52422 (TRAV14/DV4, TRAJ42)
CPRGSLRSQGNLIF

SEQ ID NO: 104844 - protein, 13 aa, Homo sapiens
  CDR3 for beta chain variable domain of TCR clone 52422 (TRBV4-2, TRBJ1-1)
CARSQAGNTEAFF

SEQ ID NO: 104845 - protein, 13 aa, Homo sapiens
  CDR3 for alpha chain variable domain of TCR clone 52423 (TRAV8-3, TRAJ36)
CAVGATGANNLFF

SEQ ID NO: 104846 - protein, 14 aa, Homo sapiens
  CDR3 for beta chain variable domain of TCR clone 52423 (TRBV7-2, TRBJ2-2)
CASRGQGAAGELFF

SEQ ID NO: 104847 - protein, 14 aa, Homo sapiens
  CDR3 for alpha chain variable domain of TCR clone 52424 (TRAV13-1, TRAJ3)
CAASRSSSASKIIF

SEQ ID NO: 104848 - protein, 16 aa, Homo sapiens
  CDR3 for beta chain variable domain of TCR clone 52424 (TRBV15, TRBJ2-3)
CATSRDLGIVTDTQYF

SEQ ID NO: 104849 - protein, 15 aa, Homo sapiens
  CDR3 for alpha chain variable domain of TCR clone 52425 (TRAV34, TRAJ38)
CGADFTPGNNRKLIW

SEQ ID NO: 104850 - protein, 16 aa, Homo sapiens
  CDR3 for beta chain variable domain of TCR clone 52425 (TRBV12-5, TRBJ2-5)
CASGTRTSGNQETQYF

SEQ ID NO: 104851 - protein, 11 aa, Homo sapiens
  CDR3 for alpha chain variable domain of TCR clone 52426 (TRAV3, TRAJ13)
CAVNSYQKVTF

SEQ ID NO: 104852 - protein, 15 aa, Homo sapiens
  CDR3 for beta chain variable domain of TCR clone 52426 (TRBV7-9, TRBJ2-7)
CASSSSGLAVYEQYF

SEQ ID NO: 104853 - protein, 15 aa, Homo sapiens
  CDR3 for alpha chain variable domain of TCR clone 52427 (TRAV35, TRAJ40)
CAGQLGTSGTYKYIF

SEQ ID NO: 104854 - protein, 13 aa, Homo sapiens
  CDR3 for beta chain variable domain of TCR clone 52427 (TRBV7-3, TRBJ2-1)
CQQLIGGTNEQFF

SEQ ID NO: 104855 - protein, 12 aa, Homo sapiens
  CDR3 for alpha chain variable domain of TCR clone 52428 (TRAV9-2, TRAJ34)
CALTDNTDKLIF

SEQ ID NO: 104856 - protein, 15 aa, Homo sapiens
  CDR3 for beta chain variable domain of TCR clone 52428 (TRBV5-1, TRBJ2-2)
CASSSRTVNTGELFF

SEQ ID NO: 104857 - protein, 16 aa, Homo sapiens
  CDR3 for alpha chain variable domain of TCR clone 52429 (TRAV13-1, TRAJ42)
CAASMNYGGSQGNLIF

SEQ ID NO: 104858 - protein, 16 aa, Homo sapiens
  CDR3 for beta chain variable domain of TCR clone 52429 (TRBV28, TRBJ2-1)
CASSSPEYPRDNEQFF

SEQ ID NO: 104859 - protein, 15 aa, Homo sapiens
  CDR3 for alpha chain variable domain of TCR clone 52430 (TRAV13-1, TRAJ44)
CAASRGGGTASKLTF

SEQ ID NO: 104860 - protein, 14 aa, Homo sapiens
  CDR3 for beta chain variable domain of TCR clone 52430 (TRBV7-2, TRBJ2-5)
CANSPRGSSETQYF

SEQ ID NO: 104861 - protein, 17 aa, Homo sapiens
  CDR3 for alpha chain variable domain of TCR clone 52431 (TRAV3, TRAJ28)
CAVREAYSGAGSYQLTF

SEQ ID NO: 104862 - protein, 18 aa, Homo sapiens
  CDR3 for beta chain variable domain of TCR clone 52431 (TRBV27, TRBJ2-1)
CASGNRAVGVGSKNYQFF

SEQ ID NO: 104863 - protein, 13 aa, Homo sapiens
  CDR3 for alpha chain variable domain of TCR clone 52432 (TRAV26-1, TRAJ48)
CIVRVVGDEKLTF

SEQ ID NO: 104864 - protein, 13 aa, Homo sapiens
  CDR3 for beta chain variable domain of TCR clone 52432 (TRBV7-9, TRBJ1-2)
CASSLKQNYGYTF

SEQ ID NO: 104865 - protein, 14 aa, Homo sapiens
  CDR3 for alpha chain variable domain of TCR clone 52433 (TRAV13-2, TRAJ15)
CAENPNQAGTALIF

SEQ ID NO: 104866 - protein, 16 aa, Homo sapiens
  CDR3 for beta chain variable domain of TCR clone 52433 (TRBV12-4, TRBJ1-2)
CASSTTATGKTRGYTF

SEQ ID NO: 104867 - protein, 11 aa, Homo sapiens
  CDR3 for alpha chain variable domain of TCR clone 52434 (TRAV2, TRAJ33)
CAVDSNYQLIW

SEQ ID NO: 104868 - protein, 15 aa, Homo sapiens
  CDR3 for beta chain variable domain of TCR clone 52434 (TRBV19, TRBJ2-1)
CASSRPGQNYNEQFF

SEQ ID NO: 104869 - protein, 16 aa, Homo sapiens
  CDR3 for alpha chain variable domain of TCR clone 52435 (TRAV12-2, TRAJ32)
CAVNLGQGGATNKPIF

SEQ ID NO: 104870 - protein, 12 aa, Homo sapiens
  CDR3 for beta chain variable domain of TCR clone 52435 (TRBV29-1, TRBJ2-3)
CSVTGGADTQYF

SEQ ID NO: 104871 - protein, 12 aa, Homo sapiens
  CDR3 for alpha chain variable domain of TCR clone 52436 (TRAV25, TRAJ5)
CAGGGGRRALTF

SEQ ID NO: 104872 - protein, 18 aa, Homo sapiens
  CDR3 for beta chain variable domain of TCR clone 52436 (TRBV7-2, TRBJ2-3)
CASSLETSRGRKADTQYF

SEQ ID NO: 104873 - protein, 16 aa, Homo sapiens
  CDR3 for alpha chain variable domain of TCR clone 52437 (TRAV14/DV4, TRAJ53)
CAMREGGGGSNYKPTF

SEQ ID NO: 104874 - protein, 18 aa, Homo sapiens
  CDR3 for beta chain variable domain of TCR clone 52437 (TRBV18, TRBJ1-3)
CASSPRGGAGPSGNTIYF

SEQ ID NO: 104875 - protein, 15 aa, Homo sapiens
  CDR3 for alpha chain variable domain of TCR clone 52438 (TRAV2, TRAJ9)
CAVEDRGSGGFKTIF

SEQ ID NO: 104876 - protein, 16 aa, Homo sapiens
  CDR3 for beta chain variable domain of TCR clone 52438 (TRBV24-1, TRBJ2-3)
CATSDPGTGATDTQYF

SEQ ID NO: 104877 - protein, 12 aa, Homo sapiens
  CDR3 for alpha chain variable domain of TCR clone 52439 (TRAV12-3, TRAJ17)
CAMTLTGNKLTF

SEQ ID NO: 104878 - protein, 13 aa, Homo sapiens
  CDR3 for beta chain variable domain of TCR clone 52439 (TRBV20-1, TRBJ2-5)
CSAREDYQETQYF

SEQ ID NO: 104879 - protein, 15 aa, Homo sapiens
  CDR3 for alpha chain variable domain of TCR clone 52440 (TRAV12-1, TRAJ9)
CVVSFGDTGGFKTIS

SEQ ID NO: 104880 - protein, 13 aa, Homo sapiens
  CDR3 for beta chain variable domain of TCR clone 52440 (TRBV2, TRBJ1-4)
CASSERAGEKLLF

SEQ ID NO: 104881 - protein, 14 aa, Homo sapiens
  CDR3 for alpha chain variable domain of TCR clone 52441 (TRAV35, TRAJ13)
CAGSPSGGYQKVTF

SEQ ID NO: 104882 - protein, 17 aa, Homo sapiens
  CDR3 for beta chain variable domain of TCR clone 52441 (TRBV18, TRBJ1-5)
CQLTTCRVRQNNQPQRF

SEQ ID NO: 104883 - protein, 14 aa, Homo sapiens
  CDR3 for alpha chain variable domain of TCR clone 52442 (TRAV1-2, TRAJ8)
CAVREDTGFQKLVF

SEQ ID NO: 104884 - protein, 12 aa, Homo sapiens
  CDR3 for beta chain variable domain of TCR clone 52442 (TRBV6-3, TRBJ2-7)
CASSEPGFEQYF

SEQ ID NO: 104885 - protein, 11 aa, Homo sapiens
  CDR3 for alpha chain variable domain of TCR clone 52443 (TRAV21, TRAJ34)
CAVTNTDKLIF

SEQ ID NO: 104886 - protein, 12 aa, Homo sapiens
  CDR3 for beta chain variable domain of TCR clone 52443 (TRBV6-3, TRBJ2-7)
CASSLTPYEQYF

SEQ ID NO: 104887 - protein, 15 aa, Homo sapiens
  CDR3 for alpha chain variable domain of TCR clone 52444 (TRAV3, TRAJ20)
CAVRDIKLSDYKLSF

SEQ ID NO: 104888 - protein, 15 aa, Homo sapiens
  CDR3 for beta chain variable domain of TCR clone 52444 (TRBV7-9, TRBJ1-6)
CASSSPGRENSPLHF

SEQ ID NO: 104889 - protein, 18 aa, Homo sapiens
  CDR3 for alpha chain variable domain of TCR clone 52445 (TRAV26-1, TRAJ5)
CIVRVVPPRDTGRRALTF

SEQ ID NO: 104890 - protein, 15 aa, Homo sapiens
  CDR3 for beta chain variable domain of TCR clone 52445 (TRBV7-9, TRBJ2-7)
CASSLPMGQANKQYF

SEQ ID NO: 104891 - protein, 18 aa, Homo sapiens
  CDR3 for alpha chain variable domain of TCR clone 52446 (TRAV13-1, TRAJ52)
CAAKNPNAGGTSYGELTF

SEQ ID NO: 104892 - protein, 15 aa, Homo sapiens
  CDR3 for beta chain variable domain of TCR clone 52446 (TRBV27, TRBJ2-1)
CASSNGGGSSNEQFF

SEQ ID NO: 104893 - protein, 15 aa, Homo sapiens
  CDR3 for alpha chain variable domain of TCR clone 52447 (TRAV12-3, TRAJ22)
CAMRTISGSARQLTF

SEQ ID NO: 104894 - protein, 16 aa, Homo sapiens
  CDR3 for beta chain variable domain of TCR clone 52447 (TRBV20-1, TRBJ2-2)
CSARRPGTGSTGELFF

SEQ ID NO: 104895 - protein, 15 aa, Homo sapiens
  CDR3 for alpha chain variable domain of TCR clone 52448 (TRAV26-1, TRAJ29)
CIVRVEGSGNTPLVF

SEQ ID NO: 104896 - protein, 15 aa, Homo sapiens
  CDR3 for beta chain variable domain of TCR clone 52448 (TRBV11-2, TRBJ1-6)
CASSLDPWAVSPLHF

SEQ ID NO: 104897 - protein, 12 aa, Homo sapiens
  CDR3 for alpha chain variable domain of TCR clone 52449 (TRAV3, TRAJ43)
CAVRDPNNDMRF

SEQ ID NO: 104898 - protein, 15 aa, Homo sapiens
  CDR3 for beta chain variable domain of TCR clone 52449 (TRBV27, TRBJ1-5)
CASSLGTEFDQPQHF

SEQ ID NO: 104899 - protein, 13 aa, Homo sapiens
  CDR3 for alpha chain variable domain of TCR clone 52450 (TRAV8-1, TRAJ30)
CAVIMNRDDNIIF

SEQ ID NO: 104900 - protein, 14 aa, Homo sapiens
  CDR3 for beta chain variable domain of TCR clone 52450 (TRBV7-2, TRBJ1-6)
CASSLQGANSPLHF

SEQ ID NO: 104901 - protein, 13 aa, Homo sapiens
  CDR3 for alpha chain variable domain of TCR clone 52451 (TRAV2, TRAJ24)
CDLQLTAGGNSSL

SEQ ID NO: 104902 - protein, 13 aa, Homo sapiens
  CDR3 for beta chain variable domain of TCR clone 52451 (TRBV7-9, TRBJ1-2)
CAGSLKQNYGYTF

SEQ ID NO: 104903 - protein, 15 aa, Homo sapiens
  CDR3 for alpha chain variable domain of TCR clone 52452 (TRAV3, TRAJ3)
CAVRDRDSSASKIIF

SEQ ID NO: 104904 - protein, 18 aa, Homo sapiens
  CDR3 for beta chain variable domain of TCR clone 52452 (TRBV25-1, TRBJ1-2)
CASSVLQNGQGLIFGYTF

SEQ ID NO: 104905 - protein, 14 aa, Homo sapiens
  CDR3 for alpha chain variable domain of TCR clone 52453 (TRAV12-3, TRAJ13)
CAVKKTGGYQKVTF

SEQ ID NO: 104906 - protein, 15 aa, Homo sapiens
  CDR3 for beta chain variable domain of TCR clone 52453 (TRBV12-4, TRBJ2-5)
CASSPPTGLQETQYF

SEQ ID NO: 104907 - protein, 14 aa, Homo sapiens
  CDR3 for alpha chain variable domain of TCR clone 52454 (TRAV8-3, TRAJ4)
CAVGAAGGYNKLIF

SEQ ID NO: 104908 - protein, 14 aa, Homo sapiens
  CDR3 for beta chain variable domain of TCR clone 52454 (TRBV19, TRBJ2-1)
CASPTFVSSGEQFF

SEQ ID NO: 104909 - protein, 17 aa, Homo sapiens
  CDR3 for alpha chain variable domain of TCR clone 52455 (TRAV16, TRAJ58)
CITVLSHGETSGSRLTF

SEQ ID NO: 104910 - protein, 17 aa, Homo sapiens
  CDR3 for beta chain variable domain of TCR clone 52455 (TRBV18, TRBJ2-1)
CASSKGLSGGADNEQFF

SEQ ID NO: 104911 - protein, 13 aa, Homo sapiens
  CDR3 for alpha chain variable domain of TCR clone 52456 (TRAV26-1, TRAJ54)
CIVGVKGAQKLVF

SEQ ID NO: 104912 - protein, 15 aa, Homo sapiens
  CDR3 for beta chain variable domain of TCR clone 52456 (TRBV20-1, TRBJ2-1)
CSAQPGGGPYNEQFF

SEQ ID NO: 104913 - protein, 15 aa, Homo sapiens
  CDR3 for alpha chain variable domain of TCR clone 52457 (TRAV3, TRAJ5)
CAVRDRKTGRRALTF

SEQ ID NO: 104914 - protein, 15 aa, Homo sapiens
  CDR3 for beta chain variable domain of TCR clone 52457 (TRBV7-8, TRBJ2-1)
CASSVADSLYNEQFF

SEQ ID NO: 104915 - protein, 14 aa, Homo sapiens
  CDR3 for alpha chain variable domain of TCR clone 52458 (TRAV2, TRAJ9)
CAVEDRSGGFKTIF

SEQ ID NO: 104916 - protein, 15 aa, Homo sapiens
  CDR3 for beta chain variable domain of TCR clone 52458 (TRBV19, TRBJ2-1)
CTSSHRDRGPNEQFF

SEQ ID NO: 104917 - protein, 14 aa, Homo sapiens
  CDR3 for alpha chain variable domain of TCR clone 52459 (TRAV1-2, TRAJ16)
CAVNRFSDGQKLLF

SEQ ID NO: 104918 - protein, 13 aa, Homo sapiens
  CDR3 for beta chain variable domain of TCR clone 52459 (TRBV12-4, TRBJ2-2)
CASSITGPGELFF

SEQ ID NO: 104919 - protein, 14 aa, Homo sapiens
  CDR3 for alpha chain variable domain of TCR clone 52460 (TRAV12-1, TRAJ10)
CVVNSAGGGNKLTF

SEQ ID NO: 104920 - protein, 14 aa, Homo sapiens
  CDR3 for beta chain variable domain of TCR clone 52460 (TRBV12-4, TRBJ1-1)
CASSLGAGGTEAFF

SEQ ID NO: 104921 - protein, 15 aa, Homo sapiens
  CDR3 for alpha chain variable domain of TCR clone 52461 (TRAV2, TRAJ9)
CAVEDRGTGGFKTIF

SEQ ID NO: 104922 - protein, 16 aa, Homo sapiens
  CDR3 for beta chain variable domain of TCR clone 52461 (TRBV24-1, TRBJ2-3)
CATSDPGTGAKDTQYF

SEQ ID NO: 104923 - protein, 12 aa, Homo sapiens
  CDR3 for alpha chain variable domain of TCR clone 52462 (TRAV8-3, TRAJ40)
CAVTSGTYKYVF

SEQ ID NO: 104924 - protein, 14 aa, Homo sapiens
  CDR3 for beta chain variable domain of TCR clone 52462 (TRBV12-4, TRBJ2-3)
CASSGQGSTDTQYF

SEQ ID NO: 104925 - protein, 18 aa, Homo sapiens
  CDR3 for alpha chain variable domain of TCR clone 52463 (TRAV21, TRAJ52)
CAVRPSPAGGTSYGKMTF

SEQ ID NO: 104926 - protein, 13 aa, Homo sapiens
  CDR3 for beta chain variable domain of TCR clone 52463 (TRBV7-3, TRBJ1-1)
CASSQDWGAEAFF

SEQ ID NO: 104927 - protein, 18 aa, Homo sapiens
  CDR3 for alpha chain variable domain of TCR clone 52464 (TRAV21, TRAJ52)
CAVRPSPAGGDSYGKLTF

SEQ ID NO: 104928 - protein, 13 aa, Homo sapiens
  CDR3 for beta chain variable domain of TCR clone 52464 (TRBV7-3, TRBJ1-1)
CASSQDWGAEAFF

SEQ ID NO: 104929 - protein, 11 aa, Homo sapiens
  CDR3 for alpha chain variable domain of TCR clone 52465 (TRAV12-3, TRAJ27)
CAMANEGKSTF

SEQ ID NO: 104930 - protein, 13 aa, Homo sapiens
  CDR3 for beta chain variable domain of TCR clone 52465 (TRBV20-1, TRBJ1-1)
CSARVGGNTEAFF

SEQ ID NO: 104931 - protein, 16 aa, Homo sapiens
  CDR3 for alpha chain variable domain of TCR clone 52466 (TRAV20, TRAJ10)
CAVLRGLTGEGNKLTF

SEQ ID NO: 104932 - protein, 14 aa, Homo sapiens
  CDR3 for beta chain variable domain of TCR clone 52466 (TRBV19, TRBJ1-5)
CASRAPDSFLSQHF

SEQ ID NO: 104933 - protein, 11 aa, Homo sapiens
  CDR3 for alpha chain variable domain of TCR clone 52467 (TRAV26-1, TRAJ37)
CIVRVGRKLIF

SEQ ID NO: 104934 - protein, 13 aa, Homo sapiens
  CDR3 for beta chain variable domain of TCR clone 52467 (TRBV14, TRBJ1-2)
CASSEDRRYGYAF

SEQ ID NO: 104935 - protein, 14 aa, Homo sapiens
  CDR3 for alpha chain variable domain of TCR clone 52468 (TRAV1-2, TRAJ16)
CAVNRFSDGQKLLF

SEQ ID NO: 104936 - protein, 17 aa, Homo sapiens
  CDR3 for beta chain variable domain of TCR clone 52468 (TRBV7-3, TRBJ2-3)
CASGLMKRMRGADTQYF

SEQ ID NO: 104937 - protein, 14 aa, Homo sapiens
  CDR3 for alpha chain variable domain of TCR clone 52469 (TRAV1-2, TRAJ8)
CAVREDTGFQKLVF

SEQ ID NO: 104938 - protein, 12 aa, Homo sapiens
  CDR3 for beta chain variable domain of TCR clone 52469 (TRBV29-1, TRBJ2-3)
CSVAGGADTQYF

SEQ ID NO: 104939 - protein, 11 aa, Homo sapiens
  CDR3 for alpha chain variable domain of TCR clone 52470 (TRAV2, TRAJ13)
CASGGYQKVTF

SEQ ID NO: 104940 - protein, 16 aa, Homo sapiens
  CDR3 for beta chain variable domain of TCR clone 52470 (TRBV6-1, TRBJ2-5)
CASSETLDRGAETQYV

SEQ ID NO: 104941 - protein, 14 aa, Homo sapiens
  CDR3 for alpha chain variable domain of TCR clone 52471 (TRAV6, TRAJ17)
CALDLKAAGNKLTF

SEQ ID NO: 104942 - protein, 17 aa, Homo sapiens
  CDR3 for beta chain variable domain of TCR clone 52471 (TRBV6-1, TRBJ1-1)
CASLARGGGGFNTEAFF

SEQ ID NO: 104943 - protein, 15 aa, Homo sapiens
  CDR3 for alpha chain variable domain of TCR clone 52472 (TRAV38-1, TRAJ54)
CAFNYLIQGAQKLVF

SEQ ID NO: 104944 - protein, 14 aa, Homo sapiens
  CDR3 for beta chain variable domain of TCR clone 52472 (TRBV19, TRBJ2-1)
CASPTFVLSGEQFF

SEQ ID NO: 104945 - protein, 15 aa, Homo sapiens
  CDR3 for alpha chain variable domain of TCR clone 52473 (TRAV21, TRAJ32)
CAVNSYGGATNKLIF

SEQ ID NO: 104946 - protein, 18 aa, Homo sapiens
  CDR3 for beta chain variable domain of TCR clone 52473 (TRBV7-9, TRBJ2-1)
CASSTGLAEGSSYNERFF

SEQ ID NO: 104947 - protein, 14 aa, Homo sapiens
  CDR3 for alpha chain variable domain of TCR clone 52474 (TRAV9-2, TRAJ39)
CALYIYNAGNMLTF

SEQ ID NO: 104948 - protein, 16 aa, Homo sapiens
  CDR3 for beta chain variable domain of TCR clone 52474 (TRBV4-3, TRBJ2-2)
CASSHLQGSGTGELFF

SEQ ID NO: 104949 - protein, 13 aa, Homo sapiens
  CDR3 for alpha chain variable domain of TCR clone 52475 (TRAV27, TRAJ49)
CAPRPYTGNQFYF

SEQ ID NO: 104950 - protein, 16 aa, Homo sapiens
  CDR3 for beta chain variable domain of TCR clone 52475 (TRBV4-1, TRBJ1-2)
CAGSQDAGQVLYGYTF

SEQ ID NO: 104951 - protein, 14 aa, Homo sapiens
  CDR3 for alpha chain variable domain of TCR clone 52476 (TRAV12-2, TRAJ5)
CAVNRSTGRRALTF

SEQ ID NO: 104952 - protein, 15 aa, Homo sapiens
  CDR3 for beta chain variable domain of TCR clone 52476 (TRBV5-1, TRBJ2-1)
CASSLVANSYNEQFF

SEQ ID NO: 104953 - protein, 18 aa, Homo sapiens
  CDR3 for alpha chain variable domain of TCR clone 52477 (TRAV26-2, TRAJ45)
CILRVDKYSGGGADGLTF

SEQ ID NO: 104954 - protein, 16 aa, Homo sapiens
  CDR3 for beta chain variable domain of TCR clone 52477 (TRBV2, TRBJ1-4)
CASNLLQGAANEKLFF

SEQ ID NO: 104955 - protein, 12 aa, Homo sapiens
  CDR3 for alpha chain variable domain of TCR clone 52478 (TRAV35, TRAJ49)
CAGWNTGKQFYF

SEQ ID NO: 104956 - protein, 16 aa, Homo sapiens
  CDR3 for beta chain variable domain of TCR clone 52478 (TRBV5-1, TRBJ2-2)
CASSLWDTTNTGELFF

SEQ ID NO: 104957 - protein, 12 aa, Homo sapiens
  CDR3 for alpha chain variable domain of TCR clone 52479 (TRAV12-2, TRAJ31)
CAVNTPDARPMF

SEQ ID NO: 104958 - protein, 17 aa, Homo sapiens
  CDR3 for beta chain variable domain of TCR clone 52479 (TRBV20-1, TRBJ1-6)
CSARGGYTFSYNSPLHF

SEQ ID NO: 104959 - protein, 16 aa, Homo sapiens
  CDR3 for alpha chain variable domain of TCR clone 52480 (TRAV12-2, TRAJ13)
CAVKKTGVTRKLPLEL

SEQ ID NO: 104960 - protein, 15 aa, Homo sapiens
  CDR3 for beta chain variable domain of TCR clone 52480 (TRBV27, TRBJ2-1)
CASSNGGGSSNEQFF

SEQ ID NO: 104961 - protein, 13 aa, Homo sapiens
  CDR3 for alpha chain variable domain of TCR clone 52481 (TRAV35, TRAJ32)
CAGVGGATNKLIF

SEQ ID NO: 104962 - protein, 17 aa, Homo sapiens
  CDR3 for beta chain variable domain of TCR clone 52481 (TRBV7-7, TRBJ1-4)
CASSLVGQGASNEKLFF

SEQ ID NO: 104963 - protein, 12 aa, Homo sapiens
  CDR3 for alpha chain variable domain of TCR clone 52482 (TRAV13-1, TRAJ21)
CAAKEGFNKFYF

SEQ ID NO: 104964 - protein, 15 aa, Homo sapiens
  CDR3 for beta chain variable domain of TCR clone 52482 (TRBV19, TRBJ1-1)
CASTSGQIQNTEAFF

SEQ ID NO: 104965 - protein, 14 aa, Homo sapiens
  CDR3 for alpha chain variable domain of TCR clone 52483 (TRAV12-2, TRAJ4)
CRERFSGGYNKLIF

SEQ ID NO: 104966 - protein, 14 aa, Homo sapiens
  CDR3 for beta chain variable domain of TCR clone 52483 (TRBV7-6, TRBJ2-3)
CASSLGTVTDTQYF

SEQ ID NO: 104967 - protein, 14 aa, Homo sapiens
  CDR3 for alpha chain variable domain of TCR clone 52484 (TRAV16, TRAJ33)
CALSAMDSNYQLIW

SEQ ID NO: 104968 - protein, 14 aa, Homo sapiens
  CDR3 for beta chain variable domain of TCR clone 52484 (TRBV12-5, TRBJ2-5)
CASGSRTHQETQYF

SEQ ID NO: 104969 - protein, 14 aa, Homo sapiens
  CDR3 for alpha chain variable domain of TCR clone 52485 (TRAV13-1, TRAJ3)
CAASKSSSASKIIF

SEQ ID NO: 104970 - protein, 15 aa, Homo sapiens
  CDR3 for beta chain variable domain of TCR clone 52485 (TRBV5-1, TRBJ1-1)
CASSLNDFKNTEAFF

SEQ ID NO: 104971 - protein, 12 aa, Homo sapiens
  CDR3 for alpha chain variable domain of TCR clone 52486 (TRAV13-1, TRAJ49)
CAASPPVTSSIL

SEQ ID NO: 104972 - protein, 15 aa, Homo sapiens
  CDR3 for beta chain variable domain of TCR clone 52486 (TRBV7-2, TRBJ1-2)
CASSPRAGWNYGYTF

SEQ ID NO: 104973 - protein, 13 aa, Homo sapiens
  CDR3 for alpha chain variable domain of TCR clone 52487 (TRAV13-2, TRAJ53)
CAENMGSNYKLTF

SEQ ID NO: 104974 - protein, 12 aa, Homo sapiens
  CDR3 for beta chain variable domain of TCR clone 52487 (TRBV5-1, TRBJ2-5)
CASSLGLETQYF

SEQ ID NO: 104975 - protein, 14 aa, Homo sapiens
  CDR3 for alpha chain variable domain of TCR clone 52488 (TRAV26-1, TRAJ38)
CIADNAGNNRKLIW

SEQ ID NO: 104976 - protein, 14 aa, Homo sapiens
  CDR3 for beta chain variable domain of TCR clone 52488 (TRBV19, TRBJ2-1)
CASSRLASINEQFF

SEQ ID NO: 104977 - protein, 16 aa, Homo sapiens
  CDR3 for alpha chain variable domain of TCR clone 52489 (TRAV12-2, TRAJ6)
CAAPLAGSGGSYIPTL

SEQ ID NO: 104978 - protein, 10 aa, Homo sapiens
  CDR3 for beta chain variable domain of TCR clone 52489 (TRBV28, TRBJ1-2)
CASSSDRAVF

SEQ ID NO: 104979 - protein, 16 aa, Homo sapiens
  CDR3 for alpha chain variable domain of TCR clone 52490 (TRAV3, TRAJ37)
CAVRPHGSGNTGKLIF

SEQ ID NO: 104980 - protein, 14 aa, Homo sapiens
  CDR3 for beta chain variable domain of TCR clone 52490 (TRBV25-1, TRBJ1-1)
CASIHLGGNTEAFF

SEQ ID NO: 104981 - protein, 14 aa, Homo sapiens
  CDR3 for alpha chain variable domain of TCR clone 52491 (TRAV1-1, TRAJ27)
CAVIYNTNTGKSTF

SEQ ID NO: 104982 - protein, 15 aa, Homo sapiens
  CDR3 for beta chain variable domain of TCR clone 52491 (TRBV7-2, TRBJ2-1)
CASSSGLAGGNEQFF

SEQ ID NO: 104983 - protein, 13 aa, Homo sapiens
  CDR3 for alpha chain variable domain of TCR clone 52492 (TRAV8-3, TRAJ43)
CAVVPYNNNDMRF

SEQ ID NO: 104984 - protein, 15 aa, Homo sapiens
  CDR3 for beta chain variable domain of TCR clone 52492 (TRBV7-2, TRBJ2-1)
CASSLASGRVNEQFF

SEQ ID NO: 104985 - protein, 15 aa, Homo sapiens
  CDR3 for alpha chain variable domain of TCR clone 52493 (TRAV21, TRAJ52)
CAVRGGGTSYGKLTF

SEQ ID NO: 104986 - protein, 12 aa, Homo sapiens
  CDR3 for beta chain variable domain of TCR clone 52493 (TRBV11-2, TRBJ2-2)
CASSPGGGELFF

SEQ ID NO: 104987 - protein, 15 aa, Homo sapiens
  CDR3 for alpha chain variable domain of TCR clone 52494 (TRAV12-3, TRAJ6)
CAMSATTGGSYIPTF

SEQ ID NO: 104988 - protein, 16 aa, Homo sapiens
  CDR3 for beta chain variable domain of TCR clone 52494 (TRBV20-1, TRBJ1-2)
CSASMGQGIANYGYTF

SEQ ID NO: 104989 - protein, 13 aa, Homo sapiens
  CDR3 for alpha chain variable domain of TCR clone 52495 (TRAV36/DV7, TRAJ57)
CAVVLGGSERLIF

SEQ ID NO: 104990 - protein, 14 aa, Homo sapiens
  CDR3 for beta chain variable domain of TCR clone 52495 (TRBV4-1, TRBJ1-2)
CASSQDGQVRGYTF

SEQ ID NO: 104991 - protein, 17 aa, Homo sapiens
  CDR3 for alpha chain variable domain of TCR clone 52496 (TRAV13-1, TRAJ52)
CAASSGAGGTSYGKLTF

SEQ ID NO: 104992 - protein, 15 aa, Homo sapiens
  CDR3 for beta chain variable domain of TCR clone 52496 (TRBV2, TRBJ2-1)
YASSELAGSYNEQFF

SEQ ID NO: 104993 - protein, 13 aa, Homo sapiens
  CDR3 for alpha chain variable domain of TCR clone 52497 (TRAV20, TRAJ48)
CAVQGVGNEKLTF

SEQ ID NO: 104994 - protein, 14 aa, Homo sapiens
  CDR3 for beta chain variable domain of TCR clone 52497 (TRBV7-6, TRBJ2-3)
CASSLGTVTDTQYF

SEQ ID NO: 104995 - protein, 12 aa, Homo sapiens
  CDR3 for alpha chain variable domain of TCR clone 52498 (TRAV16, TRAJ9)
CALRAGGFKTIS

SEQ ID NO: 104996 - protein, 13 aa, Homo sapiens
  CDR3 for beta chain variable domain of TCR clone 52498 (TRBV4-3, TRBJ1-1)
CASSQVEGSMAFF

SEQ ID NO: 104997 - protein, 14 aa, Homo sapiens
  CDR3 for alpha chain variable domain of TCR clone 52499 (TRAV21, TRAJ35)
CAVMPIGFGNVLHC

SEQ ID NO: 104998 - protein, 12 aa, Homo sapiens
  CDR3 for beta chain variable domain of TCR clone 52499 (TRBV7-9, TRBJ2-7)
CASSIKREQQYF

SEQ ID NO: 104999 - protein, 16 aa, Homo sapiens
  CDR3 for alpha chain variable domain of TCR clone 52500 (TRAV4, TRAJ18)
CCVLLIGGSTLGRLYF

SEQ ID NO: 105000 - protein, 12 aa, Homo sapiens
  CDR3 for beta chain variable domain of TCR clone 52500 (TRBV6-3, TRBJ2-7)
CASSLTPCEQYF

SEQ ID NO: 105001 - protein, 16 aa, Homo sapiens
  CDR3 for alpha chain variable domain of TCR clone 52501 (TRAV26-1, TRAJ32)
CIVRTNYGGATNKLIF

SEQ ID NO: 105002 - protein, 14 aa, Homo sapiens
  CDR3 for beta chain variable domain of TCR clone 52501 (TRBV27, TRBJ1-1)
CASSLLSGPSEAFF

SEQ ID NO: 105003 - protein, 14 aa, Homo sapiens
  CDR3 for alpha chain variable domain of TCR clone 52502 (TRAV1-2, TRAJ8)
CAVREDTGFQKLVF

SEQ ID NO: 105004 - protein, 12 aa, Homo sapiens
  CDR3 for beta chain variable domain of TCR clone 52502 (TRBV11-2, TRBJ2-5)
CASSLGQETQYF

SEQ ID NO: 105005 - protein, 15 aa, Homo sapiens
  CDR3 for alpha chain variable domain of TCR clone 52503 (TRAV21, TRAJ40)
CAVRPQTSGNYKYIF

SEQ ID NO: 105006 - protein, 13 aa, Homo sapiens
  CDR3 for beta chain variable domain of TCR clone 52503 (TRBV7-2, TRBJ2-2)
CASSSVRAGELFF

SEQ ID NO: 105007 - protein, 13 aa, Homo sapiens
  CDR3 for alpha chain variable domain of TCR clone 52504 (TRAV2, TRAJ15)
CAVASQAGTALIF

SEQ ID NO: 105008 - protein, 11 aa, Homo sapiens
  CDR3 for beta chain variable domain of TCR clone 52504 (TRBV6-3, TRBJ2-3)
CATGQADTQYF

SEQ ID NO: 105009 - protein, 11 aa, Homo sapiens
  CDR3 for alpha chain variable domain of TCR clone 52505 (TRAV13-2, TRAJ54)
RAVQGAQKLVF

SEQ ID NO: 105010 - protein, 15 aa, Homo sapiens
  CDR3 for beta chain variable domain of TCR clone 52505 (TRBV20-1, TRBJ2-7)
CSAESGTSGPYEQYF

SEQ ID NO: 105011 - protein, 14 aa, Homo sapiens
  CDR3 for alpha chain variable domain of TCR clone 52506 (TRAV21, TRAJ35)
CAVMPIGFGNVLHC

SEQ ID NO: 105012 - protein, 13 aa, Homo sapiens
  CDR3 for beta chain variable domain of TCR clone 52506 (TRBV23-1, TRBJ1-4)
CASRGKFNEKLLF

SEQ ID NO: 105013 - protein, 14 aa, Homo sapiens
  CDR3 for alpha chain variable domain of TCR clone 52507 (TRAV12-1, TRAJ23)
CVVMIYNQGGKLIF

SEQ ID NO: 105014 - protein, 23 aa, Homo sapiens
  CDR3 for beta chain variable domain of TCR clone 52507 (TRBV7-3, TRBJ1-6)
CAGSLTSRDEASDPSSYNSPLHF

SEQ ID NO: 105015 - protein, 15 aa, Homo sapiens
  CDR3 for alpha chain variable domain of TCR clone 52508 (TRAV13-1, TRAJ17)
CAASIERATGNKLTF

SEQ ID NO: 105016 - protein, 12 aa, Homo sapiens
  CDR3 for beta chain variable domain of TCR clone 52508 (TRBV5-7, TRBJ1-1)
CASSLGRGKDFF

SEQ ID NO: 105017 - protein, 12 aa, Homo sapiens
  CDR3 for alpha chain variable domain of TCR clone 52509 (TRAV2, TRAJ9)
CAVGAGGFKTIF

SEQ ID NO: 105018 - protein, 16 aa, Homo sapiens
  CDR3 for beta chain variable domain of TCR clone 52509 (TRBV12-5, TRBJ2-5)
CASGPRTSGNQETQYF

SEQ ID NO: 105019 - protein, 14 aa, Homo sapiens
  CDR3 for alpha chain variable domain of TCR clone 52510 (TRAV1-2, TRAJ8)
CAVREDTGFQKLVF

SEQ ID NO: 105020 - protein, 18 aa, Homo sapiens
  CDR3 for beta chain variable domain of TCR clone 52510 (TRBV12-4, TRBJ2-4)
CASSRTGAVDVAKNIQYF

SEQ ID NO: 105021 - protein, 12 aa, Homo sapiens
  CDR3 for alpha chain variable domain of TCR clone 52511 (TRAV13-1, TRAJ21)
RAAKEGFNKFYF

SEQ ID NO: 105022 - protein, 16 aa, Homo sapiens
  CDR3 for beta chain variable domain of TCR clone 52511 (TRBV7-2, TRBJ2-6)
CASSLAGRSGANVLTF

SEQ ID NO: 105023 - protein, 14 aa, Homo sapiens
  CDR3 for alpha chain variable domain of TCR clone 52512 (TRAV1-2, TRAJ16)
CAVNRFSDGQELLF

SEQ ID NO: 105024 - protein, 11 aa, Homo sapiens
  CDR3 for beta chain variable domain of TCR clone 52512 (TRBV29-1, TRBJ2-5)
CSEDRTGTQYF

SEQ ID NO: 105025 - protein, 15 aa, Homo sapiens
  CDR3 for alpha chain variable domain of TCR clone 52513 (TRAV26-1, TRAJ48)
CIARWSWFGDEKLTF

SEQ ID NO: 105026 - protein, 12 aa, Homo sapiens
  CDR3 for beta chain variable domain of TCR clone 52513 (TRBV19, TRBJ2-5)
CASSISEETQYF

SEQ ID NO: 105027 - protein, 17 aa, Homo sapiens
  CDR3 for alpha chain variable domain of TCR clone 52514 (TRAV4, TRAJ18)
CLVGERSVGSTLGRLYF

SEQ ID NO: 105028 - protein, 13 aa, Homo sapiens
  CDR3 for beta chain variable domain of TCR clone 52514 (TRBV10-3, TRBJ2-7)
CASKLAVNYEQYF

SEQ ID NO: 105029 - protein, 13 aa, Homo sapiens
  CDR3 for alpha chain variable domain of TCR clone 52515 (TRAV2, TRAJ15)
CAVATQAGTALIF

SEQ ID NO: 105030 - protein, 13 aa, Homo sapiens
  CDR3 for beta chain variable domain of TCR clone 52515 (TRBV5-5, TRBJ1-2)
CASSFWRGEDYTF

SEQ ID NO: 105031 - protein, 15 aa, Homo sapiens
  CDR3 for alpha chain variable domain of TCR clone 52516 (TRAV17, TRAJ56)
CATEPFTGANSRLTF

SEQ ID NO: 105032 - protein, 15 aa, Homo sapiens
  CDR3 for beta chain variable domain of TCR clone 52516 (TRBV28, TRBJ1-5)
CASSRTGGYVQPQHF

SEQ ID NO: 105033 - protein, 11 aa, Homo sapiens
  CDR3 for alpha chain variable domain of TCR clone 52517 (TRAV2, TRAJ13)
CASGGYQKVTF

SEQ ID NO: 105034 - protein, 12 aa, Homo sapiens
  CDR3 for beta chain variable domain of TCR clone 52517 (TRBV2, TRBJ2-1)
CAYGPPGNEQFF

SEQ ID NO: 105035 - protein, 17 aa, Homo sapiens
  CDR3 for alpha chain variable domain of TCR clone 52518 (TRAV8-1, TRAJ42)
CAVKWGNYGGCQGNLIF

SEQ ID NO: 105036 - protein, 15 aa, Homo sapiens
  CDR3 for beta chain variable domain of TCR clone 52518 (TRBV9, TRBJ1-6)
CASSVAGTGDSPLHF

SEQ ID NO: 105037 - protein, 13 aa, Homo sapiens
  CDR3 for alpha chain variable domain of TCR clone 52519 (TRAV16, TRAJ44)
CALSAGTASKLTF

SEQ ID NO: 105038 - protein, 12 aa, Homo sapiens
  CDR3 for beta chain variable domain of TCR clone 52519 (TRBV19, TRBJ2-3)
CATTSSTDTQYF

SEQ ID NO: 105039 - protein, 13 aa, Homo sapiens
  CDR3 for alpha chain variable domain of TCR clone 52520 (TRAV3, TRAJ20)
CAVRSLNDYKLSF

SEQ ID NO: 105040 - protein, 13 aa, Homo sapiens
  CDR3 for beta chain variable domain of TCR clone 52520 (TRBV6-1, TRBJ2-1)
CAGMDHTNNEQFF

SEQ ID NO: 105041 - protein, 13 aa, Homo sapiens
  CDR3 for alpha chain variable domain of TCR clone 52521 (TRAV27, TRAJ6)
CVGGTRGSYIPTF

SEQ ID NO: 105042 - protein, 15 aa, Homo sapiens
  CDR3 for beta chain variable domain of TCR clone 52521 (TRBV11-2, TRBJ1-3)
CASSLSPLVRDTIYF

SEQ ID NO: 105043 - protein, 13 aa, Homo sapiens
  CDR3 for alpha chain variable domain of TCR clone 52522 (TRAV13-1, TRAJ11)
CAAVLAGYSTLPF

SEQ ID NO: 105044 - protein, 17 aa, Homo sapiens
  CDR3 for beta chain variable domain of TCR clone 52522 (TRBV25-1, TRBJ2-7)
CASSDARVVFSSYEQYF

SEQ ID NO: 105045 - protein, 19 aa, Homo sapiens
  CDR3 for alpha chain variable domain of TCR clone 52523 (TRAV2, TRAJ20)
ILQVREADAAVYRDCKLSF

SEQ ID NO: 105046 - protein, 12 aa, Homo sapiens
  CDR3 for beta chain variable domain of TCR clone 52523 (TRBV11-2, TRBJ2-2)
CASSLGGGEPFF

SEQ ID NO: 105047 - protein, 13 aa, Homo sapiens
  CDR3 for alpha chain variable domain of TCR clone 52524 (TRAV21, TRAJ20)
CAVGLRVDYKLSF

SEQ ID NO: 105048 - protein, 13 aa, Homo sapiens
  CDR3 for beta chain variable domain of TCR clone 52524 (TRBV7-2, TRBJ2-2)
CASSLAVTGELFF

SEQ ID NO: 105049 - protein, 11 aa, Homo sapiens
  CDR3 for alpha chain variable domain of TCR clone 52525 (TRAV21, TRAJ34)
CAHYNNDKLIF

SEQ ID NO: 105050 - protein, 13 aa, Homo sapiens
  CDR3 for beta chain variable domain of TCR clone 52525 (TRBV7-6, TRBJ1-2)
CASSLVADYGYTF

SEQ ID NO: 105051 - protein, 13 aa, Homo sapiens
  CDR3 for alpha chain variable domain of TCR clone 52526 (TRAV21, TRAJ26)
CAVSDNYGQNFVF

SEQ ID NO: 105052 - protein, 16 aa, Homo sapiens
  CDR3 for beta chain variable domain of TCR clone 52526 (TRBV29-1, TRBJ2-2)
CSVETRASGNTGELFF

SEQ ID NO: 105053 - protein, 16 aa, Homo sapiens
  CDR3 for alpha chain variable domain of TCR clone 52527 (TRAV4, TRAJ22)
CLVGDLYSGSARQLTF

SEQ ID NO: 105054 - protein, 16 aa, Homo sapiens
  CDR3 for beta chain variable domain of TCR clone 52527 (TRBV7-9, TRBJ2-1)
CASSYVAGGSYNEQFF

SEQ ID NO: 105055 - protein, 17 aa, Homo sapiens
  CDR3 for alpha chain variable domain of TCR clone 52528 (TRAV8-3, TRAJ42)
CAVGNPEERRSQGNLIF

SEQ ID NO: 105056 - protein, 16 aa, Homo sapiens
  CDR3 for beta chain variable domain of TCR clone 52528 (TRBV11-2, TRBJ1-2)
CASSPSGREANYGYTF

SEQ ID NO: 105057 - protein, 14 aa, Homo sapiens
  CDR3 for alpha chain variable domain of TCR clone 52529 (TRAV2, TRAJ9)
CAVEDRSGGFKTIF

SEQ ID NO: 105058 - protein, 16 aa, Homo sapiens
  CDR3 for beta chain variable domain of TCR clone 52529 (TRBV7-3, TRBJ2-1)
CASSLEGYRSYNKQFF

SEQ ID NO: 105059 - protein, 16 aa, Homo sapiens
  CDR3 for alpha chain variable domain of TCR clone 52530 (TRAV26-1, )
CIDIQNPDPAVYQLRD

SEQ ID NO: 105060 - protein, 19 aa, Homo sapiens
  CDR3 for beta chain variable domain of TCR clone 52530 (TRBV19, TRBJ2-5)
CVSSIGQVTDFFLGETQYF

SEQ ID NO: 105061 - protein, 12 aa, Homo sapiens
  CDR3 for alpha chain variable domain of TCR clone 52531 (TRAV12-3, TRAJ17)
CAMTLTGNKLTF

SEQ ID NO: 105062 - protein, 16 aa, Homo sapiens
  CDR3 for beta chain variable domain of TCR clone 52531 (TRBV5-1, TRBJ2-3)
CVSSLGLAVYTDTQYF

SEQ ID NO: 105063 - protein, 14 aa, Homo sapiens
  CDR3 for alpha chain variable domain of TCR clone 52532 (TRAV26-1, TRAJ38)
CIADNADNNRKMIW

SEQ ID NO: 105064 - protein, 13 aa, Homo sapiens
  CDR3 for beta chain variable domain of TCR clone 52532 (TRBV20-1, TRBJ1-1)
YSARGGGNTEAFF

SEQ ID NO: 105065 - protein, 13 aa, Homo sapiens
  CDR3 for alpha chain variable domain of TCR clone 52533 (TRAV27, TRAJ53)
CAGQGGSNYKLTF

SEQ ID NO: 105066 - protein, 13 aa, Homo sapiens
  CDR3 for beta chain variable domain of TCR clone 52533 (TRBV29-1, TRBJ1-1)
CSVESGFGTEALF

SEQ ID NO: 105067 - protein, 15 aa, Homo sapiens
  CDR3 for alpha chain variable domain of TCR clone 52534 (TRAV8-3, TRAJ27)
CAVGPSKTNAGKSTF

SEQ ID NO: 105068 - protein, 13 aa, Homo sapiens
  CDR3 for beta chain variable domain of TCR clone 52534 (TRBV5-1, TRBJ1-1)
CASSADWDTEAFF

SEQ ID NO: 105069 - protein, 11 aa, Homo sapiens
  CDR3 for alpha chain variable domain of TCR clone 52535 (TRAV1-2, TRAJ31)
CAVKNNARLMF

SEQ ID NO: 105070 - protein, 15 aa, Homo sapiens
  CDR3 for beta chain variable domain of TCR clone 52535 (TRBV7-3, TRBJ2-1)
CASSLSSGSFDEQFF

SEQ ID NO: 105071 - protein, 12 aa, Homo sapiens
  CDR3 for alpha chain variable domain of TCR clone 52536 (TRAV12-3, TRAJ17)
CAVTLTGNKLTF

SEQ ID NO: 105072 - protein, 16 aa, Homo sapiens
  CDR3 for beta chain variable domain of TCR clone 52536 (TRBV19, TRBJ2-1)
CASSKAGPSSYNEQFF

SEQ ID NO: 105073 - protein, 12 aa, Homo sapiens
  CDR3 for alpha chain variable domain of TCR clone 52537 (TRAV2, TRAJ40)
CCGYLRNLKYIF

SEQ ID NO: 105074 - protein, 14 aa, Homo sapiens
  CDR3 for beta chain variable domain of TCR clone 52537 (TRBV19, TRBJ2-1)
CASPTFVLSGEQFF

SEQ ID NO: 105075 - protein, 13 aa, Homo sapiens
  CDR3 for alpha chain variable domain of TCR clone 52538 (TRAV21, TRAJ20)
CAVGLRVDYKLSS

SEQ ID NO: 105076 - protein, 13 aa, Homo sapiens
  CDR3 for beta chain variable domain of TCR clone 52538 (TRBV6-1, TRBJ1-1)
CASSRQGNTEAFF

SEQ ID NO: 105077 - protein, 18 aa, Homo sapiens
  CDR3 for alpha chain variable domain of TCR clone 52539 (TRAV26-1, TRAJ23)
CIVRVGLEVWNQGGKLIF

SEQ ID NO: 105078 - protein, 16 aa, Homo sapiens
  CDR3 for beta chain variable domain of TCR clone 52539 (TRBV12-4, TRBJ2-5)
YASSFFVRGRQETQYF

SEQ ID NO: 105079 - protein, 17 aa, Homo sapiens
  CDR3 for alpha chain variable domain of TCR clone 52540 (TRAV3, TRAJ38)
CAVRDCLNAGNNRKLIW

SEQ ID NO: 105080 - protein, 12 aa, Homo sapiens
  CDR3 for beta chain variable domain of TCR clone 52540 (TRBV11-2, TRBJ2-2)
CASSLPTGELFF

SEQ ID NO: 105081 - protein, 12 aa, Homo sapiens
  CDR3 for alpha chain variable domain of TCR clone 52541 (TRAV8-3, TRAJ26)
CAGDNYGQNFVS

SEQ ID NO: 105082 - protein, 15 aa, Homo sapiens
  CDR3 for beta chain variable domain of TCR clone 52541 (TRBV9, TRBJ2-1)
CASSLAGSSYNEQFF

SEQ ID NO: 105083 - protein, 13 aa, Homo sapiens
  CDR3 for alpha chain variable domain of TCR clone 52542 (TRAV3, TRAJ43)
CAVNARNNNDMRF

SEQ ID NO: 105084 - protein, 16 aa, Homo sapiens
  CDR3 for beta chain variable domain of TCR clone 52542 (TRBV7-9, TRBJ2-3)
CASSFSVAGGTDTQYF

SEQ ID NO: 105085 - protein, 12 aa, Homo sapiens
  CDR3 for alpha chain variable domain of TCR clone 52543 (TRAV21, TRAJ33)
CAKMDSNYQLIW

SEQ ID NO: 105086 - protein, 16 aa, Homo sapiens
  CDR3 for beta chain variable domain of TCR clone 52543 (TRBV19, TRBJ2-1)
CASSKAGPSSYNEQFF

SEQ ID NO: 105087 - protein, 17 aa, Homo sapiens
  CDR3 for alpha chain variable domain of TCR clone 52544 (TRAV3, TRAJ6)
CAVRDGPRAGGSYIPTF

SEQ ID NO: 105088 - protein, 14 aa, Homo sapiens
  CDR3 for beta chain variable domain of TCR clone 52544 (TRBV19, TRBJ2-2)
CASSGQGIAGELFF

SEQ ID NO: 105089 - protein, 14 aa, Homo sapiens
  CDR3 for alpha chain variable domain of TCR clone 52545 (TRAV1-2, TRAJ16)
CAVNRFSDGQKLLF

SEQ ID NO: 105090 - protein, 14 aa, Homo sapiens
  CDR3 for beta chain variable domain of TCR clone 52545 (TRBV19, TRBJ2-1)
CASPTFVFSGEQFF

SEQ ID NO: 105091 - protein, 14 aa, Homo sapiens
  CDR3 for alpha chain variable domain of TCR clone 52546 (TRAV3, TRAJ6)
CAVRDSRRKLHTYI

SEQ ID NO: 105092 - protein, 15 aa, Homo sapiens
  CDR3 for beta chain variable domain of TCR clone 52546 (TRBV18, TRBJ2-7)
CASSPLQGITYEQYF

SEQ ID NO: 105093 - protein, 15 aa, Homo sapiens
  CDR3 for alpha chain variable domain of TCR clone 52547 (TRAV21, TRAJ53)
CATLNSGGSNYKLTF

SEQ ID NO: 105094 - protein, 13 aa, Homo sapiens
  CDR3 for beta chain variable domain of TCR clone 52547 (TRBV7-3, TRBJ2-1)
CASSPGSYNEQFF

SEQ ID NO: 105095 - protein, 14 aa, Homo sapiens
  CDR3 for alpha chain variable domain of TCR clone 52548 (TRAV35, TRAJ22)
CAGPRPGSARQLTF

SEQ ID NO: 105096 - protein, 14 aa, Homo sapiens
  CDR3 for beta chain variable domain of TCR clone 52548 (TRBV11-3, TRBJ2-3)
CASSSGQGPDTQYF

SEQ ID NO: 105097 - protein, 14 aa, Homo sapiens
  CDR3 for alpha chain variable domain of TCR clone 52549 (TRAV12-2, TRAJ17)
CAVKIKAAGNKLTF

SEQ ID NO: 105098 - protein, 16 aa, Homo sapiens
  CDR3 for beta chain variable domain of TCR clone 52549 (TRBV20-1, TRBJ2-6)
CSASSQGYDGANVLTF

SEQ ID NO: 105099 - protein, 15 aa, Homo sapiens
  CDR3 for alpha chain variable domain of TCR clone 52550 (TRAV17, TRAJ23)
CATDAEDNQGGKLIF

SEQ ID NO: 105100 - protein, 15 aa, Homo sapiens
  CDR3 for beta chain variable domain of TCR clone 52550 (TRBV9, TRBJ1-6)
CASSVAGTGDSPLHF

SEQ ID NO: 105101 - protein, 14 aa, Homo sapiens
  CDR3 for alpha chain variable domain of TCR clone 52551 (TRAV12-2, TRAJ9)
CAMSPNNGGFKTIF

SEQ ID NO: 105102 - protein, 12 aa, Homo sapiens
  CDR3 for beta chain variable domain of TCR clone 52551 (TRBV19, TRBJ1-5)
CASSIAQQPQHF

SEQ ID NO: 105103 - protein, 16 aa, Homo sapiens
  CDR3 for alpha chain variable domain of TCR clone 52552 (TRAV30, TRAJ24)
CGTEIVDADSWGKFQF

SEQ ID NO: 105104 - protein, 18 aa, Homo sapiens
  CDR3 for beta chain variable domain of TCR clone 52552 (TRBV4-1, TRBJ1-5)
CASSQDPRGQGLNQPQHF

SEQ ID NO: 105105 - protein, 12 aa, Homo sapiens
  CDR3 for alpha chain variable domain of TCR clone 52553 (TRAV13-1, TRAJ53)
AASGGSNYKLTF

SEQ ID NO: 105106 - protein, 15 aa, Homo sapiens
  CDR3 for beta chain variable domain of TCR clone 52553 (TRBV20-1, TRBJ2-7)
CSARGPLAGGREQYF

SEQ ID NO: 105107 - protein, 12 aa, Homo sapiens
  CDR3 for alpha chain variable domain of TCR clone 52554 (TRAV16, TRAJ10)
CSRTGGGNKLTF

SEQ ID NO: 105108 - protein, 15 aa, Homo sapiens
  CDR3 for beta chain variable domain of TCR clone 52554 (TRBV6-3, TRBJ2-7)
CASSAPGTVFYEQYF

SEQ ID NO: 105109 - protein, 14 aa, Homo sapiens
  CDR3 for alpha chain variable domain of TCR clone 52555 (TRAV12-2, TRAJ13)
CAVKKAGGYQKVTF

SEQ ID NO: 105110 - protein, 11 aa, Homo sapiens
  CDR3 for beta chain variable domain of TCR clone 52555 (TRBV29-1, TRBJ2-5)
CSEDRTGTQYF

SEQ ID NO: 105111 - protein, 13 aa, Homo sapiens
  CDR3 for alpha chain variable domain of TCR clone 52556 (TRAV16, TRAJ54)
CALMVQGTQKLVF

SEQ ID NO: 105112 - protein, 12 aa, Homo sapiens
  CDR3 for beta chain variable domain of TCR clone 52556 (TRBV18, TRBJ2-7)
CASSTAMGEQYF

SEQ ID NO: 105113 - protein, 19 aa, Homo sapiens
  CDR3 for alpha chain variable domain of TCR clone 52557 (TRAV29/DV5, TRAJ49)
CSVLLCSKLTVDTGNQFYF

SEQ ID NO: 105114 - protein, 17 aa, Homo sapiens
  CDR3 for beta chain variable domain of TCR clone 52557 (TRBV13, TRBJ2-3)
CASSLSRVAGGRNTQYL

SEQ ID NO: 105115 - protein, 18 aa, Homo sapiens
  CDR3 for alpha chain variable domain of TCR clone 52558 (TRAV26-2, TRAJ54)
CILRDVEVGIQGAQKLVF

SEQ ID NO: 105116 - protein, 14 aa, Homo sapiens
  CDR3 for beta chain variable domain of TCR clone 52558 (TRBV19, TRBJ2-1)
CASPTFVLSGEQFF

SEQ ID NO: 105117 - protein, 12 aa, Homo sapiens
  CDR3 for alpha chain variable domain of TCR clone 52559 (TRAV13-1, TRAJ21)
CAAKEGFNKFYF

SEQ ID NO: 105118 - protein, 13 aa, Homo sapiens
  CDR3 for beta chain variable domain of TCR clone 52559 (TRBV12-4, TRBJ1-1)
CASSPGTGFEAFF

SEQ ID NO: 105119 - protein, 11 aa, Homo sapiens
  CDR3 for alpha chain variable domain of TCR clone 52560 (TRAV1-2, TRAJ40)
CAVPGTYKYIF

SEQ ID NO: 105120 - protein, 16 aa, Homo sapiens
  CDR3 for beta chain variable domain of TCR clone 52560 (TRBV12-5, TRBJ2-5)
CASGPRTSGNQETQYF

SEQ ID NO: 105121 - protein, 16 aa, Homo sapiens
  CDR3 for alpha chain variable domain of TCR clone 52561 (TRAV1-2, TRAJ10)
WAVRGVLTGGGNKLTF

SEQ ID NO: 105122 - protein, 12 aa, Homo sapiens
  CDR3 for beta chain variable domain of TCR clone 52561 (TRBV7-8, TRBJ2-7)
CASSLGDREQYF

SEQ ID NO: 105123 - protein, 14 aa, Homo sapiens
  CDR3 for alpha chain variable domain of TCR clone 52562 (TRAV12-1, TRAJ12)
CVVTRMDSSYKLIF

SEQ ID NO: 105124 - protein, 19 aa, Homo sapiens
  CDR3 for beta chain variable domain of TCR clone 52562 (TRBV4-1, TRBJ2-7)
CASSPVAGGGRAVLRAGHQ

SEQ ID NO: 105125 - protein, 13 aa, Homo sapiens
  CDR3 for alpha chain variable domain of TCR clone 52563 (TRAV8-3, TRAJ28)
CAVGAVGSYQLTF

SEQ ID NO: 105126 - protein, 15 aa, Homo sapiens
  CDR3 for beta chain variable domain of TCR clone 52563 (TRBV7-9, TRBJ1-5)
CASSQGHQPNQPQYF

SEQ ID NO: 105127 - protein, 16 aa, Homo sapiens
  CDR3 for alpha chain variable domain of TCR clone 52564 (TRAV26-2, TRAJ57)
CILRDVGSGGAEKLVF

SEQ ID NO: 105128 - protein, 13 aa, Homo sapiens
  CDR3 for beta chain variable domain of TCR clone 52564 (TRBV18, TRBJ2-3)
CASSPGVTDTQYF

SEQ ID NO: 105129 - protein, 13 aa, Homo sapiens
  CDR3 for alpha chain variable domain of TCR clone 52565 (TRAV2, TRAJ15)
CAVASQAGTALIF

SEQ ID NO: 105130 - protein, 14 aa, Homo sapiens
  CDR3 for beta chain variable domain of TCR clone 52565 (TRBV19, TRBJ2-7)
CASSIFAGTYEQYF

SEQ ID NO: 105131 - protein, 13 aa, Homo sapiens
  CDR3 for alpha chain variable domain of TCR clone 52566 (TRAV13-1, TRAJ39)
RAASIWAGNMLTF

SEQ ID NO: 105132 - protein, 15 aa, Homo sapiens
  CDR3 for beta chain variable domain of TCR clone 52566 (TRBV7-9, TRBJ1-1)
CASSLLEQGGTEAFF

SEQ ID NO: 105133 - protein, 13 aa, Homo sapiens
  CDR3 for alpha chain variable domain of TCR clone 52567 (TRAV21, TRAJ27)
RAALNTNAGKSTF

SEQ ID NO: 105134 - protein, 14 aa, Homo sapiens
  CDR3 for beta chain variable domain of TCR clone 52567 (TRBV27, TRBJ1-1)
CASSLLSGLSEAFF

SEQ ID NO: 105135 - protein, 14 aa, Homo sapiens
  CDR3 for alpha chain variable domain of TCR clone 52568 (TRAV12-1, TRAJ28)
CVSHSGAGSYQLTF

SEQ ID NO: 105136 - protein, 14 aa, Homo sapiens
  CDR3 for beta chain variable domain of TCR clone 52568 (TRBV19, TRBJ2-1)
CASPTFVLSGEQFF

SEQ ID NO: 105137 - protein, 16 aa, Homo sapiens
  CDR3 for alpha chain variable domain of TCR clone 52569 (TRAV3, TRAJ37)
CAVRGKGSGNTGKLIF

SEQ ID NO: 105138 - protein, 15 aa, Homo sapiens
  CDR3 for beta chain variable domain of TCR clone 52569 (TRBV19, TRBJ1-2)
CASSVGQVLNYGYTF

SEQ ID NO: 105139 - protein, 14 aa, Homo sapiens
  CDR3 for alpha chain variable domain of TCR clone 52570 (TRAV12-2, TRAJ13)
CAVKKTGGYQKVTF

SEQ ID NO: 105140 - protein, 16 aa, Homo sapiens
  CDR3 for beta chain variable domain of TCR clone 52570 (TRBV2, TRBJ2-1)
CASRSPAEGKYNEQFF

SEQ ID NO: 105141 - protein, 23 aa, Homo sapiens
  CDR3 for alpha chain variable domain of TCR clone 52571 (TRAV30, TRAJ43)
CTLRPPSSVTQEPTSAALSDMRF

SEQ ID NO: 105142 - protein, 14 aa, Homo sapiens
  CDR3 for beta chain variable domain of TCR clone 52571 (TRBV12-5, TRBJ2-5)
CASGSRTHQETQYF

SEQ ID NO: 105143 - protein, 15 aa, Homo sapiens
  CDR3 for alpha chain variable domain of TCR clone 52572 (TRAV25, TRAJ52)
CAGTSGGTSYGKLTF

SEQ ID NO: 105144 - protein, 16 aa, Homo sapiens
  CDR3 for beta chain variable domain of TCR clone 52572 (TRBV5-1, TRBJ1-1)
CASSSGGNSLNTEAFF

SEQ ID NO: 105145 - protein, 12 aa, Homo sapiens
  CDR3 for alpha chain variable domain of TCR clone 52573 (TRAV12-3, TRAJ17)
CAMTLTGNKLTF

SEQ ID NO: 105146 - protein, 13 aa, Homo sapiens
  CDR3 for beta chain variable domain of TCR clone 52573 (TRBV7-9, TRBJ2-7)
CASSFAGAYEQYF

SEQ ID NO: 105147 - protein, 12 aa, Homo sapiens
  CDR3 for alpha chain variable domain of TCR clone 52574 (TRAV1-1, TRAJ39)
CAVPVVGNMLTF

SEQ ID NO: 105148 - protein, 13 aa, Homo sapiens
  CDR3 for beta chain variable domain of TCR clone 52574 (TRBV7-9, TRBJ2-1)
CARSSSNFNEQFF

SEQ ID NO: 105149 - protein, 14 aa, Homo sapiens
  CDR3 for alpha chain variable domain of TCR clone 52575 (TRAV12-2, TRAJ6)
CASKWGGGGYIPTF

SEQ ID NO: 105150 - protein, 13 aa, Homo sapiens
  CDR3 for beta chain variable domain of TCR clone 52575 (TRBV2, TRBJ1-1)
CASSEGGNTEAFF

SEQ ID NO: 105151 - protein, 13 aa, Homo sapiens
  CDR3 for alpha chain variable domain of TCR clone 52576 (TRAV27, TRAJ54)
CAGAGQGAQKLVF

SEQ ID NO: 105152 - protein, 15 aa, Homo sapiens
  CDR3 for beta chain variable domain of TCR clone 52576 (TRBV18, TRBJ2-6)
CASSPLYAGANVLTF

SEQ ID NO: 105153 - protein, 17 aa, Homo sapiens
  CDR3 for alpha chain variable domain of TCR clone 52577 (TRAV26-1, TRAJ53)
CIVRVDDSGGSNYKLTF

SEQ ID NO: 105154 - protein, 15 aa, Homo sapiens
  CDR3 for beta chain variable domain of TCR clone 52577 (TRBV20-1, TRBJ2-7)
CIARVPAAYFYEQYF

SEQ ID NO: 105155 - protein, 11 aa, Homo sapiens
  CDR3 for alpha chain variable domain of TCR clone 52578 (TRAV35, TRAJ34)
CWARNTDKLIF

SEQ ID NO: 105156 - protein, 13 aa, Homo sapiens
  CDR3 for beta chain variable domain of TCR clone 52578 (TRBV19, TRBJ2-7)
CASSIDRAYEQYF

SEQ ID NO: 105157 - protein, 12 aa, Homo sapiens
  CDR3 for alpha chain variable domain of TCR clone 52579 (TRAV26-2, TRAJ21)
CILKGNFSKFYF

SEQ ID NO: 105158 - protein, 14 aa, Homo sapiens
  CDR3 for beta chain variable domain of TCR clone 52579 (TRBV7-9, TRBJ1-1)
CASTPLQSYTEAFF

SEQ ID NO: 105159 - protein, 16 aa, Homo sapiens
  CDR3 for alpha chain variable domain of TCR clone 52580 (TRAV12-3, TRAJ53)
CAMSPGSGGSNYKLKF

SEQ ID NO: 105160 - protein, 14 aa, Homo sapiens
  CDR3 for beta chain variable domain of TCR clone 52580 (TRBV4-2, TRBJ2-1)
CASGLDRAYNEQFF

SEQ ID NO: 105161 - protein, 15 aa, Homo sapiens
  CDR3 for alpha chain variable domain of TCR clone 52581 (TRAV3, TRAJ22)
CAVRDRGGSARQLTF

SEQ ID NO: 105162 - protein, 14 aa, Homo sapiens
  CDR3 for beta chain variable domain of TCR clone 52581 (TRBV7-3, TRBJ1-1)
CASSLGTGYTEAFF

SEQ ID NO: 105163 - protein, 17 aa, Homo sapiens
  CDR3 for alpha chain variable domain of TCR clone 52582 (TRAV13-1, TRAJ28)
CAASPPYSGAGSYQLPF

SEQ ID NO: 105164 - protein, 12 aa, Homo sapiens
  CDR3 for beta chain variable domain of TCR clone 52582 (TRBV11-2, TRBJ2-2)
CASSLPTGELFF

SEQ ID NO: 105165 - protein, 22 aa, Homo sapiens
  CDR3 for alpha chain variable domain of TCR clone 52583 (TRAV30, TRAJ48)
TASQLSYSGTYFRGIGNEKLTF

SEQ ID NO: 105166 - protein, 14 aa, Homo sapiens
  CDR3 for beta chain variable domain of TCR clone 52583 (TRBV7-6, TRBJ2-3)
CASSVAGGTDTQYF

SEQ ID NO: 105167 - protein, 14 aa, Homo sapiens
  CDR3 for alpha chain variable domain of TCR clone 52584 (TRAV16, TRAJ33)
CALSAMDSNYQLIW

SEQ ID NO: 105168 - protein, 13 aa, Homo sapiens
  CDR3 for beta chain variable domain of TCR clone 52584 (TRBV7-6, TRBJ1-2)
CASSLVADYGYTF

SEQ ID NO: 105169 - protein, 13 aa, Homo sapiens
  CDR3 for alpha chain variable domain of TCR clone 52585 (TRAV21, TRAJ11)
CAVPNSGYSTLTF

SEQ ID NO: 105170 - protein, 13 aa, Homo sapiens
  CDR3 for beta chain variable domain of TCR clone 52585 (TRBV19, TRBJ1-3)
CASRLSLGNTIYF

SEQ ID NO: 105171 - protein, 14 aa, Homo sapiens
  CDR3 for alpha chain variable domain of TCR clone 52586 (TRAV1-2, TRAJ8)
CAVREYTGFQKLVF

SEQ ID NO: 105172 - protein, 14 aa, Homo sapiens
  CDR3 for beta chain variable domain of TCR clone 52586 (TRBV7-9, TRBJ1-1)
CASTPLQSYTEAFF

SEQ ID NO: 105173 - protein, 12 aa, Homo sapiens
  CDR3 for alpha chain variable domain of TCR clone 52587 (TRAV25, TRAJ35)
CAGIGFGNVLHC

SEQ ID NO: 105174 - protein, 15 aa, Homo sapiens
  CDR3 for beta chain variable domain of TCR clone 52587 (TRBV6-3, TRBJ2-7)
CASSSPGTVFYEQYF

SEQ ID NO: 105175 - protein, 13 aa, Homo sapiens
  CDR3 for alpha chain variable domain of TCR clone 52588 (TRAV36/DV7, TRAJ54)
CAVDIQGAQKLVF

SEQ ID NO: 105176 - protein, 14 aa, Homo sapiens
  CDR3 for beta chain variable domain of TCR clone 52588 (TRBV19, TRBJ2-7)
CSSNSRDTFTGMYF

SEQ ID NO: 105177 - protein, 17 aa, Homo sapiens
  CDR3 for alpha chain variable domain of TCR clone 52589 (TRAV36/DV7, TRAJ52)
CAVAQRAGGTSYGKLTF

SEQ ID NO: 105178 - protein, 15 aa, Homo sapiens
  CDR3 for beta chain variable domain of TCR clone 52589 (TRBV7-2, TRBJ2-3)
CASSLEQGGTDTQYF

SEQ ID NO: 105179 - protein, 19 aa, Homo sapiens
  CDR3 for alpha chain variable domain of TCR clone 52590 (TRAV30, TRAJ52)
CGTEANTNAGGTSYGKLTF

SEQ ID NO: 105180 - protein, 17 aa, Homo sapiens
  CDR3 for beta chain variable domain of TCR clone 52590 (TRBV28, TRBJ2-7)
CASSPLRGGRWKGGQYF

SEQ ID NO: 105181 - protein, 13 aa, Homo sapiens
  CDR3 for alpha chain variable domain of TCR clone 52591 (TRAV12-3, TRAJ33)
CAMSVNSNYQLIW

SEQ ID NO: 105182 - protein, 13 aa, Homo sapiens
  CDR3 for beta chain variable domain of TCR clone 52591 (TRBV2, TRBJ1-1)
CARNPTGGFHAFF

SEQ ID NO: 105183 - protein, 16 aa, Homo sapiens
  CDR3 for alpha chain variable domain of TCR clone 52592 (TRAV13-1, TRAJ48)
CAASIFGNFGNEKLTS

SEQ ID NO: 105184 - protein, 13 aa, Homo sapiens
  CDR3 for beta chain variable domain of TCR clone 52592 (TRBV7-7, TRBJ2-3)
CASSLSRADTQYF

SEQ ID NO: 105185 - protein, 12 aa, Homo sapiens
  CDR3 for alpha chain variable domain of TCR clone 52593 (TRAV16, TRAJ10)
CSRTGGGNKLTF

SEQ ID NO: 105186 - protein, 13 aa, Homo sapiens
  CDR3 for beta chain variable domain of TCR clone 52593 (TRBV19, TRBJ1-2)
CASSQGQVYGYTF

SEQ ID NO: 105187 - protein, 16 aa, Homo sapiens
  CDR3 for alpha chain variable domain of TCR clone 52594 (TRAV27, TRAJ53)
CAAPEGSGGSNYKLTF

SEQ ID NO: 105188 - protein, 14 aa, Homo sapiens
  CDR3 for beta chain variable domain of TCR clone 52594 (TRBV7-8, TRBJ2-5)
CASSATGGQETQYF

SEQ ID NO: 105189 - protein, 15 aa, Homo sapiens
  CDR3 for alpha chain variable domain of TCR clone 52595 (TRAV25, TRAJ52)
CAGRPGGTSYGKLTF

SEQ ID NO: 105190 - protein, 15 aa, Homo sapiens
  CDR3 for beta chain variable domain of TCR clone 52595 (TRBV27, TRBJ1-6)
CASSFDRGLGSPLHF

SEQ ID NO: 105191 - protein, 15 aa, Homo sapiens
  CDR3 for alpha chain variable domain of TCR clone 52596 (TRAV16, TRAJ16)
CALRGGGSDGQKLLF

SEQ ID NO: 105192 - protein, 15 aa, Homo sapiens
  CDR3 for beta chain variable domain of TCR clone 52596 (TRBV20-1, TRBJ2-7)
CSARDRVSGMDEQYF

SEQ ID NO: 105193 - protein, 14 aa, Homo sapiens
  CDR3 for alpha chain variable domain of TCR clone 52597 (TRAV12-3, TRAJ10)
SHLPLTGGGHKLTF

SEQ ID NO: 105194 - protein, 14 aa, Homo sapiens
  CDR3 for beta chain variable domain of TCR clone 52597 (TRBV6-1, TRBJ1-3)
CASVQGGGGNTIYF

SEQ ID NO: 105195 - protein, 12 aa, Homo sapiens
  CDR3 for alpha chain variable domain of TCR clone 52598 (TRAV21, TRAJ33)
CAKMDSNYQLMW

SEQ ID NO: 105196 - protein, 14 aa, Homo sapiens
  CDR3 for beta chain variable domain of TCR clone 52598 (TRBV2, TRBJ2-7)
CASSLTSGGYEQYF

SEQ ID NO: 105197 - protein, 16 aa, Homo sapiens
  CDR3 for alpha chain variable domain of TCR clone 52599 (TRAV1-2, TRAJ10)
CAVRGVLTGGGNKLTF

SEQ ID NO: 105198 - protein, 20 aa, Homo sapiens
  CDR3 for beta chain variable domain of TCR clone 52599 (TRBV28, TRBJ2-1)
CASTPIGRSPGLAGGNEQFF

SEQ ID NO: 105199 - protein, 15 aa, Homo sapiens
  CDR3 for alpha chain variable domain of TCR clone 52600 (TRAV3, TRAJ5)
CAVRDLDTGRRALTF

SEQ ID NO: 105200 - protein, 16 aa, Homo sapiens
  CDR3 for beta chain variable domain of TCR clone 52600 (TRBV12-4, TRBJ1-5)
CASSRPVGGSNQPQHF

SEQ ID NO: 105201 - protein, 13 aa, Homo sapiens
  CDR3 for alpha chain variable domain of TCR clone 52601 (TRAV13-1, TRAJ29)
CAASIGLNTPLVF

SEQ ID NO: 105202 - protein, 13 aa, Homo sapiens
  CDR3 for beta chain variable domain of TCR clone 52601 (TRBV20-1, TRBJ2-7)
CSARGRGAYEQYF

SEQ ID NO: 105203 - protein, 16 aa, Homo sapiens
  CDR3 for alpha chain variable domain of TCR clone 52602 (TRAV30, TRAJ24)
CGTGIVDADSWGKFQF

SEQ ID NO: 105204 - protein, 15 aa, Homo sapiens
  CDR3 for beta chain variable domain of TCR clone 52602 (TRBV6-3, TRBJ2-7)
CASSSPGTVFYEQYF

SEQ ID NO: 105205 - protein, 13 aa, Homo sapiens
  CDR3 for alpha chain variable domain of TCR clone 52603 (TRAV20, TRAJ21)
CAVEGYNFNKFYF

SEQ ID NO: 105206 - protein, 14 aa, Homo sapiens
  CDR3 for beta chain variable domain of TCR clone 52603 (TRBV3-1, TRBJ2-5)
CASSQGPDQETQCF

SEQ ID NO: 105207 - protein, 13 aa, Homo sapiens
  CDR3 for alpha chain variable domain of TCR clone 52604 (TRAV17, TRAJ20)
CAPLGVDDYKLSF

SEQ ID NO: 105208 - protein, 12 aa, Homo sapiens
  CDR3 for beta chain variable domain of TCR clone 52604 (TRBV29-1, TRBJ2-3)
CNVTGGADTQYF

SEQ ID NO: 105209 - protein, 15 aa, Homo sapiens
  CDR3 for alpha chain variable domain of TCR clone 52605 (TRAV26-1, TRAJ44)
CIVRANTVTASKLTF

SEQ ID NO: 105210 - protein, 16 aa, Homo sapiens
  CDR3 for beta chain variable domain of TCR clone 52605 (TRBV7-7, TRBJ2-1)
CASSLASGTSYNEQFF

SEQ ID NO: 105211 - protein, 15 aa, Homo sapiens
  CDR3 for alpha chain variable domain of TCR clone 52606 (TRAV38-1, TRAJ37)
CAFIHGSGNTGKLIF

SEQ ID NO: 105212 - protein, 16 aa, Homo sapiens
  CDR3 for beta chain variable domain of TCR clone 52606 (TRBV10-3, TRBJ1-1)
CAISTGFPAMNTEAFL

SEQ ID NO: 105213 - protein, 13 aa, Homo sapiens
  CDR3 for alpha chain variable domain of TCR clone 52607 (TRAV12-3, TRAJ13)
CAMTSGGYQKVTF

SEQ ID NO: 105214 - protein, 12 aa, Homo sapiens
  CDR3 for beta chain variable domain of TCR clone 52607 (TRBV7-8, TRBJ2-7)
CASSLGDREQYF

SEQ ID NO: 105215 - protein, 14 aa, Homo sapiens
  CDR3 for alpha chain variable domain of TCR clone 52608 (TRAV1-2, TRAJ8)
CAVREDTGFQKLVS

SEQ ID NO: 105216 - protein, 13 aa, Homo sapiens
  CDR3 for beta chain variable domain of TCR clone 52608 (TRBV12-4, TRBJ1-2)
CASSLRQGKGYTF

SEQ ID NO: 105217 - protein, 15 aa, Homo sapiens
  CDR3 for alpha chain variable domain of TCR clone 52609 (TRAV3, TRAJ22)
CAVRDRGGSARQLNF

SEQ ID NO: 105218 - protein, 14 aa, Homo sapiens
  CDR3 for beta chain variable domain of TCR clone 52609 (TRBV19, TRBJ2-1)
CASSRLASINEQFF

SEQ ID NO: 105219 - protein, 11 aa, Homo sapiens
  CDR3 for alpha chain variable domain of TCR clone 52610 (TRAV13-2, TRAJ36)
CAETGANNPFF

SEQ ID NO: 105220 - protein, 13 aa, Homo sapiens
  CDR3 for beta chain variable domain of TCR clone 52610 (TRBV7-9, TRBJ2-4)
CATEGLAGNIQYF

SEQ ID NO: 105221 - protein, 15 aa, Homo sapiens
  CDR3 for alpha chain variable domain of TCR clone 52611 (TRAV21, TRAJ53)
CATLNSGGSNYKPTF

SEQ ID NO: 105222 - protein, 15 aa, Homo sapiens
  CDR3 for beta chain variable domain of TCR clone 52611 (TRBV5-1, TRBJ2-1)
CASSPPRAPYNEQFF

SEQ ID NO: 105223 - protein, 11 aa, Homo sapiens
  CDR3 for alpha chain variable domain of TCR clone 52612 (TRAV12-2, TRAJ31)
CAVTRWARLMF

SEQ ID NO: 105224 - protein, 15 aa, Homo sapiens
  CDR3 for beta chain variable domain of TCR clone 52612 (TRBV9, TRBJ1-6)
CASSVAGTGDSPIHF

SEQ ID NO: 105225 - protein, 13 aa, Homo sapiens
  CDR3 for alpha chain variable domain of TCR clone 52613 (TRAV12-2, TRAJ17)
CRAFKAAGNKLTF

SEQ ID NO: 105226 - protein, 17 aa, Homo sapiens
  CDR3 for beta chain variable domain of TCR clone 52613 (TRBV20-1, TRBJ2-2)
CSASGSGQGGLTGELFF

SEQ ID NO: 105227 - protein, 15 aa, Homo sapiens
  CDR3 for alpha chain variable domain of TCR clone 52614 (TRAV3, TRAJ13)
CAVRDIAGGYQKGTF

SEQ ID NO: 105228 - protein, 13 aa, Homo sapiens
  CDR3 for beta chain variable domain of TCR clone 52614 (TRBV2, TRBJ2-2)
CASSKKNTGELFF

SEQ ID NO: 105229 - protein, 16 aa, Homo sapiens
  CDR3 for alpha chain variable domain of TCR clone 52615 (TRAV21, TRAJ37)
RAVRTAGSSNTGKLIF

SEQ ID NO: 105230 - protein, 13 aa, Homo sapiens
  CDR3 for beta chain variable domain of TCR clone 52615 (TRBV7-9, TRBJ2-5)
CASLPSGRETQYF

SEQ ID NO: 105231 - protein, 18 aa, Homo sapiens
  CDR3 for alpha chain variable domain of TCR clone 52616 (TRAV29/DV5, TRAJ52)
CAAGFRGAGGTSYGKLTF

SEQ ID NO: 105232 - protein, 16 aa, Homo sapiens
  CDR3 for beta chain variable domain of TCR clone 52616 (TRBV7-3, TRBJ2-2)
CASSLKRGTLPGELFF

SEQ ID NO: 105233 - protein, 16 aa, Homo sapiens
  CDR3 for alpha chain variable domain of TCR clone 52617 (TRAV4, TRAJ22)
CLVGDLYSGSARQLTF

SEQ ID NO: 105234 - protein, 16 aa, Homo sapiens
  CDR3 for beta chain variable domain of TCR clone 52617 (TRBV7-9, TRBJ2-1)
CASIDVAGGSYNEQFF

SEQ ID NO: 105235 - protein, 16 aa, Homo sapiens
  CDR3 for alpha chain variable domain of TCR clone 52618 (TRAV27, TRAJ13)
CAGAKSDSGGYQKVTF

SEQ ID NO: 105236 - protein, 12 aa, Homo sapiens
  CDR3 for beta chain variable domain of TCR clone 52618 (TRBV11-2, TRBJ2-2)
CASSLGGGELFF

SEQ ID NO: 105237 - protein, 12 aa, Homo sapiens
  CDR3 for alpha chain variable domain of TCR clone 52619 (TRAV3, TRAJ20)
RAVRDGDYKLSF

SEQ ID NO: 105238 - protein, 13 aa, Homo sapiens
  CDR3 for beta chain variable domain of TCR clone 52619 (TRBV9, TRBJ2-1)
CASSVGQGGEQFF

SEQ ID NO: 105239 - protein, 14 aa, Homo sapiens
  CDR3 for alpha chain variable domain of TCR clone 52620 (TRAV21, TRAJ40)
CAASMTSGTYKYIF

SEQ ID NO: 105240 - protein, 15 aa, Homo sapiens
  CDR3 for beta chain variable domain of TCR clone 52620 (TRBV7-3, TRBJ2-1)
CASSPTGGGEVEQFF

SEQ ID NO: 105241 - protein, 12 aa, Homo sapiens
  CDR3 for alpha chain variable domain of TCR clone 52621 (TRAV12-3, TRAJ20)
CAMVRGDYKLSF

SEQ ID NO: 105242 - protein, 15 aa, Homo sapiens
  CDR3 for beta chain variable domain of TCR clone 52621 (TRBV12-4, TRBJ2-5)
CASSPPTGLQETQYF

SEQ ID NO: 105243 - protein, 12 aa, Homo sapiens
  CDR3 for alpha chain variable domain of TCR clone 52622 (TRAV13-1, TRAJ49)
CAASSTGNQFYF

SEQ ID NO: 105244 - protein, 12 aa, Homo sapiens
  CDR3 for beta chain variable domain of TCR clone 52622 (TRBV11-2, TRBJ2-2)
CASSLGGGELFF

SEQ ID NO: 105245 - protein, 14 aa, Homo sapiens
  CDR3 for alpha chain variable domain of TCR clone 52623 (TRAV29/DV5, TRAJ36)
CAARRKTGANNLFF

SEQ ID NO: 105246 - protein, 14 aa, Homo sapiens
  CDR3 for beta chain variable domain of TCR clone 52623 (TRBV19, TRBJ2-1)
CASGKSTQYNEQFF

SEQ ID NO: 105247 - protein, 22 aa, Homo sapiens
  CDR3 for alpha chain variable domain of TCR clone 52624 (TRAV34, TRAJ52)
STSVEQTRRSNAGGTSYGKLTF

SEQ ID NO: 105248 - protein, 15 aa, Homo sapiens
  CDR3 for beta chain variable domain of TCR clone 52624 (TRBV27, TRBJ2-1)
CASSNGGGSSNEQFF

SEQ ID NO: 105249 - protein, 15 aa, Homo sapiens
  CDR3 for alpha chain variable domain of TCR clone 52625 (TRAV17, TRAJ16)
CATALRFSDGQKLLF

SEQ ID NO: 105250 - protein, 17 aa, Homo sapiens
  CDR3 for beta chain variable domain of TCR clone 52625 (TRBV7-8, TRBJ2-6)
CASSAGTGGAGANVLTF

SEQ ID NO: 105251 - protein, 15 aa, Homo sapiens
  CDR3 for alpha chain variable domain of TCR clone 52626 (TRAV17, TRAJ57)
CATGPSQGGSEKLVF

SEQ ID NO: 105252 - protein, 16 aa, Homo sapiens
  CDR3 for beta chain variable domain of TCR clone 52626 (TRBV29-1, TRBJ2-7)
CSVEDAEDGTAYEQYF

SEQ ID NO: 105253 - protein, 14 aa, Homo sapiens
  CDR3 for alpha chain variable domain of TCR clone 52627 (TRAV35, TRAJ42)
CAGRYGGSKGNLIF

SEQ ID NO: 105254 - protein, 15 aa, Homo sapiens
  CDR3 for beta chain variable domain of TCR clone 52627 (TRBV7-9, TRBJ2-1)
CASSLGWGRANEQFF

SEQ ID NO: 105255 - protein, 14 aa, Homo sapiens
  CDR3 for alpha chain variable domain of TCR clone 52628 (TRAV8-2, TRAJ11)
CVVSEKSGHSTLTF

SEQ ID NO: 105256 - protein, 16 aa, Homo sapiens
  CDR3 for beta chain variable domain of TCR clone 52628 (TRBV28, TRBJ2-1)
CASSSPEYPRDNEQFF

SEQ ID NO: 105257 - protein, 13 aa, Homo sapiens
  CDR3 for alpha chain variable domain of TCR clone 52629 (TRAV22, TRAJ29)
CAVGGSGNTPLVF

SEQ ID NO: 105258 - protein, 13 aa, Homo sapiens
  CDR3 for beta chain variable domain of TCR clone 52629 (TRBV4-2, TRBJ1-1)
CASSQAGNTESFF

SEQ ID NO: 105259 - protein, 13 aa, Homo sapiens
  CDR3 for alpha chain variable domain of TCR clone 52630 (TRAV8-3, TRAJ43)
CAVVPYNNNDMRF

SEQ ID NO: 105260 - protein, 16 aa, Homo sapiens
  CDR3 for beta chain variable domain of TCR clone 52630 (TRBV7-2, TRBJ2-5)
CASSPFPTGGKETQYF

SEQ ID NO: 105261 - protein, 14 aa, Homo sapiens
  CDR3 for alpha chain variable domain of TCR clone 52631 (TRAV38-2/DV8, TRAJ30)
CAYIDGLGGDKIIF

SEQ ID NO: 105262 - protein, 15 aa, Homo sapiens
  CDR3 for beta chain variable domain of TCR clone 52631 (TRBV7-9, TRBJ2-2)
CASRPADRDTGELFF

SEQ ID NO: 105263 - protein, 13 aa, Homo sapiens
  CDR3 for alpha chain variable domain of TCR clone 52632 (TRAV12-1, TRAJ26)
CVVRRNYGQNFVF

SEQ ID NO: 105264 - protein, 13 aa, Homo sapiens
  CDR3 for beta chain variable domain of TCR clone 52632 (TRBV20-1, TRBJ2-2)
CSASAAGTGELFF

SEQ ID NO: 105265 - protein, 13 aa, Homo sapiens
  CDR3 for alpha chain variable domain of TCR clone 52633 (TRAV13-1, TRAJ39)
CSKYSNAGKMLTF

SEQ ID NO: 105266 - protein, 16 aa, Homo sapiens
  CDR3 for beta chain variable domain of TCR clone 52633 (TRBV20-1, TRBJ1-4)
CSAPGQGLLTNEKLFF

SEQ ID NO: 105267 - protein, 11 aa, Homo sapiens
  CDR3 for alpha chain variable domain of TCR clone 52634 (TRAV2, TRAJ21)
RAVFNFNKFYF

SEQ ID NO: 105268 - protein, 14 aa, Homo sapiens
  CDR3 for beta chain variable domain of TCR clone 52634 (TRBV6-1, TRBJ1-3)
CASVQGGGGNTIYF

SEQ ID NO: 105269 - protein, 15 aa, Homo sapiens
  CDR3 for alpha chain variable domain of TCR clone 52635 (TRAV3, TRAJ5)
CAVRDLDTGRRALTL

SEQ ID NO: 105270 - protein, 14 aa, Homo sapiens
  CDR3 for beta chain variable domain of TCR clone 52635 (TRBV25-1, TRBJ1-1)
CASTHLGGNTEAFF

SEQ ID NO: 105271 - protein, 17 aa, Homo sapiens
  CDR3 for alpha chain variable domain of TCR clone 52636 (TRAV13-1, TRAJ52)
CAAGRNAGGTSYGKLTF

SEQ ID NO: 105272 - protein, 17 aa, Homo sapiens
  CDR3 for beta chain variable domain of TCR clone 52636 (TRBV13, TRBJ2-3)
CASSLSRVAGGRNTQYF

SEQ ID NO: 105273 - protein, 14 aa, Homo sapiens
  CDR3 for alpha chain variable domain of TCR clone 52637 (TRAV12-2, TRAJ18)
CAVKRGSTLGRLYL

SEQ ID NO: 105274 - protein, 16 aa, Homo sapiens
  CDR3 for beta chain variable domain of TCR clone 52637 (TRBV27, TRBJ2-3)
CASSFRGQLLRDTQYF

SEQ ID NO: 105275 - protein, 13 aa, Homo sapiens
  CDR3 for alpha chain variable domain of TCR clone 52638 (TRAV25, TRAJ29)
CAGRFVGNTPLAF

SEQ ID NO: 105276 - protein, 15 aa, Homo sapiens
  CDR3 for beta chain variable domain of TCR clone 52638 (TRBV29-1, TRBJ2-1)
CSVRTSLSSYNEQFF

SEQ ID NO: 105277 - protein, 14 aa, Homo sapiens
  CDR3 for alpha chain variable domain of TCR clone 52639 (TRAV12-3, TRAJ10)
SHLPLTGGGNKLTF

SEQ ID NO: 105278 - protein, 15 aa, Homo sapiens
  CDR3 for beta chain variable domain of TCR clone 52639 (TRBV20-1, TRBJ2-7)
CSAREGRDSLYEQYS

SEQ ID NO: 105279 - protein, 16 aa, Homo sapiens
  CDR3 for alpha chain variable domain of TCR clone 52640 (TRAV3, TRAJ37)
CAVRGKGSGNTGKLIC

SEQ ID NO: 105280 - protein, 13 aa, Homo sapiens
  CDR3 for beta chain variable domain of TCR clone 52640 (TRBV14, TRBJ2-7)
CASSQDRRYEQYF

SEQ ID NO: 105281 - protein, 16 aa, Homo sapiens
  CDR3 for alpha chain variable domain of TCR clone 52641 (TRAV16, TRAJ52)
CALSATGGTSYGKLTF

SEQ ID NO: 105282 - protein, 12 aa, Homo sapiens
  CDR3 for beta chain variable domain of TCR clone 52641 (TRBV12-4, TRBJ1-3)
CASSFSGNTIYF

SEQ ID NO: 105283 - protein, 14 aa, Homo sapiens
  CDR3 for alpha chain variable domain of TCR clone 52642 (TRAV12-3, TRAJ10)
SHLPLTGGGTKLTF

SEQ ID NO: 105284 - protein, 14 aa, Homo sapiens
  CDR3 for beta chain variable domain of TCR clone 52642 (TRBV6-1, TRBJ1-3)
CASVQGGGGNTIYF

SEQ ID NO: 105285 - protein, 12 aa, Homo sapiens
  CDR3 for alpha chain variable domain of TCR clone 52643 (TRAV13-1, TRAJ48)
CAANFGNEKLTF

SEQ ID NO: 105286 - protein, 14 aa, Homo sapiens
  CDR3 for beta chain variable domain of TCR clone 52643 (TRBV25-1, TRBJ1-1)
CASTHLGGNTEAFF

SEQ ID NO: 105287 - protein, 20 aa, Homo sapiens
  CDR3 for alpha chain variable domain of TCR clone 52644 (TRAV26-1, TRAJ42)
CCVLLHRQTYYGGSQGNLIC

SEQ ID NO: 105288 - protein, 16 aa, Homo sapiens
  CDR3 for beta chain variable domain of TCR clone 52644 (TRBV7-3, TRBJ2-2)
CASSLKRGTLSGELFF

SEQ ID NO: 105289 - protein, 13 aa, Homo sapiens
  CDR3 for alpha chain variable domain of TCR clone 52645 (TRAV27, TRAJ29)
CAGAHSGKTPLVF

SEQ ID NO: 105290 - protein, 14 aa, Homo sapiens
  CDR3 for beta chain variable domain of TCR clone 52645 (TRBV7-9, TRBJ2-7)
CASSIGQGAGEQYF

SEQ ID NO: 105291 - protein, 12 aa, Homo sapiens
  CDR3 for alpha chain variable domain of TCR clone 52646 (TRAV29/DV5, TRAJ43)
CAAPYNNNDMRF

SEQ ID NO: 105292 - protein, 17 aa, Homo sapiens
  CDR3 for beta chain variable domain of TCR clone 52646 (TRBV19, TRBJ2-6)
CASSTGQVFSGANGLTF

SEQ ID NO: 105293 - protein, 14 aa, Homo sapiens
  CDR3 for alpha chain variable domain of TCR clone 52647 (TRAV30, TRAJ33)
CGTVAPRSNYQLIW

SEQ ID NO: 105294 - protein, 16 aa, Homo sapiens
  CDR3 for beta chain variable domain of TCR clone 52647 (TRBV3-1, TRBJ2-5)
CASSPGQFNGFGTQFF

SEQ ID NO: 105295 - protein, 14 aa, Homo sapiens
  CDR3 for alpha chain variable domain of TCR clone 52648 (TRAV1-1, TRAJ5)
CAVRDGAGRRALTF

SEQ ID NO: 105296 - protein, 14 aa, Homo sapiens
  CDR3 for beta chain variable domain of TCR clone 52648 (TRBV28, TRBJ2-1)
CASCYYTAYNEQFF

SEQ ID NO: 105297 - protein, 13 aa, Homo sapiens
  CDR3 for alpha chain variable domain of TCR clone 52649 (TRAV21, TRAJ27)
CAARPGNAGKSTF

SEQ ID NO: 105298 - protein, 17 aa, Homo sapiens
  CDR3 for beta chain variable domain of TCR clone 52649 (TRBV20-1, TRBJ2-2)
CSASGSGQGGLTGELFF

SEQ ID NO: 105299 - protein, 15 aa, Homo sapiens
  CDR3 for alpha chain variable domain of TCR clone 52650 (TRAV12-3, TRAJ5)
CAMSGLGTGRRALTF

SEQ ID NO: 105300 - protein, 16 aa, Homo sapiens
  CDR3 for beta chain variable domain of TCR clone 52650 (TRBV20-1, TRBJ2-3)
CGARLHSAGAIDTQYF

SEQ ID NO: 105301 - protein, 15 aa, Homo sapiens
  CDR3 for alpha chain variable domain of TCR clone 52651 (TRAV21, TRAJ24)
WAARSSTDSWGKLQF

SEQ ID NO: 105302 - protein, 13 aa, Homo sapiens
  CDR3 for beta chain variable domain of TCR clone 52651 (TRBV11-2, TRBJ2-5)
CASSSTGEETQYF

SEQ ID NO: 105303 - protein, 15 aa, Homo sapiens
  CDR3 for alpha chain variable domain of TCR clone 52652 (TRAV12-1, TRAJ44)
CVVFVNTGTASKLTF

SEQ ID NO: 105304 - protein, 13 aa, Homo sapiens
  CDR3 for beta chain variable domain of TCR clone 52652 (TRBV19, TRBJ2-7)
CASRKAGGSEQYF

SEQ ID NO: 105305 - protein, 12 aa, Homo sapiens
  CDR3 for alpha chain variable domain of TCR clone 52653 (TRAV12-3, TRAJ17)
CAMTLTGNKLTF

SEQ ID NO: 105306 - protein, 14 aa, Homo sapiens
  CDR3 for beta chain variable domain of TCR clone 52653 (TRBV4-1, TRBJ2-7)
CASSQDREHVEQYF

SEQ ID NO: 105307 - protein, 15 aa, Homo sapiens
  CDR3 for alpha chain variable domain of TCR clone 52654 (TRAV35, TRAJ23)
CAGQRGYNQGGKLIF

SEQ ID NO: 105308 - protein, 16 aa, Homo sapiens
  CDR3 for beta chain variable domain of TCR clone 52654 (TRBV27, TRBJ2-1)
CASSSRRAGNYNEQFF

SEQ ID NO: 105309 - protein, 16 aa, Homo sapiens
  CDR3 for alpha chain variable domain of TCR clone 52655 (TRAV30, TRAJ24)
CGTEIVDADSWGKFQF

SEQ ID NO: 105310 - protein, 14 aa, Homo sapiens
  CDR3 for beta chain variable domain of TCR clone 52655 (TRBV7-2, TRBJ2-7)
CDSSPKTSFYEQYF

SEQ ID NO: 105311 - protein, 17 aa, Homo sapiens
  CDR3 for alpha chain variable domain of TCR clone 52656 (TRAV26-1, TRAJ53)
CIVRVDDSGGSNYKLTF

SEQ ID NO: 105312 - protein, 14 aa, Homo sapiens
  CDR3 for beta chain variable domain of TCR clone 52656 (TRBV20-1, TRBJ2-4)
CSASGRVGENIQYF

SEQ ID NO: 105313 - protein, 12 aa, Homo sapiens
  CDR3 for alpha chain variable domain of TCR clone 52657 (TRAV20, TRAJ56)
CAVTGANSKLTL

SEQ ID NO: 105314 - protein, 14 aa, Homo sapiens
  CDR3 for beta chain variable domain of TCR clone 52657 (TRBV20-1, TRBJ2-5)
CSALVPGYQETQYF

SEQ ID NO: 105315 - protein, 14 aa, Homo sapiens
  CDR3 for alpha chain variable domain of TCR clone 52658 (TRAV2, TRAJ9)
CAVEDRSGGFKTIF

SEQ ID NO: 105316 - protein, 12 aa, Homo sapiens
  CDR3 for beta chain variable domain of TCR clone 52658 (TRBV19, TRBJ2-1)
CASSRQGAEQFF

SEQ ID NO: 105317 - protein, 14 aa, Homo sapiens
  CDR3 for alpha chain variable domain of TCR clone 52659 (TRAV23/DV6, TRAJ57)
CAASNQGGSEKRVF

SEQ ID NO: 105318 - protein, 13 aa, Homo sapiens
  CDR3 for beta chain variable domain of TCR clone 52659 (TRBV11-2, TRBJ2-7)
CASSSYPSYEQYF

SEQ ID NO: 105319 - protein, 14 aa, Homo sapiens
  CDR3 for alpha chain variable domain of TCR clone 52660 (TRAV1-2, TRAJ8)
CAVREDTGFQKLVF

SEQ ID NO: 105320 - protein, 15 aa, Homo sapiens
  CDR3 for beta chain variable domain of TCR clone 52660 (TRBV10-2, TRBJ2-6)
CASSEQGTGANDLTF

SEQ ID NO: 105321 - protein, 15 aa, Homo sapiens
  CDR3 for alpha chain variable domain of TCR clone 52661 (TRAV8-3, TRAJ27)
CAVGPCKTNAGKSTF

SEQ ID NO: 105322 - protein, 15 aa, Homo sapiens
  CDR3 for beta chain variable domain of TCR clone 52661 (TRBV7-2, TRBJ2-1)
CASSSGLAGGNEQFF

SEQ ID NO: 105323 - protein, 11 aa, Homo sapiens
  CDR3 for alpha chain variable domain of TCR clone 52662 (TRAV2, TRAJ13)
CASGGYQKVTF

SEQ ID NO: 105324 - protein, 16 aa, Homo sapiens
  CDR3 for beta chain variable domain of TCR clone 52662 (TRBV6-1, TRBJ2-5)
CASSETLDRGAETLYF

SEQ ID NO: 105325 - protein, 11 aa, Homo sapiens
  CDR3 for alpha chain variable domain of TCR clone 52663 (TRAV2, TRAJ33)
CAVDSNYQLIW

SEQ ID NO: 105326 - protein, 15 aa, Homo sapiens
  CDR3 for beta chain variable domain of TCR clone 52663 (TRBV4-1, TRBJ2-5)
CASSQWDLYQETQYF

SEQ ID NO: 105327 - protein, 14 aa, Homo sapiens
  CDR3 for alpha chain variable domain of TCR clone 52664 (TRAV12-3, TRAJ22)
CAMSLFCSARQLTF

SEQ ID NO: 105328 - protein, 11 aa, Homo sapiens
  CDR3 for beta chain variable domain of TCR clone 52664 (TRBV12-4, TRBJ2-2)
CASSSAGELFF

SEQ ID NO: 105329 - protein, 14 aa, Homo sapiens
  CDR3 for alpha chain variable domain of TCR clone 52665 (TRAV8-4, TRAJ9)
CAVRINTGGFKTIF

SEQ ID NO: 105330 - protein, 14 aa, Homo sapiens
  CDR3 for beta chain variable domain of TCR clone 52665 (TRBV7-6, TRBJ2-3)
CASSLGTVTDTQYF

SEQ ID NO: 105331 - protein, 17 aa, Homo sapiens
  CDR3 for alpha chain variable domain of TCR clone 52666 (TRAV16, TRAJ58)
CITVLSNGETSGSRLTF

SEQ ID NO: 105332 - protein, 17 aa, Homo sapiens
  CDR3 for beta chain variable domain of TCR clone 52666 (TRBV18, TRBJ2-1)
CASSKGLSGGADNEQSF

SEQ ID NO: 105333 - protein, 14 aa, Homo sapiens
  CDR3 for alpha chain variable domain of TCR clone 52667 (TRAV12-2, TRAJ5)
CAVNRSTGRRALTF

SEQ ID NO: 105334 - protein, 12 aa, Homo sapiens
  CDR3 for beta chain variable domain of TCR clone 52667 (TRBV19, TRBJ1-5)
CSSSIAQQPQHF

SEQ ID NO: 105335 - protein, 11 aa, Homo sapiens
  CDR3 for alpha chain variable domain of TCR clone 52668 (TRAV3, TRAJ13)
CAVTSYQKVTF

SEQ ID NO: 105336 - protein, 15 aa, Homo sapiens
  CDR3 for beta chain variable domain of TCR clone 52668 (TRBV7-9, TRBJ2-7)
CASGSSGLAVYEQYF

SEQ ID NO: 105337 - protein, 14 aa, Homo sapiens
  CDR3 for alpha chain variable domain of TCR clone 52669 (TRAV12-2, TRAJ45)
CALPERGGADGLTF

SEQ ID NO: 105338 - protein, 14 aa, Homo sapiens
  CDR3 for beta chain variable domain of TCR clone 52669 (TRBV18, TRBJ1-5)
CAGSPGNSNQPQHF

SEQ ID NO: 105339 - protein, 14 aa, Homo sapiens
  CDR3 for alpha chain variable domain of TCR clone 52670 (TRAV1-2, TRAJ8)
CAVREDTGSQKLVF

SEQ ID NO: 105340 - protein, 15 aa, Homo sapiens
  CDR3 for beta chain variable domain of TCR clone 52670 (TRBV4-1, TRBJ2-7)
CASSQNTGRLYEQYF

SEQ ID NO: 105341 - protein, 16 aa, Homo sapiens
  CDR3 for alpha chain variable domain of TCR clone 52671 (TRAV30, TRAJ24)
CGTEIVDADSWGKFQV

SEQ ID NO: 105342 - protein, 14 aa, Homo sapiens
  CDR3 for beta chain variable domain of TCR clone 52671 (TRBV7-2, TRBJ2-7)
CASSPKTSFYEQYF

SEQ ID NO: 105343 - protein, 15 aa, Homo sapiens
  CDR3 for alpha chain variable domain of TCR clone 52672 (TRAV26-1, TRAJ22)
CIVSVSFWFCKATDL

SEQ ID NO: 105344 - protein, 13 aa, Homo sapiens
  CDR3 for beta chain variable domain of TCR clone 52672 (TRBV7-9, TRBJ1-2)
CASSLKQNYGYTF

SEQ ID NO: 105345 - protein, 13 aa, Homo sapiens
  CDR3 for alpha chain variable domain of TCR clone 52673 (TRAV23/DV6, TRAJ22)
CAPYSGFARQLTF

SEQ ID NO: 105346 - protein, 15 aa, Homo sapiens
  CDR3 for beta chain variable domain of TCR clone 52673 (TRBV11-2, TRBJ1-6)
CASSLDPWAVSPLHF

SEQ ID NO: 105347 - protein, 15 aa, Homo sapiens
  CDR3 for alpha chain variable domain of TCR clone 52674 (TRAV23/DV6, TRAJ38)
CAARSNAGNNRKLIW

SEQ ID NO: 105348 - protein, 16 aa, Homo sapiens
  CDR3 for beta chain variable domain of TCR clone 52674 (TRBV10-2, TRBJ1-5)
SASSRDRDYSNQPQHF

SEQ ID NO: 105349 - protein, 17 aa, Homo sapiens
  CDR3 for alpha chain variable domain of TCR clone 52675 (TRAV17, TRAJ7)
CATLGRLAFGKGNQVAV

SEQ ID NO: 105350 - protein, 13 aa, Homo sapiens
  CDR3 for beta chain variable domain of TCR clone 52675 (TRBV12-4, TRBJ2-7)
CASSLERVREQYF

SEQ ID NO: 105351 - protein, 15 aa, Homo sapiens
  CDR3 for alpha chain variable domain of TCR clone 52676 (TRAV8-2, TRAJ16)
CVVSDGFSDGQKLLL

SEQ ID NO: 105352 - protein, 14 aa, Homo sapiens
  CDR3 for beta chain variable domain of TCR clone 52676 (TRBV7-3, TRBJ1-1)
CASSLGTGYTEAFF

SEQ ID NO: 105353 - protein, 18 aa, Homo sapiens
  CDR3 for alpha chain variable domain of TCR clone 52677 (TRAV8-4, TRAJ52)
CAVTRANAGCTSYGKLTF

SEQ ID NO: 105354 - protein, 20 aa, Homo sapiens
  CDR3 for beta chain variable domain of TCR clone 52677 (TRBV19, TRBJ2-1)
CASSISRTVTSTRLNNEQFF

SEQ ID NO: 105355 - protein, 16 aa, Homo sapiens
  CDR3 for alpha chain variable domain of TCR clone 52678 (TRAV21, TRAJ52)
CAVTNAGGTSYGKLTF

SEQ ID NO: 105356 - protein, 17 aa, Homo sapiens
  CDR3 for beta chain variable domain of TCR clone 52678 (TRBV28, TRBJ2-5)
CASSRQGGLAGAEAQYF

SEQ ID NO: 105357 - protein, 15 aa, Homo sapiens
  CDR3 for alpha chain variable domain of TCR clone 52679 (TRAV8-3, TRAJ11)
CAVGLLNSGYSTLTF

SEQ ID NO: 105358 - protein, 16 aa, Homo sapiens
  CDR3 for beta chain variable domain of TCR clone 52679 (TRBV28, TRBJ2-1)
CASSLWGRTSGTHQFF

SEQ ID NO: 105359 - protein, 14 aa, Homo sapiens
  CDR3 for alpha chain variable domain of TCR clone 52680 (TRAV8-4, TRAJ9)
CAVRINTGGFKTIF

SEQ ID NO: 105360 - protein, 15 aa, Homo sapiens
  CDR3 for beta chain variable domain of TCR clone 52680 (TRBV10-2, TRBJ2-6)
CASSEQGTGANVLNF

SEQ ID NO: 105361 - protein, 15 aa, Homo sapiens
  CDR3 for alpha chain variable domain of TCR clone 52681 (TRAV3, TRAJ9)
CAVRARNTGGFKTIF

SEQ ID NO: 105362 - protein, 15 aa, Homo sapiens
  CDR3 for beta chain variable domain of TCR clone 52681 (TRBV27, TRBJ1-1)
CASSPYADPYTGAFF

SEQ ID NO: 105363 - protein, 15 aa, Homo sapiens
  CDR3 for alpha chain variable domain of TCR clone 52682 (TRAV3, TRAJ20)
CAVRDIKLSDYKLGF

SEQ ID NO: 105364 - protein, 15 aa, Homo sapiens
  CDR3 for beta chain variable domain of TCR clone 52682 (TRBV7-9, TRBJ1-6)
CASSSPGRGNSPLHF

SEQ ID NO: 105365 - protein, 13 aa, Homo sapiens
  CDR3 for alpha chain variable domain of TCR clone 52683 (TRAV12-3, TRAJ33)
CAMSVNSNYQLIW

SEQ ID NO: 105366 - protein, 16 aa, Homo sapiens
  CDR3 for beta chain variable domain of TCR clone 52683 (TRBV13, TRBJ2-5)
CASSLRTGGYWETQYF

SEQ ID NO: 105367 - protein, 13 aa, Homo sapiens
  CDR3 for alpha chain variable domain of TCR clone 52684 (TRAV20, TRAJ21)
CAVERYNFNKFYF

SEQ ID NO: 105368 - protein, 14 aa, Homo sapiens
  CDR3 for beta chain variable domain of TCR clone 52684 (TRBV3-1, TRBJ2-5)
CASSQGPDQETQYF

SEQ ID NO: 105369 - protein, 11 aa, Homo sapiens
  CDR3 for alpha chain variable domain of TCR clone 52685 (TRAV13-1, TRAJ39)
CASHAGNMLTF

SEQ ID NO: 105370 - protein, 13 aa, Homo sapiens
  CDR3 for beta chain variable domain of TCR clone 52685 (TRBV11-2, TRBJ1-5)
CQQLIQGRQPQHF

SEQ ID NO: 105371 - protein, 13 aa, Homo sapiens
  CDR3 for alpha chain variable domain of TCR clone 52686 (TRAV36/DV7, TRAJ29)
CAVEPPGNTPLVF

SEQ ID NO: 105372 - protein, 13 aa, Homo sapiens
  CDR3 for beta chain variable domain of TCR clone 52686 (TRBV12-4, TRBJ1-2)
CASSSGLTVISTF

SEQ ID NO: 105373 - protein, 12 aa, Homo sapiens
  CDR3 for alpha chain variable domain of TCR clone 52687 (TRAV13-1, TRAJ27)
CAAHTNAGKSTF

SEQ ID NO: 105374 - protein, 11 aa, Homo sapiens
  CDR3 for beta chain variable domain of TCR clone 52687 (TRBV19, TRBJ1-1)
CASSIGSEAFF

SEQ ID NO: 105375 - protein, 14 aa, Homo sapiens
  CDR3 for alpha chain variable domain of TCR clone 52688 (TRAV2, TRAJ22)
CAVGRGGSARQLTF

SEQ ID NO: 105376 - protein, 18 aa, Homo sapiens
  CDR3 for beta chain variable domain of TCR clone 52688 (TRBV7-9, TRBJ2-7)
CASSLTTSGSRTWYEQYF

SEQ ID NO: 105377 - protein, 15 aa, Homo sapiens
  CDR3 for alpha chain variable domain of TCR clone 52689 (TRAV12-3, TRAJ27)
CAMRAYNTNAGKSTF

SEQ ID NO: 105378 - protein, 13 aa, Homo sapiens
  CDR3 for beta chain variable domain of TCR clone 52689 (TRBV20-1, TRBJ1-5)
CSAPPRANQPQHF

SEQ ID NO: 105379 - protein, 18 aa, Homo sapiens
  CDR3 for alpha chain variable domain of TCR clone 52690 (TRAV21, TRAJ52)
CAVRPSPAGGTSYGKLTF

SEQ ID NO: 105380 - protein, 17 aa, Homo sapiens
  CDR3 for beta chain variable domain of TCR clone 52690 (TRBV15, TRBJ1-4)
CATSRYGTGDPNEKLFF

SEQ ID NO: 105381 - protein, 13 aa, Homo sapiens
  CDR3 for alpha chain variable domain of TCR clone 52691 (TRAV3, TRAJ20)
CAVRDTGDYKLSF

SEQ ID NO: 105382 - protein, 14 aa, Homo sapiens
  CDR3 for beta chain variable domain of TCR clone 52691 (TRBV25-1, TRBJ1-1)
CASTHLGGNTEAFF

SEQ ID NO: 105383 - protein, 14 aa, Homo sapiens
  CDR3 for alpha chain variable domain of TCR clone 52692 (TRAV13-1, TRAJ44)
CAAKATGTASKLTC

SEQ ID NO: 105384 - protein, 17 aa, Homo sapiens
  CDR3 for beta chain variable domain of TCR clone 52692 (TRBV7-3, TRBJ2-3)
CASSLMKRMRGADTQYF

SEQ ID NO: 105385 - protein, 16 aa, Homo sapiens
  CDR3 for alpha chain variable domain of TCR clone 52693 (TRAV13-1, TRAJ37)
CAASIGGSSNTGKLIF

SEQ ID NO: 105386 - protein, 16 aa, Homo sapiens
  CDR3 for beta chain variable domain of TCR clone 52693 (TRBV28, TRBJ1-4)
CASSPPYRGRSEKLFF

SEQ ID NO: 105387 - protein, 14 aa, Homo sapiens
  CDR3 for alpha chain variable domain of TCR clone 52694 (TRAV13-1, TRAJ44)
CAAKTTGTASKLTF

SEQ ID NO: 105388 - protein, 17 aa, Homo sapiens
  CDR3 for beta chain variable domain of TCR clone 52694 (TRBV7-3, TRBJ2-3)
CASSLMKRMRGADTQYF

SEQ ID NO: 105389 - protein, 18 aa, Homo sapiens
  CDR3 for alpha chain variable domain of TCR clone 52695 (TRAV21, TRAJ52)
CAVRPSPAGGISYGKLTF

SEQ ID NO: 105390 - protein, 15 aa, Homo sapiens
  CDR3 for beta chain variable domain of TCR clone 52695 (TRBV7-9, TRBJ2-7)
CASSSSGLAVYEQYF

SEQ ID NO: 105391 - protein, 14 aa, Homo sapiens
  CDR3 for alpha chain variable domain of TCR clone 52696 (TRAV2, TRAJ37)
CAVDFTSNTGKLIF

SEQ ID NO: 105392 - protein, 12 aa, Homo sapiens
  CDR3 for beta chain variable domain of TCR clone 52696 (TRBV12-4, TRBJ2-7)
CASSLGGYEQYF

SEQ ID NO: 105393 - protein, 14 aa, Homo sapiens
  CDR3 for alpha chain variable domain of TCR clone 52697 (TRAV25, TRAJ42)
CAGNYGGSQGNLIF

SEQ ID NO: 105394 - protein, 13 aa, Homo sapiens
  CDR3 for beta chain variable domain of TCR clone 52697 (TRBV19, TRBJ2-2)
CVSSQRSTGELFF

SEQ ID NO: 105395 - protein, 12 aa, Homo sapiens
  CDR3 for alpha chain variable domain of TCR clone 52698 (TRAV12-3, TRAJ17)
CAMTLTGNKLTF

SEQ ID NO: 105396 - protein, 14 aa, Homo sapiens
  CDR3 for beta chain variable domain of TCR clone 52698 (TRBV7-8, TRBJ2-3)
CASSSRDSTDTQYF

SEQ ID NO: 105397 - protein, 14 aa, Homo sapiens
  CDR3 for alpha chain variable domain of TCR clone 52699 (TRAV1-2, TRAJ16)
CAVNRFSDGQKLLF

SEQ ID NO: 105398 - protein, 16 aa, Homo sapiens
  CDR3 for beta chain variable domain of TCR clone 52699 (TRBV29-1, TRBJ1-2)
CSVEANRDIANYGYTF

SEQ ID NO: 105399 - protein, 21 aa, Homo sapiens
  CDR3 for alpha chain variable domain of TCR clone 52700 (TRAV1-1, TRAJ6)
CLLLLRCERLERTGGSYIPTF

SEQ ID NO: 105400 - protein, 13 aa, Homo sapiens
  CDR3 for beta chain variable domain of TCR clone 52700 (TRBV10-2, TRBJ2-7)
CASGASGGCEQYF

SEQ ID NO: 105401 - protein, 14 aa, Homo sapiens
  CDR3 for alpha chain variable domain of TCR clone 52701 (TRAV13-1, TRAJ44)
CAAKATGTASKLTF

SEQ ID NO: 105402 - protein, 14 aa, Homo sapiens
  CDR3 for beta chain variable domain of TCR clone 52701 (TRBV19, TRBJ2-2)
CASSTLHRSRELFF

SEQ ID NO: 105403 - protein, 13 aa, Homo sapiens
  CDR3 for alpha chain variable domain of TCR clone 52702 (TRAV1-2, TRAJ11)
CAVRREVYSTLTF

SEQ ID NO: 105404 - protein, 14 aa, Homo sapiens
  CDR3 for beta chain variable domain of TCR clone 52702 (TRBV25-1, TRBJ1-1)
CASTHLGGNTEAFF

SEQ ID NO: 105405 - protein, 13 aa, Homo sapiens
  CDR3 for alpha chain variable domain of TCR clone 52703 (TRAV29/DV5, TRAJ44)
CAASTGTASKLTF

SEQ ID NO: 105406 - protein, 13 aa, Homo sapiens
  CDR3 for beta chain variable domain of TCR clone 52703 (TRBV19, TRBJ2-7)
YASRKAGGSEQYF

SEQ ID NO: 105407 - protein, 15 aa, Homo sapiens
  CDR3 for alpha chain variable domain of TCR clone 52704 (TRAV34, TRAJ38)
CGADFTPGNNRKLIW

SEQ ID NO: 105408 - protein, 13 aa, Homo sapiens
  CDR3 for beta chain variable domain of TCR clone 52704 (TRBV2, TRBJ1-4)
CASSERAGEKLFF

SEQ ID NO: 105409 - protein, 17 aa, Homo sapiens
  CDR3 for alpha chain variable domain of TCR clone 52705 (TRAV2, TRAJ36)
CAVEARGNWGKQPLLWD

SEQ ID NO: 105410 - protein, 14 aa, Homo sapiens
  CDR3 for beta chain variable domain of TCR clone 52705 (TRBV7-9, TRBJ2-5)
CASSLDTAQETQYF

SEQ ID NO: 105411 - protein, 15 aa, Homo sapiens
  CDR3 for alpha chain variable domain of TCR clone 52706 (TRAV3, TRAJ13)
CAVRVYSGGYQKVTF

SEQ ID NO: 105412 - protein, 15 aa, Homo sapiens
  CDR3 for beta chain variable domain of TCR clone 52706 (TRBV7-2, TRBJ2-1)
CASSSGLAGGSEQFF

SEQ ID NO: 105413 - protein, 15 aa, Homo sapiens
  CDR3 for alpha chain variable domain of TCR clone 52707 (TRAV12-3, TRAJ6)
CAMSATTGGSYIPTF

SEQ ID NO: 105414 - protein, 17 aa, Homo sapiens
  CDR3 for beta chain variable domain of TCR clone 52707 (TRBV28, TRBJ2-7)
CASSPGLAGGDSSEQYF

SEQ ID NO: 105415 - protein, 14 aa, Homo sapiens
  CDR3 for alpha chain variable domain of TCR clone 52708 (TRAV12-2, TRAJ5)
CAVNRSTGRRALTF

SEQ ID NO: 105416 - protein, 15 aa, Homo sapiens
  CDR3 for beta chain variable domain of TCR clone 52708 (TRBV9, TRBJ1-6)
CASSVAGTGDSPLHF

SEQ ID NO: 105417 - protein, 12 aa, Homo sapiens
  CDR3 for alpha chain variable domain of TCR clone 52709 (TRAV13-1, TRAJ17)
CAARTAGNKLAF

SEQ ID NO: 105418 - protein, 15 aa, Homo sapiens
  CDR3 for beta chain variable domain of TCR clone 52709 (TRBV7-6, TRBJ1-1)
CASSPQGGANTEAFF

SEQ ID NO: 105419 - protein, 14 aa, Homo sapiens
  CDR3 for alpha chain variable domain of TCR clone 52710 (TRAV26-1, TRAJ22)
CIVRVYGPARQLTF

SEQ ID NO: 105420 - protein, 17 aa, Homo sapiens
  CDR3 for beta chain variable domain of TCR clone 52710 (TRBV7-3, TRBJ2-3)
CASSPGGLAGFGDTQYF

SEQ ID NO: 105421 - protein, 16 aa, Homo sapiens
  CDR3 for alpha chain variable domain of TCR clone 52711 (TRAV4, TRAJ8)
CLVGDSGNTGFQKLVF

SEQ ID NO: 105422 - protein, 15 aa, Homo sapiens
  CDR3 for beta chain variable domain of TCR clone 52711 (TRBV15, TRBJ1-2)
CATSRVRASGPGYTF

SEQ ID NO: 105423 - protein, 13 aa, Homo sapiens
  CDR3 for alpha chain variable domain of TCR clone 52712 (TRAV27, TRAJ3)
ASLRGSGASKIIF

SEQ ID NO: 105424 - protein, 15 aa, Homo sapiens
  CDR3 for beta chain variable domain of TCR clone 52712 (TRBV28, TRBJ1-3)
CASSMGWASGNTIYF

SEQ ID NO: 105425 - protein, 17 aa, Homo sapiens
  CDR3 for alpha chain variable domain of TCR clone 52713 (TRAV27, TRAJ45)
PLPLCRSSGGGADGLTF

SEQ ID NO: 105426 - protein, 17 aa, Homo sapiens
  CDR3 for beta chain variable domain of TCR clone 52713 (TRBV11-2, TRBJ2-1)
CASSLYPPGVEYNEQFF

SEQ ID NO: 105427 - protein, 10 aa, Homo sapiens
  CDR3 for alpha chain variable domain of TCR clone 52714 (TRAV38-2/DV8, TRAJ40)
CASGTYNYIF

SEQ ID NO: 105428 - protein, 14 aa, Homo sapiens
  CDR3 for beta chain variable domain of TCR clone 52714 (TRBV7-9, TRBJ2-1)
CASSPRDSLYEQFF

SEQ ID NO: 105429 - protein, 17 aa, Homo sapiens
  CDR3 for alpha chain variable domain of TCR clone 52715 (TRAV3, TRAJ42)
CAVRDRDYGGSQGNLIF

SEQ ID NO: 105430 - protein, 18 aa, Homo sapiens
  CDR3 for beta chain variable domain of TCR clone 52715 (TRBV25-1, TRBJ1-2)
CASSGLQNGQGLIFGYTF

SEQ ID NO: 105431 - protein, 16 aa, Homo sapiens
  CDR3 for alpha chain variable domain of TCR clone 52716 (TRAV8-3, TRAJ13)
CAVGAYPSGGYQKVTF

SEQ ID NO: 105432 - protein, 13 aa, Homo sapiens
  CDR3 for beta chain variable domain of TCR clone 52716 (TRBV24-1, TRBJ2-3)
CATSTGGTDTQYF

SEQ ID NO: 105433 - protein, 16 aa, Homo sapiens
  CDR3 for alpha chain variable domain of TCR clone 52717 (TRAV8-3, TRAJ13)
CAVGAYPSGGYQKVTF

SEQ ID NO: 105434 - protein, 15 aa, Homo sapiens
  CDR3 for beta chain variable domain of TCR clone 52717 (TRBV19, TRBJ1-5)
CACSIVWADNQPQHF

SEQ ID NO: 105435 - protein, 14 aa, Homo sapiens
  CDR3 for alpha chain variable domain of TCR clone 52718 (TRAV12-2, TRAJ13)
CAVKKTGGYQKVTF

SEQ ID NO: 105436 - protein, 15 aa, Homo sapiens
  CDR3 for beta chain variable domain of TCR clone 52718 (TRBV27, TRBJ2-1)
CASSNGGGSSYEQFF

SEQ ID NO: 105437 - protein, 14 aa, Homo sapiens
  CDR3 for alpha chain variable domain of TCR clone 52719 (TRAV35, TRAJ50)
CAGHRKTTYDKVIF

SEQ ID NO: 105438 - protein, 13 aa, Homo sapiens
  CDR3 for beta chain variable domain of TCR clone 52719 (TRBV7-7, TRBJ2-3)
CASSLSRADTQYF

SEQ ID NO: 105439 - protein, 12 aa, Homo sapiens
  CDR3 for alpha chain variable domain of TCR clone 52720 (TRAV1-1, TRAJ39)
CAVPVVGNMLTF

SEQ ID NO: 105440 - protein, 12 aa, Homo sapiens
  CDR3 for beta chain variable domain of TCR clone 52720 (TRBV11-2, TRBJ2-1)
CASSPGNNEQFF

SEQ ID NO: 105441 - protein, 17 aa, Homo sapiens
  CDR3 for alpha chain variable domain of TCR clone 52721 (TRAV26-2, TRAJ42)
CILRDVGYGGSQGNHIF

SEQ ID NO: 105442 - protein, 16 aa, Homo sapiens
  CDR3 for beta chain variable domain of TCR clone 52721 (TRBV12-4, TRBJ2-7)
CASSLIGGTGTYEQYF

SEQ ID NO: 105443 - protein, 14 aa, Homo sapiens
  CDR3 for alpha chain variable domain of TCR clone 52722 (TRAV3, TRAJ22)
CAVRDYGSAGQLTF

SEQ ID NO: 105444 - protein, 13 aa, Homo sapiens
  CDR3 for beta chain variable domain of TCR clone 52722 (TRBV11-2, TRBJ2-5)
CASGHGAKETQYF

SEQ ID NO: 105445 - protein, 12 aa, Homo sapiens
  CDR3 for alpha chain variable domain of TCR clone 52723 (TRAV13-1, TRAJ21)
RAAKEGFNKFYF

SEQ ID NO: 105446 - protein, 20 aa, Homo sapiens
  CDR3 for beta chain variable domain of TCR clone 52723 (TRBV28, TRBJ2-1)
CASTPIGRSPGLAGGNEQFF

SEQ ID NO: 105447 - protein, 15 aa, Homo sapiens
  CDR3 for alpha chain variable domain of TCR clone 52724 (TRAV25, TRAJ52)
CAGTSGGTSYGKLTF

SEQ ID NO: 105448 - protein, 13 aa, Homo sapiens
  CDR3 for beta chain variable domain of TCR clone 52724 (TRBV7-3, TRBJ1-1)
CASSQDWGAEAFF

SEQ ID NO: 105449 - protein, 11 aa, Homo sapiens
  CDR3 for alpha chain variable domain of TCR clone 52725 (TRAV2, TRAJ13)
CASGGYQKVTF

SEQ ID NO: 105450 - protein, 13 aa, Homo sapiens
  CDR3 for beta chain variable domain of TCR clone 52725 (TRBV27, TRBJ2-1)
CASSSGSYNEQFF

SEQ ID NO: 105451 - protein, 12 aa, Homo sapiens
  CDR3 for alpha chain variable domain of TCR clone 52726 (TRAV8-3, TRAJ26)
CAGDNYGQNFVF

SEQ ID NO: 105452 - protein, 14 aa, Homo sapiens
  CDR3 for beta chain variable domain of TCR clone 52726 (TRBV11-1, TRBJ2-7)
CASSFRQGSYEQYF

SEQ ID NO: 105453 - protein, 15 aa, Homo sapiens
  CDR3 for alpha chain variable domain of TCR clone 52727 (TRAV38-1, TRAJ37)
CAFIHGSGNTGKLIF

SEQ ID NO: 105454 - protein, 13 aa, Homo sapiens
  CDR3 for beta chain variable domain of TCR clone 52727 (TRBV7-3, TRBJ2-5)
CASSFRGGETQYF

SEQ ID NO: 105455 - protein, 13 aa, Homo sapiens
  CDR3 for alpha chain variable domain of TCR clone 52728 (TRAV1-2, TRAJ9)
CAVLNTGGFKTIF

SEQ ID NO: 105456 - protein, 16 aa, Homo sapiens
  CDR3 for beta chain variable domain of TCR clone 52728 (TRBV20-1, TRBJ1-4)
CSAPGQGLLTNEKLFF

SEQ ID NO: 105457 - protein, 11 aa, Homo sapiens
  CDR3 for alpha chain variable domain of TCR clone 52729 (TRAV21, TRAJ48)
CAVDGNEKLTF

SEQ ID NO: 105458 - protein, 12 aa, Homo sapiens
  CDR3 for beta chain variable domain of TCR clone 52729 (TRBV5-1, TRBJ2-5)
CASSFSWETQYF

SEQ ID NO: 105459 - protein, 16 aa, Homo sapiens
  CDR3 for alpha chain variable domain of TCR clone 52730 (TRAV41, TRAJ53)
CATPRGSGGSNYKLTF

SEQ ID NO: 105460 - protein, 15 aa, Homo sapiens
  CDR3 for beta chain variable domain of TCR clone 52730 (TRBV27, TRBJ2-2)
CASSLEGPNTGELFF

SEQ ID NO: 105461 - protein, 14 aa, Homo sapiens
  CDR3 for alpha chain variable domain of TCR clone 52731 (TRAV8-4, TRAJ13)
CAVTLSGGYQKVTF

SEQ ID NO: 105462 - protein, 14 aa, Homo sapiens
  CDR3 for beta chain variable domain of TCR clone 52731 (TRBV7-2, TRBJ1-2)
CASSQTWSTYGYTF

SEQ ID NO: 105463 - protein, 11 aa, Homo sapiens
  CDR3 for alpha chain variable domain of TCR clone 52732 (TRAV3, TRAJ21)
CAVGNFNKFYF

SEQ ID NO: 105464 - protein, 14 aa, Homo sapiens
  CDR3 for beta chain variable domain of TCR clone 52732 (TRBV12-4, TRBJ2-3)
CASTIAGWGDTQYF

SEQ ID NO: 105465 - protein, 15 aa, Homo sapiens
  CDR3 for alpha chain variable domain of TCR clone 52733 (TRAV26-1, TRAJ44)
CIVGIGTGTASKLTF

SEQ ID NO: 105466 - protein, 15 aa, Homo sapiens
  CDR3 for beta chain variable domain of TCR clone 52733 (TRBV7-6, TRBJ2-1)
CASSSLAGEGNEQFF

SEQ ID NO: 105467 - protein, 14 aa, Homo sapiens
  CDR3 for alpha chain variable domain of TCR clone 52734 (TRAV17, TRAJ37)
CATDGSSNTGKLVF

SEQ ID NO: 105468 - protein, 13 aa, Homo sapiens
  CDR3 for beta chain variable domain of TCR clone 52734 (TRBV11-2, TRBJ2-1)
CASSLDLVNEQFF

SEQ ID NO: 105469 - protein, 15 aa, Homo sapiens
  CDR3 for alpha chain variable domain of TCR clone 52735 (TRAV29/DV5, TRAJ40)
CAASAQGSGTYKYIF

SEQ ID NO: 105470 - protein, 11 aa, Homo sapiens
  CDR3 for beta chain variable domain of TCR clone 52735 (TRBV29-1, TRBJ2-5)
CSEDRTGAQYF

SEQ ID NO: 105471 - protein, 15 aa, Homo sapiens
  CDR3 for alpha chain variable domain of TCR clone 52736 (TRAV8-3, TRAJ45)
CASSYSGGGADGLTF

SEQ ID NO: 105472 - protein, 17 aa, Homo sapiens
  CDR3 for beta chain variable domain of TCR clone 52736 (TRBV7-8, TRBJ1-2)
CASSLRPLQGHLYGYTV

SEQ ID NO: 105473 - protein, 14 aa, Homo sapiens
  CDR3 for alpha chain variable domain of TCR clone 52737 (TRAV22, TRAJ58)
CAVEDRTSGSRLTF

SEQ ID NO: 105474 - protein, 13 aa, Homo sapiens
  CDR3 for beta chain variable domain of TCR clone 52737 (TRBV5-5, TRBJ1-2)
CASSFWRGEDYTF

SEQ ID NO: 105475 - protein, 13 aa, Homo sapiens
  CDR3 for alpha chain variable domain of TCR clone 52738 (TRAV27, TRAJ8)
CAGGPTGFQKLVF

SEQ ID NO: 105476 - protein, 15 aa, Homo sapiens
  CDR3 for beta chain variable domain of TCR clone 52738 (TRBV6-1, TRBJ2-7)
CASSESMGDFDEQYF

SEQ ID NO: 105477 - protein, 16 aa, Homo sapiens
  CDR3 for alpha chain variable domain of TCR clone 52739 (TRAV3, TRAJ42)
CAVRDIEGGSQGNIIF

SEQ ID NO: 105478 - protein, 14 aa, Homo sapiens
  CDR3 for beta chain variable domain of TCR clone 52739 (TRBV18, TRBJ1-1)
CASSPPTGRTEAFF

SEQ ID NO: 105479 - protein, 14 aa, Homo sapiens
  CDR3 for alpha chain variable domain of TCR clone 52740 (TRAV26-1, TRAJ38)
CIADNAGNNRKLIW

SEQ ID NO: 105480 - protein, 15 aa, Homo sapiens
  CDR3 for beta chain variable domain of TCR clone 52740 (TRBV7-3, TRBJ2-1)
CASSPTGGGEVEQFF

SEQ ID NO: 105481 - protein, 13 aa, Homo sapiens
  CDR3 for alpha chain variable domain of TCR clone 52741 (TRAV21, TRAJ27)
CAALPGNAGKSTF

SEQ ID NO: 105482 - protein, 13 aa, Homo sapiens
  CDR3 for beta chain variable domain of TCR clone 52741 (TRBV18, TRBJ2-7)
CASQSGGGYEQYF

SEQ ID NO: 105483 - protein, 11 aa, Homo sapiens
  CDR3 for alpha chain variable domain of TCR clone 52742 (TRAV12-3, TRAJ27)
CAMVNAGKSTF

SEQ ID NO: 105484 - protein, 13 aa, Homo sapiens
  CDR3 for beta chain variable domain of TCR clone 52742 (TRBV20-1, TRBJ1-1)
CSARVGGNTEAFF

SEQ ID NO: 105485 - protein, 15 aa, Homo sapiens
  CDR3 for alpha chain variable domain of TCR clone 52743 (TRAV21, TRAJ36)
CAVRRKQTGANNLFF

SEQ ID NO: 105486 - protein, 15 aa, Homo sapiens
  CDR3 for beta chain variable domain of TCR clone 52743 (TRBV20-1, TRBJ2-7)
CSARDRVSGMDEQYF

SEQ ID NO: 105487 - protein, 15 aa, Homo sapiens
  CDR3 for alpha chain variable domain of TCR clone 52744 (TRAV5, TRAJ33)
CAEAPAMDSNYQLIW

SEQ ID NO: 105488 - protein, 12 aa, Homo sapiens
  CDR3 for beta chain variable domain of TCR clone 52744 (TRBV6-3, TRBJ2-7)
CASSLTPYEQYL

SEQ ID NO: 105489 - protein, 14 aa, Homo sapiens
  CDR3 for alpha chain variable domain of TCR clone 52745 (TRAV12-3, TRAJ10)
SHLPLTGGGNKLTF

SEQ ID NO: 105490 - protein, 15 aa, Homo sapiens
  CDR3 for beta chain variable domain of TCR clone 52745 (TRBV7-6, TRBJ2-7)
CASSGRRDTFGEQYF

SEQ ID NO: 105491 - protein, 14 aa, Homo sapiens
  CDR3 for alpha chain variable domain of TCR clone 52746 (TRAV21, TRAJ45)
CAVSSGGGADGLTF

SEQ ID NO: 105492 - protein, 13 aa, Homo sapiens
  CDR3 for beta chain variable domain of TCR clone 52746 (TRBV7-9, TRBJ1-2)
CASSLKQNYGYTF

SEQ ID NO: 105493 - protein, 14 aa, Homo sapiens
  CDR3 for alpha chain variable domain of TCR clone 52747 (TRAV35, TRAJ41)
CAGQASVRRNALNF

SEQ ID NO: 105494 - protein, 14 aa, Homo sapiens
  CDR3 for beta chain variable domain of TCR clone 52747 (TRBV20-1, TRBJ1-2)
CSASEQGAVYGYAF

SEQ ID NO: 105495 - protein, 14 aa, Homo sapiens
  CDR3 for alpha chain variable domain of TCR clone 52748 (TRAV1-2, TRAJ16)
CAVRSASDGQKLLF

SEQ ID NO: 105496 - protein, 17 aa, Homo sapiens
  CDR3 for beta chain variable domain of TCR clone 52748 (TRBV7-3, TRBJ2-3)
CASSLMKRIRGADTQYF

SEQ ID NO: 105497 - protein, 13 aa, Homo sapiens
  CDR3 for alpha chain variable domain of TCR clone 52749 (TRAV27, TRAJ6)
CAGGTRGSYVPTF

SEQ ID NO: 105498 - protein, 15 aa, Homo sapiens
  CDR3 for beta chain variable domain of TCR clone 52749 (TRBV5-5, TRBJ2-7)
CASSLAAPLSYEQYF

SEQ ID NO: 105499 - protein, 12 aa, Homo sapiens
  CDR3 for alpha chain variable domain of TCR clone 52750 (TRAV12-1, TRAJ40)
CVVNGETYKYIF

SEQ ID NO: 105500 - protein, 12 aa, Homo sapiens
  CDR3 for beta chain variable domain of TCR clone 52750 (TRBV14, TRBJ2-5)
CASSHLKETQYF

SEQ ID NO: 105501 - protein, 13 aa, Homo sapiens
  CDR3 for alpha chain variable domain of TCR clone 52751 (TRAV20, TRAJ31)
CAVQAIGGARLMF

SEQ ID NO: 105502 - protein, 14 aa, Homo sapiens
  CDR3 for beta chain variable domain of TCR clone 52751 (TRBV2, TRBJ1-5)
CASSGTVRNQPQHF

SEQ ID NO: 105503 - protein, 13 aa, Homo sapiens
  CDR3 for alpha chain variable domain of TCR clone 52752 (TRAV12-1, TRAJ31)
CVVNMNNNAGLMF

SEQ ID NO: 105504 - protein, 15 aa, Homo sapiens
  CDR3 for beta chain variable domain of TCR clone 52752 (TRBV4-1, TRBJ1-2)
CASSQGQGAAYGHTF

SEQ ID NO: 105505 - protein, 14 aa, Homo sapiens
  CDR3 for alpha chain variable domain of TCR clone 52753 (TRAV1-2, TRAJ16)
CAVNRFSDGQKLLF

SEQ ID NO: 105506 - protein, 11 aa, Homo sapiens
  CDR3 for beta chain variable domain of TCR clone 52753 (TRBV29-1, TRBJ2-5)
CSEDRTGTKYF

SEQ ID NO: 105507 - protein, 15 aa, Homo sapiens
  CDR3 for alpha chain variable domain of TCR clone 52754 (TRAV8-3, TRAJ45)
CASSYSGGGADGLTF

SEQ ID NO: 105508 - protein, 13 aa, Homo sapiens
  CDR3 for beta chain variable domain of TCR clone 52754 (TRBV20-1, TRBJ2-2)
CGASAAGTGELFF

SEQ ID NO: 105509 - protein, 13 aa, Homo sapiens
  CDR3 for alpha chain variable domain of TCR clone 52755 (TRAV35, TRAJ36)
CAGSRIGANNLFF

SEQ ID NO: 105510 - protein, 15 aa, Homo sapiens
  CDR3 for beta chain variable domain of TCR clone 52755 (TRBV28, TRBJ2-5)
CASSPPWSYQETQYL

SEQ ID NO: 105511 - protein, 23 aa, Homo sapiens
  CDR3 for alpha chain variable domain of TCR clone 52756 (TRAV26-1, TRAJ38)
CIADNAGNNHIQNPDPAVYQLRD

SEQ ID NO: 105512 - protein, 13 aa, Homo sapiens
  CDR3 for beta chain variable domain of TCR clone 52756 (TRBV20-1, TRBJ1-1)
CSARDGGNTEAFF

SEQ ID NO: 105513 - protein, 13 aa, Homo sapiens
  CDR3 for alpha chain variable domain of TCR clone 52757 (TRAV12-2, TRAJ20)
CAVYPSNDYKFSF

SEQ ID NO: 105514 - protein, 15 aa, Homo sapiens
  CDR3 for beta chain variable domain of TCR clone 52757 (TRBV18, TRBJ1-2)
CASSPGNGLGYGYTF

SEQ ID NO: 105515 - protein, 14 aa, Homo sapiens
  CDR3 for alpha chain variable domain of TCR clone 52758 (TRAV4, TRAJ26)
CLVGPHNYGQNFVF

SEQ ID NO: 105516 - protein, 17 aa, Homo sapiens
  CDR3 for beta chain variable domain of TCR clone 52758 (TRBV24-1, TRBJ2-1)
CDTSDVSTSGTYNEQFF

SEQ ID NO: 105517 - protein, 14 aa, Homo sapiens
  CDR3 for alpha chain variable domain of TCR clone 52759 (TRAV35, TRAJ22)
CAGLRPGSARQLTF

SEQ ID NO: 105518 - protein, 14 aa, Homo sapiens
  CDR3 for beta chain variable domain of TCR clone 52759 (TRBV4-1, TRBJ2-7)
CAGSPVAGGDEQYF

SEQ ID NO: 105519 - protein, 15 aa, Homo sapiens
  CDR3 for alpha chain variable domain of TCR clone 52760 (TRAV4, TRAJ39)
CLVGPNNNAGNMLTF

SEQ ID NO: 105520 - protein, 16 aa, Homo sapiens
  CDR3 for beta chain variable domain of TCR clone 52760 (TRBV13, TRBJ2-2)
CASSPRTGEHTGELFL

SEQ ID NO: 105521 - protein, 13 aa, Homo sapiens
  CDR3 for alpha chain variable domain of TCR clone 52761 (TRAV26-1, TRAJ48)
CIVRVVGDEKLTF

SEQ ID NO: 105522 - protein, 17 aa, Homo sapiens
  CDR3 for beta chain variable domain of TCR clone 52761 (TRBV7-3, TRBJ2-2)
CASSLSGTSGGTGEMFF

SEQ ID NO: 105523 - protein, 16 aa, Homo sapiens
  CDR3 for alpha chain variable domain of TCR clone 52762 (TRAV12-1, TRAJ42)
CVVTPYYGGSKGNLIF

SEQ ID NO: 105524 - protein, 15 aa, Homo sapiens
  CDR3 for beta chain variable domain of TCR clone 52762 (TRBV4-3, TRBJ2-7)
CASSQGGRGIYEQYF

SEQ ID NO: 105525 - protein, 15 aa, Homo sapiens
  CDR3 for alpha chain variable domain of TCR clone 52763 (TRAV17, TRAJ22)
CATVAPSGSARQLTF

SEQ ID NO: 105526 - protein, 16 aa, Homo sapiens
  CDR3 for beta chain variable domain of TCR clone 52763 (TRBV10-3, TRBJ2-7)
CSISADFADRPYEQYF

SEQ ID NO: 105527 - protein, 10 aa, Homo sapiens
  CDR3 for alpha chain variable domain of TCR clone 52764 (TRAV26-1, TRAJ40)
CIAGTYKYIF

SEQ ID NO: 105528 - protein, 12 aa, Homo sapiens
  CDR3 for beta chain variable domain of TCR clone 52764 (TRBV11-2, TRBJ2-2)
CASSLGGGELFF

SEQ ID NO: 105529 - protein, 12 aa, Homo sapiens
  CDR3 for alpha chain variable domain of TCR clone 52765 (TRAV38-2/DV8, TRAJ48)
CALLSGSEKLTF

SEQ ID NO: 105530 - protein, 15 aa, Homo sapiens
  CDR3 for beta chain variable domain of TCR clone 52765 (TRBV7-2, TRBJ2-3)
CASSSTGLETDTQYF

SEQ ID NO: 105531 - protein, 16 aa, Homo sapiens
  CDR3 for alpha chain variable domain of TCR clone 52766 (TRAV12-1, TRAJ45)
CVVIRYSGGGADGPTF

SEQ ID NO: 105532 - protein, 12 aa, Homo sapiens
  CDR3 for beta chain variable domain of TCR clone 52766 (TRBV6-5, TRBJ2-2)
CASRQITGELFF

SEQ ID NO: 105533 - protein, 16 aa, Homo sapiens
  CDR3 for alpha chain variable domain of TCR clone 52767 (TRAV1-2, TRAJ10)
CAVRGVLTGGGNKLTF

SEQ ID NO: 105534 - protein, 12 aa, Homo sapiens
  CDR3 for beta chain variable domain of TCR clone 52767 (TRBV7-8, TRBJ2-7)
CASSLGDREQHF

SEQ ID NO: 105535 - protein, 14 aa, Homo sapiens
  CDR3 for alpha chain variable domain of TCR clone 52768 (TRAV1-2, TRAJ8)
CAVREDTGFQKLLF

SEQ ID NO: 105536 - protein, 14 aa, Homo sapiens
  CDR3 for beta chain variable domain of TCR clone 52768 (TRBV7-6, TRBJ2-3)
CASSLGTVTDTQYF

SEQ ID NO: 105537 - protein, 18 aa, Homo sapiens
  CDR3 for alpha chain variable domain of TCR clone 52769 (TRAV21, TRAJ52)
CAVRPSPAGGTSYGKLTF

SEQ ID NO: 105538 - protein, 14 aa, Homo sapiens
  CDR3 for beta chain variable domain of TCR clone 52769 (TRBV9, TRBJ2-2)
CASSSRPYTGELFF

SEQ ID NO: 105539 - protein, 12 aa, Homo sapiens
  CDR3 for alpha chain variable domain of TCR clone 52770 (TRAV8-3, TRAJ4)
VFYSGGYNKLIF

SEQ ID NO: 105540 - protein, 14 aa, Homo sapiens
  CDR3 for beta chain variable domain of TCR clone 52770 (TRBV7-9, TRBJ2-3)
CASSLEDGTDTQYF

SEQ ID NO: 105541 - protein, 14 aa, Homo sapiens
  CDR3 for alpha chain variable domain of TCR clone 52771 (TRAV12-2, TRAJ40)
CAVKIPSGTYKYIF

SEQ ID NO: 105542 - protein, 14 aa, Homo sapiens
  CDR3 for beta chain variable domain of TCR clone 52771 (TRBV20-1, TRBJ1-1)
CSAQTRIGGPEAFF

SEQ ID NO: 105543 - protein, 17 aa, Homo sapiens
  CDR3 for alpha chain variable domain of TCR clone 52772 (TRAV17, TRAJ52)
CATERPSGGTSYGKLTF

SEQ ID NO: 105544 - protein, 15 aa, Homo sapiens
  CDR3 for beta chain variable domain of TCR clone 52772 (TRBV5-1, TRBJ2-1)
CASSLVANSYNEHLF

SEQ ID NO: 105545 - protein, 12 aa, Homo sapiens
  CDR3 for alpha chain variable domain of TCR clone 52773 (TRAV13-1, TRAJ49)
CAASPMGNQFYF

SEQ ID NO: 105546 - protein, 13 aa, Homo sapiens
  CDR3 for beta chain variable domain of TCR clone 52773 (TRBV20-1, TRBJ2-2)
CSASAAGTGELFV

SEQ ID NO: 105547 - protein, 14 aa, Homo sapiens
  CDR3 for alpha chain variable domain of TCR clone 52774 (TRAV9-2, TRAJ39)
CALYIYNAGNMLTF

SEQ ID NO: 105548 - protein, 15 aa, Homo sapiens
  CDR3 for beta chain variable domain of TCR clone 52774 (TRBV6-1, TRBJ2-6)
CASSSRPSGANVLTF

SEQ ID NO: 105549 - protein, 14 aa, Homo sapiens
  CDR3 for alpha chain variable domain of TCR clone 52775 (TRAV1-2, TRAJ8)
CAVREDTGFQKLVF

SEQ ID NO: 105550 - protein, 14 aa, Homo sapiens
  CDR3 for beta chain variable domain of TCR clone 52775 (TRBV15, TRBJ2-1)
CATSGVEDYNEQFF

SEQ ID NO: 105551 - protein, 11 aa, Homo sapiens
  CDR3 for alpha chain variable domain of TCR clone 52776 (TRAV13-2, TRAJ26)
CAEIPGQSFVF

SEQ ID NO: 105552 - protein, 15 aa, Homo sapiens
  CDR3 for beta chain variable domain of TCR clone 52776 (TRBV10-3, TRBJ1-5)
CAISDTGLGGQPQHF

SEQ ID NO: 105553 - protein, 11 aa, Homo sapiens
  CDR3 for alpha chain variable domain of TCR clone 52777 (TRAV2, TRAJ13)
CASGGYQKVTF

SEQ ID NO: 105554 - protein, 15 aa, Homo sapiens
  CDR3 for beta chain variable domain of TCR clone 52777 (TRBV5-4, TRBJ2-7)
CAGSRFGTGSYEQYF

SEQ ID NO: 105555 - protein, 15 aa, Homo sapiens
  CDR3 for alpha chain variable domain of TCR clone 52778 (TRAV3, TRAJ13)
CAVGVYSGGYQKVTF

SEQ ID NO: 105556 - protein, 15 aa, Homo sapiens
  CDR3 for beta chain variable domain of TCR clone 52778 (TRBV7-2, TRBJ2-1)
CASSSGLAGGNEQFF

SEQ ID NO: 105557 - protein, 14 aa, Homo sapiens
  CDR3 for alpha chain variable domain of TCR clone 52779 (TRAV35, TRAJ22)
CAGLRLGSARQLTF

SEQ ID NO: 105558 - protein, 13 aa, Homo sapiens
  CDR3 for beta chain variable domain of TCR clone 52779 (TRBV20-1, TRBJ1-1)
CSARGGGNTEAFF

SEQ ID NO: 105559 - protein, 14 aa, Homo sapiens
  CDR3 for alpha chain variable domain of TCR clone 52780 (TRAV12-1, TRAJ30)
CVVNIGGRDGMIIF

SEQ ID NO: 105560 - protein, 14 aa, Homo sapiens
  CDR3 for beta chain variable domain of TCR clone 52780 (TRBV7-6, TRBJ2-3)
CASSLGTVTDTQYF

SEQ ID NO: 105561 - protein, 13 aa, Homo sapiens
  CDR3 for alpha chain variable domain of TCR clone 52781 (TRAV8-3, TRAJ43)
CAVVPHNNNDMRF

SEQ ID NO: 105562 - protein, 17 aa, Homo sapiens
  CDR3 for beta chain variable domain of TCR clone 52781 (TRBV7-7, TRBJ1-1)
CASIGDRPNLGVTEAFF

SEQ ID NO: 105563 - protein, 12 aa, Homo sapiens
  CDR3 for alpha chain variable domain of TCR clone 52782 (TRAV13-2, TRAJ23)
CAERHRGGKLIF

SEQ ID NO: 105564 - protein, 17 aa, Homo sapiens
  CDR3 for beta chain variable domain of TCR clone 52782 (TRBV4-1, TRBJ1-4)
CASSQEGPRGVEEKLFF

SEQ ID NO: 105565 - protein, 15 aa, Homo sapiens
  CDR3 for alpha chain variable domain of TCR clone 52783 (TRAV17, TRAJ56)
CATEPFTGANSKLTS

SEQ ID NO: 105566 - protein, 15 aa, Homo sapiens
  CDR3 for beta chain variable domain of TCR clone 52783 (TRBV28, TRBJ1-5)
CASSRTGGYVQPQHF

SEQ ID NO: 105567 - protein, 12 aa, Homo sapiens
  CDR3 for alpha chain variable domain of TCR clone 52784 (TRAV12-3, TRAJ17)
CAMTLTGNKPTF

SEQ ID NO: 105568 - protein, 13 aa, Homo sapiens
  CDR3 for beta chain variable domain of TCR clone 52784 (TRBV27, TRBJ2-1)
CASRTLGVGEQFF

SEQ ID NO: 105569 - protein, 11 aa, Homo sapiens
  CDR3 for alpha chain variable domain of TCR clone 52785 (TRAV3, TRAJ21)
CAVGNFNKFYF

SEQ ID NO: 105570 - protein, 14 aa, Homo sapiens
  CDR3 for beta chain variable domain of TCR clone 52785 (TRBV29-1, TRBJ2-2)
RSGRGSGNTGELFF

SEQ ID NO: 105571 - protein, 11 aa, Homo sapiens
  CDR3 for alpha chain variable domain of TCR clone 52786 (TRAV17, TRAJ49)
CATNTGNQFYF

SEQ ID NO: 105572 - protein, 12 aa, Homo sapiens
  CDR3 for beta chain variable domain of TCR clone 52786 (TRBV2, TRBJ2-7)
CASSGGSGSPYF

SEQ ID NO: 105573 - protein, 14 aa, Homo sapiens
  CDR3 for alpha chain variable domain of TCR clone 52787 (TRAV12-2, TRAJ15)
CAPHTGQAGTALIF

SEQ ID NO: 105574 - protein, 12 aa, Homo sapiens
  CDR3 for beta chain variable domain of TCR clone 52787 (TRBV6-3, TRBJ2-7)
CASSLTPYEQYF

SEQ ID NO: 105575 - protein, 12 aa, Homo sapiens
  CDR3 for alpha chain variable domain of TCR clone 52788 (TRAV12-1, TRAJ40)
CVFYSGTYKYIF

SEQ ID NO: 105576 - protein, 14 aa, Homo sapiens
  CDR3 for beta chain variable domain of TCR clone 52788 (TRBV7-2, TRBJ1-1)
CASSFLTGTTEAFF

SEQ ID NO: 105577 - protein, 10 aa, Homo sapiens
  CDR3 for alpha chain variable domain of TCR clone 52789 (TRAV36/DV7, TRAJ48)
CAVGNEKLTF

SEQ ID NO: 105578 - protein, 16 aa, Homo sapiens
  CDR3 for beta chain variable domain of TCR clone 52789 (TRBV19, TRBJ2-1)
CASSKAGPSSYNEQFF

SEQ ID NO: 105579 - protein, 12 aa, Homo sapiens
  CDR3 for alpha chain variable domain of TCR clone 52790 (TRAV27, TRAJ13)
CAGAGGYQKGTF

SEQ ID NO: 105580 - protein, 15 aa, Homo sapiens
  CDR3 for beta chain variable domain of TCR clone 52790 (TRBV20-1, TRBJ2-6)
CSARDRGPGANVLTF

SEQ ID NO: 105581 - protein, 16 aa, Homo sapiens
  CDR3 for alpha chain variable domain of TCR clone 52791 (TRAV12-2, TRAJ43)
CAGDDMRFGAGTSLTV

SEQ ID NO: 105582 - protein, 16 aa, Homo sapiens
  CDR3 for beta chain variable domain of TCR clone 52791 (TRBV2, TRBJ2-4)
CASSEAPGGEQNIQYF

SEQ ID NO: 105583 - protein, 20 aa, Homo sapiens
  CDR3 for alpha chain variable domain of TCR clone 52792 (TRAV12-2, TRAJ52)
SPVIQPPARAGGTSYGKLTF

SEQ ID NO: 105584 - protein, 17 aa, Homo sapiens
  CDR3 for beta chain variable domain of TCR clone 52792 (TRBV4-1, TRBJ1-5)
CASSQQPPTVANQPQHF

SEQ ID NO: 105585 - protein, 12 aa, Homo sapiens
  CDR3 for alpha chain variable domain of TCR clone 52793 (TRAV12-3, TRAJ17)
CAMTLIGNKLTF

SEQ ID NO: 105586 - protein, 14 aa, Homo sapiens
  CDR3 for beta chain variable domain of TCR clone 52793 (TRBV20-1, TRBJ1-3)
CSASPTGAGNTIYF

SEQ ID NO: 105587 - protein, 14 aa, Homo sapiens
  CDR3 for alpha chain variable domain of TCR clone 52794 (TRAV17, TRAJ16)
CATADFSDGPKLLF

SEQ ID NO: 105588 - protein, 12 aa, Homo sapiens
  CDR3 for beta chain variable domain of TCR clone 52794 (TRBV24-1, TRBJ1-1)
CATLYPDTEAFF

SEQ ID NO: 105589 - protein, 15 aa, Homo sapiens
  CDR3 for alpha chain variable domain of TCR clone 52795 (TRAV25, TRAJ52)
CAGRPGGTCYGKLTF

SEQ ID NO: 105590 - protein, 17 aa, Homo sapiens
  CDR3 for beta chain variable domain of TCR clone 52795 (TRBV7-8, TRBJ2-6)
CASSAGTGGAGANVLTF

SEQ ID NO: 105591 - protein, 15 aa, Homo sapiens
  CDR3 for alpha chain variable domain of TCR clone 52796 (TRAV34, TRAJ38)
CGADFTPGNNRKLIW

SEQ ID NO: 105592 - protein, 17 aa, Homo sapiens
  CDR3 for beta chain variable domain of TCR clone 52796 (TRBV7-9, TRBJ2-3)
CASSPTVAGDLTDTQYF

SEQ ID NO: 105593 - protein, 12 aa, Homo sapiens
  CDR3 for alpha chain variable domain of TCR clone 52797 (TRAV12-1, TRAJ20)
CVVNPDDYKLSF

SEQ ID NO: 105594 - protein, 12 aa, Homo sapiens
  CDR3 for beta chain variable domain of TCR clone 52797 (TRBV3-1, TRBJ2-1)
CASSQGSSGQFF

SEQ ID NO: 105595 - protein, 18 aa, Homo sapiens
  CDR3 for alpha chain variable domain of TCR clone 52798 (TRAV26-1, TRAJ5)
CIVRVVPPRDTGRRALTF

SEQ ID NO: 105596 - protein, 15 aa, Homo sapiens
  CDR3 for beta chain variable domain of TCR clone 52798 (TRBV7-9, TRBJ2-7)
CASSLPMGQANEQYL

SEQ ID NO: 105597 - protein, 11 aa, Homo sapiens
  CDR3 for alpha chain variable domain of TCR clone 52799 (TRAV12-2, TRAJ29)
CAVTLRSPLVF

SEQ ID NO: 105598 - protein, 16 aa, Homo sapiens
  CDR3 for beta chain variable domain of TCR clone 52799 (TRBV19, TRBJ1-5)
CASSIYRGGPRQPQHF

SEQ ID NO: 105599 - protein, 15 aa, Homo sapiens
  CDR3 for alpha chain variable domain of TCR clone 52800 (TRAV26-1, TRAJ24)
CIVPSTTDSWGKFQF

SEQ ID NO: 105600 - protein, 14 aa, Homo sapiens
  CDR3 for beta chain variable domain of TCR clone 52800 (TRBV10-3, TRBJ2-3)
CAISEKGLGDTQYF

SEQ ID NO: 105601 - protein, 11 aa, Homo sapiens
  CDR3 for alpha chain variable domain of TCR clone 52801 (TRAV21, TRAJ39)
LLVNAGNMLTF

SEQ ID NO: 105602 - protein, 12 aa, Homo sapiens
  CDR3 for beta chain variable domain of TCR clone 52801 (TRBV6-5, TRBJ2-1)
CASRNDRGQQFF

SEQ ID NO: 105603 - protein, 12 aa, Homo sapiens
  CDR3 for alpha chain variable domain of TCR clone 52802 (TRAV1-1, TRAJ39)
CAVPVVGNMLTF

SEQ ID NO: 105604 - protein, 16 aa, Homo sapiens
  CDR3 for beta chain variable domain of TCR clone 52802 (TRBV7-3, TRBJ2-2)
CASSLKRGTLSGELFF

SEQ ID NO: 105605 - protein, 15 aa, Homo sapiens
  CDR3 for alpha chain variable domain of TCR clone 52803 (TRAV25, TRAJ52)
CAGRPGGTSYGKLTF

SEQ ID NO: 105606 - protein, 17 aa, Homo sapiens
  CDR3 for beta chain variable domain of TCR clone 52803 (TRBV7-8, TRBJ2-6)
CASSAGTGCAGANVLTF

SEQ ID NO: 105607 - protein, 14 aa, Homo sapiens
  CDR3 for alpha chain variable domain of TCR clone 52804 (TRAV2, TRAJ37)
CAVDFTSNTGKLIF

SEQ ID NO: 105608 - protein, 13 aa, Homo sapiens
  CDR3 for beta chain variable domain of TCR clone 52804 (TRBV7-2, TRBJ2-2)
CASSLAVTGELFF

SEQ ID NO: 105609 - protein, 12 aa, Homo sapiens
  CDR3 for alpha chain variable domain of TCR clone 52805 (TRAV12-3, TRAJ17)
CAMTLTGNKLTF

SEQ ID NO: 105610 - protein, 14 aa, Homo sapiens
  CDR3 for beta chain variable domain of TCR clone 52805 (TRBV7-2, TRBJ1-1)
CASSHRQGRTEAFF

SEQ ID NO: 105611 - protein, 16 aa, Homo sapiens
  CDR3 for alpha chain variable domain of TCR clone 52806 (TRAV30, TRAJ24)
CGTEIVDADSWGKFQF

SEQ ID NO: 105612 - protein, 14 aa, Homo sapiens
  CDR3 for beta chain variable domain of TCR clone 52806 (TRBV12-5, TRBJ2-5)
CASGPRTHQETQYL

SEQ ID NO: 105613 - protein, 13 aa, Homo sapiens
  CDR3 for alpha chain variable domain of TCR clone 52807 (TRAV1-2, TRAJ36)
CAVDQTGANNLFF

SEQ ID NO: 105614 - protein, 14 aa, Homo sapiens
  CDR3 for beta chain variable domain of TCR clone 52807 (TRBV20-1, TRBJ2-5)
CGAREMTKQETQYF

SEQ ID NO: 105615 - protein, 10 aa, Homo sapiens
  CDR3 for alpha chain variable domain of TCR clone 52808 (TRAV8-4, TRAJ43)
CAVSADDMRF

SEQ ID NO: 105616 - protein, 13 aa, Homo sapiens
  CDR3 for beta chain variable domain of TCR clone 52808 (TRBV15, TRBJ1-6)
CATSGGLNSPLHF

SEQ ID NO: 105617 - protein, 14 aa, Homo sapiens
  CDR3 for alpha chain variable domain of TCR clone 52809 (TRAV23/DV6, TRAJ23)
CAAGPYNQGGKRIF

SEQ ID NO: 105618 - protein, 17 aa, Homo sapiens
  CDR3 for beta chain variable domain of TCR clone 52809 (TRBV4-2, TRBJ1-1)
CASSQVATGGMNTEAFF

SEQ ID NO: 105619 - protein, 14 aa, Homo sapiens
  CDR3 for alpha chain variable domain of TCR clone 52810 (TRAV20, TRAJ56)
CAVQFGGANSKLTF

SEQ ID NO: 105620 - protein, 14 aa, Homo sapiens
  CDR3 for beta chain variable domain of TCR clone 52810 (TRBV20-1, TRBJ2-7)
CSAKRVRSSYEQYF

SEQ ID NO: 105621 - protein, 14 aa, Homo sapiens
  CDR3 for alpha chain variable domain of TCR clone 52811 (TRAV8-4, TRAJ9)
CAVRINTGGFKIIF

SEQ ID NO: 105622 - protein, 15 aa, Homo sapiens
  CDR3 for beta chain variable domain of TCR clone 52811 (TRBV10-2, TRBJ2-6)
CASSEQGTGANVLTF

SEQ ID NO: 105623 - protein, 14 aa, Homo sapiens
  CDR3 for alpha chain variable domain of TCR clone 52812 (TRAV3, TRAJ9)
CAVRLNTGGFKTIF

SEQ ID NO: 105624 - protein, 16 aa, Homo sapiens
  CDR3 for beta chain variable domain of TCR clone 52812 (TRBV7-3, TRBJ2-2)
CASSLKRGTLSGELFF

SEQ ID NO: 105625 - protein, 11 aa, Homo sapiens
  CDR3 for alpha chain variable domain of TCR clone 52813 (TRAV21, TRAJ34)
CAHYNTNKLIF

SEQ ID NO: 105626 - protein, 13 aa, Homo sapiens
  CDR3 for beta chain variable domain of TCR clone 52813 (TRBV7-6, TRBJ1-2)
CASSLVADYGYTF

SEQ ID NO: 105627 - protein, 14 aa, Homo sapiens
  CDR3 for alpha chain variable domain of TCR clone 52814 (TRAV13-1, TRAJ35)
CAASKGGFGNVLHC

SEQ ID NO: 105628 - protein, 13 aa, Homo sapiens
  CDR3 for beta chain variable domain of TCR clone 52814 (TRBV7-3, TRBJ1-1)
CASSKDWGAEAFL

SEQ ID NO: 105629 - protein, 16 aa, Homo sapiens
  CDR3 for alpha chain variable domain of TCR clone 52815 (TRAV3, TRAJ37)
CAVRPHGSGNTGKLIF

SEQ ID NO: 105630 - protein, 13 aa, Homo sapiens
  CDR3 for beta chain variable domain of TCR clone 52815 (TRBV2, TRBJ1-5)
CASGTGGYQTQHF

SEQ ID NO: 105631 - protein, 11 aa, Homo sapiens
  CDR3 for alpha chain variable domain of TCR clone 52816 (TRAV12-1, TRAJ8)
CVATGFQKLVF

SEQ ID NO: 105632 - protein, 14 aa, Homo sapiens
  CDR3 for beta chain variable domain of TCR clone 52816 (TRBV19, TRBJ2-1)
CASGKSTQYNEQFF

SEQ ID NO: 105633 - protein, 14 aa, Homo sapiens
  CDR3 for alpha chain variable domain of TCR clone 52817 (TRAV1-2, TRAJ16)
CAVNRFSDGQKLLF

SEQ ID NO: 105634 - protein, 13 aa, Homo sapiens
  CDR3 for beta chain variable domain of TCR clone 52817 (TRBV11-2, TRBJ2-2)
CASGRDREEELFF

SEQ ID NO: 105635 - protein, 13 aa, Homo sapiens
  CDR3 for alpha chain variable domain of TCR clone 52818 (TRAV17, TRAJ5)
CAPMDTGRRALTF

SEQ ID NO: 105636 - protein, 16 aa, Homo sapiens
  CDR3 for beta chain variable domain of TCR clone 52818 (TRBV19, TRBJ2-2)
CASRSPGTGATGELFF

SEQ ID NO: 105637 - protein, 13 aa, Homo sapiens
  CDR3 for alpha chain variable domain of TCR clone 52819 (TRAV3, TRAJ26)
CAVSRRYGQNFVF

SEQ ID NO: 105638 - protein, 15 aa, Homo sapiens
  CDR3 for beta chain variable domain of TCR clone 52819 (TRBV27, TRBJ2-1)
CASSLARGAYNEQFF

SEQ ID NO: 105639 - protein, 16 aa, Homo sapiens
  CDR3 for alpha chain variable domain of TCR clone 52820 (TRAV30, TRAJ24)
CGTEIVDADSWGKFQF

SEQ ID NO: 105640 - protein, 15 aa, Homo sapiens
  CDR3 for beta chain variable domain of TCR clone 52820 (TRBV12-4, TRBJ1-5)
CASTQGTGPLQPQHF

SEQ ID NO: 105641 - protein, 14 aa, Homo sapiens
  CDR3 for alpha chain variable domain of TCR clone 52821 (TRAV9-2, TRAJ39)
CALYIYNAGNMLTF

SEQ ID NO: 105642 - protein, 16 aa, Homo sapiens
  CDR3 for beta chain variable domain of TCR clone 52821 (TRBV19, TRBJ1-5)
CASSIDRGGPRQPQHF

SEQ ID NO: 105643 - protein, 13 aa, Homo sapiens
  CDR3 for alpha chain variable domain of TCR clone 52822 (TRAV12-3, TRAJ7)
CAMSASGNNRLAV

SEQ ID NO: 105644 - protein, 14 aa, Homo sapiens
  CDR3 for beta chain variable domain of TCR clone 52822 (TRBV13, TRBJ2-5)
CASSLGPRGETQYF

SEQ ID NO: 105645 - protein, 10 aa, Homo sapiens
  CDR3 for alpha chain variable domain of TCR clone 52823 (TRAV17, TRAJ52)
SATSYGKLTF

SEQ ID NO: 105646 - protein, 13 aa, Homo sapiens
  CDR3 for beta chain variable domain of TCR clone 52823 (TRBV29-1, TRBJ2-5)
CSVGGTSADTQYF

SEQ ID NO: 105647 - protein, 12 aa, Homo sapiens
  CDR3 for alpha chain variable domain of TCR clone 52824 (TRAV13-1, TRAJ21)
CAAKEGFNKFYF

SEQ ID NO: 105648 - protein, 15 aa, Homo sapiens
  CDR3 for beta chain variable domain of TCR clone 52824 (TRBV7-9, TRBJ1-6)
CASSSPGRGNSRLHF

SEQ ID NO: 105649 - protein, 13 aa, Homo sapiens
  CDR3 for alpha chain variable domain of TCR clone 52825 (TRAV12-1, TRAJ40)
CVVPTSGTYKYIF

SEQ ID NO: 105650 - protein, 16 aa, Homo sapiens
  CDR3 for beta chain variable domain of TCR clone 52825 (TRBV2, TRBJ2-7)
CASSSTRRGSSYEQYF

SEQ ID NO: 105651 - protein, 14 aa, Homo sapiens
  CDR3 for alpha chain variable domain of TCR clone 52826 (TRAV13-1, TRAJ8)
CAASMSTGSQKLVF

SEQ ID NO: 105652 - protein, 13 aa, Homo sapiens
  CDR3 for beta chain variable domain of TCR clone 52826 (TRBV13, TRBJ2-1)
CASTPGSYNEQFF

SEQ ID NO: 105653 - protein, 17 aa, Homo sapiens
  CDR3 for alpha chain variable domain of TCR clone 52827 (TRAV23/DV6, TRAJ58)
CAARLLRGETSGPRLTF

SEQ ID NO: 105654 - protein, 13 aa, Homo sapiens
  CDR3 for beta chain variable domain of TCR clone 52827 (TRBV6-4, TRBJ1-5)
CASSADLNQPQHF

SEQ ID NO: 105655 - protein, 14 aa, Homo sapiens
  CDR3 for alpha chain variable domain of TCR clone 52828 (TRAV1-2, TRAJ16)
CAVNRFSDGQKLLF

SEQ ID NO: 105656 - protein, 15 aa, Homo sapiens
  CDR3 for beta chain variable domain of TCR clone 52828 (TRBV4-1, TRBJ2-3)
CASSRGQGIPDTQYF

SEQ ID NO: 105657 - protein, 12 aa, Homo sapiens
  CDR3 for alpha chain variable domain of TCR clone 52829 (TRAV12-1, TRAJ40)
CVVYSGTYKYIF

SEQ ID NO: 105658 - protein, 18 aa, Homo sapiens
  CDR3 for beta chain variable domain of TCR clone 52829 (TRBV11-2, TRBJ2-3)
CASSLGAASRGAPNTQYF

SEQ ID NO: 105659 - protein, 16 aa, Homo sapiens
  CDR3 for alpha chain variable domain of TCR clone 52830 (TRAV3, TRAJ37)
CAVRGKGSGNTGKLIF

SEQ ID NO: 105660 - protein, 16 aa, Homo sapiens
  CDR3 for beta chain variable domain of TCR clone 52830 (TRBV12-5, TRBJ2-5)
CASGPWTSGSQETQYF

SEQ ID NO: 105661 - protein, 13 aa, Homo sapiens
  CDR3 for alpha chain variable domain of TCR clone 52831 (TRAV1-2, TRAJ9)
CAALNTGGFKTIF

SEQ ID NO: 105662 - protein, 15 aa, Homo sapiens
  CDR3 for beta chain variable domain of TCR clone 52831 (TRBV4-1, TRBJ1-4)
CASSDTGGTNEKLFF

SEQ ID NO: 105663 - protein, 16 aa, Homo sapiens
  CDR3 for alpha chain variable domain of TCR clone 52832 (TRAV16, TRAJ4)
CALSRMFSGGYNKLIF

SEQ ID NO: 105664 - protein, 15 aa, Homo sapiens
  CDR3 for beta chain variable domain of TCR clone 52832 (TRBV7-8, TRBJ2-1)
CASSLAGGLYNEQFF

SEQ ID NO: 105665 - protein, 15 aa, Homo sapiens
  CDR3 for alpha chain variable domain of TCR clone 52833 (TRAV12-3, TRAJ10)
CASYILTGGGNKLTF

SEQ ID NO: 105666 - protein, 14 aa, Homo sapiens
  CDR3 for beta chain variable domain of TCR clone 52833 (TRBV12-5, TRBJ2-5)
CASGSRTHQETQYF

SEQ ID NO: 105667 - protein, 10 aa, Homo sapiens
  CDR3 for alpha chain variable domain of TCR clone 52834 (TRAV20, TRAJ22)
CAAPARQLTL

SEQ ID NO: 105668 - protein, 14 aa, Homo sapiens
  CDR3 for beta chain variable domain of TCR clone 52834 (TRBV19, TRBJ2-1)
CASSMGSGATEQFF

SEQ ID NO: 105669 - protein, 17 aa, Homo sapiens
  CDR3 for alpha chain variable domain of TCR clone 52835 (TRAV8-6, TRAJ58)
CAMSSWVGETSGSRLTF

SEQ ID NO: 105670 - protein, 14 aa, Homo sapiens
  CDR3 for beta chain variable domain of TCR clone 52835 (TRBV4-2, TRBJ2-1)
CASGLDRAYNEQFF

SEQ ID NO: 105671 - protein, 12 aa, Homo sapiens
  CDR3 for alpha chain variable domain of TCR clone 52836 (TRAV12-1, TRAJ40)
CVVYSGTYKYIF

SEQ ID NO: 105672 - protein, 18 aa, Homo sapiens
  CDR3 for beta chain variable domain of TCR clone 52836 (TRBV11-2, TRBJ2-3)
CASSFGGAARGAPNTQYF

SEQ ID NO: 105673 - protein, 11 aa, Homo sapiens
  CDR3 for alpha chain variable domain of TCR clone 52837 (TRAV1-2, TRAJ20)
CAVSNDYKLSF

SEQ ID NO: 105674 - protein, 16 aa, Homo sapiens
  CDR3 for beta chain variable domain of TCR clone 52837 (TRBV2, TRBJ2-1)
CASSDSPGQPYNEQFF

SEQ ID NO: 105675 - protein, 15 aa, Homo sapiens
  CDR3 for alpha chain variable domain of TCR clone 52838 (TRAV3, TRAJ32)
CAVSSYGGATNKLIF

SEQ ID NO: 105676 - protein, 13 aa, Homo sapiens
  CDR3 for beta chain variable domain of TCR clone 52838 (TRBV20-1, TRBJ2-7)
CSARPSTNDEQYF

SEQ ID NO: 105677 - protein, 16 aa, Homo sapiens
  CDR3 for alpha chain variable domain of TCR clone 52839 (TRAV26-1, TRAJ53)
CIVRVSMGGSNYKLTF

SEQ ID NO: 105678 - protein, 12 aa, Homo sapiens
  CDR3 for beta chain variable domain of TCR clone 52839 (TRBV7-9, TRBJ1-5)
CASSPQGQPQHF

SEQ ID NO: 105679 - protein, 11 aa, Homo sapiens
  CDR3 for alpha chain variable domain of TCR clone 52840 (TRAV16, TRAJ33)
CALHSDYQLIW

SEQ ID NO: 105680 - protein, 15 aa, Homo sapiens
  CDR3 for beta chain variable domain of TCR clone 52840 (TRBV4-1, TRBJ2-7)
CASSQQGQGFDEQYF

SEQ ID NO: 105681 - protein, 16 aa, Homo sapiens
  CDR3 for alpha chain variable domain of TCR clone 52841 (TRAV16, TRAJ4)
CALSRMFSGGYSKLIF

SEQ ID NO: 105682 - protein, 16 aa, Homo sapiens
  CDR3 for beta chain variable domain of TCR clone 52841 (TRBV12-4, TRBJ1-5)
CASSRPVGGSNQPQHF

SEQ ID NO: 105683 - protein, 14 aa, Homo sapiens
  CDR3 for alpha chain variable domain of TCR clone 52842 (TRAV8-3, TRAJ45)
WGSYSGGGADGLTF

SEQ ID NO: 105684 - protein, 11 aa, Homo sapiens
  CDR3 for beta chain variable domain of TCR clone 52842 (TRBV20-1, TRBJ2-5)
CSADRAETQYF

SEQ ID NO: 105685 - protein, 14 aa, Homo sapiens
  CDR3 for alpha chain variable domain of TCR clone 52843 (TRAV12-2, TRAJ13)
CAVKKTGGYQKVTL

SEQ ID NO: 105686 - protein, 11 aa, Homo sapiens
  CDR3 for beta chain variable domain of TCR clone 52843 (TRBV12-4, TRBJ2-2)
CASSSAGELFF

SEQ ID NO: 105687 - protein, 18 aa, Homo sapiens
  CDR3 for alpha chain variable domain of TCR clone 52844 (TRAV13-1, TRAJ52)
CAASKRSAGGTSYGKLTF

SEQ ID NO: 105688 - protein, 13 aa, Homo sapiens
  CDR3 for beta chain variable domain of TCR clone 52844 (TRBV12-4, TRBJ1-2)
CASSLRQGKGYNF

SEQ ID NO: 105689 - protein, 12 aa, Homo sapiens
  CDR3 for alpha chain variable domain of TCR clone 52845 (TRAV9-2, TRAJ36)
CALKKGANNLFF

SEQ ID NO: 105690 - protein, 14 aa, Homo sapiens
  CDR3 for beta chain variable domain of TCR clone 52845 (TRBV19, TRBJ2-1)
CASPTFVLSGEQFF

SEQ ID NO: 105691 - protein, 15 aa, Homo sapiens
  CDR3 for alpha chain variable domain of TCR clone 52846 (TRAV25, TRAJ52)
CAGRPGGTSYGKLTF

SEQ ID NO: 105692 - protein, 17 aa, Homo sapiens
  CDR3 for beta chain variable domain of TCR clone 52846 (TRBV7-8, TRBJ2-6)
CASRAGTGGAGANVLTF

SEQ ID NO: 105693 - protein, 14 aa, Homo sapiens
  CDR3 for alpha chain variable domain of TCR clone 52847 (TRAV26-1, TRAJ45)
CIEVTGGGADGLTF

SEQ ID NO: 105694 - protein, 13 aa, Homo sapiens
  CDR3 for beta chain variable domain of TCR clone 52847 (TRBV7-6, TRBJ1-2)
CAGSLVADYGYTF

SEQ ID NO: 105695 - protein, 16 aa, Homo sapiens
  CDR3 for alpha chain variable domain of TCR clone 52848 (TRAV1-2, TRAJ10)
CAVRGVLKGGGNKLTF

SEQ ID NO: 105696 - protein, 12 aa, Homo sapiens
  CDR3 for beta chain variable domain of TCR clone 52848 (TRBV7-8, TRBJ2-7)
CASSLGDREQYF

SEQ ID NO: 105697 - protein, 11 aa, Homo sapiens
  CDR3 for alpha chain variable domain of TCR clone 52849 (TRAV2, TRAJ21)
CAVFNFNKSYF

SEQ ID NO: 105698 - protein, 14 aa, Homo sapiens
  CDR3 for beta chain variable domain of TCR clone 52849 (TRBV15, TRBJ2-3)
CATRSGTSTDTQYF

SEQ ID NO: 105699 - protein, 13 aa, Homo sapiens
  CDR3 for alpha chain variable domain of TCR clone 52850 (TRAV26-1, TRAJ30)
CIVRVESNDKIIF

SEQ ID NO: 105700 - protein, 17 aa, Homo sapiens
  CDR3 for beta chain variable domain of TCR clone 52850 (TRBV13, TRBJ2-3)
CASSISRVAGGRNTQYF

SEQ ID NO: 105701 - protein, 13 aa, Homo sapiens
  CDR3 for alpha chain variable domain of TCR clone 52851 (TRAV35, TRAJ37)
CAGSSGNTGKLIF

SEQ ID NO: 105702 - protein, 16 aa, Homo sapiens
  CDR3 for beta chain variable domain of TCR clone 52851 (TRBV10-3, TRBJ2-1)
RAISLTSGNSYNEQFF

SEQ ID NO: 105703 - protein, 15 aa, Homo sapiens
  CDR3 for alpha chain variable domain of TCR clone 52852 (TRAV26-1, TRAJ29)
CIVRVEGSGNTPLVF

SEQ ID NO: 105704 - protein, 15 aa, Homo sapiens
  CDR3 for beta chain variable domain of TCR clone 52852 (TRBV7-9, TRBJ1-5)
CASSQGHQPNQPEHF

SEQ ID NO: 105705 - protein, 13 aa, Homo sapiens
  CDR3 for alpha chain variable domain of TCR clone 52853 (TRAV3, TRAJ36)
CAVKRTGANNLFF

SEQ ID NO: 105706 - protein, 13 aa, Homo sapiens
  CDR3 for beta chain variable domain of TCR clone 52853 (TRBV7-9, TRBJ2-3)
CASSPGSTDTQYF

SEQ ID NO: 105707 - protein, 12 aa, Homo sapiens
  CDR3 for alpha chain variable domain of TCR clone 52854 (TRAV12-3, TRAJ17)
CAMTLTGNKLTF

SEQ ID NO: 105708 - protein, 15 aa, Homo sapiens
  CDR3 for beta chain variable domain of TCR clone 52854 (TRBV7-2, TRBJ2-3)
CASSLAGAFIDTQYF

SEQ ID NO: 105709 - protein, 14 aa, Homo sapiens
  CDR3 for alpha chain variable domain of TCR clone 52855 (TRAV12-3, TRAJ6)
CAMSATGGSYIPTF

SEQ ID NO: 105710 - protein, 16 aa, Homo sapiens
  CDR3 for beta chain variable domain of TCR clone 52855 (TRBV4-2, TRBJ2-1)
CASSPRAGQGANEQFF

SEQ ID NO: 105711 - protein, 13 aa, Homo sapiens
  CDR3 for alpha chain variable domain of TCR clone 52856 (TRAV13-1, TRAJ39)
CAASIRAGNMLTF

SEQ ID NO: 105712 - protein, 15 aa, Homo sapiens
  CDR3 for beta chain variable domain of TCR clone 52856 (TRBV7-9, TRBJ1-1)
CASSLLEQGGTEAFF

SEQ ID NO: 105713 - protein, 17 aa, Homo sapiens
  CDR3 for alpha chain variable domain of TCR clone 52857 (TRAV3, TRAJ6)
CAVRDGPRAGGSYIPTF

SEQ ID NO: 105714 - protein, 13 aa, Homo sapiens
  CDR3 for beta chain variable domain of TCR clone 52857 (TRBV29-1, TRBJ1-1)
CSVGGSRNTEAFF

SEQ ID NO: 105715 - protein, 16 aa, Homo sapiens
  CDR3 for alpha chain variable domain of TCR clone 52858 (TRAV12-3, TRAJ53)
CAMSPGSGGSNYKLTF

SEQ ID NO: 105716 - protein, 13 aa, Homo sapiens
  CDR3 for beta chain variable domain of TCR clone 52858 (TRBV11-2, TRBJ2-5)
CASSSTGEETQYF

SEQ ID NO: 105717 - protein, 14 aa, Homo sapiens
  CDR3 for alpha chain variable domain of TCR clone 52859 (TRAV26-1, TRAJ38)
CIADNAGNNRKLIW

SEQ ID NO: 105718 - protein, 15 aa, Homo sapiens
  CDR3 for beta chain variable domain of TCR clone 52859 (TRBV20-1, TRBJ2-7)
CSARDWVSGMDEQYF

SEQ ID NO: 105719 - protein, 23 aa, Homo sapiens
  CDR3 for alpha chain variable domain of TCR clone 52860 (TRAV12-2, TRAJ43)
SLLIRDSQPSDSATYLSAFDMRF

SEQ ID NO: 105720 - protein, 18 aa, Homo sapiens
  CDR3 for beta chain variable domain of TCR clone 52860 (TRBV20-1, TRBJ2-3)
CSASGLAGGPGTTDTQYF

SEQ ID NO: 105721 - protein, 12 aa, Homo sapiens
  CDR3 for alpha chain variable domain of TCR clone 52861 (TRAV2, TRAJ17)
CCPKAAGNKLTF

SEQ ID NO: 105722 - protein, 13 aa, Homo sapiens
  CDR3 for beta chain variable domain of TCR clone 52861 (TRBV7-9, TRBJ1-2)
CASSSKQNYGYTF

SEQ ID NO: 105723 - protein, 13 aa, Homo sapiens
  CDR3 for alpha chain variable domain of TCR clone 52862 (TRAV12-1, TRAJ40)
CVVPTSGTYKYIF

SEQ ID NO: 105724 - protein, 16 aa, Homo sapiens
  CDR3 for beta chain variable domain of TCR clone 52862 (TRBV7-9, TRBJ1-2)
CASSLSFSSGEDGYTF

SEQ ID NO: 105725 - protein, 15 aa, Homo sapiens
  CDR3 for alpha chain variable domain of TCR clone 52863 (TRAV12-1, TRAJ41)
CVVNGASNSGYALNF

SEQ ID NO: 105726 - protein, 15 aa, Homo sapiens
  CDR3 for beta chain variable domain of TCR clone 52863 (TRBV7-2, TRBJ1-5)
CVSSSTGVDNQPQHF

SEQ ID NO: 105727 - protein, 11 aa, Homo sapiens
  CDR3 for alpha chain variable domain of TCR clone 52864 (TRAV12-2, TRAJ31)
CALTRWARLMF

SEQ ID NO: 105728 - protein, 15 aa, Homo sapiens
  CDR3 for beta chain variable domain of TCR clone 52864 (TRBV19, TRBJ2-7)
CASSIGGGLVNEQYF

SEQ ID NO: 105729 - protein, 14 aa, Homo sapiens
  CDR3 for alpha chain variable domain of TCR clone 52865 (TRAV8-4, TRAJ9)
CAVRINTGGFKTIF

SEQ ID NO: 105730 - protein, 12 aa, Homo sapiens
  CDR3 for beta chain variable domain of TCR clone 52865 (TRBV7-8, TRBJ2-7)
CASSLGDREQYF

SEQ ID NO: 105731 - protein, 16 aa, Homo sapiens
  CDR3 for alpha chain variable domain of TCR clone 52866 (TRAV30, TRAJ24)
FGTEIVDADSWGKFQF

SEQ ID NO: 105732 - protein, 13 aa, Homo sapiens
  CDR3 for beta chain variable domain of TCR clone 52866 (TRBV10-3, TRBJ2-7)
CASKLAVNYEQYF

SEQ ID NO: 105733 - protein, 12 aa, Homo sapiens
  CDR3 for alpha chain variable domain of TCR clone 52867 (TRAV12-3, TRAJ17)
CAMTLTGNKLTF

SEQ ID NO: 105734 - protein, 12 aa, Homo sapiens
  CDR3 for beta chain variable domain of TCR clone 52867 (TRBV14, TRBJ1-1)
CASSQLKGLAFF

SEQ ID NO: 105735 - protein, 12 aa, Homo sapiens
  CDR3 for alpha chain variable domain of TCR clone 52868 (TRAV29/DV5, TRAJ49)
CAATDTGNQFYF

SEQ ID NO: 105736 - protein, 11 aa, Homo sapiens
  CDR3 for beta chain variable domain of TCR clone 52868 (TRBV20-1, TRBJ2-7)
CSARTSYERYF

SEQ ID NO: 105737 - protein, 13 aa, Homo sapiens
  CDR3 for alpha chain variable domain of TCR clone 52869 (TRAV17, TRAJ5)
CAPMDTGRRALTF

SEQ ID NO: 105738 - protein, 11 aa, Homo sapiens
  CDR3 for beta chain variable domain of TCR clone 52869 (TRBV7-8, TRBJ2-7)
CASSLSLEQYF

SEQ ID NO: 105739 - protein, 16 aa, Homo sapiens
  CDR3 for alpha chain variable domain of TCR clone 52870 (TRAV3, TRAJ10)
CAVRDMRAGGGNKLTF

SEQ ID NO: 105740 - protein, 15 aa, Homo sapiens
  CDR3 for beta chain variable domain of TCR clone 52870 (TRBV11-2, TRBJ1-6)
CASTGFGTAVSSLHF

SEQ ID NO: 105741 - protein, 15 aa, Homo sapiens
  CDR3 for alpha chain variable domain of TCR clone 52871 (TRAV17, TRAJ57)
CATGPSQGGSEKLVF

SEQ ID NO: 105742 - protein, 14 aa, Homo sapiens
  CDR3 for beta chain variable domain of TCR clone 52871 (TRBV12-5, TRBJ2-5)
CASGSQAHQETQYF

SEQ ID NO: 105743 - protein, 12 aa, Homo sapiens
  CDR3 for alpha chain variable domain of TCR clone 52872 (TRAV12-3, TRAJ17)
CAMTLTGNKLTL

SEQ ID NO: 105744 - protein, 15 aa, Homo sapiens
  CDR3 for beta chain variable domain of TCR clone 52872 (TRBV20-1, TRBJ2-7)
CSARDRVSGTDEQYF

SEQ ID NO: 105745 - protein, 11 aa, Homo sapiens
  CDR3 for alpha chain variable domain of TCR clone 52873 (TRAV3, TRAJ21)
CAVGNFNKFYF

SEQ ID NO: 105746 - protein, 16 aa, Homo sapiens
  CDR3 for beta chain variable domain of TCR clone 52873 (TRBV19, TRBJ2-5)
CASSKAGPSSYNEQFF

SEQ ID NO: 105747 - protein, 14 aa, Homo sapiens
  CDR3 for alpha chain variable domain of TCR clone 52874 (TRAV1-2, TRAJ16)
CAVNRFSDGQKLLF

SEQ ID NO: 105748 - protein, 16 aa, Homo sapiens
  CDR3 for beta chain variable domain of TCR clone 52874 (TRBV7-2, TRBJ2-6)
CASSLAGRSGANVLTF

SEQ ID NO: 105749 - protein, 11 aa, Homo sapiens
  CDR3 for alpha chain variable domain of TCR clone 52875 (TRAV21, TRAJ31)
CVVRNNARLMF

SEQ ID NO: 105750 - protein, 15 aa, Homo sapiens
  CDR3 for beta chain variable domain of TCR clone 52875 (TRBV20-1, TRBJ2-7)
CSARDRVSGMDEQYF

SEQ ID NO: 105751 - protein, 15 aa, Homo sapiens
  CDR3 for alpha chain variable domain of TCR clone 52876 (TRAV8-3, TRAJ45)
CASSYSGGGADGLTF

SEQ ID NO: 105752 - protein, 17 aa, Homo sapiens
  CDR3 for beta chain variable domain of TCR clone 52876 (TRBV7-3, TRBJ2-5)
CASSLGSGRSGSETQYF

SEQ ID NO: 105753 - protein, 13 aa, Homo sapiens
  CDR3 for alpha chain variable domain of TCR clone 52877 (TRAV21, TRAJ45)
CAVMGGGADGLTF

SEQ ID NO: 105754 - protein, 15 aa, Homo sapiens
  CDR3 for beta chain variable domain of TCR clone 52877 (TRBV6-3, TRBJ2-7)
CASSSPGTVFYEQYF

SEQ ID NO: 105755 - protein, 12 aa, Homo sapiens
  CDR3 for alpha chain variable domain of TCR clone 52878 (TRAV27, TRAJ35)
CAGADFGNVRHC

SEQ ID NO: 105756 - protein, 16 aa, Homo sapiens
  CDR3 for beta chain variable domain of TCR clone 52878 (TRBV6-1, TRBJ2-1)
CASILRQGSSYNEQFF

SEQ ID NO: 105757 - protein, 14 aa, Homo sapiens
  CDR3 for alpha chain variable domain of TCR clone 52879 (TRAV8-1, TRAJ5)
CAVRTDTGRRALTF

SEQ ID NO: 105758 - protein, 14 aa, Homo sapiens
  CDR3 for beta chain variable domain of TCR clone 52879 (TRBV7-8, TRBJ2-3)
CTSSFPDGQDTQYF

SEQ ID NO: 105759 - protein, 12 aa, Homo sapiens
  CDR3 for alpha chain variable domain of TCR clone 52880 (TRAV12-3, TRAJ41)
CAMSYSGYALNF

SEQ ID NO: 105760 - protein, 13 aa, Homo sapiens
  CDR3 for beta chain variable domain of TCR clone 52880 (TRBV7-3, TRBJ2-1)
CASSLDSCNEQFF

SEQ ID NO: 105761 - protein, 15 aa, Homo sapiens
  CDR3 for alpha chain variable domain of TCR clone 52881 (TRAV12-3, TRAJ11)
CAMSEENSGYSTLTF

SEQ ID NO: 105762 - protein, 16 aa, Homo sapiens
  CDR3 for beta chain variable domain of TCR clone 52881 (TRBV5-1, TRBJ2-7)
GASSLEGLAGLYEQYF

SEQ ID NO: 105763 - protein, 13 aa, Homo sapiens
  CDR3 for alpha chain variable domain of TCR clone 52882 (TRAV29/DV5, TRAJ31)
CAASRNNNARLMF

SEQ ID NO: 105764 - protein, 11 aa, Homo sapiens
  CDR3 for beta chain variable domain of TCR clone 52882 (TRBV7-9, TRBJ2-1)
CASSSQNEQFF

SEQ ID NO: 105765 - protein, 14 aa, Homo sapiens
  CDR3 for alpha chain variable domain of TCR clone 52883 (TRAV8-3, TRAJ4)
CAVGAAGGYNKLIF

SEQ ID NO: 105766 - protein, 20 aa, Homo sapiens
  CDR3 for beta chain variable domain of TCR clone 52883 (TRBV7-8, TRBJ2-2)
CASSHLFPGPTIHITGELFF

SEQ ID NO: 105767 - protein, 14 aa, Homo sapiens
  CDR3 for alpha chain variable domain of TCR clone 52884 (TRAV16, TRAJ3)
CALSQYSSASKIIF

SEQ ID NO: 105768 - protein, 14 aa, Homo sapiens
  CDR3 for beta chain variable domain of TCR clone 52884 (TRBV12-5, TRBJ2-5)
CASGSRTHQETQYF

SEQ ID NO: 105769 - protein, 19 aa, Homo sapiens
  CDR3 for alpha chain variable domain of TCR clone 52885 (TRAV26-1, TRAJ39)
CCVLLHRQSREYAGNMLTF

SEQ ID NO: 105770 - protein, 14 aa, Homo sapiens
  CDR3 for beta chain variable domain of TCR clone 52885 (TRBV7-6, TRBJ2-3)
CASSVAGGTDTQYF

SEQ ID NO: 105771 - protein, 11 aa, Homo sapiens
  CDR3 for alpha chain variable domain of TCR clone 52886 (TRAV1-2, TRAJ11)
CAVRGYSTLTF

SEQ ID NO: 105772 - protein, 13 aa, Homo sapiens
  CDR3 for beta chain variable domain of TCR clone 52886 (TRBV7-3, TRBJ1-1)
CASSQDWGAEAFF

SEQ ID NO: 105773 - protein, 12 aa, Homo sapiens
  CDR3 for alpha chain variable domain of TCR clone 52887 (TRAV13-1, TRAJ49)
CSASIWGNQFYF

SEQ ID NO: 105774 - protein, 14 aa, Homo sapiens
  CDR3 for beta chain variable domain of TCR clone 52887 (TRBV12-4, TRBJ1-1)
CASSLDGLNTEAFF

SEQ ID NO: 105775 - protein, 11 aa, Homo sapiens
  CDR3 for alpha chain variable domain of TCR clone 52888 (TRAV2, TRAJ33)
CAVESNYQLIW

SEQ ID NO: 105776 - protein, 16 aa, Homo sapiens
  CDR3 for beta chain variable domain of TCR clone 52888 (TRBV19, TRBJ2-1)
CASSMGGGSSYNEQFF

SEQ ID NO: 105777 - protein, 16 aa, Homo sapiens
  CDR3 for alpha chain variable domain of TCR clone 52889 (TRAV16, TRAJ52)
CALSAAGGTSYGKLTF

SEQ ID NO: 105778 - protein, 14 aa, Homo sapiens
  CDR3 for beta chain variable domain of TCR clone 52889 (TRBV19, TRBJ2-1)
CASPTFVLSGEQFF

SEQ ID NO: 105779 - protein, 14 aa, Homo sapiens
  CDR3 for alpha chain variable domain of TCR clone 52890 (TRAV38-1, TRAJ45)
CASHSGGGADGLTF

SEQ ID NO: 105780 - protein, 16 aa, Homo sapiens
  CDR3 for beta chain variable domain of TCR clone 52890 (TRBV27, TRBJ2-2)
CASSFRGLIRTGELFF

SEQ ID NO: 105781 - protein, 12 aa, Homo sapiens
  CDR3 for alpha chain variable domain of TCR clone 52891 (TRAV12-3, TRAJ17)
CAMTLTGNKLTF

SEQ ID NO: 105782 - protein, 15 aa, Homo sapiens
  CDR3 for beta chain variable domain of TCR clone 52891 (TRBV20-1, TRBJ2-7)
CSARDRVFGVDEQYF

SEQ ID NO: 105783 - protein, 14 aa, Homo sapiens
  CDR3 for alpha chain variable domain of TCR clone 52892 (TRAV38-1, TRAJ45)
CAYYSGGGADGLTF

SEQ ID NO: 105784 - protein, 20 aa, Homo sapiens
  CDR3 for beta chain variable domain of TCR clone 52892 (TRBV28, TRBJ2-1)
CASTPVGRSPGLAGGNEQFF

SEQ ID NO: 105785 - protein, 14 aa, Homo sapiens
  CDR3 for alpha chain variable domain of TCR clone 52893 (TRAV3, TRAJ34)
CAVRDIDNTDKLIF

SEQ ID NO: 105786 - protein, 14 aa, Homo sapiens
  CDR3 for beta chain variable domain of TCR clone 52893 (TRBV7-2, TRBJ2-2)
CASSLGQNTGELFF

SEQ ID NO: 105787 - protein, 15 aa, Homo sapiens
  CDR3 for alpha chain variable domain of TCR clone 52894 (TRAV4, TRAJ39)
CLVGPNNNAGNMPTF

SEQ ID NO: 105788 - protein, 14 aa, Homo sapiens
  CDR3 for beta chain variable domain of TCR clone 52894 (TRBV19, TRBJ2-1)
CASPTFVLSGEQFF

SEQ ID NO: 105789 - protein, 11 aa, Homo sapiens
  CDR3 for alpha chain variable domain of TCR clone 52895 (TRAV12-3, TRAJ27)
CAMANAGKSTF

SEQ ID NO: 105790 - protein, 13 aa, Homo sapiens
  CDR3 for beta chain variable domain of TCR clone 52895 (TRBV20-1, TRBJ1-1)
CSARVGENTEAFF

SEQ ID NO: 105791 - protein, 12 aa, Homo sapiens
  CDR3 for alpha chain variable domain of TCR clone 52896 (TRAV16, TRAJ10)
CSRTGGGNKLTF

SEQ ID NO: 105792 - protein, 15 aa, Homo sapiens
  CDR3 for beta chain variable domain of TCR clone 52896 (TRBV6-3, TRBJ2-7)
CASSSRGTVFYEQYF

SEQ ID NO: 105793 - protein, 14 aa, Homo sapiens
  CDR3 for alpha chain variable domain of TCR clone 52897 (TRAV12-2, TRAJ24)
CAVTPADSWGKWQF

SEQ ID NO: 105794 - protein, 12 aa, Homo sapiens
  CDR3 for beta chain variable domain of TCR clone 52897 (TRBV3-1, TRBJ2-1)
CASSQGSSGQFF

SEQ ID NO: 105795 - protein, 14 aa, Homo sapiens
  CDR3 for alpha chain variable domain of TCR clone 52898 (TRAV12-2, TRAJ5)
CAVNRSTGRRALTF

SEQ ID NO: 105796 - protein, 16 aa, Homo sapiens
  CDR3 for beta chain variable domain of TCR clone 52898 (TRBV12-5, TRBJ2-5)
CASGPRTSGNQETQYF

SEQ ID NO: 105797 - protein, 14 aa, Homo sapiens
  CDR3 for alpha chain variable domain of TCR clone 52899 (TRAV1-2, TRAJ8)
CAVREGTGFQKLVF

SEQ ID NO: 105798 - protein, 14 aa, Homo sapiens
  CDR3 for beta chain variable domain of TCR clone 52899 (TRBV28, TRBJ2-1)
CASSFDSVSDEQFF

SEQ ID NO: 105799 - protein, 11 aa, Homo sapiens
  CDR3 for alpha chain variable domain of TCR clone 52900 (TRAV12-1, TRAJ30)
CVVNGQDKIIF

SEQ ID NO: 105800 - protein, 13 aa, Homo sapiens
  CDR3 for beta chain variable domain of TCR clone 52900 (TRBV7-2, TRBJ2-2)
CASSLAVTGELFF

SEQ ID NO: 105801 - protein, 14 aa, Homo sapiens
  CDR3 for alpha chain variable domain of TCR clone 52901 (TRAV8-3, TRAJ4)
CAVGASGGDNKLIF

SEQ ID NO: 105802 - protein, 13 aa, Homo sapiens
  CDR3 for beta chain variable domain of TCR clone 52901 (TRBV18, TRBJ2-5)
CASSLQGQETQYF

SEQ ID NO: 105803 - protein, 14 aa, Homo sapiens
  CDR3 for alpha chain variable domain of TCR clone 52902 (TRAV12-2, TRAJ13)
CAMKKTGGYQKVTF

SEQ ID NO: 105804 - protein, 13 aa, Homo sapiens
  CDR3 for beta chain variable domain of TCR clone 52902 (TRBV20-1, TRBJ1-1)
CSARLGQGTEAFF

SEQ ID NO: 105805 - protein, 14 aa, Homo sapiens
  CDR3 for alpha chain variable domain of TCR clone 52903 (TRAV1-2, TRAJ16)
CAVNRFSDGQKLLF

SEQ ID NO: 105806 - protein, 11 aa, Homo sapiens
  CDR3 for beta chain variable domain of TCR clone 52903 (TRBV19, TRBJ2-2)
CASRYSGELFF

SEQ ID NO: 105807 - protein, 13 aa, Homo sapiens
  CDR3 for alpha chain variable domain of TCR clone 52904 (TRAV12-1, TRAJ16)
CVVNGPDGQKLLF

SEQ ID NO: 105808 - protein, 12 aa, Homo sapiens
  CDR3 for beta chain variable domain of TCR clone 52904 (TRBV2, TRBJ1-1)
CQESDRGFHAFF

SEQ ID NO: 105809 - protein, 12 aa, Homo sapiens
  CDR3 for alpha chain variable domain of TCR clone 52905 (TRAV13-1, TRAJ53)
AASGGSNYTLTF

SEQ ID NO: 105810 - protein, 15 aa, Homo sapiens
  CDR3 for beta chain variable domain of TCR clone 52905 (TRBV5-1, TRBJ2-1)
CASSPPRAPYNEQFF

SEQ ID NO: 105811 - protein, 12 aa, Homo sapiens
  CDR3 for alpha chain variable domain of TCR clone 52906 (TRAV29/DV5, TRAJ34)
CAARHNTDKLIF

SEQ ID NO: 105812 - protein, 15 aa, Homo sapiens
  CDR3 for beta chain variable domain of TCR clone 52906 (TRBV11-3, TRBJ2-3)
CASLKDGREGDTQYF

SEQ ID NO: 105813 - protein, 11 aa, Homo sapiens
  CDR3 for alpha chain variable domain of TCR clone 52907 (TRAV2, TRAJ33)
CAVDSNYQLIW

SEQ ID NO: 105814 - protein, 12 aa, Homo sapiens
  CDR3 for beta chain variable domain of TCR clone 52907 (TRBV11-2, TRBJ2-2)
CASSLGGGVLFF

SEQ ID NO: 105815 - protein, 14 aa, Homo sapiens
  CDR3 for alpha chain variable domain of TCR clone 52908 (TRAV12-3, TRAJ6)
CAMSATGGSYIPTF

SEQ ID NO: 105816 - protein, 14 aa, Homo sapiens
  CDR3 for beta chain variable domain of TCR clone 52908 (TRBV18, TRBJ2-7)
CASSPRGGAYEQYF

SEQ ID NO: 105817 - protein, 14 aa, Homo sapiens
  CDR3 for alpha chain variable domain of TCR clone 52909 (TRAV26-1, TRAJ38)
CIAENAGNNRKLIW

SEQ ID NO: 105818 - protein, 13 aa, Homo sapiens
  CDR3 for beta chain variable domain of TCR clone 52909 (TRBV20-1, TRBJ1-1)
CSARGGGNTEAFF

SEQ ID NO: 105819 - protein, 15 aa, Homo sapiens
  CDR3 for alpha chain variable domain of TCR clone 52910 (TRAV21, TRAJ24)
CAARSSTDSWGKLQF

SEQ ID NO: 105820 - protein, 16 aa, Homo sapiens
  CDR3 for beta chain variable domain of TCR clone 52910 (TRBV29-1, TRBJ2-7)
CSVEVVGTSGSYEQYF

SEQ ID NO: 105821 - protein, 14 aa, Homo sapiens
  CDR3 for alpha chain variable domain of TCR clone 52911 (TRAV9-2, TRAJ39)
CALYIYNAGNMLTF

SEQ ID NO: 105822 - protein, 16 aa, Homo sapiens
  CDR3 for beta chain variable domain of TCR clone 52911 (TRBV20-1, TRBJ1-4)
CSAPGRGLLTNEKLFF

SEQ ID NO: 105823 - protein, 14 aa, Homo sapiens
  CDR3 for alpha chain variable domain of TCR clone 52912 (TRAV1-1, TRAJ27)
CAVIYNTNAGKSTF

SEQ ID NO: 105824 - protein, 15 aa, Homo sapiens
  CDR3 for beta chain variable domain of TCR clone 52912 (TRBV7-2, TRBJ2-1)
CASSSGPAGGNEQFF

SEQ ID NO: 105825 - protein, 14 aa, Homo sapiens
  CDR3 for alpha chain variable domain of TCR clone 52913 (TRAV8-1, TRAJ5)
CAVRTDTGRRALTF

SEQ ID NO: 105826 - protein, 14 aa, Homo sapiens
  CDR3 for beta chain variable domain of TCR clone 52913 (TRBV7-8, TRBJ2-3)
CASSFPDGQETQYF

SEQ ID NO: 105827 - protein, 15 aa, Homo sapiens
  CDR3 for alpha chain variable domain of TCR clone 52914 (TRAV34, TRAJ38)
CGADFTPGNNRKLIW

SEQ ID NO: 105828 - protein, 17 aa, Homo sapiens
  CDR3 for beta chain variable domain of TCR clone 52914 (TRBV13, TRBJ2-3)
CASSLSRVAGGRNTQYF

SEQ ID NO: 105829 - protein, 16 aa, Homo sapiens
  CDR3 for alpha chain variable domain of TCR clone 52915 (TRAV26-1, TRAJ23)
CIVRVHPYNQGGKLIF

SEQ ID NO: 105830 - protein, 15 aa, Homo sapiens
  CDR3 for beta chain variable domain of TCR clone 52915 (TRBV5-7, TRBJ2-7)
CASSPYLEGSYEQYF

SEQ ID NO: 105831 - protein, 14 aa, Homo sapiens
  CDR3 for alpha chain variable domain of TCR clone 52916 (TRAV17, TRAJ57)
CATDPQGGSEKLVF

SEQ ID NO: 105832 - protein, 16 aa, Homo sapiens
  CDR3 for beta chain variable domain of TCR clone 52916 (TRBV4-1, TRBJ1-2)
CASSQDAGQVLYGYTF

SEQ ID NO: 105833 - protein, 11 aa, Homo sapiens
  CDR3 for alpha chain variable domain of TCR clone 52917 (TRAV35, TRAJ12)
RRMDRSYKLIF

SEQ ID NO: 105834 - protein, 14 aa, Homo sapiens
  CDR3 for beta chain variable domain of TCR clone 52917 (TRBV19, TRBJ1-1)
CASSPNRGDTEALF

SEQ ID NO: 105835 - protein, 14 aa, Homo sapiens
  CDR3 for alpha chain variable domain of TCR clone 52918 (TRAV12-3, TRAJ9)
CAMSPNTGGFKTIF

SEQ ID NO: 105836 - protein, 12 aa, Homo sapiens
  CDR3 for beta chain variable domain of TCR clone 52918 (TRBV19, TRBJ1-5)
CASSLAQQPQHF

SEQ ID NO: 105837 - protein, 13 aa, Homo sapiens
  CDR3 for alpha chain variable domain of TCR clone 52919 (TRAV8-6, TRAJ8)
CAVSNTGFQKLGF

SEQ ID NO: 105838 - protein, 15 aa, Homo sapiens
  CDR3 for beta chain variable domain of TCR clone 52919 (TRBV28, TRBJ2-5)
CASSSGRTIQETQYF

SEQ ID NO: 105839 - protein, 14 aa, Homo sapiens
  CDR3 for alpha chain variable domain of TCR clone 52920 (TRAV1-2, TRAJ16)
CAVNRFSDGQKLLF

SEQ ID NO: 105840 - protein, 14 aa, Homo sapiens
  CDR3 for beta chain variable domain of TCR clone 52920 (TRBV11-2, TRBJ2-3)
CASSRLARTDTQYL

SEQ ID NO: 105841 - protein, 11 aa, Homo sapiens
  CDR3 for alpha chain variable domain of TCR clone 52921 (TRAV21, TRAJ11)
CAVNGYSTPTF

SEQ ID NO: 105842 - protein, 16 aa, Homo sapiens
  CDR3 for beta chain variable domain of TCR clone 52921 (TRBV4-3, TRBJ2-2)
CASSHLQGSGTGELFF

SEQ ID NO: 105843 - protein, 16 aa, Homo sapiens
  CDR3 for alpha chain variable domain of TCR clone 52922 (TRAV3, TRAJ37)
CAARGKGSGNTGKLIF

SEQ ID NO: 105844 - protein, 16 aa, Homo sapiens
  CDR3 for beta chain variable domain of TCR clone 52922 (TRBV28, TRBJ1-5)
CASSFRGGYSNQPQHF

SEQ ID NO: 105845 - protein, 14 aa, Homo sapiens
  CDR3 for alpha chain variable domain of TCR clone 52923 (TRAV12-2, TRAJ13)
CAVKKTGGYQKVTL

SEQ ID NO: 105846 - protein, 16 aa, Homo sapiens
  CDR3 for beta chain variable domain of TCR clone 52923 (TRBV12-5, TRBJ2-7)
CASGSQGAPTSSTSGR

SEQ ID NO: 105847 - protein, 11 aa, Homo sapiens
  CDR3 for alpha chain variable domain of TCR clone 52924 (TRAV12-3, TRAJ27)
CPMANAGKSTF

SEQ ID NO: 105848 - protein, 13 aa, Homo sapiens
  CDR3 for beta chain variable domain of TCR clone 52924 (TRBV20-1, TRBJ1-1)
CSARVGGNTEAFF

SEQ ID NO: 105849 - protein, 13 aa, Homo sapiens
  CDR3 for alpha chain variable domain of TCR clone 52925 (TRAV1-1, TRAJ23)
CAVVANQGGKLIF

SEQ ID NO: 105850 - protein, 15 aa, Homo sapiens
  CDR3 for beta chain variable domain of TCR clone 52925 (TRBV7-9, TRBJ1-4)
CASSARTGGNEKLFF

SEQ ID NO: 105851 - protein, 14 aa, Homo sapiens
  CDR3 for alpha chain variable domain of TCR clone 52926 (TRAV12-2, TRAJ24)
CAVTPADSWGKLQF

SEQ ID NO: 105852 - protein, 15 aa, Homo sapiens
  CDR3 for beta chain variable domain of TCR clone 52926 (TRBV7-8, TRBJ2-1)
CASSLADSLYNEQFF

SEQ ID NO: 105853 - protein, 15 aa, Homo sapiens
  CDR3 for alpha chain variable domain of TCR clone 52927 (TRAV27, TRAJ38)
CAGRFNAGNNRKRIW

SEQ ID NO: 105854 - protein, 13 aa, Homo sapiens
  CDR3 for beta chain variable domain of TCR clone 52927 (TRBV20-1, TRBJ2-1)
TSGALPPGNEQFF

SEQ ID NO: 105855 - protein, 12 aa, Homo sapiens
  CDR3 for alpha chain variable domain of TCR clone 52928 (TRAV12-3, TRAJ17)
CAMTITGNKLTF

SEQ ID NO: 105856 - protein, 17 aa, Homo sapiens
  CDR3 for beta chain variable domain of TCR clone 52928 (TRBV11-2, TRBJ2-1)
CASSLYPPGVEYNEQFF

SEQ ID NO: 105857 - protein, 15 aa, Homo sapiens
  CDR3 for alpha chain variable domain of TCR clone 52929 (TRAV26-1, TRAJ23)
CIVRVAGYQGGKLIL

SEQ ID NO: 105858 - protein, 18 aa, Homo sapiens
  CDR3 for beta chain variable domain of TCR clone 52929 (TRBV28, TRBJ2-1)
CASSSTSGRANSYNEQFF

SEQ ID NO: 105859 - protein, 15 aa, Homo sapiens
  CDR3 for alpha chain variable domain of TCR clone 52930 (TRAV3, TRAJ22)
CAVRDRGGSARQLTF

SEQ ID NO: 105860 - protein, 12 aa, Homo sapiens
  CDR3 for beta chain variable domain of TCR clone 52930 (TRBV7-2, TRBJ2-1)
CASSPQDIEQFL

SEQ ID NO: 105861 - protein, 14 aa, Homo sapiens
  CDR3 for alpha chain variable domain of TCR clone 52931 (TRAV1-2, TRAJ8)
CAVREDTGFQKLVF

SEQ ID NO: 105862 - protein, 16 aa, Homo sapiens
  CDR3 for beta chain variable domain of TCR clone 52931 (TRBV7-9, TRBJ2-1)
CGSSDVAGGSYNEQFF

SEQ ID NO: 105863 - protein, 18 aa, Homo sapiens
  CDR3 for alpha chain variable domain of TCR clone 52932 (TRAV21, TRAJ52)
CAVRPSPAGGTSYGKLTF

SEQ ID NO: 105864 - protein, 14 aa, Homo sapiens
  CDR3 for beta chain variable domain of TCR clone 52932 (TRBV18, TRBJ1-5)
CASSRQQRNQPQHF

SEQ ID NO: 105865 - protein, 15 aa, Homo sapiens
  CDR3 for alpha chain variable domain of TCR clone 52933 (TRAV13-1, TRAJ17)
CAASIERAAGNKITF

SEQ ID NO: 105866 - protein, 12 aa, Homo sapiens
  CDR3 for beta chain variable domain of TCR clone 52933 (TRBV5-7, TRBJ1-1)
CANSLGRGKAFF

SEQ ID NO: 105867 - protein, 21 aa, Homo sapiens
  CDR3 for alpha chain variable domain of TCR clone 52934 (TRAV30, TRAJ48)
GLPAQLLRNLLLRHWNEKLTF

SEQ ID NO: 105868 - protein, 14 aa, Homo sapiens
  CDR3 for beta chain variable domain of TCR clone 52934 (TRBV7-6, TRBJ2-3)
CASSLGTVTDTQYF

SEQ ID NO: 105869 - protein, 16 aa, Homo sapiens
  CDR3 for alpha chain variable domain of TCR clone 52935 (TRAV20, TRAJ53)
CAVQGNSGGSNYKLTF

SEQ ID NO: 105870 - protein, 14 aa, Homo sapiens
  CDR3 for beta chain variable domain of TCR clone 52935 (TRBV6-5, TRBJ2-7)
CVSSPHRGLREQYF

SEQ ID NO: 105871 - protein, 13 aa, Homo sapiens
  CDR3 for alpha chain variable domain of TCR clone 52936 (TRAV12-3, TRAJ33)
CAMSLNSNYQLIW

SEQ ID NO: 105872 - protein, 13 aa, Homo sapiens
  CDR3 for beta chain variable domain of TCR clone 52936 (TRBV4-1, TRBJ2-2)
CASSQENTGELFF

SEQ ID NO: 105873 - protein, 15 aa, Homo sapiens
  CDR3 for alpha chain variable domain of TCR clone 52937 (TRAV26-1, TRAJ29)
CIVRVEGSGNTPLVF

SEQ ID NO: 105874 - protein, 14 aa, Homo sapiens
  CDR3 for beta chain variable domain of TCR clone 52937 (TRBV18, TRBJ2-5)
CASSPGVSQETQYY

SEQ ID NO: 105875 - protein, 13 aa, Homo sapiens
  CDR3 for alpha chain variable domain of TCR clone 52938 (TRAV12-1, TRAJ39)
CVVPQRAGNMLTF

SEQ ID NO: 105876 - protein, 15 aa, Homo sapiens
  CDR3 for beta chain variable domain of TCR clone 52938 (TRBV6-3, TRBJ2-7)
CASSSPGTVFYEQYF

SEQ ID NO: 105877 - protein, 17 aa, Homo sapiens
  CDR3 for alpha chain variable domain of TCR clone 52939 (TRAV2, TRAJ22)
ILQVREADAAEQSQLTF

SEQ ID NO: 105878 - protein, 16 aa, Homo sapiens
  CDR3 for beta chain variable domain of TCR clone 52939 (TRBV2, TRBJ2-5)
CASSETQGVGEETQYF

SEQ ID NO: 105879 - protein, 13 aa, Homo sapiens
  CDR3 for alpha chain variable domain of TCR clone 52940 (TRAV12-3, TRAJ9)
CAMRNTGGCKTIF

SEQ ID NO: 105880 - protein, 14 aa, Homo sapiens
  CDR3 for beta chain variable domain of TCR clone 52940 (TRBV11-2, TRBJ2-7)
CASSSTGEGYEQYF

SEQ ID NO: 105881 - protein, 18 aa, Homo sapiens
  CDR3 for alpha chain variable domain of TCR clone 52941 (TRAV17, TRAJ45)
CATSLDLYPGGGADGLTF

SEQ ID NO: 105882 - protein, 15 aa, Homo sapiens
  CDR3 for beta chain variable domain of TCR clone 52941 (TRBV11-2, TRBJ2-1)
CASSKNRGLIYEQFF

SEQ ID NO: 105883 - protein, 12 aa, Homo sapiens
  CDR3 for alpha chain variable domain of TCR clone 52942 (TRAV13-1, TRAJ21)
CAAKEGFNKFYF

SEQ ID NO: 105884 - protein, 13 aa, Homo sapiens
  CDR3 for beta chain variable domain of TCR clone 52942 (TRBV27, TRBJ2-7)
CASSLTTGYEQYF

SEQ ID NO: 105885 - protein, 12 aa, Homo sapiens
  CDR3 for alpha chain variable domain of TCR clone 52943 (TRAV21, TRAJ49)
CDVNDGGNQFYF

SEQ ID NO: 105886 - protein, 14 aa, Homo sapiens
  CDR3 for beta chain variable domain of TCR clone 52943 (TRBV18, TRBJ2-7)
CASSPRGGSYEQYF

SEQ ID NO: 105887 - protein, 16 aa, Homo sapiens
  CDR3 for alpha chain variable domain of TCR clone 52944 (TRAV30, TRAJ24)
CGTEIVDADSWGKFQF

SEQ ID NO: 105888 - protein, 15 aa, Homo sapiens
  CDR3 for beta chain variable domain of TCR clone 52944 (TRBV20-1, TRBJ2-7)
CSARDRVTGMDEQYF

SEQ ID NO: 105889 - protein, 13 aa, Homo sapiens
  CDR3 for alpha chain variable domain of TCR clone 52945 (TRAV21, TRAJ57)
CAVIGGGSEKLVF

SEQ ID NO: 105890 - protein, 15 aa, Homo sapiens
  CDR3 for beta chain variable domain of TCR clone 52945 (TRBV10-3, TRBJ2-5)
CAISEFGRGQETQYF

SEQ ID NO: 105891 - protein, 11 aa, Homo sapiens
  CDR3 for alpha chain variable domain of TCR clone 52946 (TRAV13-1, TRAJ20)
CAASNDYKLSF

SEQ ID NO: 105892 - protein, 15 aa, Homo sapiens
  CDR3 for beta chain variable domain of TCR clone 52946 (TRBV28, TRBJ2-1)
CASSIIAGGRSEQFF

SEQ ID NO: 105893 - protein, 16 aa, Homo sapiens
  CDR3 for alpha chain variable domain of TCR clone 52947 (TRAV30, TRAJ24)
CGTEIVDADSWGKFHV

SEQ ID NO: 105894 - protein, 14 aa, Homo sapiens
  CDR3 for beta chain variable domain of TCR clone 52947 (TRBV12-5, TRBJ2-5)
CASGSRTHQETQYF

SEQ ID NO: 105895 - protein, 14 aa, Homo sapiens
  CDR3 for alpha chain variable domain of TCR clone 52948 (TRAV38-1, TRAJ40)
GALRPTSGTYKYIF

SEQ ID NO: 105896 - protein, 14 aa, Homo sapiens
  CDR3 for beta chain variable domain of TCR clone 52948 (TRBV25-1, TRBJ1-1)
CASTHLGGNTEAFF

SEQ ID NO: 105897 - protein, 14 aa, Homo sapiens
  CDR3 for alpha chain variable domain of TCR clone 52949 (TRAV16, TRAJ33)
CALSAMDSNYQLIW

SEQ ID NO: 105898 - protein, 14 aa, Homo sapiens
  CDR3 for beta chain variable domain of TCR clone 52949 (TRBV12-4, TRBJ1-1)
CASSLGTGGTEAFF

SEQ ID NO: 105899 - protein, 14 aa, Homo sapiens
  CDR3 for alpha chain variable domain of TCR clone 52950 (TRAV12-3, TRAJ10)
SHLPLTGGGIKLTF

SEQ ID NO: 105900 - protein, 14 aa, Homo sapiens
  CDR3 for beta chain variable domain of TCR clone 52950 (TRBV6-1, TRBJ1-3)
CASVQGGGGNTIYF

SEQ ID NO: 105901 - protein, 16 aa, Homo sapiens
  CDR3 for alpha chain variable domain of TCR clone 52951 (TRAV27, TRAJ53)
CAAPEGSGGSNDKLTF

SEQ ID NO: 105902 - protein, 15 aa, Homo sapiens
  CDR3 for beta chain variable domain of TCR clone 52951 (TRBV20-1, TRBJ1-1)
CSASRGVTGNTEAFF

SEQ ID NO: 105903 - protein, 16 aa, Homo sapiens
  CDR3 for alpha chain variable domain of TCR clone 52952 (TRAV12-3, TRAJ53)
CAMSPGSGGSNYKLTF

SEQ ID NO: 105904 - protein, 16 aa, Homo sapiens
  CDR3 for beta chain variable domain of TCR clone 52952 (TRBV11-2, TRBJ2-7)
CASSPTTGGVSYEQYF

SEQ ID NO: 105905 - protein, 14 aa, Homo sapiens
  CDR3 for alpha chain variable domain of TCR clone 52953 (TRAV14/DV4, TRAJ49)
CAMREGVNGNQFYF

SEQ ID NO: 105906 - protein, 13 aa, Homo sapiens
  CDR3 for beta chain variable domain of TCR clone 52953 (TRBV18, TRBJ2-7)
CASSRSGSYEQYF

SEQ ID NO: 105907 - protein, 15 aa, Homo sapiens
  CDR3 for alpha chain variable domain of TCR clone 52954 (TRAV3, TRAJ5)
CAVRDLDTGRRALTF

SEQ ID NO: 105908 - protein, 13 aa, Homo sapiens
  CDR3 for beta chain variable domain of TCR clone 52954 (TRBV12-4, TRBJ2-7)
CASSPTETYEQDF

SEQ ID NO: 105909 - protein, 13 aa, Homo sapiens
  CDR3 for alpha chain variable domain of TCR clone 52955 (TRAV20, TRAJ21)
CAVEGYNFNEFYF

SEQ ID NO: 105910 - protein, 14 aa, Homo sapiens
  CDR3 for beta chain variable domain of TCR clone 52955 (TRBV3-1, TRBJ2-5)
CASSQGPDQETQYF

SEQ ID NO: 105911 - protein, 13 aa, Homo sapiens
  CDR3 for alpha chain variable domain of TCR clone 52956 (TRAV12-3, TRAJ33)
CALSVNSNYQLIW

SEQ ID NO: 105912 - protein, 13 aa, Homo sapiens
  CDR3 for beta chain variable domain of TCR clone 52956 (TRBV7-2, TRBJ2-2)
CASSLAVTGELFF

SEQ ID NO: 105913 - protein, 15 aa, Homo sapiens
  CDR3 for alpha chain variable domain of TCR clone 52957 (TRAV17, TRAJ6)
CATDLPSGGSYIHTF

SEQ ID NO: 105914 - protein, 16 aa, Homo sapiens
  CDR3 for beta chain variable domain of TCR clone 52957 (TRBV4-1, TRBJ2-7)
CASSQDPTGYSYEQYF

SEQ ID NO: 105915 - protein, 13 aa, Homo sapiens
  CDR3 for alpha chain variable domain of TCR clone 52958 (TRAV12-2, TRAJ7)
CAVSLYGNNRLAF

SEQ ID NO: 105916 - protein, 14 aa, Homo sapiens
  CDR3 for beta chain variable domain of TCR clone 52958 (TRBV25-1, TRBJ1-2)
CASSEATGPYGYTF

SEQ ID NO: 105917 - protein, 15 aa, Homo sapiens
  CDR3 for alpha chain variable domain of TCR clone 52959 (TRAV26-1, TRAJ29)
CIVRVEGSGNTPLVF

SEQ ID NO: 105918 - protein, 15 aa, Homo sapiens
  CDR3 for beta chain variable domain of TCR clone 52959 (TRBV7-9, TRBJ1-5)
CASSQGLQPNQPQHF

SEQ ID NO: 105919 - protein, 11 aa, Homo sapiens
  CDR3 for alpha chain variable domain of TCR clone 52960 (TRAV12-2, TRAJ39)
CAVNNMLTFGG

SEQ ID NO: 105920 - protein, 16 aa, Homo sapiens
  CDR3 for beta chain variable domain of TCR clone 52960 (TRBV9, TRBJ2-7)
CASSAGPDRSPYEQHF

SEQ ID NO: 105921 - protein, 14 aa, Homo sapiens
  CDR3 for alpha chain variable domain of TCR clone 52961 (TRAV35, TRAJ13)
CAVSPSGGYQKVTF

SEQ ID NO: 105922 - protein, 13 aa, Homo sapiens
  CDR3 for beta chain variable domain of TCR clone 52961 (TRBV29-1, TRBJ1-1)
CSVGDSRNTEAFF

SEQ ID NO: 105923 - protein, 15 aa, Homo sapiens
  CDR3 for alpha chain variable domain of TCR clone 52962 (TRAV8-1, TRAJ6)
CAVNTPPGGSSIPTF

SEQ ID NO: 105924 - protein, 14 aa, Homo sapiens
  CDR3 for beta chain variable domain of TCR clone 52962 (TRBV12-4, TRBJ2-1)
CASSLGQGASEQFF

SEQ ID NO: 105925 - protein, 13 aa, Homo sapiens
  CDR3 for alpha chain variable domain of TCR clone 52963 (TRAV1-2, TRAJ12)
CAVSMDSSYKLIF

SEQ ID NO: 105926 - protein, 15 aa, Homo sapiens
  CDR3 for beta chain variable domain of TCR clone 52963 (TRBV27, TRBJ2-5)
CASSLIPSGGETKYF

SEQ ID NO: 105927 - protein, 14 aa, Homo sapiens
  CDR3 for alpha chain variable domain of TCR clone 52964 (TRAV1-2, TRAJ8)
CAVREDTGSQKLVF

SEQ ID NO: 105928 - protein, 14 aa, Homo sapiens
  CDR3 for beta chain variable domain of TCR clone 52964 (TRBV7-2, TRBJ1-2)
CASSQTGSTYGYTF

SEQ ID NO: 105929 - protein, 16 aa, Homo sapiens
  CDR3 for alpha chain variable domain of TCR clone 52965 (TRAV30, TRAJ24)
CGTESVDADSWGKFQF

SEQ ID NO: 105930 - protein, 12 aa, Homo sapiens
  CDR3 for beta chain variable domain of TCR clone 52965 (TRBV11-2, TRBJ2-2)
CASSLGGGELFF

SEQ ID NO: 105931 - protein, 13 aa, Homo sapiens
  CDR3 for alpha chain variable domain of TCR clone 52966 (TRAV39, TRAJ49)
CAVDRNTGNQFYF

SEQ ID NO: 105932 - protein, 11 aa, Homo sapiens
  CDR3 for beta chain variable domain of TCR clone 52966 (TRBV6-9, TRBJ2-7)
CAGRVASEQYF

SEQ ID NO: 105933 - protein, 18 aa, Homo sapiens
  CDR3 for alpha chain variable domain of TCR clone 52967 (TRAV13-1, TRAJ52)
CAARNPNAGGTSYGKLTF

SEQ ID NO: 105934 - protein, 18 aa, Homo sapiens
  CDR3 for beta chain variable domain of TCR clone 52967 (TRBV4-1, TRBJ1-4)
CASSPRTGGAWTNEKLFF

SEQ ID NO: 105935 - protein, 12 aa, Homo sapiens
  CDR3 for alpha chain variable domain of TCR clone 52968 (TRAV27, TRAJ9)
CAGESGGFTTIF

SEQ ID NO: 105936 - protein, 14 aa, Homo sapiens
  CDR3 for beta chain variable domain of TCR clone 52968 (TRBV6-1, TRBJ2-1)
CASAKDGFYNEQFF

SEQ ID NO: 105937 - protein, 15 aa, Homo sapiens
  CDR3 for alpha chain variable domain of TCR clone 52969 (TRAV12-2, TRAJ32)
CAVNHYGGATNRLIF

SEQ ID NO: 105938 - protein, 14 aa, Homo sapiens
  CDR3 for beta chain variable domain of TCR clone 52969 (TRBV27, TRBJ2-1)
CASSFGREANEQFF

SEQ ID NO: 105939 - protein, 13 aa, Homo sapiens
  CDR3 for alpha chain variable domain of TCR clone 52970 (TRAV8-3, TRAJ28)
CSVGAVGSYQLTF

SEQ ID NO: 105940 - protein, 15 aa, Homo sapiens
  CDR3 for beta chain variable domain of TCR clone 52970 (TRBV28, TRBJ2-5)
CASSPGQGSIETQYF

SEQ ID NO: 105941 - protein, 12 aa, Homo sapiens
  CDR3 for alpha chain variable domain of TCR clone 52971 (TRAV21, TRAJ39)
CAADNAGNTLTF

SEQ ID NO: 105942 - protein, 13 aa, Homo sapiens
  CDR3 for beta chain variable domain of TCR clone 52971 (TRBV12-4, TRBJ1-1)
CASSPGTGFEAFF

SEQ ID NO: 105943 - protein, 11 aa, Homo sapiens
  CDR3 for alpha chain variable domain of TCR clone 52972 (TRAV2, TRAJ21)
CAVFNFTKFYF

SEQ ID NO: 105944 - protein, 14 aa, Homo sapiens
  CDR3 for beta chain variable domain of TCR clone 52972 (TRBV15, TRBJ2-3)
CATRSGTSTDTQYF

SEQ ID NO: 105945 - protein, 18 aa, Homo sapiens
  CDR3 for alpha chain variable domain of TCR clone 52973 (TRAV17, TRAJ28)
CATDPPRGSGAGSYQLTL

SEQ ID NO: 105946 - protein, 14 aa, Homo sapiens
  CDR3 for beta chain variable domain of TCR clone 52973 (TRBV13, TRBJ2-5)
CASSLDYPQETQYF

SEQ ID NO: 105947 - protein, 14 aa, Homo sapiens
  CDR3 for alpha chain variable domain of TCR clone 52974 (TRAV1-2, TRAJ33)
CAVRAPDSNHQLIW

SEQ ID NO: 105948 - protein, 15 aa, Homo sapiens
  CDR3 for beta chain variable domain of TCR clone 52974 (TRBV10-3, TRBJ2-3)
CAISLTSGGTDTQYF

SEQ ID NO: 105949 - protein, 14 aa, Homo sapiens
  CDR3 for alpha chain variable domain of TCR clone 52975 (TRAV29/DV5, TRAJ36)
CAARRKTGANNLFF

SEQ ID NO: 105950 - protein, 14 aa, Homo sapiens
  CDR3 for beta chain variable domain of TCR clone 52975 (TRBV7-2, TRBJ2-7)
CASSPKTSFYEQYF

SEQ ID NO: 105951 - protein, 13 aa, Homo sapiens
  CDR3 for alpha chain variable domain of TCR clone 52976 (TRAV9-2, TRAJ31)
CALTSVENARLMF

SEQ ID NO: 105952 - protein, 12 aa, Homo sapiens
  CDR3 for beta chain variable domain of TCR clone 52976 (TRBV29-1, TRBJ2-7)
CSVGPSGDEQYF

SEQ ID NO: 105953 - protein, 14 aa, Homo sapiens
  CDR3 for alpha chain variable domain of TCR clone 52977 (TRAV38-1, TRAJ29)
CDFITPSGNTPLVF

SEQ ID NO: 105954 - protein, 14 aa, Homo sapiens
  CDR3 for beta chain variable domain of TCR clone 52977 (TRBV18, TRBJ2-7)
CASSPRGGAYEQYF

SEQ ID NO: 105955 - protein, 14 aa, Homo sapiens
  CDR3 for alpha chain variable domain of TCR clone 52978 (TRAV12-2, TRAJ40)
CAVKIPSGTYKYIF

SEQ ID NO: 105956 - protein, 14 aa, Homo sapiens
  CDR3 for beta chain variable domain of TCR clone 52978 (TRBV20-1, TRBJ1-1)
CSAQTRIRGTEAFF

SEQ ID NO: 105957 - protein, 11 aa, Homo sapiens
  CDR3 for alpha chain variable domain of TCR clone 52979 (TRAV12-3, TRAJ27)
CAMANAGKSTF

SEQ ID NO: 105958 - protein, 13 aa, Homo sapiens
  CDR3 for beta chain variable domain of TCR clone 52979 (TRBV20-1, TRBJ1-1)
CSARGGGNTEAFF

SEQ ID NO: 105959 - protein, 13 aa, Homo sapiens
  CDR3 for alpha chain variable domain of TCR clone 52980 (TRAV35, TRAJ42)
CAGFPGSQGNLIF

SEQ ID NO: 105960 - protein, 14 aa, Homo sapiens
  CDR3 for beta chain variable domain of TCR clone 52980 (TRBV4-1, TRBJ2-2)
CANSQAVNTGELFF

SEQ ID NO: 105961 - protein, 16 aa, Homo sapiens
  CDR3 for alpha chain variable domain of TCR clone 52981 (TRAV3, TRAJ37)
CAVRGKGPGNTGKLIF

SEQ ID NO: 105962 - protein, 15 aa, Homo sapiens
  CDR3 for beta chain variable domain of TCR clone 52981 (TRBV20-1, TRBJ2-1)
CSARGGTRYYNEQFF

SEQ ID NO: 105963 - protein, 13 aa, Homo sapiens
  CDR3 for alpha chain variable domain of TCR clone 52982 (TRAV35, TRAJ20)
CAGPLSNDYKLGF

SEQ ID NO: 105964 - protein, 14 aa, Homo sapiens
  CDR3 for beta chain variable domain of TCR clone 52982 (TRBV9, TRBJ2-7)
CASSVGVGSYEQYF

SEQ ID NO: 105965 - protein, 11 aa, Homo sapiens
  CDR3 for alpha chain variable domain of TCR clone 52983 (TRAV2, TRAJ21)
CAVFNFNKFYF

SEQ ID NO: 105966 - protein, 14 aa, Homo sapiens
  CDR3 for beta chain variable domain of TCR clone 52983 (TRBV15, TRBJ2-3)
CATRSVTSTDTQYF

SEQ ID NO: 105967 - protein, 14 aa, Homo sapiens
  CDR3 for alpha chain variable domain of TCR clone 52984 (TRAV1-2, TRAJ8)
CAVREGTGFQKLVF

SEQ ID NO: 105968 - protein, 17 aa, Homo sapiens
  CDR3 for beta chain variable domain of TCR clone 52984 (TRBV11-3, TRBJ2-1)
CASSLYPPGVEYNEQFF

SEQ ID NO: 105969 - protein, 14 aa, Homo sapiens
  CDR3 for alpha chain variable domain of TCR clone 52985 (TRAV8-2, TRAJ11)
CVVSEKSGCSTLTL

SEQ ID NO: 105970 - protein, 16 aa, Homo sapiens
  CDR3 for beta chain variable domain of TCR clone 52985 (TRBV28, TRBJ2-1)
CASSSPEYPRDNEQFF

SEQ ID NO: 105971 - protein, 13 aa, Homo sapiens
  CDR3 for alpha chain variable domain of TCR clone 52986 (TRAV12-2, TRAJ6)
CAVNVSRKLHTYI

SEQ ID NO: 105972 - protein, 12 aa, Homo sapiens
  CDR3 for beta chain variable domain of TCR clone 52986 (TRBV29-1, TRBJ2-3)
CSVTGGANTQYF

SEQ ID NO: 105973 - protein, 14 aa, Homo sapiens
  CDR3 for alpha chain variable domain of TCR clone 52987 (TRAV29/DV5, TRAJ48)
CAAMALFGNEKLTF

SEQ ID NO: 105974 - protein, 15 aa, Homo sapiens
  CDR3 for beta chain variable domain of TCR clone 52987 (TRBV7-2, TRBJ2-1)
CASTHGTGIYNEQFL

SEQ ID NO: 105975 - protein, 14 aa, Homo sapiens
  CDR3 for alpha chain variable domain of TCR clone 52988 (TRAV1-2, TRAJ15)
CAVRDRQAGTALIF

SEQ ID NO: 105976 - protein, 13 aa, Homo sapiens
  CDR3 for beta chain variable domain of TCR clone 52988 (TRBV7-9, TRBJ1-2)
CASSLKQNYGYTF

SEQ ID NO: 105977 - protein, 14 aa, Homo sapiens
  CDR3 for alpha chain variable domain of TCR clone 52989 (TRAV17, TRAJ57)
CATDPQGGSEKLVF

SEQ ID NO: 105978 - protein, 14 aa, Homo sapiens
  CDR3 for beta chain variable domain of TCR clone 52989 (TRBV18, TRBJ2-5)
CASSPGVSQETQYF

SEQ ID NO: 105979 - protein, 13 aa, Homo sapiens
  CDR3 for alpha chain variable domain of TCR clone 52990 (TRAV13-1, TRAJ8)
CAARNTGFQKLVF

SEQ ID NO: 105980 - protein, 13 aa, Homo sapiens
  CDR3 for beta chain variable domain of TCR clone 52990 (TRBV19, TRBJ2-7)
CASSMGSWPDQYF

SEQ ID NO: 105981 - protein, 16 aa, Homo sapiens
  CDR3 for alpha chain variable domain of TCR clone 52991 (TRAV30, TRAJ24)
CGTEIVDADSWGKFKF

SEQ ID NO: 105982 - protein, 14 aa, Homo sapiens
  CDR3 for beta chain variable domain of TCR clone 52991 (TRBV20-1, TRBJ1-1)
CSAQTRIGGTEAFF

SEQ ID NO: 105983 - protein, 16 aa, Homo sapiens
  CDR3 for alpha chain variable domain of TCR clone 52992 (TRAV30, TRAJ24)
CGTEIVDADSWGKFQF

SEQ ID NO: 105984 - protein, 14 aa, Homo sapiens
  CDR3 for beta chain variable domain of TCR clone 52992 (TRBV12-5, TRBJ2-5)
CASGSRTHQGIQYF

SEQ ID NO: 105985 - protein, 15 aa, Homo sapiens
  CDR3 for alpha chain variable domain of TCR clone 52993 (TRAV8-3, TRAJ45)
CASSYSGGGADGLTF

SEQ ID NO: 105986 - protein, 18 aa, Homo sapiens
  CDR3 for beta chain variable domain of TCR clone 52993 (TRBV18, TRBJ1-3)
CASSPRGGAGPSGNTICF

SEQ ID NO: 105987 - protein, 15 aa, Homo sapiens
  CDR3 for alpha chain variable domain of TCR clone 52994 (TRAV26-1, TRAJ22)
CIVRVSFWFCKATDL

SEQ ID NO: 105988 - protein, 14 aa, Homo sapiens
  CDR3 for beta chain variable domain of TCR clone 52994 (TRBV7-2, TRBJ1-3)
CASSRLRSGNTIYF

SEQ ID NO: 105989 - protein, 12 aa, Homo sapiens
  CDR3 for alpha chain variable domain of TCR clone 52995 (TRAV12-3, TRAJ17)
CAMTLAGNKLTF

SEQ ID NO: 105990 - protein, 12 aa, Homo sapiens
  CDR3 for beta chain variable domain of TCR clone 52995 (TRBV2, TRBJ2-1)
CAYGPPGNEQFF

SEQ ID NO: 105991 - protein, 14 aa, Homo sapiens
  CDR3 for alpha chain variable domain of TCR clone 52996 (TRAV16, TRAJ32)
CALKSGGATNKLIF

SEQ ID NO: 105992 - protein, 14 aa, Homo sapiens
  CDR3 for beta chain variable domain of TCR clone 52996 (TRBV19, TRBJ1-3)
CASSIGGSGNTIYF

SEQ ID NO: 105993 - protein, 16 aa, Homo sapiens
  CDR3 for alpha chain variable domain of TCR clone 52997 (TRAV26-2, TRAJ37)
CILRDFGSSNTGKLIF

SEQ ID NO: 105994 - protein, 15 aa, Homo sapiens
  CDR3 for beta chain variable domain of TCR clone 52997 (TRBV6-5, TRBJ2-7)
CACRSLAVSSYEQYF

SEQ ID NO: 105995 - protein, 14 aa, Homo sapiens
  CDR3 for alpha chain variable domain of TCR clone 52998 (TRAV1-2, TRAJ8)
CAVREDTGFQKLVF

SEQ ID NO: 105996 - protein, 15 aa, Homo sapiens
  CDR3 for beta chain variable domain of TCR clone 52998 (TRBV6-3, TRBJ2-7)
RDSSSPGTVFYEQYF

SEQ ID NO: 105997 - protein, 14 aa, Homo sapiens
  CDR3 for alpha chain variable domain of TCR clone 52999 (TRAV26-1, TRAJ45)
CIEVTGGGADGLTF

SEQ ID NO: 105998 - protein, 13 aa, Homo sapiens
  CDR3 for beta chain variable domain of TCR clone 52999 (TRBV12-4, TRBJ1-2)
CASSLRQGKGYTF

SEQ ID NO: 105999 - protein, 15 aa, Homo sapiens
  CDR3 for alpha chain variable domain of TCR clone 53000 (TRAV35, TRAJ40)
FAGQLWDSGTYKYIF

SEQ ID NO: 106000 - protein, 12 aa, Homo sapiens
  CDR3 for beta chain variable domain of TCR clone 53000 (TRBV7-8, TRBJ2-7)
CASSLAGYEQYF

SEQ ID NO: 106001 - protein, 14 aa, Homo sapiens
  CDR3 for alpha chain variable domain of TCR clone 53001 (TRAV3, TRAJ17)
CAVRDATAGNKLTF

SEQ ID NO: 106002 - protein, 13 aa, Homo sapiens
  CDR3 for beta chain variable domain of TCR clone 53001 (TRBV2, TRBJ1-1)
CASSVSGYTEAFF

SEQ ID NO: 106003 - protein, 16 aa, Homo sapiens
  CDR3 for alpha chain variable domain of TCR clone 53002 (TRAV8-3, TRAJ13)
CAVGAYPSGGYQKVTF

SEQ ID NO: 106004 - protein, 16 aa, Homo sapiens
  CDR3 for beta chain variable domain of TCR clone 53002 (TRBV12-4, TRBJ2-5)
CASSFFVRGRQETQYF

SEQ ID NO: 106005 - protein, 14 aa, Homo sapiens
  CDR3 for alpha chain variable domain of TCR clone 53003 (TRAV1-2, TRAJ8)
CAVREDTDFQKLVF

SEQ ID NO: 106006 - protein, 15 aa, Homo sapiens
  CDR3 for beta chain variable domain of TCR clone 53003 (TRBV28, TRBJ2-6)
CASSLAGSGANVLTF

SEQ ID NO: 106007 - protein, 15 aa, Homo sapiens
  CDR3 for alpha chain variable domain of TCR clone 53004 (TRAV6, TRAJ4)
CALGGFSGGYNKLIF

SEQ ID NO: 106008 - protein, 14 aa, Homo sapiens
  CDR3 for beta chain variable domain of TCR clone 53004 (TRBV2, TRBJ2-1)
CASGVGRSGNEQFF

SEQ ID NO: 106009 - protein, 14 aa, Homo sapiens
  CDR3 for alpha chain variable domain of TCR clone 53005 (TRAV8-4, TRAJ13)
CAVTLSGGYRKVTF

SEQ ID NO: 106010 - protein, 16 aa, Homo sapiens
  CDR3 for beta chain variable domain of TCR clone 53005 (TRBV19, TRBJ2-2)
CASRSPGTGATGELFF

SEQ ID NO: 106011 - protein, 13 aa, Homo sapiens
  CDR3 for alpha chain variable domain of TCR clone 53006 (TRAV12-3, TRAJ13)
CAMTSGGYQKVTF

SEQ ID NO: 106012 - protein, 15 aa, Homo sapiens
  CDR3 for beta chain variable domain of TCR clone 53006 (TRBV4-1, TRBJ2-3)
CASSQVLAGGDTQYF

SEQ ID NO: 106013 - protein, 14 aa, Homo sapiens
  CDR3 for alpha chain variable domain of TCR clone 53007 (TRAV1-2, TRAJ8)
CAVRGDTGFQKLVF

SEQ ID NO: 106014 - protein, 12 aa, Homo sapiens
  CDR3 for beta chain variable domain of TCR clone 53007 (TRBV11-2, TRBJ2-2)
CASRLGGGELFF

SEQ ID NO: 106015 - protein, 20 aa, Homo sapiens
  CDR3 for alpha chain variable domain of TCR clone 53008 (TRAV21, TRAJ4)
AASQPGDSATFAGGYNKLIF

SEQ ID NO: 106016 - protein, 19 aa, Homo sapiens
  CDR3 for beta chain variable domain of TCR clone 53008 (TRBV18, TRBJ1-3)
CASSPLSRTGMSSGNTIYF

SEQ ID NO: 106017 - protein, 13 aa, Homo sapiens
  CDR3 for alpha chain variable domain of TCR clone 53009 (TRAV20, TRAJ42)
CAVQGGSQGNLIF

SEQ ID NO: 106018 - protein, 14 aa, Homo sapiens
  CDR3 for beta chain variable domain of TCR clone 53009 (TRBV11-2, TRBJ2-3)
CASSLGRGTDTQYF

SEQ ID NO: 106019 - protein, 14 aa, Homo sapiens
  CDR3 for alpha chain variable domain of TCR clone 53010 (TRAV1-2, TRAJ8)
CAVREDTGFQKLVF

SEQ ID NO: 106020 - protein, 16 aa, Homo sapiens
  CDR3 for beta chain variable domain of TCR clone 53010 (TRBV10-3, TRBJ2-1)
CAIRGGGRGDYNEQFF

SEQ ID NO: 106021 - protein, 15 aa, Homo sapiens
  CDR3 for alpha chain variable domain of TCR clone 53011 (TRAV8-6, TRAJ8)
CAVSDWNTGFQKLVF

SEQ ID NO: 106022 - protein, 13 aa, Homo sapiens
  CDR3 for beta chain variable domain of TCR clone 53011 (TRBV19, TRBJ1-2)
CASSQGQVYGYTF

SEQ ID NO: 106023 - protein, 13 aa, Homo sapiens
  CDR3 for alpha chain variable domain of TCR clone 53012 (TRAV8-6, TRAJ49)
CAVITNTGNQFYL

SEQ ID NO: 106024 - protein, 13 aa, Homo sapiens
  CDR3 for beta chain variable domain of TCR clone 53012 (TRBV7-9, TRBJ1-2)
CASSLKQNYGYTF

SEQ ID NO: 106025 - protein, 13 aa, Homo sapiens
  CDR3 for alpha chain variable domain of TCR clone 53013 (TRAV23/DV6, TRAJ22)
CAPYSGSARQLTF

SEQ ID NO: 106026 - protein, 15 aa, Homo sapiens
  CDR3 for beta chain variable domain of TCR clone 53013 (TRBV11-2, TRBJ1-6)
CASSLDPGAVSPLHF

SEQ ID NO: 106027 - protein, 13 aa, Homo sapiens
  CDR3 for alpha chain variable domain of TCR clone 53014 (TRAV17, TRAJ29)
CATDAFRKHTSCL

SEQ ID NO: 106028 - protein, 13 aa, Homo sapiens
  CDR3 for beta chain variable domain of TCR clone 53014 (TRBV5-7, TRBJ2-6)
CASTSSGANVPTF

SEQ ID NO: 106029 - protein, 14 aa, Homo sapiens
  CDR3 for alpha chain variable domain of TCR clone 53015 (TRAV12-3, TRAJ57)
CAISAWGGSEKLVF

SEQ ID NO: 106030 - protein, 14 aa, Homo sapiens
  CDR3 for beta chain variable domain of TCR clone 53015 (TRBV18, TRBJ2-5)
CASSPGVSQETQYF

SEQ ID NO: 106031 - protein, 10 aa, Homo sapiens
  CDR3 for alpha chain variable domain of TCR clone 53016 (TRAV1-2, TRAJ23)
CAGQGGKLIF

SEQ ID NO: 106032 - protein, 14 aa, Homo sapiens
  CDR3 for beta chain variable domain of TCR clone 53016 (TRBV12-5, TRBJ2-5)
CASGSRTHQETQYF

SEQ ID NO: 106033 - protein, 15 aa, Homo sapiens
  CDR3 for alpha chain variable domain of TCR clone 53017 (TRAV8-3, TRAJ11)
CAVGLLNSGYSTLTF

SEQ ID NO: 106034 - protein, 15 aa, Homo sapiens
  CDR3 for beta chain variable domain of TCR clone 53017 (TRBV7-9, TRBJ1-6)
CASSSPGRGNSPLHF

SEQ ID NO: 106035 - protein, 14 aa, Homo sapiens
  CDR3 for alpha chain variable domain of TCR clone 53018 (TRAV13-1, TRAJ44)
CAAKAIGTASKLTF

SEQ ID NO: 106036 - protein, 13 aa, Homo sapiens
  CDR3 for beta chain variable domain of TCR clone 53018 (TRBV5-5, TRBJ1-2)
CASSFWRGEDYTF

SEQ ID NO: 106037 - protein, 11 aa, Homo sapiens
  CDR3 for alpha chain variable domain of TCR clone 53019 (TRAV12-3, TRAJ27)
CAMAYAGKSTF

SEQ ID NO: 106038 - protein, 14 aa, Homo sapiens
  CDR3 for beta chain variable domain of TCR clone 53019 (TRBV12-5, TRBJ2-5)
CASGSRTHQETQYF

SEQ ID NO: 106039 - protein, 12 aa, Homo sapiens
  CDR3 for alpha chain variable domain of TCR clone 53020 (TRAV17, TRAJ57)
CATDGGSEKLVL

SEQ ID NO: 106040 - protein, 12 aa, Homo sapiens
  CDR3 for beta chain variable domain of TCR clone 53020 (TRBV29-1, TRBJ2-2)
CSVDKYTGELFF

SEQ ID NO: 106041 - protein, 11 aa, Homo sapiens
  CDR3 for alpha chain variable domain of TCR clone 53021 (TRAV12-1, TRAJ33)
CVVNMNYQLIW

SEQ ID NO: 106042 - protein, 15 aa, Homo sapiens
  CDR3 for beta chain variable domain of TCR clone 53021 (TRBV7-2, TRBJ2-1)
CASSSGLAGGNEQFF

SEQ ID NO: 106043 - protein, 17 aa, Homo sapiens
  CDR3 for alpha chain variable domain of TCR clone 53022 (TRAV3, TRAJ28)
CAVREAYSGAGSHQLTF

SEQ ID NO: 106044 - protein, 18 aa, Homo sapiens
  CDR3 for beta chain variable domain of TCR clone 53022 (TRBV27, TRBJ2-1)
CASGNRAVGVGSKNEQFF

SEQ ID NO: 106045 - protein, 13 aa, Homo sapiens
  CDR3 for alpha chain variable domain of TCR clone 53023 (TRAV35, TRAJ36)
CAGPRIGANNLSF

SEQ ID NO: 106046 - protein, 15 aa, Homo sapiens
  CDR3 for beta chain variable domain of TCR clone 53023 (TRBV28, TRBJ2-5)
CASSPPWSYQETQYF

SEQ ID NO: 106047 - protein, 12 aa, Homo sapiens
  CDR3 for alpha chain variable domain of TCR clone 53024 (TRAV12-3, TRAJ17)
CAMTLTCNKLTF

SEQ ID NO: 106048 - protein, 13 aa, Homo sapiens
  CDR3 for beta chain variable domain of TCR clone 53024 (TRBV7-3, TRBJ1-1)
CASSQDWGAEAFF

SEQ ID NO: 106049 - protein, 10 aa, Homo sapiens
  CDR3 for alpha chain variable domain of TCR clone 53025 (TRAV8-2, TRAJ29)
CTGGSTPLVF

SEQ ID NO: 106050 - protein, 17 aa, Homo sapiens
  CDR3 for beta chain variable domain of TCR clone 53025 (TRBV2, TRBJ2-7)
CASSQALTGWDSYEQYF

SEQ ID NO: 106051 - protein, 13 aa, Homo sapiens
  CDR3 for alpha chain variable domain of TCR clone 53026 (TRAV8-2, TRAJ15)
CVVRNQAGTALIF

SEQ ID NO: 106052 - protein, 13 aa, Homo sapiens
  CDR3 for beta chain variable domain of TCR clone 53026 (TRBV12-5, TRBJ2-3)
CASGDRQSDTQYF

SEQ ID NO: 106053 - protein, 12 aa, Homo sapiens
  CDR3 for alpha chain variable domain of TCR clone 53027 (TRAV17, TRAJ30)
CVPERRDDKIIF

SEQ ID NO: 106054 - protein, 13 aa, Homo sapiens
  CDR3 for beta chain variable domain of TCR clone 53027 (TRBV2, TRBJ1-1)
CARNPTGGFHAFF

SEQ ID NO: 106055 - protein, 16 aa, Homo sapiens
  CDR3 for alpha chain variable domain of TCR clone 53028 (TRAV8-4, TRAJ5)
CAVSPLADTGRRALTF

SEQ ID NO: 106056 - protein, 14 aa, Homo sapiens
  CDR3 for beta chain variable domain of TCR clone 53028 (TRBV19, TRBJ1-6)
CASSTDGWNSPLHF

SEQ ID NO: 106057 - protein, 14 aa, Homo sapiens
  CDR3 for alpha chain variable domain of TCR clone 53029 (TRAV34, TRAJ44)
CGADGTGTASKLTF

SEQ ID NO: 106058 - protein, 15 aa, Homo sapiens
  CDR3 for beta chain variable domain of TCR clone 53029 (TRBV5-1, TRBJ2-1)
GASSPPRAPYNEQFF

SEQ ID NO: 106059 - protein, 14 aa, Homo sapiens
  CDR3 for alpha chain variable domain of TCR clone 53030 (TRAV17, TRAJ45)
CVTASGGGADGLTF

SEQ ID NO: 106060 - protein, 15 aa, Homo sapiens
  CDR3 for beta chain variable domain of TCR clone 53030 (TRBV11-2, TRBJ2-1)
CASSRNRGLMYEQFF

SEQ ID NO: 106061 - protein, 16 aa, Homo sapiens
  CDR3 for alpha chain variable domain of TCR clone 53031 (TRAV30, TRAJ24)
CGTEIVDTDSWGKFQF

SEQ ID NO: 106062 - protein, 12 aa, Homo sapiens
  CDR3 for beta chain variable domain of TCR clone 53031 (TRBV11-2, TRBJ2-2)
CASSLPTGELFF

SEQ ID NO: 106063 - protein, 12 aa, Homo sapiens
  CDR3 for alpha chain variable domain of TCR clone 53032 (TRAV17, TRAJ12)
CATLRSSYKLIF

SEQ ID NO: 106064 - protein, 17 aa, Homo sapiens
  CDR3 for beta chain variable domain of TCR clone 53032 (TRBV7-8, TRBJ2-6)
CASSAGTGGAGANVLTF

SEQ ID NO: 106065 - protein, 14 aa, Homo sapiens
  CDR3 for alpha chain variable domain of TCR clone 53033 (TRAV9-2, TRAJ39)
RALYIYNAGNMLTF

SEQ ID NO: 106066 - protein, 13 aa, Homo sapiens
  CDR3 for beta chain variable domain of TCR clone 53033 (TRBV20-1, TRBJ1-1)
CSAGTVGNTEAFF

SEQ ID NO: 106067 - protein, 14 aa, Homo sapiens
  CDR3 for alpha chain variable domain of TCR clone 53034 (TRAV12-2, TRAJ6)
CASKWGGGSYIPTF

SEQ ID NO: 106068 - protein, 13 aa, Homo sapiens
  CDR3 for beta chain variable domain of TCR clone 53034 (TRBV2, TRBJ1-1)
CAGSEGGNTEAFF

SEQ ID NO: 106069 - protein, 15 aa, Homo sapiens
  CDR3 for alpha chain variable domain of TCR clone 53035 (TRAV26-1, TRAJ44)
CIVRANTGTASKLTF

SEQ ID NO: 106070 - protein, 16 aa, Homo sapiens
  CDR3 for beta chain variable domain of TCR clone 53035 (TRBV7-6, TRBJ2-1)
CASSLASGTSYNEQFF

SEQ ID NO: 106071 - protein, 15 aa, Homo sapiens
  CDR3 for alpha chain variable domain of TCR clone 53036 (TRAV12-3, TRAJ6)
CAMSATSGRSYIPTF

SEQ ID NO: 106072 - protein, 11 aa, Homo sapiens
  CDR3 for beta chain variable domain of TCR clone 53036 (TRBV20-1, TRBJ1-5)
CSAQGDQPQHF

SEQ ID NO: 106073 - protein, 12 aa, Homo sapiens
  CDR3 for alpha chain variable domain of TCR clone 53037 (TRAV2, TRAJ31)
CAVEDNKARLMF

SEQ ID NO: 106074 - protein, 11 aa, Homo sapiens
  CDR3 for beta chain variable domain of TCR clone 53037 (TRBV11-2, TRBJ1-1)
CASSINTEAFF

SEQ ID NO: 106075 - protein, 16 aa, Homo sapiens
  CDR3 for alpha chain variable domain of TCR clone 53038 (TRAV4, TRAJ22)
CLVGDLYSGSARQLTF

SEQ ID NO: 106076 - protein, 16 aa, Homo sapiens
  CDR3 for beta chain variable domain of TCR clone 53038 (TRBV7-9, TRBJ2-3)
CASSPWREVGTDTHYF

SEQ ID NO: 106077 - protein, 14 aa, Homo sapiens
  CDR3 for alpha chain variable domain of TCR clone 53039 (TRAV1-2, TRAJ16)
CAVNRFSDGQKLLF

SEQ ID NO: 106078 - protein, 14 aa, Homo sapiens
  CDR3 for beta chain variable domain of TCR clone 53039 (TRBV18, TRBJ2-7)
RASSPRGGAYEQYF

SEQ ID NO: 106079 - protein, 12 aa, Homo sapiens
  CDR3 for alpha chain variable domain of TCR clone 53040 (TRAV36/DV7, TRAJ54)
CAVVRGAQKLVF

SEQ ID NO: 106080 - protein, 14 aa, Homo sapiens
  CDR3 for beta chain variable domain of TCR clone 53040 (TRBV7-3, TRBJ1-1)
CASSLKGGNAEAFF

SEQ ID NO: 106081 - protein, 13 aa, Homo sapiens
  CDR3 for alpha chain variable domain of TCR clone 53041 (TRAV1-2, TRAJ23)
CAVRDRQGGKLIF

SEQ ID NO: 106082 - protein, 14 aa, Homo sapiens
  CDR3 for beta chain variable domain of TCR clone 53041 (TRBV7-9, TRBJ2-7)
CASSLSQGSYEQYF

SEQ ID NO: 106083 - protein, 12 aa, Homo sapiens
  CDR3 for alpha chain variable domain of TCR clone 53042 (TRAV3, TRAJ27)
CAVRDGAGKSTF

SEQ ID NO: 106084 - protein, 13 aa, Homo sapiens
  CDR3 for beta chain variable domain of TCR clone 53042 (TRBV10-3, TRBJ1-2)
CAINADPNYGYTF

SEQ ID NO: 106085 - protein, 15 aa, Homo sapiens
  CDR3 for alpha chain variable domain of TCR clone 53043 (TRAV8-4, TRAJ37)
CAVTYGSSNTGKLIF

SEQ ID NO: 106086 - protein, 13 aa, Homo sapiens
  CDR3 for beta chain variable domain of TCR clone 53043 (TRBV12-4, TRBJ2-5)
CASSLGGSRTQYS

SEQ ID NO: 106087 - protein, 12 aa, Homo sapiens
  CDR3 for alpha chain variable domain of TCR clone 53044 (TRAV13-1, TRAJ21)
CAAKEGFNKFYF

SEQ ID NO: 106088 - protein, 12 aa, Homo sapiens
  CDR3 for beta chain variable domain of TCR clone 53044 (TRBV12-4, TRBJ2-7)
CASSLGGYEQYF

SEQ ID NO: 106089 - protein, 11 aa, Homo sapiens
  CDR3 for alpha chain variable domain of TCR clone 53045 (TRAV6, TRAJ31)
CALRDNARPMF

SEQ ID NO: 106090 - protein, 12 aa, Homo sapiens
  CDR3 for beta chain variable domain of TCR clone 53045 (TRBV11-2, TRBJ2-2)
CASSLGGGELFF

SEQ ID NO: 106091 - protein, 12 aa, Homo sapiens
  CDR3 for alpha chain variable domain of TCR clone 53046 (TRAV13-1, TRAJ21)
CAAKEGFSKFYF

SEQ ID NO: 106092 - protein, 14 aa, Homo sapiens
  CDR3 for beta chain variable domain of TCR clone 53046 (TRBV18, TRBJ2-7)
CASSPRGGAYEQYF

SEQ ID NO: 106093 - protein, 12 aa, Homo sapiens
  CDR3 for alpha chain variable domain of TCR clone 53047 (TRAV8-3, TRAJ26)
CAGDNYGQNFVF

SEQ ID NO: 106094 - protein, 14 aa, Homo sapiens
  CDR3 for beta chain variable domain of TCR clone 53047 (TRBV20-1, TRBJ2-3)
CSARGGTSTDTQYF

SEQ ID NO: 106095 - protein, 15 aa, Homo sapiens
  CDR3 for alpha chain variable domain of TCR clone 53048 (TRAV17, TRAJ57)
CATGPSQGGSEKLVF

SEQ ID NO: 106096 - protein, 16 aa, Homo sapiens
  CDR3 for beta chain variable domain of TCR clone 53048 (TRBV12-4, TRBJ1-5)
CASSRPVGVSNQPQHF

SEQ ID NO: 106097 - protein, 15 aa, Homo sapiens
  CDR3 for alpha chain variable domain of TCR clone 53049 (TRAV3, TRAJ22)
CAVRDRGGSARQLTF

SEQ ID NO: 106098 - protein, 14 aa, Homo sapiens
  CDR3 for beta chain variable domain of TCR clone 53049 (TRBV4-1, TRBJ2-7)
CASRLTSGSYEQYF

SEQ ID NO: 106099 - protein, 13 aa, Homo sapiens
  CDR3 for alpha chain variable domain of TCR clone 53050 (TRAV23/DV6, TRAJ22)
CAASSGSARQLTF

SEQ ID NO: 106100 - protein, 16 aa, Homo sapiens
  CDR3 for beta chain variable domain of TCR clone 53050 (TRBV19, TRBJ2-2)
CASRSPGTGATGEPFF

SEQ ID NO: 106101 - protein, 17 aa, Homo sapiens
  CDR3 for alpha chain variable domain of TCR clone 53051 (TRAV23/DV6, TRAJ58)
CAARLLRGETGGSRLTF

SEQ ID NO: 106102 - protein, 13 aa, Homo sapiens
  CDR3 for beta chain variable domain of TCR clone 53051 (TRBV6-4, TRBJ1-5)
CASSADLNQPQHF

SEQ ID NO: 106103 - protein, 11 aa, Homo sapiens
  CDR3 for alpha chain variable domain of TCR clone 53052 (TRAV13-1, TRAJ39)
CAPHAGNMLTF

SEQ ID NO: 106104 - protein, 15 aa, Homo sapiens
  CDR3 for beta chain variable domain of TCR clone 53052 (TRBV20-1, TRBJ2-7)
CSARDRVSGMDEQYF

SEQ ID NO: 106105 - protein, 12 aa, Homo sapiens
  CDR3 for alpha chain variable domain of TCR clone 53053 (TRAV8-6, TRAJ8)
CAVTPGFQKLVF

SEQ ID NO: 106106 - protein, 16 aa, Homo sapiens
  CDR3 for beta chain variable domain of TCR clone 53053 (TRBV7-3, TRBJ2-2)
CASSLKRGTLPGELFF

SEQ ID NO: 106107 - protein, 12 aa, Homo sapiens
  CDR3 for alpha chain variable domain of TCR clone 53054 (TRAV23/DV6, )
CADIQNPDPAVY

SEQ ID NO: 106108 - protein, 13 aa, Homo sapiens
  CDR3 for beta chain variable domain of TCR clone 53054 (TRBV28, TRBJ2-7)
CASRSSGVYEQYF

SEQ ID NO: 106109 - protein, 13 aa, Homo sapiens
  CDR3 for alpha chain variable domain of TCR clone 53055 (TRAV8-3, TRAJ20)
CAVDRPNDYKLSF

SEQ ID NO: 106110 - protein, 14 aa, Homo sapiens
  CDR3 for beta chain variable domain of TCR clone 53055 (TRBV12-5, TRBJ2-5)
CASGSRTHQETQYF

SEQ ID NO: 106111 - protein, 16 aa, Homo sapiens
  CDR3 for alpha chain variable domain of TCR clone 53056 (TRAV12-2, TRAJ18)
CAVTTDRGSTLGRRYF

SEQ ID NO: 106112 - protein, 13 aa, Homo sapiens
  CDR3 for beta chain variable domain of TCR clone 53056 (TRBV19, TRBJ2-3)
CATWDKITDTQYF

SEQ ID NO: 106113 - protein, 12 aa, Homo sapiens
  CDR3 for alpha chain variable domain of TCR clone 53057 (TRAV27, TRAJ11)
CAGASGYSTLTF

SEQ ID NO: 106114 - protein, 14 aa, Homo sapiens
  CDR3 for beta chain variable domain of TCR clone 53057 (TRBV12-5, TRBJ1-3)
CASGPAGSGNTMYF

SEQ ID NO: 106115 - protein, 12 aa, Homo sapiens
  CDR3 for alpha chain variable domain of TCR clone 53058 (TRAV1-2, TRAJ26)
CAVSPYGRNFVF

SEQ ID NO: 106116 - protein, 14 aa, Homo sapiens
  CDR3 for beta chain variable domain of TCR clone 53058 (TRBV5-1, TRBJ2-7)
CASSFASGVNEQYF

SEQ ID NO: 106117 - protein, 16 aa, Homo sapiens
  CDR3 for alpha chain variable domain of TCR clone 53059 (TRAV30, TRAJ24)
CGTKIVDADSWGKFQF

SEQ ID NO: 106118 - protein, 15 aa, Homo sapiens
  CDR3 for beta chain variable domain of TCR clone 53059 (TRBV9, TRBJ1-6)
CASSVAGTGDSPLHF

SEQ ID NO: 106119 - protein, 13 aa, Homo sapiens
  CDR3 for alpha chain variable domain of TCR clone 53060 (TRAV21, TRAJ57)
CAVTQGGSEKLVF

SEQ ID NO: 106120 - protein, 16 aa, Homo sapiens
  CDR3 for beta chain variable domain of TCR clone 53060 (TRBV29-1, TRBJ2-7)
CSVEDAEEGTAYEQYF

SEQ ID NO: 106121 - protein, 15 aa, Homo sapiens
  CDR3 for alpha chain variable domain of TCR clone 53061 (TRAV8-3, TRAJ45)
CASSYSGGGADGLTF

SEQ ID NO: 106122 - protein, 13 aa, Homo sapiens
  CDR3 for beta chain variable domain of TCR clone 53061 (TRBV10-3, TRBJ2-7)
CASKQAVNYEQYF

SEQ ID NO: 106123 - protein, 15 aa, Homo sapiens
  CDR3 for alpha chain variable domain of TCR clone 53062 (TRAV26-1, TRAJ29)
CFVRVEGSGNTPLVF

SEQ ID NO: 106124 - protein, 15 aa, Homo sapiens
  CDR3 for beta chain variable domain of TCR clone 53062 (TRBV7-9, TRBJ1-5)
CASSQGHQPNQPQHF

SEQ ID NO: 106125 - protein, 15 aa, Homo sapiens
  CDR3 for alpha chain variable domain of TCR clone 53063 (TRAV26-1, TRAJ29)
CTVRVEGSGNAPLVF

SEQ ID NO: 106126 - protein, 14 aa, Homo sapiens
  CDR3 for beta chain variable domain of TCR clone 53063 (TRBV25-1, TRBJ1-1)
CASTHLGGNTEAFF

SEQ ID NO: 106127 - protein, 15 aa, Homo sapiens
  CDR3 for alpha chain variable domain of TCR clone 53064 (TRAV2, TRAJ37)
CAVGDGSSNTGKLIF

SEQ ID NO: 106128 - protein, 13 aa, Homo sapiens
  CDR3 for beta chain variable domain of TCR clone 53064 (TRBV20-1, TRBJ2-7)
CSAQTGLSYEQCF

SEQ ID NO: 106129 - protein, 14 aa, Homo sapiens
  CDR3 for alpha chain variable domain of TCR clone 53065 (TRAV12-2, TRAJ45)
CAVNEGGGADGLTF

SEQ ID NO: 106130 - protein, 15 aa, Homo sapiens
  CDR3 for beta chain variable domain of TCR clone 53065 (TRBV9, TRBJ1-6)
CASSVAGTGDSPLHF

SEQ ID NO: 106131 - protein, 14 aa, Homo sapiens
  CDR3 for alpha chain variable domain of TCR clone 53066 (TRAV3, TRAJ8)
CAVSRNTGFQKLVF

SEQ ID NO: 106132 - protein, 14 aa, Homo sapiens
  CDR3 for beta chain variable domain of TCR clone 53066 (TRBV7-2, TRBJ2-5)
CASSLSGGGETQYF

SEQ ID NO: 106133 - protein, 15 aa, Homo sapiens
  CDR3 for alpha chain variable domain of TCR clone 53067 (TRAV21, TRAJ53)
CATLNSGGSNYKLTF

SEQ ID NO: 106134 - protein, 15 aa, Homo sapiens
  CDR3 for beta chain variable domain of TCR clone 53067 (TRBV10-2, TRBJ2-6)
CASSEQGTGANVLTF

SEQ ID NO: 106135 - protein, 12 aa, Homo sapiens
  CDR3 for alpha chain variable domain of TCR clone 53068 (TRAV35, TRAJ49)
CAGWNTGNQFYF

SEQ ID NO: 106136 - protein, 14 aa, Homo sapiens
  CDR3 for beta chain variable domain of TCR clone 53068 (TRBV6-1, TRBJ1-3)
CASVQGGGGNTIYF

SEQ ID NO: 106137 - protein, 11 aa, Homo sapiens
  CDR3 for alpha chain variable domain of TCR clone 53069 (TRAV12-1, TRAJ21)
CVVYNFNKFYF

SEQ ID NO: 106138 - protein, 14 aa, Homo sapiens
  CDR3 for beta chain variable domain of TCR clone 53069 (TRBV19, TRBJ2-7)
CASSMGPGAIEQYF

SEQ ID NO: 106139 - protein, 16 aa, Homo sapiens
  CDR3 for alpha chain variable domain of TCR clone 53070 (TRAV12-3, TRAJ53)
CAMSPGSGGSNYKLTF

SEQ ID NO: 106140 - protein, 14 aa, Homo sapiens
  CDR3 for beta chain variable domain of TCR clone 53070 (TRBV20-1, TRBJ1-1)
CSAQTRIGGTEAFF

SEQ ID NO: 106141 - protein, 11 aa, Homo sapiens
  CDR3 for alpha chain variable domain of TCR clone 53071 (TRAV2, TRAJ13)
CASGGYQKVTF

SEQ ID NO: 106142 - protein, 16 aa, Homo sapiens
  CDR3 for beta chain variable domain of TCR clone 53071 (TRBV4-1, TRBJ1-2)
CASSQDAGQVLYGYTF

SEQ ID NO: 106143 - protein, 11 aa, Homo sapiens
  CDR3 for alpha chain variable domain of TCR clone 53072 (TRAV12-1, TRAJ30)
CVVNGQDKIIF

SEQ ID NO: 106144 - protein, 12 aa, Homo sapiens
  CDR3 for beta chain variable domain of TCR clone 53072 (TRBV27, TRBJ2-2)
CASKLSTGELFF

SEQ ID NO: 106145 - protein, 16 aa, Homo sapiens
  CDR3 for alpha chain variable domain of TCR clone 53073 (TRAV1-2, TRAJ10)
CAVRGVLTGGGNKLTF

SEQ ID NO: 106146 - protein, 14 aa, Homo sapiens
  CDR3 for beta chain variable domain of TCR clone 53073 (TRBV19, TRBJ1-5)
CASRAPDSFLSQHF

SEQ ID NO: 106147 - protein, 19 aa, Homo sapiens
  CDR3 for alpha chain variable domain of TCR clone 53074 (TRAV26-1, TRAJ38)
CIADNAGNNHIQNPDPAVY

SEQ ID NO: 106148 - protein, 12 aa, Homo sapiens
  CDR3 for beta chain variable domain of TCR clone 53074 (TRBV11-2, TRBJ2-2)
CASSLGGGELFF

SEQ ID NO: 106149 - protein, 14 aa, Homo sapiens
  CDR3 for alpha chain variable domain of TCR clone 53075 (TRAV8-3, TRAJ9)
CAVVYSTGGFKTVF

SEQ ID NO: 106150 - protein, 14 aa, Homo sapiens
  CDR3 for beta chain variable domain of TCR clone 53075 (TRBV7-3, TRBJ2-2)
CASSSGGYTGELFF

SEQ ID NO: 106151 - protein, 13 aa, Homo sapiens
  CDR3 for alpha chain variable domain of TCR clone 53076 (TRAV20, TRAJ37)
CAGCSSNTGKLIF

SEQ ID NO: 106152 - protein, 11 aa, Homo sapiens
  CDR3 for beta chain variable domain of TCR clone 53076 (TRBV12-4, TRBJ2-3)
CPSTATDTQYF

SEQ ID NO: 106153 - protein, 15 aa, Homo sapiens
  CDR3 for alpha chain variable domain of TCR clone 53077 (TRAV38-1, TRAJ37)
CAFIFGSGNTGKLIF

SEQ ID NO: 106154 - protein, 16 aa, Homo sapiens
  CDR3 for beta chain variable domain of TCR clone 53077 (TRBV7-3, TRBJ2-2)
CASSLKRGTLSGELFF

SEQ ID NO: 106155 - protein, 16 aa, Homo sapiens
  CDR3 for alpha chain variable domain of TCR clone 53078 (TRAV26-1, TRAJ37)
CIVRGDGSGNTGKLIF

SEQ ID NO: 106156 - protein, 17 aa, Homo sapiens
  CDR3 for beta chain variable domain of TCR clone 53078 (TRBV4-1, TRBJ2-7)
CASSRDPLGVRGGEQYL

SEQ ID NO: 106157 - protein, 14 aa, Homo sapiens
  CDR3 for alpha chain variable domain of TCR clone 53079 (TRAV1-2, TRAJ16)
CAVDRFSDGQKLLF

SEQ ID NO: 106158 - protein, 13 aa, Homo sapiens
  CDR3 for beta chain variable domain of TCR clone 53079 (TRBV6-5, TRBJ1-1)
QTSVYFCALRAFF

SEQ ID NO: 106159 - protein, 15 aa, Homo sapiens
  CDR3 for alpha chain variable domain of TCR clone 53080 (TRAV13-1, TRAJ42)
CAASIAGGSRGNLIF

SEQ ID NO: 106160 - protein, 15 aa, Homo sapiens
  CDR3 for beta chain variable domain of TCR clone 53080 (TRBV19, TRBJ2-1)
CASSIVRGEGREQFF

SEQ ID NO: 106161 - protein, 12 aa, Homo sapiens
  CDR3 for alpha chain variable domain of TCR clone 53081 (TRAV35, TRAJ31)
CAAASNNARLMF

SEQ ID NO: 106162 - protein, 14 aa, Homo sapiens
  CDR3 for beta chain variable domain of TCR clone 53081 (TRBV2, TRBJ2-2)
CAGSLFGGNGELFF

SEQ ID NO: 106163 - protein, 15 aa, Homo sapiens
  CDR3 for alpha chain variable domain of TCR clone 53082 (TRAV8-3, TRAJ45)
CASSYSGGGADGLPF

SEQ ID NO: 106164 - protein, 16 aa, Homo sapiens
  CDR3 for beta chain variable domain of TCR clone 53082 (TRBV7-9, TRBJ2-2)
CASSGFGGANTGELFF

SEQ ID NO: 106165 - protein, 15 aa, Homo sapiens
  CDR3 for alpha chain variable domain of TCR clone 53083 (TRAV17, TRAJ57)
CATGPSQGGSEKLVF

SEQ ID NO: 106166 - protein, 18 aa, Homo sapiens
  CDR3 for beta chain variable domain of TCR clone 53083 (TRBV12-4, TRBJ1-5)
CTSVPAADRSGGPISQHF

SEQ ID NO: 106167 - protein, 13 aa, Homo sapiens
  CDR3 for alpha chain variable domain of TCR clone 53084 (TRAV3, TRAJ21)
CAVREPDFNKFYF

SEQ ID NO: 106168 - protein, 11 aa, Homo sapiens
  CDR3 for beta chain variable domain of TCR clone 53084 (TRBV12-4, TRBJ2-3)
CASTATDTQYF

SEQ ID NO: 106169 - protein, 14 aa, Homo sapiens
  CDR3 for alpha chain variable domain of TCR clone 53085 (TRAV1-2, TRAJ16)
CAVNRFSDGQKLLF

SEQ ID NO: 106170 - protein, 12 aa, Homo sapiens
  CDR3 for beta chain variable domain of TCR clone 53085 (TRBV5-4, TRBJ2-5)
CASSSTRETQYF

SEQ ID NO: 106171 - protein, 17 aa, Homo sapiens
  CDR3 for alpha chain variable domain of TCR clone 53086 (TRAV8-6, TRAJ58)
CAVSSWVGETSGSRLTF

SEQ ID NO: 106172 - protein, 14 aa, Homo sapiens
  CDR3 for beta chain variable domain of TCR clone 53086 (TRBV4-2, TRBJ2-1)
CASGLDGAYNEQFF

SEQ ID NO: 106173 - protein, 17 aa, Homo sapiens
  CDR3 for alpha chain variable domain of TCR clone 53087 (TRAV3, TRAJ38)
CAVRDCLNAGNNRKLIW

SEQ ID NO: 106174 - protein, 14 aa, Homo sapiens
  CDR3 for beta chain variable domain of TCR clone 53087 (TRBV19, TRBJ2-1)
CASPTFVLSGEQFF

SEQ ID NO: 106175 - protein, 13 aa, Homo sapiens
  CDR3 for alpha chain variable domain of TCR clone 53088 (TRAV12-3, TRAJ36)
CAMRRPGANNLFF

SEQ ID NO: 106176 - protein, 18 aa, Homo sapiens
  CDR3 for beta chain variable domain of TCR clone 53088 (TRBV11-1, TRBJ2-2)
CASSREAGGPGNTRELFF

SEQ ID NO: 106177 - protein, 16 aa, Homo sapiens
  CDR3 for alpha chain variable domain of TCR clone 53089 (TRAV12-1, TRAJ32)
PPTSMNYGGATNKLIF

SEQ ID NO: 106178 - protein, 15 aa, Homo sapiens
  CDR3 for beta chain variable domain of TCR clone 53089 (TRBV7-9, TRBJ2-2)
CASGPLDTFPGELFF

SEQ ID NO: 106179 - protein, 14 aa, Homo sapiens
  CDR3 for alpha chain variable domain of TCR clone 53090 (TRAV1-2, TRAJ8)
CAVREDTGFQKLVF

SEQ ID NO: 106180 - protein, 11 aa, Homo sapiens
  CDR3 for beta chain variable domain of TCR clone 53090 (TRBV11-3, TRBJ2-7)
CASSRTYEQYL

SEQ ID NO: 106181 - protein, 10 aa, Homo sapiens
  CDR3 for alpha chain variable domain of TCR clone 53091 (TRAV12-2, TRAJ26)
CLEGGQNFVF

SEQ ID NO: 106182 - protein, 17 aa, Homo sapiens
  CDR3 for beta chain variable domain of TCR clone 53091 (TRBV20-1, TRBJ2-1)
CSASGGENTGAYNEQFF

SEQ ID NO: 106183 - protein, 14 aa, Homo sapiens
  CDR3 for alpha chain variable domain of TCR clone 53092 (TRAV12-2, TRAJ13)
CAVKKTGGYQKVTF

SEQ ID NO: 106184 - protein, 17 aa, Homo sapiens
  CDR3 for beta chain variable domain of TCR clone 53092 (TRBV15, TRBJ2-4)
CATSRNNPQTGLDIQYF

SEQ ID NO: 106185 - protein, 14 aa, Homo sapiens
  CDR3 for alpha chain variable domain of TCR clone 53093 (TRAV17, TRAJ39)
CAADPVRAGNMLTF

SEQ ID NO: 106186 - protein, 15 aa, Homo sapiens
  CDR3 for beta chain variable domain of TCR clone 53093 (TRBV13, TRBJ1-5)
CASSFGQGGVQPQHF

SEQ ID NO: 106187 - protein, 14 aa, Homo sapiens
  CDR3 for alpha chain variable domain of TCR clone 53094 (TRAV12-3, TRAJ5)
CAMSTYTGRRAFTF

SEQ ID NO: 106188 - protein, 13 aa, Homo sapiens
  CDR3 for beta chain variable domain of TCR clone 53094 (TRBV28, TRBJ2-3)
CASSTGGGDTQYF

SEQ ID NO: 106189 - protein, 13 aa, Homo sapiens
  CDR3 for alpha chain variable domain of TCR clone 53095 (TRAV38-1, TRAJ42)
CARWGGSQVNLIF

SEQ ID NO: 106190 - protein, 17 aa, Homo sapiens
  CDR3 for beta chain variable domain of TCR clone 53095 (TRBV20-1, TRBJ2-1)
CSARDPLAGVWDNEQFF

SEQ ID NO: 106191 - protein, 14 aa, Homo sapiens
  CDR3 for alpha chain variable domain of TCR clone 53096 (TRAV1-1, TRAJ27)
CAVIYNTNAGKSTF

SEQ ID NO: 106192 - protein, 15 aa, Homo sapiens
  CDR3 for beta chain variable domain of TCR clone 53096 (TRBV7-2, TRBJ2-1)
SASSSGLAGGNEQFF

SEQ ID NO: 106193 - protein, 13 aa, Homo sapiens
  CDR3 for alpha chain variable domain of TCR clone 53097 (TRAV3, TRAJ27)
CAVRPLGAGKSTF

SEQ ID NO: 106194 - protein, 20 aa, Homo sapiens
  CDR3 for beta chain variable domain of TCR clone 53097 (TRBV7-8, TRBJ2-2)
CASSHLFPGPTIHITGELFF

SEQ ID NO: 106195 - protein, 14 aa, Homo sapiens
  CDR3 for alpha chain variable domain of TCR clone 53098 (TRAV2, TRAJ37)
CAVDFTSNTGKLIY

SEQ ID NO: 106196 - protein, 15 aa, Homo sapiens
  CDR3 for beta chain variable domain of TCR clone 53098 (TRBV20-1, TRBJ1-1)
CSASRGVTGNTEAFF

SEQ ID NO: 106197 - protein, 14 aa, Homo sapiens
  CDR3 for alpha chain variable domain of TCR clone 53099 (TRAV8-3, TRAJ39)
CAVGANNAGNMLTF

SEQ ID NO: 106198 - protein, 13 aa, Homo sapiens
  CDR3 for beta chain variable domain of TCR clone 53099 (TRBV3-1, TRBJ2-5)
CASSPVLSETRYF

SEQ ID NO: 106199 - protein, 14 aa, Homo sapiens
  CDR3 for alpha chain variable domain of TCR clone 53100 (TRAV3, TRAJ8)
CAVSLNTGFQKLVF

SEQ ID NO: 106200 - protein, 14 aa, Homo sapiens
  CDR3 for beta chain variable domain of TCR clone 53100 (TRBV6-6, TRBJ1-5)
CASVGSGFNQPQHF

SEQ ID NO: 106201 - protein, 12 aa, Homo sapiens
  CDR3 for alpha chain variable domain of TCR clone 53101 (TRAV3, TRAJ20)
CAVRDGDYKLSF

SEQ ID NO: 106202 - protein, 17 aa, Homo sapiens
  CDR3 for beta chain variable domain of TCR clone 53101 (TRBV11-2, TRBJ2-4)
CASSFLALGGAGDIQYF

SEQ ID NO: 106203 - protein, 14 aa, Homo sapiens
  CDR3 for alpha chain variable domain of TCR clone 53102 (TRAV17, TRAJ37)
CATDGSSNTGKLIF

SEQ ID NO: 106204 - protein, 13 aa, Homo sapiens
  CDR3 for beta chain variable domain of TCR clone 53102 (TRBV11-2, TRBJ2-1)
CASSLDLVNELFF

SEQ ID NO: 106205 - protein, 14 aa, Homo sapiens
  CDR3 for alpha chain variable domain of TCR clone 53103 (TRAV1-2, TRAJ16)
CAVDRFSDGQKLLF

SEQ ID NO: 106206 - protein, 13 aa, Homo sapiens
  CDR3 for beta chain variable domain of TCR clone 53103 (TRBV7-9, TRBJ1-2)
CASSLKQNYGYTF

SEQ ID NO: 106207 - protein, 14 aa, Homo sapiens
  CDR3 for alpha chain variable domain of TCR clone 53104 (TRAV12-2, TRAJ44)
CAVNPAGTASKLTF

SEQ ID NO: 106208 - protein, 13 aa, Homo sapiens
  CDR3 for beta chain variable domain of TCR clone 53104 (TRBV20-1, TRBJ1-6)
CSAPLGVGSPLYF

SEQ ID NO: 106209 - protein, 16 aa, Homo sapiens
  CDR3 for alpha chain variable domain of TCR clone 53105 (TRAV3, TRAJ21)
CAVRDIERGNFNNFYF

SEQ ID NO: 106210 - protein, 13 aa, Homo sapiens
  CDR3 for beta chain variable domain of TCR clone 53105 (TRBV27, TRBJ2-7)
CASSLTTGYEQYF

SEQ ID NO: 106211 - protein, 14 aa, Homo sapiens
  CDR3 for alpha chain variable domain of TCR clone 53106 (TRAV12-1, TRAJ8)
CVVDSNTGFQKLVF

SEQ ID NO: 106212 - protein, 16 aa, Homo sapiens
  CDR3 for beta chain variable domain of TCR clone 53106 (TRBV20-1, TRBJ2-2)
CSARDDRVGLTGELFF

SEQ ID NO: 106213 - protein, 10 aa, Homo sapiens
  CDR3 for alpha chain variable domain of TCR clone 53107 (TRAV13-1, TRAJ52)
CAAKTPMLVV

SEQ ID NO: 106214 - protein, 15 aa, Homo sapiens
  CDR3 for beta chain variable domain of TCR clone 53107 (TRBV6-1, TRBJ2-3)
CACSERGGITDTQYF

SEQ ID NO: 106215 - protein, 14 aa, Homo sapiens
  CDR3 for alpha chain variable domain of TCR clone 53108 (TRAV26-1, TRAJ38)
CIADNAGNDRKLIW

SEQ ID NO: 106216 - protein, 17 aa, Homo sapiens
  CDR3 for beta chain variable domain of TCR clone 53108 (TRBV15, TRBJ1-1)
CATSRVGGADGDTEAFF

SEQ ID NO: 106217 - protein, 18 aa, Homo sapiens
  CDR3 for alpha chain variable domain of TCR clone 53109 (TRAV21, TRAJ52)
CAVKPSPAGGTSYGKLTF

SEQ ID NO: 106218 - protein, 15 aa, Homo sapiens
  CDR3 for beta chain variable domain of TCR clone 53109 (TRBV7-9, TRBJ2-7)
CASSSSGLAVYEQYF

SEQ ID NO: 106219 - protein, 15 aa, Homo sapiens
  CDR3 for alpha chain variable domain of TCR clone 53110 (TRAV25, TRAJ52)
CAGRPGGTSYGKLTF

SEQ ID NO: 106220 - protein, 17 aa, Homo sapiens
  CDR3 for beta chain variable domain of TCR clone 53110 (TRBV7-8, TRBJ2-6)
CTSSAGTGGAGANVLTF

SEQ ID NO: 106221 - protein, 15 aa, Homo sapiens
  CDR3 for alpha chain variable domain of TCR clone 53111 (TRAV14/DV4, TRAJ12)
CAMREERDSSYKLIF

SEQ ID NO: 106222 - protein, 16 aa, Homo sapiens
  CDR3 for beta chain variable domain of TCR clone 53111 (TRBV11-2, TRBJ1-2)
CASGLDTGGADYGYTF

SEQ ID NO: 106223 - protein, 12 aa, Homo sapiens
  CDR3 for alpha chain variable domain of TCR clone 53112 (TRAV4, TRAJ26)
CLVGDYGQNFVF

SEQ ID NO: 106224 - protein, 13 aa, Homo sapiens
  CDR3 for beta chain variable domain of TCR clone 53112 (TRBV7-2, TRBJ2-2)
CASSLAVTGELFF

SEQ ID NO: 106225 - protein, 13 aa, Homo sapiens
  CDR3 for alpha chain variable domain of TCR clone 53113 (TRAV27, TRAJ6)
CAGGTRGSYIPTF

SEQ ID NO: 106226 - protein, 16 aa, Homo sapiens
  CDR3 for beta chain variable domain of TCR clone 53113 (TRBV24-1, TRBJ2-3)
CATSDPGTGATDTQYF

SEQ ID NO: 106227 - protein, 15 aa, Homo sapiens
  CDR3 for alpha chain variable domain of TCR clone 53114 (TRAV3, TRAJ5)
CAVRDLDTGRRALTF

SEQ ID NO: 106228 - protein, 14 aa, Homo sapiens
  CDR3 for beta chain variable domain of TCR clone 53114 (TRBV11-2, TRBJ1-5)
CASSLDRGRQPQHF

SEQ ID NO: 106229 - protein, 15 aa, Homo sapiens
  CDR3 for alpha chain variable domain of TCR clone 53115 (TRAV23/DV6, TRAJ30)
CAASSQESRDDKIIF

SEQ ID NO: 106230 - protein, 17 aa, Homo sapiens
  CDR3 for beta chain variable domain of TCR clone 53115 (TRBV4-3, TRBJ2-1)
CASSQFSSGRASGEQFL

SEQ ID NO: 106231 - protein, 15 aa, Homo sapiens
  CDR3 for alpha chain variable domain of TCR clone 53116 (TRAV12-2, TRAJ43)
CAFDMRFGAGTRLTV

SEQ ID NO: 106232 - protein, 13 aa, Homo sapiens
  CDR3 for beta chain variable domain of TCR clone 53116 (TRBV7-3, TRBJ1-1)
CASSQDWGAEAFF

SEQ ID NO: 106233 - protein, 15 aa, Homo sapiens
  CDR3 for alpha chain variable domain of TCR clone 53117 (TRAV12-2, TRAJ53)
CAVNGGGGSNYKLTF

SEQ ID NO: 106234 - protein, 14 aa, Homo sapiens
  CDR3 for beta chain variable domain of TCR clone 53117 (TRBV19, TRBJ1-2)
CASSVLGYNYGYTF

SEQ ID NO: 106235 - protein, 14 aa, Homo sapiens
  CDR3 for alpha chain variable domain of TCR clone 53118 (TRAV9-2, TRAJ39)
CALYIYNAGNMLTF

SEQ ID NO: 106236 - protein, 18 aa, Homo sapiens
  CDR3 for beta chain variable domain of TCR clone 53118 (TRBV7-9, TRBJ2-3)
CASSLPINGQISTDTQYF

SEQ ID NO: 106237 - protein, 16 aa, Homo sapiens
  CDR3 for alpha chain variable domain of TCR clone 53119 (TRAV12-2, TRAJ40)
CAVIRGGTPGTYKYIF

SEQ ID NO: 106238 - protein, 16 aa, Homo sapiens
  CDR3 for beta chain variable domain of TCR clone 53119 (TRBV7-9, TRBJ2-1)
CASSDVAGGSYNEQFF

SEQ ID NO: 106239 - protein, 12 aa, Homo sapiens
  CDR3 for alpha chain variable domain of TCR clone 53120 (TRAV13-1, TRAJ53)
AASGGSSYKLTF

SEQ ID NO: 106240 - protein, 15 aa, Homo sapiens
  CDR3 for beta chain variable domain of TCR clone 53120 (TRBV5-1, TRBJ2-1)
CASSPPRAPYNEQFF

SEQ ID NO: 106241 - protein, 11 aa, Homo sapiens
  CDR3 for alpha chain variable domain of TCR clone 53121 (TRAV13-1, TRAJ15)
CAATPGTALIF

SEQ ID NO: 106242 - protein, 14 aa, Homo sapiens
  CDR3 for beta chain variable domain of TCR clone 53121 (TRBV28, TRBJ2-5)
CQQHPWSYQETQYF

SEQ ID NO: 106243 - protein, 15 aa, Homo sapiens
  CDR3 for alpha chain variable domain of TCR clone 53122 (TRAV25, TRAJ52)
CAGRPGGTSYGKLTF

SEQ ID NO: 106244 - protein, 16 aa, Homo sapiens
  CDR3 for beta chain variable domain of TCR clone 53122 (TRBV5-1, TRBJ1-1)
CASSSGGNSLNTEAFF

SEQ ID NO: 106245 - protein, 15 aa, Homo sapiens
  CDR3 for alpha chain variable domain of TCR clone 53123 (TRAV2, TRAJ11)
CAVGGRNSGYSTLTF

SEQ ID NO: 106246 - protein, 15 aa, Homo sapiens
  CDR3 for beta chain variable domain of TCR clone 53123 (TRBV6-6, TRBJ2-7)
CASSYSYGGSYEQYF

SEQ ID NO: 106247 - protein, 18 aa, Homo sapiens
  CDR3 for alpha chain variable domain of TCR clone 53124 (TRAV21, TRAJ52)
CAMRPSPAGGTSYGKLTF

SEQ ID NO: 106248 - protein, 15 aa, Homo sapiens
  CDR3 for beta chain variable domain of TCR clone 53124 (TRBV19, TRBJ1-1)
CASTSGQIQNTEAFF

SEQ ID NO: 106249 - protein, 10 aa, Homo sapiens
  CDR3 for alpha chain variable domain of TCR clone 53125 (TRAV23/DV6, TRAJ57)
CAASSTLSQG

SEQ ID NO: 106250 - protein, 13 aa, Homo sapiens
  CDR3 for beta chain variable domain of TCR clone 53125 (TRBV25-1, TRBJ1-1)
CSTHLGGNTEAFF

SEQ ID NO: 106251 - protein, 12 aa, Homo sapiens
  CDR3 for alpha chain variable domain of TCR clone 53126 (TRAV21, TRAJ11)
CAVRGGDSTLTF

SEQ ID NO: 106252 - protein, 15 aa, Homo sapiens
  CDR3 for beta chain variable domain of TCR clone 53126 (TRBV6-1, TRBJ2-7)
CASSEPIAATTEQYF

SEQ ID NO: 106253 - protein, 15 aa, Homo sapiens
  CDR3 for alpha chain variable domain of TCR clone 53127 (TRAV12-2, TRAJ8)
CAVREENTGFQKLVF

SEQ ID NO: 106254 - protein, 20 aa, Homo sapiens
  CDR3 for beta chain variable domain of TCR clone 53127 (TRBV28, TRBJ2-1)
CASTPIGRSPGLAGGNEQFF

SEQ ID NO: 106255 - protein, 12 aa, Homo sapiens
  CDR3 for alpha chain variable domain of TCR clone 53128 (TRAV2, TRAJ33)
CAVEDSNYQLIW

SEQ ID NO: 106256 - protein, 14 aa, Homo sapiens
  CDR3 for beta chain variable domain of TCR clone 53128 (TRBV19, TRBJ1-4)
CASSINRGSEKLFF

SEQ ID NO: 106257 - protein, 12 aa, Homo sapiens
  CDR3 for alpha chain variable domain of TCR clone 53129 (TRAV12-3, TRAJ4)
CAMMGAGTRLAV

SEQ ID NO: 106258 - protein, 14 aa, Homo sapiens
  CDR3 for beta chain variable domain of TCR clone 53129 (TRBV10-3, TRBJ1-1)
CAISDTDRGVEAFF

SEQ ID NO: 106259 - protein, 13 aa, Homo sapiens
  CDR3 for alpha chain variable domain of TCR clone 53130 (TRAV24, TRAJ23)
CASYWNQGGKLIF

SEQ ID NO: 106260 - protein, 13 aa, Homo sapiens
  CDR3 for beta chain variable domain of TCR clone 53130 (TRBV13, TRBJ2-1)
CASILGGRGEQFF

SEQ ID NO: 106261 - protein, 14 aa, Homo sapiens
  CDR3 for alpha chain variable domain of TCR clone 53131 (TRAV8-6, TRAJ29)
CAVSRASGNTPLAF

SEQ ID NO: 106262 - protein, 13 aa, Homo sapiens
  CDR3 for beta chain variable domain of TCR clone 53131 (TRBV19, TRBJ1-5)
CASSEGSNQPQHF

SEQ ID NO: 106263 - protein, 18 aa, Homo sapiens
  CDR3 for alpha chain variable domain of TCR clone 53132 (TRAV12-3, TRAJ52)
CAMSVGGAGGNSYGKLTF

SEQ ID NO: 106264 - protein, 15 aa, Homo sapiens
  CDR3 for beta chain variable domain of TCR clone 53132 (TRBV27, TRBJ1-6)
CASSFDRGLGSPLHF

SEQ ID NO: 106265 - protein, 23 aa, Homo sapiens
  CDR3 for alpha chain variable domain of TCR clone 53133 (TRAV26-1, )
CIADNAGNHHIQNPDPAVYQLRD

SEQ ID NO: 106266 - protein, 13 aa, Homo sapiens
  CDR3 for beta chain variable domain of TCR clone 53133 (TRBV20-1, TRBJ1-1)
CSARGGGNTEAFF

SEQ ID NO: 106267 - protein, 13 aa, Homo sapiens
  CDR3 for alpha chain variable domain of TCR clone 53134 (TRAV35, TRAJ44)
CAGLSGTASNLTF

SEQ ID NO: 106268 - protein, 17 aa, Homo sapiens
  CDR3 for beta chain variable domain of TCR clone 53134 (TRBV7-8, TRBJ1-2)
CASNLRPLQGHLYGYTF

SEQ ID NO: 106269 - protein, 12 aa, Homo sapiens
  CDR3 for alpha chain variable domain of TCR clone 53135 (TRAV13-1, TRAJ53)
AASGGSNYKLTF

SEQ ID NO: 106270 - protein, 16 aa, Homo sapiens
  CDR3 for beta chain variable domain of TCR clone 53135 (TRBV28, TRBJ2-6)
CASSSRRGSGANVLTF

SEQ ID NO: 106271 - protein, 14 aa, Homo sapiens
  CDR3 for alpha chain variable domain of TCR clone 53136 (TRAV1-2, TRAJ8)
CAAREDTGSQKLVF

SEQ ID NO: 106272 - protein, 13 aa, Homo sapiens
  CDR3 for beta chain variable domain of TCR clone 53136 (TRBV19, TRBJ1-2)
CASSVPGQDGYTF

SEQ ID NO: 106273 - protein, 15 aa, Homo sapiens
  CDR3 for alpha chain variable domain of TCR clone 53137 (TRAV13-1, TRAJ52)
SYYNAGGTSYGKLTF

SEQ ID NO: 106274 - protein, 11 aa, Homo sapiens
  CDR3 for beta chain variable domain of TCR clone 53137 (TRBV7-9, TRBJ2-3)
CASSGPDTQYF

SEQ ID NO: 106275 - protein, 19 aa, Homo sapiens
  CDR3 for alpha chain variable domain of TCR clone 53138 (TRAV26-1, TRAJ28)
CIARVAHAYSGAGSYQLTF

SEQ ID NO: 106276 - protein, 15 aa, Homo sapiens
  CDR3 for beta chain variable domain of TCR clone 53138 (TRBV5-1, TRBJ1-3)
CASSSKTGAGNTIYF

SEQ ID NO: 106277 - protein, 14 aa, Homo sapiens
  CDR3 for alpha chain variable domain of TCR clone 53139 (TRAV17, TRAJ40)
CATAPMGGTYKYIF

SEQ ID NO: 106278 - protein, 15 aa, Homo sapiens
  CDR3 for beta chain variable domain of TCR clone 53139 (TRBV6-3, TRBJ2-7)
CASSSPGTVFYEQYF

SEQ ID NO: 106279 - protein, 16 aa, Homo sapiens
  CDR3 for alpha chain variable domain of TCR clone 53140 (TRAV17, TRAJ35)
CATAEGGIGFGNVLHC

SEQ ID NO: 106280 - protein, 16 aa, Homo sapiens
  CDR3 for beta chain variable domain of TCR clone 53140 (TRBV6-5, TRBJ2-7)
CASSSDPTSGFYGQYF

SEQ ID NO: 106281 - protein, 14 aa, Homo sapiens
  CDR3 for alpha chain variable domain of TCR clone 53141 (TRAV26-2, TRAJ23)
CSRALYNQGGKLIF

SEQ ID NO: 106282 - protein, 15 aa, Homo sapiens
  CDR3 for beta chain variable domain of TCR clone 53141 (TRBV20-1, TRBJ2-7)
CSARDRVSGMDEQYF

SEQ ID NO: 106283 - protein, 19 aa, Homo sapiens
  CDR3 for alpha chain variable domain of TCR clone 53142 (TRAV2, TRAJ20)
ILQVREAGAAVYRDCKLSF

SEQ ID NO: 106284 - protein, 17 aa, Homo sapiens
  CDR3 for beta chain variable domain of TCR clone 53142 (TRBV11-2, TRBJ2-1)
CASSLYPPGVEYNEQFF

SEQ ID NO: 106285 - protein, 15 aa, Homo sapiens
  CDR3 for alpha chain variable domain of TCR clone 53143 (TRAV25, TRAJ52)
CTGRPGGTSYGKLTF

SEQ ID NO: 106286 - protein, 17 aa, Homo sapiens
  CDR3 for beta chain variable domain of TCR clone 53143 (TRBV7-8, TRBJ2-6)
CASSAGTGGAGANVLTF

SEQ ID NO: 106287 - protein, 12 aa, Homo sapiens
  CDR3 for alpha chain variable domain of TCR clone 53144 (TRAV8-1, TRAJ26)
CAANNYGQNFVF

SEQ ID NO: 106288 - protein, 12 aa, Homo sapiens
  CDR3 for beta chain variable domain of TCR clone 53144 (TRBV5-5, TRBJ2-5)
CASSYFGETQYF

SEQ ID NO: 106289 - protein, 13 aa, Homo sapiens
  CDR3 for alpha chain variable domain of TCR clone 53145 (TRAV8-1, TRAJ13)
CAVSKGGLPESYL

SEQ ID NO: 106290 - protein, 18 aa, Homo sapiens
  CDR3 for beta chain variable domain of TCR clone 53145 (TRBV11-2, TRBJ2-7)
CASSWRTVQTGQSYEQYF

SEQ ID NO: 106291 - protein, 18 aa, Homo sapiens
  CDR3 for alpha chain variable domain of TCR clone 53146 (TRAV12-3, TRAJ52)
CAMSRTNAGGTSYGKLTF

SEQ ID NO: 106292 - protein, 13 aa, Homo sapiens
  CDR3 for beta chain variable domain of TCR clone 53146 (TRBV14, TRBJ1-1)
CASSQEAGTGAFF

SEQ ID NO: 106293 - protein, 15 aa, Homo sapiens
  CDR3 for alpha chain variable domain of TCR clone 53147 (TRAV34, TRAJ38)
CGADFTPGNNRKLIW

SEQ ID NO: 106294 - protein, 13 aa, Homo sapiens
  CDR3 for beta chain variable domain of TCR clone 53147 (TRBV2, TRBJ1-1)
CASRWTVNTEAFF

SEQ ID NO: 106295 - protein, 13 aa, Homo sapiens
  CDR3 for alpha chain variable domain of TCR clone 53148 (TRAV3, TRAJ20)
CAVRSLNDDKLSF

SEQ ID NO: 106296 - protein, 13 aa, Homo sapiens
  CDR3 for beta chain variable domain of TCR clone 53148 (TRBV6-1, TRBJ2-1)
CAGMGPTNNEQFF

SEQ ID NO: 106297 - protein, 12 aa, Homo sapiens
  CDR3 for alpha chain variable domain of TCR clone 53149 (TRAV16, TRAJ21)
CALLGNFNKFYF

SEQ ID NO: 106298 - protein, 15 aa, Homo sapiens
  CDR3 for beta chain variable domain of TCR clone 53149 (TRBV3-1, TRBJ2-2)
CASSQAVRETGELSF

SEQ ID NO: 106299 - protein, 15 aa, Homo sapiens
  CDR3 for alpha chain variable domain of TCR clone 53150 (TRAV8-3, TRAJ27)
CAVGAGDTNAGKSTF

SEQ ID NO: 106300 - protein, 14 aa, Homo sapiens
  CDR3 for beta chain variable domain of TCR clone 53150 (TRBV19, TRBJ2-7)
CASSMGQGAIEQYF

SEQ ID NO: 106301 - protein, 14 aa, Homo sapiens
  CDR3 for alpha chain variable domain of TCR clone 53151 (TRAV29/DV5, TRAJ36)
CAARRKTGANNLFF

SEQ ID NO: 106302 - protein, 12 aa, Homo sapiens
  CDR3 for beta chain variable domain of TCR clone 53151 (TRBV11-2, TRBJ2-2)
CASSLPTGELFF

SEQ ID NO: 106303 - protein, 10 aa, Homo sapiens
  CDR3 for alpha chain variable domain of TCR clone 53152 (TRAV26-1, TRAJ22)
CIVSLNFFWF

SEQ ID NO: 106304 - protein, 15 aa, Homo sapiens
  CDR3 for beta chain variable domain of TCR clone 53152 (TRBV4-1, TRBJ1-4)
CASSDTGGTNEKLFF

SEQ ID NO: 106305 - protein, 12 aa, Homo sapiens
  CDR3 for alpha chain variable domain of TCR clone 53153 (TRAV16, TRAJ49)
CALNEGGNQFYF

SEQ ID NO: 106306 - protein, 14 aa, Homo sapiens
  CDR3 for beta chain variable domain of TCR clone 53153 (TRBV7-9, TRBJ2-1)
CGSRPTGLRNEQFF

SEQ ID NO: 106307 - protein, 12 aa, Homo sapiens
  CDR3 for alpha chain variable domain of TCR clone 53154 (TRAV16, TRAJ57)
CALEGGSEKLVF

SEQ ID NO: 106308 - protein, 12 aa, Homo sapiens
  CDR3 for beta chain variable domain of TCR clone 53154 (TRBV28, TRBJ2-7)
CASSGRPCEQYF

SEQ ID NO: 106309 - protein, 11 aa, Homo sapiens
  CDR3 for alpha chain variable domain of TCR clone 53155 (TRAV13-1, TRAJ6)
CATLGSYIPTF

SEQ ID NO: 106310 - protein, 15 aa, Homo sapiens
  CDR3 for beta chain variable domain of TCR clone 53155 (TRBV7-9, TRBJ1-5)
CASSQGHQPNQPQHF

SEQ ID NO: 106311 - protein, 16 aa, Homo sapiens
  CDR3 for alpha chain variable domain of TCR clone 53156 (TRAV3, TRAJ37)
CAVRPHGSGNTGKLIF

SEQ ID NO: 106312 - protein, 16 aa, Homo sapiens
  CDR3 for beta chain variable domain of TCR clone 53156 (TRBV12-4, TRBJ1-5)
CASSRPVGGSNQPQHF

SEQ ID NO: 106313 - protein, 13 aa, Homo sapiens
  CDR3 for alpha chain variable domain of TCR clone 53157 (TRAV3, TRAJ4)
CAVRDGGYNKLTF

SEQ ID NO: 106314 - protein, 14 aa, Homo sapiens
  CDR3 for beta chain variable domain of TCR clone 53157 (TRBV12-4, TRBJ1-2)
CASSSSAAGSSYTF

SEQ ID NO: 106315 - protein, 15 aa, Homo sapiens
  CDR3 for alpha chain variable domain of TCR clone 53158 (TRAV8-4, TRAJ47)
CAVSDPEEYGNKLFF

SEQ ID NO: 106316 - protein, 15 aa, Homo sapiens
  CDR3 for beta chain variable domain of TCR clone 53158 (TRBV11-2, TRBJ2-1)
CASSLGPDSYNEQFF

SEQ ID NO: 106317 - protein, 14 aa, Homo sapiens
  CDR3 for alpha chain variable domain of TCR clone 53159 (TRAV1-2, TRAJ8)
CAVREDTGFQKLVF

SEQ ID NO: 106318 - protein, 16 aa, Homo sapiens
  CDR3 for beta chain variable domain of TCR clone 53159 (TRBV18, TRBJ1-4)
CASSQLVGDRAEKLFF

SEQ ID NO: 106319 - protein, 14 aa, Homo sapiens
  CDR3 for alpha chain variable domain of TCR clone 53160 (TRAV26-1, TRAJ38)
CIADNAGNNRKLIW

SEQ ID NO: 106320 - protein, 17 aa, Homo sapiens
  CDR3 for beta chain variable domain of TCR clone 53160 (TRBV15, TRBJ1-1)
CATSRVGGADGDTEAFF

SEQ ID NO: 106321 - protein, 14 aa, Homo sapiens
  CDR3 for alpha chain variable domain of TCR clone 53161 (TRAV1-2, TRAJ8)
CAVREDTGFQKPVF

SEQ ID NO: 106322 - protein, 15 aa, Homo sapiens
  CDR3 for beta chain variable domain of TCR clone 53161 (TRBV29-1, TRBJ2-1)
CSVPTGLALYNEQFF

SEQ ID NO: 106323 - protein, 14 aa, Homo sapiens
  CDR3 for alpha chain variable domain of TCR clone 53162 (TRAV12-2, TRAJ17)
CAVLFKAAGNKLTF

SEQ ID NO: 106324 - protein, 15 aa, Homo sapiens
  CDR3 for beta chain variable domain of TCR clone 53162 (TRBV27, TRBJ2-5)
CASSLYPRGGETQYF

SEQ ID NO: 106325 - protein, 10 aa, Homo sapiens
  CDR3 for alpha chain variable domain of TCR clone 53163 (TRAV12-3, TRAJ50)
CAMIAMGNLL

SEQ ID NO: 106326 - protein, 12 aa, Homo sapiens
  CDR3 for beta chain variable domain of TCR clone 53163 (TRBV14, TRBJ2-7)
CASSRLKGEQYF

SEQ ID NO: 106327 - protein, 11 aa, Homo sapiens
  CDR3 for alpha chain variable domain of TCR clone 53164 (TRAV2, TRAJ13)
CASGGYQKVTF

SEQ ID NO: 106328 - protein, 16 aa, Homo sapiens
  CDR3 for beta chain variable domain of TCR clone 53164 (TRBV7-6, TRBJ2-1)
CASSAPGPSSYNEQFF

SEQ ID NO: 106329 - protein, 13 aa, Homo sapiens
  CDR3 for alpha chain variable domain of TCR clone 53165 (TRAV21, TRAJ27)
CAARPGNVGKSTF

SEQ ID NO: 106330 - protein, 12 aa, Homo sapiens
  CDR3 for beta chain variable domain of TCR clone 53165 (TRBV11-2, TRBJ2-2)
CASSLGGGELFF

SEQ ID NO: 106331 - protein, 11 aa, Homo sapiens
  CDR3 for alpha chain variable domain of TCR clone 53166 (TRAV12-1, TRAJ34)
CVVNKGRELIF

SEQ ID NO: 106332 - protein, 12 aa, Homo sapiens
  CDR3 for beta chain variable domain of TCR clone 53166 (TRBV2, TRBJ2-1)
CAYGPPCNEQFF

SEQ ID NO: 106333 - protein, 17 aa, Homo sapiens
  CDR3 for alpha chain variable domain of TCR clone 53167 (TRAV26-2, TRAJ42)
CILRDESYGVSQGNLIF

SEQ ID NO: 106334 - protein, 15 aa, Homo sapiens
  CDR3 for beta chain variable domain of TCR clone 53167 (TRBV6-6, TRBJ2-7)
CASSYSYGGSYEQYF

SEQ ID NO: 106335 - protein, 10 aa, Homo sapiens
  CDR3 for alpha chain variable domain of TCR clone 53168 (TRAV5, TRAJ34)
CAEDTDKLIF

SEQ ID NO: 106336 - protein, 13 aa, Homo sapiens
  CDR3 for beta chain variable domain of TCR clone 53168 (TRBV11-2, TRBJ1-1)
CASSLGRNTEAFF

SEQ ID NO: 106337 - protein, 13 aa, Homo sapiens
  CDR3 for alpha chain variable domain of TCR clone 53169 (TRAV35, TRAJ42)
CAGFPGSQGNLIF

SEQ ID NO: 106338 - protein, 14 aa, Homo sapiens
  CDR3 for beta chain variable domain of TCR clone 53169 (TRBV6-1, TRBJ1-3)
CASVQGGGGNTIYF

SEQ ID NO: 106339 - protein, 10 aa, Homo sapiens
  CDR3 for alpha chain variable domain of TCR clone 53170 (TRAV30, TRAJ48)
CGIGNEKLTF

SEQ ID NO: 106340 - protein, 14 aa, Homo sapiens
  CDR3 for beta chain variable domain of TCR clone 53170 (TRBV7-6, TRBJ2-3)
CASSVSGGTDTQYF

SEQ ID NO: 106341 - protein, 14 aa, Homo sapiens
  CDR3 for alpha chain variable domain of TCR clone 53171 (TRAV14/DV4, TRAJ20)
CAMRESLNDYKLSF

SEQ ID NO: 106342 - protein, 14 aa, Homo sapiens
  CDR3 for beta chain variable domain of TCR clone 53171 (TRBV4-1, TRBJ2-2)
CASSQAVNTGELFF

SEQ ID NO: 106343 - protein, 14 aa, Homo sapiens
  CDR3 for alpha chain variable domain of TCR clone 53172 (TRAV1-1, TRAJ27)
CAVIYNTNAGKSTF

SEQ ID NO: 106344 - protein, 14 aa, Homo sapiens
  CDR3 for beta chain variable domain of TCR clone 53172 (TRBV7-6, TRBJ2-3)
CASSLGTVTDTQYF

SEQ ID NO: 106345 - protein, 14 aa, Homo sapiens
  CDR3 for alpha chain variable domain of TCR clone 53173 (TRAV9-2, TRAJ45)
CALGRGGGADGLTF

SEQ ID NO: 106346 - protein, 14 aa, Homo sapiens
  CDR3 for beta chain variable domain of TCR clone 53173 (TRBV11-2, TRBJ2-3)
CASSLGGGTDTQYF

SEQ ID NO: 106347 - protein, 13 aa, Homo sapiens
  CDR3 for alpha chain variable domain of TCR clone 53174 (TRAV29/DV5, TRAJ31)
CAASRNNNARLMF

SEQ ID NO: 106348 - protein, 11 aa, Homo sapiens
  CDR3 for beta chain variable domain of TCR clone 53174 (TRBV12-4, TRBJ2-3)
CASTATDTQYF

SEQ ID NO: 106349 - protein, 12 aa, Homo sapiens
  CDR3 for alpha chain variable domain of TCR clone 53175 (TRAV17, TRAJ57)
CATDGGSEKLVL

SEQ ID NO: 106350 - protein, 13 aa, Homo sapiens
  CDR3 for beta chain variable domain of TCR clone 53175 (TRBV7-9, TRBJ2-7)
CASSFAGAYEQYF

SEQ ID NO: 106351 - protein, 12 aa, Homo sapiens
  CDR3 for alpha chain variable domain of TCR clone 53176 (TRAV13-1, TRAJ9)
CASHTGGFKTIF

SEQ ID NO: 106352 - protein, 13 aa, Homo sapiens
  CDR3 for beta chain variable domain of TCR clone 53176 (TRBV12-4, TRBJ1-2)
CASSSGSKDGYTV

SEQ ID NO: 106353 - protein, 14 aa, Homo sapiens
  CDR3 for alpha chain variable domain of TCR clone 53177 (TRAV23/DV6, TRAJ8)
CAASKATGFQQLVF

SEQ ID NO: 106354 - protein, 15 aa, Homo sapiens
  CDR3 for beta chain variable domain of TCR clone 53177 (TRBV28, TRBJ2-3)
CASSPDRQGANTQYF

SEQ ID NO: 106355 - protein, 17 aa, Homo sapiens
  CDR3 for alpha chain variable domain of TCR clone 53178 (TRAV3, TRAJ6)
CAVRDGPRAGGSYIPTF

SEQ ID NO: 106356 - protein, 14 aa, Homo sapiens
  CDR3 for beta chain variable domain of TCR clone 53178 (TRBV19, TRBJ2-1)
CARGARSFQWEQFF

SEQ ID NO: 106357 - protein, 13 aa, Homo sapiens
  CDR3 for alpha chain variable domain of TCR clone 53179 (TRAV2, TRAJ21)
CAVEDLNFNKFYF

SEQ ID NO: 106358 - protein, 15 aa, Homo sapiens
  CDR3 for beta chain variable domain of TCR clone 53179 (TRBV28, TRBJ2-5)
CASSPGQGSIENQYF

SEQ ID NO: 106359 - protein, 16 aa, Homo sapiens
  CDR3 for alpha chain variable domain of TCR clone 53180 (TRAV27, TRAJ52)
CAGAPAGGTSYGKLTF

SEQ ID NO: 106360 - protein, 12 aa, Homo sapiens
  CDR3 for beta chain variable domain of TCR clone 53180 (TRBV27, TRBJ2-1)
RASRGFYNEQFF

SEQ ID NO: 106361 - protein, 17 aa, Homo sapiens
  CDR3 for alpha chain variable domain of TCR clone 53181 (TRAV3, TRAJ6)
CAVRDGPMAGGSYIPTF

SEQ ID NO: 106362 - protein, 20 aa, Homo sapiens
  CDR3 for beta chain variable domain of TCR clone 53181 (TRBV28, TRBJ2-1)
CASTPIGRSPGLAGGNEQFF

SEQ ID NO: 106363 - protein, 13 aa, Homo sapiens
  CDR3 for alpha chain variable domain of TCR clone 53182 (TRAV13-2, TRAJ13)
CAERPGGYQKVTF

SEQ ID NO: 106364 - protein, 17 aa, Homo sapiens
  CDR3 for beta chain variable domain of TCR clone 53182 (TRBV13, TRBJ2-3)
CASSLSRVAGGRNTQYF

SEQ ID NO: 106365 - protein, 12 aa, Homo sapiens
  CDR3 for alpha chain variable domain of TCR clone 53183 (TRAV12-3, TRAJ17)
CAMTLTGNKLTF

SEQ ID NO: 106366 - protein, 15 aa, Homo sapiens
  CDR3 for beta chain variable domain of TCR clone 53183 (TRBV7-8, TRBJ2-2)
CASSDRGPNTGELFF

SEQ ID NO: 106367 - protein, 12 aa, Homo sapiens
  CDR3 for alpha chain variable domain of TCR clone 53184 (TRAV13-1, TRAJ49)
CAAPNTGNQFYF

SEQ ID NO: 106368 - protein, 17 aa, Homo sapiens
  CDR3 for beta chain variable domain of TCR clone 53184 (TRBV25-1, TRBJ2-7)
CASSGARVVFSSYEQYF

SEQ ID NO: 106369 - protein, 14 aa, Homo sapiens
  CDR3 for alpha chain variable domain of TCR clone 53185 (TRAV8-2, TRAJ4)
CVVSPSGGYNKLIF

SEQ ID NO: 106370 - protein, 15 aa, Homo sapiens
  CDR3 for beta chain variable domain of TCR clone 53185 (TRBV2, TRBJ2-1)
CASSELAGSYDEQFF

SEQ ID NO: 106371 - protein, 13 aa, Homo sapiens
  CDR3 for alpha chain variable domain of TCR clone 53186 (TRAV13-1, TRAJ39)
CAASIWAGNMLTF

SEQ ID NO: 106372 - protein, 15 aa, Homo sapiens
  CDR3 for beta chain variable domain of TCR clone 53186 (TRBV7-9, TRBJ1-1)
CASSLLEQGGAEAFF

SEQ ID NO: 106373 - protein, 14 aa, Homo sapiens
  CDR3 for alpha chain variable domain of TCR clone 53187 (TRAV1-2, TRAJ8)
CAVREDTGFQKLVF

SEQ ID NO: 106374 - protein, 15 aa, Homo sapiens
  CDR3 for beta chain variable domain of TCR clone 53187 (TRBV5-7, TRBJ2-3)
CASSPGLATTGTQYF

SEQ ID NO: 106375 - protein, 15 aa, Homo sapiens
  CDR3 for alpha chain variable domain of TCR clone 53188 (TRAV8-3, TRAJ27)
CAVGPSKTNAGKSTF

SEQ ID NO: 106376 - protein, 17 aa, Homo sapiens
  CDR3 for beta chain variable domain of TCR clone 53188 (TRBV11-2, TRBJ2-1)
CASSLYPPGVEYNEQFF

SEQ ID NO: 106377 - protein, 14 aa, Homo sapiens
  CDR3 for alpha chain variable domain of TCR clone 53189 (TRAV17, TRAJ54)
CATDANQGAQKLVF

SEQ ID NO: 106378 - protein, 13 aa, Homo sapiens
  CDR3 for beta chain variable domain of TCR clone 53189 (TRBV7-9, TRBJ1-2)
CASSLKQNYGYTF

SEQ ID NO: 106379 - protein, 14 aa, Homo sapiens
  CDR3 for alpha chain variable domain of TCR clone 53190 (TRAV16, TRAJ33)
CALSAMDSNYQLIW

SEQ ID NO: 106380 - protein, 12 aa, Homo sapiens
  CDR3 for beta chain variable domain of TCR clone 53190 (TRBV28, TRBJ2-6)
CAVQAGANVLTF

SEQ ID NO: 106381 - protein, 13 aa, Homo sapiens
  CDR3 for alpha chain variable domain of TCR clone 53191 (TRAV12-2, TRAJ20)
CAVYPSNDYKLSF

SEQ ID NO: 106382 - protein, 14 aa, Homo sapiens
  CDR3 for beta chain variable domain of TCR clone 53191 (TRBV7-3, TRBJ2-1)
CASSLAGGTNEQFF

SEQ ID NO: 106383 - protein, 13 aa, Homo sapiens
  CDR3 for alpha chain variable domain of TCR clone 53192 (TRAV12-2, TRAJ30)
RAVNLNRDDKIIF

SEQ ID NO: 106384 - protein, 12 aa, Homo sapiens
  CDR3 for beta chain variable domain of TCR clone 53192 (TRBV11-2, TRBJ2-2)
CASSLGGGEPFF

SEQ ID NO: 106385 - protein, 18 aa, Homo sapiens
  CDR3 for alpha chain variable domain of TCR clone 53193 (TRAV12-2, )
CAVEDIQNPDPAVYQLSD

SEQ ID NO: 106386 - protein, 16 aa, Homo sapiens
  CDR3 for beta chain variable domain of TCR clone 53193 (TRBV6-1, TRBJ1-2)
CASSGAWQGRSHGYTF

SEQ ID NO: 106387 - protein, 14 aa, Homo sapiens
  CDR3 for alpha chain variable domain of TCR clone 53194 (TRAV12-2, TRAJ17)
CAVLFKAAGNKLTF

SEQ ID NO: 106388 - protein, 15 aa, Homo sapiens
  CDR3 for beta chain variable domain of TCR clone 53194 (TRBV6-1, TRBJ2-3)
CASSERGGITDTQYF

SEQ ID NO: 106389 - protein, 15 aa, Homo sapiens
  CDR3 for alpha chain variable domain of TCR clone 53195 (TRAV23/DV6, TRAJ38)
CAASGGAGNNRKLIW

SEQ ID NO: 106390 - protein, 13 aa, Homo sapiens
  CDR3 for beta chain variable domain of TCR clone 53195 (TRBV7-2, TRBJ1-2)
CAGSLPGLYGYTF

SEQ ID NO: 106391 - protein, 15 aa, Homo sapiens
  CDR3 for alpha chain variable domain of TCR clone 53196 (TRAV2, TRAJ9)
CAVEDRGTGGFKTIF

SEQ ID NO: 106392 - protein, 14 aa, Homo sapiens
  CDR3 for beta chain variable domain of TCR clone 53196 (TRBV25-1, TRBJ1-1)
CASTHLGGNTEAFL

SEQ ID NO: 106393 - protein, 15 aa, Homo sapiens
  CDR3 for alpha chain variable domain of TCR clone 53197 (TRAV3, TRAJ5)
CAVRDLDTGRRDLTF

SEQ ID NO: 106394 - protein, 13 aa, Homo sapiens
  CDR3 for beta chain variable domain of TCR clone 53197 (TRBV12-4, TRBJ2-7)
CASSPTETYEQYF

SEQ ID NO: 106395 - protein, 12 aa, Homo sapiens
  CDR3 for alpha chain variable domain of TCR clone 53198 (TRAV13-1, TRAJ21)
CAAKEGFNKFYF

SEQ ID NO: 106396 - protein, 15 aa, Homo sapiens
  CDR3 for beta chain variable domain of TCR clone 53198 (TRBV19, TRBJ2-7)
CASSPAGSGEALRYF

SEQ ID NO: 106397 - protein, 14 aa, Homo sapiens
  CDR3 for alpha chain variable domain of TCR clone 53199 (TRAV1-2, TRAJ16)
CAVNRFSDGQKLPF

SEQ ID NO: 106398 - protein, 12 aa, Homo sapiens
  CDR3 for beta chain variable domain of TCR clone 53199 (TRBV11-2, TRBJ2-1)
CASSPGNNEQFF

SEQ ID NO: 106399 - protein, 16 aa, Homo sapiens
  CDR3 for alpha chain variable domain of TCR clone 53200 (TRAV4, TRAJ22)
CLVGDLYSGSARQLTF

SEQ ID NO: 106400 - protein, 13 aa, Homo sapiens
  CDR3 for beta chain variable domain of TCR clone 53200 (TRBV7-7, TRBJ2-3)
CASSLSRADTQYF

SEQ ID NO: 106401 - protein, 12 aa, Homo sapiens
  CDR3 for alpha chain variable domain of TCR clone 53201 (TRAV13-1, TRAJ21)
CAAKEGLNKFYF

SEQ ID NO: 106402 - protein, 14 aa, Homo sapiens
  CDR3 for beta chain variable domain of TCR clone 53201 (TRBV5-4, TRBJ1-1)
CASSLDSRRGEAFF

SEQ ID NO: 106403 - protein, 13 aa, Homo sapiens
  CDR3 for alpha chain variable domain of TCR clone 53202 (TRAV8-3, TRAJ36)
CAVGVTGANNLFF

SEQ ID NO: 106404 - protein, 15 aa, Homo sapiens
  CDR3 for beta chain variable domain of TCR clone 53202 (TRBV7-2, TRBJ1-2)
CASSPRAGWNYGYTF

SEQ ID NO: 106405 - protein, 13 aa, Homo sapiens
  CDR3 for alpha chain variable domain of TCR clone 53203 (TRAV27, TRAJ6)
CAGGTRGSYIPTF

SEQ ID NO: 106406 - protein, 14 aa, Homo sapiens
  CDR3 for beta chain variable domain of TCR clone 53203 (TRBV7-2, TRBJ2-7)
CASRSQGAAYEQYF

SEQ ID NO: 106407 - protein, 14 aa, Homo sapiens
  CDR3 for alpha chain variable domain of TCR clone 53204 (TRAV1-2, TRAJ16)
CAVNRFSDGKKLLF

SEQ ID NO: 106408 - protein, 14 aa, Homo sapiens
  CDR3 for beta chain variable domain of TCR clone 53204 (TRBV13, TRBJ2-5)
CASSLGRGQETQYF

SEQ ID NO: 106409 - protein, 14 aa, Homo sapiens
  CDR3 for alpha chain variable domain of TCR clone 53205 (TRAV21, TRAJ45)
CAVSSGGGADGLTF

SEQ ID NO: 106410 - protein, 15 aa, Homo sapiens
  CDR3 for beta chain variable domain of TCR clone 53205 (TRBV11-2, TRBJ1-3)
CASSLDGTVGNTIYF

SEQ ID NO: 106411 - protein, 15 aa, Homo sapiens
  CDR3 for alpha chain variable domain of TCR clone 53206 (TRAV3, TRAJ22)
CAVRDRGGSARQLTF

SEQ ID NO: 106412 - protein, 11 aa, Homo sapiens
  CDR3 for beta chain variable domain of TCR clone 53206 (TRBV7-8, TRBJ2-7)
CASSLSLEQYF

SEQ ID NO: 106413 - protein, 14 aa, Homo sapiens
  CDR3 for alpha chain variable domain of TCR clone 53207 (TRAV12-2, TRAJ13)
CAVKKTGGYQKVTF

SEQ ID NO: 106414 - protein, 15 aa, Homo sapiens
  CDR3 for beta chain variable domain of TCR clone 53207 (TRBV7-2, TRBJ2-7)
CASSLKGALTYEQYF

SEQ ID NO: 106415 - protein, 14 aa, Homo sapiens
  CDR3 for alpha chain variable domain of TCR clone 53208 (TRAV8-3, TRAJ23)
CAVIIYNQGGKLIF

SEQ ID NO: 106416 - protein, 15 aa, Homo sapiens
  CDR3 for beta chain variable domain of TCR clone 53208 (TRBV18, TRBJ2-1)
YASSPPSASYNEQFF

SEQ ID NO: 106417 - protein, 13 aa, Homo sapiens
  CDR3 for alpha chain variable domain of TCR clone 53209 (TRAV21, TRAJ27)
CAARPGNAGKSTF

SEQ ID NO: 106418 - protein, 14 aa, Homo sapiens
  CDR3 for beta chain variable domain of TCR clone 53209 (TRBV7-3, TRBJ1-1)
CASSLGTGYTEAFF

SEQ ID NO: 106419 - protein, 12 aa, Homo sapiens
  CDR3 for alpha chain variable domain of TCR clone 53210 (TRAV12-1, TRAJ40)
CVVYSGTYKYIF

SEQ ID NO: 106420 - protein, 14 aa, Homo sapiens
  CDR3 for beta chain variable domain of TCR clone 53210 (TRBV7-3, TRBJ2-1)
CASSLAGGTNEQFF

SEQ ID NO: 106421 - protein, 21 aa, Homo sapiens
  CDR3 for alpha chain variable domain of TCR clone 53211 (TRAV25, TRAJ3)
TATQTTDVGTFAYSSASKIIF

SEQ ID NO: 106422 - protein, 13 aa, Homo sapiens
  CDR3 for beta chain variable domain of TCR clone 53211 (TRBV10-3, TRBJ1-2)
CAISERDSYGYTF

SEQ ID NO: 106423 - protein, 15 aa, Homo sapiens
  CDR3 for alpha chain variable domain of TCR clone 53212 (TRAV35, TRAJ52)
CAGSRGGTSYGKLTF

SEQ ID NO: 106424 - protein, 14 aa, Homo sapiens
  CDR3 for beta chain variable domain of TCR clone 53212 (TRBV20-1, TRBJ2-7)
CSAWTALSSYEQYF

SEQ ID NO: 106425 - protein, 13 aa, Homo sapiens
  CDR3 for alpha chain variable domain of TCR clone 53213 (TRAV2, TRAJ15)
CAVASQAGTALIF

SEQ ID NO: 106426 - protein, 14 aa, Homo sapiens
  CDR3 for beta chain variable domain of TCR clone 53213 (TRBV2, TRBJ2-3)
CASSEEQNTDTQYF

SEQ ID NO: 106427 - protein, 14 aa, Homo sapiens
  CDR3 for alpha chain variable domain of TCR clone 53214 (TRAV12-2, TRAJ5)
CAVNRSTGRRALTF

SEQ ID NO: 106428 - protein, 16 aa, Homo sapiens
  CDR3 for beta chain variable domain of TCR clone 53214 (TRBV19, TRBJ2-1)
CASSKAGPSSYNEQFF

SEQ ID NO: 106429 - protein, 12 aa, Homo sapiens
  CDR3 for alpha chain variable domain of TCR clone 53215 (TRAV8-4, TRAJ43)
CAVSGNNNDMRF

SEQ ID NO: 106430 - protein, 13 aa, Homo sapiens
  CDR3 for beta chain variable domain of TCR clone 53215 (TRBV7-9, TRBJ1-2)
CASSLKQNYGYTF

SEQ ID NO: 106431 - protein, 15 aa, Homo sapiens
  CDR3 for alpha chain variable domain of TCR clone 53216 (TRAV21, TRAJ53)
CATLNSGGSDYKLTF

SEQ ID NO: 106432 - protein, 15 aa, Homo sapiens
  CDR3 for beta chain variable domain of TCR clone 53216 (TRBV20-1, TRBJ2-7)
CSARDRVSGMDEQYF

SEQ ID NO: 106433 - protein, 14 aa, Homo sapiens
  CDR3 for alpha chain variable domain of TCR clone 53217 (TRAV17, TRAJ50)
CATMMKTSYDKVIF

SEQ ID NO: 106434 - protein, 13 aa, Homo sapiens
  CDR3 for beta chain variable domain of TCR clone 53217 (TRBV12-4, TRBJ1-5)
CASSPDRAQPQHF

SEQ ID NO: 106435 - protein, 11 aa, Homo sapiens
  CDR3 for alpha chain variable domain of TCR clone 53218 (TRAV21, TRAJ34)
CAHYNTDKLIF

SEQ ID NO: 106436 - protein, 15 aa, Homo sapiens
  CDR3 for beta chain variable domain of TCR clone 53218 (TRBV19, TRBJ2-1)
CASSTGTSSYNEQFF

SEQ ID NO: 106437 - protein, 13 aa, Homo sapiens
  CDR3 for alpha chain variable domain of TCR clone 53219 (TRAV29/DV5, TRAJ44)
CAASTGTASKLTF

SEQ ID NO: 106438 - protein, 13 aa, Homo sapiens
  CDR3 for beta chain variable domain of TCR clone 53219 (TRBV19, TRBJ2-7)
CASRKAGGSEEYF

SEQ ID NO: 106439 - protein, 17 aa, Homo sapiens
  CDR3 for alpha chain variable domain of TCR clone 53220 (TRAV8-6, TRAJ58)
CAVSSWVGETSGSRLTF

SEQ ID NO: 106440 - protein, 13 aa, Homo sapiens
  CDR3 for beta chain variable domain of TCR clone 53220 (TRBV4-2, TRBJ2-1)
CQRPDRAYNEQFF

SEQ ID NO: 106441 - protein, 14 aa, Homo sapiens
  CDR3 for alpha chain variable domain of TCR clone 53221 (TRAV9-2, TRAJ39)
CALYIYNAGNMLTF

SEQ ID NO: 106442 - protein, 12 aa, Homo sapiens
  CDR3 for beta chain variable domain of TCR clone 53221 (TRBV7-8, TRBJ2-4)
CASSLGGNIQYF

SEQ ID NO: 106443 - protein, 12 aa, Homo sapiens
  CDR3 for alpha chain variable domain of TCR clone 53222 (TRAV35, TRAJ30)
CAGLNRDDKIIF

SEQ ID NO: 106444 - protein, 14 aa, Homo sapiens
  CDR3 for beta chain variable domain of TCR clone 53222 (TRBV7-2, TRBJ2-7)
CASSLYPGRYEQYF

SEQ ID NO: 106445 - protein, 14 aa, Homo sapiens
  CDR3 for alpha chain variable domain of TCR clone 53223 (TRAV13-1, TRAJ35)
CAASKGGFGNVLHG

SEQ ID NO: 106446 - protein, 13 aa, Homo sapiens
  CDR3 for beta chain variable domain of TCR clone 53223 (TRBV7-3, TRBJ1-1)
CASSQDWGAEAFF

SEQ ID NO: 106447 - protein, 16 aa, Homo sapiens
  CDR3 for alpha chain variable domain of TCR clone 53224 (TRAV30, TRAJ24)
CGTEIVDADSWGKFQF

SEQ ID NO: 106448 - protein, 17 aa, Homo sapiens
  CDR3 for beta chain variable domain of TCR clone 53224 (TRBV4-1, TRBJ2-7)
CASSRDPLGVRGGEQYF

SEQ ID NO: 106449 - protein, 13 aa, Homo sapiens
  CDR3 for alpha chain variable domain of TCR clone 53225 (TRAV1-2, TRAJ9)
CAVLNTGGFKTIF

SEQ ID NO: 106450 - protein, 14 aa, Homo sapiens
  CDR3 for beta chain variable domain of TCR clone 53225 (TRBV20-1, TRBJ2-3)
CSARGGTSTDTRYF

SEQ ID NO: 106451 - protein, 15 aa, Homo sapiens
  CDR3 for alpha chain variable domain of TCR clone 53226 (TRAV23/DV6, TRAJ18)
CAARYRGSTLGRLYF

SEQ ID NO: 106452 - protein, 13 aa, Homo sapiens
  CDR3 for beta chain variable domain of TCR clone 53226 (TRBV7-2, TRBJ2-7)
CASSFPSGSEQYF

SEQ ID NO: 106453 - protein, 14 aa, Homo sapiens
  CDR3 for alpha chain variable domain of TCR clone 53227 (TRAV1-2, TRAJ16)
CAVNRFSDGQQLLF

SEQ ID NO: 106454 - protein, 16 aa, Homo sapiens
  CDR3 for beta chain variable domain of TCR clone 53227 (TRBV12-5, TRBJ2-5)
CASGPRTSGNQETQYF

SEQ ID NO: 106455 - protein, 16 aa, Homo sapiens
  CDR3 for alpha chain variable domain of TCR clone 53228 (TRAV3, TRAJ37)
CAVRVKGSGNTGKLIF

SEQ ID NO: 106456 - protein, 13 aa, Homo sapiens
  CDR3 for beta chain variable domain of TCR clone 53228 (TRBV14, TRBJ2-7)
CASSQDRRYEQYF

SEQ ID NO: 106457 - protein, 13 aa, Homo sapiens
  CDR3 for alpha chain variable domain of TCR clone 53229 (TRAV13-1, TRAJ39)
CSKYSNAGNMLTF

SEQ ID NO: 106458 - protein, 13 aa, Homo sapiens
  CDR3 for beta chain variable domain of TCR clone 53229 (TRBV27, TRBJ1-4)
CASSLMGDEKLFF

SEQ ID NO: 106459 - protein, 14 aa, Homo sapiens
  CDR3 for alpha chain variable domain of TCR clone 53230 (TRAV1-2, TRAJ16)
CAVNRFSDGQKLLF

SEQ ID NO: 106460 - protein, 16 aa, Homo sapiens
  CDR3 for beta chain variable domain of TCR clone 53230 (TRBV19, TRBJ1-1)
CASSPTRFWPGTEAFF

SEQ ID NO: 106461 - protein, 13 aa, Homo sapiens
  CDR3 for alpha chain variable domain of TCR clone 53231 (TRAV8-3, TRAJ36)
CAAGATGANNLFS

SEQ ID NO: 106462 - protein, 15 aa, Homo sapiens
  CDR3 for beta chain variable domain of TCR clone 53231 (TRBV7-2, TRBJ1-2)
CASSPRAGWSYGYTF

SEQ ID NO: 106463 - protein, 14 aa, Homo sapiens
  CDR3 for alpha chain variable domain of TCR clone 53232 (TRAV12-2, TRAJ13)
CAVKKTGGYQKVTF

SEQ ID NO: 106464 - protein, 16 aa, Homo sapiens
  CDR3 for beta chain variable domain of TCR clone 53232 (TRBV20-1, TRBJ1-2)
CSASMGQGVANYGDTF

SEQ ID NO: 106465 - protein, 13 aa, Homo sapiens
  CDR3 for alpha chain variable domain of TCR clone 53233 (TRAV35, TRAJ42)
CAGFPGSQGNLIF

SEQ ID NO: 106466 - protein, 13 aa, Homo sapiens
  CDR3 for beta chain variable domain of TCR clone 53233 (TRBV29-1, TRBJ2-1)
CSVEDGRVNEQFF

SEQ ID NO: 106467 - protein, 20 aa, Homo sapiens
  CDR3 for alpha chain variable domain of TCR clone 53234 (TRAV12-2, TRAJ52)
SPVIQPPDRAGGTSYGKLTF

SEQ ID NO: 106468 - protein, 16 aa, Homo sapiens
  CDR3 for beta chain variable domain of TCR clone 53234 (TRBV15, TRBJ1-2)
CATSRGPRTGGGGYTF

SEQ ID NO: 106469 - protein, 12 aa, Homo sapiens
  CDR3 for alpha chain variable domain of TCR clone 53235 (TRAV12-1, TRAJ16)
CVVFRDGQKLLF

SEQ ID NO: 106470 - protein, 16 aa, Homo sapiens
  CDR3 for beta chain variable domain of TCR clone 53235 (TRBV20-1, TRBJ2-6)
CSASSQGYDGANVLTF

SEQ ID NO: 106471 - protein, 12 aa, Homo sapiens
  CDR3 for alpha chain variable domain of TCR clone 53236 (TRAV21, TRAJ31)
CAVWGNNARLMF

SEQ ID NO: 106472 - protein, 13 aa, Homo sapiens
  CDR3 for beta chain variable domain of TCR clone 53236 (TRBV10-3, TRBJ2-7)
CASKLAVNYEQYF

SEQ ID NO: 106473 - protein, 16 aa, Homo sapiens
  CDR3 for alpha chain variable domain of TCR clone 53237 (TRAV16, TRAJ52)
CALSAAGGTSYGKLTF

SEQ ID NO: 106474 - protein, 12 aa, Homo sapiens
  CDR3 for beta chain variable domain of TCR clone 53237 (TRBV12-4, TRBJ1-3)
CASSFPGNTIYF

SEQ ID NO: 106475 - protein, 12 aa, Homo sapiens
  CDR3 for alpha chain variable domain of TCR clone 53238 (TRAV8-3, TRAJ26)
CAGDDYGQNFVF

SEQ ID NO: 106476 - protein, 13 aa, Homo sapiens
  CDR3 for beta chain variable domain of TCR clone 53238 (TRBV20-1, TRBJ1-1)
CSAPLGGGTEAFF

SEQ ID NO: 106477 - protein, 12 aa, Homo sapiens
  CDR3 for alpha chain variable domain of TCR clone 53239 (TRAV12-3, TRAJ17)
CAMTLTGNKLTF

SEQ ID NO: 106478 - protein, 13 aa, Homo sapiens
  CDR3 for beta chain variable domain of TCR clone 53239 (TRBV9, TRBJ2-7)
CASSVDPTGEQYF

SEQ ID NO: 106479 - protein, 15 aa, Homo sapiens
  CDR3 for alpha chain variable domain of TCR clone 53240 (TRAV13-1, TRAJ50)
CAAKRSETSYDKVIF

SEQ ID NO: 106480 - protein, 13 aa, Homo sapiens
  CDR3 for beta chain variable domain of TCR clone 53240 (TRBV20-1, TRBJ2-3)
CSARAGGRDTQYF

SEQ ID NO: 106481 - protein, 15 aa, Homo sapiens
  CDR3 for alpha chain variable domain of TCR clone 53241 (TRAV26-1, TRAJ44)
CIVRANTGTASKLTI

SEQ ID NO: 106482 - protein, 16 aa, Homo sapiens
  CDR3 for beta chain variable domain of TCR clone 53241 (TRBV7-7, TRBJ2-1)
CASSLASGTSYNEQFF

SEQ ID NO: 106483 - protein, 15 aa, Homo sapiens
  CDR3 for alpha chain variable domain of TCR clone 53242 (TRAV12-1, TRAJ4)
CVVNPFSVGYNKLIF

SEQ ID NO: 106484 - protein, 13 aa, Homo sapiens
  CDR3 for beta chain variable domain of TCR clone 53242 (TRBV20-1, TRBJ1-2)
CSARGTADYGYTF

SEQ ID NO: 106485 - protein, 12 aa, Homo sapiens
  CDR3 for alpha chain variable domain of TCR clone 53243 (TRAV12-3, TRAJ17)
CAMTLTGNKLTS

SEQ ID NO: 106486 - protein, 14 aa, Homo sapiens
  CDR3 for beta chain variable domain of TCR clone 53243 (TRBV7-3, TRBJ2-1)
CASSLAGGTNEQFF

SEQ ID NO: 106487 - protein, 13 aa, Homo sapiens
  CDR3 for alpha chain variable domain of TCR clone 53244 (TRAV21, TRAJ11)
CAVPNSGYSTLTF

SEQ ID NO: 106488 - protein, 17 aa, Homo sapiens
  CDR3 for beta chain variable domain of TCR clone 53244 (TRBV7-3, TRBJ2-3)
CASSLMKRMRGADTQYF

SEQ ID NO: 106489 - protein, 14 aa, Homo sapiens
  CDR3 for alpha chain variable domain of TCR clone 53245 (TRAV2, TRAJ37)
CAVDFTSNTGKLIF

SEQ ID NO: 106490 - protein, 13 aa, Homo sapiens
  CDR3 for beta chain variable domain of TCR clone 53245 (TRBV20-1, TRBJ1-1)
CSAPLGGGTEAFS

SEQ ID NO: 106491 - protein, 12 aa, Homo sapiens
  CDR3 for alpha chain variable domain of TCR clone 53246 (TRAV2, TRAJ9)
CAVGAGGFKTIY

SEQ ID NO: 106492 - protein, 16 aa, Homo sapiens
  CDR3 for beta chain variable domain of TCR clone 53246 (TRBV13, TRBJ2-2)
CASSPRTGEHTGELFF

SEQ ID NO: 106493 - protein, 14 aa, Homo sapiens
  CDR3 for alpha chain variable domain of TCR clone 53247 (TRAV12-3, TRAJ10)
SHLPLKGGGNKLTF

SEQ ID NO: 106494 - protein, 16 aa, Homo sapiens
  CDR3 for beta chain variable domain of TCR clone 53247 (TRBV12-4, TRBJ2-5)
CASSWRPSGDLETQYF

SEQ ID NO: 106495 - protein, 11 aa, Homo sapiens
  CDR3 for alpha chain variable domain of TCR clone 53248 (TRAV12-3, TRAJ27)
CAMANAGQSTF

SEQ ID NO: 106496 - protein, 13 aa, Homo sapiens
  CDR3 for beta chain variable domain of TCR clone 53248 (TRBV20-1, TRBJ1-1)
CSARVGGNTEAFF

SEQ ID NO: 106497 - protein, 14 aa, Homo sapiens
  CDR3 for alpha chain variable domain of TCR clone 53249 (TRAV30, TRAJ33)
CGTVAPRSNYQLIW

SEQ ID NO: 106498 - protein, 16 aa, Homo sapiens
  CDR3 for beta chain variable domain of TCR clone 53249 (TRBV12-5, TRBJ2-5)
CASGPRTSGNQETQYF

SEQ ID NO: 106499 - protein, 13 aa, Homo sapiens
  CDR3 for alpha chain variable domain of TCR clone 53250 (TRAV35, TRAJ42)
CAGFPGSQGNLIF

SEQ ID NO: 106500 - protein, 12 aa, Homo sapiens
  CDR3 for beta chain variable domain of TCR clone 53250 (TRBV7-2, TRBJ1-6)
CASSLPSSPLHF

SEQ ID NO: 106501 - protein, 12 aa, Homo sapiens
  CDR3 for alpha chain variable domain of TCR clone 53251 (TRAV3, TRAJ31)
CAVRDGNARLMF

SEQ ID NO: 106502 - protein, 18 aa, Homo sapiens
  CDR3 for beta chain variable domain of TCR clone 53251 (TRBV7-2, TRBJ2-3)
CASSLKSEGSGITDTQYF

SEQ ID NO: 106503 - protein, 13 aa, Homo sapiens
  CDR3 for alpha chain variable domain of TCR clone 53252 (TRAV25, TRAJ26)
CAGRDNYGQNFVF

SEQ ID NO: 106504 - protein, 13 aa, Homo sapiens
  CDR3 for beta chain variable domain of TCR clone 53252 (TRBV13, TRBJ2-5)
CASSLGGEETQYF

SEQ ID NO: 106505 - protein, 13 aa, Homo sapiens
  CDR3 for alpha chain variable domain of TCR clone 53253 (TRAV16, TRAJ31)
CALSAHNNARLMF

SEQ ID NO: 106506 - protein, 17 aa, Homo sapiens
  CDR3 for beta chain variable domain of TCR clone 53253 (TRBV12-4, TRBJ2-1)
CASSTGLAGGRINEQFF

SEQ ID NO: 106507 - protein, 13 aa, Homo sapiens
  CDR3 for alpha chain variable domain of TCR clone 53254 (TRAV2, TRAJ40)
CAVVTSGTYKYIF

SEQ ID NO: 106508 - protein, 17 aa, Homo sapiens
  CDR3 for beta chain variable domain of TCR clone 53254 (TRBV7-3, TRBJ2-3)
CASSLMKRMRGEDTQYF

SEQ ID NO: 106509 - protein, 13 aa, Homo sapiens
  CDR3 for alpha chain variable domain of TCR clone 53255 (TRAV12-1, TRAJ34)
CVVTGYNTEKLIF

SEQ ID NO: 106510 - protein, 13 aa, Homo sapiens
  CDR3 for beta chain variable domain of TCR clone 53255 (TRBV28, TRBJ2-7)
CASKAGGVYEQYF

SEQ ID NO: 106511 - protein, 13 aa, Homo sapiens
  CDR3 for alpha chain variable domain of TCR clone 53256 (TRAV21, TRAJ20)
CAVGVFADYKLSF

SEQ ID NO: 106512 - protein, 14 aa, Homo sapiens
  CDR3 for beta chain variable domain of TCR clone 53256 (TRBV4-2, TRBJ1-4)
CASSLSSGNEKLFF

SEQ ID NO: 106513 - protein, 12 aa, Homo sapiens
  CDR3 for alpha chain variable domain of TCR clone 53257 (TRAV22, TRAJ29)
CAPPSGNTPLVF

SEQ ID NO: 106514 - protein, 14 aa, Homo sapiens
  CDR3 for beta chain variable domain of TCR clone 53257 (TRBV11-2, TRBJ2-7)
FASSLGAGAYEQYF

SEQ ID NO: 106515 - protein, 14 aa, Homo sapiens
  CDR3 for alpha chain variable domain of TCR clone 53258 (TRAV20, TRAJ29)
CAVQAWVGNTPLVF

SEQ ID NO: 106516 - protein, 15 aa, Homo sapiens
  CDR3 for beta chain variable domain of TCR clone 53258 (TRBV27, TRBJ2-1)
CASSNGGGSSNEQFF

SEQ ID NO: 106517 - protein, 18 aa, Homo sapiens
  CDR3 for alpha chain variable domain of TCR clone 53259 (TRAV29/DV5, TRAJ53)
CSVLLCGKRGGSNYKLTF

SEQ ID NO: 106518 - protein, 17 aa, Homo sapiens
  CDR3 for beta chain variable domain of TCR clone 53259 (TRBV7-8, TRBJ2-6)
CASSAGTGGAGANVLTF

SEQ ID NO: 106519 - protein, 17 aa, Homo sapiens
  CDR3 for alpha chain variable domain of TCR clone 53260 (TRAV21, TRAJ52)
CCEAFPAGGTSYGKLTF

SEQ ID NO: 106520 - protein, 15 aa, Homo sapiens
  CDR3 for beta chain variable domain of TCR clone 53260 (TRBV10-3, TRBJ2-3)
CAISLTSGGTDTQYF

SEQ ID NO: 106521 - protein, 12 aa, Homo sapiens
  CDR3 for alpha chain variable domain of TCR clone 53261 (TRAV17, TRAJ20)
RATYSNDYKLSF

SEQ ID NO: 106522 - protein, 11 aa, Homo sapiens
  CDR3 for beta chain variable domain of TCR clone 53261 (TRBV4-1, TRBJ2-2)
CASEHTGELFF

SEQ ID NO: 106523 - protein, 13 aa, Homo sapiens
  CDR3 for alpha chain variable domain of TCR clone 53262 (TRAV13-1, TRAJ5)
CAARVTGRRALTF

SEQ ID NO: 106524 - protein, 15 aa, Homo sapiens
  CDR3 for beta chain variable domain of TCR clone 53262 (TRBV7-9, TRBJ2-7)
CASSPGGGLTYEQCF

SEQ ID NO: 106525 - protein, 13 aa, Homo sapiens
  CDR3 for alpha chain variable domain of TCR clone 53263 (TRAV3, TRAJ20)
CAVRSLNDCKLSF

SEQ ID NO: 106526 - protein, 13 aa, Homo sapiens
  CDR3 for beta chain variable domain of TCR clone 53263 (TRBV7-3, TRBJ1-1)
CASSQDWGAEAFF

SEQ ID NO: 106527 - protein, 14 aa, Homo sapiens
  CDR3 for alpha chain variable domain of TCR clone 53264 (TRAV27, TRAJ23)
CAGLSYNQGGKLIF

SEQ ID NO: 106528 - protein, 15 aa, Homo sapiens
  CDR3 for beta chain variable domain of TCR clone 53264 (TRBV19, TRBJ2-2)
CASSLNRGVTGELFF

SEQ ID NO: 106529 - protein, 14 aa, Homo sapiens
  CDR3 for alpha chain variable domain of TCR clone 53265 (TRAV1-2, TRAJ6)
CAVSLSGGSYIPTF

SEQ ID NO: 106530 - protein, 15 aa, Homo sapiens
  CDR3 for beta chain variable domain of TCR clone 53265 (TRBV28, TRBJ2-7)
CASSPGGRGFYEQYV

SEQ ID NO: 106531 - protein, 16 aa, Homo sapiens
  CDR3 for alpha chain variable domain of TCR clone 53266 (TRAV3, TRAJ3)
CAVRDRAKSSASKIIF

SEQ ID NO: 106532 - protein, 16 aa, Homo sapiens
  CDR3 for beta chain variable domain of TCR clone 53266 (TRBV20-1, TRBJ2-4)
CSATSLAELAENIQYF

SEQ ID NO: 106533 - protein, 15 aa, Homo sapiens
  CDR3 for alpha chain variable domain of TCR clone 53267 (TRAV3, TRAJ5)
YAVRDLDTGRRALTF

SEQ ID NO: 106534 - protein, 13 aa, Homo sapiens
  CDR3 for beta chain variable domain of TCR clone 53267 (TRBV12-4, TRBJ2-7)
CASSPTETYEQYF

SEQ ID NO: 106535 - protein, 12 aa, Homo sapiens
  CDR3 for alpha chain variable domain of TCR clone 53268 (TRAV16, TRAJ27)
CALNHQCRQINL

SEQ ID NO: 106536 - protein, 13 aa, Homo sapiens
  CDR3 for beta chain variable domain of TCR clone 53268 (TRBV7-9, TRBJ1-2)
CASSLKQNYGYTF

SEQ ID NO: 106537 - protein, 14 aa, Homo sapiens
  CDR3 for alpha chain variable domain of TCR clone 53269 (TRAV16, TRAJ37)
CALDISGNTGKLIF

SEQ ID NO: 106538 - protein, 14 aa, Homo sapiens
  CDR3 for beta chain variable domain of TCR clone 53269 (TRBV19, TRBJ2-1)
CASPTFVLSGEQFF

SEQ ID NO: 106539 - protein, 14 aa, Homo sapiens
  CDR3 for alpha chain variable domain of TCR clone 53270 (TRAV30, TRAJ33)
CGTERRFSNYQLIW

SEQ ID NO: 106540 - protein, 16 aa, Homo sapiens
  CDR3 for beta chain variable domain of TCR clone 53270 (TRBV7-3, TRBJ2-2)
CASSLKRGALSGELFF

SEQ ID NO: 106541 - protein, 15 aa, Homo sapiens
  CDR3 for alpha chain variable domain of TCR clone 53271 (TRAV3, TRAJ3)
CAVRDMSSSASKIIF

SEQ ID NO: 106542 - protein, 17 aa, Homo sapiens
  CDR3 for beta chain variable domain of TCR clone 53271 (TRBV6-3, TRBJ2-1)
CASSYSSGTRGLDEQFF

SEQ ID NO: 106543 - protein, 13 aa, Homo sapiens
  CDR3 for alpha chain variable domain of TCR clone 53272 (TRAV12-2, TRAJ42)
CDVKRGSQGNLIF

SEQ ID NO: 106544 - protein, 13 aa, Homo sapiens
  CDR3 for beta chain variable domain of TCR clone 53272 (TRBV7-9, TRBJ2-3)
CASSPGSTDTQYF

SEQ ID NO: 106545 - protein, 14 aa, Homo sapiens
  CDR3 for alpha chain variable domain of TCR clone 53273 (TRAV12-3, TRAJ57)
CARALEGGSEKLVF

SEQ ID NO: 106546 - protein, 14 aa, Homo sapiens
  CDR3 for beta chain variable domain of TCR clone 53273 (TRBV7-9, TRBJ2-2)
CASSLVQDTGELFF

SEQ ID NO: 106547 - protein, 13 aa, Homo sapiens
  CDR3 for alpha chain variable domain of TCR clone 53274 (TRAV8-3, TRAJ44)
CAVVPGTVSKLTF

SEQ ID NO: 106548 - protein, 13 aa, Homo sapiens
  CDR3 for beta chain variable domain of TCR clone 53274 (TRBV10-3, TRBJ2-7)
CASKLAVNYEQYF

SEQ ID NO: 106549 - protein, 13 aa, Homo sapiens
  CDR3 for alpha chain variable domain of TCR clone 53275 (TRAV21, TRAJ20)
CAVGLRVDYKLSF

SEQ ID NO: 106550 - protein, 11 aa, Homo sapiens
  CDR3 for beta chain variable domain of TCR clone 53275 (TRBV12-4, TRBJ2-3)
CASTATDTQYF

SEQ ID NO: 106551 - protein, 12 aa, Homo sapiens
  CDR3 for alpha chain variable domain of TCR clone 53276 (TRAV13-2, TRAJ8)
CAPWLGFQKLVF

SEQ ID NO: 106552 - protein, 20 aa, Homo sapiens
  CDR3 for beta chain variable domain of TCR clone 53276 (TRBV7-8, TRBJ2-2)
CASSHLFPGPTIHITGELFF

SEQ ID NO: 106553 - protein, 15 aa, Homo sapiens
  CDR3 for alpha chain variable domain of TCR clone 53277 (TRAV8-3, TRAJ45)
CASSYSGGGADGLTF

SEQ ID NO: 106554 - protein, 15 aa, Homo sapiens
  CDR3 for beta chain variable domain of TCR clone 53277 (TRBV10-3, TRBJ1-3)
CAISDSQGAGNTIYF

SEQ ID NO: 106555 - protein, 12 aa, Homo sapiens
  CDR3 for alpha chain variable domain of TCR clone 53278 (TRAV3, TRAJ27)
CAVRDKAGKSTF

SEQ ID NO: 106556 - protein, 15 aa, Homo sapiens
  CDR3 for beta chain variable domain of TCR clone 53278 (TRBV4-1, TRBJ2-3)
CASSRGQGIPDTQYF

SEQ ID NO: 106557 - protein, 14 aa, Homo sapiens
  CDR3 for alpha chain variable domain of TCR clone 53279 (TRAV2, TRAJ37)
CAVDFTSNTGKLIF

SEQ ID NO: 106558 - protein, 15 aa, Homo sapiens
  CDR3 for beta chain variable domain of TCR clone 53279 (TRBV20-1, TRBJ1-1)
CSASGGVTGNTEAFF

SEQ ID NO: 106559 - protein, 15 aa, Homo sapiens
  CDR3 for alpha chain variable domain of TCR clone 53280 (TRAV26-1, TRAJ44)
CIVRANTGTASKLTF

SEQ ID NO: 106560 - protein, 15 aa, Homo sapiens
  CDR3 for beta chain variable domain of TCR clone 53280 (TRBV6-3, TRBJ2-7)
CASSSPGTVFYEQYF

SEQ ID NO: 106561 - protein, 13 aa, Homo sapiens
  CDR3 for alpha chain variable domain of TCR clone 53281 (TRAV2, TRAJ40)
CAVVTSGTYKYIF

SEQ ID NO: 106562 - protein, 15 aa, Homo sapiens
  CDR3 for beta chain variable domain of TCR clone 53281 (TRBV18, TRBJ2-1)
CASSPPSASYNEQLF

SEQ ID NO: 106563 - protein, 14 aa, Homo sapiens
  CDR3 for alpha chain variable domain of TCR clone 53282 (TRAV1-2, TRAJ6)
CAVSLSGGSYIPTF

SEQ ID NO: 106564 - protein, 15 aa, Homo sapiens
  CDR3 for beta chain variable domain of TCR clone 53282 (TRBV28, TRBJ2-7)
CASSPGGSGFYEQYF

SEQ ID NO: 106565 - protein, 16 aa, Homo sapiens
  CDR3 for alpha chain variable domain of TCR clone 53283 (TRAV21, TRAJ17)
CAVRPGEEAAGNKLTF

SEQ ID NO: 106566 - protein, 22 aa, Homo sapiens
  CDR3 for beta chain variable domain of TCR clone 53283 (TRBV7-2, TRBJ1-4)
CASSFDPYSKTVFWQWNPALCL

SEQ ID NO: 106567 - protein, 15 aa, Homo sapiens
  CDR3 for alpha chain variable domain of TCR clone 53284 (TRAV35, TRAJ52)
CAGPRGGTSYGKLTF

SEQ ID NO: 106568 - protein, 14 aa, Homo sapiens
  CDR3 for beta chain variable domain of TCR clone 53284 (TRBV20-1, TRBJ2-7)
CSAWTALGSYEQYF

SEQ ID NO: 106569 - protein, 14 aa, Homo sapiens
  CDR3 for alpha chain variable domain of TCR clone 53285 (TRAV26-1, TRAJ21)
CIVRPPYNFNKFYL

SEQ ID NO: 106570 - protein, 14 aa, Homo sapiens
  CDR3 for beta chain variable domain of TCR clone 53285 (TRBV11-3, TRBJ2-1)
CASSATTSGSIQFF

SEQ ID NO: 106571 - protein, 14 aa, Homo sapiens
  CDR3 for alpha chain variable domain of TCR clone 53286 (TRAV2, TRAJ9)
CAVEYRSGGFKTIF

SEQ ID NO: 106572 - protein, 16 aa, Homo sapiens
  CDR3 for beta chain variable domain of TCR clone 53286 (TRBV7-3, TRBJ2-1)
CASSLEGYRSYNEQFF

SEQ ID NO: 106573 - protein, 11 aa, Homo sapiens
  CDR3 for alpha chain variable domain of TCR clone 53287 (TRAV21, TRAJ11)
CAVNGYSTLTF

SEQ ID NO: 106574 - protein, 13 aa, Homo sapiens
  CDR3 for beta chain variable domain of TCR clone 53287 (TRBV3-1, TRBJ2-7)
CASSPGLAHTEYF

SEQ ID NO: 106575 - protein, 15 aa, Homo sapiens
  CDR3 for alpha chain variable domain of TCR clone 53288 (TRAV12-3, TRAJ9)
CVVSFGDTGGFKTIF

SEQ ID NO: 106576 - protein, 16 aa, Homo sapiens
  CDR3 for beta chain variable domain of TCR clone 53288 (TRBV27, TRBJ2-5)
CASSFGPGGTKETQYF

SEQ ID NO: 106577 - protein, 15 aa, Homo sapiens
  CDR3 for alpha chain variable domain of TCR clone 53289 (TRAV12-3, TRAJ49)
CAMAVTPNTCNQFYF

SEQ ID NO: 106578 - protein, 18 aa, Homo sapiens
  CDR3 for beta chain variable domain of TCR clone 53289 (TRBV4-1, TRBJ1-5)
CASSQDPRGQGLNQPQHF

SEQ ID NO: 106579 - protein, 17 aa, Homo sapiens
  CDR3 for alpha chain variable domain of TCR clone 53290 (TRAV4, TRAJ13)
CLVGVQGSSGGYQKVTF

SEQ ID NO: 106580 - protein, 18 aa, Homo sapiens
  CDR3 for beta chain variable domain of TCR clone 53290 (TRBV15, TRBJ2-3)
CATSRDGASSWDTDTQYF

SEQ ID NO: 106581 - protein, 13 aa, Homo sapiens
  CDR3 for alpha chain variable domain of TCR clone 53291 (TRAV29/DV5, TRAJ47)
CAASAEYGDKLVF

SEQ ID NO: 106582 - protein, 15 aa, Homo sapiens
  CDR3 for beta chain variable domain of TCR clone 53291 (TRBV7-9, TRBJ1-4)
CASSARTGGNEKLFF

SEQ ID NO: 106583 - protein, 14 aa, Homo sapiens
  CDR3 for alpha chain variable domain of TCR clone 53292 (TRAV3, TRAJ7)
YAVREEEREQQTRF

SEQ ID NO: 106584 - protein, 12 aa, Homo sapiens
  CDR3 for beta chain variable domain of TCR clone 53292 (TRBV24-1, TRBJ1-4)
CATSDPNEKLFF

SEQ ID NO: 106585 - protein, 13 aa, Homo sapiens
  CDR3 for alpha chain variable domain of TCR clone 53293 (TRAV2, TRAJ20)
CAVEDPSEYKLSF

SEQ ID NO: 106586 - protein, 16 aa, Homo sapiens
  CDR3 for beta chain variable domain of TCR clone 53293 (TRBV25-1, TRBJ2-7)
CASSELTGGGTYEQYF

SEQ ID NO: 106587 - protein, 13 aa, Homo sapiens
  CDR3 for alpha chain variable domain of TCR clone 53294 (TRAV17, TRAJ26)
CATVNNYGQNFVF

SEQ ID NO: 106588 - protein, 16 aa, Homo sapiens
  CDR3 for beta chain variable domain of TCR clone 53294 (TRBV2, TRBJ2-1)
CASSVGGSLSYNEQFF

SEQ ID NO: 106589 - protein, 15 aa, Homo sapiens
  CDR3 for alpha chain variable domain of TCR clone 53295 (TRAV17, TRAJ4)
CATGTWSGGYNKLIF

SEQ ID NO: 106590 - protein, 13 aa, Homo sapiens
  CDR3 for beta chain variable domain of TCR clone 53295 (TRBV10-2, TRBJ2-5)
CASSVGPQETQYF

SEQ ID NO: 106591 - protein, 14 aa, Homo sapiens
  CDR3 for alpha chain variable domain of TCR clone 53296 (TRAV3, TRAJ33)
CAVRDMDSNYQLIW

SEQ ID NO: 106592 - protein, 19 aa, Homo sapiens
  CDR3 for beta chain variable domain of TCR clone 53296 (TRBV7-3, TRBJ1-2)
CASSFPQGDDGELWLHLRF

SEQ ID NO: 106593 - protein, 15 aa, Homo sapiens
  CDR3 for alpha chain variable domain of TCR clone 53297 (TRAV3, TRAJ3)
CAVRDMSSSASKIIF

SEQ ID NO: 106594 - protein, 14 aa, Homo sapiens
  CDR3 for beta chain variable domain of TCR clone 53297 (TRBV6-6, TRBJ2-7)
CASSIAGGVDEQCF

SEQ ID NO: 106595 - protein, 14 aa, Homo sapiens
  CDR3 for alpha chain variable domain of TCR clone 53298 (TRAV2, TRAJ9)
CAVEDRSGGFKTIF

SEQ ID NO: 106596 - protein, 16 aa, Homo sapiens
  CDR3 for beta chain variable domain of TCR clone 53298 (TRBV9, TRBJ2-1)
CASSVGGGGNYNEQFF

SEQ ID NO: 106597 - protein, 14 aa, Homo sapiens
  CDR3 for alpha chain variable domain of TCR clone 53299 (TRAV13-1, TRAJ44)
CAAKATGTASKLTF

SEQ ID NO: 106598 - protein, 14 aa, Homo sapiens
  CDR3 for beta chain variable domain of TCR clone 53299 (TRBV19, TRBJ2-2)
CASSTRHRSGELFF

SEQ ID NO: 106599 - protein, 14 aa, Homo sapiens
  CDR3 for alpha chain variable domain of TCR clone 53300 (TRAV12-3, TRAJ58)
CAMSTETSGSRLTF

SEQ ID NO: 106600 - protein, 13 aa, Homo sapiens
  CDR3 for beta chain variable domain of TCR clone 53300 (TRBV27, TRBJ2-3)
CASSGGRTDTQYF

SEQ ID NO: 106601 - protein, 16 aa, Homo sapiens
  CDR3 for alpha chain variable domain of TCR clone 53301 (TRAV3, TRAJ23)
CAVKIGIYKQGGKLIF

SEQ ID NO: 106602 - protein, 17 aa, Homo sapiens
  CDR3 for beta chain variable domain of TCR clone 53301 (TRBV10-3, TRBJ2-6)
CAISESTAPSGANVLTF

SEQ ID NO: 106603 - protein, 12 aa, Homo sapiens
  CDR3 for alpha chain variable domain of TCR clone 53302 (TRAV12-2, TRAJ10)
WGVTGGGNKLTF

SEQ ID NO: 106604 - protein, 14 aa, Homo sapiens
  CDR3 for beta chain variable domain of TCR clone 53302 (TRBV19, TRBJ2-3)
CASSAPRGTDTQYF

SEQ ID NO: 106605 - protein, 13 aa, Homo sapiens
  CDR3 for alpha chain variable domain of TCR clone 53303 (TRAV27, TRAJ41)
CAGEGNSGYALNC

SEQ ID NO: 106606 - protein, 14 aa, Homo sapiens
  CDR3 for beta chain variable domain of TCR clone 53303 (TRBV7-2, TRBJ1-1)
CASSFLTGTTEAFF

SEQ ID NO: 106607 - protein, 14 aa, Homo sapiens
  CDR3 for alpha chain variable domain of TCR clone 53304 (TRAV1-2, TRAJ8)
CAVREDTGFQKLVF

SEQ ID NO: 106608 - protein, 16 aa, Homo sapiens
  CDR3 for beta chain variable domain of TCR clone 53304 (TRBV7-3, TRBJ2-2)
CASSLKRGTLPGELFF

SEQ ID NO: 106609 - protein, 14 aa, Homo sapiens
  CDR3 for alpha chain variable domain of TCR clone 53305 (TRAV1-2, TRAJ16)
CAVNRFSDGQKLLF

SEQ ID NO: 106610 - protein, 13 aa, Homo sapiens
  CDR3 for beta chain variable domain of TCR clone 53305 (TRBV3-1, TRBJ2-7)
CASSLRDGYEQYF

SEQ ID NO: 106611 - protein, 14 aa, Homo sapiens
  CDR3 for alpha chain variable domain of TCR clone 53306 (TRAV27, TRAJ49)
CAGRPEGTGSQFYF

SEQ ID NO: 106612 - protein, 15 aa, Homo sapiens
  CDR3 for beta chain variable domain of TCR clone 53306 (TRBV19, TRBJ2-1)
CASSIQATSYNEQFF

SEQ ID NO: 106613 - protein, 14 aa, Homo sapiens
  CDR3 for alpha chain variable domain of TCR clone 53307 (TRAV3, TRAJ9)
CAVRLNTGGFKTIF

SEQ ID NO: 106614 - protein, 15 aa, Homo sapiens
  CDR3 for beta chain variable domain of TCR clone 53307 (TRBV9, TRBJ1-6)
CASSVAGTGDSPLHF

SEQ ID NO: 106615 - protein, 13 aa, Homo sapiens
  CDR3 for alpha chain variable domain of TCR clone 53308 (TRAV38-2/DV8, TRAJ34)
CAYRTWNTDKLIF

SEQ ID NO: 106616 - protein, 16 aa, Homo sapiens
  CDR3 for beta chain variable domain of TCR clone 53308 (TRBV11-2, TRBJ2-7)
CASSPLAGGPRYEQYF

SEQ ID NO: 106617 - protein, 11 aa, Homo sapiens
  CDR3 for alpha chain variable domain of TCR clone 53309 (TRAV23/DV6, TRAJ49)
CAVAPVTSSIL

SEQ ID NO: 106618 - protein, 13 aa, Homo sapiens
  CDR3 for beta chain variable domain of TCR clone 53309 (TRBV6-1, TRBJ1-1)
CASSRQGNTETFF

SEQ ID NO: 106619 - protein, 14 aa, Homo sapiens
  CDR3 for alpha chain variable domain of TCR clone 53310 (TRAV1-2, TRAJ16)
CAANRFSDGQKLLF

SEQ ID NO: 106620 - protein, 15 aa, Homo sapiens
  CDR3 for beta chain variable domain of TCR clone 53310 (TRBV20-1, TRBJ2-7)
CSARDRVSGMDEQYF

SEQ ID NO: 106621 - protein, 16 aa, Homo sapiens
  CDR3 for alpha chain variable domain of TCR clone 53311 (TRAV30, TRAJ24)
CGTEIVDADSWGKFQF

SEQ ID NO: 106622 - protein, 19 aa, Homo sapiens
  CDR3 for beta chain variable domain of TCR clone 53311 (TRBV25-1, TRBJ2-2)
CAILVYRVERGRKTGELFF

SEQ ID NO: 106623 - protein, 13 aa, Homo sapiens
  CDR3 for alpha chain variable domain of TCR clone 53312 (TRAV13-2, TRAJ40)
CAGLISGTYKYIF

SEQ ID NO: 106624 - protein, 14 aa, Homo sapiens
  CDR3 for beta chain variable domain of TCR clone 53312 (TRBV19, TRBJ1-5)
CASGTEVYNQPQHF

SEQ ID NO: 106625 - protein, 13 aa, Homo sapiens
  CDR3 for alpha chain variable domain of TCR clone 53313 (TRAV12-3, TRAJ20)
CAMRRSNDYRLSF

SEQ ID NO: 106626 - protein, 15 aa, Homo sapiens
  CDR3 for beta chain variable domain of TCR clone 53313 (TRBV9, TRBJ2-3)
CASSVAGGRSDTQYF

SEQ ID NO: 106627 - protein, 14 aa, Homo sapiens
  CDR3 for alpha chain variable domain of TCR clone 53314 (TRAV35, TRAJ22)
CAGLRPGSARQLTF

SEQ ID NO: 106628 - protein, 13 aa, Homo sapiens
  CDR3 for beta chain variable domain of TCR clone 53314 (TRBV7-9, TRBJ2-7)
CASSFAGAYEQYF

SEQ ID NO: 106629 - protein, 14 aa, Homo sapiens
  CDR3 for alpha chain variable domain of TCR clone 53315 (TRAV12-3, TRAJ10)
SHLPLTGGGNKLTF

SEQ ID NO: 106630 - protein, 12 aa, Homo sapiens
  CDR3 for beta chain variable domain of TCR clone 53315 (TRBV2, TRBJ2-7)
CASKRGSYEQYF

SEQ ID NO: 106631 - protein, 10 aa, Homo sapiens
  CDR3 for alpha chain variable domain of TCR clone 53316 (TRAV12-2, TRAJ27)
CGANAGKSTF

SEQ ID NO: 106632 - protein, 17 aa, Homo sapiens
  CDR3 for beta chain variable domain of TCR clone 53316 (TRBV7-2, TRBJ2-3)
CASSLAGGLAGTAGQYF

SEQ ID NO: 106633 - protein, 14 aa, Homo sapiens
  CDR3 for alpha chain variable domain of TCR clone 53317 (TRAV12-3, TRAJ41)
CAMSAGNSGYALNF

SEQ ID NO: 106634 - protein, 11 aa, Homo sapiens
  CDR3 for beta chain variable domain of TCR clone 53317 (TRBV7-2, TRBJ2-3)
CASSSSDTHYF

SEQ ID NO: 106635 - protein, 12 aa, Homo sapiens
  CDR3 for alpha chain variable domain of TCR clone 53318 (TRAV21, TRAJ39)
CAADNAGNMPTF

SEQ ID NO: 106636 - protein, 13 aa, Homo sapiens
  CDR3 for beta chain variable domain of TCR clone 53318 (TRBV12-4, TRBJ1-1)
CASSPGTGFEAFF

SEQ ID NO: 106637 - protein, 14 aa, Homo sapiens
  CDR3 for alpha chain variable domain of TCR clone 53319 (TRAV9-2, TRAJ39)
CALYIYNAGNMLTF

SEQ ID NO: 106638 - protein, 12 aa, Homo sapiens
  CDR3 for beta chain variable domain of TCR clone 53319 (TRBV19, TRBJ2-1)
CASSMQDTEQFF

SEQ ID NO: 106639 - protein, 14 aa, Homo sapiens
  CDR3 for alpha chain variable domain of TCR clone 53320 (TRAV27, TRAJ45)
CAGAQEEVLTDTPL

SEQ ID NO: 106640 - protein, 17 aa, Homo sapiens
  CDR3 for beta chain variable domain of TCR clone 53320 (TRBV11-2, TRBJ2-1)
CASSLYPPGVEYNEQFF

SEQ ID NO: 106641 - protein, 16 aa, Homo sapiens
  CDR3 for alpha chain variable domain of TCR clone 53321 (TRAV3, TRAJ6)
CAVRDGLGRRKLHTYI

SEQ ID NO: 106642 - protein, 15 aa, Homo sapiens
  CDR3 for beta chain variable domain of TCR clone 53321 (TRBV5-1, TRBJ2-7)
CASSLGDFTTYEQYF

SEQ ID NO: 106643 - protein, 17 aa, Homo sapiens
  CDR3 for alpha chain variable domain of TCR clone 53322 (TRAV36/DV7, TRAJ52)
CAVAQRAGGTSYGKLTF

SEQ ID NO: 106644 - protein, 13 aa, Homo sapiens
  CDR3 for beta chain variable domain of TCR clone 53322 (TRBV5-7, TRBJ2-3)
CASSLGRTDTQYF

SEQ ID NO: 106645 - protein, 13 aa, Homo sapiens
  CDR3 for alpha chain variable domain of TCR clone 53323 (TRAV17, TRAJ9)
CATDYTGGCKTIF

SEQ ID NO: 106646 - protein, 16 aa, Homo sapiens
  CDR3 for beta chain variable domain of TCR clone 53323 (TRBV7-7, TRBJ2-1)
CASSLASGTSYNEQFF

SEQ ID NO: 106647 - protein, 13 aa, Homo sapiens
  CDR3 for alpha chain variable domain of TCR clone 53324 (TRAV3, TRAJ21)
CAVREPDFNKFYF

SEQ ID NO: 106648 - protein, 11 aa, Homo sapiens
  CDR3 for beta chain variable domain of TCR clone 53324 (TRBV19, TRBJ2-5)
CASSIKETQYF

SEQ ID NO: 106649 - protein, 13 aa, Homo sapiens
  CDR3 for alpha chain variable domain of TCR clone 53325 (TRAV12-3, TRAJ33)
CAMSVNSNYQLIW

SEQ ID NO: 106650 - protein, 11 aa, Homo sapiens
  CDR3 for beta chain variable domain of TCR clone 53325 (TRBV12-4, TRBJ2-3)
CASTATDTQYF

SEQ ID NO: 106651 - protein, 13 aa, Homo sapiens
  CDR3 for alpha chain variable domain of TCR clone 53326 (TRAV20, TRAJ17)
CAVLRDAGNKLTF

SEQ ID NO: 106652 - protein, 15 aa, Homo sapiens
  CDR3 for beta chain variable domain of TCR clone 53326 (TRBV5-1, TRBJ2-7)
CASSLNGGPAREQYF

SEQ ID NO: 106653 - protein, 18 aa, Homo sapiens
  CDR3 for alpha chain variable domain of TCR clone 53327 (TRAV13-1, TRAJ52)
CAASKRSAGGTGYGKLTF

SEQ ID NO: 106654 - protein, 13 aa, Homo sapiens
  CDR3 for beta chain variable domain of TCR clone 53327 (TRBV12-4, TRBJ1-2)
CASSLRQGKGYTF

SEQ ID NO: 106655 - protein, 15 aa, Homo sapiens
  CDR3 for alpha chain variable domain of TCR clone 53328 (TRAV21, TRAJ24)
CAARSSTDSWRKLQF

SEQ ID NO: 106656 - protein, 15 aa, Homo sapiens
  CDR3 for beta chain variable domain of TCR clone 53328 (TRBV5-1, TRBJ2-1)
CASSPPRAPYNEQFF

SEQ ID NO: 106657 - protein, 14 aa, Homo sapiens
  CDR3 for alpha chain variable domain of TCR clone 53329 (TRAV1-2, TRAJ16)
CVVNRFSDGQKLLF

SEQ ID NO: 106658 - protein, 14 aa, Homo sapiens
  CDR3 for beta chain variable domain of TCR clone 53329 (TRBV20-1, TRBJ2-1)
CSARGGSSYNEQFF

SEQ ID NO: 106659 - protein, 12 aa, Homo sapiens
  CDR3 for alpha chain variable domain of TCR clone 53330 (TRAV8-3, TRAJ26)
CAGDNYGQNFVF

SEQ ID NO: 106660 - protein, 15 aa, Homo sapiens
  CDR3 for beta chain variable domain of TCR clone 53330 (TRBV9, TRBJ2-1)
CAISLAGSSYNEQFF

SEQ ID NO: 106661 - protein, 12 aa, Homo sapiens
  CDR3 for alpha chain variable domain of TCR clone 53331 (TRAV29/DV5, TRAJ49)
CAATDTGNQFYF

SEQ ID NO: 106662 - protein, 13 aa, Homo sapiens
  CDR3 for beta chain variable domain of TCR clone 53331 (TRBV7-6, TRBJ1-2)
CASSLVADYGYTF

SEQ ID NO: 106663 - protein, 14 aa, Homo sapiens
  CDR3 for alpha chain variable domain of TCR clone 53332 (TRAV38-1, TRAJ40)
CALRPTSGTYKYIF

SEQ ID NO: 106664 - protein, 14 aa, Homo sapiens
  CDR3 for beta chain variable domain of TCR clone 53332 (TRBV25-1, TRBJ1-1)
CASTHLGGNTAAFF

SEQ ID NO: 106665 - protein, 13 aa, Homo sapiens
  CDR3 for alpha chain variable domain of TCR clone 53333 (TRAV8-3, TRAJ28)
CAVGAVGSFQLTF

SEQ ID NO: 106666 - protein, 14 aa, Homo sapiens
  CDR3 for beta chain variable domain of TCR clone 53333 (TRBV7-2, TRBJ2-7)
CASRSQGAAYEQYF

SEQ ID NO: 106667 - protein, 14 aa, Homo sapiens
  CDR3 for alpha chain variable domain of TCR clone 53334 (TRAV12-2, TRAJ17)
CAVNIKAAGNKLTF

SEQ ID NO: 106668 - protein, 18 aa, Homo sapiens
  CDR3 for beta chain variable domain of TCR clone 53334 (TRBV11-2, TRBJ2-3)
CASSLGGASRGAPNTQYF

SEQ ID NO: 106669 - protein, 12 aa, Homo sapiens
  CDR3 for alpha chain variable domain of TCR clone 53335 (TRAV13-2, TRAJ41)
CAKNVGRYALNF

SEQ ID NO: 106670 - protein, 12 aa, Homo sapiens
  CDR3 for beta chain variable domain of TCR clone 53335 (TRBV7-9, TRBJ1-1)
CASSLSGGVAFF

SEQ ID NO: 106671 - protein, 12 aa, Homo sapiens
  CDR3 for alpha chain variable domain of TCR clone 53336 (TRAV17, TRAJ39)
CATGAAGNMLTF

SEQ ID NO: 106672 - protein, 16 aa, Homo sapiens
  CDR3 for beta chain variable domain of TCR clone 53336 (TRBV7-9, TRBJ1-2)
CASSLGFSSGEDGYTF

SEQ ID NO: 106673 - protein, 14 aa, Homo sapiens
  CDR3 for alpha chain variable domain of TCR clone 53337 (TRAV13-1, TRAJ13)
CAASRVGGYQKVTF

SEQ ID NO: 106674 - protein, 17 aa, Homo sapiens
  CDR3 for beta chain variable domain of TCR clone 53337 (TRBV15, TRBJ1-5)
CATSRAPPGTRDQPQHF

SEQ ID NO: 106675 - protein, 17 aa, Homo sapiens
  CDR3 for alpha chain variable domain of TCR clone 53338 (TRAV13-1, TRAJ52)
CAASSGAGGTSYGKLTF

SEQ ID NO: 106676 - protein, 15 aa, Homo sapiens
  CDR3 for beta chain variable domain of TCR clone 53338 (TRBV2, TRBJ2-1)
CASSKLAGSYNEQFF

SEQ ID NO: 106677 - protein, 12 aa, Homo sapiens
  CDR3 for alpha chain variable domain of TCR clone 53339 (TRAV17, TRAJ57)
CATDGGSEKLVF

SEQ ID NO: 106678 - protein, 13 aa, Homo sapiens
  CDR3 for beta chain variable domain of TCR clone 53339 (TRBV7-9, TRBJ2-7)
CASSFAGAYEQHF

SEQ ID NO: 106679 - protein, 15 aa, Homo sapiens
  CDR3 for alpha chain variable domain of TCR clone 53340 (TRAV21, TRAJ37)
CAVRPTLSNTGKLIF

SEQ ID NO: 106680 - protein, 16 aa, Homo sapiens
  CDR3 for beta chain variable domain of TCR clone 53340 (TRBV24-1, TRBJ2-3)
CATSARRQDLTDTQYF

SEQ ID NO: 106681 - protein, 22 aa, Homo sapiens
  CDR3 for alpha chain variable domain of TCR clone 53341 (TRAV26-2, TRAJ32)
CCVLLHPESPLNYGGATNKLIF

SEQ ID NO: 106682 - protein, 13 aa, Homo sapiens
  CDR3 for beta chain variable domain of TCR clone 53341 (TRBV7-3, TRBJ2-1)
CASSLWPYNEQFF

SEQ ID NO: 106683 - protein, 12 aa, Homo sapiens
  CDR3 for alpha chain variable domain of TCR clone 53342 (TRAV16, TRAJ13)
CITLRGYQKVTF

SEQ ID NO: 106684 - protein, 17 aa, Homo sapiens
  CDR3 for beta chain variable domain of TCR clone 53342 (TRBV28, TRBJ2-5)
CAGSRQGGLAGAETQYF

SEQ ID NO: 106685 - protein, 17 aa, Homo sapiens
  CDR3 for alpha chain variable domain of TCR clone 53343 (TRAV3, TRAJ6)
CAVRDGPRAGGSYIPTF

SEQ ID NO: 106686 - protein, 15 aa, Homo sapiens
  CDR3 for beta chain variable domain of TCR clone 53343 (TRBV28, TRBJ1-3)
CASSMGWASGNTIYF

SEQ ID NO: 106687 - protein, 14 aa, Homo sapiens
  CDR3 for alpha chain variable domain of TCR clone 53344 (TRAV35, TRAJ38)
CAGSNAGNDRKLIW

SEQ ID NO: 106688 - protein, 12 aa, Homo sapiens
  CDR3 for beta chain variable domain of TCR clone 53344 (TRBV19, TRBJ2-7)
CASTDRGYEQYF

SEQ ID NO: 106689 - protein, 14 aa, Homo sapiens
  CDR3 for alpha chain variable domain of TCR clone 53345 (TRAV12-2, TRAJ44)
CAVNPAGTASKLTF

SEQ ID NO: 106690 - protein, 13 aa, Homo sapiens
  CDR3 for beta chain variable domain of TCR clone 53345 (TRBV20-1, TRBJ1-6)
CSAPLGVGSPPHF

SEQ ID NO: 106691 - protein, 15 aa, Homo sapiens
  CDR3 for alpha chain variable domain of TCR clone 53346 (TRAV3, TRAJ5)
CSVRDRKTGRRALTF

SEQ ID NO: 106692 - protein, 15 aa, Homo sapiens
  CDR3 for beta chain variable domain of TCR clone 53346 (TRBV7-8, TRBJ2-1)
CASSLADSLYNEQFF

SEQ ID NO: 106693 - protein, 15 aa, Homo sapiens
  CDR3 for alpha chain variable domain of TCR clone 53347 (TRAV8-2, TRAJ40)
CVVLGTTSGTYKYIF

SEQ ID NO: 106694 - protein, 14 aa, Homo sapiens
  CDR3 for beta chain variable domain of TCR clone 53347 (TRBV19, TRBJ2-1)
CASTTFVLSGEQFF

SEQ ID NO: 106695 - protein, 13 aa, Homo sapiens
  CDR3 for alpha chain variable domain of TCR clone 53348 (TRAV1-2, TRAJ9)
CAVLNTGGFKTIF

SEQ ID NO: 106696 - protein, 14 aa, Homo sapiens
  CDR3 for beta chain variable domain of TCR clone 53348 (TRBV20-1, TRBJ2-3)
CSARGGTSTDTQYF

SEQ ID NO: 106697 - protein, 13 aa, Homo sapiens
  CDR3 for alpha chain variable domain of TCR clone 53349 (TRAV27, TRAJ43)
CAGAGNNNNDMRF

SEQ ID NO: 106698 - protein, 14 aa, Homo sapiens
  CDR3 for beta chain variable domain of TCR clone 53349 (TRBV7-2, TRBJ2-7)
CASRSQGAAYDQYF

SEQ ID NO: 106699 - protein, 11 aa, Homo sapiens
  CDR3 for alpha chain variable domain of TCR clone 53350 (TRAV12-1, TRAJ26)
CVVAYGQNFVF

SEQ ID NO: 106700 - protein, 15 aa, Homo sapiens
  CDR3 for beta chain variable domain of TCR clone 53350 (TRBV12-4, TRBJ2-5)
CASSGTGQEQETQYF

SEQ ID NO: 106701 - protein, 14 aa, Homo sapiens
  CDR3 for alpha chain variable domain of TCR clone 53351 (TRAV1-2, TRAJ16)
CAVNRLSDGQKLLF

SEQ ID NO: 106702 - protein, 14 aa, Homo sapiens
  CDR3 for beta chain variable domain of TCR clone 53351 (TRBV7-2, TRBJ1-1)
CASSFLTGTTEAFF

SEQ ID NO: 106703 - protein, 16 aa, Homo sapiens
  CDR3 for alpha chain variable domain of TCR clone 53352 (TRAV17, TRAJ28)
CATDEYSGAGGYQLTF

SEQ ID NO: 106704 - protein, 13 aa, Homo sapiens
  CDR3 for beta chain variable domain of TCR clone 53352 (TRBV7-9, TRBJ1-2)
CASRTGPNYGYTF

SEQ ID NO: 106705 - protein, 13 aa, Homo sapiens
  CDR3 for alpha chain variable domain of TCR clone 53353 (TRAV8-3, TRAJ30)
CAVGGWRDDKIIF

SEQ ID NO: 106706 - protein, 14 aa, Homo sapiens
  CDR3 for beta chain variable domain of TCR clone 53353 (TRBV20-1, TRBJ1-1)
CSAPPADMNAEAFF

SEQ ID NO: 106707 - protein, 16 aa, Homo sapiens
  CDR3 for alpha chain variable domain of TCR clone 53354 (TRAV3, TRAJ28)
CAVLPRSGAGSYHLTF

SEQ ID NO: 106708 - protein, 13 aa, Homo sapiens
  CDR3 for beta chain variable domain of TCR clone 53354 (TRBV12-4, TRBJ2-5)
CASRLAVQETQYF

SEQ ID NO: 106709 - protein, 14 aa, Homo sapiens
  CDR3 for alpha chain variable domain of TCR clone 53355 (TRAV1-2, TRAJ16)
CAVNRFSDGQKLLF

SEQ ID NO: 106710 - protein, 14 aa, Homo sapiens
  CDR3 for beta chain variable domain of TCR clone 53355 (TRBV19, TRBJ2-1)
CVSPTFVLSGEQFF

SEQ ID NO: 106711 - protein, 13 aa, Homo sapiens
  CDR3 for alpha chain variable domain of TCR clone 53356 (TRAV12-2, TRAJ20)
CAVNRFDDYKLSF

SEQ ID NO: 106712 - protein, 12 aa, Homo sapiens
  CDR3 for beta chain variable domain of TCR clone 53356 (TRBV19, TRBJ2-1)
CASSQISDEQFF

SEQ ID NO: 106713 - protein, 15 aa, Homo sapiens
  CDR3 for alpha chain variable domain of TCR clone 53357 (TRAV25, TRAJ52)
CAGRPGGTSYGKLTF

SEQ ID NO: 106714 - protein, 17 aa, Homo sapiens
  CDR3 for beta chain variable domain of TCR clone 53357 (TRBV7-8, TRBJ2-6)
CASSAGTGGAGANFLTF

SEQ ID NO: 106715 - protein, 13 aa, Homo sapiens
  CDR3 for alpha chain variable domain of TCR clone 53358 (TRAV12-3, TRAJ7)
CAMRASGNNRLAF

SEQ ID NO: 106716 - protein, 14 aa, Homo sapiens
  CDR3 for beta chain variable domain of TCR clone 53358 (TRBV13, TRBJ2-5)
CASSLGPRGETQYF

SEQ ID NO: 106717 - protein, 19 aa, Homo sapiens
  CDR3 for alpha chain variable domain of TCR clone 53359 (TRAV1-2, TRAJ26)
CLLPLCCERPDNYGQNFVF

SEQ ID NO: 106718 - protein, 16 aa, Homo sapiens
  CDR3 for beta chain variable domain of TCR clone 53359 (TRBV5-4, TRBJ2-7)
CASSQNEIAGAYEQYF

SEQ ID NO: 106719 - protein, 16 aa, Homo sapiens
  CDR3 for alpha chain variable domain of TCR clone 53360 (TRAV20, TRAJ22)
FAVQASSSGSARQLTF

SEQ ID NO: 106720 - protein, 13 aa, Homo sapiens
  CDR3 for beta chain variable domain of TCR clone 53360 (TRBV7-2, TRBJ2-5)
CASSQTSVETQYF

SEQ ID NO: 106721 - protein, 16 aa, Homo sapiens
  CDR3 for alpha chain variable domain of TCR clone 53361 (TRAV3, TRAJ13)
CAVRDPNSGGYQKVTF

SEQ ID NO: 106722 - protein, 13 aa, Homo sapiens
  CDR3 for beta chain variable domain of TCR clone 53361 (TRBV7-9, TRBJ2-7)
CASSVQGSYEQYF

SEQ ID NO: 106723 - protein, 12 aa, Homo sapiens
  CDR3 for alpha chain variable domain of TCR clone 53362 (TRAV12-3, TRAJ17)
CAMTLTGNKLTF

SEQ ID NO: 106724 - protein, 11 aa, Homo sapiens
  CDR3 for beta chain variable domain of TCR clone 53362 (TRBV29-1, TRBJ2-5)
CSGDRTGTQYF

SEQ ID NO: 106725 - protein, 11 aa, Homo sapiens
  CDR3 for alpha chain variable domain of TCR clone 53363 (TRAV4, TRAJ31)
CLVGLNARLMF

SEQ ID NO: 106726 - protein, 16 aa, Homo sapiens
  CDR3 for beta chain variable domain of TCR clone 53363 (TRBV15, TRBJ2-6)
CATSVNGGFLANVLTF

SEQ ID NO: 106727 - protein, 14 aa, Homo sapiens
  CDR3 for alpha chain variable domain of TCR clone 53364 (TRAV1-2, TRAJ16)
SAVNRFSDGQKLLF

SEQ ID NO: 106728 - protein, 14 aa, Homo sapiens
  CDR3 for beta chain variable domain of TCR clone 53364 (TRBV7-9, TRBJ2-3)
CASSLEDGTDTQYF

SEQ ID NO: 106729 - protein, 10 aa, Homo sapiens
  CDR3 for alpha chain variable domain of TCR clone 53365 (TRAV1-2, TRAJ31)
CVSEGARLMF

SEQ ID NO: 106730 - protein, 14 aa, Homo sapiens
  CDR3 for beta chain variable domain of TCR clone 53365 (TRBV19, TRBJ2-1)
CASPTFVLSGEQFF

SEQ ID NO: 106731 - protein, 14 aa, Homo sapiens
  CDR3 for alpha chain variable domain of TCR clone 53366 (TRAV27, TRAJ22)
CAGLPSGSARQLTF

SEQ ID NO: 106732 - protein, 16 aa, Homo sapiens
  CDR3 for beta chain variable domain of TCR clone 53366 (TRBV7-3, TRBJ2-2)
CASSLKRGTLSGELVF

SEQ ID NO: 106733 - protein, 15 aa, Homo sapiens
  CDR3 for alpha chain variable domain of TCR clone 53367 (TRAV26-1, TRAJ44)
CIVRANTGTASKLTF

SEQ ID NO: 106734 - protein, 16 aa, Homo sapiens
  CDR3 for beta chain variable domain of TCR clone 53367 (TRBV7-7, TRBJ2-1)
RASSLASGTSYNEQFF

SEQ ID NO: 106735 - protein, 14 aa, Homo sapiens
  CDR3 for alpha chain variable domain of TCR clone 53368 (TRAV13-1, TRAJ3)
CAAGKSSSASKIIF

SEQ ID NO: 106736 - protein, 13 aa, Homo sapiens
  CDR3 for beta chain variable domain of TCR clone 53368 (TRBV25-1, TRBJ2-5)
CASSESGRETQYF

SEQ ID NO: 106737 - protein, 12 aa, Homo sapiens
  CDR3 for alpha chain variable domain of TCR clone 53369 (TRAV17, TRAJ57)
CATDGGSEKLVC

SEQ ID NO: 106738 - protein, 13 aa, Homo sapiens
  CDR3 for beta chain variable domain of TCR clone 53369 (TRBV7-9, TRBJ2-7)
CASSFAGAYEQYF

SEQ ID NO: 106739 - protein, 13 aa, Homo sapiens
  CDR3 for alpha chain variable domain of TCR clone 53370 (TRAV12-1, TRAJ43)
CAVSHHNNNDMRF

SEQ ID NO: 106740 - protein, 14 aa, Homo sapiens
  CDR3 for beta chain variable domain of TCR clone 53370 (TRBV5-5, TRBJ2-2)
CASSLLGDTGELFF

SEQ ID NO: 106741 - protein, 15 aa, Homo sapiens
  CDR3 for alpha chain variable domain of TCR clone 53371 (TRAV14/DV4, TRAJ10)
CAMRELTGGGNKLTL

SEQ ID NO: 106742 - protein, 18 aa, Homo sapiens
  CDR3 for beta chain variable domain of TCR clone 53371 (TRBV7-9, TRBJ2-7)
CASSLTTSGSRTWYEQYF

SEQ ID NO: 106743 - protein, 13 aa, Homo sapiens
  CDR3 for alpha chain variable domain of TCR clone 53372 (TRAV3, TRAJ27)
CAVRPLGAGKSTF

SEQ ID NO: 106744 - protein, 14 aa, Homo sapiens
  CDR3 for beta chain variable domain of TCR clone 53372 (TRBV7-8, TRBJ2-3)
CASSLEAGTDTQYF

SEQ ID NO: 106745 - protein, 13 aa, Homo sapiens
  CDR3 for alpha chain variable domain of TCR clone 53373 (TRAV22, TRAJ29)
CAVGGSGNTPLVF

SEQ ID NO: 106746 - protein, 14 aa, Homo sapiens
  CDR3 for beta chain variable domain of TCR clone 53373 (TRBV4-1, TRBJ2-2)
CASSQAVNTGELFF

SEQ ID NO: 106747 - protein, 14 aa, Homo sapiens
  CDR3 for alpha chain variable domain of TCR clone 53374 (TRAV16, TRAJ15)
CALSGPQAGTALIF

SEQ ID NO: 106748 - protein, 14 aa, Homo sapiens
  CDR3 for beta chain variable domain of TCR clone 53374 (TRBV18, TRBJ2-1)
CASSPQGRFNEQFF

SEQ ID NO: 106749 - protein, 12 aa, Homo sapiens
  CDR3 for alpha chain variable domain of TCR clone 53375 (TRAV3, TRAJ20)
CAVRGPDYKLSF

SEQ ID NO: 106750 - protein, 11 aa, Homo sapiens
  CDR3 for beta chain variable domain of TCR clone 53375 (TRBV28, TRBJ2-5)
CASSLKETQYF

SEQ ID NO: 106751 - protein, 16 aa, Homo sapiens
  CDR3 for alpha chain variable domain of TCR clone 53376 (TRAV8-1, TRAJ48)
CAVTLISNFGNEKLTF

SEQ ID NO: 106752 - protein, 12 aa, Homo sapiens
  CDR3 for beta chain variable domain of TCR clone 53376 (TRBV20-1, TRBJ1-2)
CSAPGFNYGYAF

SEQ ID NO: 106753 - protein, 22 aa, Homo sapiens
  CDR3 for alpha chain variable domain of TCR clone 53377 (TRAV12-2, TRAJ30)
CAVRRRMTRSSLEKGHDFIFSP

SEQ ID NO: 106754 - protein, 15 aa, Homo sapiens
  CDR3 for beta chain variable domain of TCR clone 53377 (TRBV6-6, TRBJ2-7)
CASSYSYGGSYEQYF

SEQ ID NO: 106755 - protein, 13 aa, Homo sapiens
  CDR3 for alpha chain variable domain of TCR clone 53378 (TRAV8-3, TRAJ43)
CAVGPDNNNDMRF

SEQ ID NO: 106756 - protein, 14 aa, Homo sapiens
  CDR3 for beta chain variable domain of TCR clone 53378 (TRBV19, TRBJ2-1)
RASPTFVLSGEQFF

SEQ ID NO: 106757 - protein, 15 aa, Homo sapiens
  CDR3 for alpha chain variable domain of TCR clone 53379 (TRAV8-4, TRAJ11)
CAVSRALSGYSTLTF

SEQ ID NO: 106758 - protein, 13 aa, Homo sapiens
  CDR3 for beta chain variable domain of TCR clone 53379 (TRBV10-3, TRBJ2-7)
CASKLAVNYEKYF

SEQ ID NO: 106759 - protein, 12 aa, Homo sapiens
  CDR3 for alpha chain variable domain of TCR clone 53380 (TRAV17, TRAJ12)
CATLRSSYKLIF

SEQ ID NO: 106760 - protein, 16 aa, Homo sapiens
  CDR3 for beta chain variable domain of TCR clone 53380 (TRBV28, TRBJ2-7)
CARSLFFETGGPEQYF

SEQ ID NO: 106761 - protein, 15 aa, Homo sapiens
  CDR3 for alpha chain variable domain of TCR clone 53381 (TRAV23/DV6, TRAJ15)
CAALPAGRNCSDLCE

SEQ ID NO: 106762 - protein, 14 aa, Homo sapiens
  CDR3 for beta chain variable domain of TCR clone 53381 (TRBV7-9, TRBJ1-2)
CASSRQGANYGYTF

SEQ ID NO: 106763 - protein, 12 aa, Homo sapiens
  CDR3 for alpha chain variable domain of TCR clone 53382 (TRAV26-1, TRAJ36)
CIVRVRADNLFF

SEQ ID NO: 106764 - protein, 11 aa, Homo sapiens
  CDR3 for beta chain variable domain of TCR clone 53382 (TRBV11-2, TRBJ2-2)
CASSLPGELFF

SEQ ID NO: 106765 - protein, 11 aa, Homo sapiens
  CDR3 for alpha chain variable domain of TCR clone 53383 (TRAV2, TRAJ13)
CASGGYQKVTF

SEQ ID NO: 106766 - protein, 15 aa, Homo sapiens
  CDR3 for beta chain variable domain of TCR clone 53383 (TRBV11-2, TRBJ2-1)
CASSLAPRAHNEQFF

SEQ ID NO: 106767 - protein, 12 aa, Homo sapiens
  CDR3 for alpha chain variable domain of TCR clone 53384 (TRAV8-3, TRAJ20)
CAVGANDYKLSF

SEQ ID NO: 106768 - protein, 15 aa, Homo sapiens
  CDR3 for beta chain variable domain of TCR clone 53384 (TRBV19, TRBJ2-2)
CQPISRDRATGELFF

SEQ ID NO: 106769 - protein, 15 aa, Homo sapiens
  CDR3 for alpha chain variable domain of TCR clone 53385 (TRAV14/DV4, TRAJ26)
CAMREGQNYGQNFVF

SEQ ID NO: 106770 - protein, 15 aa, Homo sapiens
  CDR3 for beta chain variable domain of TCR clone 53385 (TRBV7-9, TRBJ1-4)
CASSRTGGFNEKLFF

SEQ ID NO: 106771 - protein, 16 aa, Homo sapiens
  CDR3 for alpha chain variable domain of TCR clone 53386 (TRAV12-2, TRAJ43)
CAGDDMRFGAGTKLTV

SEQ ID NO: 106772 - protein, 16 aa, Homo sapiens
  CDR3 for beta chain variable domain of TCR clone 53386 (TRBV2, TRBJ2-4)
CASSEAPGGEQNIQYF

SEQ ID NO: 106773 - protein, 11 aa, Homo sapiens
  CDR3 for alpha chain variable domain of TCR clone 53387 (TRAV1-2, TRAJ20)
CAVSNDYKLSF

SEQ ID NO: 106774 - protein, 16 aa, Homo sapiens
  CDR3 for beta chain variable domain of TCR clone 53387 (TRBV29-1, TRBJ2-6)
CSVEDSTYSGANVLTF

SEQ ID NO: 106775 - protein, 16 aa, Homo sapiens
  CDR3 for alpha chain variable domain of TCR clone 53388 (TRAV30, TRAJ24)
CGTEIVDADSWGKLQF

SEQ ID NO: 106776 - protein, 14 aa, Homo sapiens
  CDR3 for beta chain variable domain of TCR clone 53388 (TRBV12-5, TRBJ2-5)
CASGSQTHQETQYF

SEQ ID NO: 106777 - protein, 14 aa, Homo sapiens
  CDR3 for alpha chain variable domain of TCR clone 53389 (TRAV12-3, TRAJ29)
CAMSPYSGSTPLVF

SEQ ID NO: 106778 - protein, 11 aa, Homo sapiens
  CDR3 for beta chain variable domain of TCR clone 53389 (TRBV12-4, TRBJ2-3)
CASTATDTQYF

SEQ ID NO: 106779 - protein, 14 aa, Homo sapiens
  CDR3 for alpha chain variable domain of TCR clone 53390 (TRAV17, TRAJ12)
CAILPMDSSYKLIF

SEQ ID NO: 106780 - protein, 13 aa, Homo sapiens
  CDR3 for beta chain variable domain of TCR clone 53390 (TRBV7-3, TRBJ1-1)
CASSQDWGAEAFF

SEQ ID NO: 106781 - protein, 17 aa, Homo sapiens
  CDR3 for alpha chain variable domain of TCR clone 53391 (TRAV26-1, TRAJ37)
CIVRVITVSSNTGKLIF

SEQ ID NO: 106782 - protein, 14 aa, Homo sapiens
  CDR3 for beta chain variable domain of TCR clone 53391 (TRBV12-5, TRBJ2-5)
CASGSRTHQETQYF

SEQ ID NO: 106783 - protein, 13 aa, Homo sapiens
  CDR3 for alpha chain variable domain of TCR clone 53392 (TRAV36/DV7, TRAJ37)
CAVFSSNTGKLIF

SEQ ID NO: 106784 - protein, 16 aa, Homo sapiens
  CDR3 for beta chain variable domain of TCR clone 53392 (TRBV3-1, TRBJ2-5)
CDSSPGQFNGFGTQYF

SEQ ID NO: 106785 - protein, 18 aa, Homo sapiens
  CDR3 for alpha chain variable domain of TCR clone 53393 (TRAV26-2, TRAJ45)
CILRVDKYSGGGADGLTF

SEQ ID NO: 106786 - protein, 15 aa, Homo sapiens
  CDR3 for beta chain variable domain of TCR clone 53393 (TRBV7-2, TRBJ2-7)
CASSSGLAGRREQYF

SEQ ID NO: 106787 - protein, 16 aa, Homo sapiens
  CDR3 for alpha chain variable domain of TCR clone 53394 (TRAV3, TRAJ21)
CAVRDIERGNFNKFYF

SEQ ID NO: 106788 - protein, 13 aa, Homo sapiens
  CDR3 for beta chain variable domain of TCR clone 53394 (TRBV27, TRBJ2-7)
CASSLTTVYEQYF

SEQ ID NO: 106789 - protein, 13 aa, Homo sapiens
  CDR3 for alpha chain variable domain of TCR clone 53395 (TRAV8-3, TRAJ36)
CAVGATGANKLFF

SEQ ID NO: 106790 - protein, 15 aa, Homo sapiens
  CDR3 for beta chain variable domain of TCR clone 53395 (TRBV7-2, TRBJ1-2)
CASSPRAGWNYGYTF

SEQ ID NO: 106791 - protein, 16 aa, Homo sapiens
  CDR3 for alpha chain variable domain of TCR clone 53396 (TRAV22, TRAJ45)
CALERGKRGGADGLTF

SEQ ID NO: 106792 - protein, 11 aa, Homo sapiens
  CDR3 for beta chain variable domain of TCR clone 53396 (TRBV29-1, TRBJ2-5)
CSEDRTGTQYF

SEQ ID NO: 106793 - protein, 15 aa, Homo sapiens
  CDR3 for alpha chain variable domain of TCR clone 53397 (TRAV3, TRAJ20)
CAVRDIKLSDYELSF

SEQ ID NO: 106794 - protein, 15 aa, Homo sapiens
  CDR3 for beta chain variable domain of TCR clone 53397 (TRBV7-9, TRBJ2-7)
CASSLPMGQANEQYF

SEQ ID NO: 106795 - protein, 15 aa, Homo sapiens
  CDR3 for alpha chain variable domain of TCR clone 53398 (TRAV12-2, TRAJ52)
CVGNAGGTSYGKLTF

SEQ ID NO: 106796 - protein, 14 aa, Homo sapiens
  CDR3 for beta chain variable domain of TCR clone 53398 (TRBV7-3, TRBJ2-2)
CASSPDPSGRELFF

SEQ ID NO: 106797 - protein, 12 aa, Homo sapiens
  CDR3 for alpha chain variable domain of TCR clone 53399 (TRAV12-3, TRAJ17)
CAMTLTGNNLTF

SEQ ID NO: 106798 - protein, 17 aa, Homo sapiens
  CDR3 for beta chain variable domain of TCR clone 53399 (TRBV7-3, TRBJ2-3)
CASSLMKRMRGADTQYF

SEQ ID NO: 106799 - protein, 16 aa, Homo sapiens
  CDR3 for alpha chain variable domain of TCR clone 53400 (TRAV23/DV6, TRAJ48)
CAASGVVNFGNEKLTF

SEQ ID NO: 106800 - protein, 11 aa, Homo sapiens
  CDR3 for beta chain variable domain of TCR clone 53400 (TRBV2, TRBJ1-1)
CASREGTEAFF

SEQ ID NO: 106801 - protein, 14 aa, Homo sapiens
  CDR3 for alpha chain variable domain of TCR clone 53401 (TRAV26-1, TRAJ38)
CTADNAGNNRKLIW

SEQ ID NO: 106802 - protein, 13 aa, Homo sapiens
  CDR3 for beta chain variable domain of TCR clone 53401 (TRBV15, TRBJ1-6)
CATSGGLNSPLHF

SEQ ID NO: 106803 - protein, 22 aa, Homo sapiens
  CDR3 for alpha chain variable domain of TCR clone 53402 (TRAV23/DV6, )
CAATALIPDIQNPDPAVYQLRD

SEQ ID NO: 106804 - protein, 16 aa, Homo sapiens
  CDR3 for beta chain variable domain of TCR clone 53402 (TRBV10-3, TRBJ2-7)
CAISPRGQEQTYEQYF

SEQ ID NO: 106805 - protein, 14 aa, Homo sapiens
  CDR3 for alpha chain variable domain of TCR clone 53403 (TRAV23/DV6, TRAJ4)
CSANLSGGYNKLIF

SEQ ID NO: 106806 - protein, 17 aa, Homo sapiens
  CDR3 for beta chain variable domain of TCR clone 53403 (TRBV4-1, TRBJ1-3)
CASSPQRGIRFGNTIYF

SEQ ID NO: 106807 - protein, 12 aa, Homo sapiens
  CDR3 for alpha chain variable domain of TCR clone 53404 (TRAV13-2, TRAJ23)
CAELHRGGKLIF

SEQ ID NO: 106808 - protein, 13 aa, Homo sapiens
  CDR3 for beta chain variable domain of TCR clone 53404 (TRBV7-9, TRBJ1-2)
CASSLKQNYGYTF

SEQ ID NO: 106809 - protein, 15 aa, Homo sapiens
  CDR3 for alpha chain variable domain of TCR clone 53405 (TRAV2, TRAJ9)
CAVEDRGTGGFKTIF

SEQ ID NO: 106810 - protein, 16 aa, Homo sapiens
  CDR3 for beta chain variable domain of TCR clone 53405 (TRBV24-1, TRBJ2-3)
CASSDPGTGATDTQYF

SEQ ID NO: 106811 - protein, 14 aa, Homo sapiens
  CDR3 for alpha chain variable domain of TCR clone 53406 (TRAV12-2, TRAJ44)
CAVNPAGTASKLTF

SEQ ID NO: 106812 - protein, 15 aa, Homo sapiens
  CDR3 for beta chain variable domain of TCR clone 53406 (TRBV5-1, TRBJ2-1)
CASSPPRAPYNEQSF

SEQ ID NO: 106813 - protein, 14 aa, Homo sapiens
  CDR3 for alpha chain variable domain of TCR clone 53407 (TRAV8-3, TRAJ4)
CDVGAAGGYNKLIF

SEQ ID NO: 106814 - protein, 15 aa, Homo sapiens
  CDR3 for beta chain variable domain of TCR clone 53407 (TRBV6-5, TRBJ2-1)
CASSYDAGAGNEQFF

SEQ ID NO: 106815 - protein, 16 aa, Homo sapiens
  CDR3 for alpha chain variable domain of TCR clone 53408 (TRAV26-1, TRAJ53)
CIVRVAMGGSNYKLTF

SEQ ID NO: 106816 - protein, 12 aa, Homo sapiens
  CDR3 for beta chain variable domain of TCR clone 53408 (TRBV7-9, TRBJ1-5)
CASSPQVQPQHF

SEQ ID NO: 106817 - protein, 14 aa, Homo sapiens
  CDR3 for alpha chain variable domain of TCR clone 53409 (TRAV29/DV5, TRAJ36)
CAARRKTGANNLFF

SEQ ID NO: 106818 - protein, 13 aa, Homo sapiens
  CDR3 for beta chain variable domain of TCR clone 53409 (TRBV19, TRBJ2-7)
FASSIDRTYEQYF

SEQ ID NO: 106819 - protein, 13 aa, Homo sapiens
  CDR3 for alpha chain variable domain of TCR clone 53410 (TRAV12-3, TRAJ7)
CAMTPYGNNRLPF

SEQ ID NO: 106820 - protein, 16 aa, Homo sapiens
  CDR3 for beta chain variable domain of TCR clone 53410 (TRBV20-1, TRBJ1-4)
CSARPYGGELNEKLFF

SEQ ID NO: 106821 - protein, 13 aa, Homo sapiens
  CDR3 for alpha chain variable domain of TCR clone 53411 (TRAV12-2, TRAJ4)
CAVRSGGYNKLIF

SEQ ID NO: 106822 - protein, 15 aa, Homo sapiens
  CDR3 for beta chain variable domain of TCR clone 53411 (TRBV10-3, TRBJ2-1)
CAISDVQDRAYEQFL

SEQ ID NO: 106823 - protein, 14 aa, Homo sapiens
  CDR3 for alpha chain variable domain of TCR clone 53412 (TRAV35, TRAJ33)
CAGSSQDSNYQLIW

SEQ ID NO: 106824 - protein, 15 aa, Homo sapiens
  CDR3 for beta chain variable domain of TCR clone 53412 (TRBV20-1, TRBJ2-7)
CSAESGTSGAYEQFF

SEQ ID NO: 106825 - protein, 14 aa, Homo sapiens
  CDR3 for alpha chain variable domain of TCR clone 53413 (TRAV8-6, TRAJ5)
CAVSVDTGRRALTF

SEQ ID NO: 106826 - protein, 11 aa, Homo sapiens
  CDR3 for beta chain variable domain of TCR clone 53413 (TRBV7-3, TRBJ2-5)
CASSLGETQYF

SEQ ID NO: 106827 - protein, 13 aa, Homo sapiens
  CDR3 for alpha chain variable domain of TCR clone 53414 (TRAV8-4, TRAJ30)
CAGSVNRDDKIIF

SEQ ID NO: 106828 - protein, 13 aa, Homo sapiens
  CDR3 for beta chain variable domain of TCR clone 53414 (TRBV3-1, TRBJ2-2)
CASLARGSGELFF

SEQ ID NO: 106829 - protein, 14 aa, Homo sapiens
  CDR3 for alpha chain variable domain of TCR clone 53415 (TRAV1-2, TRAJ16)
CAVNRFSDGQKLLF

SEQ ID NO: 106830 - protein, 14 aa, Homo sapiens
  CDR3 for beta chain variable domain of TCR clone 53415 (TRBV7-3, TRBJ1-1)
CASSLGTGYTEALF

SEQ ID NO: 106831 - protein, 11 aa, Homo sapiens
  CDR3 for alpha chain variable domain of TCR clone 53416 (TRAV12-2, TRAJ31)
CAVRNNARLMF

SEQ ID NO: 106832 - protein, 17 aa, Homo sapiens
  CDR3 for beta chain variable domain of TCR clone 53416 (TRBV28, TRBJ1-5)
CASSLSWLVSSNQPQHF

SEQ ID NO: 106833 - protein, 14 aa, Homo sapiens
  CDR3 for alpha chain variable domain of TCR clone 53417 (TRAV17, TRAJ45)
CATASGGGADGLTL

SEQ ID NO: 106834 - protein, 15 aa, Homo sapiens
  CDR3 for beta chain variable domain of TCR clone 53417 (TRBV11-2, TRBJ2-1)
CASSRNRGLMYEQFF

SEQ ID NO: 106835 - protein, 14 aa, Homo sapiens
  CDR3 for alpha chain variable domain of TCR clone 53418 (TRAV12-2, TRAJ17)
CDVNIKAAGNKLTF

SEQ ID NO: 106836 - protein, 16 aa, Homo sapiens
  CDR3 for beta chain variable domain of TCR clone 53418 (TRBV20-1, TRBJ2-6)
CSASSQGYDGANVLTF

SEQ ID NO: 106837 - protein, 12 aa, Homo sapiens
  CDR3 for alpha chain variable domain of TCR clone 53419 (TRAV35, TRAJ49)
CAGWNPGNQFYF

SEQ ID NO: 106838 - protein, 16 aa, Homo sapiens
  CDR3 for beta chain variable domain of TCR clone 53419 (TRBV5-1, TRBJ2-2)
CASSLWDTTNTGELFF

SEQ ID NO: 106839 - protein, 14 aa, Homo sapiens
  CDR3 for alpha chain variable domain of TCR clone 53420 (TRAV3, TRAJ17)
CAVREAAAGNKLTF

SEQ ID NO: 106840 - protein, 16 aa, Homo sapiens
  CDR3 for beta chain variable domain of TCR clone 53420 (TRBV20-1, TRBJ1-2)
CSASMGQGVANYGYTF

SEQ ID NO: 106841 - protein, 14 aa, Homo sapiens
  CDR3 for alpha chain variable domain of TCR clone 53421 (TRAV1-2, TRAJ16)
CAVNRFSDGQKLLF

SEQ ID NO: 106842 - protein, 15 aa, Homo sapiens
  CDR3 for beta chain variable domain of TCR clone 53421 (TRBV19, TRBJ1-1)
CASTSGQIQDTEAFF

SEQ ID NO: 106843 - protein, 15 aa, Homo sapiens
  CDR3 for alpha chain variable domain of TCR clone 53422 (TRAV34, TRAJ38)
CGADFTPGNNRKLIW

SEQ ID NO: 106844 - protein, 17 aa, Homo sapiens
  CDR3 for beta chain variable domain of TCR clone 53422 (TRBV28, TRBJ2-5)
CASSTPEGDALQETQYF

SEQ ID NO: 106845 - protein, 17 aa, Homo sapiens
  CDR3 for alpha chain variable domain of TCR clone 53423 (TRAV3, TRAJ42)
CPVRDRDYGGSQGNLIF

SEQ ID NO: 106846 - protein, 15 aa, Homo sapiens
  CDR3 for beta chain variable domain of TCR clone 53423 (TRBV6-6, TRBJ2-7)
CASSYSYGGSYEQYF

SEQ ID NO: 106847 - protein, 15 aa, Homo sapiens
  CDR3 for alpha chain variable domain of TCR clone 53424 (TRAV8-3, TRAJ45)
CASSYSGGGADGLTF

SEQ ID NO: 106848 - protein, 12 aa, Homo sapiens
  CDR3 for beta chain variable domain of TCR clone 53424 (TRBV12-3, TRBJ2-7)
CASSLGGYEQYF

SEQ ID NO: 106849 - protein, 14 aa, Homo sapiens
  CDR3 for alpha chain variable domain of TCR clone 53425 (TRAV8-4, TRAJ13)
CAVTLSGGYQKVTF

SEQ ID NO: 106850 - protein, 16 aa, Homo sapiens
  CDR3 for beta chain variable domain of TCR clone 53425 (TRBV5-7, TRBJ1-4)
CASSPSGGLKTEKLLF

SEQ ID NO: 106851 - protein, 13 aa, Homo sapiens
  CDR3 for alpha chain variable domain of TCR clone 53426 (TRAV21, TRAJ45)
RAVMGGGADGLTF

SEQ ID NO: 106852 - protein, 16 aa, Homo sapiens
  CDR3 for beta chain variable domain of TCR clone 53426 (TRBV20-1, TRBJ2-1)
CSARDHLAGGRGEQFF

SEQ ID NO: 106853 - protein, 13 aa, Homo sapiens
  CDR3 for alpha chain variable domain of TCR clone 53427 (TRAV36/DV7, TRAJ33)
CAVDMDSNYQLIW

SEQ ID NO: 106854 - protein, 16 aa, Homo sapiens
  CDR3 for beta chain variable domain of TCR clone 53427 (TRBV15, TRBJ2-3)
CATRLPGGRAPDTQYF

SEQ ID NO: 106855 - protein, 13 aa, Homo sapiens
  CDR3 for alpha chain variable domain of TCR clone 53428 (TRAV17, TRAJ9)
CTTFLTGGFKTTF

SEQ ID NO: 106856 - protein, 16 aa, Homo sapiens
  CDR3 for beta chain variable domain of TCR clone 53428 (TRBV5-7, TRBJ1-4)
CASSPSGGLKTEKLFF

SEQ ID NO: 106857 - protein, 14 aa, Homo sapiens
  CDR3 for alpha chain variable domain of TCR clone 53429 (TRAV38-1, TRAJ29)
CAFITPSGNTPLVF

SEQ ID NO: 106858 - protein, 15 aa, Homo sapiens
  CDR3 for beta chain variable domain of TCR clone 53429 (TRBV7-8, TRBJ1-1)
CASSRGQGGNTEAFF

SEQ ID NO: 106859 - protein, 16 aa, Homo sapiens
  CDR3 for alpha chain variable domain of TCR clone 53430 (TRAV12-3, TRAJ53)
CAMSPGSGGSNYKLEF

SEQ ID NO: 106860 - protein, 17 aa, Homo sapiens
  CDR3 for beta chain variable domain of TCR clone 53430 (TRBV28, TRBJ2-5)
CASSTPEGDALQETQYF

SEQ ID NO: 106861 - protein, 16 aa, Homo sapiens
  CDR3 for alpha chain variable domain of TCR clone 53431 (TRAV3, TRAJ10)
CAVRDMRAGGGNKLTF

SEQ ID NO: 106862 - protein, 14 aa, Homo sapiens
  CDR3 for beta chain variable domain of TCR clone 53431 (TRBV11-2, TRBJ2-7)
CASSLGAGAYEQYF

SEQ ID NO: 106863 - protein, 15 aa, Homo sapiens
  CDR3 for alpha chain variable domain of TCR clone 53432 (TRAV2, TRAJ15)
CAVEDRGQAGTALTF

SEQ ID NO: 106864 - protein, 15 aa, Homo sapiens
  CDR3 for beta chain variable domain of TCR clone 53432 (TRBV20-1, TRBJ1-5)
CSATSDRGLGQPQHF

SEQ ID NO: 106865 - protein, 17 aa, Homo sapiens
  CDR3 for alpha chain variable domain of TCR clone 53433 (TRAV26-2, TRAJ42)
CILRDVGYGGSQGNLIF

SEQ ID NO: 106866 - protein, 16 aa, Homo sapiens
  CDR3 for beta chain variable domain of TCR clone 53433 (TRBV12-4, TRBJ2-7)
CASSLIGGTGTYEQFF

SEQ ID NO: 106867 - protein, 16 aa, Homo sapiens
  CDR3 for alpha chain variable domain of TCR clone 53434 (TRAV8-3, TRAJ10)
CAVGPILTGGGNKLTL

SEQ ID NO: 106868 - protein, 16 aa, Homo sapiens
  CDR3 for beta chain variable domain of TCR clone 53434 (TRBV7-2, TRBJ2-5)
CASSSKWLSGQETQYF

SEQ ID NO: 106869 - protein, 12 aa, Homo sapiens
  CDR3 for alpha chain variable domain of TCR clone 53435 (TRAV16, TRAJ13)
CITLRGYKKVTF

SEQ ID NO: 106870 - protein, 17 aa, Homo sapiens
  CDR3 for beta chain variable domain of TCR clone 53435 (TRBV28, TRBJ2-5)
CASSRQGGLAGAETQYF

SEQ ID NO: 106871 - protein, 14 aa, Homo sapiens
  CDR3 for alpha chain variable domain of TCR clone 53436 (TRAV13-1, TRAJ35)
CAASKGGFGNVLHC

SEQ ID NO: 106872 - protein, 14 aa, Homo sapiens
  CDR3 for beta chain variable domain of TCR clone 53436 (TRBV11-3, TRBJ2-1)
CASSATTSGSIQFF

SEQ ID NO: 106873 - protein, 16 aa, Homo sapiens
  CDR3 for alpha chain variable domain of TCR clone 53437 (TRAV16, TRAJ57)
CAPYLIAQGGSEKLVF

SEQ ID NO: 106874 - protein, 17 aa, Homo sapiens
  CDR3 for beta chain variable domain of TCR clone 53437 (TRBV24-1, TRBJ2-4)
CATSDAEARGVRNIQYF

SEQ ID NO: 106875 - protein, 12 aa, Homo sapiens
  CDR3 for alpha chain variable domain of TCR clone 53438 (TRAV8-3, TRAJ20)
CAVGANDYKLSF

SEQ ID NO: 106876 - protein, 14 aa, Homo sapiens
  CDR3 for beta chain variable domain of TCR clone 53438 (TRBV19, TRBJ2-7)
CASSMGQGAIEQYF

SEQ ID NO: 106877 - protein, 14 aa, Homo sapiens
  CDR3 for alpha chain variable domain of TCR clone 53439 (TRAV12-3, TRAJ29)
CAMSPYSGNTPLVF

SEQ ID NO: 106878 - protein, 15 aa, Homo sapiens
  CDR3 for beta chain variable domain of TCR clone 53439 (TRBV28, TRBJ1-3)
CASSMGWASGNTIYF

SEQ ID NO: 106879 - protein, 12 aa, Homo sapiens
  CDR3 for alpha chain variable domain of TCR clone 53440 (TRAV12-3, TRAJ17)
CAMTLTGNKLTF

SEQ ID NO: 106880 - protein, 13 aa, Homo sapiens
  CDR3 for beta chain variable domain of TCR clone 53440 (TRBV7-3, TRBJ1-1)
CASSQDWGAEAFC

SEQ ID NO: 106881 - protein, 15 aa, Homo sapiens
  CDR3 for alpha chain variable domain of TCR clone 53441 (TRAV3, TRAJ5)
CAVRDRKTGRRALTF

SEQ ID NO: 106882 - protein, 11 aa, Homo sapiens
  CDR3 for beta chain variable domain of TCR clone 53441 (TRBV7-8, TRBJ2-7)
CASSLSLEQYF

SEQ ID NO: 106883 - protein, 22 aa, Homo sapiens
  CDR3 for alpha chain variable domain of TCR clone 53442 (TRAV2, TRAJ10)
ILQVREADAAVYYTGGGNKPTF

SEQ ID NO: 106884 - protein, 16 aa, Homo sapiens
  CDR3 for beta chain variable domain of TCR clone 53442 (TRBV5-7, TRBJ1-2)
CASSRGVTGGSYGYTF

SEQ ID NO: 106885 - protein, 18 aa, Homo sapiens
  CDR3 for alpha chain variable domain of TCR clone 53443 (TRAV26-1, TRAJ23)
CIVRVGLEVWNQGGKLIF

SEQ ID NO: 106886 - protein, 17 aa, Homo sapiens
  CDR3 for beta chain variable domain of TCR clone 53443 (TRBV11-2, TRBJ2-1)
CASSLYPPGVEYNEQFF

SEQ ID NO: 106887 - protein, 16 aa, Homo sapiens
  CDR3 for alpha chain variable domain of TCR clone 53444 (TRAV27, TRAJ52)
CAGAPAGGTSYVKLTF

SEQ ID NO: 106888 - protein, 12 aa, Homo sapiens
  CDR3 for beta chain variable domain of TCR clone 53444 (TRBV27, TRBJ2-1)
CASRGFYNEQFF

SEQ ID NO: 106889 - protein, 16 aa, Homo sapiens
  CDR3 for alpha chain variable domain of TCR clone 53445 (TRAV30, TRAJ24)
CGTEIVDADSWGKFQF

SEQ ID NO: 106890 - protein, 15 aa, Homo sapiens
  CDR3 for beta chain variable domain of TCR clone 53445 (TRBV11-3, TRBJ2-3)
CASSAGTVVTNTQYF

SEQ ID NO: 106891 - protein, 16 aa, Homo sapiens
  CDR3 for alpha chain variable domain of TCR clone 53446 (TRAV12-1, TRAJ45)
CVVIRYSGGGADGLTF

SEQ ID NO: 106892 - protein, 12 aa, Homo sapiens
  CDR3 for beta chain variable domain of TCR clone 53446 (TRBV6-6, TRBJ2-2)
CASRQITGELFF

SEQ ID NO: 106893 - protein, 14 aa, Homo sapiens
  CDR3 for alpha chain variable domain of TCR clone 53447 (TRAV12-2, TRAJ44)
CAVNKAGTASKLTF

SEQ ID NO: 106894 - protein, 12 aa, Homo sapiens
  CDR3 for beta chain variable domain of TCR clone 53447 (TRBV19, TRBJ1-4)
CASKDWPGGRFF

SEQ ID NO: 106895 - protein, 13 aa, Homo sapiens
  CDR3 for alpha chain variable domain of TCR clone 53448 (TRAV26-2, TRAJ43)
CILRAVNNNDMRF

SEQ ID NO: 106896 - protein, 15 aa, Homo sapiens
  CDR3 for beta chain variable domain of TCR clone 53448 (TRBV7-2, TRBJ2-1)
CASTHGTGIYNEQFC

SEQ ID NO: 106897 - protein, 18 aa, Homo sapiens
  CDR3 for alpha chain variable domain of TCR clone 53449 (TRAV26-1, TRAJ23)
CIVRVGLEVWNQGGKLIF

SEQ ID NO: 106898 - protein, 16 aa, Homo sapiens
  CDR3 for beta chain variable domain of TCR clone 53449 (TRBV12-4, TRBJ2-5)
CASSFFVRGSQETQYF

SEQ ID NO: 106899 - protein, 16 aa, Homo sapiens
  CDR3 for alpha chain variable domain of TCR clone 53450 (TRAV3, TRAJ4)
RAVRPSPSGGYNKLIF

SEQ ID NO: 106900 - protein, 12 aa, Homo sapiens
  CDR3 for beta chain variable domain of TCR clone 53450 (TRBV7-9, TRBJ2-7)
CASSQGIYEQYF

SEQ ID NO: 106901 - protein, 14 aa, Homo sapiens
  CDR3 for alpha chain variable domain of TCR clone 53451 (TRAV16, TRAJ26)
CALSSANYGQNFVF

SEQ ID NO: 106902 - protein, 12 aa, Homo sapiens
  CDR3 for beta chain variable domain of TCR clone 53451 (TRBV6-5, TRBJ2-2)
CASGTGTGELFF

SEQ ID NO: 106903 - protein, 14 aa, Homo sapiens
  CDR3 for alpha chain variable domain of TCR clone 53452 (TRAV1-2, TRAJ8)
CSVREDTGFQKLVF

SEQ ID NO: 106904 - protein, 14 aa, Homo sapiens
  CDR3 for beta chain variable domain of TCR clone 53452 (TRBV7-6, TRBJ2-3)
CASSLGTVTDTQYF

SEQ ID NO: 106905 - protein, 13 aa, Homo sapiens
  CDR3 for alpha chain variable domain of TCR clone 53453 (TRAV35, TRAJ36)
CAGPRIGANDLFF

SEQ ID NO: 106906 - protein, 15 aa, Homo sapiens
  CDR3 for beta chain variable domain of TCR clone 53453 (TRBV28, TRBJ2-5)
CASSPPWSYQETQYF

SEQ ID NO: 106907 - protein, 14 aa, Homo sapiens
  CDR3 for alpha chain variable domain of TCR clone 53454 (TRAV36/DV7, TRAJ13)
WGSGEHGGYQKVTF

SEQ ID NO: 106908 - protein, 15 aa, Homo sapiens
  CDR3 for beta chain variable domain of TCR clone 53454 (TRBV19, TRBJ2-1)
CASSTGTSSYNEQFF

SEQ ID NO: 106909 - protein, 14 aa, Homo sapiens
  CDR3 for alpha chain variable domain of TCR clone 53455 (TRAV1-2, TRAJ16)
CAVNRFSDGQKLLF

SEQ ID NO: 106910 - protein, 20 aa, Homo sapiens
  CDR3 for beta chain variable domain of TCR clone 53455 (TRBV7-8, TRBJ2-1)
CASSLAHRLAGVRSYNEQIF

SEQ ID NO: 106911 - protein, 15 aa, Homo sapiens
  CDR3 for alpha chain variable domain of TCR clone 53456 (TRAV26-1, TRAJ40)
CIVRAVPSGTYNYIF

SEQ ID NO: 106912 - protein, 14 aa, Homo sapiens
  CDR3 for beta chain variable domain of TCR clone 53456 (TRBV19, TRBJ2-1)
CASKDPGLANEQFF

SEQ ID NO: 106913 - protein, 13 aa, Homo sapiens
  CDR3 for alpha chain variable domain of TCR clone 53457 (TRAV13-2, TRAJ11)
CSENYSRYSTLTF

SEQ ID NO: 106914 - protein, 13 aa, Homo sapiens
  CDR3 for beta chain variable domain of TCR clone 53457 (TRBV12-4, TRBJ1-4)
CASAMGHNEKLFF

SEQ ID NO: 106915 - protein, 13 aa, Homo sapiens
  CDR3 for alpha chain variable domain of TCR clone 53458 (TRAV2, TRAJ40)
CAVVTSGTHKYIF

SEQ ID NO: 106916 - protein, 14 aa, Homo sapiens
  CDR3 for beta chain variable domain of TCR clone 53458 (TRBV19, TRBJ2-3)
CASSAPRGTDTQYF

SEQ ID NO: 106917 - protein, 15 aa, Homo sapiens
  CDR3 for alpha chain variable domain of TCR clone 53459 (TRAV25, TRAJ53)
CPTSNSGGSNYKLTF

SEQ ID NO: 106918 - protein, 14 aa, Homo sapiens
  CDR3 for beta chain variable domain of TCR clone 53459 (TRBV11-2, TRBJ2-3)
CASSRLACTDTQYF

SEQ ID NO: 106919 - protein, 16 aa, Homo sapiens
  CDR3 for alpha chain variable domain of TCR clone 53460 (TRAV3, TRAJ10)
CAVRDMRAGGGNKLTF

SEQ ID NO: 106920 - protein, 12 aa, Homo sapiens
  CDR3 for beta chain variable domain of TCR clone 53460 (TRBV28, TRBJ2-6)
CAIQAGANVLTF

SEQ ID NO: 106921 - protein, 16 aa, Homo sapiens
  CDR3 for alpha chain variable domain of TCR clone 53461 (TRAV12-1, TRAJ42)
CVVTPYYGGSQGNLIF

SEQ ID NO: 106922 - protein, 15 aa, Homo sapiens
  CDR3 for beta chain variable domain of TCR clone 53461 (TRBV4-3, TRBJ2-7)
CASSQGGRGTYEQYF

SEQ ID NO: 106923 - protein, 13 aa, Homo sapiens
  CDR3 for alpha chain variable domain of TCR clone 53462 (TRAV36/DV7, TRAJ37)
CAVFSSNTGKLIF

SEQ ID NO: 106924 - protein, 16 aa, Homo sapiens
  CDR3 for beta chain variable domain of TCR clone 53462 (TRBV7-3, TRBJ2-3)
CASSLGLAGVADTQYF

SEQ ID NO: 106925 - protein, 16 aa, Homo sapiens
  CDR3 for alpha chain variable domain of TCR clone 53463 (TRAV3, TRAJ10)
CAVRDMRAGGGNKLTF

SEQ ID NO: 106926 - protein, 14 aa, Homo sapiens
  CDR3 for beta chain variable domain of TCR clone 53463 (TRBV7-6, TRBJ2-3)
CASSLGTVTDTQYF

SEQ ID NO: 106927 - protein, 13 aa, Homo sapiens
  CDR3 for alpha chain variable domain of TCR clone 53464 (TRAV13-2, TRAJ13)
CAERPGGYQKVTF

SEQ ID NO: 106928 - protein, 15 aa, Homo sapiens
  CDR3 for beta chain variable domain of TCR clone 53464 (TRBV11-3, TRBJ2-7)
CASSPGPASSYEQYS

SEQ ID NO: 106929 - protein, 13 aa, Homo sapiens
  CDR3 for alpha chain variable domain of TCR clone 53465 (TRAV13-2, TRAJ13)
CAERPGGYQKFTF

SEQ ID NO: 106930 - protein, 16 aa, Homo sapiens
  CDR3 for beta chain variable domain of TCR clone 53465 (TRBV18, TRBJ2-5)
CASSPPSSGGAKTQYF

SEQ ID NO: 106931 - protein, 21 aa, Homo sapiens
  CDR3 for alpha chain variable domain of TCR clone 53466 (TRAV21, )
CAVRQDAGNNHIQNPDPAVYQ

SEQ ID NO: 106932 - protein, 16 aa, Homo sapiens
  CDR3 for beta chain variable domain of TCR clone 53466 (TRBV4-2, TRBJ1-1)
CASRPLDGGGDTEAFF

SEQ ID NO: 106933 - protein, 14 aa, Homo sapiens
  CDR3 for alpha chain variable domain of TCR clone 53467 (TRAV1-2, TRAJ8)
CAVREDTGFQKLVF

SEQ ID NO: 106934 - protein, 17 aa, Homo sapiens
  CDR3 for beta chain variable domain of TCR clone 53467 (TRBV7-2, TRBJ2-3)
CASSLEARGTSTDTQYS

SEQ ID NO: 106935 - protein, 16 aa, Homo sapiens
  CDR3 for alpha chain variable domain of TCR clone 53468 (TRAV3, TRAJ10)
CAMRDMRAGGGSKLTF

SEQ ID NO: 106936 - protein, 15 aa, Homo sapiens
  CDR3 for beta chain variable domain of TCR clone 53468 (TRBV9, TRBJ1-6)
CASSVAGTGDSPLHF

SEQ ID NO: 106937 - protein, 16 aa, Homo sapiens
  CDR3 for alpha chain variable domain of TCR clone 53469 (TRAV12-3, TRAJ53)
CAMSPGSGGSNYKLTF

SEQ ID NO: 106938 - protein, 12 aa, Homo sapiens
  CDR3 for beta chain variable domain of TCR clone 53469 (TRBV11-2, TRBJ2-2)
CASSLGGGEPFF

SEQ ID NO: 106939 - protein, 14 aa, Homo sapiens
  CDR3 for alpha chain variable domain of TCR clone 53470 (TRAV12-1, TRAJ17)
CVVNYKAAGNKLTF

SEQ ID NO: 106940 - protein, 17 aa, Homo sapiens
  CDR3 for beta chain variable domain of TCR clone 53470 (TRBV20-1, TRBJ2-1)
CSPSSSGLAGSYNEQFF

SEQ ID NO: 106941 - protein, 12 aa, Homo sapiens
  CDR3 for alpha chain variable domain of TCR clone 53471 (TRAV27, TRAJ35)
CAGADFGNVLNC

SEQ ID NO: 106942 - protein, 16 aa, Homo sapiens
  CDR3 for beta chain variable domain of TCR clone 53471 (TRBV6-1, TRBJ2-1)
CASILRQGSSYNEQFF

SEQ ID NO: 106943 - protein, 15 aa, Homo sapiens
  CDR3 for alpha chain variable domain of TCR clone 53472 (TRAV2, TRAJ9)
CAVEDRGTGGFKTIF

SEQ ID NO: 106944 - protein, 14 aa, Homo sapiens
  CDR3 for beta chain variable domain of TCR clone 53472 (TRBV7-9, TRBJ2-1)
CASSPRDSLYEQFF

SEQ ID NO: 106945 - protein, 14 aa, Homo sapiens
  CDR3 for alpha chain variable domain of TCR clone 53473 (TRAV2, TRAJ12)
CAVDAKDSSYKLIF

SEQ ID NO: 106946 - protein, 13 aa, Homo sapiens
  CDR3 for beta chain variable domain of TCR clone 53473 (TRBV19, TRBJ2-1)
CASKVGAGGEQFF

SEQ ID NO: 106947 - protein, 14 aa, Homo sapiens
  CDR3 for alpha chain variable domain of TCR clone 53474 (TRAV16, TRAJ33)
CALSAMDSNYQLIW

SEQ ID NO: 106948 - protein, 11 aa, Homo sapiens
  CDR3 for beta chain variable domain of TCR clone 53474 (TRBV12-4, TRBJ2-3)
CASTATDTQYF

SEQ ID NO: 106949 - protein, 13 aa, Homo sapiens
  CDR3 for alpha chain variable domain of TCR clone 53475 (TRAV20, TRAJ20)
CAVRWVRDYKLSF

SEQ ID NO: 106950 - protein, 14 aa, Homo sapiens
  CDR3 for beta chain variable domain of TCR clone 53475 (TRBV19, TRBJ2-2)
CAGTVTANTGELFF

SEQ ID NO: 106951 - protein, 15 aa, Homo sapiens
  CDR3 for alpha chain variable domain of TCR clone 53476 (TRAV27, TRAJ38)
CAGRFNAGNNRKLIW

SEQ ID NO: 106952 - protein, 13 aa, Homo sapiens
  CDR3 for beta chain variable domain of TCR clone 53476 (TRBV12-5, TRBJ2-3)
CASQDRGTDTQYF

SEQ ID NO: 106953 - protein, 13 aa, Homo sapiens
  CDR3 for alpha chain variable domain of TCR clone 53477 (TRAV12-2, TRAJ20)
CAVCPSNDYKLSF

SEQ ID NO: 106954 - protein, 15 aa, Homo sapiens
  CDR3 for beta chain variable domain of TCR clone 53477 (TRBV27, TRBJ2-5)
CASSLYPRGGETQYF

SEQ ID NO: 106955 - protein, 15 aa, Homo sapiens
  CDR3 for alpha chain variable domain of TCR clone 53478 (TRAV8-6, TRAJ10)
CAVSSKGGGGNKPTF

SEQ ID NO: 106956 - protein, 13 aa, Homo sapiens
  CDR3 for beta chain variable domain of TCR clone 53478 (TRBV12-4, TRBJ2-7)
CASSPTETYEQYF

SEQ ID NO: 106957 - protein, 16 aa, Homo sapiens
  CDR3 for alpha chain variable domain of TCR clone 53479 (TRAV3, TRAJ37)
CAVRGKWSGNTGKLIF

SEQ ID NO: 106958 - protein, 13 aa, Homo sapiens
  CDR3 for beta chain variable domain of TCR clone 53479 (TRBV14, TRBJ2-7)
CASSQDRRYEQYF

SEQ ID NO: 106959 - protein, 12 aa, Homo sapiens
  CDR3 for alpha chain variable domain of TCR clone 53480 (TRAV16, TRAJ22)
CALEVSARQLTF

SEQ ID NO: 106960 - protein, 14 aa, Homo sapiens
  CDR3 for beta chain variable domain of TCR clone 53480 (TRBV11-2, TRBJ2-3)
CASSSIASTDTQYL

SEQ ID NO: 106961 - protein, 15 aa, Homo sapiens
  CDR3 for alpha chain variable domain of TCR clone 53481 (TRAV16, TRAJ12)
CSKWPLRDSSYKLIF

SEQ ID NO: 106962 - protein, 13 aa, Homo sapiens
  CDR3 for beta chain variable domain of TCR clone 53481 (TRBV4-2, TRBJ1-1)
CASSQAGNTEAVF

SEQ ID NO: 106963 - protein, 13 aa, Homo sapiens
  CDR3 for alpha chain variable domain of TCR clone 53482 (TRAV35, TRAJ43)
CAGYPYNNNDMRF

SEQ ID NO: 106964 - protein, 15 aa, Homo sapiens
  CDR3 for beta chain variable domain of TCR clone 53482 (TRBV25-1, TRBJ1-4)
CASSKRIATNEKLLF

SEQ ID NO: 106965 - protein, 19 aa, Homo sapiens
  CDR3 for alpha chain variable domain of TCR clone 53483 (TRAV25, TRAJ20)
TATQTTDVGILPHDYKPSF

SEQ ID NO: 106966 - protein, 17 aa, Homo sapiens
  CDR3 for beta chain variable domain of TCR clone 53483 (TRBV4-3, TRBJ2-1)
CASSQFSSGRASGEQFF

SEQ ID NO: 106967 - protein, 14 aa, Homo sapiens
  CDR3 for alpha chain variable domain of TCR clone 53484 (TRAV12-2, TRAJ13)
CAVKKTGGYQKVTF

SEQ ID NO: 106968 - protein, 10 aa, Homo sapiens
  CDR3 for beta chain variable domain of TCR clone 53484 (TRBV12-4, TRBJ1-2)
CASSFIWRHL

SEQ ID NO: 106969 - protein, 12 aa, Homo sapiens
  CDR3 for alpha chain variable domain of TCR clone 53485 (TRAV2, TRAJ33)
CAVPDSNYQLIW

SEQ ID NO: 106970 - protein, 15 aa, Homo sapiens
  CDR3 for beta chain variable domain of TCR clone 53485 (TRBV15, TRBJ1-5)
CATSRDPVSNQPQHC

SEQ ID NO: 106971 - protein, 14 aa, Homo sapiens
  CDR3 for alpha chain variable domain of TCR clone 53486 (TRAV35, TRAJ13)
CAGSPSGGYQKVTF

SEQ ID NO: 106972 - protein, 17 aa, Homo sapiens
  CDR3 for beta chain variable domain of TCR clone 53486 (TRBV7-6, TRBJ2-5)
CASSPGRADPWGETQYF

SEQ ID NO: 106973 - protein, 14 aa, Homo sapiens
  CDR3 for alpha chain variable domain of TCR clone 53487 (TRAV1-2, TRAJ16)
CAVNRFSDGQKLLF

SEQ ID NO: 106974 - protein, 13 aa, Homo sapiens
  CDR3 for beta chain variable domain of TCR clone 53487 (TRBV10-2, TRBJ2-3)
CASSESGDHTQYF

SEQ ID NO: 106975 - protein, 15 aa, Homo sapiens
  CDR3 for alpha chain variable domain of TCR clone 53488 (TRAV21, TRAJ53)
CATLNSGGSNYKLTF

SEQ ID NO: 106976 - protein, 13 aa, Homo sapiens
  CDR3 for beta chain variable domain of TCR clone 53488 (TRBV11-2, TRBJ2-1)
CASSLRLTHEQFF

SEQ ID NO: 106977 - protein, 21 aa, Homo sapiens
  CDR3 for alpha chain variable domain of TCR clone 53489 (TRAV1-1, TRAJ6)
CLLLLRCERLERTGGSYIPTF

SEQ ID NO: 106978 - protein, 18 aa, Homo sapiens
  CDR3 for beta chain variable domain of TCR clone 53489 (TRBV7-2, TRBJ2-3)
CASSLETSRGRKADAQYF

SEQ ID NO: 106979 - protein, 15 aa, Homo sapiens
  CDR3 for alpha chain variable domain of TCR clone 53490 (TRAV21, TRAJ32)
CAVNSYGDATNKLIF

SEQ ID NO: 106980 - protein, 18 aa, Homo sapiens
  CDR3 for beta chain variable domain of TCR clone 53490 (TRBV7-9, TRBJ2-1)
CASSTGLAEGSSYNEQFF

SEQ ID NO: 106981 - protein, 16 aa, Homo sapiens
  CDR3 for alpha chain variable domain of TCR clone 53491 (TRAV30, TRAJ24)
CGTEIVDADSWGKFQL

SEQ ID NO: 106982 - protein, 13 aa, Homo sapiens
  CDR3 for beta chain variable domain of TCR clone 53491 (TRBV20-1, TRBJ1-1)
CSARGGGNTEAFF

SEQ ID NO: 106983 - protein, 11 aa, Homo sapiens
  CDR3 for alpha chain variable domain of TCR clone 53492 (TRAV13-1, TRAJ39)
CASHAGNMLTF

SEQ ID NO: 106984 - protein, 15 aa, Homo sapiens
  CDR3 for beta chain variable domain of TCR clone 53492 (TRBV6-3, TRBJ2-7)
RASSSPGTVFYEQYF

SEQ ID NO: 106985 - protein, 15 aa, Homo sapiens
  CDR3 for alpha chain variable domain of TCR clone 53493 (TRAV8-3, TRAJ41)
CAVGSDSNSGYALNF

SEQ ID NO: 106986 - protein, 17 aa, Homo sapiens
  CDR3 for beta chain variable domain of TCR clone 53493 (TRBV25-1, TRBJ2-1)
CASSAYGQGRGVYEQFF

SEQ ID NO: 106987 - protein, 11 aa, Homo sapiens
  CDR3 for alpha chain variable domain of TCR clone 53494 (TRAV25, TRAJ21)
CAGTIFNKFYF

SEQ ID NO: 106988 - protein, 20 aa, Homo sapiens
  CDR3 for beta chain variable domain of TCR clone 53494 (TRBV19, TRBJ2-1)
CASSISRTVTSTRLNNEQFF

SEQ ID NO: 106989 - protein, 12 aa, Homo sapiens
  CDR3 for alpha chain variable domain of TCR clone 53495 (TRAV12-3, TRAJ17)
CAMTLTGNKLTF

SEQ ID NO: 106990 - protein, 16 aa, Homo sapiens
  CDR3 for beta chain variable domain of TCR clone 53495 (TRBV7-8, TRBJ2-6)
CASRVGDSSGANVLTF

SEQ ID NO: 106991 - protein, 18 aa, Homo sapiens
  CDR3 for alpha chain variable domain of TCR clone 53496 (TRAV26-1, TRAJ52)
CIVRVDGAGGTSYGKLTF

SEQ ID NO: 106992 - protein, 13 aa, Homo sapiens
  CDR3 for beta chain variable domain of TCR clone 53496 (TRBV7-3, TRBJ1-2)
CASSLKRGYGYTF

SEQ ID NO: 106993 - protein, 15 aa, Homo sapiens
  CDR3 for alpha chain variable domain of TCR clone 53497 (TRAV8-3, TRAJ27)
CAVGPSKTNAGKSTF

SEQ ID NO: 106994 - protein, 15 aa, Homo sapiens
  CDR3 for beta chain variable domain of TCR clone 53497 (TRBV7-2, TRBJ2-1)
CAISSGLAGGNEQFF

SEQ ID NO: 106995 - protein, 17 aa, Homo sapiens
  CDR3 for alpha chain variable domain of TCR clone 53498 (TRAV3, TRAJ42)
CAVRDRDYGGSQGNRIF

SEQ ID NO: 106996 - protein, 15 aa, Homo sapiens
  CDR3 for beta chain variable domain of TCR clone 53498 (TRBV2, TRBJ2-7)
CASSEGLARSYEQYF

SEQ ID NO: 106997 - protein, 13 aa, Homo sapiens
  CDR3 for alpha chain variable domain of TCR clone 53499 (TRAV8-3, TRAJ28)
CAVGAVGSYQLTF

SEQ ID NO: 106998 - protein, 15 aa, Homo sapiens
  CDR3 for beta chain variable domain of TCR clone 53499 (TRBV5-1, TRBJ2-3)
CASSVTSGSTDTQYF

SEQ ID NO: 106999 - protein, 13 aa, Homo sapiens
  CDR3 for alpha chain variable domain of TCR clone 53500 (TRAV8-6, TRAJ40)
CAVTSSGTYKYIF

SEQ ID NO: 107000 - protein, 15 aa, Homo sapiens
  CDR3 for beta chain variable domain of TCR clone 53500 (TRBV5-5, TRBJ1-5)
CASSSTPGSNQPHHF

SEQ ID NO: 107001 - protein, 17 aa, Homo sapiens
  CDR3 for alpha chain variable domain of TCR clone 53501 (TRAV13-1, TRAJ31)
CAPRDRLMFGDGTQLVV

SEQ ID NO: 107002 - protein, 12 aa, Homo sapiens
  CDR3 for beta chain variable domain of TCR clone 53501 (TRBV7-9, TRBJ2-7)
CASSLEGYEKYF

SEQ ID NO: 107003 - protein, 14 aa, Homo sapiens
  CDR3 for alpha chain variable domain of TCR clone 53502 (TRAV38-2/DV8, TRAJ29)
CAYRSRSGDTPLVF

SEQ ID NO: 107004 - protein, 17 aa, Homo sapiens
  CDR3 for beta chain variable domain of TCR clone 53502 (TRBV6-1, TRBJ1-2)
CASSGTHSQRGNYGYTF

SEQ ID NO: 107005 - protein, 14 aa, Homo sapiens
  CDR3 for alpha chain variable domain of TCR clone 53503 (TRAV1-1, TRAJ27)
CAVIYNTNAGKSTF

SEQ ID NO: 107006 - protein, 15 aa, Homo sapiens
  CDR3 for beta chain variable domain of TCR clone 53503 (TRBV7-2, TRBJ2-1)
CASSSGLAGGNDQFF

SEQ ID NO: 107007 - protein, 12 aa, Homo sapiens
  CDR3 for alpha chain variable domain of TCR clone 53504 (TRAV2, TRAJ33)
CAVPDSNYQLIR

SEQ ID NO: 107008 - protein, 15 aa, Homo sapiens
  CDR3 for beta chain variable domain of TCR clone 53504 (TRBV15, TRBJ1-5)
CATSRDPVSNQPQHF

SEQ ID NO: 107009 - protein, 13 aa, Homo sapiens
  CDR3 for alpha chain variable domain of TCR clone 53505 (TRAV8-3, TRAJ48)
CAVVPFVNEKLTF

SEQ ID NO: 107010 - protein, 15 aa, Homo sapiens
  CDR3 for beta chain variable domain of TCR clone 53505 (TRBV11-2, TRBJ2-1)
CASSSPSTRYNEQFF

SEQ ID NO: 107011 - protein, 17 aa, Homo sapiens
  CDR3 for alpha chain variable domain of TCR clone 53506 (TRAV16, TRAJ58)
CITVLSNGETSGSRLTF

SEQ ID NO: 107012 - protein, 17 aa, Homo sapiens
  CDR3 for beta chain variable domain of TCR clone 53506 (TRBV18, TRBJ2-1)
CASSKGLSEGADNEQFF

SEQ ID NO: 107013 - protein, 12 aa, Homo sapiens
  CDR3 for alpha chain variable domain of TCR clone 53507 (TRAV2, TRAJ9)
CAVGAGGFKTIF

SEQ ID NO: 107014 - protein, 16 aa, Homo sapiens
  CDR3 for beta chain variable domain of TCR clone 53507 (TRBV13, TRBJ2-2)
CASTPRTGEHTGELFF

SEQ ID NO: 107015 - protein, 14 aa, Homo sapiens
  CDR3 for alpha chain variable domain of TCR clone 53508 (TRAV23/DV6, TRAJ11)
CAALIGGGYSTPTF

SEQ ID NO: 107016 - protein, 13 aa, Homo sapiens
  CDR3 for beta chain variable domain of TCR clone 53508 (TRBV11-3, TRBJ1-1)
CASSLGGNTEAFF

SEQ ID NO: 107017 - protein, 14 aa, Homo sapiens
  CDR3 for alpha chain variable domain of TCR clone 53509 (TRAV12-2, TRAJ45)
CAVSIGGGADGLTF

SEQ ID NO: 107018 - protein, 17 aa, Homo sapiens
  CDR3 for beta chain variable domain of TCR clone 53509 (TRBV7-8, TRBJ2-6)
CASSAGTGGAGANVLTF

SEQ ID NO: 107019 - protein, 13 aa, Homo sapiens
  CDR3 for alpha chain variable domain of TCR clone 53510 (TRAV26-2, TRAJ54)
CIPRVGGAQKLVF

SEQ ID NO: 107020 - protein, 16 aa, Homo sapiens
  CDR3 for beta chain variable domain of TCR clone 53510 (TRBV4-1, TRBJ1-1)
CASSSMSERPKTEAFF

SEQ ID NO: 107021 - protein, 17 aa, Homo sapiens
  CDR3 for alpha chain variable domain of TCR clone 53511 (TRAV36/DV7, TRAJ52)
CAVAQRAGGTSYGKLTF

SEQ ID NO: 107022 - protein, 13 aa, Homo sapiens
  CDR3 for beta chain variable domain of TCR clone 53511 (TRBV7-3, TRBJ1-1)
CASSQDWGAEAFF

SEQ ID NO: 107023 - protein, 15 aa, Homo sapiens
  CDR3 for alpha chain variable domain of TCR clone 53512 (TRAV16, TRAJ17)
CALSGNKAAGNKLTF

SEQ ID NO: 107024 - protein, 16 aa, Homo sapiens
  CDR3 for beta chain variable domain of TCR clone 53512 (TRBV7-6, TRBJ1-6)
CASSSLPAGGYSPLHF

SEQ ID NO: 107025 - protein, 13 aa, Homo sapiens
  CDR3 for alpha chain variable domain of TCR clone 53513 (TRAV12-3, TRAJ47)
CAMKKEYGNKLVL

SEQ ID NO: 107026 - protein, 12 aa, Homo sapiens
  CDR3 for beta chain variable domain of TCR clone 53513 (TRBV7-9, TRBJ1-4)
CASSTDREKLFF

SEQ ID NO: 107027 - protein, 14 aa, Homo sapiens
  CDR3 for alpha chain variable domain of TCR clone 53514 (TRAV12-2, TRAJ45)
YAVNIGGGADGLTF

SEQ ID NO: 107028 - protein, 13 aa, Homo sapiens
  CDR3 for beta chain variable domain of TCR clone 53514 (TRBV19, TRBJ2-2)
CASSIWSTGELFF

SEQ ID NO: 107029 - protein, 17 aa, Homo sapiens
  CDR3 for alpha chain variable domain of TCR clone 53515 (TRAV13-1, TRAJ52)
CAAGRNAGGTSYGKLTF

SEQ ID NO: 107030 - protein, 13 aa, Homo sapiens
  CDR3 for beta chain variable domain of TCR clone 53515 (TRBV7-2, TRBJ1-1)
CASNLKGAKVAVF

SEQ ID NO: 107031 - protein, 11 aa, Homo sapiens
  CDR3 for alpha chain variable domain of TCR clone 53516 (TRAV1-1, TRAJ23)
CAVRQGGKPIF

SEQ ID NO: 107032 - protein, 20 aa, Homo sapiens
  CDR3 for beta chain variable domain of TCR clone 53516 (TRBV11-2, TRBJ1-6)
CASSLVFATGGSVHPSTLGT

SEQ ID NO: 107033 - protein, 16 aa, Homo sapiens
  CDR3 for alpha chain variable domain of TCR clone 53517 (TRAV27, TRAJ52)
CAGAGAGGTSYGKLTL

SEQ ID NO: 107034 - protein, 17 aa, Homo sapiens
  CDR3 for beta chain variable domain of TCR clone 53517 (TRBV24-1, TRBJ2-3)
CATSDLPSGEDTDTQYF

SEQ ID NO: 107035 - protein, 14 aa, Homo sapiens
  CDR3 for alpha chain variable domain of TCR clone 53518 (TRAV12-2, TRAJ44)
CAANPAGTASKLTF

SEQ ID NO: 107036 - protein, 15 aa, Homo sapiens
  CDR3 for beta chain variable domain of TCR clone 53518 (TRBV28, TRBJ2-7)
CASSVRQVSSYEQYF

SEQ ID NO: 107037 - protein, 15 aa, Homo sapiens
  CDR3 for alpha chain variable domain of TCR clone 53519 (TRAV3, TRAJ22)
CAVRDRGGSARQLTF

SEQ ID NO: 107038 - protein, 14 aa, Homo sapiens
  CDR3 for beta chain variable domain of TCR clone 53519 (TRBV19, TRBJ2-1)
CASSCLASINEQFF

SEQ ID NO: 107039 - protein, 11 aa, Homo sapiens
  CDR3 for alpha chain variable domain of TCR clone 53520 (TRAV21, TRAJ34)
CAHYNTDKLIF

SEQ ID NO: 107040 - protein, 12 aa, Homo sapiens
  CDR3 for beta chain variable domain of TCR clone 53520 (TRBV7-8, TRBJ2-7)
CASSLGDREQYF

SEQ ID NO: 107041 - protein, 13 aa, Homo sapiens
  CDR3 for alpha chain variable domain of TCR clone 53521 (TRAV22, TRAJ29)
CAVGGSGNTPLVF

SEQ ID NO: 107042 - protein, 14 aa, Homo sapiens
  CDR3 for beta chain variable domain of TCR clone 53521 (TRBV7-2, TRBJ2-7)
CASSPKTSFYEQYF

SEQ ID NO: 107043 - protein, 12 aa, Homo sapiens
  CDR3 for alpha chain variable domain of TCR clone 53522 (TRAV12-1, TRAJ40)
CVFYLGTYKYIF

SEQ ID NO: 107044 - protein, 18 aa, Homo sapiens
  CDR3 for beta chain variable domain of TCR clone 53522 (TRBV12-4, TRBJ2-2)
CASSLVAGTRGRTGELFF

SEQ ID NO: 107045 - protein, 12 aa, Homo sapiens
  CDR3 for alpha chain variable domain of TCR clone 53523 (TRAV2, TRAJ36)
CAELTGANNLFF

SEQ ID NO: 107046 - protein, 14 aa, Homo sapiens
  CDR3 for beta chain variable domain of TCR clone 53523 (TRBV18, TRBJ2-7)
CASSPRVGAYEQYF

SEQ ID NO: 107047 - protein, 15 aa, Homo sapiens
  CDR3 for alpha chain variable domain of TCR clone 53524 (TRAV27, TRAJ38)
CAARRNAGNNRKLIW

SEQ ID NO: 107048 - protein, 14 aa, Homo sapiens
  CDR3 for beta chain variable domain of TCR clone 53524 (TRBV7-8, TRBJ2-3)
CASSLGAGTDTQYF

SEQ ID NO: 107049 - protein, 14 aa, Homo sapiens
  CDR3 for alpha chain variable domain of TCR clone 53525 (TRAV9-2, TRAJ39)
CALYIYNAGNMLTF

SEQ ID NO: 107050 - protein, 14 aa, Homo sapiens
  CDR3 for beta chain variable domain of TCR clone 53525 (TRBV9, TRBJ2-1)
CASSVDPRGKEQFF

SEQ ID NO: 107051 - protein, 12 aa, Homo sapiens
  CDR3 for alpha chain variable domain of TCR clone 53526 (TRAV8-3, TRAJ26)
CAGDNYGQNFVF

SEQ ID NO: 107052 - protein, 12 aa, Homo sapiens
  CDR3 for beta chain variable domain of TCR clone 53526 (TRBV11-2, TRBJ2-1)
CAGSPGNNEQFF

SEQ ID NO: 107053 - protein, 15 aa, Homo sapiens
  CDR3 for alpha chain variable domain of TCR clone 53527 (TRAV3, TRAJ5)
CAVRDVDTGRRALTF

SEQ ID NO: 107054 - protein, 13 aa, Homo sapiens
  CDR3 for beta chain variable domain of TCR clone 53527 (TRBV12-4, TRBJ2-7)
CASSPTETYEQYF

SEQ ID NO: 107055 - protein, 15 aa, Homo sapiens
  CDR3 for alpha chain variable domain of TCR clone 53528 (TRAV26-1, TRAJ15)
CIVRAANQAGTALIF

SEQ ID NO: 107056 - protein, 15 aa, Homo sapiens
  CDR3 for beta chain variable domain of TCR clone 53528 (TRBV20-1, TRBJ1-1)
CSARSAATANTEAFF

SEQ ID NO: 107057 - protein, 12 aa, Homo sapiens
  CDR3 for alpha chain variable domain of TCR clone 53529 (TRAV17, TRAJ12)
CATLRSIYKLIF

SEQ ID NO: 107058 - protein, 16 aa, Homo sapiens
  CDR3 for beta chain variable domain of TCR clone 53529 (TRBV28, TRBJ2-7)
CASSLFFETGGPEQYF

SEQ ID NO: 107059 - protein, 13 aa, Homo sapiens
  CDR3 for alpha chain variable domain of TCR clone 53530 (TRAV13-1, TRAJ31)
CAASRNNNARLMF

SEQ ID NO: 107060 - protein, 12 aa, Homo sapiens
  CDR3 for beta chain variable domain of TCR clone 53530 (TRBV11-2, TRBJ2-2)
CASSLGGGELFF

SEQ ID NO: 107061 - protein, 12 aa, Homo sapiens
  CDR3 for alpha chain variable domain of TCR clone 53531 (TRAV21, TRAJ23)
CAVGPQGGKFIF

SEQ ID NO: 107062 - protein, 13 aa, Homo sapiens
  CDR3 for beta chain variable domain of TCR clone 53531 (TRBV20-1, TRBJ2-7)
CSARTGAGYEQYF

SEQ ID NO: 107063 - protein, 11 aa, Homo sapiens
  CDR3 for alpha chain variable domain of TCR clone 53532 (TRAV13-1, TRAJ49)
CARVGGNQFYF

SEQ ID NO: 107064 - protein, 16 aa, Homo sapiens
  CDR3 for beta chain variable domain of TCR clone 53532 (TRBV11-2, TRBJ2-2)
CASSLRTGNLIGELFF

SEQ ID NO: 107065 - protein, 12 aa, Homo sapiens
  CDR3 for alpha chain variable domain of TCR clone 53533 (TRAV12-2, TRAJ21)
CAVRYNFNKFYF

SEQ ID NO: 107066 - protein, 14 aa, Homo sapiens
  CDR3 for beta chain variable domain of TCR clone 53533 (TRBV28, TRBJ2-1)
CASSYYTAYNEQFF

SEQ ID NO: 107067 - protein, 14 aa, Homo sapiens
  CDR3 for alpha chain variable domain of TCR clone 53534 (TRAV25, TRAJ42)
CAGNYGGSQGNLIF

SEQ ID NO: 107068 - protein, 12 aa, Homo sapiens
  CDR3 for beta chain variable domain of TCR clone 53534 (TRBV7-2, TRBJ1-6)
CASSLSSSPLHF

SEQ ID NO: 107069 - protein, 16 aa, Homo sapiens
  CDR3 for alpha chain variable domain of TCR clone 53535 (TRAV12-1, TRAJ4)
CVVRRLPAGGYNKLIF

SEQ ID NO: 107070 - protein, 15 aa, Homo sapiens
  CDR3 for beta chain variable domain of TCR clone 53535 (TRBV14, TRBJ2-5)
CASSRRGGVQETQYF

SEQ ID NO: 107071 - protein, 14 aa, Homo sapiens
  CDR3 for alpha chain variable domain of TCR clone 53536 (TRAV12-3, TRAJ10)
SHLPLTGGGNKLTF

SEQ ID NO: 107072 - protein, 14 aa, Homo sapiens
  CDR3 for beta chain variable domain of TCR clone 53536 (TRBV7-3, TRBJ2-1)
CASSLSGSYNEQFF

SEQ ID NO: 107073 - protein, 14 aa, Homo sapiens
  CDR3 for alpha chain variable domain of TCR clone 53537 (TRAV12-3, TRAJ10)
SHLPLTGGGNKLTF

SEQ ID NO: 107074 - protein, 15 aa, Homo sapiens
  CDR3 for beta chain variable domain of TCR clone 53537 (TRBV7-9, TRBJ1-2)
CASSLDREPNYGYTF

SEQ ID NO: 107075 - protein, 15 aa, Homo sapiens
  CDR3 for alpha chain variable domain of TCR clone 53538 (TRAV8-4, TRAJ36)
CAVRKSWTGANNLLF

SEQ ID NO: 107076 - protein, 17 aa, Homo sapiens
  CDR3 for beta chain variable domain of TCR clone 53538 (TRBV3-1, TRBJ2-2)
CASSQDSQGPNTGELFF

SEQ ID NO: 107077 - protein, 14 aa, Homo sapiens
  CDR3 for alpha chain variable domain of TCR clone 53539 (TRAV12-1, TRAJ43)
CVVNGRSNNDDMRF

SEQ ID NO: 107078 - protein, 13 aa, Homo sapiens
  CDR3 for beta chain variable domain of TCR clone 53539 (TRBV27, TRBJ1-1)
CASSLSIGAEAFF

SEQ ID NO: 107079 - protein, 11 aa, Homo sapiens
  CDR3 for alpha chain variable domain of TCR clone 53540 (TRAV3, TRAJ21)
CAVGNFNKFYF

SEQ ID NO: 107080 - protein, 16 aa, Homo sapiens
  CDR3 for beta chain variable domain of TCR clone 53540 (TRBV9, TRBJ2-1)
CASSVGGGGNYNEQFF

SEQ ID NO: 107081 - protein, 11 aa, Homo sapiens
  CDR3 for alpha chain variable domain of TCR clone 53541 (TRAV3, TRAJ21)
CAVGNFNKFYF

SEQ ID NO: 107082 - protein, 13 aa, Homo sapiens
  CDR3 for beta chain variable domain of TCR clone 53541 (TRBV9, TRBJ2-1)
CASSPSGGSEQFF

SEQ ID NO: 107083 - protein, 11 aa, Homo sapiens
  CDR3 for alpha chain variable domain of TCR clone 53542 (TRAV2, TRAJ33)
CAVEGNYQLIW

SEQ ID NO: 107084 - protein, 14 aa, Homo sapiens
  CDR3 for beta chain variable domain of TCR clone 53542 (TRBV11-2, TRBJ1-2)
CASSLYRGNYGYTF

SEQ ID NO: 107085 - protein, 12 aa, Homo sapiens
  CDR3 for alpha chain variable domain of TCR clone 53543 (TRAV12-3, TRAJ39)
CAMTQAGNMLTF

SEQ ID NO: 107086 - protein, 14 aa, Homo sapiens
  CDR3 for beta chain variable domain of TCR clone 53543 (TRBV7-6, TRBJ2-3)
CASSLGTVTDTQYF

SEQ ID NO: 107087 - protein, 14 aa, Homo sapiens
  CDR3 for alpha chain variable domain of TCR clone 53544 (TRAV26-2, TRAJ32)
CCVGYGGATNKLIF

SEQ ID NO: 107088 - protein, 13 aa, Homo sapiens
  CDR3 for beta chain variable domain of TCR clone 53544 (TRBV4-2, TRBJ2-1)
CQRPDRAYNEQFF

SEQ ID NO: 107089 - protein, 13 aa, Homo sapiens
  CDR3 for alpha chain variable domain of TCR clone 53545 (TRAV16, TRAJ26)
CITVLCLGQNFVF

SEQ ID NO: 107090 - protein, 12 aa, Homo sapiens
  CDR3 for beta chain variable domain of TCR clone 53545 (TRBV11-2, TRBJ2-1)
RASSPGNNEQFF

SEQ ID NO: 107091 - protein, 19 aa, Homo sapiens
  CDR3 for alpha chain variable domain of TCR clone 53546 (TRAV26-1, TRAJ48)
CCVLLHRPLVVVWNEKLTF

SEQ ID NO: 107092 - protein, 12 aa, Homo sapiens
  CDR3 for beta chain variable domain of TCR clone 53546 (TRBV19, TRBJ2-5)
CASSISEETQYF

SEQ ID NO: 107093 - protein, 14 aa, Homo sapiens
  CDR3 for alpha chain variable domain of TCR clone 53547 (TRAV1-2, TRAJ8)
CAVRGDTGFQKLVF

SEQ ID NO: 107094 - protein, 15 aa, Homo sapiens
  CDR3 for beta chain variable domain of TCR clone 53547 (TRBV4-1, TRBJ2-7)
CASSQNTGRLYEQYF

SEQ ID NO: 107095 - protein, 15 aa, Homo sapiens
  CDR3 for alpha chain variable domain of TCR clone 53548 (TRAV3, TRAJ5)
CAVRDLDTGRRALTF

SEQ ID NO: 107096 - protein, 13 aa, Homo sapiens
  CDR3 for beta chain variable domain of TCR clone 53548 (TRBV10-3, TRBJ2-7)
CASKLAVNYEQYF

SEQ ID NO: 107097 - protein, 13 aa, Homo sapiens
  CDR3 for alpha chain variable domain of TCR clone 53549 (TRAV22, TRAJ29)
CAVGGSGNTPLVF

SEQ ID NO: 107098 - protein, 19 aa, Homo sapiens
  CDR3 for beta chain variable domain of TCR clone 53549 (TRBV25-1, TRBJ2-2)
CAILVYRVDRGRKTGELFF

SEQ ID NO: 107099 - protein, 13 aa, Homo sapiens
  CDR3 for alpha chain variable domain of TCR clone 53550 (TRAV12-1, TRAJ7)
CVVNMRGNNRLVF

SEQ ID NO: 107100 - protein, 15 aa, Homo sapiens
  CDR3 for beta chain variable domain of TCR clone 53550 (TRBV27, TRBJ2-3)
CASSLGLAATDTQYF

SEQ ID NO: 107101 - protein, 15 aa, Homo sapiens
  CDR3 for alpha chain variable domain of TCR clone 53551 (TRAV3, TRAJ9)
CAVRARNTGGFKTIF

SEQ ID NO: 107102 - protein, 11 aa, Homo sapiens
  CDR3 for beta chain variable domain of TCR clone 53551 (TRBV11-2, TRBJ1-1)
CASSINTEAFF

SEQ ID NO: 107103 - protein, 13 aa, Homo sapiens
  CDR3 for alpha chain variable domain of TCR clone 53552 (TRAV12-2, TRAJ9)
CAGKWAGGFKTIF

SEQ ID NO: 107104 - protein, 15 aa, Homo sapiens
  CDR3 for beta chain variable domain of TCR clone 53552 (TRBV5-1, TRBJ1-4)
CASSLTADSDEKLFF

SEQ ID NO: 107105 - protein, 13 aa, Homo sapiens
  CDR3 for alpha chain variable domain of TCR clone 53553 (TRAV8-3, TRAJ43)
CAVVPYNNDDMRF

SEQ ID NO: 107106 - protein, 17 aa, Homo sapiens
  CDR3 for beta chain variable domain of TCR clone 53553 (TRBV7-7, TRBJ1-1)
CASIGDRPNLGVTEAFF

SEQ ID NO: 107107 - protein, 15 aa, Homo sapiens
  CDR3 for alpha chain variable domain of TCR clone 53554 (TRAV38-1, TRAJ37)
CAFIHGSGNTGKLIF

SEQ ID NO: 107108 - protein, 14 aa, Homo sapiens
  CDR3 for beta chain variable domain of TCR clone 53554 (TRBV29-1, TRBJ2-5)
CSVETSGGGETQYF

SEQ ID NO: 107109 - protein, 14 aa, Homo sapiens
  CDR3 for alpha chain variable domain of TCR clone 53555 (TRAV12-2, TRAJ33)
CAVKRARSNYQLIW

SEQ ID NO: 107110 - protein, 15 aa, Homo sapiens
  CDR3 for beta chain variable domain of TCR clone 53555 (TRBV20-1, TRBJ2-7)
CSARDRVSGMDEQYS

SEQ ID NO: 107111 - protein, 15 aa, Homo sapiens
  CDR3 for alpha chain variable domain of TCR clone 53556 (TRAV21, TRAJ10)
CAVRGLTGGGNKLTF

SEQ ID NO: 107112 - protein, 16 aa, Homo sapiens
  CDR3 for beta chain variable domain of TCR clone 53556 (TRBV12-4, TRBJ1-5)
CASSRPVGGSNQPQHF

SEQ ID NO: 107113 - protein, 13 aa, Homo sapiens
  CDR3 for alpha chain variable domain of TCR clone 53557 (TRAV21, TRAJ37)
CAVSSGNTGKLIF

SEQ ID NO: 107114 - protein, 12 aa, Homo sapiens
  CDR3 for beta chain variable domain of TCR clone 53557 (TRBV11-2, TRBJ2-5)
CASSLVGETQYF

SEQ ID NO: 107115 - protein, 16 aa, Homo sapiens
  CDR3 for alpha chain variable domain of TCR clone 53558 (TRAV8-4, TRAJ28)
CAVESNSGAGSYQLTF

SEQ ID NO: 107116 - protein, 11 aa, Homo sapiens
  CDR3 for beta chain variable domain of TCR clone 53558 (TRBV29-1, TRBJ2-5)
CSEDRTGTQYF

SEQ ID NO: 107117 - protein, 12 aa, Homo sapiens
  CDR3 for alpha chain variable domain of TCR clone 53559 (TRAV27, TRAJ36)
ASTPAGANNLFF

SEQ ID NO: 107118 - protein, 13 aa, Homo sapiens
  CDR3 for beta chain variable domain of TCR clone 53559 (TRBV7-9, TRBJ2-3)
CTSSPGSTDTQYF

SEQ ID NO: 107119 - protein, 15 aa, Homo sapiens
  CDR3 for alpha chain variable domain of TCR clone 53560 (TRAV3, TRAJ12)
CAVRDIRDSSYKLIF

SEQ ID NO: 107120 - protein, 15 aa, Homo sapiens
  CDR3 for beta chain variable domain of TCR clone 53560 (TRBV27, TRBJ2-7)
CASSLRDEQGYEQYF

SEQ ID NO: 107121 - protein, 14 aa, Homo sapiens
  CDR3 for alpha chain variable domain of TCR clone 53561 (TRAV17, TRAJ22)
CATSPSDSARQLTF

SEQ ID NO: 107122 - protein, 15 aa, Homo sapiens
  CDR3 for beta chain variable domain of TCR clone 53561 (TRBV4-1, TRBJ2-5)
CASSQWDLYQETQYF

SEQ ID NO: 107123 - protein, 13 aa, Homo sapiens
  CDR3 for alpha chain variable domain of TCR clone 53562 (TRAV2, TRAJ40)
CAVVTSGTYKYIF

SEQ ID NO: 107124 - protein, 15 aa, Homo sapiens
  CDR3 for beta chain variable domain of TCR clone 53562 (TRBV11-1, TRBJ2-3)
CASLKDGREGDTQYF

SEQ ID NO: 107125 - protein, 17 aa, Homo sapiens
  CDR3 for alpha chain variable domain of TCR clone 53563 (TRAV4, TRAJ13)
CLVGGQGSSGGYQKVTF

SEQ ID NO: 107126 - protein, 18 aa, Homo sapiens
  CDR3 for beta chain variable domain of TCR clone 53563 (TRBV15, TRBJ2-3)
CATSRDGARSWDTDTQYF

SEQ ID NO: 107127 - protein, 12 aa, Homo sapiens
  CDR3 for alpha chain variable domain of TCR clone 53564 (TRAV13-1, TRAJ21)
CAAFFNFNKFYF

SEQ ID NO: 107128 - protein, 12 aa, Homo sapiens
  CDR3 for beta chain variable domain of TCR clone 53564 (TRBV7-9, TRBJ2-7)
CASSIKREEQHF

SEQ ID NO: 107129 - protein, 14 aa, Homo sapiens
  CDR3 for alpha chain variable domain of TCR clone 53565 (TRAV38-1, TRAJ45)
CASHSGGGADGLTF

SEQ ID NO: 107130 - protein, 13 aa, Homo sapiens
  CDR3 for beta chain variable domain of TCR clone 53565 (TRBV10-3, TRBJ1-2)
CAISEWDSYGYTF

SEQ ID NO: 107131 - protein, 12 aa, Homo sapiens
  CDR3 for alpha chain variable domain of TCR clone 53566 (TRAV2, TRAJ33)
CAFMDSNYQLIC

SEQ ID NO: 107132 - protein, 16 aa, Homo sapiens
  CDR3 for beta chain variable domain of TCR clone 53566 (TRBV2, TRBJ2-7)
CASSEPWTGPSYEQYF

SEQ ID NO: 107133 - protein, 14 aa, Homo sapiens
  CDR3 for alpha chain variable domain of TCR clone 53567 (TRAV12-1, TRAJ12)
CVVTRMDSSYKLIF

SEQ ID NO: 107134 - protein, 18 aa, Homo sapiens
  CDR3 for beta chain variable domain of TCR clone 53567 (TRBV20-1, TRBJ2-6)
CSAETTTTHGSGANVLTF

SEQ ID NO: 107135 - protein, 18 aa, Homo sapiens
  CDR3 for alpha chain variable domain of TCR clone 53568 (TRAV21, TRAJ52)
CAVRPSPAGGTSYGKLTF

SEQ ID NO: 107136 - protein, 17 aa, Homo sapiens
  CDR3 for beta chain variable domain of TCR clone 53568 (TRBV13, TRBJ2-3)
CASSLSRVAGGRNSQYF

SEQ ID NO: 107137 - protein, 14 aa, Homo sapiens
  CDR3 for alpha chain variable domain of TCR clone 53569 (TRAV1-2, TRAJ8)
CAVREDTGFQRLVF

SEQ ID NO: 107138 - protein, 16 aa, Homo sapiens
  CDR3 for beta chain variable domain of TCR clone 53569 (TRBV12-5, TRBJ2-5)
CASGPRTSGNQETQYF

SEQ ID NO: 107139 - protein, 14 aa, Homo sapiens
  CDR3 for alpha chain variable domain of TCR clone 53570 (TRAV17, TRAJ16)
CAAADFSDGQKLLF

SEQ ID NO: 107140 - protein, 15 aa, Homo sapiens
  CDR3 for beta chain variable domain of TCR clone 53570 (TRBV18, TRBJ2-1)
CASSPPSASYNEQFF

SEQ ID NO: 107141 - protein, 18 aa, Homo sapiens
  CDR3 for alpha chain variable domain of TCR clone 53571 (TRAV26-1, TRAJ23)
CIVRVGLEVWNQGGKLIF

SEQ ID NO: 107142 - protein, 16 aa, Homo sapiens
  CDR3 for beta chain variable domain of TCR clone 53571 (TRBV12-4, TRBJ2-5)
CASSFFVRERQETQYF

SEQ ID NO: 107143 - protein, 12 aa, Homo sapiens
  CDR3 for alpha chain variable domain of TCR clone 53572 (TRAV12-3, TRAJ17)
CAMTLTGNKLTF

SEQ ID NO: 107144 - protein, 15 aa, Homo sapiens
  CDR3 for beta chain variable domain of TCR clone 53572 (TRBV4-1, TRBJ1-4)
CASGDTGGTNEKLFF

SEQ ID NO: 107145 - protein, 15 aa, Homo sapiens
  CDR3 for alpha chain variable domain of TCR clone 53573 (TRAV21, TRAJ38)
CAVRQDAGNNRKLIW

SEQ ID NO: 107146 - protein, 16 aa, Homo sapiens
  CDR3 for beta chain variable domain of TCR clone 53573 (TRBV4-2, TRBJ1-1)
CASRPRDGGGDTEAFF

SEQ ID NO: 107147 - protein, 14 aa, Homo sapiens
  CDR3 for alpha chain variable domain of TCR clone 53574 (TRAV12-2, TRAJ13)
CAVKKTGGDQKVTF

SEQ ID NO: 107148 - protein, 12 aa, Homo sapiens
  CDR3 for beta chain variable domain of TCR clone 53574 (TRBV12-4, TRBJ1-2)
CASSFIWLHLRF

SEQ ID NO: 107149 - protein, 13 aa, Homo sapiens
  CDR3 for alpha chain variable domain of TCR clone 53575 (TRAV27, TRAJ27)
CAGGITNAGKSTF

SEQ ID NO: 107150 - protein, 19 aa, Homo sapiens
  CDR3 for beta chain variable domain of TCR clone 53575 (TRBV28, TRBJ2-7)
CASSYSGTSRLGWVYEQYF

SEQ ID NO: 107151 - protein, 14 aa, Homo sapiens
  CDR3 for alpha chain variable domain of TCR clone 53576 (TRAV12-3, TRAJ10)
GHLPLTGGGNKLTF

SEQ ID NO: 107152 - protein, 15 aa, Homo sapiens
  CDR3 for beta chain variable domain of TCR clone 53576 (TRBV9, TRBJ1-6)
CASSVAGTGDSPLHF

SEQ ID NO: 107153 - protein, 12 aa, Homo sapiens
  CDR3 for alpha chain variable domain of TCR clone 53577 (TRAV1-1, TRAJ9)
CAVDTGCFKTIF

SEQ ID NO: 107154 - protein, 14 aa, Homo sapiens
  CDR3 for beta chain variable domain of TCR clone 53577 (TRBV7-8, TRBJ2-5)
CASSATGGQETQYF

SEQ ID NO: 107155 - protein, 15 aa, Homo sapiens
  CDR3 for alpha chain variable domain of TCR clone 53578 (TRAV2, TRAJ22)
CAVPSRGGSARQLTF

SEQ ID NO: 107156 - protein, 11 aa, Homo sapiens
  CDR3 for beta chain variable domain of TCR clone 53578 (TRBV27, TRBJ2-3)
CASSLGDAQYF

SEQ ID NO: 107157 - protein, 16 aa, Homo sapiens
  CDR3 for alpha chain variable domain of TCR clone 53579 (TRAV8-3, TRAJ13)
CAVAAYPSGGYQKVTF

SEQ ID NO: 107158 - protein, 15 aa, Homo sapiens
  CDR3 for beta chain variable domain of TCR clone 53579 (TRBV19, TRBJ1-5)
CASSIVWADNQPQHF

SEQ ID NO: 107159 - protein, 13 aa, Homo sapiens
  CDR3 for alpha chain variable domain of TCR clone 53580 (TRAV8-3, TRAJ48)
CAVVPFGNEKLTF

SEQ ID NO: 107160 - protein, 12 aa, Homo sapiens
  CDR3 for beta chain variable domain of TCR clone 53580 (TRBV11-2, TRBJ2-2)
CTSSLGGGELFF

SEQ ID NO: 107161 - protein, 14 aa, Homo sapiens
  CDR3 for alpha chain variable domain of TCR clone 53581 (TRAV12-3, TRAJ13)
CVMRNSGGYQKVTF

SEQ ID NO: 107162 - protein, 14 aa, Homo sapiens
  CDR3 for beta chain variable domain of TCR clone 53581 (TRBV4-1, TRBJ1-6)
CASSPGSDSSPLHF

SEQ ID NO: 107163 - protein, 16 aa, Homo sapiens
  CDR3 for alpha chain variable domain of TCR clone 53582 (TRAV8-4, TRAJ18)
CAVSSDRGSTLGRLYF

SEQ ID NO: 107164 - protein, 14 aa, Homo sapiens
  CDR3 for beta chain variable domain of TCR clone 53582 (TRBV18, TRBJ2-5)
CASSPGVSQETQYF

SEQ ID NO: 107165 - protein, 14 aa, Homo sapiens
  CDR3 for alpha chain variable domain of TCR clone 53583 (TRAV24, TRAJ42)
CAQNYGGSQGNLIF

SEQ ID NO: 107166 - protein, 14 aa, Homo sapiens
  CDR3 for beta chain variable domain of TCR clone 53583 (TRBV7-8, TRBJ2-7)
CASSPRDRVYEQYF

SEQ ID NO: 107167 - protein, 12 aa, Homo sapiens
  CDR3 for alpha chain variable domain of TCR clone 53584 (TRAV17, TRAJ5)
CSYDTGRRALTF

SEQ ID NO: 107168 - protein, 16 aa, Homo sapiens
  CDR3 for beta chain variable domain of TCR clone 53584 (TRBV27, TRBJ2-7)
CANSSERRDSAYEQYF

SEQ ID NO: 107169 - protein, 14 aa, Homo sapiens
  CDR3 for alpha chain variable domain of TCR clone 53585 (TRAV29/DV5, TRAJ32)
CAAAYGGATNKLIF

SEQ ID NO: 107170 - protein, 15 aa, Homo sapiens
  CDR3 for beta chain variable domain of TCR clone 53585 (TRBV27, TRBJ2-7)
CASGTAGTGSYEQYF

SEQ ID NO: 107171 - protein, 11 aa, Homo sapiens
  CDR3 for alpha chain variable domain of TCR clone 53586 (TRAV1-2, TRAJ20)
CAVANDYKLSF

SEQ ID NO: 107172 - protein, 18 aa, Homo sapiens
  CDR3 for beta chain variable domain of TCR clone 53586 (TRBV20-1, TRBJ2-6)
CSAETTPTHGYGANVLTF

SEQ ID NO: 107173 - protein, 14 aa, Homo sapiens
  CDR3 for alpha chain variable domain of TCR clone 53587 (TRAV12-3, TRAJ10)
SHLPLTGGRNKLTF

SEQ ID NO: 107174 - protein, 15 aa, Homo sapiens
  CDR3 for beta chain variable domain of TCR clone 53587 (TRBV7-2, TRBJ2-1)
CASSSGLAGGNEQFF

SEQ ID NO: 107175 - protein, 13 aa, Homo sapiens
  CDR3 for alpha chain variable domain of TCR clone 53588 (TRAV17, TRAJ26)
CATVDNYGQNFVF

SEQ ID NO: 107176 - protein, 13 aa, Homo sapiens
  CDR3 for beta chain variable domain of TCR clone 53588 (TRBV19, TRBJ1-4)
CASPTQGNEKLFF

SEQ ID NO: 107177 - protein, 14 aa, Homo sapiens
  CDR3 for alpha chain variable domain of TCR clone 53589 (TRAV12-2, TRAJ13)
CAVKKTGGYQKVTF

SEQ ID NO: 107178 - protein, 14 aa, Homo sapiens
  CDR3 for beta chain variable domain of TCR clone 53589 (TRBV12-5, TRBJ2-5)
CASGSRTHQETQYS

SEQ ID NO: 107179 - protein, 14 aa, Homo sapiens
  CDR3 for alpha chain variable domain of TCR clone 53590 (TRAV12-3, TRAJ58)
CAMSTETRGSRLTF

SEQ ID NO: 107180 - protein, 12 aa, Homo sapiens
  CDR3 for beta chain variable domain of TCR clone 53590 (TRBV7-8, TRBJ2-7)
CASSLGDREQYF

SEQ ID NO: 107181 - protein, 15 aa, Homo sapiens
  CDR3 for alpha chain variable domain of TCR clone 53591 (TRAV12-3, TRAJ27)
CAVRAYNTNAGKSTF

SEQ ID NO: 107182 - protein, 13 aa, Homo sapiens
  CDR3 for beta chain variable domain of TCR clone 53591 (TRBV11-2, TRBJ2-5)
CASSRGPSETQYF

SEQ ID NO: 107183 - protein, 14 aa, Homo sapiens
  CDR3 for alpha chain variable domain of TCR clone 53592 (TRAV23/DV6, TRAJ27)
CAASRDTNAGKSTF

SEQ ID NO: 107184 - protein, 16 aa, Homo sapiens
  CDR3 for beta chain variable domain of TCR clone 53592 (TRBV5-1, TRBJ2-5)
CASSLALLRAGETQYF

SEQ ID NO: 107185 - protein, 11 aa, Homo sapiens
  CDR3 for alpha chain variable domain of TCR clone 53593 (TRAV2, TRAJ13)
CASGGYQKVTF

SEQ ID NO: 107186 - protein, 14 aa, Homo sapiens
  CDR3 for beta chain variable domain of TCR clone 53593 (TRBV7-2, TRBJ2-5)
CASSPRGSSETQYF

SEQ ID NO: 107187 - protein, 13 aa, Homo sapiens
  CDR3 for alpha chain variable domain of TCR clone 53594 (TRAV23/DV6, TRAJ47)
CAASMTRGNKLAF

SEQ ID NO: 107188 - protein, 14 aa, Homo sapiens
  CDR3 for beta chain variable domain of TCR clone 53594 (TRBV7-3, TRBJ1-1)
CASSLKGGNTEAFF

SEQ ID NO: 107189 - protein, 11 aa, Homo sapiens
  CDR3 for alpha chain variable domain of TCR clone 53595 (TRAV30, TRAJ24)
VDADSWGKFQF

SEQ ID NO: 107190 - protein, 14 aa, Homo sapiens
  CDR3 for beta chain variable domain of TCR clone 53595 (TRBV12-5, TRBJ2-5)
CASGSRTHQETQYF

SEQ ID NO: 107191 - protein, 15 aa, Homo sapiens
  CDR3 for alpha chain variable domain of TCR clone 53596 (TRAV3, TRAJ5)
CAVRDRKTGRRAFTF

SEQ ID NO: 107192 - protein, 15 aa, Homo sapiens
  CDR3 for beta chain variable domain of TCR clone 53596 (TRBV7-8, TRBJ2-1)
CASSLADSLYNEQFF

SEQ ID NO: 107193 - protein, 14 aa, Homo sapiens
  CDR3 for alpha chain variable domain of TCR clone 53597 (TRAV8-4, TRAJ40)
CAVIPTSGTYKYIF

SEQ ID NO: 107194 - protein, 15 aa, Homo sapiens
  CDR3 for beta chain variable domain of TCR clone 53597 (TRBV7-2, TRBJ2-1)
CASTSASGDCNEQFF

SEQ ID NO: 107195 - protein, 15 aa, Homo sapiens
  CDR3 for alpha chain variable domain of TCR clone 53598 (TRAV34, TRAJ38)
CGAGFTPGNNRKLIW

SEQ ID NO: 107196 - protein, 12 aa, Homo sapiens
  CDR3 for beta chain variable domain of TCR clone 53598 (TRBV19, TRBJ1-5)
CASSIAQQPQHF

SEQ ID NO: 107197 - protein, 12 aa, Homo sapiens
  CDR3 for alpha chain variable domain of TCR clone 53599 (TRAV13-1, TRAJ21)
CAAKEGFNRFYF

SEQ ID NO: 107198 - protein, 20 aa, Homo sapiens
  CDR3 for beta chain variable domain of TCR clone 53599 (TRBV7-8, TRBJ2-2)
CASSHLFPGPTIHITGELFF

SEQ ID NO: 107199 - protein, 16 aa, Homo sapiens
  CDR3 for alpha chain variable domain of TCR clone 53600 (TRAV30, TRAJ24)
WGTEIVDADSWGKFQF

SEQ ID NO: 107200 - protein, 14 aa, Homo sapiens
  CDR3 for beta chain variable domain of TCR clone 53600 (TRBV12-5, TRBJ2-5)
CASGSRTHQETQYF

SEQ ID NO: 107201 - protein, 15 aa, Homo sapiens
  CDR3 for alpha chain variable domain of TCR clone 53601 (TRAV21, TRAJ53)
CATLNSGGSNYKLTF

SEQ ID NO: 107202 - protein, 13 aa, Homo sapiens
  CDR3 for beta chain variable domain of TCR clone 53601 (TRBV12-4, TRBJ1-1)
CASSPGTGFEAFF

SEQ ID NO: 107203 - protein, 12 aa, Homo sapiens
  CDR3 for alpha chain variable domain of TCR clone 53602 (TRAV13-1, TRAJ21)
CAAKEGFNKFYF

SEQ ID NO: 107204 - protein, 18 aa, Homo sapiens
  CDR3 for beta chain variable domain of TCR clone 53602 (TRBV20-1, TRBJ2-6)
CSAGTTPTHGSGANVLTF

SEQ ID NO: 107205 - protein, 13 aa, Homo sapiens
  CDR3 for alpha chain variable domain of TCR clone 53603 (TRAV35, TRAJ13)
CWFPFWGYQKVTF

SEQ ID NO: 107206 - protein, 13 aa, Homo sapiens
  CDR3 for beta chain variable domain of TCR clone 53603 (TRBV29-1, TRBJ1-1)
CSVGDSRNTEAFF

SEQ ID NO: 107207 - protein, 14 aa, Homo sapiens
  CDR3 for alpha chain variable domain of TCR clone 53604 (TRAV1-2, TRAJ13)
CAVKHSGGYQKVTF

SEQ ID NO: 107208 - protein, 12 aa, Homo sapiens
  CDR3 for beta chain variable domain of TCR clone 53604 (TRBV7-3, TRBJ2-5)
CAGSSPGGTQYF

SEQ ID NO: 107209 - protein, 11 aa, Homo sapiens
  CDR3 for alpha chain variable domain of TCR clone 53605 (TRAV17, TRAJ9)
CATTGVFKTIF

SEQ ID NO: 107210 - protein, 14 aa, Homo sapiens
  CDR3 for beta chain variable domain of TCR clone 53605 (TRBV7-9, TRBJ2-2)
CASSGLADTGELFF

SEQ ID NO: 107211 - protein, 13 aa, Homo sapiens
  CDR3 for alpha chain variable domain of TCR clone 53606 (TRAV21, TRAJ27)
CAARPGNAGKSTF

SEQ ID NO: 107212 - protein, 15 aa, Homo sapiens
  CDR3 for beta chain variable domain of TCR clone 53606 (TRBV20-1, TRBJ2-7)
CNAGDRVSGMDEQYF

SEQ ID NO: 107213 - protein, 12 aa, Homo sapiens
  CDR3 for alpha chain variable domain of TCR clone 53607 (TRAV25, TRAJ11)
CAGYSGYSTLTF

SEQ ID NO: 107214 - protein, 13 aa, Homo sapiens
  CDR3 for beta chain variable domain of TCR clone 53607 (TRBV7-9, TRBJ1-2)
CASSLKQDYGYTF

SEQ ID NO: 107215 - protein, 12 aa, Homo sapiens
  CDR3 for alpha chain variable domain of TCR clone 53608 (TRAV16, TRAJ56)
CAPTGVNSKLTF

SEQ ID NO: 107216 - protein, 17 aa, Homo sapiens
  CDR3 for beta chain variable domain of TCR clone 53608 (TRBV27, TRBJ2-6)
CASSLTGFASGANVLTF

SEQ ID NO: 107217 - protein, 13 aa, Homo sapiens
  CDR3 for alpha chain variable domain of TCR clone 53609 (TRAV27, TRAJ45)
CRSSGGGANGLTF

SEQ ID NO: 107218 - protein, 17 aa, Homo sapiens
  CDR3 for beta chain variable domain of TCR clone 53609 (TRBV11-2, TRBJ2-1)
CASSLYPPGVEYNEQFF

SEQ ID NO: 107219 - protein, 16 aa, Homo sapiens
  CDR3 for alpha chain variable domain of TCR clone 53610 (TRAV30, TRAJ24)
CGTEIVDADSWGKFKF

SEQ ID NO: 107220 - protein, 14 aa, Homo sapiens
  CDR3 for beta chain variable domain of TCR clone 53610 (TRBV12-5, TRBJ2-5)
CASGSRTQQETQYF

SEQ ID NO: 107221 - protein, 14 aa, Homo sapiens
  CDR3 for alpha chain variable domain of TCR clone 53611 (TRAV35, TRAJ40)
CAGSTTSGTYKYIF

SEQ ID NO: 107222 - protein, 14 aa, Homo sapiens
  CDR3 for beta chain variable domain of TCR clone 53611 (TRBV18, TRBJ1-2)
CASSPPGQAYGYTF

SEQ ID NO: 107223 - protein, 11 aa, Homo sapiens
  CDR3 for alpha chain variable domain of TCR clone 53612 (TRAV2, TRAJ33)
CAVDSNYQLIW

SEQ ID NO: 107224 - protein, 14 aa, Homo sapiens
  CDR3 for beta chain variable domain of TCR clone 53612 (TRBV11-2, TRBJ2-3)
CACSRLARTDTQYF

SEQ ID NO: 107225 - protein, 15 aa, Homo sapiens
  CDR3 for alpha chain variable domain of TCR clone 53613 (TRAV1-2, TRAJ30)
CAVRPHGHRDDKIIF

SEQ ID NO: 107226 - protein, 13 aa, Homo sapiens
  CDR3 for beta chain variable domain of TCR clone 53613 (TRBV4-1, TRBJ2-7)
CASSQGQAYEQYF

SEQ ID NO: 107227 - protein, 16 aa, Homo sapiens
  CDR3 for alpha chain variable domain of TCR clone 53614 (TRAV38-1, TRAJ56)
CAFMKRQTGANSKLTF

SEQ ID NO: 107228 - protein, 14 aa, Homo sapiens
  CDR3 for beta chain variable domain of TCR clone 53614 (TRBV4-1, TRBJ2-2)
CASSQAVNTGELFF

SEQ ID NO: 107229 - protein, 14 aa, Homo sapiens
  CDR3 for alpha chain variable domain of TCR clone 53615 (TRAV21, TRAJ12)
CAVGNGDSSYKLIF

SEQ ID NO: 107230 - protein, 14 aa, Homo sapiens
  CDR3 for beta chain variable domain of TCR clone 53615 (TRBV7-6, TRBJ2-7)
CASSLTGTGNEQYF

SEQ ID NO: 107231 - protein, 10 aa, Homo sapiens
  CDR3 for alpha chain variable domain of TCR clone 53616 (TRAV36/DV7, TRAJ49)
CALTGNQFYF

SEQ ID NO: 107232 - protein, 15 aa, Homo sapiens
  CDR3 for beta chain variable domain of TCR clone 53616 (TRBV7-2, TRBJ2-1)
CASTHGTGIYNEQFF

SEQ ID NO: 107233 - protein, 14 aa, Homo sapiens
  CDR3 for alpha chain variable domain of TCR clone 53617 (TRAV12-2, TRAJ45)
CAVNIGGGADGLTL

SEQ ID NO: 107234 - protein, 13 aa, Homo sapiens
  CDR3 for beta chain variable domain of TCR clone 53617 (TRBV19, TRBJ2-2)
CASSIWSTGELFF

SEQ ID NO: 107235 - protein, 14 aa, Homo sapiens
  CDR3 for alpha chain variable domain of TCR clone 53618 (TRAV27, TRAJ23)
CAGLSYNQGGKLIF

SEQ ID NO: 107236 - protein, 15 aa, Homo sapiens
  CDR3 for beta chain variable domain of TCR clone 53618 (TRBV19, TRBJ2-2)
CASNLNRGVTGELFF

SEQ ID NO: 107237 - protein, 16 aa, Homo sapiens
  CDR3 for alpha chain variable domain of TCR clone 53619 (TRAV30, TRAJ24)
CGTEMVDADSWGKFQL

SEQ ID NO: 107238 - protein, 14 aa, Homo sapiens
  CDR3 for beta chain variable domain of TCR clone 53619 (TRBV12-5, TRBJ2-5)
CASGSRTHQETQYF

SEQ ID NO: 107239 - protein, 15 aa, Homo sapiens
  CDR3 for alpha chain variable domain of TCR clone 53620 (TRAV17, TRAJ16)
CATALRFSDGQKLLF

SEQ ID NO: 107240 - protein, 20 aa, Homo sapiens
  CDR3 for beta chain variable domain of TCR clone 53620 (TRBV28, TRBJ2-1)
CASTPIGRSPGLAGGNEQFF

SEQ ID NO: 107241 - protein, 15 aa, Homo sapiens
  CDR3 for alpha chain variable domain of TCR clone 53621 (TRAV12-1, TRAJ44)
CVVFVNTGTASKLTF

SEQ ID NO: 107242 - protein, 16 aa, Homo sapiens
  CDR3 for beta chain variable domain of TCR clone 53621 (TRBV6-4, TRBJ1-2)
CASSEAVGDPNYGYTF

SEQ ID NO: 107243 - protein, 14 aa, Homo sapiens
  CDR3 for alpha chain variable domain of TCR clone 53622 (TRAV12-2, TRAJ40)
CAVKIPSGTYKYIF

SEQ ID NO: 107244 - protein, 17 aa, Homo sapiens
  CDR3 for beta chain variable domain of TCR clone 53622 (TRBV7-8, TRBJ2-6)
CASSAGTGGAGANVPTF

SEQ ID NO: 107245 - protein, 10 aa, Homo sapiens
  CDR3 for alpha chain variable domain of TCR clone 53623 (TRAV4, TRAJ33)
TLDSNYQLIW

SEQ ID NO: 107246 - protein, 14 aa, Homo sapiens
  CDR3 for beta chain variable domain of TCR clone 53623 (TRBV7-3, TRBJ1-1)
CASSLKGGNTEAFF

SEQ ID NO: 107247 - protein, 15 aa, Homo sapiens
  CDR3 for alpha chain variable domain of TCR clone 53624 (TRAV8-3, TRAJ9)
CAVEDRGTGGFKTIF

SEQ ID NO: 107248 - protein, 16 aa, Homo sapiens
  CDR3 for beta chain variable domain of TCR clone 53624 (TRBV24-1, TRBJ2-3)
CATSDPGTGATDTQYF

SEQ ID NO: 107249 - protein, 13 aa, Homo sapiens
  CDR3 for alpha chain variable domain of TCR clone 53625 (TRAV2, TRAJ40)
CAVVTSGTYKYIF

SEQ ID NO: 107250 - protein, 15 aa, Homo sapiens
  CDR3 for beta chain variable domain of TCR clone 53625 (TRBV7-8, TRBJ2-1)
CASSLADSLYNEQFF

SEQ ID NO: 107251 - protein, 14 aa, Homo sapiens
  CDR3 for alpha chain variable domain of TCR clone 53626 (TRAV1-2, TRAJ16)
CAVNRFSDGQRLLF

SEQ ID NO: 107252 - protein, 15 aa, Homo sapiens
  CDR3 for beta chain variable domain of TCR clone 53626 (TRBV10-1, TRBJ2-1)
CASSEWRGTYNGQFF

SEQ ID NO: 107253 - protein, 21 aa, Homo sapiens
  CDR3 for alpha chain variable domain of TCR clone 53627 (TRAV8-3, TRAJ10)
CAVGHTHGRRKQTHLWDRHSA

SEQ ID NO: 107254 - protein, 10 aa, Homo sapiens
  CDR3 for beta chain variable domain of TCR clone 53627 (TRBV20-1, TRBJ2-5)
CSAGFETQYF

SEQ ID NO: 107255 - protein, 10 aa, Homo sapiens
  CDR3 for alpha chain variable domain of TCR clone 53628 (TRAV12-3, TRAJ49)
CAMDDDQFYF

SEQ ID NO: 107256 - protein, 13 aa, Homo sapiens
  CDR3 for beta chain variable domain of TCR clone 53628 (TRBV12-4, TRBJ1-1)
CASSPGTGFEAFF

SEQ ID NO: 107257 - protein, 11 aa, Homo sapiens
  CDR3 for alpha chain variable domain of TCR clone 53629 (TRAV3, TRAJ21)
CAVGNFNKFYF

SEQ ID NO: 107258 - protein, 16 aa, Homo sapiens
  CDR3 for beta chain variable domain of TCR clone 53629 (TRBV19, TRBJ2-1)
CASSKAGPSSYNEQLS

SEQ ID NO: 107259 - protein, 15 aa, Homo sapiens
  CDR3 for alpha chain variable domain of TCR clone 53630 (TRAV12-3, TRAJ27)
CAMRAYNTNAGKSTF

SEQ ID NO: 107260 - protein, 14 aa, Homo sapiens
  CDR3 for beta chain variable domain of TCR clone 53630 (TRBV19, TRBJ2-2)
CASSTLHRSGELFF

SEQ ID NO: 107261 - protein, 14 aa, Homo sapiens
  CDR3 for alpha chain variable domain of TCR clone 53631 (TRAV26-1, TRAJ21)
CIVRPPYNFNNFYF

SEQ ID NO: 107262 - protein, 14 aa, Homo sapiens
  CDR3 for beta chain variable domain of TCR clone 53631 (TRBV11-3, TRBJ2-1)
CASSATTSGSIQFF

SEQ ID NO: 107263 - protein, 14 aa, Homo sapiens
  CDR3 for alpha chain variable domain of TCR clone 53632 (TRAV1-2, TRAJ16)
CAVNRFSDGQKLLF

SEQ ID NO: 107264 - protein, 15 aa, Homo sapiens
  CDR3 for beta chain variable domain of TCR clone 53632 (TRBV9, TRBJ1-6)
CASSVAGSGDSPLHF

SEQ ID NO: 107265 - protein, 13 aa, Homo sapiens
  CDR3 for alpha chain variable domain of TCR clone 53633 (TRAV13-1, TRAJ21)
CAASIYNFNKFYF

SEQ ID NO: 107266 - protein, 16 aa, Homo sapiens
  CDR3 for beta chain variable domain of TCR clone 53633 (TRBV4-3, TRBJ2-2)
CASSHLQGSGTGELFF

SEQ ID NO: 107267 - protein, 13 aa, Homo sapiens
  CDR3 for alpha chain variable domain of TCR clone 53634 (TRAV13-2, TRAJ48)
CAEMDFGNEKLTF

SEQ ID NO: 107268 - protein, 15 aa, Homo sapiens
  CDR3 for beta chain variable domain of TCR clone 53634 (TRBV7-2, TRBJ2-1)
CASSLVGSSYNEQFF

SEQ ID NO: 107269 - protein, 15 aa, Homo sapiens
  CDR3 for alpha chain variable domain of TCR clone 53635 (TRAV26-2, TRAJ26)
CILRDFDNYGQNIVF

SEQ ID NO: 107270 - protein, 14 aa, Homo sapiens
  CDR3 for beta chain variable domain of TCR clone 53635 (TRBV29-1, TRBJ2-5)
CSFWTPYTGETQYF

SEQ ID NO: 107271 - protein, 13 aa, Homo sapiens
  CDR3 for alpha chain variable domain of TCR clone 53636 (TRAV2, TRAJ15)
CAVASQAGTALIF

SEQ ID NO: 107272 - protein, 16 aa, Homo sapiens
  CDR3 for beta chain variable domain of TCR clone 53636 (TRBV5-1, TRBJ1-1)
CASSLGGNSLNTEAFF

SEQ ID NO: 107273 - protein, 13 aa, Homo sapiens
  CDR3 for alpha chain variable domain of TCR clone 53637 (TRAV23/DV6, TRAJ22)
CAPYSGSSRQLTF

SEQ ID NO: 107274 - protein, 15 aa, Homo sapiens
  CDR3 for beta chain variable domain of TCR clone 53637 (TRBV11-2, TRBJ1-6)
CASSLDPWAVSPLHF

SEQ ID NO: 107275 - protein, 14 aa, Homo sapiens
  CDR3 for alpha chain variable domain of TCR clone 53638 (TRAV1-2, TRAJ8)
RAVREDTGFQKLVF

SEQ ID NO: 107276 - protein, 13 aa, Homo sapiens
  CDR3 for beta chain variable domain of TCR clone 53638 (TRBV2, TRBJ1-1)
CARNPTGGFHAFF

SEQ ID NO: 107277 - protein, 11 aa, Homo sapiens
  CDR3 for alpha chain variable domain of TCR clone 53639 (TRAV12-2, TRAJ31)
CAVTRGARLMF

SEQ ID NO: 107278 - protein, 15 aa, Homo sapiens
  CDR3 for beta chain variable domain of TCR clone 53639 (TRBV19, TRBJ2-7)
CASSIGGGLVNEQYF

SEQ ID NO: 107279 - protein, 17 aa, Homo sapiens
  CDR3 for alpha chain variable domain of TCR clone 53640 (TRAV3, TRAJ12)
CAVRDGGRMDSSYKLIF

SEQ ID NO: 107280 - protein, 16 aa, Homo sapiens
  CDR3 for beta chain variable domain of TCR clone 53640 (TRBV9, TRBJ2-2)
CASSAMGKGNTGELFL

SEQ ID NO: 107281 - protein, 14 aa, Homo sapiens
  CDR3 for alpha chain variable domain of TCR clone 53641 (TRAV26-1, TRAJ40)
CIARVARGTYKYIF

SEQ ID NO: 107282 - protein, 14 aa, Homo sapiens
  CDR3 for beta chain variable domain of TCR clone 53641 (TRBV7-3, TRBJ2-7)
CASSLKADSYEQYF

SEQ ID NO: 107283 - protein, 13 aa, Homo sapiens
  CDR3 for alpha chain variable domain of TCR clone 53642 (TRAV13-2, TRAJ48)
CAEMDFGNEKLTF

SEQ ID NO: 107284 - protein, 11 aa, Homo sapiens
  CDR3 for beta chain variable domain of TCR clone 53642 (TRBV11-2, TRBJ2-2)
CASSLPGELFF

SEQ ID NO: 107285 - protein, 16 aa, Homo sapiens
  CDR3 for alpha chain variable domain of TCR clone 53643 (TRAV39, TRAJ32)
CAVDMEYGGATNKLIF

SEQ ID NO: 107286 - protein, 14 aa, Homo sapiens
  CDR3 for beta chain variable domain of TCR clone 53643 (TRBV9, TRBJ2-4)
CASSPSGTSGFRYF

SEQ ID NO: 107287 - protein, 13 aa, Homo sapiens
  CDR3 for alpha chain variable domain of TCR clone 53644 (TRAV29/DV5, TRAJ31)
CAASRNNNARLMF

SEQ ID NO: 107288 - protein, 15 aa, Homo sapiens
  CDR3 for beta chain variable domain of TCR clone 53644 (TRBV12-4, TRBJ2-5)
CASSPPTGLQETQYF

SEQ ID NO: 107289 - protein, 14 aa, Homo sapiens
  CDR3 for alpha chain variable domain of TCR clone 53645 (TRAV23/DV6, TRAJ37)
CAASTSSNTGKLIF

SEQ ID NO: 107290 - protein, 13 aa, Homo sapiens
  CDR3 for beta chain variable domain of TCR clone 53645 (TRBV7-7, TRBJ1-1)
CASSVGANTEAFF

SEQ ID NO: 107291 - protein, 16 aa, Homo sapiens
  CDR3 for alpha chain variable domain of TCR clone 53646 (TRAV30, TRAJ24)
CGTEIVDADSWGKFQF

SEQ ID NO: 107292 - protein, 12 aa, Homo sapiens
  CDR3 for beta chain variable domain of TCR clone 53646 (TRBV7-3, TRBJ2-1)
CASSFINNEQFF

SEQ ID NO: 107293 - protein, 12 aa, Homo sapiens
  CDR3 for alpha chain variable domain of TCR clone 53647 (TRAV21, TRAJ13)
PGPSGGYQKVTF

SEQ ID NO: 107294 - protein, 15 aa, Homo sapiens
  CDR3 for beta chain variable domain of TCR clone 53647 (TRBV7-9, TRBJ1-6)
CASSSPGRGSSPLHF

SEQ ID NO: 107295 - protein, 11 aa, Homo sapiens
  CDR3 for alpha chain variable domain of TCR clone 53648 (TRAV3, TRAJ21)
CALGNFNKFYF

SEQ ID NO: 107296 - protein, 13 aa, Homo sapiens
  CDR3 for beta chain variable domain of TCR clone 53648 (TRBV7-3, TRBJ1-1)
CASSQDWGAEAFF

SEQ ID NO: 107297 - protein, 14 aa, Homo sapiens
  CDR3 for alpha chain variable domain of TCR clone 53649 (TRAV8-1, TRAJ34)
CAVNPSYNTDKLTS

SEQ ID NO: 107298 - protein, 16 aa, Homo sapiens
  CDR3 for beta chain variable domain of TCR clone 53649 (TRBV7-2, TRBJ2-6)
CASSLAGRSGANVLTF

SEQ ID NO: 107299 - protein, 13 aa, Homo sapiens
  CDR3 for alpha chain variable domain of TCR clone 53650 (TRAV3, TRAJ21)
CAVREPDFKKFYF

SEQ ID NO: 107300 - protein, 14 aa, Homo sapiens
  CDR3 for beta chain variable domain of TCR clone 53650 (TRBV4-1, TRBJ2-2)
CASSQAVNTGELFF

SEQ ID NO: 107301 - protein, 11 aa, Homo sapiens
  CDR3 for alpha chain variable domain of TCR clone 53651 (TRAV2, TRAJ33)
CAVESNYQLIW

SEQ ID NO: 107302 - protein, 15 aa, Homo sapiens
  CDR3 for beta chain variable domain of TCR clone 53651 (TRBV4-1, TRBJ1-4)
CASSDTGGTNEKLFF

SEQ ID NO: 107303 - protein, 14 aa, Homo sapiens
  CDR3 for alpha chain variable domain of TCR clone 53652 (TRAV12-3, TRAJ10)
SHLPLTGGGNKLTF

SEQ ID NO: 107304 - protein, 16 aa, Homo sapiens
  CDR3 for beta chain variable domain of TCR clone 53652 (TRBV18, TRBJ1-5)
CASSPYRVEGNQPQHF

SEQ ID NO: 107305 - protein, 13 aa, Homo sapiens
  CDR3 for alpha chain variable domain of TCR clone 53653 (TRAV21, TRAJ20)
CAVGLRVDYKLSF

SEQ ID NO: 107306 - protein, 15 aa, Homo sapiens
  CDR3 for beta chain variable domain of TCR clone 53653 (TRBV7-9, TRBJ1-5)
CASSQGHQPNQPQHF

SEQ ID NO: 107307 - protein, 14 aa, Homo sapiens
  CDR3 for alpha chain variable domain of TCR clone 53654 (TRAV20, TRAJ56)
CAVQFGEANSKLTF

SEQ ID NO: 107308 - protein, 14 aa, Homo sapiens
  CDR3 for beta chain variable domain of TCR clone 53654 (TRBV20-1, TRBJ2-7)
CSAKRGRSSYEQYF

SEQ ID NO: 107309 - protein, 14 aa, Homo sapiens
  CDR3 for alpha chain variable domain of TCR clone 53655 (TRAV1-2, TRAJ16)
CAVNRVSDGQKLLF

SEQ ID NO: 107310 - protein, 12 aa, Homo sapiens
  CDR3 for beta chain variable domain of TCR clone 53655 (TRBV11-2, TRBJ2-2)
CASSLGGGELFF

SEQ ID NO: 107311 - protein, 15 aa, Homo sapiens
  CDR3 for alpha chain variable domain of TCR clone 53656 (TRAV2, TRAJ9)
CAVEDRGTGGFKTIF

SEQ ID NO: 107312 - protein, 13 aa, Homo sapiens
  CDR3 for beta chain variable domain of TCR clone 53656 (TRBV6-5, TRBJ1-1)
CASRPVTGSRTFF

SEQ ID NO: 107313 - protein, 14 aa, Homo sapiens
  CDR3 for alpha chain variable domain of TCR clone 53657 (TRAV26-1, TRAJ11)
CIVPLYSGYSTLTF

SEQ ID NO: 107314 - protein, 13 aa, Homo sapiens
  CDR3 for beta chain variable domain of TCR clone 53657 (TRBV2, TRBJ1-4)
CASSERAGEKLFY

SEQ ID NO: 107315 - protein, 17 aa, Homo sapiens
  CDR3 for alpha chain variable domain of TCR clone 53658 (TRAV4, TRAJ13)
CIVGVQGSSGGYQKVTF

SEQ ID NO: 107316 - protein, 18 aa, Homo sapiens
  CDR3 for beta chain variable domain of TCR clone 53658 (TRBV15, TRBJ2-3)
CATSRGGARSWDTDTQYF

SEQ ID NO: 107317 - protein, 16 aa, Homo sapiens
  CDR3 for alpha chain variable domain of TCR clone 53659 (TRAV3, TRAJ21)
CAVRDIERGNFNKFYF

SEQ ID NO: 107318 - protein, 14 aa, Homo sapiens
  CDR3 for beta chain variable domain of TCR clone 53659 (TRBV12-4, TRBJ2-5)
CASSLSSGRGTQYF

SEQ ID NO: 107319 - protein, 12 aa, Homo sapiens
  CDR3 for alpha chain variable domain of TCR clone 53660 (TRAV38-2/DV8, TRAJ47)
CVLMEYGNKPVF

SEQ ID NO: 107320 - protein, 14 aa, Homo sapiens
  CDR3 for beta chain variable domain of TCR clone 53660 (TRBV20-1, TRBJ1-5)
CSATDRGSNQPQHF

SEQ ID NO: 107321 - protein, 19 aa, Homo sapiens
  CDR3 for alpha chain variable domain of TCR clone 53661 (TRAV26-1, TRAJ52)
RIVRAHRNAGGTSYGKLTF

SEQ ID NO: 107322 - protein, 15 aa, Homo sapiens
  CDR3 for beta chain variable domain of TCR clone 53661 (TRBV29-1, TRBJ2-1)
CSGRDRKSSYNEQFF

SEQ ID NO: 107323 - protein, 15 aa, Homo sapiens
  CDR3 for alpha chain variable domain of TCR clone 53662 (TRAV17, TRAJ57)
CATGPSQGGSEKLVF

SEQ ID NO: 107324 - protein, 18 aa, Homo sapiens
  CDR3 for beta chain variable domain of TCR clone 53662 (TRBV7-9, TRBJ2-7)
RASSLTTSGSRTWYEQYF

SEQ ID NO: 107325 - protein, 15 aa, Homo sapiens
  CDR3 for alpha chain variable domain of TCR clone 53663 (TRAV25, TRAJ52)
CARRPGGTSYGKLTF

SEQ ID NO: 107326 - protein, 17 aa, Homo sapiens
  CDR3 for beta chain variable domain of TCR clone 53663 (TRBV7-8, TRBJ2-6)
CASSAGTGGAGANVLTF

SEQ ID NO: 107327 - protein, 12 aa, Homo sapiens
  CDR3 for alpha chain variable domain of TCR clone 53664 (TRAV1-1, TRAJ39)
CAVPVVGSMLTF

SEQ ID NO: 107328 - protein, 15 aa, Homo sapiens
  CDR3 for beta chain variable domain of TCR clone 53664 (TRBV19, TRBJ1-6)
CASSTQGAVGSPLHF

SEQ ID NO: 107329 - protein, 14 aa, Homo sapiens
  CDR3 for alpha chain variable domain of TCR clone 53665 (TRAV3, TRAJ33)
CAVRDMDSNYQLIW

SEQ ID NO: 107330 - protein, 19 aa, Homo sapiens
  CDR3 for beta chain variable domain of TCR clone 53665 (TRBV7-3, TRBJ1-2)
CASSFHQGNDGELWLHLRF

SEQ ID NO: 107331 - protein, 21 aa, Homo sapiens
  CDR3 for alpha chain variable domain of TCR clone 53666 (TRAV29/DV5, TRAJ24)
CSVLLCSKRVMTTDSWGKFQF

SEQ ID NO: 107332 - protein, 14 aa, Homo sapiens
  CDR3 for beta chain variable domain of TCR clone 53666 (TRBV5-5, TRBJ1-5)
CASSGQGVDQPQHF

SEQ ID NO: 107333 - protein, 16 aa, Homo sapiens
  CDR3 for alpha chain variable domain of TCR clone 53667 (TRAV26-2, TRAJ52)
CIRGPAGGTSYGELTF

SEQ ID NO: 107334 - protein, 15 aa, Homo sapiens
  CDR3 for beta chain variable domain of TCR clone 53667 (TRBV5-1, TRBJ2-1)
CASSWGPGPGGEQFF

SEQ ID NO: 107335 - protein, 13 aa, Homo sapiens
  CDR3 for alpha chain variable domain of TCR clone 53668 (TRAV2, TRAJ15)
CAVASQAGTALIF

SEQ ID NO: 107336 - protein, 15 aa, Homo sapiens
  CDR3 for beta chain variable domain of TCR clone 53668 (TRBV7-3, TRBJ2-2)
CASSETGQGTGEMFF

SEQ ID NO: 107337 - protein, 16 aa, Homo sapiens
  CDR3 for alpha chain variable domain of TCR clone 53669 (TRAV4, TRAJ22)
CPVGDLYSGSARQLTF

SEQ ID NO: 107338 - protein, 14 aa, Homo sapiens
  CDR3 for beta chain variable domain of TCR clone 53669 (TRBV28, TRBJ2-3)
CASSWRGRADTQYF

SEQ ID NO: 107339 - protein, 11 aa, Homo sapiens
  CDR3 for alpha chain variable domain of TCR clone 53670 (TRAV1-1, TRAJ23)
CAVRQGGKLIF

SEQ ID NO: 107340 - protein, 16 aa, Homo sapiens
  CDR3 for beta chain variable domain of TCR clone 53670 (TRBV11-2, TRBJ1-2)
CASSLDTGGADYGYTF

SEQ ID NO: 107341 - protein, 14 aa, Homo sapiens
  CDR3 for alpha chain variable domain of TCR clone 53671 (TRAV12-1, TRAJ27)
CGEHIRTNAGKSTF

SEQ ID NO: 107342 - protein, 15 aa, Homo sapiens
  CDR3 for beta chain variable domain of TCR clone 53671 (TRBV19, TRBJ1-1)
CASTSGRIQNTEAFF

SEQ ID NO: 107343 - protein, 16 aa, Homo sapiens
  CDR3 for alpha chain variable domain of TCR clone 53672 (TRAV30, TRAJ24)
YGTEIVDADSWGKFQF

SEQ ID NO: 107344 - protein, 15 aa, Homo sapiens
  CDR3 for beta chain variable domain of TCR clone 53672 (TRBV20-1, TRBJ2-7)
CSARDRVSGMDEQYF

SEQ ID NO: 107345 - protein, 15 aa, Homo sapiens
  CDR3 for alpha chain variable domain of TCR clone 53673 (TRAV8-6, TRAJ6)
CAVRGESGGSYIPTF

SEQ ID NO: 107346 - protein, 14 aa, Homo sapiens
  CDR3 for beta chain variable domain of TCR clone 53673 (TRBV7-9, TRBJ2-1)
CASSSMVGFGEQFF

SEQ ID NO: 107347 - protein, 16 aa, Homo sapiens
  CDR3 for alpha chain variable domain of TCR clone 53674 (TRAV27, TRAJ52)
CAGAGAGGTSYGKLTF

SEQ ID NO: 107348 - protein, 17 aa, Homo sapiens
  CDR3 for beta chain variable domain of TCR clone 53674 (TRBV24-1, TRBJ2-3)
CATSDLHSGEDTDTQYF

SEQ ID NO: 107349 - protein, 11 aa, Homo sapiens
  CDR3 for alpha chain variable domain of TCR clone 53675 (TRAV2, TRAJ13)
CASGGYQKVTF

SEQ ID NO: 107350 - protein, 13 aa, Homo sapiens
  CDR3 for beta chain variable domain of TCR clone 53675 (TRBV2, TRBJ1-1)
CASSVSGYTEAFF

SEQ ID NO: 107351 - protein, 15 aa, Homo sapiens
  CDR3 for alpha chain variable domain of TCR clone 53676 (TRAV12-3, TRAJ6)
CAMSATTGGSYIPTF

SEQ ID NO: 107352 - protein, 16 aa, Homo sapiens
  CDR3 for beta chain variable domain of TCR clone 53676 (TRBV20-1, TRBJ1-2)
CSTSMGQGVANYGYTF

SEQ ID NO: 107353 - protein, 12 aa, Homo sapiens
  CDR3 for alpha chain variable domain of TCR clone 53677 (TRAV20, TRAJ56)
CAVTGANSKLTF

SEQ ID NO: 107354 - protein, 14 aa, Homo sapiens
  CDR3 for beta chain variable domain of TCR clone 53677 (TRBV20-1, TRBJ2-5)
CSALVPGDQETQYF

SEQ ID NO: 107355 - protein, 14 aa, Homo sapiens
  CDR3 for alpha chain variable domain of TCR clone 53678 (TRAV8-3, TRAJ9)
CAVVNNTGGFKTIF

SEQ ID NO: 107356 - protein, 14 aa, Homo sapiens
  CDR3 for beta chain variable domain of TCR clone 53678 (TRBV7-3, TRBJ2-2)
CASSSGGYTGELFF

SEQ ID NO: 107357 - protein, 14 aa, Homo sapiens
  CDR3 for alpha chain variable domain of TCR clone 53679 (TRAV16, TRAJ15)
CALRFNQAGTALIF

SEQ ID NO: 107358 - protein, 16 aa, Homo sapiens
  CDR3 for beta chain variable domain of TCR clone 53679 (TRBV9, TRBJ2-7)
CASSAGPDRSPYEQYF

SEQ ID NO: 107359 - protein, 18 aa, Homo sapiens
  CDR3 for alpha chain variable domain of TCR clone 53680 (TRAV1-2, TRAJ18)
CAVRDMGDRDSTLGRLYF

SEQ ID NO: 107360 - protein, 16 aa, Homo sapiens
  CDR3 for beta chain variable domain of TCR clone 53680 (TRBV29-1, TRBJ1-2)
CSVEANRDIANYGYTF

SEQ ID NO: 107361 - protein, 14 aa, Homo sapiens
  CDR3 for alpha chain variable domain of TCR clone 53681 (TRAV2, TRAJ42)
CAVVGGGSQGNLIF

SEQ ID NO: 107362 - protein, 15 aa, Homo sapiens
  CDR3 for beta chain variable domain of TCR clone 53681 (TRBV11-3, TRBJ2-3)
CASSLRAAFPDTQYF

SEQ ID NO: 107363 - protein, 14 aa, Homo sapiens
  CDR3 for alpha chain variable domain of TCR clone 53682 (TRAV2, TRAJ9)
CAVEDRSGGFKTIF

SEQ ID NO: 107364 - protein, 16 aa, Homo sapiens
  CDR3 for beta chain variable domain of TCR clone 53682 (TRBV15, TRBJ2-7)
CATSRDEGIPSYEQYF

SEQ ID NO: 107365 - protein, 20 aa, Homo sapiens
  CDR3 for alpha chain variable domain of TCR clone 53683 (TRAV40, )
CLLGDGIPDIQNPDPAVYQL

SEQ ID NO: 107366 - protein, 16 aa, Homo sapiens
  CDR3 for beta chain variable domain of TCR clone 53683 (TRBV20-1, TRBJ1-5)
CSAELPGQQTNQPQHF

SEQ ID NO: 107367 - protein, 16 aa, Homo sapiens
  CDR3 for alpha chain variable domain of TCR clone 53684 (TRAV3, TRAJ32)
CAVRDMGGGATNKPIF

SEQ ID NO: 107368 - protein, 11 aa, Homo sapiens
  CDR3 for beta chain variable domain of TCR clone 53684 (TRBV12-4, TRBJ2-1)
CASSRLNEQFF

SEQ ID NO: 107369 - protein, 12 aa, Homo sapiens
  CDR3 for alpha chain variable domain of TCR clone 53685 (TRAV13-1, TRAJ9)
CASRTGGFKTIF

SEQ ID NO: 107370 - protein, 13 aa, Homo sapiens
  CDR3 for beta chain variable domain of TCR clone 53685 (TRBV12-4, TRBJ1-2)
CASSSGSKDGYTF

SEQ ID NO: 107371 - protein, 22 aa, Homo sapiens
  CDR3 for alpha chain variable domain of TCR clone 53686 (TRAV26-1, TRAJ30)
CIVRVRTEMTRSSLERGHDFIF

SEQ ID NO: 107372 - protein, 18 aa, Homo sapiens
  CDR3 for beta chain variable domain of TCR clone 53686 (TRBV4-1, TRBJ1-5)
CASSQDPRGQGLNQPQHF

SEQ ID NO: 107373 - protein, 11 aa, Homo sapiens
  CDR3 for alpha chain variable domain of TCR clone 53687 (TRAV2, TRAJ13)
CASGGYQKVTF

SEQ ID NO: 107374 - protein, 15 aa, Homo sapiens
  CDR3 for beta chain variable domain of TCR clone 53687 (TRBV24-1, TRBJ2-1)
CATSGPGTLSAEQFF

SEQ ID NO: 107375 - protein, 14 aa, Homo sapiens
  CDR3 for alpha chain variable domain of TCR clone 53688 (TRAV12-1, TRAJ12)
CVVTSGDSSYKLIF

SEQ ID NO: 107376 - protein, 17 aa, Homo sapiens
  CDR3 for beta chain variable domain of TCR clone 53688 (TRBV7-8, TRBJ2-6)
CASSAGTGGAGANVLTF

SEQ ID NO: 107377 - protein, 23 aa, Homo sapiens
  CDR3 for alpha chain variable domain of TCR clone 53689 (TRAV8-4, TRAJ38)
CARLNAGNNHIQNPDPAVYPLRD

SEQ ID NO: 107378 - protein, 14 aa, Homo sapiens
  CDR3 for beta chain variable domain of TCR clone 53689 (TRBV7-8, TRBJ2-3)
CASSLEAGTDTQYF

SEQ ID NO: 107379 - protein, 12 aa, Homo sapiens
  CDR3 for alpha chain variable domain of TCR clone 53690 (TRAV13-1, TRAJ11)
CAGPSGYSTLPF

SEQ ID NO: 107380 - protein, 13 aa, Homo sapiens
  CDR3 for beta chain variable domain of TCR clone 53690 (TRBV12-4, TRBJ1-5)
CASSPDRAQPQHF

SEQ ID NO: 107381 - protein, 14 aa, Homo sapiens
  CDR3 for alpha chain variable domain of TCR clone 53691 (TRAV12-2, TRAJ15)
CAPHTGQAGTALIF

SEQ ID NO: 107382 - protein, 14 aa, Homo sapiens
  CDR3 for beta chain variable domain of TCR clone 53691 (TRBV19, TRBJ2-1)
CASPTFVLSGEQFF

SEQ ID NO: 107383 - protein, 16 aa, Homo sapiens
  CDR3 for alpha chain variable domain of TCR clone 53692 (TRAV8-3, TRAJ13)
CAVGAYPSGGYQKVTF

SEQ ID NO: 107384 - protein, 15 aa, Homo sapiens
  CDR3 for beta chain variable domain of TCR clone 53692 (TRBV19, TRBJ1-5)
CAGSIVWADNQPQHF

SEQ ID NO: 107385 - protein, 11 aa, Homo sapiens
  CDR3 for alpha chain variable domain of TCR clone 53693 (TRAV2, TRAJ33)
CAVDSNYQLIW

SEQ ID NO: 107386 - protein, 13 aa, Homo sapiens
  CDR3 for beta chain variable domain of TCR clone 53693 (TRBV4-2, TRBJ1-1)
CASSQAGNTEAFF

SEQ ID NO: 107387 - protein, 12 aa, Homo sapiens
  CDR3 for alpha chain variable domain of TCR clone 53694 (TRAV16, TRAJ12)
CAHGDSSYKLIF

SEQ ID NO: 107388 - protein, 12 aa, Homo sapiens
  CDR3 for beta chain variable domain of TCR clone 53694 (TRBV28, TRBJ2-1)
CASSRLIGEQFF

SEQ ID NO: 107389 - protein, 15 aa, Homo sapiens
  CDR3 for alpha chain variable domain of TCR clone 53695 (TRAV17, TRAJ56)
CATEPFTGANSKLTF

SEQ ID NO: 107390 - protein, 14 aa, Homo sapiens
  CDR3 for beta chain variable domain of TCR clone 53695 (TRBV19, TRBJ2-1)
CASPTFVLSGERFF

SEQ ID NO: 107391 - protein, 13 aa, Homo sapiens
  CDR3 for alpha chain variable domain of TCR clone 53696 (TRAV26-1, TRAJ36)
CIVVGTGADNLFF

SEQ ID NO: 107392 - protein, 13 aa, Homo sapiens
  CDR3 for beta chain variable domain of TCR clone 53696 (TRBV6-5, TRBJ2-6)
CASSTSGPLRLDF

SEQ ID NO: 107393 - protein, 15 aa, Homo sapiens
  CDR3 for alpha chain variable domain of TCR clone 53697 (TRAV17, TRAJ57)
CATGPSQGGSEKLVF

SEQ ID NO: 107394 - protein, 13 aa, Homo sapiens
  CDR3 for beta chain variable domain of TCR clone 53697 (TRBV11-2, TRBJ2-5)
CTSSSTGEETQYF

SEQ ID NO: 107395 - protein, 14 aa, Homo sapiens
  CDR3 for alpha chain variable domain of TCR clone 53698 (TRAV2, TRAJ9)
CAVEDRRGGFKTIF

SEQ ID NO: 107396 - protein, 15 aa, Homo sapiens
  CDR3 for beta chain variable domain of TCR clone 53698 (TRBV11-3, TRBJ2-3)
CASSAGTVVTNTQYF

SEQ ID NO: 107397 - protein, 14 aa, Homo sapiens
  CDR3 for alpha chain variable domain of TCR clone 53699 (TRAV12-3, TRAJ10)
SHLPLTGGGNKLTF

SEQ ID NO: 107398 - protein, 13 aa, Homo sapiens
  CDR3 for beta chain variable domain of TCR clone 53699 (TRBV5-4, TRBJ1-1)
CASSVDLGTEAFF

SEQ ID NO: 107399 - protein, 15 aa, Homo sapiens
  CDR3 for alpha chain variable domain of TCR clone 53700 (TRAV27, TRAJ38)
CAARRNAGNNRKLIW

SEQ ID NO: 107400 - protein, 13 aa, Homo sapiens
  CDR3 for beta chain variable domain of TCR clone 53700 (TRBV23-1, TRBJ1-4)
CASRGKFNEKLFF

SEQ ID NO: 107401 - protein, 18 aa, Homo sapiens
  CDR3 for alpha chain variable domain of TCR clone 53701 (TRAV3, TRAJ17)
CAVRASRGGRSCRQQANF

SEQ ID NO: 107402 - protein, 14 aa, Homo sapiens
  CDR3 for beta chain variable domain of TCR clone 53701 (TRBV4-1, TRBJ2-2)
CASSQAVNTGELFF

SEQ ID NO: 107403 - protein, 12 aa, Homo sapiens
  CDR3 for alpha chain variable domain of TCR clone 53702 (TRAV3, TRAJ26)
CAVSDYGQNFVF

SEQ ID NO: 107404 - protein, 16 aa, Homo sapiens
  CDR3 for beta chain variable domain of TCR clone 53702 (TRBV11-2, TRBJ1-2)
CASSPSGREANYGYTF

SEQ ID NO: 107405 - protein, 15 aa, Homo sapiens
  CDR3 for alpha chain variable domain of TCR clone 53703 (TRAV27, TRAJ38)
CAARRNAGNNRKLIW

SEQ ID NO: 107406 - protein, 17 aa, Homo sapiens
  CDR3 for beta chain variable domain of TCR clone 53703 (TRBV20-1, TRBJ2-2)
CSASGSGLGGLTGELFF

SEQ ID NO: 107407 - protein, 15 aa, Homo sapiens
  CDR3 for alpha chain variable domain of TCR clone 53704 (TRAV26-1, TRAJ22)
CIVRVSFWLSKATDL

SEQ ID NO: 107408 - protein, 13 aa, Homo sapiens
  CDR3 for beta chain variable domain of TCR clone 53704 (TRBV7-9, TRBJ1-2)
CASSLKQNYGYTF

SEQ ID NO: 107409 - protein, 13 aa, Homo sapiens
  CDR3 for alpha chain variable domain of TCR clone 53705 (TRAV17, TRAJ9)
CATDYTGGFKTIF

SEQ ID NO: 107410 - protein, 16 aa, Homo sapiens
  CDR3 for beta chain variable domain of TCR clone 53705 (TRBV7-2, TRBJ2-5)
CASSYKTGISLETQYF

SEQ ID NO: 107411 - protein, 17 aa, Homo sapiens
  CDR3 for alpha chain variable domain of TCR clone 53706 (TRAV3, TRAJ12)
CAVRDGGRMDSSYKLIF

SEQ ID NO: 107412 - protein, 14 aa, Homo sapiens
  CDR3 for beta chain variable domain of TCR clone 53706 (TRBV12-4, TRBJ1-3)
CASILTGAGNTIYF

SEQ ID NO: 107413 - protein, 15 aa, Homo sapiens
  CDR3 for alpha chain variable domain of TCR clone 53707 (TRAV35, TRAJ40)
CAGQLGTSGPYKYIF

SEQ ID NO: 107414 - protein, 14 aa, Homo sapiens
  CDR3 for beta chain variable domain of TCR clone 53707 (TRBV7-3, TRBJ2-1)
CASSLAGGTNEQFF

SEQ ID NO: 107415 - protein, 14 aa, Homo sapiens
  CDR3 for alpha chain variable domain of TCR clone 53708 (TRAV23/DV6, TRAJ22)
CADISSGSARQLTF

SEQ ID NO: 107416 - protein, 16 aa, Homo sapiens
  CDR3 for beta chain variable domain of TCR clone 53708 (TRBV5-1, TRBJ2-3)
CASSVFPMSSTDTQYF

SEQ ID NO: 107417 - protein, 13 aa, Homo sapiens
  CDR3 for alpha chain variable domain of TCR clone 53709 (TRAV12-3, TRAJ53)
CSMRGGSNYKLTF

SEQ ID NO: 107418 - protein, 15 aa, Homo sapiens
  CDR3 for beta chain variable domain of TCR clone 53709 (TRBV2, TRBJ2-1)
CATQARLVMIGEQFF

SEQ ID NO: 107419 - protein, 15 aa, Homo sapiens
  CDR3 for alpha chain variable domain of TCR clone 53710 (TRAV21, TRAJ53)
CATLNSGGSNYKLTF

SEQ ID NO: 107420 - protein, 15 aa, Homo sapiens
  CDR3 for beta chain variable domain of TCR clone 53710 (TRBV7-3, TRBJ2-1)
CASSPTGGGEVEQFF

SEQ ID NO: 107421 - protein, 13 aa, Homo sapiens
  CDR3 for alpha chain variable domain of TCR clone 53711 (TRAV13-2, TRAJ48)
CAKMDFGNEKLTF

SEQ ID NO: 107422 - protein, 15 aa, Homo sapiens
  CDR3 for beta chain variable domain of TCR clone 53711 (TRBV7-9, TRBJ1-6)
CASSSPGRGNSPLHF

SEQ ID NO: 107423 - protein, 15 aa, Homo sapiens
  CDR3 for alpha chain variable domain of TCR clone 53712 (TRAV38-1, TRAJ37)
CAFIFGSGNTGKLIF

SEQ ID NO: 107424 - protein, 14 aa, Homo sapiens
  CDR3 for beta chain variable domain of TCR clone 53712 (TRBV25-1, TRBJ1-1)
CASTHLGGNTEAFF

SEQ ID NO: 107425 - protein, 12 aa, Homo sapiens
  CDR3 for alpha chain variable domain of TCR clone 53713 (TRAV12-1, TRAJ40)
CVFYSGTYKYIF

SEQ ID NO: 107426 - protein, 18 aa, Homo sapiens
  CDR3 for beta chain variable domain of TCR clone 53713 (TRBV12-4, TRBJ2-2)
CAISLVAGTRGRTGELFF

SEQ ID NO: 107427 - protein, 12 aa, Homo sapiens
  CDR3 for alpha chain variable domain of TCR clone 53714 (TRAV27, TRAJ9)
CAGESGGFKPIF

SEQ ID NO: 107428 - protein, 14 aa, Homo sapiens
  CDR3 for beta chain variable domain of TCR clone 53714 (TRBV6-1, TRBJ2-1)
CASAKDGFYNEQFF

SEQ ID NO: 107429 - protein, 13 aa, Homo sapiens
  CDR3 for alpha chain variable domain of TCR clone 53715 (TRAV13-1, TRAJ6)
CAARKGGSYIPTF

SEQ ID NO: 107430 - protein, 14 aa, Homo sapiens
  CDR3 for beta chain variable domain of TCR clone 53715 (TRBV7-2, TRBJ2-1)
CASSLGVGYNEQFF

SEQ ID NO: 107431 - protein, 14 aa, Homo sapiens
  CDR3 for alpha chain variable domain of TCR clone 53716 (TRAV3, TRAJ9)
CAVRGNTGGVKTIF

SEQ ID NO: 107432 - protein, 14 aa, Homo sapiens
  CDR3 for beta chain variable domain of TCR clone 53716 (TRBV15, TRBJ2-1)
CATSGVEDYNEQFF

SEQ ID NO: 107433 - protein, 14 aa, Homo sapiens
  CDR3 for alpha chain variable domain of TCR clone 53717 (TRAV1-2, TRAJ16)
CAVNRFSDGQKLLF

SEQ ID NO: 107434 - protein, 13 aa, Homo sapiens
  CDR3 for beta chain variable domain of TCR clone 53717 (TRBV4-1, TRBJ2-1)
CASSQAGGDEQFL

SEQ ID NO: 107435 - protein, 12 aa, Homo sapiens
  CDR3 for alpha chain variable domain of TCR clone 53718 (TRAV3, TRAJ26)
CAVRDYGQNFVF

SEQ ID NO: 107436 - protein, 16 aa, Homo sapiens
  CDR3 for beta chain variable domain of TCR clone 53718 (TRBV11-2, TRBJ1-2)
CASSPSGKEANYGYTF

SEQ ID NO: 107437 - protein, 16 aa, Homo sapiens
  CDR3 for alpha chain variable domain of TCR clone 53719 (TRAV26-1, TRAJ52)
CIISNAGGTSYGKLTF

SEQ ID NO: 107438 - protein, 16 aa, Homo sapiens
  CDR3 for beta chain variable domain of TCR clone 53719 (TRBV5-1, TRBJ2-1)
CASSLEGRGLYNEQFF

SEQ ID NO: 107439 - protein, 13 aa, Homo sapiens
  CDR3 for alpha chain variable domain of TCR clone 53720 (TRAV27, TRAJ23)
CAGVLPKGGNLIF

SEQ ID NO: 107440 - protein, 14 aa, Homo sapiens
  CDR3 for beta chain variable domain of TCR clone 53720 (TRBV5-8, TRBJ2-3)
CASSLSPSTDTQYF

SEQ ID NO: 107441 - protein, 14 aa, Homo sapiens
  CDR3 for alpha chain variable domain of TCR clone 53721 (TRAV1-2, TRAJ16)
CAVNRFSDGQKLLF

SEQ ID NO: 107442 - protein, 16 aa, Homo sapiens
  CDR3 for beta chain variable domain of TCR clone 53721 (TRBV4-2, TRBJ2-3)
CASSQELAGDTDTQYF

SEQ ID NO: 107443 - protein, 13 aa, Homo sapiens
  CDR3 for alpha chain variable domain of TCR clone 53722 (TRAV12-1, TRAJ22)
CVAYSGSARQLTF

SEQ ID NO: 107444 - protein, 10 aa, Homo sapiens
  CDR3 for beta chain variable domain of TCR clone 53722 (TRBV6-3, TRBJ2-2)
CASRDGELFF

SEQ ID NO: 107445 - protein, 12 aa, Homo sapiens
  CDR3 for alpha chain variable domain of TCR clone 53723 (TRAV12-3, TRAJ17)
CAMTLTGNKLTF

SEQ ID NO: 107446 - protein, 15 aa, Homo sapiens
  CDR3 for beta chain variable domain of TCR clone 53723 (TRBV7-3, TRBJ2-1)
CASSLGQGPFGEQFF

SEQ ID NO: 107447 - protein, 18 aa, Homo sapiens
  CDR3 for alpha chain variable domain of TCR clone 53724 (TRAV21, TRAJ52)
CAVRPSPAGGTSYGKLTF

SEQ ID NO: 107448 - protein, 16 aa, Homo sapiens
  CDR3 for beta chain variable domain of TCR clone 53724 (TRBV29-1, TRBJ2-7)
CSVEDAEDGTAYEQYF

SEQ ID NO: 107449 - protein, 13 aa, Homo sapiens
  CDR3 for alpha chain variable domain of TCR clone 53725 (TRAV27, TRAJ41)
CAGEGNSGYALNF

SEQ ID NO: 107450 - protein, 14 aa, Homo sapiens
  CDR3 for beta chain variable domain of TCR clone 53725 (TRBV7-2, TRBJ1-1)
CASSFLTGTIEAFF

SEQ ID NO: 107451 - protein, 12 aa, Homo sapiens
  CDR3 for alpha chain variable domain of TCR clone 53726 (TRAV14/DV4, TRAJ47)
CAIPGDGNKLAF

SEQ ID NO: 107452 - protein, 14 aa, Homo sapiens
  CDR3 for beta chain variable domain of TCR clone 53726 (TRBV12-5, TRBJ1-3)
CASGPAGSGNTIYF

SEQ ID NO: 107453 - protein, 11 aa, Homo sapiens
  CDR3 for alpha chain variable domain of TCR clone 53727 (TRAV2, TRAJ13)
CASGGYQKVTF

SEQ ID NO: 107454 - protein, 16 aa, Homo sapiens
  CDR3 for beta chain variable domain of TCR clone 53727 (TRBV19, TRBJ2-1)
CASNKAGPSSYNEQFF

SEQ ID NO: 107455 - protein, 12 aa, Homo sapiens
  CDR3 for alpha chain variable domain of TCR clone 53728 (TRAV13-2, TRAJ23)
CAERHRGGKLIF

SEQ ID NO: 107456 - protein, 12 aa, Homo sapiens
  CDR3 for beta chain variable domain of TCR clone 53728 (TRBV11-2, TRBJ2-2)
CASSLGGGELFS

SEQ ID NO: 107457 - protein, 13 aa, Homo sapiens
  CDR3 for alpha chain variable domain of TCR clone 53729 (TRAV17, TRAJ5)
CAPMDTGRGALTF

SEQ ID NO: 107458 - protein, 16 aa, Homo sapiens
  CDR3 for beta chain variable domain of TCR clone 53729 (TRBV27, TRBJ2-7)
CASSSERRDSAYEQYF

SEQ ID NO: 107459 - protein, 18 aa, Homo sapiens
  CDR3 for alpha chain variable domain of TCR clone 53730 (TRAV13-1, TRAJ52)
CAASRRSAGGTSYGKLTF

SEQ ID NO: 107460 - protein, 13 aa, Homo sapiens
  CDR3 for beta chain variable domain of TCR clone 53730 (TRBV6-3, TRBJ2-3)
CASTLQGIDTQYF

SEQ ID NO: 107461 - protein, 15 aa, Homo sapiens
  CDR3 for alpha chain variable domain of TCR clone 53731 (TRAV17, TRAJ13)
CATVPNSGGYQKVTF

SEQ ID NO: 107462 - protein, 14 aa, Homo sapiens
  CDR3 for beta chain variable domain of TCR clone 53731 (TRBV7-6, TRBJ2-3)
CASSLGTVTDTQYF

SEQ ID NO: 107463 - protein, 14 aa, Homo sapiens
  CDR3 for alpha chain variable domain of TCR clone 53732 (TRAV35, TRAJ33)
CAGSSQDSNYQLIW

SEQ ID NO: 107464 - protein, 15 aa, Homo sapiens
  CDR3 for beta chain variable domain of TCR clone 53732 (TRBV20-1, TRBJ2-7)
CSAETGTSGAYEQYF

SEQ ID NO: 107465 - protein, 14 aa, Homo sapiens
  CDR3 for alpha chain variable domain of TCR clone 53733 (TRAV21, TRAJ28)
CAVGSGAGSYQVTF

SEQ ID NO: 107466 - protein, 14 aa, Homo sapiens
  CDR3 for beta chain variable domain of TCR clone 53733 (TRBV18, TRBJ1-4)
CASSPGPNGEKLFF

SEQ ID NO: 107467 - protein, 13 aa, Homo sapiens
  CDR3 for alpha chain variable domain of TCR clone 53734 (TRAV12-3, TRAJ6)
CAMIPGGSYIPTF

SEQ ID NO: 107468 - protein, 14 aa, Homo sapiens
  CDR3 for beta chain variable domain of TCR clone 53734 (TRBV25-1, TRBJ1-1)
CASTHLGGNTEAFF

SEQ ID NO: 107469 - protein, 15 aa, Homo sapiens
  CDR3 for alpha chain variable domain of TCR clone 53735 (TRAV12-2, TRAJ53)
CAVNGGGGSNYKLTF

SEQ ID NO: 107470 - protein, 15 aa, Homo sapiens
  CDR3 for beta chain variable domain of TCR clone 53735 (TRBV7-3, TRBJ2-1)
CASSPTGGGEVEQFF

SEQ ID NO: 107471 - protein, 15 aa, Homo sapiens
  CDR3 for alpha chain variable domain of TCR clone 53736 (TRAV20, TRAJ6)
CAVRLHSGGSYIPTF

SEQ ID NO: 107472 - protein, 14 aa, Homo sapiens
  CDR3 for beta chain variable domain of TCR clone 53736 (TRBV12-4, TRBJ2-7)
CASSASGGWYEQYF

SEQ ID NO: 107473 - protein, 16 aa, Homo sapiens
  CDR3 for alpha chain variable domain of TCR clone 53737 (TRAV23/DV6, TRAJ9)
CAASIGGNTGGFKTIF

SEQ ID NO: 107474 - protein, 15 aa, Homo sapiens
  CDR3 for beta chain variable domain of TCR clone 53737 (TRBV27, TRBJ2-1)
CASSNGGGSSNEQFF

SEQ ID NO: 107475 - protein, 16 aa, Homo sapiens
  CDR3 for alpha chain variable domain of TCR clone 53738 (TRAV21, TRAJ52)
CAVTNAGGTSYGKLTF

SEQ ID NO: 107476 - protein, 12 aa, Homo sapiens
  CDR3 for beta chain variable domain of TCR clone 53738 (TRBV11-2, TRBJ2-2)
CASSLGGGELFF

SEQ ID NO: 107477 - protein, 12 aa, Homo sapiens
  CDR3 for alpha chain variable domain of TCR clone 53739 (TRAV13-2, TRAJ23)
CAERHRGGKLIF

SEQ ID NO: 107478 - protein, 15 aa, Homo sapiens
  CDR3 for beta chain variable domain of TCR clone 53739 (TRBV19, TRBJ1-2)
CSSSVGQVLNYGYTF

SEQ ID NO: 107479 - protein, 16 aa, Homo sapiens
  CDR3 for alpha chain variable domain of TCR clone 53740 (TRAV30, TRAJ24)
RSTEIVDADSWGKFQF

SEQ ID NO: 107480 - protein, 14 aa, Homo sapiens
  CDR3 for beta chain variable domain of TCR clone 53740 (TRBV12-5, TRBJ2-5)
CASGSRTHQETQYF

SEQ ID NO: 107481 - protein, 16 aa, Homo sapiens
  CDR3 for alpha chain variable domain of TCR clone 53741 (TRAV1-2, TRAJ10)
CAVRGVLTGGGNKLTF

SEQ ID NO: 107482 - protein, 13 aa, Homo sapiens
  CDR3 for beta chain variable domain of TCR clone 53741 (TRBV28, TRBJ1-1)
CASSKQGWTEAFF

SEQ ID NO: 107483 - protein, 11 aa, Homo sapiens
  CDR3 for alpha chain variable domain of TCR clone 53742 (TRAV2, TRAJ33)
CAVESNYQLIW

SEQ ID NO: 107484 - protein, 12 aa, Homo sapiens
  CDR3 for beta chain variable domain of TCR clone 53742 (TRBV11-2, TRBJ2-2)
CASSFGGGELFF

SEQ ID NO: 107485 - protein, 13 aa, Homo sapiens
  CDR3 for alpha chain variable domain of TCR clone 53743 (TRAV8-3, TRAJ43)
CAVVPYNNNDMRF

SEQ ID NO: 107486 - protein, 17 aa, Homo sapiens
  CDR3 for beta chain variable domain of TCR clone 53743 (TRBV7-7, TRBJ1-1)
CASIGDRPNLGVTGAFF

SEQ ID NO: 107487 - protein, 12 aa, Homo sapiens
  CDR3 for alpha chain variable domain of TCR clone 53744 (TRAV12-2, TRAJ10)
WGVTGGGNKLTF

SEQ ID NO: 107488 - protein, 16 aa, Homo sapiens
  CDR3 for beta chain variable domain of TCR clone 53744 (TRBV6-4, TRBJ1-2)
CASSEAVGDANYGYTF

SEQ ID NO: 107489 - protein, 13 aa, Homo sapiens
  CDR3 for alpha chain variable domain of TCR clone 53745 (TRAV13-1, TRAJ33)
CAASRAGNYQLIW

SEQ ID NO: 107490 - protein, 12 aa, Homo sapiens
  CDR3 for beta chain variable domain of TCR clone 53745 (TRBV11-2, TRBJ1-2)
CASSREGDGCTF

SEQ ID NO: 107491 - protein, 16 aa, Homo sapiens
  CDR3 for alpha chain variable domain of TCR clone 53746 (TRAV12-3, TRAJ53)
CAMSPGSGGSNYKLTF

SEQ ID NO: 107492 - protein, 16 aa, Homo sapiens
  CDR3 for beta chain variable domain of TCR clone 53746 (TRBV4-2, TRBJ1-1)
CASGQAGFGMNTEAFF

SEQ ID NO: 107493 - protein, 12 aa, Homo sapiens
  CDR3 for alpha chain variable domain of TCR clone 53747 (TRAV2, TRAJ10)
WASTGGGNKLTF

SEQ ID NO: 107494 - protein, 14 aa, Homo sapiens
  CDR3 for beta chain variable domain of TCR clone 53747 (TRBV7-2, TRBJ2-2)
CASRGQGAAGELFF

SEQ ID NO: 107495 - protein, 15 aa, Homo sapiens
  CDR3 for alpha chain variable domain of TCR clone 53748 (TRAV23/DV6, TRAJ37)
CAAGEGPSNTGKLIF

SEQ ID NO: 107496 - protein, 13 aa, Homo sapiens
  CDR3 for beta chain variable domain of TCR clone 53748 (TRBV2, TRBJ1-4)
CASSERAGEKLFF

SEQ ID NO: 107497 - protein, 14 aa, Homo sapiens
  CDR3 for alpha chain variable domain of TCR clone 53749 (TRAV1-2, TRAJ8)
CAVREDTGFQKLVF

SEQ ID NO: 107498 - protein, 14 aa, Homo sapiens
  CDR3 for beta chain variable domain of TCR clone 53749 (TRBV5-4, TRBJ1-1)
CASSLDSRRDEASF

SEQ ID NO: 107499 - protein, 14 aa, Homo sapiens
  CDR3 for alpha chain variable domain of TCR clone 53750 (TRAV35, TRAJ34)
CAGRGTPTSSSLRL

SEQ ID NO: 107500 - protein, 13 aa, Homo sapiens
  CDR3 for beta chain variable domain of TCR clone 53750 (TRBV19, TRBJ2-7)
CASSIDRTYEQYF

SEQ ID NO: 107501 - protein, 11 aa, Homo sapiens
  CDR3 for alpha chain variable domain of TCR clone 53751 (TRAV21, TRAJ34)
CAVTNADKLIF

SEQ ID NO: 107502 - protein, 12 aa, Homo sapiens
  CDR3 for beta chain variable domain of TCR clone 53751 (TRBV11-2, TRBJ2-2)
CASSLGGGELFF

SEQ ID NO: 107503 - protein, 13 aa, Homo sapiens
  CDR3 for alpha chain variable domain of TCR clone 53752 (TRAV13-1, TRAJ5)
CAASDTDRRALTF

SEQ ID NO: 107504 - protein, 12 aa, Homo sapiens
  CDR3 for beta chain variable domain of TCR clone 53752 (TRBV28, TRBJ2-3)
CASSLYRDTQYF

SEQ ID NO: 107505 - protein, 13 aa, Homo sapiens
  CDR3 for alpha chain variable domain of TCR clone 53753 (TRAV2, TRAJ40)
CAVVTSGIYKYIF

SEQ ID NO: 107506 - protein, 16 aa, Homo sapiens
  CDR3 for beta chain variable domain of TCR clone 53753 (TRBV7-9, TRBJ1-3)
CASSLGAGSSGNTIYF

SEQ ID NO: 107507 - protein, 13 aa, Homo sapiens
  CDR3 for alpha chain variable domain of TCR clone 53754 (TRAV8-3, TRAJ4)
WLFYSGGYNKLIF

SEQ ID NO: 107508 - protein, 14 aa, Homo sapiens
  CDR3 for beta chain variable domain of TCR clone 53754 (TRBV7-9, TRBJ2-3)
CASSLEDGTDTQYF

SEQ ID NO: 107509 - protein, 13 aa, Homo sapiens
  CDR3 for alpha chain variable domain of TCR clone 53755 (TRAV27, TRAJ16)
CAGACSYGQKLLF

SEQ ID NO: 107510 - protein, 14 aa, Homo sapiens
  CDR3 for beta chain variable domain of TCR clone 53755 (TRBV11-2, TRBJ1-3)
CASSLAVPGNTIYF

SEQ ID NO: 107511 - protein, 14 aa, Homo sapiens
  CDR3 for alpha chain variable domain of TCR clone 53756 (TRAV16, TRAJ33)
CALSAMDSNYQLIW

SEQ ID NO: 107512 - protein, 12 aa, Homo sapiens
  CDR3 for beta chain variable domain of TCR clone 53756 (TRBV5-1, TRBJ1-2)
CASSQGTYGYTF

SEQ ID NO: 107513 - protein, 15 aa, Homo sapiens
  CDR3 for alpha chain variable domain of TCR clone 53757 (TRAV8-3, TRAJ15)
CAVGAPNQAVTALIF

SEQ ID NO: 107514 - protein, 14 aa, Homo sapiens
  CDR3 for beta chain variable domain of TCR clone 53757 (TRBV20-1, TRBJ2-1)
CSPNDEASYNEQFF

SEQ ID NO: 107515 - protein, 18 aa, Homo sapiens
  CDR3 for alpha chain variable domain of TCR clone 53758 (TRAV17, TRAJ45)
CATSLDWYSGGGADGLTF

SEQ ID NO: 107516 - protein, 15 aa, Homo sapiens
  CDR3 for beta chain variable domain of TCR clone 53758 (TRBV11-2, TRBJ2-1)
CASSKNRGLIYEQFF

SEQ ID NO: 107517 - protein, 14 aa, Homo sapiens
  CDR3 for alpha chain variable domain of TCR clone 53759 (TRAV26-1, TRAJ39)
CIVFTNNAGNMLTF

SEQ ID NO: 107518 - protein, 15 aa, Homo sapiens
  CDR3 for beta chain variable domain of TCR clone 53759 (TRBV19, TRBJ2-4)
CASSLTGLTKNNQYF

SEQ ID NO: 107519 - protein, 14 aa, Homo sapiens
  CDR3 for alpha chain variable domain of TCR clone 53760 (TRAV8-4, TRAJ9)
CAVRINPGGFKTIF

SEQ ID NO: 107520 - protein, 15 aa, Homo sapiens
  CDR3 for beta chain variable domain of TCR clone 53760 (TRBV10-2, TRBJ2-6)
CASSEQGTGANVLTF

SEQ ID NO: 107521 - protein, 11 aa, Homo sapiens
  CDR3 for alpha chain variable domain of TCR clone 53761 (TRAV3, TRAJ21)
CAVGNFNKFYF

SEQ ID NO: 107522 - protein, 15 aa, Homo sapiens
  CDR3 for beta chain variable domain of TCR clone 53761 (TRBV7-2, TRBJ2-3)
CASSSTGLETDTQYF

SEQ ID NO: 107523 - protein, 11 aa, Homo sapiens
  CDR3 for alpha chain variable domain of TCR clone 53762 (TRAV12-2, TRAJ31)
CAATRWARLMF

SEQ ID NO: 107524 - protein, 15 aa, Homo sapiens
  CDR3 for beta chain variable domain of TCR clone 53762 (TRBV19, TRBJ2-7)
CASSIGGGLVNEQYF

SEQ ID NO: 107525 - protein, 17 aa, Homo sapiens
  CDR3 for alpha chain variable domain of TCR clone 53763 (TRAV8-6, TRAJ58)
CAVSYWVGETSGSRLTF

SEQ ID NO: 107526 - protein, 14 aa, Homo sapiens
  CDR3 for beta chain variable domain of TCR clone 53763 (TRBV4-2, TRBJ2-1)
CASGLDRAYNEQFF

SEQ ID NO: 107527 - protein, 13 aa, Homo sapiens
  CDR3 for alpha chain variable domain of TCR clone 53764 (TRAV17, TRAJ26)
CATVDNYGQNFVF

SEQ ID NO: 107528 - protein, 15 aa, Homo sapiens
  CDR3 for beta chain variable domain of TCR clone 53764 (TRBV20-1, TRBJ2-7)
CSARDRVSGMDEQYF

SEQ ID NO: 107529 - protein, 16 aa, Homo sapiens
  CDR3 for alpha chain variable domain of TCR clone 53765 (TRAV30, TRAJ24)
CGTEIVDADSWGKFQF

SEQ ID NO: 107530 - protein, 16 aa, Homo sapiens
  CDR3 for beta chain variable domain of TCR clone 53765 (TRBV7-7, TRBJ2-1)
CASSLASGTSYNEQFF

SEQ ID NO: 107531 - protein, 13 aa, Homo sapiens
  CDR3 for alpha chain variable domain of TCR clone 53766 (TRAV27, TRAJ29)
CAGAHSGNTPLVF

SEQ ID NO: 107532 - protein, 15 aa, Homo sapiens
  CDR3 for beta chain variable domain of TCR clone 53766 (TRBV7-9, TRBJ1-6)
CASSSPGRGNSPLHF

SEQ ID NO: 107533 - protein, 12 aa, Homo sapiens
  CDR3 for alpha chain variable domain of TCR clone 53767 (TRAV21, TRAJ11)
CAATSGYSTLTF

SEQ ID NO: 107534 - protein, 14 aa, Homo sapiens
  CDR3 for beta chain variable domain of TCR clone 53767 (TRBV20-1, TRBJ2-7)
CSAPELAGVDEQYF

SEQ ID NO: 107535 - protein, 16 aa, Homo sapiens
  CDR3 for alpha chain variable domain of TCR clone 53768 (TRAV17, TRAJ22)
CATGPISSSSARQLTF

SEQ ID NO: 107536 - protein, 13 aa, Homo sapiens
  CDR3 for beta chain variable domain of TCR clone 53768 (TRBV11-2, TRBJ2-1)
CASSLGLAGGRFF

SEQ ID NO: 107537 - protein, 14 aa, Homo sapiens
  CDR3 for alpha chain variable domain of TCR clone 53769 (TRAV1-2, TRAJ8)
CAVREDTGFQKLVF

SEQ ID NO: 107538 - protein, 15 aa, Homo sapiens
  CDR3 for beta chain variable domain of TCR clone 53769 (TRBV6-3, TRBJ2-7)
WASSSPGTVFYEQYF

SEQ ID NO: 107539 - protein, 18 aa, Homo sapiens
  CDR3 for alpha chain variable domain of TCR clone 53770 (TRAV3, TRAJ17)
CAVRARRGGRSCRQQAKF

SEQ ID NO: 107540 - protein, 14 aa, Homo sapiens
  CDR3 for beta chain variable domain of TCR clone 53770 (TRBV4-1, TRBJ2-2)
CASSQAVNTGELFF

SEQ ID NO: 107541 - protein, 14 aa, Homo sapiens
  CDR3 for alpha chain variable domain of TCR clone 53771 (TRAV13-1, TRAJ44)
CAAKATGTASKLTF

SEQ ID NO: 107542 - protein, 14 aa, Homo sapiens
  CDR3 for beta chain variable domain of TCR clone 53771 (TRBV25-1, TRBJ1-1)
CASTHLGGNTEASF

SEQ ID NO: 107543 - protein, 13 aa, Homo sapiens
  CDR3 for alpha chain variable domain of TCR clone 53772 (TRAV3, TRAJ27)
CAVRPLGAGKSTF

SEQ ID NO: 107544 - protein, 14 aa, Homo sapiens
  CDR3 for beta chain variable domain of TCR clone 53772 (TRBV7-6, TRBJ2-3)
CASSLGTVTDTQYF

SEQ ID NO: 107545 - protein, 11 aa, Homo sapiens
  CDR3 for alpha chain variable domain of TCR clone 53773 (TRAV4, TRAJ23)
CLVAPGGNLIF

SEQ ID NO: 107546 - protein, 15 aa, Homo sapiens
  CDR3 for beta chain variable domain of TCR clone 53773 (TRBV7-2, TRBJ2-1)
CASSFQADEYNEQFF

SEQ ID NO: 107547 - protein, 13 aa, Homo sapiens
  CDR3 for alpha chain variable domain of TCR clone 53774 (TRAV8-6, TRAJ8)
CAVSNTGFQKLVF

SEQ ID NO: 107548 - protein, 15 aa, Homo sapiens
  CDR3 for beta chain variable domain of TCR clone 53774 (TRBV28, TRBJ2-5)
CASSSGRTIQGTQYF

SEQ ID NO: 107549 - protein, 12 aa, Homo sapiens
  CDR3 for alpha chain variable domain of TCR clone 53775 (TRAV17, TRAJ20)
CATDGDDYKLSF

SEQ ID NO: 107550 - protein, 12 aa, Homo sapiens
  CDR3 for beta chain variable domain of TCR clone 53775 (TRBV11-2, TRBJ2-2)
CASSLGGGELFF

SEQ ID NO: 107551 - protein, 12 aa, Homo sapiens
  CDR3 for alpha chain variable domain of TCR clone 53776 (TRAV2, TRAJ37)
CAVAGNTGKLVF

SEQ ID NO: 107552 - protein, 17 aa, Homo sapiens
  CDR3 for beta chain variable domain of TCR clone 53776 (TRBV28, TRBJ2-5)
CASSTPEGDALQETQYF

SEQ ID NO: 107553 - protein, 14 aa, Homo sapiens
  CDR3 for alpha chain variable domain of TCR clone 53777 (TRAV12-2, TRAJ29)
CAVRRNSGNKPLVF

SEQ ID NO: 107554 - protein, 13 aa, Homo sapiens
  CDR3 for beta chain variable domain of TCR clone 53777 (TRBV12-4, TRBJ2-1)
CASSHYTDNEQFF

SEQ ID NO: 107555 - protein, 12 aa, Homo sapiens
  CDR3 for alpha chain variable domain of TCR clone 53778 (TRAV3, TRAJ34)
CAVLGNTDKLIF

SEQ ID NO: 107556 - protein, 13 aa, Homo sapiens
  CDR3 for beta chain variable domain of TCR clone 53778 (TRBV19, TRBJ2-1)
CAGSIGTGNEQFF

SEQ ID NO: 107557 - protein, 15 aa, Homo sapiens
  CDR3 for alpha chain variable domain of TCR clone 53779 (TRAV21, TRAJ24)
CADRSSTDSWGKLQF

SEQ ID NO: 107558 - protein, 13 aa, Homo sapiens
  CDR3 for beta chain variable domain of TCR clone 53779 (TRBV11-2, TRBJ2-5)
CASSSTGEETQYF

SEQ ID NO: 107559 - protein, 23 aa, Homo sapiens
  CDR3 for alpha chain variable domain of TCR clone 53780 (TRAV30, TRAJ43)
CTLRPPSSVTREPTSAALSDMRF

SEQ ID NO: 107560 - protein, 13 aa, Homo sapiens
  CDR3 for beta chain variable domain of TCR clone 53780 (TRBV12-4, TRBJ2-2)
CASSITGSGELFF

SEQ ID NO: 107561 - protein, 14 aa, Homo sapiens
  CDR3 for alpha chain variable domain of TCR clone 53781 (TRAV26-1, TRAJ45)
CIEVTGGGADGLTF

SEQ ID NO: 107562 - protein, 15 aa, Homo sapiens
  CDR3 for beta chain variable domain of TCR clone 53781 (TRBV29-1, TRBJ2-7)
CSVEFFDRGSYEQYF

SEQ ID NO: 107563 - protein, 13 aa, Homo sapiens
  CDR3 for alpha chain variable domain of TCR clone 53782 (TRAV12-2, TRAJ53)
CAGVGGSNYKLTF

SEQ ID NO: 107564 - protein, 13 aa, Homo sapiens
  CDR3 for beta chain variable domain of TCR clone 53782 (TRBV7-3, TRBJ1-1)
CASSQDWGAEAFF

SEQ ID NO: 107565 - protein, 14 aa, Homo sapiens
  CDR3 for alpha chain variable domain of TCR clone 53783 (TRAV26-1, TRAJ52)
CIPAGGTSYGKLTF

SEQ ID NO: 107566 - protein, 16 aa, Homo sapiens
  CDR3 for beta chain variable domain of TCR clone 53783 (TRBV19, TRBJ2-2)
CTSTIGARAGAGELFF

SEQ ID NO: 107567 - protein, 12 aa, Homo sapiens
  CDR3 for alpha chain variable domain of TCR clone 53784 (TRAV13-2, TRAJ8)
CAPWLGFQKLVF

SEQ ID NO: 107568 - protein, 14 aa, Homo sapiens
  CDR3 for beta chain variable domain of TCR clone 53784 (TRBV18, TRBJ1-5)
CASSRRQRNQPQHF

SEQ ID NO: 107569 - protein, 14 aa, Homo sapiens
  CDR3 for alpha chain variable domain of TCR clone 53785 (TRAV12-3, TRAJ10)
SHLPLTGGGNKLTF

SEQ ID NO: 107570 - protein, 13 aa, Homo sapiens
  CDR3 for beta chain variable domain of TCR clone 53785 (TRBV9, TRBJ2-1)
CASRPSGGNEQFF

SEQ ID NO: 107571 - protein, 17 aa, Homo sapiens
  CDR3 for alpha chain variable domain of TCR clone 53786 (TRAV38-1, TRAJ28)
CAFMKPTSGAGSYQLTF

SEQ ID NO: 107572 - protein, 15 aa, Homo sapiens
  CDR3 for beta chain variable domain of TCR clone 53786 (TRBV5-1, TRBJ2-4)
CASSLGGGGSYSQYF

SEQ ID NO: 107573 - protein, 11 aa, Homo sapiens
  CDR3 for alpha chain variable domain of TCR clone 53787 (TRAV1-1, TRAJ23)
CAVRQGGKLIF

SEQ ID NO: 107574 - protein, 20 aa, Homo sapiens
  CDR3 for beta chain variable domain of TCR clone 53787 (TRBV7-8, TRBJ2-2)
CASSDLFPGPTIHITGELFF

SEQ ID NO: 107575 - protein, 14 aa, Homo sapiens
  CDR3 for alpha chain variable domain of TCR clone 53788 (TRAV6, TRAJ6)
CALPTSGGSYIPPF

SEQ ID NO: 107576 - protein, 17 aa, Homo sapiens
  CDR3 for beta chain variable domain of TCR clone 53788 (TRBV5-1, TRBJ2-5)
CASSPVALGQNQETQYF

SEQ ID NO: 107577 - protein, 14 aa, Homo sapiens
  CDR3 for alpha chain variable domain of TCR clone 53789 (TRAV1-2, TRAJ8)
CAVREDTGFHKLVF

SEQ ID NO: 107578 - protein, 17 aa, Homo sapiens
  CDR3 for beta chain variable domain of TCR clone 53789 (TRBV11-2, TRBJ2-1)
CASSLYPPGVEYNEQFF

SEQ ID NO: 107579 - protein, 18 aa, Homo sapiens
  CDR3 for alpha chain variable domain of TCR clone 53790 (TRAV12-3, TRAJ52)
CAVSVGGAGGTSYGKLTF

SEQ ID NO: 107580 - protein, 14 aa, Homo sapiens
  CDR3 for beta chain variable domain of TCR clone 53790 (TRBV7-2, TRBJ2-7)
CASRSQGAAYEQYF

SEQ ID NO: 107581 - protein, 15 aa, Homo sapiens
  CDR3 for alpha chain variable domain of TCR clone 53791 (TRAV8-3, TRAJ27)
CAVGPSKTNAGKSTF

SEQ ID NO: 107582 - protein, 12 aa, Homo sapiens
  CDR3 for beta chain variable domain of TCR clone 53791 (TRBV11-2, TRBJ2-1)
CASSPGNNEQFF

SEQ ID NO: 107583 - protein, 13 aa, Homo sapiens
  CDR3 for alpha chain variable domain of TCR clone 53792 (TRAV27, TRAJ6)
CAGGTRGSYIPTF

SEQ ID NO: 107584 - protein, 12 aa, Homo sapiens
  CDR3 for beta chain variable domain of TCR clone 53792 (TRBV7-9, TRBJ2-7)
CASSIKREEQYF

SEQ ID NO: 107585 - protein, 13 aa, Homo sapiens
  CDR3 for alpha chain variable domain of TCR clone 53793 (TRAV20, TRAJ37)
CAGCSSNTCKLIF

SEQ ID NO: 107586 - protein, 11 aa, Homo sapiens
  CDR3 for beta chain variable domain of TCR clone 53793 (TRBV12-4, TRBJ2-3)
CASTATDAQYF

SEQ ID NO: 107587 - protein, 14 aa, Homo sapiens
  CDR3 for alpha chain variable domain of TCR clone 53794 (TRAV1-2, TRAJ16)
CAVNRFSDGQRLLF

SEQ ID NO: 107588 - protein, 11 aa, Homo sapiens
  CDR3 for beta chain variable domain of TCR clone 53794 (TRBV29-1, TRBJ2-5)
CSEDRTGTQYF

SEQ ID NO: 107589 - protein, 17 aa, Homo sapiens
  CDR3 for alpha chain variable domain of TCR clone 53795 (TRAV3, TRAJ42)
CAVRDRDYGGSKGNLIF

SEQ ID NO: 107590 - protein, 15 aa, Homo sapiens
  CDR3 for beta chain variable domain of TCR clone 53795 (TRBV2, TRBJ2-7)
CASSEGLARSYEQYF

SEQ ID NO: 107591 - protein, 17 aa, Homo sapiens
  CDR3 for alpha chain variable domain of TCR clone 53796 (TRAV26-1, TRAJ28)
CIVRVPDSGAGSYQLTF

SEQ ID NO: 107592 - protein, 17 aa, Homo sapiens
  CDR3 for beta chain variable domain of TCR clone 53796 (TRBV28, TRBJ2-7)
CASSPLPAGGKSCEQYF

SEQ ID NO: 107593 - protein, 12 aa, Homo sapiens
  CDR3 for alpha chain variable domain of TCR clone 53797 (TRAV23/DV6, TRAJ3)
CAAMAPQQCFQD

SEQ ID NO: 107594 - protein, 17 aa, Homo sapiens
  CDR3 for beta chain variable domain of TCR clone 53797 (TRBV7-9, TRBJ2-3)
CASSPTVAGDLTDTQYF

SEQ ID NO: 107595 - protein, 15 aa, Homo sapiens
  CDR3 for alpha chain variable domain of TCR clone 53798 (TRAV12-1, TRAJ9)
CVVSFGGTGGFKTIF

SEQ ID NO: 107596 - protein, 13 aa, Homo sapiens
  CDR3 for beta chain variable domain of TCR clone 53798 (TRBV2, TRBJ1-4)
CASSERAGEKLFF

SEQ ID NO: 107597 - protein, 14 aa, Homo sapiens
  CDR3 for alpha chain variable domain of TCR clone 53799 (TRAV12-3, TRAJ10)
SHLPLTGGGNKLTF

SEQ ID NO: 107598 - protein, 16 aa, Homo sapiens
  CDR3 for beta chain variable domain of TCR clone 53799 (TRBV5-8, TRBJ2-2)
CASSLINPGGAGELLF

SEQ ID NO: 107599 - protein, 17 aa, Homo sapiens
  CDR3 for alpha chain variable domain of TCR clone 53800 (TRAV13-1, TRAJ52)
CAAGRNAGGTSYGKLTF

SEQ ID NO: 107600 - protein, 13 aa, Homo sapiens
  CDR3 for beta chain variable domain of TCR clone 53800 (TRBV7-2, TRBJ1-1)
CASNLKGANVAFF

SEQ ID NO: 107601 - protein, 16 aa, Homo sapiens
  CDR3 for alpha chain variable domain of TCR clone 53801 (TRAV12-1, TRAJ48)
CVVNVVSNFGNEKLTF

SEQ ID NO: 107602 - protein, 18 aa, Homo sapiens
  CDR3 for beta chain variable domain of TCR clone 53801 (TRBV11-2, TRBJ2-6)
CASSLNPFLGTGANVLTF

SEQ ID NO: 107603 - protein, 13 aa, Homo sapiens
  CDR3 for alpha chain variable domain of TCR clone 53802 (TRAV2, TRAJ20)
CAVEDPSGYKLSF

SEQ ID NO: 107604 - protein, 16 aa, Homo sapiens
  CDR3 for beta chain variable domain of TCR clone 53802 (TRBV25-1, TRBJ2-7)
CASSELTGGGIYEQYF

SEQ ID NO: 107605 - protein, 13 aa, Homo sapiens
  CDR3 for alpha chain variable domain of TCR clone 53803 (TRAV3, TRAJ21)
CAVREPDFNKFYF

SEQ ID NO: 107606 - protein, 14 aa, Homo sapiens
  CDR3 for beta chain variable domain of TCR clone 53803 (TRBV7-6, TRBJ2-3)
CASSLGTVTDTQYF

SEQ ID NO: 107607 - protein, 16 aa, Homo sapiens
  CDR3 for alpha chain variable domain of TCR clone 53804 (TRAV3, TRAJ37)
CAVRGKGSGKTGKLIF

SEQ ID NO: 107608 - protein, 16 aa, Homo sapiens
  CDR3 for beta chain variable domain of TCR clone 53804 (TRBV12-5, TRBJ2-5)
CASGPRTSGSQETQYF

SEQ ID NO: 107609 - protein, 14 aa, Homo sapiens
  CDR3 for alpha chain variable domain of TCR clone 53805 (TRAV21, TRAJ54)
CAVRPLQGAQKLVF

SEQ ID NO: 107610 - protein, 13 aa, Homo sapiens
  CDR3 for beta chain variable domain of TCR clone 53805 (TRBV10-3, TRBJ2-7)
CASKLAVNYEQYF

SEQ ID NO: 107611 - protein, 12 aa, Homo sapiens
  CDR3 for alpha chain variable domain of TCR clone 53806 (TRAV16, TRAJ10)
LSRTGGGNKLTF

SEQ ID NO: 107612 - protein, 15 aa, Homo sapiens
  CDR3 for beta chain variable domain of TCR clone 53806 (TRBV6-3, TRBJ2-7)
CASSSPGTVFYEQYF

SEQ ID NO: 107613 - protein, 14 aa, Homo sapiens
  CDR3 for alpha chain variable domain of TCR clone 53807 (TRAV12-2, TRAJ17)
CAVLFKAAGNKLTF

SEQ ID NO: 107614 - protein, 15 aa, Homo sapiens
  CDR3 for beta chain variable domain of TCR clone 53807 (TRBV18, TRBJ1-1)
CASSPRQGENTEAFF

SEQ ID NO: 107615 - protein, 14 aa, Homo sapiens
  CDR3 for alpha chain variable domain of TCR clone 53808 (TRAV8-3, TRAJ36)
CAVGPIAGANNLFF

SEQ ID NO: 107616 - protein, 15 aa, Homo sapiens
  CDR3 for beta chain variable domain of TCR clone 53808 (TRBV4-1, TRBJ2-1)
CASSQDPGNYNEQFF

SEQ ID NO: 107617 - protein, 13 aa, Homo sapiens
  CDR3 for alpha chain variable domain of TCR clone 53809 (TRAV8-6, TRAJ49)
CAVITNTGNQFYF

SEQ ID NO: 107618 - protein, 17 aa, Homo sapiens
  CDR3 for beta chain variable domain of TCR clone 53809 (TRBV20-1, TRBJ2-1)
CSARDPLAGVWDNEQFF

SEQ ID NO: 107619 - protein, 18 aa, Homo sapiens
  CDR3 for alpha chain variable domain of TCR clone 53810 (TRAV26-2, TRAJ33)
CCVLLHPEEPASNYQLIW

SEQ ID NO: 107620 - protein, 15 aa, Homo sapiens
  CDR3 for beta chain variable domain of TCR clone 53810 (TRBV11-2, TRBJ1-6)
CASTLRGTGNSPLHF

SEQ ID NO: 107621 - protein, 16 aa, Homo sapiens
  CDR3 for alpha chain variable domain of TCR clone 53811 (TRAV8-1, TRAJ42)
CAMTSRYGGSQGNLIF

SEQ ID NO: 107622 - protein, 12 aa, Homo sapiens
  CDR3 for beta chain variable domain of TCR clone 53811 (TRBV6-3, TRBJ2-7)
CASSLGRRGLYF

SEQ ID NO: 107623 - protein, 18 aa, Homo sapiens
  CDR3 for alpha chain variable domain of TCR clone 53812 (TRAV13-1, TRAJ52)
CAAKNPNAGGTSYGKLTF

SEQ ID NO: 107624 - protein, 17 aa, Homo sapiens
  CDR3 for beta chain variable domain of TCR clone 53812 (TRBV11-2, TRBJ2-1)
CASGLYPPGVEYNEQFF

SEQ ID NO: 107625 - protein, 10 aa, Homo sapiens
  CDR3 for alpha chain variable domain of TCR clone 53813 (TRAV36/DV7, TRAJ48)
CAVGNEKLTF

SEQ ID NO: 107626 - protein, 14 aa, Homo sapiens
  CDR3 for beta chain variable domain of TCR clone 53813 (TRBV27, TRBJ2-1)
CAGSIAETYNEQFF

SEQ ID NO: 107627 - protein, 12 aa, Homo sapiens
  CDR3 for alpha chain variable domain of TCR clone 53814 (TRAV12-3, TRAJ17)
CAMTLTGNKLTL

SEQ ID NO: 107628 - protein, 16 aa, Homo sapiens
  CDR3 for beta chain variable domain of TCR clone 53814 (TRBV24-1, TRBJ2-3)
CATSDPGTGATDTQYF

SEQ ID NO: 107629 - protein, 16 aa, Homo sapiens
  CDR3 for alpha chain variable domain of TCR clone 53815 (TRAV3, TRAJ10)
CAVRDMRAGGGSKLTF

SEQ ID NO: 107630 - protein, 14 aa, Homo sapiens
  CDR3 for beta chain variable domain of TCR clone 53815 (TRBV25-1, TRBJ1-1)
CASAHLGGNTEAFF

SEQ ID NO: 107631 - protein, 15 aa, Homo sapiens
  CDR3 for alpha chain variable domain of TCR clone 53816 (TRAV3, TRAJ3)
CAGRDRDSSASKIIF

SEQ ID NO: 107632 - protein, 18 aa, Homo sapiens
  CDR3 for beta chain variable domain of TCR clone 53816 (TRBV25-1, TRBJ1-2)
CASSGLQNGQGLIFGYTF

SEQ ID NO: 107633 - protein, 10 aa, Homo sapiens
  CDR3 for alpha chain variable domain of TCR clone 53817 (TRAV1-2, TRAJ31)
CVSEDARLMF

SEQ ID NO: 107634 - protein, 13 aa, Homo sapiens
  CDR3 for beta chain variable domain of TCR clone 53817 (TRBV4-2, TRBJ1-1)
CASSQAGNTEAFS

SEQ ID NO: 107635 - protein, 13 aa, Homo sapiens
  CDR3 for alpha chain variable domain of TCR clone 53818 (TRAV3, TRAJ21)
CAVREPDFNKFYF

SEQ ID NO: 107636 - protein, 18 aa, Homo sapiens
  CDR3 for beta chain variable domain of TCR clone 53818 (TRBV11-2, TRBJ2-3)
CASSLGGASRGAPTTQYF

SEQ ID NO: 107637 - protein, 15 aa, Homo sapiens
  CDR3 for alpha chain variable domain of TCR clone 53819 (TRAV8-3, TRAJ41)
CAVVSNSNSGYALNF

SEQ ID NO: 107638 - protein, 17 aa, Homo sapiens
  CDR3 for beta chain variable domain of TCR clone 53819 (TRBV25-1, TRBJ2-1)
CASSAYGQGRGVYEQFF

SEQ ID NO: 107639 - protein, 15 aa, Homo sapiens
  CDR3 for alpha chain variable domain of TCR clone 53820 (TRAV2, TRAJ22)
CAVPSRGGSARQLTF

SEQ ID NO: 107640 - protein, 14 aa, Homo sapiens
  CDR3 for beta chain variable domain of TCR clone 53820 (TRBV25-1, TRBJ2-7)
CASSEYGRGYEQYF

SEQ ID NO: 107641 - protein, 13 aa, Homo sapiens
  CDR3 for alpha chain variable domain of TCR clone 53821 (TRAV12-1, TRAJ11)
CVVTRGGYSTLPF

SEQ ID NO: 107642 - protein, 13 aa, Homo sapiens
  CDR3 for beta chain variable domain of TCR clone 53821 (TRBV20-1, TRBJ1-2)
CSARDQGAYGYTF

SEQ ID NO: 107643 - protein, 14 aa, Homo sapiens
  CDR3 for alpha chain variable domain of TCR clone 53822 (TRAV20, TRAJ22)
RAVALGGSARQLTF

SEQ ID NO: 107644 - protein, 17 aa, Homo sapiens
  CDR3 for beta chain variable domain of TCR clone 53822 (TRBV13, TRBJ2-3)
CASSLSRVAGGRNTQYF

SEQ ID NO: 107645 - protein, 16 aa, Homo sapiens
  CDR3 for alpha chain variable domain of TCR clone 53823 (TRAV30, TRAJ24)
CGTEIVDADSWGKFQF

SEQ ID NO: 107646 - protein, 16 aa, Homo sapiens
  CDR3 for beta chain variable domain of TCR clone 53823 (TRBV4-1, TRBJ1-2)
CASSQDAGQVLYGYTF

SEQ ID NO: 107647 - protein, 14 aa, Homo sapiens
  CDR3 for alpha chain variable domain of TCR clone 53824 (TRAV38-1, TRAJ45)
CASHSGGGAHGLTF

SEQ ID NO: 107648 - protein, 13 aa, Homo sapiens
  CDR3 for beta chain variable domain of TCR clone 53824 (TRBV10-3, TRBJ1-2)
CAISERDSYGYTF

SEQ ID NO: 107649 - protein, 11 aa, Homo sapiens
  CDR3 for alpha chain variable domain of TCR clone 53825 (TRAV21, TRAJ11)
CAVNGYSTLTF

SEQ ID NO: 107650 - protein, 17 aa, Homo sapiens
  CDR3 for beta chain variable domain of TCR clone 53825 (TRBV5-1, TRBJ1-1)
CASRPIRTGGVNTEAFF

SEQ ID NO: 107651 - protein, 15 aa, Homo sapiens
  CDR3 for alpha chain variable domain of TCR clone 53826 (TRAV13-1, TRAJ52)
SYHNAGGTSYGKLTF

SEQ ID NO: 107652 - protein, 11 aa, Homo sapiens
  CDR3 for beta chain variable domain of TCR clone 53826 (TRBV12-4, TRBJ2-2)
CASSSAGELFF

SEQ ID NO: 107653 - protein, 14 aa, Homo sapiens
  CDR3 for alpha chain variable domain of TCR clone 53827 (TRAV17, TRAJ24)
CATLTTDSWGKFQF

SEQ ID NO: 107654 - protein, 16 aa, Homo sapiens
  CDR3 for beta chain variable domain of TCR clone 53827 (TRBV4-2, TRBJ2-7)
CASSQDGGSLRGEQYS

SEQ ID NO: 107655 - protein, 11 aa, Homo sapiens
  CDR3 for alpha chain variable domain of TCR clone 53828 (TRAV21, TRAJ31)
CAVRNNARLMF

SEQ ID NO: 107656 - protein, 14 aa, Homo sapiens
  CDR3 for beta chain variable domain of TCR clone 53828 (TRBV2, TRBJ2-5)
CASSEVLAQETQYF

SEQ ID NO: 107657 - protein, 13 aa, Homo sapiens
  CDR3 for alpha chain variable domain of TCR clone 53829 (TRAV13-1, TRAJ11)
CAAVLAGYSTLTF

SEQ ID NO: 107658 - protein, 17 aa, Homo sapiens
  CDR3 for beta chain variable domain of TCR clone 53829 (TRBV11-2, TRBJ2-1)
CASSLYPPGVEYNEQFF

SEQ ID NO: 107659 - protein, 14 aa, Homo sapiens
  CDR3 for alpha chain variable domain of TCR clone 53830 (TRAV17, TRAJ56)
CATVPAGANSKLTF

SEQ ID NO: 107660 - protein, 13 aa, Homo sapiens
  CDR3 for beta chain variable domain of TCR clone 53830 (TRBV12-4, TRBJ2-2)
CASSITGSGGLFF

SEQ ID NO: 107661 - protein, 17 aa, Homo sapiens
  CDR3 for alpha chain variable domain of TCR clone 53831 (TRAV3, TRAJ42)
CAVRDRDYGGSQGNLIF

SEQ ID NO: 107662 - protein, 15 aa, Homo sapiens
  CDR3 for beta chain variable domain of TCR clone 53831 (TRBV6-6, TRBJ2-7)
CASSYSYGVSYEQYF

SEQ ID NO: 107663 - protein, 13 aa, Homo sapiens
  CDR3 for alpha chain variable domain of TCR clone 53832 (TRAV27, TRAJ40)
CAGPPSGTYKYIF

SEQ ID NO: 107664 - protein, 12 aa, Homo sapiens
  CDR3 for beta chain variable domain of TCR clone 53832 (TRBV11-2, TRBJ2-2)
CASSLGGGELFF

SEQ ID NO: 107665 - protein, 12 aa, Homo sapiens
  CDR3 for alpha chain variable domain of TCR clone 53833 (TRAV36/DV7, TRAJ54)
CAVVRGAQKLVF

SEQ ID NO: 107666 - protein, 14 aa, Homo sapiens
  CDR3 for beta chain variable domain of TCR clone 53833 (TRBV7-3, TRBJ1-1)
CAISLKGGNTEAFF

SEQ ID NO: 107667 - protein, 11 aa, Homo sapiens
  CDR3 for alpha chain variable domain of TCR clone 53834 (TRAV17, TRAJ43)
CATPRSNDMRF

SEQ ID NO: 107668 - protein, 15 aa, Homo sapiens
  CDR3 for beta chain variable domain of TCR clone 53834 (TRBV11-2, TRBJ2-1)
CASSLGTRGLNEQFF

SEQ ID NO: 107669 - protein, 17 aa, Homo sapiens
  CDR3 for alpha chain variable domain of TCR clone 53835 (TRAV3, TRAJ6)
CAVRDGPRAGGSYIPTF

SEQ ID NO: 107670 - protein, 15 aa, Homo sapiens
  CDR3 for beta chain variable domain of TCR clone 53835 (TRBV18, TRBJ2-1)
CASLPDRGRDNEQFF

SEQ ID NO: 107671 - protein, 16 aa, Homo sapiens
  CDR3 for alpha chain variable domain of TCR clone 53836 (TRAV3, TRAJ37)
CAVRPHGSGNTGKLIF

SEQ ID NO: 107672 - protein, 15 aa, Homo sapiens
  CDR3 for beta chain variable domain of TCR clone 53836 (TRBV5-5, TRBJ2-7)
RASSLAAPLSYEQYF

SEQ ID NO: 107673 - protein, 14 aa, Homo sapiens
  CDR3 for alpha chain variable domain of TCR clone 53837 (TRAV21, TRAJ21)
CAVKGFGNFNKFYF

SEQ ID NO: 107674 - protein, 13 aa, Homo sapiens
  CDR3 for beta chain variable domain of TCR clone 53837 (TRBV18, TRBJ1-1)
CASSPETKPEASF

SEQ ID NO: 107675 - protein, 12 aa, Homo sapiens
  CDR3 for alpha chain variable domain of TCR clone 53838 (TRAV3, TRAJ20)
CAARDHDYKLSF

SEQ ID NO: 107676 - protein, 13 aa, Homo sapiens
  CDR3 for beta chain variable domain of TCR clone 53838 (TRBV9, TRBJ2-7)
CASSVGQGGEQYF

SEQ ID NO: 107677 - protein, 12 aa, Homo sapiens
  CDR3 for alpha chain variable domain of TCR clone 53839 (TRAV9-2, TRAJ26)
CALRGYGQNFFF

SEQ ID NO: 107678 - protein, 12 aa, Homo sapiens
  CDR3 for beta chain variable domain of TCR clone 53839 (TRBV29-1, TRBJ2-3)
CSVTGGADTQYF

SEQ ID NO: 107679 - protein, 12 aa, Homo sapiens
  CDR3 for alpha chain variable domain of TCR clone 53840 (TRAV16, TRAJ58)
CALKRGNQWLQV

SEQ ID NO: 107680 - protein, 13 aa, Homo sapiens
  CDR3 for beta chain variable domain of TCR clone 53840 (TRBV20-1, TRBJ2-2)
CSASAAGTGELFF

SEQ ID NO: 107681 - protein, 12 aa, Homo sapiens
  CDR3 for alpha chain variable domain of TCR clone 53841 (TRAV12-3, TRAJ17)
CAMTLTGNKLTF

SEQ ID NO: 107682 - protein, 17 aa, Homo sapiens
  CDR3 for beta chain variable domain of TCR clone 53841 (TRBV15, TRBJ1-5)
CATSRAPPGTRNQPQHF

SEQ ID NO: 107683 - protein, 14 aa, Homo sapiens
  CDR3 for alpha chain variable domain of TCR clone 53842 (TRAV1-2, TRAJ8)
CAVREDTGFQKLVI

SEQ ID NO: 107684 - protein, 15 aa, Homo sapiens
  CDR3 for beta chain variable domain of TCR clone 53842 (TRBV6-3, TRBJ2-7)
CASSSPGTVFYEQYF

SEQ ID NO: 107685 - protein, 11 aa, Homo sapiens
  CDR3 for alpha chain variable domain of TCR clone 53843 (TRAV1-2, TRAJ20)
CAVADDYKLSF

SEQ ID NO: 107686 - protein, 15 aa, Homo sapiens
  CDR3 for beta chain variable domain of TCR clone 53843 (TRBV28, TRBJ2-1)
CASSIIAGGRSEQFF

SEQ ID NO: 107687 - protein, 15 aa, Homo sapiens
  CDR3 for alpha chain variable domain of TCR clone 53844 (TRAV3, TRAJ22)
CAVRGRGGSARQLTF

SEQ ID NO: 107688 - protein, 13 aa, Homo sapiens
  CDR3 for beta chain variable domain of TCR clone 53844 (TRBV12-4, TRBJ1-2)
CASSLRQGKGYTF

SEQ ID NO: 107689 - protein, 15 aa, Homo sapiens
  CDR3 for alpha chain variable domain of TCR clone 53845 (TRAV20, TRAJ4)
CAVQVLSGGYNKLIF

SEQ ID NO: 107690 - protein, 14 aa, Homo sapiens
  CDR3 for beta chain variable domain of TCR clone 53845 (TRBV7-6, TRBJ2-3)
CASNSGGDANTQYF

SEQ ID NO: 107691 - protein, 13 aa, Homo sapiens
  CDR3 for alpha chain variable domain of TCR clone 53846 (TRAV38-1, TRAJ42)
CARWGGSQGNLIF

SEQ ID NO: 107692 - protein, 17 aa, Homo sapiens
  CDR3 for beta chain variable domain of TCR clone 53846 (TRBV20-1, TRBJ2-1)
CSARDPLAGVWDNEQFV

SEQ ID NO: 107693 - protein, 14 aa, Homo sapiens
  CDR3 for alpha chain variable domain of TCR clone 53847 (TRAV12-1, TRAJ15)
CLPPANLAGTALIF

SEQ ID NO: 107694 - protein, 13 aa, Homo sapiens
  CDR3 for beta chain variable domain of TCR clone 53847 (TRBV7-2, TRBJ2-4)
CASSREHANIQYF

SEQ ID NO: 107695 - protein, 14 aa, Homo sapiens
  CDR3 for alpha chain variable domain of TCR clone 53848 (TRAV12-1, TRAJ17)
CVVNYKAAGNKLSF

SEQ ID NO: 107696 - protein, 17 aa, Homo sapiens
  CDR3 for beta chain variable domain of TCR clone 53848 (TRBV20-1, TRBJ2-1)
CSASSSGLAGSYNEQFF

SEQ ID NO: 107697 - protein, 12 aa, Homo sapiens
  CDR3 for alpha chain variable domain of TCR clone 53849 (TRAV12-1, TRAJ40)
CVVYSGTYKYIF

SEQ ID NO: 107698 - protein, 18 aa, Homo sapiens
  CDR3 for beta chain variable domain of TCR clone 53849 (TRBV11-2, TRBJ2-3)
CASSLGGASLGAPNTQYF

SEQ ID NO: 107699 - protein, 14 aa, Homo sapiens
  CDR3 for alpha chain variable domain of TCR clone 53850 (TRAV1-2, TRAJ16)
CAVNRFSDGQKLLF

SEQ ID NO: 107700 - protein, 15 aa, Homo sapiens
  CDR3 for beta chain variable domain of TCR clone 53850 (TRBV7-9, TRBJ1-6)
CASSSLGRGNSHLHF

SEQ ID NO: 107701 - protein, 14 aa, Homo sapiens
  CDR3 for alpha chain variable domain of TCR clone 53851 (TRAV12-1, TRAJ23)
CVVIGYNQGGKLIF

SEQ ID NO: 107702 - protein, 15 aa, Homo sapiens
  CDR3 for beta chain variable domain of TCR clone 53851 (TRBV20-1, TRBJ1-5)
CSAKPPGQGPQPQHF

SEQ ID NO: 107703 - protein, 14 aa, Homo sapiens
  CDR3 for alpha chain variable domain of TCR clone 53852 (TRAV1-2, TRAJ16)
CAVNRFSDGQKLLF

SEQ ID NO: 107704 - protein, 15 aa, Homo sapiens
  CDR3 for beta chain variable domain of TCR clone 53852 (TRBV19, TRBJ1-5)
CASSIVWADNQPQHS

SEQ ID NO: 107705 - protein, 13 aa, Homo sapiens
  CDR3 for alpha chain variable domain of TCR clone 53853 (TRAV27, TRAJ45)
CRSSGGGADGLTF

SEQ ID NO: 107706 - protein, 15 aa, Homo sapiens
  CDR3 for beta chain variable domain of TCR clone 53853 (TRBV10-3, TRBJ2-3)
CAISLTSGGTDTQYF

SEQ ID NO: 107707 - protein, 16 aa, Homo sapiens
  CDR3 for alpha chain variable domain of TCR clone 53854 (TRAV16, TRAJ4)
CALSRMFSGGYNKRIF

SEQ ID NO: 107708 - protein, 16 aa, Homo sapiens
  CDR3 for beta chain variable domain of TCR clone 53854 (TRBV24-1, TRBJ2-3)
CATSDPGTGATDTQYF

SEQ ID NO: 107709 - protein, 15 aa, Homo sapiens
  CDR3 for alpha chain variable domain of TCR clone 53855 (TRAV27, TRAJ38)
CAARRNAGNNRKLIW

SEQ ID NO: 107710 - protein, 12 aa, Homo sapiens
  CDR3 for beta chain variable domain of TCR clone 53855 (TRBV7-9, TRBJ1-4)
CASSTDREKLFF

SEQ ID NO: 107711 - protein, 15 aa, Homo sapiens
  CDR3 for alpha chain variable domain of TCR clone 53856 (TRAV21, TRAJ53)
CATLNSGGSNSKLTF

SEQ ID NO: 107712 - protein, 16 aa, Homo sapiens
  CDR3 for beta chain variable domain of TCR clone 53856 (TRBV9, TRBJ2-1)
CASSVGGGGNYNEQFF

SEQ ID NO: 107713 - protein, 16 aa, Homo sapiens
  CDR3 for alpha chain variable domain of TCR clone 53857 (TRAV8-3, TRAJ44)
CAVGASNTGTTSKLTF

SEQ ID NO: 107714 - protein, 15 aa, Homo sapiens
  CDR3 for beta chain variable domain of TCR clone 53857 (TRBV27, TRBJ1-5)
CASTFNRGSNQPQHF

SEQ ID NO: 107715 - protein, 16 aa, Homo sapiens
  CDR3 for alpha chain variable domain of TCR clone 53858 (TRAV23/DV6, TRAJ9)
CAASIGGNTGGLKTIF

SEQ ID NO: 107716 - protein, 12 aa, Homo sapiens
  CDR3 for beta chain variable domain of TCR clone 53858 (TRBV6-3, TRBJ2-7)
CASSEPGFEQYF

SEQ ID NO: 107717 - protein, 11 aa, Homo sapiens
  CDR3 for alpha chain variable domain of TCR clone 53859 (TRAV21, TRAJ34)
CAVTNTDKLIF

SEQ ID NO: 107718 - protein, 12 aa, Homo sapiens
  CDR3 for beta chain variable domain of TCR clone 53859 (TRBV12-4, TRBJ1-4)
CASSETNEKLFF

SEQ ID NO: 107719 - protein, 14 aa, Homo sapiens
  CDR3 for alpha chain variable domain of TCR clone 53860 (TRAV1-2, TRAJ16)
CAVDRFSDGQKLLF

SEQ ID NO: 107720 - protein, 14 aa, Homo sapiens
  CDR3 for beta chain variable domain of TCR clone 53860 (TRBV20-1, TRBJ2-1)
CSARGGSSYNEQFF

SEQ ID NO: 107721 - protein, 13 aa, Homo sapiens
  CDR3 for alpha chain variable domain of TCR clone 53861 (TRAV27, TRAJ49)
CAPRPYTGNQFYF

SEQ ID NO: 107722 - protein, 18 aa, Homo sapiens
  CDR3 for beta chain variable domain of TCR clone 53861 (TRBV7-3, TRBJ2-5)
CASSLGGAAQGRLETQYF

SEQ ID NO: 107723 - protein, 14 aa, Homo sapiens
  CDR3 for alpha chain variable domain of TCR clone 53862 (TRAV20, TRAJ37)
CAVQSSSNTGKLIF

SEQ ID NO: 107724 - protein, 14 aa, Homo sapiens
  CDR3 for beta chain variable domain of TCR clone 53862 (TRBV7-3, TRBJ2-2)
CASSLNSKTGELFF

SEQ ID NO: 107725 - protein, 13 aa, Homo sapiens
  CDR3 for alpha chain variable domain of TCR clone 53863 (TRAV17, TRAJ21)
CATDGGNFNKFYF

SEQ ID NO: 107726 - protein, 17 aa, Homo sapiens
  CDR3 for beta chain variable domain of TCR clone 53863 (TRBV20-1, TRBJ2-2)
CSASGSGQGGLTGELFF

SEQ ID NO: 107727 - protein, 12 aa, Homo sapiens
  CDR3 for alpha chain variable domain of TCR clone 53864 (TRAV1-2, TRAJ29)
CAVPSGNTPLVF

SEQ ID NO: 107728 - protein, 12 aa, Homo sapiens
  CDR3 for beta chain variable domain of TCR clone 53864 (TRBV12-4, TRBJ1-2)
CASSFIWLHLRF

SEQ ID NO: 107729 - protein, 14 aa, Homo sapiens
  CDR3 for alpha chain variable domain of TCR clone 53865 (TRAV21, TRAJ38)
CAVMGAGNNRKLIW

SEQ ID NO: 107730 - protein, 13 aa, Homo sapiens
  CDR3 for beta chain variable domain of TCR clone 53865 (TRBV7-3, TRBJ2-5)
CASSIGFVETQYF

SEQ ID NO: 107731 - protein, 13 aa, Homo sapiens
  CDR3 for alpha chain variable domain of TCR clone 53866 (TRAV12-1, TRAJ11)
CVVNRAGYSTLTF

SEQ ID NO: 107732 - protein, 12 aa, Homo sapiens
  CDR3 for beta chain variable domain of TCR clone 53866 (TRBV11-2, TRBJ2-2)
CASSLGGGELFF

SEQ ID NO: 107733 - protein, 13 aa, Homo sapiens
  CDR3 for alpha chain variable domain of TCR clone 53867 (TRAV12-2, TRAJ42)
CAVKRGSQGNLIF

SEQ ID NO: 107734 - protein, 16 aa, Homo sapiens
  CDR3 for beta chain variable domain of TCR clone 53867 (TRBV9, TRBJ2-2)
CASSAMGKGNTGELLF

SEQ ID NO: 107735 - protein, 12 aa, Homo sapiens
  CDR3 for alpha chain variable domain of TCR clone 53868 (TRAV13-1, TRAJ3)
QVYNSSASKIIF

SEQ ID NO: 107736 - protein, 17 aa, Homo sapiens
  CDR3 for beta chain variable domain of TCR clone 53868 (TRBV5-1, TRBJ2-7)
CASSKPEGREASYEQYF

SEQ ID NO: 107737 - protein, 13 aa, Homo sapiens
  CDR3 for alpha chain variable domain of TCR clone 53869 (TRAV26-1, TRAJ48)
CIVRVVGDEKLTF

SEQ ID NO: 107738 - protein, 19 aa, Homo sapiens
  CDR3 for beta chain variable domain of TCR clone 53869 (TRBV11-3, TRBJ2-2)
CASSTRLGAKTTNTGELFF

SEQ ID NO: 107739 - protein, 14 aa, Homo sapiens
  CDR3 for alpha chain variable domain of TCR clone 53870 (TRAV25, TRAJ44)
CAVFPTGTASKLTF

SEQ ID NO: 107740 - protein, 14 aa, Homo sapiens
  CDR3 for beta chain variable domain of TCR clone 53870 (TRBV19, TRBJ1-1)
CAGTGHRLNTEAFF

SEQ ID NO: 107741 - protein, 13 aa, Homo sapiens
  CDR3 for alpha chain variable domain of TCR clone 53871 (TRAV21, TRAJ57)
CAVTQGGSEKLVF

SEQ ID NO: 107742 - protein, 15 aa, Homo sapiens
  CDR3 for beta chain variable domain of TCR clone 53871 (TRBV5-1, TRBJ1-1)
CASSSTTGTNTEASF

SEQ ID NO: 107743 - protein, 15 aa, Homo sapiens
  CDR3 for alpha chain variable domain of TCR clone 53872 (TRAV3, TRAJ22)
CAVRDRGGSARQLTL

SEQ ID NO: 107744 - protein, 16 aa, Homo sapiens
  CDR3 for beta chain variable domain of TCR clone 53872 (TRBV5-4, TRBJ2-3)
CASQQPGAGGSDTQYF

SEQ ID NO: 107745 - protein, 13 aa, Homo sapiens
  CDR3 for alpha chain variable domain of TCR clone 53873 (TRAV12-1, TRAJ29)
CVANGPGNTPLVF

SEQ ID NO: 107746 - protein, 13 aa, Homo sapiens
  CDR3 for beta chain variable domain of TCR clone 53873 (TRBV7-2, TRBJ2-5)
CASSRGGLETQYF

SEQ ID NO: 107747 - protein, 14 aa, Homo sapiens
  CDR3 for alpha chain variable domain of TCR clone 53874 (TRAV9-2, TRAJ39)
CALYIYNAGNMLAF

SEQ ID NO: 107748 - protein, 12 aa, Homo sapiens
  CDR3 for beta chain variable domain of TCR clone 53874 (TRBV11-2, TRBJ2-2)
CASSLGGGELFF

SEQ ID NO: 107749 - protein, 19 aa, Homo sapiens
  CDR3 for alpha chain variable domain of TCR clone 53875 (TRAV26-1, TRAJ28)
CIVRVAHAYSGAGSYQLTF

SEQ ID NO: 107750 - protein, 14 aa, Homo sapiens
  CDR3 for beta chain variable domain of TCR clone 53875 (TRBV6-1, TRBJ1-3)
CASVQGGGGNTIYF

SEQ ID NO: 107751 - protein, 14 aa, Homo sapiens
  CDR3 for alpha chain variable domain of TCR clone 53876 (TRAV12-2, TRAJ24)
CAVTPADSWGKLQF

SEQ ID NO: 107752 - protein, 11 aa, Homo sapiens
  CDR3 for beta chain variable domain of TCR clone 53876 (TRBV11-2, TRBJ2-2)
CASSLPGELFF

SEQ ID NO: 107753 - protein, 14 aa, Homo sapiens
  CDR3 for alpha chain variable domain of TCR clone 53877 (TRAV26-1, TRAJ45)
CIEVTGGGADGLTF

SEQ ID NO: 107754 - protein, 14 aa, Homo sapiens
  CDR3 for beta chain variable domain of TCR clone 53877 (TRBV6-1, TRBJ1-3)
CASVQGGGGNTIYS

SEQ ID NO: 107755 - protein, 13 aa, Homo sapiens
  CDR3 for alpha chain variable domain of TCR clone 53878 (TRAV17, TRAJ6)
CATGFGGSYIPTF

SEQ ID NO: 107756 - protein, 14 aa, Homo sapiens
  CDR3 for beta chain variable domain of TCR clone 53878 (TRBV5-1, TRBJ2-5)
CASSFGDSQETQYF

SEQ ID NO: 107757 - protein, 15 aa, Homo sapiens
  CDR3 for alpha chain variable domain of TCR clone 53879 (TRAV12-2, TRAJ50)
CAVNGLEASYDKVIF

SEQ ID NO: 107758 - protein, 16 aa, Homo sapiens
  CDR3 for beta chain variable domain of TCR clone 53879 (TRBV5-4, TRBJ2-3)
CASQQPGAGGADTQYF

SEQ ID NO: 107759 - protein, 14 aa, Homo sapiens
  CDR3 for alpha chain variable domain of TCR clone 53880 (TRAV1-2, TRAJ16)
CAVNRFSDGQKLLF

SEQ ID NO: 107760 - protein, 14 aa, Homo sapiens
  CDR3 for beta chain variable domain of TCR clone 53880 (TRBV6-3, TRBJ1-1)
CASSNLLPGAEAFF

SEQ ID NO: 107761 - protein, 14 aa, Homo sapiens
  CDR3 for alpha chain variable domain of TCR clone 53881 (TRAV8-3, TRAJ17)
CAVGAQTAGNKLTL

SEQ ID NO: 107762 - protein, 11 aa, Homo sapiens
  CDR3 for beta chain variable domain of TCR clone 53881 (TRBV29-1, TRBJ1-4)
CSVSSGEKLFF

SEQ ID NO: 107763 - protein, 14 aa, Homo sapiens
  CDR3 for alpha chain variable domain of TCR clone 53882 (TRAV12-3, TRAJ54)
CAMRGIQGAQKLVF

SEQ ID NO: 107764 - protein, 13 aa, Homo sapiens
  CDR3 for beta chain variable domain of TCR clone 53882 (TRBV19, TRBJ1-1)
CASSTSNGGEAFF

SEQ ID NO: 107765 - protein, 12 aa, Homo sapiens
  CDR3 for alpha chain variable domain of TCR clone 53883 (TRAV2, TRAJ9)
CAVGAGGFKTIF

SEQ ID NO: 107766 - protein, 16 aa, Homo sapiens
  CDR3 for beta chain variable domain of TCR clone 53883 (TRBV13, TRBJ2-2)
CASSPRTGEHTGQLFF

SEQ ID NO: 107767 - protein, 14 aa, Homo sapiens
  CDR3 for alpha chain variable domain of TCR clone 53884 (TRAV1-1, TRAJ27)
CAVIYNTIAGKSTF

SEQ ID NO: 107768 - protein, 15 aa, Homo sapiens
  CDR3 for beta chain variable domain of TCR clone 53884 (TRBV7-2, TRBJ2-1)
CASSSGLAGGNEQFF

SEQ ID NO: 107769 - protein, 16 aa, Homo sapiens
  CDR3 for alpha chain variable domain of TCR clone 53885 (TRAV17, TRAJ53)
CATDAISGGSNYKLTF

SEQ ID NO: 107770 - protein, 12 aa, Homo sapiens
  CDR3 for beta chain variable domain of TCR clone 53885 (TRBV5-1, TRBJ2-7)
CASSFRGYEQYF

SEQ ID NO: 107771 - protein, 15 aa, Homo sapiens
  CDR3 for alpha chain variable domain of TCR clone 53886 (TRAV8-4, TRAJ9)
CAVSDLEGGGFKTIF

SEQ ID NO: 107772 - protein, 13 aa, Homo sapiens
  CDR3 for beta chain variable domain of TCR clone 53886 (TRBV4-2, TRBJ1-1)
CASSQAGNTEAFF

SEQ ID NO: 107773 - protein, 11 aa, Homo sapiens
  CDR3 for alpha chain variable domain of TCR clone 53887 (TRAV2, TRAJ13)
CASGGYQKVTF

SEQ ID NO: 107774 - protein, 14 aa, Homo sapiens
  CDR3 for beta chain variable domain of TCR clone 53887 (TRBV7-2, TRBJ1-2)
CASSQTGSTYGYTF

SEQ ID NO: 107775 - protein, 20 aa, Homo sapiens
  CDR3 for alpha chain variable domain of TCR clone 53888 (TRAV12-1, TRAJ42)
SSVIQPPTSVKGGSQGNLIF

SEQ ID NO: 107776 - protein, 20 aa, Homo sapiens
  CDR3 for beta chain variable domain of TCR clone 53888 (TRBV28, TRBJ2-1)
CASTPIGRSPGLAGGNEQFF

SEQ ID NO: 107777 - protein, 12 aa, Homo sapiens
  CDR3 for alpha chain variable domain of TCR clone 53889 (TRAV1-1, TRAJ8)
CAGGTGFQKLEF

SEQ ID NO: 107778 - protein, 15 aa, Homo sapiens
  CDR3 for beta chain variable domain of TCR clone 53889 (TRBV7-9, TRBJ1-4)
CASSRTGGFNEKLFF

SEQ ID NO: 107779 - protein, 14 aa, Homo sapiens
  CDR3 for alpha chain variable domain of TCR clone 53890 (TRAV8-3, TRAJ9)
CAVVHNTGGFKTIF

SEQ ID NO: 107780 - protein, 14 aa, Homo sapiens
  CDR3 for beta chain variable domain of TCR clone 53890 (TRBV7-3, TRBJ2-2)
CASSSGGYAGELFF

SEQ ID NO: 107781 - protein, 13 aa, Homo sapiens
  CDR3 for alpha chain variable domain of TCR clone 53891 (TRAV3, TRAJ30)
CAVRDRGDDKIIF

SEQ ID NO: 107782 - protein, 14 aa, Homo sapiens
  CDR3 for beta chain variable domain of TCR clone 53891 (TRBV5-1, TRBJ1-1)
YASSRTTGDTEAFF

SEQ ID NO: 107783 - protein, 23 aa, Homo sapiens
  CDR3 for alpha chain variable domain of TCR clone 53892 (TRAV8-3, )
CAVGASYAGNNHIQNPDPAVYQL

SEQ ID NO: 107784 - protein, 15 aa, Homo sapiens
  CDR3 for beta chain variable domain of TCR clone 53892 (TRBV11-3, TRBJ1-3)
CASSLFGPSGNTIYF

SEQ ID NO: 107785 - protein, 14 aa, Homo sapiens
  CDR3 for alpha chain variable domain of TCR clone 53893 (TRAV1-2, TRAJ16)
CAVNRFSDGQKLLF

SEQ ID NO: 107786 - protein, 15 aa, Homo sapiens
  CDR3 for beta chain variable domain of TCR clone 53893 (TRBV20-1, TRBJ2-7)
CSARDRVSGVDEQYF

SEQ ID NO: 107787 - protein, 13 aa, Homo sapiens
  CDR3 for alpha chain variable domain of TCR clone 53894 (TRAV26-2, TRAJ43)
CILRAVNNNDMRF

SEQ ID NO: 107788 - protein, 15 aa, Homo sapiens
  CDR3 for beta chain variable domain of TCR clone 53894 (TRBV7-2, TRBJ2-1)
CASTHGIGIYNEQFF

SEQ ID NO: 107789 - protein, 12 aa, Homo sapiens
  CDR3 for alpha chain variable domain of TCR clone 53895 (TRAV23/DV6, TRAJ24)
CAANDSWGNLQF

SEQ ID NO: 107790 - protein, 16 aa, Homo sapiens
  CDR3 for beta chain variable domain of TCR clone 53895 (TRBV12-4, TRBJ2-5)
CASSLSTSGGKETQYF

SEQ ID NO: 107791 - protein, 23 aa, Homo sapiens
  CDR3 for alpha chain variable domain of TCR clone 53896 (TRAV4, TRAJ26)
IPADRESSTLSLPRVYYGQNFVF

SEQ ID NO: 107792 - protein, 16 aa, Homo sapiens
  CDR3 for beta chain variable domain of TCR clone 53896 (TRBV7-2, TRBJ1-2)
CASSSNQDRRGHGYTF

SEQ ID NO: 107793 - protein, 16 aa, Homo sapiens
  CDR3 for alpha chain variable domain of TCR clone 53897 (TRAV30, TRAJ24)
CGTEIVDADSWGKFQF

SEQ ID NO: 107794 - protein, 13 aa, Homo sapiens
  CDR3 for beta chain variable domain of TCR clone 53897 (TRBV4-1, TRBJ2-2)
RASSQENTGELFF

SEQ ID NO: 107795 - protein, 16 aa, Homo sapiens
  CDR3 for alpha chain variable domain of TCR clone 53898 (TRAV3, TRAJ10)
CAVRDMRAGGGNKLTF

SEQ ID NO: 107796 - protein, 12 aa, Homo sapiens
  CDR3 for beta chain variable domain of TCR clone 53898 (TRBV12-4, TRBJ2-7)
CASSLGGYEQYF

SEQ ID NO: 107797 - protein, 13 aa, Homo sapiens
  CDR3 for alpha chain variable domain of TCR clone 53899 (TRAV17, TRAJ26)
CATVDNYGQNFVF

SEQ ID NO: 107798 - protein, 16 aa, Homo sapiens
  CDR3 for beta chain variable domain of TCR clone 53899 (TRBV2, TRBJ2-1)
CASSIGGSLSYNEQFF

SEQ ID NO: 107799 - protein, 13 aa, Homo sapiens
  CDR3 for alpha chain variable domain of TCR clone 53900 (TRAV21, TRAJ9)
CAVRRSGGFKTIF

SEQ ID NO: 107800 - protein, 20 aa, Homo sapiens
  CDR3 for beta chain variable domain of TCR clone 53900 (TRBV28, TRBJ2-1)
CASTPIGRSPGLAGGNERFF

SEQ ID NO: 107801 - protein, 14 aa, Homo sapiens
  CDR3 for alpha chain variable domain of TCR clone 53901 (TRAV26-1, TRAJ39)
CIVRGSRAGNMLTF

SEQ ID NO: 107802 - protein, 15 aa, Homo sapiens
  CDR3 for beta chain variable domain of TCR clone 53901 (TRBV7-9, TRBJ1-5)
CASSQGHQHNQPQHF

SEQ ID NO: 107803 - protein, 13 aa, Homo sapiens
  CDR3 for alpha chain variable domain of TCR clone 53902 (TRAV41, TRAJ45)
CAVRSGGADGLTF

SEQ ID NO: 107804 - protein, 12 aa, Homo sapiens
  CDR3 for beta chain variable domain of TCR clone 53902 (TRBV11-2, TRBJ2-2)
CASSLGGGELFF

SEQ ID NO: 107805 - protein, 12 aa, Homo sapiens
  CDR3 for alpha chain variable domain of TCR clone 53903 (TRAV1-2, TRAJ9)
CAGYTVGFKTIF

SEQ ID NO: 107806 - protein, 15 aa, Homo sapiens
  CDR3 for beta chain variable domain of TCR clone 53903 (TRBV11-2, TRBJ2-1)
CASSPAGQSLNEQFF

SEQ ID NO: 107807 - protein, 13 aa, Homo sapiens
  CDR3 for alpha chain variable domain of TCR clone 53904 (TRAV23/DV6, TRAJ36)
CAVGATGANNLFF

SEQ ID NO: 107808 - protein, 15 aa, Homo sapiens
  CDR3 for beta chain variable domain of TCR clone 53904 (TRBV7-2, TRBJ1-2)
CASSPRAGWNYGYTF

SEQ ID NO: 107809 - protein, 13 aa, Homo sapiens
  CDR3 for alpha chain variable domain of TCR clone 53905 (TRAV2, TRAJ29)
CAVYSSGNTPLVF

SEQ ID NO: 107810 - protein, 12 aa, Homo sapiens
  CDR3 for beta chain variable domain of TCR clone 53905 (TRBV20-1, TRBJ2-1)
CSAQYTYNEQFF

SEQ ID NO: 107811 - protein, 13 aa, Homo sapiens
  CDR3 for alpha chain variable domain of TCR clone 53906 (TRAV13-1, TRAJ13)
CAASKGGYQKVTF

SEQ ID NO: 107812 - protein, 16 aa, Homo sapiens
  CDR3 for beta chain variable domain of TCR clone 53906 (TRBV18, TRBJ1-2)
CASSPPERVTIYGDTF

SEQ ID NO: 107813 - protein, 12 aa, Homo sapiens
  CDR3 for alpha chain variable domain of TCR clone 53907 (TRAV3, TRAJ7)
CADLLWEQQTRF

SEQ ID NO: 107814 - protein, 13 aa, Homo sapiens
  CDR3 for beta chain variable domain of TCR clone 53907 (TRBV7-3, TRBJ2-5)
CARSFRGGETQYF

SEQ ID NO: 107815 - protein, 12 aa, Homo sapiens
  CDR3 for alpha chain variable domain of TCR clone 53908 (TRAV17, TRAJ30)
CVPARRDDKIIF

SEQ ID NO: 107816 - protein, 14 aa, Homo sapiens
  CDR3 for beta chain variable domain of TCR clone 53908 (TRBV7-7, TRBJ2-2)
CASSRDRSTGELFF

SEQ ID NO: 107817 - protein, 12 aa, Homo sapiens
  CDR3 for alpha chain variable domain of TCR clone 53909 (TRAV17, TRAJ57)
CATDGRSEKLVF

SEQ ID NO: 107818 - protein, 12 aa, Homo sapiens
  CDR3 for beta chain variable domain of TCR clone 53909 (TRBV29-1, TRBJ2-2)
CSVDKYTGELFF

SEQ ID NO: 107819 - protein, 12 aa, Homo sapiens
  CDR3 for alpha chain variable domain of TCR clone 53910 (TRAV9-2, TRAJ20)
CALSEGDYKLSF

SEQ ID NO: 107820 - protein, 13 aa, Homo sapiens
  CDR3 for beta chain variable domain of TCR clone 53910 (TRBV11-2, TRBJ1-6)
CASGLAGVSPLHF

SEQ ID NO: 107821 - protein, 13 aa, Homo sapiens
  CDR3 for alpha chain variable domain of TCR clone 53911 (TRAV3, TRAJ27)
SAVRPLGAGKSTF

SEQ ID NO: 107822 - protein, 13 aa, Homo sapiens
  CDR3 for beta chain variable domain of TCR clone 53911 (TRBV7-9, TRBJ2-3)
CASSPGSTDTQYF

SEQ ID NO: 107823 - protein, 16 aa, Homo sapiens
  CDR3 for alpha chain variable domain of TCR clone 53912 (TRAV3, TRAJ21)
CAVRDIERGNFNKFYF

SEQ ID NO: 107824 - protein, 16 aa, Homo sapiens
  CDR3 for beta chain variable domain of TCR clone 53912 (TRBV5-4, TRBJ2-3)
CASQQPGAGGADTQYF

SEQ ID NO: 107825 - protein, 15 aa, Homo sapiens
  CDR3 for alpha chain variable domain of TCR clone 53913 (TRAV26-1, TRAJ22)
CIVRVSFWFCKATDL

SEQ ID NO: 107826 - protein, 13 aa, Homo sapiens
  CDR3 for beta chain variable domain of TCR clone 53913 (TRBV7-9, TRBJ1-2)
CASSLKKNYGYTF

SEQ ID NO: 107827 - protein, 15 aa, Homo sapiens
  CDR3 for alpha chain variable domain of TCR clone 53914 (TRAV20, TRAJ24)
CAVQAAPDGWGKFQF

SEQ ID NO: 107828 - protein, 14 aa, Homo sapiens
  CDR3 for beta chain variable domain of TCR clone 53914 (TRBV20-1, TRBJ1-1)
CSARDRGQGSEAFF

SEQ ID NO: 107829 - protein, 13 aa, Homo sapiens
  CDR3 for alpha chain variable domain of TCR clone 53915 (TRAV35, TRAJ36)
CAGPRIGANNLFF

SEQ ID NO: 107830 - protein, 14 aa, Homo sapiens
  CDR3 for beta chain variable domain of TCR clone 53915 (TRBV28, TRBJ2-5)
CQQPPWSYQETQYF

SEQ ID NO: 107831 - protein, 13 aa, Homo sapiens
  CDR3 for alpha chain variable domain of TCR clone 53916 (TRAV25, TRAJ30)
CAGRVDRDDKIIF

SEQ ID NO: 107832 - protein, 10 aa, Homo sapiens
  CDR3 for beta chain variable domain of TCR clone 53916 (TRBV7-9, TRBJ2-6)
CASSLARGTL

SEQ ID NO: 107833 - protein, 11 aa, Homo sapiens
  CDR3 for alpha chain variable domain of TCR clone 53917 (TRAV21, TRAJ11)
CAVNGYSTLTF

SEQ ID NO: 107834 - protein, 12 aa, Homo sapiens
  CDR3 for beta chain variable domain of TCR clone 53917 (TRBV6-3, TRBJ2-7)
CASSLGRRGLYF

SEQ ID NO: 107835 - protein, 11 aa, Homo sapiens
  CDR3 for alpha chain variable domain of TCR clone 53918 (TRAV3, TRAJ13)
CAVTSYKKVTF

SEQ ID NO: 107836 - protein, 15 aa, Homo sapiens
  CDR3 for beta chain variable domain of TCR clone 53918 (TRBV7-9, TRBJ2-7)
CASSSSGLAVYEQYF

SEQ ID NO: 107837 - protein, 14 aa, Homo sapiens
  CDR3 for alpha chain variable domain of TCR clone 53919 (TRAV12-1, TRAJ17)
CMVNYKAAGNKLTF

SEQ ID NO: 107838 - protein, 17 aa, Homo sapiens
  CDR3 for beta chain variable domain of TCR clone 53919 (TRBV20-1, TRBJ2-1)
CSASSSGLAGSYNEQFF

SEQ ID NO: 107839 - protein, 13 aa, Homo sapiens
  CDR3 for alpha chain variable domain of TCR clone 53920 (TRAV2, TRAJ40)
CAVVTSGAYKYIF

SEQ ID NO: 107840 - protein, 13 aa, Homo sapiens
  CDR3 for beta chain variable domain of TCR clone 53920 (TRBV7-9, TRBJ2-5)
CASLPSGRETQYF

SEQ ID NO: 107841 - protein, 15 aa, Homo sapiens
  CDR3 for alpha chain variable domain of TCR clone 53921 (TRAV26-1, TRAJ56)
CIVRVDNGANSKLTF

SEQ ID NO: 107842 - protein, 15 aa, Homo sapiens
  CDR3 for beta chain variable domain of TCR clone 53921 (TRBV20-1, TRBJ2-7)
CSARDPTDVGHEQYF

SEQ ID NO: 107843 - protein, 15 aa, Homo sapiens
  CDR3 for alpha chain variable domain of TCR clone 53922 (TRAV26-1, TRAJ29)
CIVRVEGSGNTPLVF

SEQ ID NO: 107844 - protein, 14 aa, Homo sapiens
  CDR3 for beta chain variable domain of TCR clone 53922 (TRBV18, TRBJ2-5)
CASSPGVSQETQYI

SEQ ID NO: 107845 - protein, 14 aa, Homo sapiens
  CDR3 for alpha chain variable domain of TCR clone 53923 (TRAV12-2, TRAJ13)
CAVKKTGGYQKVTF

SEQ ID NO: 107846 - protein, 15 aa, Homo sapiens
  CDR3 for beta chain variable domain of TCR clone 53923 (TRBV7-6, TRBJ1-5)
CASSQSSGINQPQHF

SEQ ID NO: 107847 - protein, 13 aa, Homo sapiens
  CDR3 for alpha chain variable domain of TCR clone 53924 (TRAV35, TRAJ42)
CAGFPGSQGDLIF

SEQ ID NO: 107848 - protein, 14 aa, Homo sapiens
  CDR3 for beta chain variable domain of TCR clone 53924 (TRBV4-1, TRBJ2-2)
CASSQAVSTGELFF

SEQ ID NO: 107849 - protein, 14 aa, Homo sapiens
  CDR3 for alpha chain variable domain of TCR clone 53925 (TRAV12-3, TRAJ22)
CAMSLFGSARQLTF

SEQ ID NO: 107850 - protein, 14 aa, Homo sapiens
  CDR3 for beta chain variable domain of TCR clone 53925 (TRBV25-1, TRBJ1-1)
CASTHLGGNTEAFF

SEQ ID NO: 107851 - protein, 13 aa, Homo sapiens
  CDR3 for alpha chain variable domain of TCR clone 53926 (TRAV8-4, TRAJ9)
CAVSDTGGFKTIF

SEQ ID NO: 107852 - protein, 16 aa, Homo sapiens
  CDR3 for beta chain variable domain of TCR clone 53926 (TRBV7-9, TRBJ1-2)
CASSLGFSSGEDGYTF

SEQ ID NO: 107853 - protein, 15 aa, Homo sapiens
  CDR3 for alpha chain variable domain of TCR clone 53927 (TRAV8-4, TRAJ56)
CAVSGGTGDNSKLTF

SEQ ID NO: 107854 - protein, 14 aa, Homo sapiens
  CDR3 for beta chain variable domain of TCR clone 53927 (TRBV7-9, TRBJ2-1)
CASSPKGGADEQFF

SEQ ID NO: 107855 - protein, 18 aa, Homo sapiens
  CDR3 for alpha chain variable domain of TCR clone 53928 (TRAV9-2, TRAJ52)
CALSRHNAGGTSYGKLTF

SEQ ID NO: 107856 - protein, 14 aa, Homo sapiens
  CDR3 for beta chain variable domain of TCR clone 53928 (TRBV19, TRBJ2-1)
CASGKSTQYNEQFF

SEQ ID NO: 107857 - protein, 14 aa, Homo sapiens
  CDR3 for alpha chain variable domain of TCR clone 53929 (TRAV20, TRAJ56)
CAVQFGGANSKLTF

SEQ ID NO: 107858 - protein, 14 aa, Homo sapiens
  CDR3 for beta chain variable domain of TCR clone 53929 (TRBV20-1, TRBJ2-7)
CSAKRGRSSDEQYF

SEQ ID NO: 107859 - protein, 14 aa, Homo sapiens
  CDR3 for alpha chain variable domain of TCR clone 53930 (TRAV26-1, TRAJ38)
CIADNAGNNRKLIW

SEQ ID NO: 107860 - protein, 15 aa, Homo sapiens
  CDR3 for beta chain variable domain of TCR clone 53930 (TRBV4-1, TRBJ1-1)
CASSQEWGHCTEAFF

SEQ ID NO: 107861 - protein, 12 aa, Homo sapiens
  CDR3 for alpha chain variable domain of TCR clone 53931 (TRAV13-1, TRAJ15)
CAASQAGTALIF

SEQ ID NO: 107862 - protein, 14 aa, Homo sapiens
  CDR3 for beta chain variable domain of TCR clone 53931 (TRBV19, TRBJ2-2)
CASNTLHRSGELFF

SEQ ID NO: 107863 - protein, 15 aa, Homo sapiens
  CDR3 for alpha chain variable domain of TCR clone 53932 (TRAV21, TRAJ53)
CATSNSGGSNYKLTF

SEQ ID NO: 107864 - protein, 16 aa, Homo sapiens
  CDR3 for beta chain variable domain of TCR clone 53932 (TRBV9, TRBJ2-1)
CASSVGGGGNYNEQFF

SEQ ID NO: 107865 - protein, 12 aa, Homo sapiens
  CDR3 for alpha chain variable domain of TCR clone 53933 (TRAV16, TRAJ26)
CALRSYGQNSVF

SEQ ID NO: 107866 - protein, 13 aa, Homo sapiens
  CDR3 for beta chain variable domain of TCR clone 53933 (TRBV12-4, TRBJ1-1)
CASSPGTGFEAFF

SEQ ID NO: 107867 - protein, 16 aa, Homo sapiens
  CDR3 for alpha chain variable domain of TCR clone 53934 (TRAV30, TRAJ24)
CGTETVDADSWGKFQF

SEQ ID NO: 107868 - protein, 13 aa, Homo sapiens
  CDR3 for beta chain variable domain of TCR clone 53934 (TRBV20-1, TRBJ1-1)
CSALPGGHTEAFF

SEQ ID NO: 107869 - protein, 15 aa, Homo sapiens
  CDR3 for alpha chain variable domain of TCR clone 53935 (TRAV12-1, TRAJ45)
CVVLSGGGGADGLTF

SEQ ID NO: 107870 - protein, 16 aa, Homo sapiens
  CDR3 for beta chain variable domain of TCR clone 53935 (TRBV6-5, TRBJ2-1)
CASSETLAGHYNEQLF

SEQ ID NO: 107871 - protein, 12 aa, Homo sapiens
  CDR3 for alpha chain variable domain of TCR clone 53936 (TRAV2, TRAJ33)
CAFMDSNYQLIW

SEQ ID NO: 107872 - protein, 13 aa, Homo sapiens
  CDR3 for beta chain variable domain of TCR clone 53936 (TRBV19, TRBJ1-1)
CASTRRGDTEAFF

SEQ ID NO: 107873 - protein, 14 aa, Homo sapiens
  CDR3 for alpha chain variable domain of TCR clone 53937 (TRAV12-3, TRAJ10)
SHLPLTGGGNKLTF

SEQ ID NO: 107874 - protein, 17 aa, Homo sapiens
  CDR3 for beta chain variable domain of TCR clone 53937 (TRBV18, TRBJ1-5)
CQLTTCRVRQNNQPQHF

SEQ ID NO: 107875 - protein, 14 aa, Homo sapiens
  CDR3 for alpha chain variable domain of TCR clone 53938 (TRAV35, TRAJ22)
CAGLRPGSARQLTF

SEQ ID NO: 107876 - protein, 16 aa, Homo sapiens
  CDR3 for beta chain variable domain of TCR clone 53938 (TRBV4-1, TRBJ2-7)
CASSQLRGGTSSTSGR

SEQ ID NO: 107877 - protein, 11 aa, Homo sapiens
  CDR3 for alpha chain variable domain of TCR clone 53939 (TRAV2, TRAJ33)
CAVDSNYQLIW

SEQ ID NO: 107878 - protein, 15 aa, Homo sapiens
  CDR3 for beta chain variable domain of TCR clone 53939 (TRBV28, TRBJ2-3)
CASSPDRQGANTQYF

SEQ ID NO: 107879 - protein, 13 aa, Homo sapiens
  CDR3 for alpha chain variable domain of TCR clone 53940 (TRAV3, TRAJ21)
CAVREPDFNKFYF

SEQ ID NO: 107880 - protein, 15 aa, Homo sapiens
  CDR3 for beta chain variable domain of TCR clone 53940 (TRBV6-6, TRBJ2-7)
CASSYSYGGSYEQYF

SEQ ID NO: 107881 - protein, 23 aa, Homo sapiens
  CDR3 for alpha chain variable domain of TCR clone 53941 (TRAV26-1, )
CIADNAGNNYIQNPDPAVYQLRD

SEQ ID NO: 107882 - protein, 13 aa, Homo sapiens
  CDR3 for beta chain variable domain of TCR clone 53941 (TRBV20-1, TRBJ1-1)
CSARGGGNTEAFF

SEQ ID NO: 107883 - protein, 17 aa, Homo sapiens
  CDR3 for alpha chain variable domain of TCR clone 53942 (TRAV4, TRAJ18)
CLVGERSVGPTLGRLYF

SEQ ID NO: 107884 - protein, 14 aa, Homo sapiens
  CDR3 for beta chain variable domain of TCR clone 53942 (TRBV6-5, TRBJ1-2)
CASSYDGTGGGYTF

SEQ ID NO: 107885 - protein, 11 aa, Homo sapiens
  CDR3 for alpha chain variable domain of TCR clone 53943 (TRAV17, TRAJ43)
CATPRSNDMRF

SEQ ID NO: 107886 - protein, 15 aa, Homo sapiens
  CDR3 for beta chain variable domain of TCR clone 53943 (TRBV2, TRBJ2-3)
CASSDFEKATDTQYF

SEQ ID NO: 107887 - protein, 13 aa, Homo sapiens
  CDR3 for alpha chain variable domain of TCR clone 53944 (TRAV12-1, TRAJ7)
CVVNMRGNNSLAF

SEQ ID NO: 107888 - protein, 15 aa, Homo sapiens
  CDR3 for beta chain variable domain of TCR clone 53944 (TRBV27, TRBJ2-3)
CASSLGLAATDTQYF

SEQ ID NO: 107889 - protein, 11 aa, Homo sapiens
  CDR3 for alpha chain variable domain of TCR clone 53945 (TRAV3, TRAJ21)
CAVGNFNKFYF

SEQ ID NO: 107890 - protein, 14 aa, Homo sapiens
  CDR3 for beta chain variable domain of TCR clone 53945 (TRBV19, TRBJ2-2)
CATTGHANTGELFF

SEQ ID NO: 107891 - protein, 12 aa, Homo sapiens
  CDR3 for alpha chain variable domain of TCR clone 53946 (TRAV8-3, TRAJ20)
CAVGANDYKLSF

SEQ ID NO: 107892 - protein, 16 aa, Homo sapiens
  CDR3 for beta chain variable domain of TCR clone 53946 (TRBV19, TRBJ2-2)
CASRSPGTGATGVLFF

SEQ ID NO: 107893 - protein, 15 aa, Homo sapiens
  CDR3 for alpha chain variable domain of TCR clone 53947 (TRAV3, TRAJ29)
CAVRAPLSGNTPLVF

SEQ ID NO: 107894 - protein, 15 aa, Homo sapiens
  CDR3 for beta chain variable domain of TCR clone 53947 (TRBV28, TRBJ1-1)
CASRIKGGLNTEASF

SEQ ID NO: 107895 - protein, 14 aa, Homo sapiens
  CDR3 for alpha chain variable domain of TCR clone 53948 (TRAV26-2, TRAJ38)
CILYNAGNNRKLMW

SEQ ID NO: 107896 - protein, 14 aa, Homo sapiens
  CDR3 for beta chain variable domain of TCR clone 53948 (TRBV19, TRBJ2-1)
CASPTFVLSGEQFF

SEQ ID NO: 107897 - protein, 12 aa, Homo sapiens
  CDR3 for alpha chain variable domain of TCR clone 53949 (TRAV1-1, TRAJ9)
CAVDTGGFKTIF

SEQ ID NO: 107898 - protein, 14 aa, Homo sapiens
  CDR3 for beta chain variable domain of TCR clone 53949 (TRBV7-8, TRBJ2-5)
CASSATGGQETQYL

SEQ ID NO: 107899 - protein, 14 aa, Homo sapiens
  CDR3 for alpha chain variable domain of TCR clone 53950 (TRAV8-4, TRAJ9)
CAVRINTGGFKTIF

SEQ ID NO: 107900 - protein, 15 aa, Homo sapiens
  CDR3 for beta chain variable domain of TCR clone 53950 (TRBV10-2, TRBJ2-6)
CASSEQGTGVNVLTF

SEQ ID NO: 107901 - protein, 15 aa, Homo sapiens
  CDR3 for alpha chain variable domain of TCR clone 53951 (TRAV2, TRAJ15)
CAVEDRGQAGAALIF

SEQ ID NO: 107902 - protein, 13 aa, Homo sapiens
  CDR3 for beta chain variable domain of TCR clone 53951 (TRBV10-2, TRBJ2-7)
CASGASGGYEQYF

SEQ ID NO: 107903 - protein, 19 aa, Homo sapiens
  CDR3 for alpha chain variable domain of TCR clone 53952 (TRAV17, TRAJ17)
CATDGRPGGIKAAGNKLTF

SEQ ID NO: 107904 - protein, 17 aa, Homo sapiens
  CDR3 for beta chain variable domain of TCR clone 53952 (TRBV12-4, TRBJ1-1)
CASSLSGFRTMNTEAFF

SEQ ID NO: 107905 - protein, 14 aa, Homo sapiens
  CDR3 for alpha chain variable domain of TCR clone 53953 (TRAV1-2, TRAJ8)
CAVREDTGFQKLVF

SEQ ID NO: 107906 - protein, 13 aa, Homo sapiens
  CDR3 for beta chain variable domain of TCR clone 53953 (TRBV19, TRBJ2-2)
CASSIWSTGELFF

SEQ ID NO: 107907 - protein, 13 aa, Homo sapiens
  CDR3 for alpha chain variable domain of TCR clone 53954 (TRAV21, TRAJ27)
CAALNTNAGKSTF

SEQ ID NO: 107908 - protein, 12 aa, Homo sapiens
  CDR3 for beta chain variable domain of TCR clone 53954 (TRBV11-2, TRBJ2-1)
CASSPGNNEQFF

SEQ ID NO: 107909 - protein, 14 aa, Homo sapiens
  CDR3 for alpha chain variable domain of TCR clone 53955 (TRAV1-2, TRAJ16)
CAVNRFSDGQKLLF

SEQ ID NO: 107910 - protein, 14 aa, Homo sapiens
  CDR3 for beta chain variable domain of TCR clone 53955 (TRBV7-2, TRBJ2-3)
CQQLRGGGRDTQYF

SEQ ID NO: 107911 - protein, 14 aa, Homo sapiens
  CDR3 for alpha chain variable domain of TCR clone 53956 (TRAV13-1, TRAJ39)
CAASKNNAGNVLTF

SEQ ID NO: 107912 - protein, 15 aa, Homo sapiens
  CDR3 for beta chain variable domain of TCR clone 53956 (TRBV7-9, TRBJ1-6)
CASSSPGRGNSPLHF

SEQ ID NO: 107913 - protein, 17 aa, Homo sapiens
  CDR3 for alpha chain variable domain of TCR clone 53957 (TRAV1-1, TRAJ13)
CAVRGNLGVTRKLPLEL

SEQ ID NO: 107914 - protein, 13 aa, Homo sapiens
  CDR3 for beta chain variable domain of TCR clone 53957 (TRBV29-1, TRBJ2-1)
CSVEGGRVNEQFF

SEQ ID NO: 107915 - protein, 14 aa, Homo sapiens
  CDR3 for alpha chain variable domain of TCR clone 53958 (TRAV2, TRAJ9)
CAVEDRSGGFKTIF

SEQ ID NO: 107916 - protein, 14 aa, Homo sapiens
  CDR3 for beta chain variable domain of TCR clone 53958 (TRBV4-1, TRBJ1-1)
CASSRSGQSFEAFF

SEQ ID NO: 107917 - protein, 15 aa, Homo sapiens
  CDR3 for alpha chain variable domain of TCR clone 53959 (TRAV3, TRAJ29)
CAVRDPISGNTPLVF

SEQ ID NO: 107918 - protein, 17 aa, Homo sapiens
  CDR3 for beta chain variable domain of TCR clone 53959 (TRBV7-2, TRBJ2-7)
CASSLGTGTSGRYEQYF

SEQ ID NO: 107919 - protein, 15 aa, Homo sapiens
  CDR3 for alpha chain variable domain of TCR clone 53960 (TRAV13-1, TRAJ32)
CAASNGWGCYKQAHL

SEQ ID NO: 107920 - protein, 15 aa, Homo sapiens
  CDR3 for beta chain variable domain of TCR clone 53960 (TRBV20-1, TRBJ1-2)
CSAIRTGAFNYGYTF

SEQ ID NO: 107921 - protein, 15 aa, Homo sapiens
  CDR3 for alpha chain variable domain of TCR clone 53961 (TRAV8-2, TRAJ40)
CVVLGTTAGTYKYIF

SEQ ID NO: 107922 - protein, 16 aa, Homo sapiens
  CDR3 for beta chain variable domain of TCR clone 53961 (TRBV7-3, TRBJ2-1)
CASSLEGYRSYNEQFF

SEQ ID NO: 107923 - protein, 18 aa, Homo sapiens
  CDR3 for alpha chain variable domain of TCR clone 53962 (TRAV21, TRAJ52)
CAVRPSPAGGTSYGKLTF

SEQ ID NO: 107924 - protein, 14 aa, Homo sapiens
  CDR3 for beta chain variable domain of TCR clone 53962 (TRBV12-4, TRBJ1-1)
CASSLGTGGTEAFF

SEQ ID NO: 107925 - protein, 16 aa, Homo sapiens
  CDR3 for alpha chain variable domain of TCR clone 53963 (TRAV3, TRAJ37)
CDVRGKGSGNTGKLIF

SEQ ID NO: 107926 - protein, 13 aa, Homo sapiens
  CDR3 for beta chain variable domain of TCR clone 53963 (TRBV14, TRBJ2-7)
CASSQDRRYEQYF

SEQ ID NO: 107927 - protein, 15 aa, Homo sapiens
  CDR3 for alpha chain variable domain of TCR clone 53964 (TRAV21, TRAJ53)
CATLNSGGSNYKLTF

SEQ ID NO: 107928 - protein, 16 aa, Homo sapiens
  CDR3 for beta chain variable domain of TCR clone 53964 (TRBV9, TRBJ2-1)
CASSVSGGGNYNEQFF

SEQ ID NO: 107929 - protein, 14 aa, Homo sapiens
  CDR3 for alpha chain variable domain of TCR clone 53965 (TRAV8-3, TRAJ39)
CAVGANNAGNMLTF

SEQ ID NO: 107930 - protein, 14 aa, Homo sapiens
  CDR3 for beta chain variable domain of TCR clone 53965 (TRBV19, TRBJ2-1)
CASPTFVLSGEQFF

SEQ ID NO: 107931 - protein, 15 aa, Homo sapiens
  CDR3 for alpha chain variable domain of TCR clone 53966 (TRAV34, TRAJ38)
CGADFTPGNNSKLIW

SEQ ID NO: 107932 - protein, 16 aa, Homo sapiens
  CDR3 for beta chain variable domain of TCR clone 53966 (TRBV12-5, TRBJ2-5)
CASGPRTSGNQETQYF

SEQ ID NO: 107933 - protein, 13 aa, Homo sapiens
  CDR3 for alpha chain variable domain of TCR clone 53967 (TRAV36/DV7, TRAJ34)
CAVGEVNTDKLIF

SEQ ID NO: 107934 - protein, 15 aa, Homo sapiens
  CDR3 for beta chain variable domain of TCR clone 53967 (TRBV6-5, TRBJ1-6)
CASSLGQGFRSPLHF

SEQ ID NO: 107935 - protein, 11 aa, Homo sapiens
  CDR3 for alpha chain variable domain of TCR clone 53968 (TRAV1-2, TRAJ20)
CAVSNDYKLSF

SEQ ID NO: 107936 - protein, 12 aa, Homo sapiens
  CDR3 for beta chain variable domain of TCR clone 53968 (TRBV7-9, TRBJ2-7)
CASSLEGYEQYF

SEQ ID NO: 107937 - protein, 16 aa, Homo sapiens
  CDR3 for alpha chain variable domain of TCR clone 53969 (TRAV26-1, TRAJ52)
CIVSNAGGTSYGELTF

SEQ ID NO: 107938 - protein, 16 aa, Homo sapiens
  CDR3 for beta chain variable domain of TCR clone 53969 (TRBV5-1, TRBJ2-1)
CASSLEGRGLYNEQFF

SEQ ID NO: 107939 - protein, 14 aa, Homo sapiens
  CDR3 for alpha chain variable domain of TCR clone 53970 (TRAV13-1, TRAJ20)
CAARPGSNDYNLSF

SEQ ID NO: 107940 - protein, 13 aa, Homo sapiens
  CDR3 for beta chain variable domain of TCR clone 53970 (TRBV20-1, TRBJ1-1)
CSAPPGGHTEAFF

SEQ ID NO: 107941 - protein, 13 aa, Homo sapiens
  CDR3 for alpha chain variable domain of TCR clone 53971 (TRAV13-2, TRAJ48)
CAEMDFGNEKLTF

SEQ ID NO: 107942 - protein, 15 aa, Homo sapiens
  CDR3 for beta chain variable domain of TCR clone 53971 (TRBV7-9, TRBJ1-6)
CASSSRGRGNSPLHF

SEQ ID NO: 107943 - protein, 15 aa, Homo sapiens
  CDR3 for alpha chain variable domain of TCR clone 53972 (TRAV27, TRAJ45)
CAPVDSGGGADGLTF

SEQ ID NO: 107944 - protein, 15 aa, Homo sapiens
  CDR3 for beta chain variable domain of TCR clone 53972 (TRBV5-1, TRBJ1-1)
CASSVDRLGNTEASF

SEQ ID NO: 107945 - protein, 15 aa, Homo sapiens
  CDR3 for alpha chain variable domain of TCR clone 53973 (TRAV34, TRAJ38)
CGADFTPGNNRKLIW

SEQ ID NO: 107946 - protein, 14 aa, Homo sapiens
  CDR3 for beta chain variable domain of TCR clone 53973 (TRBV4-1, TRBJ2-3)
CASSQDWSTDTQYF

SEQ ID NO: 107947 - protein, 16 aa, Homo sapiens
  CDR3 for alpha chain variable domain of TCR clone 53974 (TRAV3, TRAJ37)
CAVRGKGSGNTGKLIF

SEQ ID NO: 107948 - protein, 12 aa, Homo sapiens
  CDR3 for beta chain variable domain of TCR clone 53974 (TRBV29-1, TRBJ2-3)
CSVTGGADTQYF

SEQ ID NO: 107949 - protein, 13 aa, Homo sapiens
  CDR3 for alpha chain variable domain of TCR clone 53975 (TRAV12-1, TRAJ42)
CGGVGGSQGNLIF

SEQ ID NO: 107950 - protein, 15 aa, Homo sapiens
  CDR3 for beta chain variable domain of TCR clone 53975 (TRBV5-4, TRBJ1-4)
CASSSFGTGNEKLFS

SEQ ID NO: 107951 - protein, 12 aa, Homo sapiens
  CDR3 for alpha chain variable domain of TCR clone 53976 (TRAV21, TRAJ11)
CAATSGHSTLTF

SEQ ID NO: 107952 - protein, 14 aa, Homo sapiens
  CDR3 for beta chain variable domain of TCR clone 53976 (TRBV20-1, TRBJ2-7)
CSAPELAGVGEQYF

SEQ ID NO: 107953 - protein, 14 aa, Homo sapiens
  CDR3 for alpha chain variable domain of TCR clone 53977 (TRAV30, TRAJ33)
CGTVAPRSNYQLIW

SEQ ID NO: 107954 - protein, 16 aa, Homo sapiens
  CDR3 for beta chain variable domain of TCR clone 53977 (TRBV3-1, TRBJ2-5)
CASGPGQFNGFGTQYF

SEQ ID NO: 107955 - protein, 15 aa, Homo sapiens
  CDR3 for alpha chain variable domain of TCR clone 53978 (TRAV3, TRAJ20)
CAVRDIKLSDYKHSF

SEQ ID NO: 107956 - protein, 15 aa, Homo sapiens
  CDR3 for beta chain variable domain of TCR clone 53978 (TRBV7-9, TRBJ1-6)
CASSSPGRGNSPLHF

SEQ ID NO: 107957 - protein, 12 aa, Homo sapiens
  CDR3 for alpha chain variable domain of TCR clone 53979 (TRAV3, TRAJ39)
CAVIELSNMLTF

SEQ ID NO: 107958 - protein, 14 aa, Homo sapiens
  CDR3 for beta chain variable domain of TCR clone 53979 (TRBV7-8, TRBJ2-3)
CASSFPDGQDTQYF

SEQ ID NO: 107959 - protein, 14 aa, Homo sapiens
  CDR3 for alpha chain variable domain of TCR clone 53980 (TRAV1-2, TRAJ16)
CAVNRFSDGQKLIF

SEQ ID NO: 107960 - protein, 12 aa, Homo sapiens
  CDR3 for beta chain variable domain of TCR clone 53980 (TRBV28, TRBJ2-6)
CAIQAGANVLTF

SEQ ID NO: 107961 - protein, 11 aa, Homo sapiens
  CDR3 for alpha chain variable domain of TCR clone 53981 (TRAV12-3, TRAJ43)
CAMSVSNDMRF

SEQ ID NO: 107962 - protein, 16 aa, Homo sapiens
  CDR3 for beta chain variable domain of TCR clone 53981 (TRBV7-9, TRBJ2-1)
CASSDVAGGSYNEQFF

SEQ ID NO: 107963 - protein, 15 aa, Homo sapiens
  CDR3 for alpha chain variable domain of TCR clone 53982 (TRAV26-1, TRAJ44)
CIVSANTGTASKLTF

SEQ ID NO: 107964 - protein, 16 aa, Homo sapiens
  CDR3 for beta chain variable domain of TCR clone 53982 (TRBV7-7, TRBJ2-1)
CASSLASGTSYNEQFF

SEQ ID NO: 107965 - protein, 15 aa, Homo sapiens
  CDR3 for alpha chain variable domain of TCR clone 53983 (TRAV8-3, TRAJ15)
CAVGASNQAGTALIF

SEQ ID NO: 107966 - protein, 14 aa, Homo sapiens
  CDR3 for beta chain variable domain of TCR clone 53983 (TRBV20-1, TRBJ2-1)
CSPNDEASYNEQFF

SEQ ID NO: 107967 - protein, 15 aa, Homo sapiens
  CDR3 for alpha chain variable domain of TCR clone 53984 (TRAV38-1, TRAJ37)
CAFMHGSGNTGKLIF

SEQ ID NO: 107968 - protein, 12 aa, Homo sapiens
  CDR3 for beta chain variable domain of TCR clone 53984 (TRBV7-9, TRBJ2-7)
CASSFGSYEQYF

SEQ ID NO: 107969 - protein, 14 aa, Homo sapiens
  CDR3 for alpha chain variable domain of TCR clone 53985 (TRAV8-4, TRAJ13)
CPVTLSGGYQKVTF

SEQ ID NO: 107970 - protein, 14 aa, Homo sapiens
  CDR3 for beta chain variable domain of TCR clone 53985 (TRBV7-2, TRBJ1-2)
CASSQTGSTYGYTF

SEQ ID NO: 107971 - protein, 15 aa, Homo sapiens
  CDR3 for alpha chain variable domain of TCR clone 53986 (TRAV20, TRAJ43)
CAVQTGKSSNNDMRF

SEQ ID NO: 107972 - protein, 14 aa, Homo sapiens
  CDR3 for beta chain variable domain of TCR clone 53986 (TRBV27, TRBJ2-1)
CASRHLGGGKEQFF

SEQ ID NO: 107973 - protein, 13 aa, Homo sapiens
  CDR3 for alpha chain variable domain of TCR clone 53987 (TRAV25, TRAJ17)
CAGLRAAGNKLTF

SEQ ID NO: 107974 - protein, 13 aa, Homo sapiens
  CDR3 for beta chain variable domain of TCR clone 53987 (TRBV20-1, TRBJ1-1)
CSARGGGNTEAFF

SEQ ID NO: 107975 - protein, 13 aa, Homo sapiens
  CDR3 for alpha chain variable domain of TCR clone 53988 (TRAV20, TRAJ20)
CAVQAGSGYKLSF

SEQ ID NO: 107976 - protein, 13 aa, Homo sapiens
  CDR3 for beta chain variable domain of TCR clone 53988 (TRBV3-1, TRBJ2-3)
CASIQGGGDTQYF

SEQ ID NO: 107977 - protein, 11 aa, Homo sapiens
  CDR3 for alpha chain variable domain of TCR clone 53989 (TRAV1-1, TRAJ23)
CAVRQGGKLIF

SEQ ID NO: 107978 - protein, 22 aa, Homo sapiens
  CDR3 for beta chain variable domain of TCR clone 53989 (TRBV29-1, TRBJ2-5)
TVSNMSPEDSSIYLCSAGTQYF

SEQ ID NO: 107979 - protein, 14 aa, Homo sapiens
  CDR3 for alpha chain variable domain of TCR clone 53990 (TRAV35, TRAJ33)
CAGSSQDSNYQLIW

SEQ ID NO: 107980 - protein, 14 aa, Homo sapiens
  CDR3 for beta chain variable domain of TCR clone 53990 (TRBV7-2, TRBJ2-7)
CASSPKTSFYEQYF

SEQ ID NO: 107981 - protein, 12 aa, Homo sapiens
  CDR3 for alpha chain variable domain of TCR clone 53991 (TRAV16, TRAJ10)
CSRTGGGNKLTF

SEQ ID NO: 107982 - protein, 14 aa, Homo sapiens
  CDR3 for beta chain variable domain of TCR clone 53991 (TRBV7-2, TRBJ2-7)
CANRSQGAAYEQYF

SEQ ID NO: 107983 - protein, 11 aa, Homo sapiens
  CDR3 for alpha chain variable domain of TCR clone 53992 (TRAV17, TRAJ49)
CATDAGNQFYF

SEQ ID NO: 107984 - protein, 16 aa, Homo sapiens
  CDR3 for beta chain variable domain of TCR clone 53992 (TRBV7-2, TRBJ1-2)
CASSPTSGTSLGGYSF

SEQ ID NO: 107985 - protein, 11 aa, Homo sapiens
  CDR3 for alpha chain variable domain of TCR clone 53993 (TRAV12-1, TRAJ37)
CVVNTPGKLIF

SEQ ID NO: 107986 - protein, 13 aa, Homo sapiens
  CDR3 for beta chain variable domain of TCR clone 53993 (TRBV12-4, TRBJ1-5)
CASSPDGAQPQHF

SEQ ID NO: 107987 - protein, 13 aa, Homo sapiens
  CDR3 for alpha chain variable domain of TCR clone 53994 (TRAV1-2, TRAJ9)
CAAINTGGFKTIF

SEQ ID NO: 107988 - protein, 13 aa, Homo sapiens
  CDR3 for beta chain variable domain of TCR clone 53994 (TRBV19, TRBJ1-2)
CASSVPGQDGYTF

SEQ ID NO: 107989 - protein, 13 aa, Homo sapiens
  CDR3 for alpha chain variable domain of TCR clone 53995 (TRAV2, TRAJ21)
CAVEDLHFNKFYF

SEQ ID NO: 107990 - protein, 15 aa, Homo sapiens
  CDR3 for beta chain variable domain of TCR clone 53995 (TRBV28, TRBJ2-5)
CASSPGQGSIETQYF

SEQ ID NO: 107991 - protein, 15 aa, Homo sapiens
  CDR3 for alpha chain variable domain of TCR clone 53996 (TRAV3, TRAJ22)
CAVIDRGGSARQLTF

SEQ ID NO: 107992 - protein, 16 aa, Homo sapiens
  CDR3 for beta chain variable domain of TCR clone 53996 (TRBV5-4, TRBJ2-3)
CASQQPGAGGADTQYF

SEQ ID NO: 107993 - protein, 16 aa, Homo sapiens
  CDR3 for alpha chain variable domain of TCR clone 53997 (TRAV25, TRAJ7)
TDVGTYFCPGNNRLAF

SEQ ID NO: 107994 - protein, 14 aa, Homo sapiens
  CDR3 for beta chain variable domain of TCR clone 53997 (TRBV11-2, TRBJ2-2)
CASSLGLRVRELFF

SEQ ID NO: 107995 - protein, 18 aa, Homo sapiens
  CDR3 for alpha chain variable domain of TCR clone 53998 (TRAV27, TRAJ36)
PSLVIQASTPAGANNLFF

SEQ ID NO: 107996 - protein, 13 aa, Homo sapiens
  CDR3 for beta chain variable domain of TCR clone 53998 (TRBV7-9, TRBJ2-3)
CASSPGSTDTQYF

SEQ ID NO: 107997 - protein, 16 aa, Homo sapiens
  CDR3 for alpha chain variable domain of TCR clone 53999 (TRAV3, TRAJ5)
CAVRNLMDTGRIALTF

SEQ ID NO: 107998 - protein, 16 aa, Homo sapiens
  CDR3 for beta chain variable domain of TCR clone 53999 (TRBV4-2, TRBJ2-7)
CASSQEGLANSYEQYF

SEQ ID NO: 107999 - protein, 14 aa, Homo sapiens
  CDR3 for alpha chain variable domain of TCR clone 54000 (TRAV13-2, TRAJ15)
CAENPNQAGTALIF

SEQ ID NO: 108000 - protein, 16 aa, Homo sapiens
  CDR3 for beta chain variable domain of TCR clone 54000 (TRBV12-4, TRBJ1-2)
CASSPTATGKTRGHTF

SEQ ID NO: 108001 - protein, 13 aa, Homo sapiens
  CDR3 for alpha chain variable domain of TCR clone 54001 (TRAV12-3, TRAJ43)
CAMIRPNNDDMRF

SEQ ID NO: 108002 - protein, 12 aa, Homo sapiens
  CDR3 for beta chain variable domain of TCR clone 54001 (TRBV11-2, TRBJ2-5)
CASSLGQETQYF

SEQ ID NO: 108003 - protein, 15 aa, Homo sapiens
  CDR3 for alpha chain variable domain of TCR clone 54002 (TRAV8-3, TRAJ45)
CASSYSGGGADGLTF

SEQ ID NO: 108004 - protein, 12 aa, Homo sapiens
  CDR3 for beta chain variable domain of TCR clone 54002 (TRBV28, TRBJ2-3)
CASSLYRDTQYF

SEQ ID NO: 108005 - protein, 13 aa, Homo sapiens
  CDR3 for alpha chain variable domain of TCR clone 54003 (TRAV12-2, TRAJ37)
CAGGSGNTCKLIF

SEQ ID NO: 108006 - protein, 13 aa, Homo sapiens
  CDR3 for beta chain variable domain of TCR clone 54003 (TRBV4-1, TRBJ2-2)
CASSQENTGELFF

SEQ ID NO: 108007 - protein, 11 aa, Homo sapiens
  CDR3 for alpha chain variable domain of TCR clone 54004 (TRAV1-2, TRAJ31)
CAVKNNARLMF

SEQ ID NO: 108008 - protein, 13 aa, Homo sapiens
  CDR3 for beta chain variable domain of TCR clone 54004 (TRBV4-1, TRBJ2-2)
CASSQENTGELFF

SEQ ID NO: 108009 - protein, 13 aa, Homo sapiens
  CDR3 for alpha chain variable domain of TCR clone 54005 (TRAV13-2, TRAJ48)
CAEMDFGNEKLTF

SEQ ID NO: 108010 - protein, 15 aa, Homo sapiens
  CDR3 for beta chain variable domain of TCR clone 54005 (TRBV7-9, TRBJ1-6)
CASSSPGRGNLPLHF

SEQ ID NO: 108011 - protein, 16 aa, Homo sapiens
  CDR3 for alpha chain variable domain of TCR clone 54006 (TRAV21, TRAJ37)
CAVRTAGSSNTGKLIF

SEQ ID NO: 108012 - protein, 13 aa, Homo sapiens
  CDR3 for beta chain variable domain of TCR clone 54006 (TRBV7-9, TRBJ2-5)
CASIPSGRETQYF

SEQ ID NO: 108013 - protein, 14 aa, Homo sapiens
  CDR3 for alpha chain variable domain of TCR clone 54007 (TRAV12-1, TRAJ30)
CVVNTGNRDDKIIF

SEQ ID NO: 108014 - protein, 14 aa, Homo sapiens
  CDR3 for beta chain variable domain of TCR clone 54007 (TRBV7-9, TRBJ2-5)
CASSPRPSGETQYF

SEQ ID NO: 108015 - protein, 12 aa, Homo sapiens
  CDR3 for alpha chain variable domain of TCR clone 54008 (TRAV21, TRAJ39)
CAADNAGNMLTF

SEQ ID NO: 108016 - protein, 13 aa, Homo sapiens
  CDR3 for beta chain variable domain of TCR clone 54008 (TRBV12-4, TRBJ1-1)
CASSPGTGLEAFF

SEQ ID NO: 108017 - protein, 13 aa, Homo sapiens
  CDR3 for alpha chain variable domain of TCR clone 54009 (TRAV12-3, TRAJ31)
CAMSANNNARLMF

SEQ ID NO: 108018 - protein, 16 aa, Homo sapiens
  CDR3 for beta chain variable domain of TCR clone 54009 (TRBV7-9, TRBJ1-2)
CASSLGFSSGEDVYTF

SEQ ID NO: 108019 - protein, 15 aa, Homo sapiens
  CDR3 for alpha chain variable domain of TCR clone 54010 (TRAV1-2, TRAJ12)
CADARWMDSSYKFIF

SEQ ID NO: 108020 - protein, 11 aa, Homo sapiens
  CDR3 for beta chain variable domain of TCR clone 54010 (TRBV29-1, TRBJ2-5)
CSEDRTGTQYF

SEQ ID NO: 108021 - protein, 11 aa, Homo sapiens
  CDR3 for alpha chain variable domain of TCR clone 54011 (TRAV2, TRAJ33)
CAVDSNYRLIW

SEQ ID NO: 108022 - protein, 14 aa, Homo sapiens
  CDR3 for beta chain variable domain of TCR clone 54011 (TRBV11-2, TRBJ2-3)
CASSRLARTDTQYF

SEQ ID NO: 108023 - protein, 15 aa, Homo sapiens
  CDR3 for alpha chain variable domain of TCR clone 54012 (TRAV13-2, TRAJ50)
CAEEPLKTSYDKVIF

SEQ ID NO: 108024 - protein, 15 aa, Homo sapiens
  CDR3 for beta chain variable domain of TCR clone 54012 (TRBV20-1, TRBJ2-7)
CSARDRVSGMDEQYF

SEQ ID NO: 108025 - protein, 17 aa, Homo sapiens
  CDR3 for alpha chain variable domain of TCR clone 54013 (TRAV3, TRAJ38)
CAVRDFLNAGNNRKLIW

SEQ ID NO: 108026 - protein, 13 aa, Homo sapiens
  CDR3 for beta chain variable domain of TCR clone 54013 (TRBV23-1, TRBJ1-4)
CASRGKFNEKLFF

SEQ ID NO: 108027 - protein, 14 aa, Homo sapiens
  CDR3 for alpha chain variable domain of TCR clone 54014 (TRAV8-2, TRAJ4)
CVVSPSGGYNKLSF

SEQ ID NO: 108028 - protein, 15 aa, Homo sapiens
  CDR3 for beta chain variable domain of TCR clone 54014 (TRBV4-1, TRBJ1-4)
CASSDTGGTNEKLFF

SEQ ID NO: 108029 - protein, 14 aa, Homo sapiens
  CDR3 for alpha chain variable domain of TCR clone 54015 (TRAV12-2, TRAJ36)
CAVKISTGASNLFF

SEQ ID NO: 108030 - protein, 14 aa, Homo sapiens
  CDR3 for beta chain variable domain of TCR clone 54015 (TRBV25-1, TRBJ1-2)
CASSDTTGVVGYTF

SEQ ID NO: 108031 - protein, 17 aa, Homo sapiens
  CDR3 for alpha chain variable domain of TCR clone 54016 (TRAV26-1, TRAJ53)
CIVRVDDSGGSNYKLTF

SEQ ID NO: 108032 - protein, 19 aa, Homo sapiens
  CDR3 for beta chain variable domain of TCR clone 54016 (TRBV25-1, TRBJ2-2)
CAILVYRVDRGRKTGELLF

SEQ ID NO: 108033 - protein, 14 aa, Homo sapiens
  CDR3 for alpha chain variable domain of TCR clone 54017 (TRAV26-1, TRAJ38)
CIADNAGNNRKLIW

SEQ ID NO: 108034 - protein, 14 aa, Homo sapiens
  CDR3 for beta chain variable domain of TCR clone 54017 (TRBV4-1, TRBJ2-2)
CASSQAVNTGELFS

SEQ ID NO: 108035 - protein, 14 aa, Homo sapiens
  CDR3 for alpha chain variable domain of TCR clone 54018 (TRAV12-2, TRAJ44)
CAVNPAGTASKLTF

SEQ ID NO: 108036 - protein, 15 aa, Homo sapiens
  CDR3 for beta chain variable domain of TCR clone 54018 (TRBV7-3, TRBJ2-1)
CASSPTGGGEVEQFF

SEQ ID NO: 108037 - protein, 12 aa, Homo sapiens
  CDR3 for alpha chain variable domain of TCR clone 54019 (TRAV13-1, TRAJ21)
CAAKEGFNKFYF

SEQ ID NO: 108038 - protein, 19 aa, Homo sapiens
  CDR3 for beta chain variable domain of TCR clone 54019 (TRBV25-1, TRBJ2-2)
CAILVYRVDRGRKTGELFF

SEQ ID NO: 108039 - protein, 18 aa, Homo sapiens
  CDR3 for alpha chain variable domain of TCR clone 54020 (TRAV21, TRAJ52)
CAVRPSPAGGTSYGKLTF

SEQ ID NO: 108040 - protein, 12 aa, Homo sapiens
  CDR3 for beta chain variable domain of TCR clone 54020 (TRBV7-3, TRBJ1-1)
CQQPGLGAEAFF

SEQ ID NO: 108041 - protein, 15 aa, Homo sapiens
  CDR3 for alpha chain variable domain of TCR clone 54021 (TRAV17, TRAJ4)
CATGTWSGGYNKLIF

SEQ ID NO: 108042 - protein, 13 aa, Homo sapiens
  CDR3 for beta chain variable domain of TCR clone 54021 (TRBV7-3, TRBJ1-1)
CASSQDWGAEAFF

SEQ ID NO: 108043 - protein, 15 aa, Homo sapiens
  CDR3 for alpha chain variable domain of TCR clone 54022 (TRAV12-2, TRAJ53)
CAVNGGGGSNYKLTF

SEQ ID NO: 108044 - protein, 17 aa, Homo sapiens
  CDR3 for beta chain variable domain of TCR clone 54022 (TRBV13, TRBJ2-3)
CASSLSRVAGGRNTQYF

SEQ ID NO: 108045 - protein, 14 aa, Homo sapiens
  CDR3 for alpha chain variable domain of TCR clone 54023 (TRAV26-1, TRAJ34)
CIVRVAYNTDKLIF

SEQ ID NO: 108046 - protein, 17 aa, Homo sapiens
  CDR3 for beta chain variable domain of TCR clone 54023 (TRBV11-2, TRBJ2-1)
CASSLYPPGVEYNEQFF

SEQ ID NO: 108047 - protein, 14 aa, Homo sapiens
  CDR3 for alpha chain variable domain of TCR clone 54024 (TRAV8-2, TRAJ4)
CVVSPSGGYNKLIF

SEQ ID NO: 108048 - protein, 14 aa, Homo sapiens
  CDR3 for beta chain variable domain of TCR clone 54024 (TRBV25-1, TRBJ1-1)
CASTHLGGNTEAFF

SEQ ID NO: 108049 - protein, 13 aa, Homo sapiens
  CDR3 for alpha chain variable domain of TCR clone 54025 (TRAV1-2, TRAJ12)
CAVSMDSSYKLIF

SEQ ID NO: 108050 - protein, 18 aa, Homo sapiens
  CDR3 for beta chain variable domain of TCR clone 54025 (TRBV12-4, TRBJ2-2)
CASSLVAGTRGRTGELFF

SEQ ID NO: 108051 - protein, 14 aa, Homo sapiens
  CDR3 for alpha chain variable domain of TCR clone 54026 (TRAV8-3, TRAJ4)
CAVGASGGYNKLIL

SEQ ID NO: 108052 - protein, 16 aa, Homo sapiens
  CDR3 for beta chain variable domain of TCR clone 54026 (TRBV4-3, TRBJ2-2)
CASSHLQGSGTGELFF

SEQ ID NO: 108053 - protein, 12 aa, Homo sapiens
  CDR3 for alpha chain variable domain of TCR clone 54027 (TRAV16, TRAJ12)
CAHGDSSYKLIF

SEQ ID NO: 108054 - protein, 12 aa, Homo sapiens
  CDR3 for beta chain variable domain of TCR clone 54027 (TRBV28, TRBJ2-1)
RASSRLVGEQFF

SEQ ID NO: 108055 - protein, 13 aa, Homo sapiens
  CDR3 for alpha chain variable domain of TCR clone 54028 (TRAV20, TRAJ37)
CAGSSSNTGKLIF

SEQ ID NO: 108056 - protein, 11 aa, Homo sapiens
  CDR3 for beta chain variable domain of TCR clone 54028 (TRBV12-4, TRBJ2-3)
CASTATDTQYF

SEQ ID NO: 108057 - protein, 11 aa, Homo sapiens
  CDR3 for alpha chain variable domain of TCR clone 54029 (TRAV12-3, TRAJ49)
CAANTGNQFYF

SEQ ID NO: 108058 - protein, 15 aa, Homo sapiens
  CDR3 for beta chain variable domain of TCR clone 54029 (TRBV11-2, TRBJ2-1)
CASSLGTSRLNEQFF

SEQ ID NO: 108059 - protein, 13 aa, Homo sapiens
  CDR3 for alpha chain variable domain of TCR clone 54030 (TRAV1-1, TRAJ9)
CAAKNTGDFKTIF

SEQ ID NO: 108060 - protein, 14 aa, Homo sapiens
  CDR3 for beta chain variable domain of TCR clone 54030 (TRBV20-1, TRBJ2-1)
CSAQIGGSANEQFF

SEQ ID NO: 108061 - protein, 12 aa, Homo sapiens
  CDR3 for alpha chain variable domain of TCR clone 54031 (TRAV13-1, TRAJ21)
CAAKEGFNKFSF

SEQ ID NO: 108062 - protein, 14 aa, Homo sapiens
  CDR3 for beta chain variable domain of TCR clone 54031 (TRBV5-4, TRBJ1-1)
CASSLDSRRDEAFF

SEQ ID NO: 108063 - protein, 12 aa, Homo sapiens
  CDR3 for alpha chain variable domain of TCR clone 54032 (TRAV21, TRAJ31)
CVLAWNNARLMF

SEQ ID NO: 108064 - protein, 16 aa, Homo sapiens
  CDR3 for beta chain variable domain of TCR clone 54032 (TRBV27, TRBJ2-5)
CASSFGPGGTKETQYF

SEQ ID NO: 108065 - protein, 12 aa, Homo sapiens
  CDR3 for alpha chain variable domain of TCR clone 54033 (TRAV12-1, TRAJ34)
CVVTLNTDKLIF

SEQ ID NO: 108066 - protein, 14 aa, Homo sapiens
  CDR3 for beta chain variable domain of TCR clone 54033 (TRBV19, TRBJ1-1)
CASLRTGLNTEAFF

SEQ ID NO: 108067 - protein, 11 aa, Homo sapiens
  CDR3 for alpha chain variable domain of TCR clone 54034 (TRAV12-1, TRAJ31)
CVVNGDARLMF

SEQ ID NO: 108068 - protein, 15 aa, Homo sapiens
  CDR3 for beta chain variable domain of TCR clone 54034 (TRBV19, TRBJ2-4)
CASRGPRRGENIQYF

SEQ ID NO: 108069 - protein, 12 aa, Homo sapiens
  CDR3 for alpha chain variable domain of TCR clone 54035 (TRAV21, TRAJ49)
CAVNDGGNQFYF

SEQ ID NO: 108070 - protein, 14 aa, Homo sapiens
  CDR3 for beta chain variable domain of TCR clone 54035 (TRBV18, TRBJ2-7)
CAGSPRGGSYEQYL

SEQ ID NO: 108071 - protein, 11 aa, Homo sapiens
  CDR3 for alpha chain variable domain of TCR clone 54036 (TRAV17, TRAJ21)
CATGNFNKFYF

SEQ ID NO: 108072 - protein, 15 aa, Homo sapiens
  CDR3 for beta chain variable domain of TCR clone 54036 (TRBV5-1, TRBJ2-7)
CASSLGDFTTYEQYF

SEQ ID NO: 108073 - protein, 15 aa, Homo sapiens
  CDR3 for alpha chain variable domain of TCR clone 54037 (TRAV8-3, TRAJ40)
CAAPSLGSGTCKYIF

SEQ ID NO: 108074 - protein, 16 aa, Homo sapiens
  CDR3 for beta chain variable domain of TCR clone 54037 (TRBV7-3, TRBJ2-3)
CASSLSGYRPEDTQYF

SEQ ID NO: 108075 - protein, 12 aa, Homo sapiens
  CDR3 for alpha chain variable domain of TCR clone 54038 (TRAV13-1, TRAJ21)
CAAKEGFNKFYF

SEQ ID NO: 108076 - protein, 14 aa, Homo sapiens
  CDR3 for beta chain variable domain of TCR clone 54038 (TRBV5-4, TRBJ1-1)
CASSLDSRRDVAFF

SEQ ID NO: 108077 - protein, 16 aa, Homo sapiens
  CDR3 for alpha chain variable domain of TCR clone 54039 (TRAV16, TRAJ4)
CALSRMFSGGYNKLIF

SEQ ID NO: 108078 - protein, 15 aa, Homo sapiens
  CDR3 for beta chain variable domain of TCR clone 54039 (TRBV4-1, TRBJ1-4)
CAGSGTGGTNEKLFF

SEQ ID NO: 108079 - protein, 16 aa, Homo sapiens
  CDR3 for alpha chain variable domain of TCR clone 54040 (TRAV12-2, TRAJ40)
CAVIRGGTSGTYKYIF

SEQ ID NO: 108080 - protein, 15 aa, Homo sapiens
  CDR3 for beta chain variable domain of TCR clone 54040 (TRBV9, TRBJ1-6)
CASSVAGTGDSPLHF

SEQ ID NO: 108081 - protein, 12 aa, Homo sapiens
  CDR3 for alpha chain variable domain of TCR clone 54041 (TRAV36/DV7, TRAJ26)
CAVDNYGQNFVF

SEQ ID NO: 108082 - protein, 14 aa, Homo sapiens
  CDR3 for beta chain variable domain of TCR clone 54041 (TRBV19, TRBJ2-1)
CASPTFVLSGEQFF

SEQ ID NO: 108083 - protein, 13 aa, Homo sapiens
  CDR3 for alpha chain variable domain of TCR clone 54042 (TRAV17, TRAJ26)
CATVDNYGQNFVF

SEQ ID NO: 108084 - protein, 16 aa, Homo sapiens
  CDR3 for beta chain variable domain of TCR clone 54042 (TRBV2, TRBJ2-1)
CASSVGGPLSYNEQFF

SEQ ID NO: 108085 - protein, 11 aa, Homo sapiens
  CDR3 for alpha chain variable domain of TCR clone 54043 (TRAV21, TRAJ34)
CAHYNTDKLIF

SEQ ID NO: 108086 - protein, 12 aa, Homo sapiens
  CDR3 for beta chain variable domain of TCR clone 54043 (TRBV20-1, TRBJ2-1)
CSAQYTYNEQFF

SEQ ID NO: 108087 - protein, 13 aa, Homo sapiens
  CDR3 for alpha chain variable domain of TCR clone 54044 (TRAV3, TRAJ33)
CAVRDRSNYQLTW

SEQ ID NO: 108088 - protein, 16 aa, Homo sapiens
  CDR3 for beta chain variable domain of TCR clone 54044 (TRBV4-2, TRBJ2-7)
CASSQDRGTSSYEQYF

SEQ ID NO: 108089 - protein, 12 aa, Homo sapiens
  CDR3 for alpha chain variable domain of TCR clone 54045 (TRAV12-2, TRAJ8)
CAVNKGFQKLVF

SEQ ID NO: 108090 - protein, 15 aa, Homo sapiens
  CDR3 for beta chain variable domain of TCR clone 54045 (TRBV7-8, TRBJ1-5)
CASSLERRGLEPQHF

SEQ ID NO: 108091 - protein, 15 aa, Homo sapiens
  CDR3 for alpha chain variable domain of TCR clone 54046 (TRAV17, TRAJ56)
CATDATPGANSKLTF

SEQ ID NO: 108092 - protein, 15 aa, Homo sapiens
  CDR3 for beta chain variable domain of TCR clone 54046 (TRBV6-3, TRBJ2-2)
CASSRFGGNTGELFF

SEQ ID NO: 108093 - protein, 11 aa, Homo sapiens
  CDR3 for alpha chain variable domain of TCR clone 54047 (TRAV1-2, TRAJ40)
CAVPGTYKYIF

SEQ ID NO: 108094 - protein, 16 aa, Homo sapiens
  CDR3 for beta chain variable domain of TCR clone 54047 (TRBV29-1, TRBJ2-7)
CSVVVVGTSGSYEQYF

SEQ ID NO: 108095 - protein, 14 aa, Homo sapiens
  CDR3 for alpha chain variable domain of TCR clone 54048 (TRAV12-2, TRAJ5)
CAVNRSTGRRALTF

SEQ ID NO: 108096 - protein, 14 aa, Homo sapiens
  CDR3 for beta chain variable domain of TCR clone 54048 (TRBV4-1, TRBJ2-2)
CASSQAVNTGELFF

SEQ ID NO: 108097 - protein, 12 aa, Homo sapiens
  CDR3 for alpha chain variable domain of TCR clone 54049 (TRAV8-4, TRAJ43)
CAVSVNNNDMRF

SEQ ID NO: 108098 - protein, 14 aa, Homo sapiens
  CDR3 for beta chain variable domain of TCR clone 54049 (TRBV11-2, TRBJ1-2)
CASSLGTANYGYSF

SEQ ID NO: 108099 - protein, 11 aa, Homo sapiens
  CDR3 for alpha chain variable domain of TCR clone 54050 (TRAV1-2, TRAJ20)
CAVSNDYKLSF

SEQ ID NO: 108100 - protein, 17 aa, Homo sapiens
  CDR3 for beta chain variable domain of TCR clone 54050 (TRBV20-1, TRBJ2-2)
CSDSGSGQGGLTGELFF

SEQ ID NO: 108101 - protein, 12 aa, Homo sapiens
  CDR3 for alpha chain variable domain of TCR clone 54051 (TRAV1-1, TRAJ24)
CAATDSWGKLQF

SEQ ID NO: 108102 - protein, 14 aa, Homo sapiens
  CDR3 for beta chain variable domain of TCR clone 54051 (TRBV19, TRBJ2-5)
CASSMTGQQETQYF

SEQ ID NO: 108103 - protein, 15 aa, Homo sapiens
  CDR3 for alpha chain variable domain of TCR clone 54052 (TRAV14/DV4, TRAJ28)
CAMSPLRAGSYQLTF

SEQ ID NO: 108104 - protein, 13 aa, Homo sapiens
  CDR3 for beta chain variable domain of TCR clone 54052 (TRBV3-1, TRBJ1-2)
CASSQRAPGGYTF

SEQ ID NO: 108105 - protein, 13 aa, Homo sapiens
  CDR3 for alpha chain variable domain of TCR clone 54053 (TRAV13-2, TRAJ13)
CAERPGGYQKVTF

SEQ ID NO: 108106 - protein, 13 aa, Homo sapiens
  CDR3 for beta chain variable domain of TCR clone 54053 (TRBV27, TRBJ2-1)
CASRTLGVGEQFF

SEQ ID NO: 108107 - protein, 11 aa, Homo sapiens
  CDR3 for alpha chain variable domain of TCR clone 54054 (TRAV1-1, TRAJ23)
CAVRQGGKLIF

SEQ ID NO: 108108 - protein, 14 aa, Homo sapiens
  CDR3 for beta chain variable domain of TCR clone 54054 (TRBV7-2, TRBJ1-2)
CASSQTGSTYGYTF

SEQ ID NO: 108109 - protein, 13 aa, Homo sapiens
  CDR3 for alpha chain variable domain of TCR clone 54055 (TRAV12-3, TRAJ13)
CAMSYGGYQKVTF

SEQ ID NO: 108110 - protein, 16 aa, Homo sapiens
  CDR3 for beta chain variable domain of TCR clone 54055 (TRBV4-1, TRBJ2-7)
CASSRGDILNSYEQYF

SEQ ID NO: 108111 - protein, 13 aa, Homo sapiens
  CDR3 for alpha chain variable domain of TCR clone 54056 (TRAV27, TRAJ3)
ASLRGSSASKIIF

SEQ ID NO: 108112 - protein, 15 aa, Homo sapiens
  CDR3 for beta chain variable domain of TCR clone 54056 (TRBV28, TRBJ1-3)
CASSMGWASGNNIYF

SEQ ID NO: 108113 - protein, 14 aa, Homo sapiens
  CDR3 for alpha chain variable domain of TCR clone 54057 (TRAV1-2, TRAJ8)
CAVREDTGFQKLVF

SEQ ID NO: 108114 - protein, 15 aa, Homo sapiens
  CDR3 for beta chain variable domain of TCR clone 54057 (TRBV4-1, TRBJ1-2)
CASSQGQGAAYGYTF

SEQ ID NO: 108115 - protein, 15 aa, Homo sapiens
  CDR3 for alpha chain variable domain of TCR clone 54058 (TRAV25, TRAJ52)
CAGRPGGTSYGKLTF

SEQ ID NO: 108116 - protein, 14 aa, Homo sapiens
  CDR3 for beta chain variable domain of TCR clone 54058 (TRBV9, TRBJ2-7)
CASSVGVGSYEQYF

SEQ ID NO: 108117 - protein, 21 aa, Homo sapiens
  CDR3 for alpha chain variable domain of TCR clone 54059 (TRAV1-1, TRAJ6)
CAVRREEATYLHLEEEPSLLF

SEQ ID NO: 108118 - protein, 15 aa, Homo sapiens
  CDR3 for beta chain variable domain of TCR clone 54059 (TRBV6-6, TRBJ2-1)
CATRQGVSSYNEQFF

SEQ ID NO: 108119 - protein, 16 aa, Homo sapiens
  CDR3 for alpha chain variable domain of TCR clone 54060 (TRAV30, TRAJ24)
CGTEIVDADSWGKFQF

SEQ ID NO: 108120 - protein, 16 aa, Homo sapiens
  CDR3 for beta chain variable domain of TCR clone 54060 (TRBV3-1, TRBJ2-5)
CASSQDWASGQETQYF

SEQ ID NO: 108121 - protein, 14 aa, Homo sapiens
  CDR3 for alpha chain variable domain of TCR clone 54061 (TRAV26-1, TRAJ45)
CIGVTGGGADGLTF

SEQ ID NO: 108122 - protein, 12 aa, Homo sapiens
  CDR3 for beta chain variable domain of TCR clone 54061 (TRBV12-4, TRBJ2-7)
CASSLGGYEQYF

SEQ ID NO: 108123 - protein, 16 aa, Homo sapiens
  CDR3 for alpha chain variable domain of TCR clone 54062 (TRAV4, TRAJ28)
CTTDFLSGAGSYQLTF

SEQ ID NO: 108124 - protein, 14 aa, Homo sapiens
  CDR3 for beta chain variable domain of TCR clone 54062 (TRBV7-9, TRBJ2-5)
CASSLDTAQETQYF

SEQ ID NO: 108125 - protein, 13 aa, Homo sapiens
  CDR3 for alpha chain variable domain of TCR clone 54063 (TRAV13-2, TRAJ15)
CAERPQAGNALIF

SEQ ID NO: 108126 - protein, 15 aa, Homo sapiens
  CDR3 for beta chain variable domain of TCR clone 54063 (TRBV11-2, TRBJ2-7)
CASRFPGTGGYEQYF

SEQ ID NO: 108127 - protein, 22 aa, Homo sapiens
  CDR3 for alpha chain variable domain of TCR clone 54064 (TRAV27, TRAJ41)
CAVRTQIPDIQNPDPAVYQLSD

SEQ ID NO: 108128 - protein, 16 aa, Homo sapiens
  CDR3 for beta chain variable domain of TCR clone 54064 (TRBV5-1, TRBJ2-3)
CASSLGLAVYTDTQYF

SEQ ID NO: 108129 - protein, 12 aa, Homo sapiens
  CDR3 for alpha chain variable domain of TCR clone 54065 (TRAV21, TRAJ37)
CAVAPVTGKLIF

SEQ ID NO: 108130 - protein, 14 aa, Homo sapiens
  CDR3 for beta chain variable domain of TCR clone 54065 (TRBV6-1, TRBJ1-3)
CASVQGGGGNTIYF

SEQ ID NO: 108131 - protein, 14 aa, Homo sapiens
  CDR3 for alpha chain variable domain of TCR clone 54066 (TRAV17, TRAJ45)
CATASGGGADGLPF

SEQ ID NO: 108132 - protein, 15 aa, Homo sapiens
  CDR3 for beta chain variable domain of TCR clone 54066 (TRBV11-2, TRBJ2-1)
CASSRNRGLMYEQFF

SEQ ID NO: 108133 - protein, 14 aa, Homo sapiens
  CDR3 for alpha chain variable domain of TCR clone 54067 (TRAV8-3, TRAJ9)
WAVVYNTGGFKTIF

SEQ ID NO: 108134 - protein, 14 aa, Homo sapiens
  CDR3 for beta chain variable domain of TCR clone 54067 (TRBV7-3, TRBJ2-2)
CASSSGGYTGELFF

SEQ ID NO: 108135 - protein, 16 aa, Homo sapiens
  CDR3 for alpha chain variable domain of TCR clone 54068 (TRAV30, TRAJ24)
CGTEIVDADSWGKFQF

SEQ ID NO: 108136 - protein, 13 aa, Homo sapiens
  CDR3 for beta chain variable domain of TCR clone 54068 (TRBV28, TRBJ2-1)
CASRSGGLNEQFF

SEQ ID NO: 108137 - protein, 14 aa, Homo sapiens
  CDR3 for alpha chain variable domain of TCR clone 54069 (TRAV35, TRAJ50)
CAGHRKTSYDKVIF

SEQ ID NO: 108138 - protein, 16 aa, Homo sapiens
  CDR3 for beta chain variable domain of TCR clone 54069 (TRBV2, TRBJ2-3)
CASSTSVEGVTDTQYF

SEQ ID NO: 108139 - protein, 14 aa, Homo sapiens
  CDR3 for alpha chain variable domain of TCR clone 54070 (TRAV16, TRAJ15)
CALSGPHAGTALIF

SEQ ID NO: 108140 - protein, 12 aa, Homo sapiens
  CDR3 for beta chain variable domain of TCR clone 54070 (TRBV18, TRBJ2-5)
CASSPSKETQYF

SEQ ID NO: 108141 - protein, 16 aa, Homo sapiens
  CDR3 for alpha chain variable domain of TCR clone 54071 (TRAV8-3, TRAJ13)
CAVGAYPSGGYQKVTF

SEQ ID NO: 108142 - protein, 15 aa, Homo sapiens
  CDR3 for beta chain variable domain of TCR clone 54071 (TRBV19, TRBJ1-5)
CASSIVWADNHPQHF

SEQ ID NO: 108143 - protein, 14 aa, Homo sapiens
  CDR3 for alpha chain variable domain of TCR clone 54072 (TRAV10, TRAJ36)
CVVKYEGGANNLFF

SEQ ID NO: 108144 - protein, 16 aa, Homo sapiens
  CDR3 for beta chain variable domain of TCR clone 54072 (TRBV7-3, TRBJ2-2)
CASSLRRGTLSGELFF

SEQ ID NO: 108145 - protein, 14 aa, Homo sapiens
  CDR3 for alpha chain variable domain of TCR clone 54073 (TRAV35, TRAJ13)
CAGSPSGGYQKFTF

SEQ ID NO: 108146 - protein, 13 aa, Homo sapiens
  CDR3 for beta chain variable domain of TCR clone 54073 (TRBV29-1, TRBJ1-1)
CSVGDSRNTEAFF

SEQ ID NO: 108147 - protein, 20 aa, Homo sapiens
  CDR3 for alpha chain variable domain of TCR clone 54074 (TRAV26-1, TRAJ47)
CCVLLHRQSSFMEYGNKLVF

SEQ ID NO: 108148 - protein, 14 aa, Homo sapiens
  CDR3 for beta chain variable domain of TCR clone 54074 (TRBV7-2, TRBJ1-2)
CASSRGGTNYGDTF

SEQ ID NO: 108149 - protein, 13 aa, Homo sapiens
  CDR3 for alpha chain variable domain of TCR clone 54075 (TRAV26-1, TRAJ29)
CIVRRSGNTHLVF

SEQ ID NO: 108150 - protein, 16 aa, Homo sapiens
  CDR3 for beta chain variable domain of TCR clone 54075 (TRBV11-2, TRBJ2-7)
CASSLAPTGVNYEQYF

SEQ ID NO: 108151 - protein, 15 aa, Homo sapiens
  CDR3 for alpha chain variable domain of TCR clone 54076 (TRAV21, TRAJ40)
CAVGPQTSGTYKYIF

SEQ ID NO: 108152 - protein, 13 aa, Homo sapiens
  CDR3 for beta chain variable domain of TCR clone 54076 (TRBV7-2, TRBJ2-2)
CASSSVRAGELFF

SEQ ID NO: 108153 - protein, 11 aa, Homo sapiens
  CDR3 for alpha chain variable domain of TCR clone 54077 (TRAV23/DV6, TRAJ58)
CAARLLRGETS

SEQ ID NO: 108154 - protein, 15 aa, Homo sapiens
  CDR3 for beta chain variable domain of TCR clone 54077 (TRBV6-3, TRBJ2-7)
CASSSPGTVFYEQYF

SEQ ID NO: 108155 - protein, 15 aa, Homo sapiens
  CDR3 for alpha chain variable domain of TCR clone 54078 (TRAV21, TRAJ24)
CAARSSTDSWGKLQF

SEQ ID NO: 108156 - protein, 14 aa, Homo sapiens
  CDR3 for beta chain variable domain of TCR clone 54078 (TRBV18, TRBJ2-7)
CASSPRGGAYEQYF

SEQ ID NO: 108157 - protein, 16 aa, Homo sapiens
  CDR3 for alpha chain variable domain of TCR clone 54079 (TRAV14/DV4, TRAJ53)
CAMREGGGGSNYKLTF

SEQ ID NO: 108158 - protein, 13 aa, Homo sapiens
  CDR3 for beta chain variable domain of TCR clone 54079 (TRBV12-4, TRBJ2-7)
CASSPTETYEQYF

SEQ ID NO: 108159 - protein, 14 aa, Homo sapiens
  CDR3 for alpha chain variable domain of TCR clone 54080 (TRAV8-3, TRAJ35)
CAVVPQGFGNVLHC

SEQ ID NO: 108160 - protein, 15 aa, Homo sapiens
  CDR3 for beta chain variable domain of TCR clone 54080 (TRBV6-1, TRBJ2-2)
CASSAGQGYTGEPFF

SEQ ID NO: 108161 - protein, 13 aa, Homo sapiens
  CDR3 for alpha chain variable domain of TCR clone 54081 (TRAV12-2, TRAJ24)
CAVSTDSWGKLQF

SEQ ID NO: 108162 - protein, 12 aa, Homo sapiens
  CDR3 for beta chain variable domain of TCR clone 54081 (TRBV6-3, TRBJ2-7)
CASSEPGFEQYF

SEQ ID NO: 108163 - protein, 15 aa, Homo sapiens
  CDR3 for alpha chain variable domain of TCR clone 54082 (TRAV12-3, TRAJ6)
CAMSATTGGSYIPTF

SEQ ID NO: 108164 - protein, 15 aa, Homo sapiens
  CDR3 for beta chain variable domain of TCR clone 54082 (TRBV9, TRBJ1-6)
CASSVAGTGDSPLHF

SEQ ID NO: 108165 - protein, 16 aa, Homo sapiens
  CDR3 for alpha chain variable domain of TCR clone 54083 (TRAV13-1, TRAJ48)
CAASIFGNFGNEKLTF

SEQ ID NO: 108166 - protein, 16 aa, Homo sapiens
  CDR3 for beta chain variable domain of TCR clone 54083 (TRBV7-2, TRBJ2-6)
CASSGRRASGANVLTF

SEQ ID NO: 108167 - protein, 15 aa, Homo sapiens
  CDR3 for alpha chain variable domain of TCR clone 54084 (TRAV17, TRAJ57)
CATGPSQGGSEKPVF

SEQ ID NO: 108168 - protein, 15 aa, Homo sapiens
  CDR3 for beta chain variable domain of TCR clone 54084 (TRBV25-1, TRBJ1-4)
CASSPGDSTNEKLFF

SEQ ID NO: 108169 - protein, 13 aa, Homo sapiens
  CDR3 for alpha chain variable domain of TCR clone 54085 (TRAV21, TRAJ47)
CAVSGLYGNKLVF

SEQ ID NO: 108170 - protein, 13 aa, Homo sapiens
  CDR3 for beta chain variable domain of TCR clone 54085 (TRBV2, TRBJ1-1)
CARNPTGGFHAFF

SEQ ID NO: 108171 - protein, 16 aa, Homo sapiens
  CDR3 for alpha chain variable domain of TCR clone 54086 (TRAV30, TRAJ24)
CGTEIVDADSWGKFQF

SEQ ID NO: 108172 - protein, 15 aa, Homo sapiens
  CDR3 for beta chain variable domain of TCR clone 54086 (TRBV20-1, TRBJ2-1)
CSAITGTSGSNEQFF

SEQ ID NO: 108173 - protein, 17 aa, Homo sapiens
  CDR3 for alpha chain variable domain of TCR clone 54087 (TRAV38-2/DV8, TRAJ38)
CAYRSARGAGNNRKLIC

SEQ ID NO: 108174 - protein, 13 aa, Homo sapiens
  CDR3 for beta chain variable domain of TCR clone 54087 (TRBV6-5, TRBJ2-1)
CASRGRVGNEQFF

SEQ ID NO: 108175 - protein, 15 aa, Homo sapiens
  CDR3 for alpha chain variable domain of TCR clone 54088 (TRAV12-3, TRAJ6)
CAMSATTGGSYIPTF

SEQ ID NO: 108176 - protein, 13 aa, Homo sapiens
  CDR3 for beta chain variable domain of TCR clone 54088 (TRBV12-4, TRBJ1-1)
CASSPGTGFEAFF

SEQ ID NO: 108177 - protein, 12 aa, Homo sapiens
  CDR3 for alpha chain variable domain of TCR clone 54089 (TRAV13-1, TRAJ53)
AASGGSNYKLTF

SEQ ID NO: 108178 - protein, 14 aa, Homo sapiens
  CDR3 for beta chain variable domain of TCR clone 54089 (TRBV7-2, TRBJ2-7)
CASSPKTSFYEQYF

SEQ ID NO: 108179 - protein, 18 aa, Homo sapiens
  CDR3 for alpha chain variable domain of TCR clone 54090 (TRAV13-1, TRAJ52)
CAAKNPNAGGTSFGKLTF

SEQ ID NO: 108180 - protein, 15 aa, Homo sapiens
  CDR3 for beta chain variable domain of TCR clone 54090 (TRBV6-1, TRBJ2-3)
CASSERGGITDTQYF

SEQ ID NO: 108181 - protein, 19 aa, Homo sapiens
  CDR3 for alpha chain variable domain of TCR clone 54091 (TRAV2, TRAJ20)
ILQVREADAAVYRDCKLSF

SEQ ID NO: 108182 - protein, 16 aa, Homo sapiens
  CDR3 for beta chain variable domain of TCR clone 54091 (TRBV20-1, TRBJ1-4)
CGAPGQGLLTNEKLFF

SEQ ID NO: 108183 - protein, 10 aa, Homo sapiens
  CDR3 for alpha chain variable domain of TCR clone 54092 (TRAV8-3, TRAJ8)
CAVGPNEHRL

SEQ ID NO: 108184 - protein, 13 aa, Homo sapiens
  CDR3 for beta chain variable domain of TCR clone 54092 (TRBV10-2, TRBJ2-3)
CASSESGDHTQYF

SEQ ID NO: 108185 - protein, 11 aa, Homo sapiens
  CDR3 for alpha chain variable domain of TCR clone 54093 (TRAV12-2, TRAJ39)
CAVNSMLTFGG

SEQ ID NO: 108186 - protein, 16 aa, Homo sapiens
  CDR3 for beta chain variable domain of TCR clone 54093 (TRBV5-3, TRBJ2-2)
CARSFGTGTNTGELFF

SEQ ID NO: 108187 - protein, 16 aa, Homo sapiens
  CDR3 for alpha chain variable domain of TCR clone 54094 (TRAV27, TRAJ13)
CAGAKSDSGGYQKVTF

SEQ ID NO: 108188 - protein, 15 aa, Homo sapiens
  CDR3 for beta chain variable domain of TCR clone 54094 (TRBV29-1, TRBJ2-1)
CSVGRHSLFYNEQFF

SEQ ID NO: 108189 - protein, 10 aa, Homo sapiens
  CDR3 for alpha chain variable domain of TCR clone 54095 (TRAV16, TRAJ18)
CALRRAEAQP

SEQ ID NO: 108190 - protein, 14 aa, Homo sapiens
  CDR3 for beta chain variable domain of TCR clone 54095 (TRBV12-4, TRBJ1-1)
CASSLGTGGTEAFF

SEQ ID NO: 108191 - protein, 14 aa, Homo sapiens
  CDR3 for alpha chain variable domain of TCR clone 54096 (TRAV9-2, TRAJ39)
CALYIYNAGNTLTF

SEQ ID NO: 108192 - protein, 15 aa, Homo sapiens
  CDR3 for beta chain variable domain of TCR clone 54096 (TRBV27, TRBJ1-6)
CASSFDRGLGSPLHF

SEQ ID NO: 108193 - protein, 15 aa, Homo sapiens
  CDR3 for alpha chain variable domain of TCR clone 54097 (TRAV8-3, TRAJ45)
CASSYSGGGADGLTF

SEQ ID NO: 108194 - protein, 14 aa, Homo sapiens
  CDR3 for beta chain variable domain of TCR clone 54097 (TRBV7-3, TRBJ1-5)
RASSFSGCNQPQHF

SEQ ID NO: 108195 - protein, 12 aa, Homo sapiens
  CDR3 for alpha chain variable domain of TCR clone 54098 (TRAV16, TRAJ10)
CSRTGGGNKLTF

SEQ ID NO: 108196 - protein, 15 aa, Homo sapiens
  CDR3 for beta chain variable domain of TCR clone 54098 (TRBV6-3, TRBJ2-7)
CASSSPGTVIYEQYF

SEQ ID NO: 108197 - protein, 15 aa, Homo sapiens
  CDR3 for alpha chain variable domain of TCR clone 54099 (TRAV38-1, TRAJ57)
CAFMDAQGGSEKLVF

SEQ ID NO: 108198 - protein, 16 aa, Homo sapiens
  CDR3 for beta chain variable domain of TCR clone 54099 (TRBV10-3, TRBJ2-1)
CAIRGGGRGDYNEQFF

SEQ ID NO: 108199 - protein, 14 aa, Homo sapiens
  CDR3 for alpha chain variable domain of TCR clone 54100 (TRAV26-1, TRAJ38)
CIADNAGNNRKLIW

SEQ ID NO: 108200 - protein, 16 aa, Homo sapiens
  CDR3 for beta chain variable domain of TCR clone 54100 (TRBV12-4, TRBJ2-7)
CASSPEGQGSSYEQYF

SEQ ID NO: 108201 - protein, 12 aa, Homo sapiens
  CDR3 for alpha chain variable domain of TCR clone 54101 (TRAV23/DV6, TRAJ30)
CAASKGDDKIIL

SEQ ID NO: 108202 - protein, 18 aa, Homo sapiens
  CDR3 for beta chain variable domain of TCR clone 54101 (TRBV10-3, TRBJ2-3)
CAISESRVGPMRGDTQYF

SEQ ID NO: 108203 - protein, 16 aa, Homo sapiens
  CDR3 for alpha chain variable domain of TCR clone 54102 (TRAV12-2, TRAJ40)
CAVIRGGTSGTYKYIF

SEQ ID NO: 108204 - protein, 14 aa, Homo sapiens
  CDR3 for beta chain variable domain of TCR clone 54102 (TRBV20-1, TRBJ2-5)
CSVRDGRAGETQYF

SEQ ID NO: 108205 - protein, 14 aa, Homo sapiens
  CDR3 for alpha chain variable domain of TCR clone 54103 (TRAV1-2, TRAJ16)
CAVNRFSDGQKLLF

SEQ ID NO: 108206 - protein, 15 aa, Homo sapiens
  CDR3 for beta chain variable domain of TCR clone 54103 (TRBV10-3, TRBJ2-1)
CAIRNGTSGHNEQFF

SEQ ID NO: 108207 - protein, 12 aa, Homo sapiens
  CDR3 for alpha chain variable domain of TCR clone 54104 (TRAV17, TRAJ57)
CATDGGSEKRVF

SEQ ID NO: 108208 - protein, 12 aa, Homo sapiens
  CDR3 for beta chain variable domain of TCR clone 54104 (TRBV29-1, TRBJ2-2)
CSVDKYTGELFF

SEQ ID NO: 108209 - protein, 14 aa, Homo sapiens
  CDR3 for alpha chain variable domain of TCR clone 54105 (TRAV1-2, TRAJ16)
CAVNRFSDGQKLLF

SEQ ID NO: 108210 - protein, 16 aa, Homo sapiens
  CDR3 for beta chain variable domain of TCR clone 54105 (TRBV28, TRBJ2-4)
CASSLIQGPLGNIQYF

SEQ ID NO: 108211 - protein, 11 aa, Homo sapiens
  CDR3 for alpha chain variable domain of TCR clone 54106 (TRAV12-2, TRAJ31)
CAVTRWARLMF

SEQ ID NO: 108212 - protein, 15 aa, Homo sapiens
  CDR3 for beta chain variable domain of TCR clone 54106 (TRBV19, TRBJ2-7)
CASSIGGGLVNEQCF

SEQ ID NO: 108213 - protein, 15 aa, Homo sapiens
  CDR3 for alpha chain variable domain of TCR clone 54107 (TRAV26-1, TRAJ29)
CIVRVEGSGNTPLVL

SEQ ID NO: 108214 - protein, 15 aa, Homo sapiens
  CDR3 for beta chain variable domain of TCR clone 54107 (TRBV7-9, TRBJ1-5)
CASSQGHQPNQHQHF

SEQ ID NO: 108215 - protein, 13 aa, Homo sapiens
  CDR3 for alpha chain variable domain of TCR clone 54108 (TRAV24, TRAJ37)
CAFSPGNTGKLIF

SEQ ID NO: 108216 - protein, 15 aa, Homo sapiens
  CDR3 for beta chain variable domain of TCR clone 54108 (TRBV7-6, TRBJ2-5)
CASSKPTGPQGTQYF

SEQ ID NO: 108217 - protein, 13 aa, Homo sapiens
  CDR3 for alpha chain variable domain of TCR clone 54109 (TRAV2, TRAJ40)
CAVVTSGTYKYIF

SEQ ID NO: 108218 - protein, 15 aa, Homo sapiens
  CDR3 for beta chain variable domain of TCR clone 54109 (TRBV5-7, TRBJ1-5)
CASSYGKLWDQPQHF

SEQ ID NO: 108219 - protein, 15 aa, Homo sapiens
  CDR3 for alpha chain variable domain of TCR clone 54110 (TRAV20, TRAJ50)
CAARQMKTSYDKVIF

SEQ ID NO: 108220 - protein, 17 aa, Homo sapiens
  CDR3 for beta chain variable domain of TCR clone 54110 (TRBV28, TRBJ2-7)
CASSPLHRASGVYEQYF

SEQ ID NO: 108221 - protein, 16 aa, Homo sapiens
  CDR3 for alpha chain variable domain of TCR clone 54111 (TRAV30, TRAJ24)
CGTETVDADSWGKFQF

SEQ ID NO: 108222 - protein, 14 aa, Homo sapiens
  CDR3 for beta chain variable domain of TCR clone 54111 (TRBV20-1, TRBJ1-1)
CSAQTRIGGTEAFF

SEQ ID NO: 108223 - protein, 17 aa, Homo sapiens
  CDR3 for alpha chain variable domain of TCR clone 54112 (TRAV26-2, TRAJ42)
FILRDVGYGGSQGNLIF

SEQ ID NO: 108224 - protein, 16 aa, Homo sapiens
  CDR3 for beta chain variable domain of TCR clone 54112 (TRBV12-4, TRBJ2-7)
CASSLIGGTGTYEQYF

SEQ ID NO: 108225 - protein, 16 aa, Homo sapiens
  CDR3 for alpha chain variable domain of TCR clone 54113 (TRAV3, TRAJ37)
CAVRGKGSGNTGKPIF

SEQ ID NO: 108226 - protein, 13 aa, Homo sapiens
  CDR3 for beta chain variable domain of TCR clone 54113 (TRBV19, TRBJ1-2)
CASSVPGQDGYTF

SEQ ID NO: 108227 - protein, 14 aa, Homo sapiens
  CDR3 for alpha chain variable domain of TCR clone 54114 (TRAV3, TRAJ22)
CAVRDYGSARQLTF

SEQ ID NO: 108228 - protein, 13 aa, Homo sapiens
  CDR3 for beta chain variable domain of TCR clone 54114 (TRBV11-2, TRBJ2-5)
CASGHGAKETQCF

SEQ ID NO: 108229 - protein, 15 aa, Homo sapiens
  CDR3 for alpha chain variable domain of TCR clone 54115 (TRAV17, TRAJ4)
CATGTWSGGYSKLIF

SEQ ID NO: 108230 - protein, 13 aa, Homo sapiens
  CDR3 for beta chain variable domain of TCR clone 54115 (TRBV6-6, TRBJ2-7)
CASSPKHLAEQYF

SEQ ID NO: 108231 - protein, 13 aa, Homo sapiens
  CDR3 for alpha chain variable domain of TCR clone 54116 (TRAV26-1, TRAJ29)
CIVRRSGDTPLVF

SEQ ID NO: 108232 - protein, 16 aa, Homo sapiens
  CDR3 for beta chain variable domain of TCR clone 54116 (TRBV11-2, TRBJ2-7)
CASSLAPTGVNYEQYF

SEQ ID NO: 108233 - protein, 14 aa, Homo sapiens
  CDR3 for alpha chain variable domain of TCR clone 54117 (TRAV35, TRAJ29)
CAGQLTSGNTPLVF

SEQ ID NO: 108234 - protein, 17 aa, Homo sapiens
  CDR3 for beta chain variable domain of TCR clone 54117 (TRBV20-1, TRBJ2-1)
CSAPPRLAGTRYNEQFF

SEQ ID NO: 108235 - protein, 12 aa, Homo sapiens
  CDR3 for alpha chain variable domain of TCR clone 54118 (TRAV13-2, TRAJ23)
CAERHRGGKLIF

SEQ ID NO: 108236 - protein, 14 aa, Homo sapiens
  CDR3 for beta chain variable domain of TCR clone 54118 (TRBV7-3, TRBJ2-1)
CASSLAGGTNEQFF

SEQ ID NO: 108237 - protein, 11 aa, Homo sapiens
  CDR3 for alpha chain variable domain of TCR clone 54119 (TRAV12-3, TRAJ43)
CAMSVSNYMRF

SEQ ID NO: 108238 - protein, 13 aa, Homo sapiens
  CDR3 for beta chain variable domain of TCR clone 54119 (TRBV20-1, TRBJ1-1)
CSAPLGGGTEAFF

SEQ ID NO: 108239 - protein, 14 aa, Homo sapiens
  CDR3 for alpha chain variable domain of TCR clone 54120 (TRAV12-1, TRAJ9)
CVVNRGTGGFKTIF

SEQ ID NO: 108240 - protein, 17 aa, Homo sapiens
  CDR3 for beta chain variable domain of TCR clone 54120 (TRBV13, TRBJ2-3)
CASSLSRVAGGRNTQYF

SEQ ID NO: 108241 - protein, 15 aa, Homo sapiens
  CDR3 for alpha chain variable domain of TCR clone 54121 (TRAV8-3, TRAJ45)
CASSYSGGGADGLTF

SEQ ID NO: 108242 - protein, 13 aa, Homo sapiens
  CDR3 for beta chain variable domain of TCR clone 54121 (TRBV10-3, TRBJ2-7)
CASKLAVNFEQYF

SEQ ID NO: 108243 - protein, 12 aa, Homo sapiens
  CDR3 for alpha chain variable domain of TCR clone 54122 (TRAV2, TRAJ10)
CASTGGGTKLTF

SEQ ID NO: 108244 - protein, 14 aa, Homo sapiens
  CDR3 for beta chain variable domain of TCR clone 54122 (TRBV7-2, TRBJ2-2)
CASRGQGAAGELFF

SEQ ID NO: 108245 - protein, 15 aa, Homo sapiens
  CDR3 for alpha chain variable domain of TCR clone 54123 (TRAV14/DV4, TRAJ10)
CAMRELTGGGNKLTF

SEQ ID NO: 108246 - protein, 18 aa, Homo sapiens
  CDR3 for beta chain variable domain of TCR clone 54123 (TRBV7-9, TRBJ2-7)
CASSLTTSGSRTWYERYF

SEQ ID NO: 108247 - protein, 17 aa, Homo sapiens
  CDR3 for alpha chain variable domain of TCR clone 54124 (TRAV26-1, TRAJ28)
CIVRVPDPGAGSYQLTF

SEQ ID NO: 108248 - protein, 17 aa, Homo sapiens
  CDR3 for beta chain variable domain of TCR clone 54124 (TRBV28, TRBJ2-7)
CASSPLPAGGKSYEQYF

SEQ ID NO: 108249 - protein, 14 aa, Homo sapiens
  CDR3 for alpha chain variable domain of TCR clone 54125 (TRAV1-1, TRAJ27)
CAVIYNTNAGKSTF

SEQ ID NO: 108250 - protein, 15 aa, Homo sapiens
  CDR3 for beta chain variable domain of TCR clone 54125 (TRBV7-2, TRBJ2-1)
CAGSSGLAGGNEQFF

SEQ ID NO: 108251 - protein, 13 aa, Homo sapiens
  CDR3 for alpha chain variable domain of TCR clone 54126 (TRAV8-3, TRAJ36)
CAVGTTGANNLFF

SEQ ID NO: 108252 - protein, 15 aa, Homo sapiens
  CDR3 for beta chain variable domain of TCR clone 54126 (TRBV7-2, TRBJ1-2)
CASSPRAGWNYGYTF

SEQ ID NO: 108253 - protein, 12 aa, Homo sapiens
  CDR3 for alpha chain variable domain of TCR clone 54127 (TRAV12-1, TRAJ40)
CEVYSGTYKYIF

SEQ ID NO: 108254 - protein, 18 aa, Homo sapiens
  CDR3 for beta chain variable domain of TCR clone 54127 (TRBV11-2, TRBJ2-3)
CASSLGGASRGAPNTQYF

SEQ ID NO: 108255 - protein, 12 aa, Homo sapiens
  CDR3 for alpha chain variable domain of TCR clone 54128 (TRAV26-1, TRAJ13)
CIISRGYQKVTF

SEQ ID NO: 108256 - protein, 16 aa, Homo sapiens
  CDR3 for beta chain variable domain of TCR clone 54128 (TRBV27, TRBJ2-1)
CASSLSKGFGLDEQFF

SEQ ID NO: 108257 - protein, 14 aa, Homo sapiens
  CDR3 for alpha chain variable domain of TCR clone 54129 (TRAV3, TRAJ9)
CAVRLNTGGFKTIF

SEQ ID NO: 108258 - protein, 15 aa, Homo sapiens
  CDR3 for beta chain variable domain of TCR clone 54129 (TRBV5-1, TRBJ2-2)
CASSLAAGGSGELFF

SEQ ID NO: 108259 - protein, 15 aa, Homo sapiens
  CDR3 for alpha chain variable domain of TCR clone 54130 (TRAV12-3, TRAJ11)
CAMSEENSGYGTLTF

SEQ ID NO: 108260 - protein, 16 aa, Homo sapiens
  CDR3 for beta chain variable domain of TCR clone 54130 (TRBV5-1, TRBJ2-7)
CTSSLEGLAGLYEQYF

SEQ ID NO: 108261 - protein, 12 aa, Homo sapiens
  CDR3 for alpha chain variable domain of TCR clone 54131 (TRAV12-3, TRAJ17)
CAMTLTGDKLTF

SEQ ID NO: 108262 - protein, 14 aa, Homo sapiens
  CDR3 for beta chain variable domain of TCR clone 54131 (TRBV4-1, TRBJ2-7)
CASSQDREHVEQYF

SEQ ID NO: 108263 - protein, 13 aa, Homo sapiens
  CDR3 for alpha chain variable domain of TCR clone 54132 (TRAV14/DV4, TRAJ49)
CAMVENTGNQFYF

SEQ ID NO: 108264 - protein, 14 aa, Homo sapiens
  CDR3 for beta chain variable domain of TCR clone 54132 (TRBV7-3, TRBJ2-1)
CASSLAGGTNEQFF

SEQ ID NO: 108265 - protein, 13 aa, Homo sapiens
  CDR3 for alpha chain variable domain of TCR clone 54133 (TRAV17, TRAJ7)
CATDNYGNNRLAF

SEQ ID NO: 108266 - protein, 16 aa, Homo sapiens
  CDR3 for beta chain variable domain of TCR clone 54133 (TRBV4-1, TRBJ2-5)
CASSQAIAASSATQCF

SEQ ID NO: 108267 - protein, 20 aa, Homo sapiens
  CDR3 for alpha chain variable domain of TCR clone 54134 (TRAV12-2, TRAJ52)
SPVIQPPARAGGTSYGKLTF

SEQ ID NO: 108268 - protein, 16 aa, Homo sapiens
  CDR3 for beta chain variable domain of TCR clone 54134 (TRBV15, TRBJ1-2)
CATSRGPRTGGGGYAF

SEQ ID NO: 108269 - protein, 14 aa, Homo sapiens
  CDR3 for alpha chain variable domain of TCR clone 54135 (TRAV16, TRAJ39)
CALSKNNAGNMLTL

SEQ ID NO: 108270 - protein, 16 aa, Homo sapiens
  CDR3 for beta chain variable domain of TCR clone 54135 (TRBV5-1, TRBJ2-5)
CASSSSGLGGAETQYF

SEQ ID NO: 108271 - protein, 14 aa, Homo sapiens
  CDR3 for alpha chain variable domain of TCR clone 54136 (TRAV26-1, TRAJ34)
CIVRVAYNTDKIIF

SEQ ID NO: 108272 - protein, 15 aa, Homo sapiens
  CDR3 for beta chain variable domain of TCR clone 54136 (TRBV20-1, TRBJ2-7)
CSARVPAAYFYEQYF

SEQ ID NO: 108273 - protein, 14 aa, Homo sapiens
  CDR3 for alpha chain variable domain of TCR clone 54137 (TRAV23/DV6, TRAJ13)
CAAGETGGYQKVTF

SEQ ID NO: 108274 - protein, 16 aa, Homo sapiens
  CDR3 for beta chain variable domain of TCR clone 54137 (TRBV5-1, TRBJ1-3)
CASSPWAPSSGNTIYF

SEQ ID NO: 108275 - protein, 12 aa, Homo sapiens
  CDR3 for alpha chain variable domain of TCR clone 54138 (TRAV12-3, TRAJ17)
CAMTLTGNKLTF

SEQ ID NO: 108276 - protein, 17 aa, Homo sapiens
  CDR3 for beta chain variable domain of TCR clone 54138 (TRBV5-1, TRBJ2-5)
CASSLLGLAANQETQYF

SEQ ID NO: 108277 - protein, 16 aa, Homo sapiens
  CDR3 for alpha chain variable domain of TCR clone 54139 (TRAV38-1, TRAJ37)
CAFKGDGSSNTGKLIL

SEQ ID NO: 108278 - protein, 13 aa, Homo sapiens
  CDR3 for beta chain variable domain of TCR clone 54139 (TRBV12-4, TRBJ2-5)
CASSLFRRETQYF

SEQ ID NO: 108279 - protein, 14 aa, Homo sapiens
  CDR3 for alpha chain variable domain of TCR clone 54140 (TRAV17, TRAJ56)
CATVPVGANSKLTF

SEQ ID NO: 108280 - protein, 13 aa, Homo sapiens
  CDR3 for beta chain variable domain of TCR clone 54140 (TRBV12-4, TRBJ2-2)
CASSITGSGELFF

SEQ ID NO: 108281 - protein, 16 aa, Homo sapiens
  CDR3 for alpha chain variable domain of TCR clone 54141 (TRAV30, TRAJ24)
CGTEIVDADSWGKFQF

SEQ ID NO: 108282 - protein, 14 aa, Homo sapiens
  CDR3 for beta chain variable domain of TCR clone 54141 (TRBV2, TRBJ1-2)
CASRKGALDYGYTF

SEQ ID NO: 108283 - protein, 13 aa, Homo sapiens
  CDR3 for alpha chain variable domain of TCR clone 54142 (TRAV12-2, TRAJ42)
CAVKRGSQGNLIF

SEQ ID NO: 108284 - protein, 12 aa, Homo sapiens
  CDR3 for beta chain variable domain of TCR clone 54142 (TRBV5-7, TRBJ1-2)
CASSLVQDGYTF

SEQ ID NO: 108285 - protein, 16 aa, Homo sapiens
  CDR3 for alpha chain variable domain of TCR clone 54143 (TRAV3, TRAJ37)
CAVRPHGSGNTGKLIF

SEQ ID NO: 108286 - protein, 15 aa, Homo sapiens
  CDR3 for beta chain variable domain of TCR clone 54143 (TRBV27, TRBJ2-1)
CASSNGGGSSNEQFF

SEQ ID NO: 108287 - protein, 14 aa, Homo sapiens
  CDR3 for alpha chain variable domain of TCR clone 54144 (TRAV12-2, TRAJ45)
CAVNIGGGADGLTF

SEQ ID NO: 108288 - protein, 13 aa, Homo sapiens
  CDR3 for beta chain variable domain of TCR clone 54144 (TRBV19, TRBJ2-2)
CASSIWSTEELFF

SEQ ID NO: 108289 - protein, 12 aa, Homo sapiens
  CDR3 for alpha chain variable domain of TCR clone 54145 (TRAV21, TRAJ27)
CATPGNAGKSTF

SEQ ID NO: 108290 - protein, 13 aa, Homo sapiens
  CDR3 for beta chain variable domain of TCR clone 54145 (TRBV2, TRBJ1-1)
CARNPTGGFHAFF

SEQ ID NO: 108291 - protein, 13 aa, Homo sapiens
  CDR3 for alpha chain variable domain of TCR clone 54146 (TRAV13-1, TRAJ21)
CAASIYNFNKFHF

SEQ ID NO: 108292 - protein, 12 aa, Homo sapiens
  CDR3 for beta chain variable domain of TCR clone 54146 (TRBV11-2, TRBJ2-1)
CASSPGNNEQFF

SEQ ID NO: 108293 - protein, 15 aa, Homo sapiens
  CDR3 for alpha chain variable domain of TCR clone 54147 (TRAV30, TRAJ57)
CGTAIPQGGSEKLVF

SEQ ID NO: 108294 - protein, 13 aa, Homo sapiens
  CDR3 for beta chain variable domain of TCR clone 54147 (TRBV7-9, TRBJ1-2)
CASSPSDFWGYTF

SEQ ID NO: 108295 - protein, 14 aa, Homo sapiens
  CDR3 for alpha chain variable domain of TCR clone 54148 (TRAV23/DV6, TRAJ37)
CAASTSSNTGKLIF

SEQ ID NO: 108296 - protein, 13 aa, Homo sapiens
  CDR3 for beta chain variable domain of TCR clone 54148 (TRBV7-7, TRBJ1-1)
CASSLGANAEAFF

SEQ ID NO: 108297 - protein, 10 aa, Homo sapiens
  CDR3 for alpha chain variable domain of TCR clone 54149 (TRAV23/DV6, TRAJ57)
CAASTTLSQG

SEQ ID NO: 108298 - protein, 14 aa, Homo sapiens
  CDR3 for beta chain variable domain of TCR clone 54149 (TRBV25-1, TRBJ1-1)
CASTHLGGNTEAFF

SEQ ID NO: 108299 - protein, 13 aa, Homo sapiens
  CDR3 for alpha chain variable domain of TCR clone 54150 (TRAV3, TRAJ20)
CAVRDTGDYKLSF

SEQ ID NO: 108300 - protein, 13 aa, Homo sapiens
  CDR3 for beta chain variable domain of TCR clone 54150 (TRBV19, TRBJ1-2)
CASSVPGQDGYTF

SEQ ID NO: 108301 - protein, 14 aa, Homo sapiens
  CDR3 for alpha chain variable domain of TCR clone 54151 (TRAV13-2, TRAJ17)
CAENSKAAGSKLTF

SEQ ID NO: 108302 - protein, 14 aa, Homo sapiens
  CDR3 for beta chain variable domain of TCR clone 54151 (TRBV4-1, TRBJ2-2)
CASSQAVNTGELFF

SEQ ID NO: 108303 - protein, 18 aa, Homo sapiens
  CDR3 for alpha chain variable domain of TCR clone 54152 (TRAV9-2, TRAJ52)
CALSRHNAGGTSSGKLTF

SEQ ID NO: 108304 - protein, 13 aa, Homo sapiens
  CDR3 for beta chain variable domain of TCR clone 54152 (TRBV7-9, TRBJ1-2)
CASSLKQNYGYTF

SEQ ID NO: 108305 - protein, 17 aa, Homo sapiens
  CDR3 for alpha chain variable domain of TCR clone 54153 (TRAV12-3, TRAJ58)
CAVSSWVGESSGSRLTF

SEQ ID NO: 108306 - protein, 14 aa, Homo sapiens
  CDR3 for beta chain variable domain of TCR clone 54153 (TRBV4-2, TRBJ2-1)
CASGLDRAYNEQFF

SEQ ID NO: 108307 - protein, 14 aa, Homo sapiens
  CDR3 for alpha chain variable domain of TCR clone 54154 (TRAV3, TRAJ26)
CAVRDYNYGQNFVF

SEQ ID NO: 108308 - protein, 15 aa, Homo sapiens
  CDR3 for beta chain variable domain of TCR clone 54154 (TRBV20-1, TRBJ2-5)
CSASPPGRGGETQYF

SEQ ID NO: 108309 - protein, 16 aa, Homo sapiens
  CDR3 for alpha chain variable domain of TCR clone 54155 (TRAV12-3, TRAJ50)
CAMRDPMKASYDKVIF

SEQ ID NO: 108310 - protein, 13 aa, Homo sapiens
  CDR3 for beta chain variable domain of TCR clone 54155 (TRBV4-1, TRBJ2-3)
CASSLDFTDTQYF

SEQ ID NO: 108311 - protein, 14 aa, Homo sapiens
  CDR3 for alpha chain variable domain of TCR clone 54156 (TRAV26-1, TRAJ26)
CIVRATFLGQDFVF

SEQ ID NO: 108312 - protein, 16 aa, Homo sapiens
  CDR3 for beta chain variable domain of TCR clone 54156 (TRBV12-4, TRBJ2-7)
CASRSTGTGPSYEQYF

SEQ ID NO: 108313 - protein, 14 aa, Homo sapiens
  CDR3 for alpha chain variable domain of TCR clone 54157 (TRAV12-2, TRAJ45)
CALPERGGADGLTF

SEQ ID NO: 108314 - protein, 15 aa, Homo sapiens
  CDR3 for beta chain variable domain of TCR clone 54157 (TRBV4-3, TRBJ2-7)
CASSQGDWGDYEQYF

SEQ ID NO: 108315 - protein, 13 aa, Homo sapiens
  CDR3 for alpha chain variable domain of TCR clone 54158 (TRAV8-3, TRAJ48)
CAVAPFGNEKLTF

SEQ ID NO: 108316 - protein, 15 aa, Homo sapiens
  CDR3 for beta chain variable domain of TCR clone 54158 (TRBV11-2, TRBJ2-1)
CASSSPSTRYNEQFF

SEQ ID NO: 108317 - protein, 12 aa, Homo sapiens
  CDR3 for alpha chain variable domain of TCR clone 54159 (TRAV12-3, TRAJ5)
CAMDTGRRALTF

SEQ ID NO: 108318 - protein, 14 aa, Homo sapiens
  CDR3 for beta chain variable domain of TCR clone 54159 (TRBV19, TRBJ2-1)
CASPTFVLSGEQFF

SEQ ID NO: 108319 - protein, 14 aa, Homo sapiens
  CDR3 for alpha chain variable domain of TCR clone 54160 (TRAV29/DV5, TRAJ45)
CAASFRGGADGLTF

SEQ ID NO: 108320 - protein, 11 aa, Homo sapiens
  CDR3 for beta chain variable domain of TCR clone 54160 (TRBV11-2, TRBJ2-2)
CASSVPGELFF

SEQ ID NO: 108321 - protein, 11 aa, Homo sapiens
  CDR3 for alpha chain variable domain of TCR clone 54161 (TRAV2, TRAJ23)
CAVATRGKLIF

SEQ ID NO: 108322 - protein, 14 aa, Homo sapiens
  CDR3 for beta chain variable domain of TCR clone 54161 (TRBV2, TRBJ2-3)
CASSEGQNTDTQYF

SEQ ID NO: 108323 - protein, 16 aa, Homo sapiens
  CDR3 for alpha chain variable domain of TCR clone 54162 (TRAV20, TRAJ22)
CAVQASSSGSARQLTF

SEQ ID NO: 108324 - protein, 12 aa, Homo sapiens
  CDR3 for beta chain variable domain of TCR clone 54162 (TRBV24-1, TRBJ2-7)
CATGTGTYEQYF

SEQ ID NO: 108325 - protein, 15 aa, Homo sapiens
  CDR3 for alpha chain variable domain of TCR clone 54163 (TRAV17, TRAJ35)
CATAFVIGFGNVLHC

SEQ ID NO: 108326 - protein, 14 aa, Homo sapiens
  CDR3 for beta chain variable domain of TCR clone 54163 (TRBV19, TRBJ2-1)
CASSMGSGATEQFF

SEQ ID NO: 108327 - protein, 13 aa, Homo sapiens
  CDR3 for alpha chain variable domain of TCR clone 54164 (TRAV3, TRAJ21)
CAVREPDFNKFYF

SEQ ID NO: 108328 - protein, 16 aa, Homo sapiens
  CDR3 for beta chain variable domain of TCR clone 54164 (TRBV11-2, TRBJ2-2)
CASSTHRGSDTGELFF

SEQ ID NO: 108329 - protein, 14 aa, Homo sapiens
  CDR3 for alpha chain variable domain of TCR clone 54165 (TRAV1-1, TRAJ27)
CAVIYSTNAGKSTF

SEQ ID NO: 108330 - protein, 15 aa, Homo sapiens
  CDR3 for beta chain variable domain of TCR clone 54165 (TRBV7-2, TRBJ2-1)
CASSSGLAGGNEQFF

SEQ ID NO: 108331 - protein, 16 aa, Homo sapiens
  CDR3 for alpha chain variable domain of TCR clone 54166 (TRAV38-2/DV8, TRAJ47)
CAYRSAIMEYGNKLAF

SEQ ID NO: 108332 - protein, 14 aa, Homo sapiens
  CDR3 for beta chain variable domain of TCR clone 54166 (TRBV19, TRBJ2-7)
CASSIFAGTYEQYF

SEQ ID NO: 108333 - protein, 13 aa, Homo sapiens
  CDR3 for alpha chain variable domain of TCR clone 54167 (TRAV3, TRAJ36)
CAVRDTGANNIFF

SEQ ID NO: 108334 - protein, 15 aa, Homo sapiens
  CDR3 for beta chain variable domain of TCR clone 54167 (TRBV24-1, TRBJ2-1)
CATSGSGGFYNEQFF

SEQ ID NO: 108335 - protein, 16 aa, Homo sapiens
  CDR3 for alpha chain variable domain of TCR clone 54168 (TRAV16, TRAJ42)
CARKMNCGGSQGNLIF

SEQ ID NO: 108336 - protein, 13 aa, Homo sapiens
  CDR3 for beta chain variable domain of TCR clone 54168 (TRBV20-1, TRBJ2-7)
CSASPPSSYEQYF

SEQ ID NO: 108337 - protein, 13 aa, Homo sapiens
  CDR3 for alpha chain variable domain of TCR clone 54169 (TRAV21, TRAJ27)
CAARPGNAGKSTF

SEQ ID NO: 108338 - protein, 15 aa, Homo sapiens
  CDR3 for beta chain variable domain of TCR clone 54169 (TRBV12-4, TRBJ2-5)
CASSPPTGLQETRYF

SEQ ID NO: 108339 - protein, 12 aa, Homo sapiens
  CDR3 for alpha chain variable domain of TCR clone 54170 (TRAV25, TRAJ29)
CAGHSGNTPLVF

SEQ ID NO: 108340 - protein, 14 aa, Homo sapiens
  CDR3 for beta chain variable domain of TCR clone 54170 (TRBV6-1, TRBJ2-7)
RASTRTGDYYEQYF

SEQ ID NO: 108341 - protein, 12 aa, Homo sapiens
  CDR3 for alpha chain variable domain of TCR clone 54171 (TRAV26-1, TRAJ36)
CIVRVRADNLFF

SEQ ID NO: 108342 - protein, 13 aa, Homo sapiens
  CDR3 for beta chain variable domain of TCR clone 54171 (TRBV11-2, TRBJ2-5)
CASSRGPSETRYF

SEQ ID NO: 108343 - protein, 12 aa, Homo sapiens
  CDR3 for alpha chain variable domain of TCR clone 54172 (TRAV26-1, TRAJ31)
CIVINNNARLMF

SEQ ID NO: 108344 - protein, 15 aa, Homo sapiens
  CDR3 for beta chain variable domain of TCR clone 54172 (TRBV20-1, TRBJ2-4)
CSARDLTGGPNIQYF

SEQ ID NO: 108345 - protein, 14 aa, Homo sapiens
  CDR3 for alpha chain variable domain of TCR clone 54173 (TRAV1-2, TRAJ8)
CAVREDTGFQKLVF

SEQ ID NO: 108346 - protein, 13 aa, Homo sapiens
  CDR3 for beta chain variable domain of TCR clone 54173 (TRBV7-3, TRBJ1-2)
CASSLKRGYGYTF

SEQ ID NO: 108347 - protein, 14 aa, Homo sapiens
  CDR3 for alpha chain variable domain of TCR clone 54174 (TRAV21, TRAJ39)
CAVRVNNAGNMPTF

SEQ ID NO: 108348 - protein, 15 aa, Homo sapiens
  CDR3 for beta chain variable domain of TCR clone 54174 (TRBV3-1, TRBJ1-3)
CASSPVGTDRNTIYF

SEQ ID NO: 108349 - protein, 14 aa, Homo sapiens
  CDR3 for alpha chain variable domain of TCR clone 54175 (TRAV12-2, TRAJ13)
CAVKKTGGYQKVTF

SEQ ID NO: 108350 - protein, 13 aa, Homo sapiens
  CDR3 for beta chain variable domain of TCR clone 54175 (TRBV20-1, TRBJ1-1)
CSARLGQGTEAFL

SEQ ID NO: 108351 - protein, 12 aa, Homo sapiens
  CDR3 for alpha chain variable domain of TCR clone 54176 (TRAV2, TRAJ9)
CAVGAGGFKTIF

SEQ ID NO: 108352 - protein, 14 aa, Homo sapiens
  CDR3 for beta chain variable domain of TCR clone 54176 (TRBV28, TRBJ2-7)
CASSLLRISYEQYF

SEQ ID NO: 108353 - protein, 15 aa, Homo sapiens
  CDR3 for alpha chain variable domain of TCR clone 54177 (TRAV25, TRAJ53)
CAATGGGGSNYKLTF

SEQ ID NO: 108354 - protein, 15 aa, Homo sapiens
  CDR3 for beta chain variable domain of TCR clone 54177 (TRBV25-1, TRBJ1-4)
CASSKRIATNEKLFF

SEQ ID NO: 108355 - protein, 14 aa, Homo sapiens
  CDR3 for alpha chain variable domain of TCR clone 54178 (TRAV2, TRAJ22)
CAVGRGGSARQLTF

SEQ ID NO: 108356 - protein, 15 aa, Homo sapiens
  CDR3 for beta chain variable domain of TCR clone 54178 (TRBV6-3, TRBJ2-7)
CASSSPGTVFYEQYF

SEQ ID NO: 108357 - protein, 14 aa, Homo sapiens
  CDR3 for alpha chain variable domain of TCR clone 54179 (TRAV35, TRAJ42)
CAGRYGGSQGDLIF

SEQ ID NO: 108358 - protein, 15 aa, Homo sapiens
  CDR3 for beta chain variable domain of TCR clone 54179 (TRBV7-9, TRBJ2-1)
CASSLGWGRANEQFF

SEQ ID NO: 108359 - protein, 13 aa, Homo sapiens
  CDR3 for alpha chain variable domain of TCR clone 54180 (TRAV27, TRAJ45)
CWSSGGGADGLTF

SEQ ID NO: 108360 - protein, 17 aa, Homo sapiens
  CDR3 for beta chain variable domain of TCR clone 54180 (TRBV11-2, TRBJ2-1)
CASSLYPPGVEYNEQFF

SEQ ID NO: 108361 - protein, 13 aa, Homo sapiens
  CDR3 for alpha chain variable domain of TCR clone 54181 (TRAV8-6, TRAJ50)
CAVIKTSYDKVIF

SEQ ID NO: 108362 - protein, 15 aa, Homo sapiens
  CDR3 for beta chain variable domain of TCR clone 54181 (TRBV7-2, TRBJ2-2)
CASRRPGQSTGELFF

SEQ ID NO: 108363 - protein, 15 aa, Homo sapiens
  CDR3 for alpha chain variable domain of TCR clone 54182 (TRAV27, TRAJ50)
CAGVGRGTSYDKMIF

SEQ ID NO: 108364 - protein, 14 aa, Homo sapiens
  CDR3 for beta chain variable domain of TCR clone 54182 (TRBV7-2, TRBJ1-1)
RASSFYDLNTEAFF

SEQ ID NO: 108365 - protein, 15 aa, Homo sapiens
  CDR3 for alpha chain variable domain of TCR clone 54183 (TRAV26-2, TRAJ13)
CILRDLSGGYQKVTF

SEQ ID NO: 108366 - protein, 14 aa, Homo sapiens
  CDR3 for beta chain variable domain of TCR clone 54183 (TRBV7-9, TRBJ2-3)
CASSLEDGTDTQYF

SEQ ID NO: 108367 - protein, 14 aa, Homo sapiens
  CDR3 for alpha chain variable domain of TCR clone 54184 (TRAV35, TRAJ50)
CAGHRKTTYDKVIF

SEQ ID NO: 108368 - protein, 13 aa, Homo sapiens
  CDR3 for beta chain variable domain of TCR clone 54184 (TRBV7-7, TRBJ2-3)
CASSLSRADTQDF

SEQ ID NO: 108369 - protein, 16 aa, Homo sapiens
  CDR3 for alpha chain variable domain of TCR clone 54185 (TRAV3, TRAJ37)
CAVRVRGSGNTGKLIS

SEQ ID NO: 108370 - protein, 11 aa, Homo sapiens
  CDR3 for beta chain variable domain of TCR clone 54185 (TRBV11-2, TRBJ2-2)
CASSLPGELFF

SEQ ID NO: 108371 - protein, 11 aa, Homo sapiens
  CDR3 for alpha chain variable domain of TCR clone 54186 (TRAV12-3, TRAJ43)
CAMSVSNDMRF

SEQ ID NO: 108372 - protein, 16 aa, Homo sapiens
  CDR3 for beta chain variable domain of TCR clone 54186 (TRBV12-4, TRBJ1-5)
CASSRPVGGSNQPQHF

SEQ ID NO: 108373 - protein, 17 aa, Homo sapiens
  CDR3 for alpha chain variable domain of TCR clone 54187 (TRAV13-1, TRAJ28)
CAASPPYSGAGSYQLTF

SEQ ID NO: 108374 - protein, 12 aa, Homo sapiens
  CDR3 for beta chain variable domain of TCR clone 54187 (TRBV11-2, TRBJ2-2)
CASGLPTGELFF

SEQ ID NO: 108375 - protein, 16 aa, Homo sapiens
  CDR3 for alpha chain variable domain of TCR clone 54188 (TRAV26-1, TRAJ33)
CIVPFWGEDSNYQLIW

SEQ ID NO: 108376 - protein, 14 aa, Homo sapiens
  CDR3 for beta chain variable domain of TCR clone 54188 (TRBV6-3, TRBJ1-1)
CASSYHSKNTEAFL

SEQ ID NO: 108377 - protein, 14 aa, Homo sapiens
  CDR3 for alpha chain variable domain of TCR clone 54189 (TRAV12-1, TRAJ12)
CMVTRMDSSYKLIF

SEQ ID NO: 108378 - protein, 13 aa, Homo sapiens
  CDR3 for beta chain variable domain of TCR clone 54189 (TRBV20-1, TRBJ1-1)
CSARGGGNTEAFF

SEQ ID NO: 108379 - protein, 13 aa, Homo sapiens
  CDR3 for alpha chain variable domain of TCR clone 54190 (TRAV13-1, TRAJ40)
CAARTSGTYKYIF

SEQ ID NO: 108380 - protein, 12 aa, Homo sapiens
  CDR3 for beta chain variable domain of TCR clone 54190 (TRBV7-8, TRBJ2-7)
CASSLGDREQYF

SEQ ID NO: 108381 - protein, 14 aa, Homo sapiens
  CDR3 for alpha chain variable domain of TCR clone 54191 (TRAV2, TRAJ37)
CAVEDQGNTGKLIF

SEQ ID NO: 108382 - protein, 14 aa, Homo sapiens
  CDR3 for beta chain variable domain of TCR clone 54191 (TRBV18, TRBJ2-1)
CASSPQGRFNEQFL

SEQ ID NO: 108383 - protein, 10 aa, Homo sapiens
  CDR3 for alpha chain variable domain of TCR clone 54192 (TRAV12-3, TRAJ49)
CAMNADQFYF

SEQ ID NO: 108384 - protein, 13 aa, Homo sapiens
  CDR3 for beta chain variable domain of TCR clone 54192 (TRBV12-4, TRBJ1-1)
CASSPGTGFEAFF

SEQ ID NO: 108385 - protein, 16 aa, Homo sapiens
  CDR3 for alpha chain variable domain of TCR clone 54193 (TRAV17, TRAJ28)
CACGSYSGAGSYQLTF

SEQ ID NO: 108386 - protein, 11 aa, Homo sapiens
  CDR3 for beta chain variable domain of TCR clone 54193 (TRBV12-4, TRBJ2-3)
CASTATDTQYF

SEQ ID NO: 108387 - protein, 17 aa, Homo sapiens
  CDR3 for alpha chain variable domain of TCR clone 54194 (TRAV38-1, TRAJ45)
CAFMKHYMGGGADGLTF

SEQ ID NO: 108388 - protein, 13 aa, Homo sapiens
  CDR3 for beta chain variable domain of TCR clone 54194 (TRBV2, TRBJ1-4)
CASSVRAGEKLFF

SEQ ID NO: 108389 - protein, 16 aa, Homo sapiens
  CDR3 for alpha chain variable domain of TCR clone 54195 (TRAV20, TRAJ52)
CAVLPDGGTSYGKLTF

SEQ ID NO: 108390 - protein, 12 aa, Homo sapiens
  CDR3 for beta chain variable domain of TCR clone 54195 (TRBV19, TRBJ2-1)
CASSQISNEQLF

SEQ ID NO: 108391 - protein, 14 aa, Homo sapiens
  CDR3 for alpha chain variable domain of TCR clone 54196 (TRAV12-1, TRAJ17)
CVVNYKAAGNKLTF

SEQ ID NO: 108392 - protein, 17 aa, Homo sapiens
  CDR3 for beta chain variable domain of TCR clone 54196 (TRBV20-1, TRBJ2-1)
CSASSSGLAGSFNEQFF

SEQ ID NO: 108393 - protein, 13 aa, Homo sapiens
  CDR3 for alpha chain variable domain of TCR clone 54197 (TRAV25, TRAJ47)
CAGHRGYGNKLVF

SEQ ID NO: 108394 - protein, 17 aa, Homo sapiens
  CDR3 for beta chain variable domain of TCR clone 54197 (TRBV7-8, TRBJ2-5)
CASSLASGGRFQETQYF

SEQ ID NO: 108395 - protein, 11 aa, Homo sapiens
  CDR3 for alpha chain variable domain of TCR clone 54198 (TRAV12-3, TRAJ43)
CEMSVSNDMRF

SEQ ID NO: 108396 - protein, 13 aa, Homo sapiens
  CDR3 for beta chain variable domain of TCR clone 54198 (TRBV20-1, TRBJ1-1)
CSAPLGGGTEAFF

SEQ ID NO: 108397 - protein, 13 aa, Homo sapiens
  CDR3 for alpha chain variable domain of TCR clone 54199 (TRAV1-2, TRAJ9)
CAVLNTGGFKTIF

SEQ ID NO: 108398 - protein, 13 aa, Homo sapiens
  CDR3 for beta chain variable domain of TCR clone 54199 (TRBV10-3, TRBJ2-7)
CASKLAVNYEQYF

SEQ ID NO: 108399 - protein, 13 aa, Homo sapiens
  CDR3 for alpha chain variable domain of TCR clone 54200 (TRAV3, TRAJ30)
CAVRDRGDDKIIF

SEQ ID NO: 108400 - protein, 16 aa, Homo sapiens
  CDR3 for beta chain variable domain of TCR clone 54200 (TRBV7-3, TRBJ2-2)
CASSLKRGTLSGELVF

SEQ ID NO: 108401 - protein, 14 aa, Homo sapiens
  CDR3 for alpha chain variable domain of TCR clone 54201 (TRAV12-2, TRAJ17)
CAVLVKAAGNKLTF

SEQ ID NO: 108402 - protein, 17 aa, Homo sapiens
  CDR3 for beta chain variable domain of TCR clone 54201 (TRBV20-1, TRBJ2-2)
CSASGSGQGGLTGELFF

SEQ ID NO: 108403 - protein, 19 aa, Homo sapiens
  CDR3 for alpha chain variable domain of TCR clone 54202 (TRAV38-1, TRAJ53)
CAFMKHGLESGGSNYKLAF

SEQ ID NO: 108404 - protein, 13 aa, Homo sapiens
  CDR3 for beta chain variable domain of TCR clone 54202 (TRBV19, TRBJ2-7)
CASSPRQSYEQYF

SEQ ID NO: 108405 - protein, 13 aa, Homo sapiens
  CDR3 for alpha chain variable domain of TCR clone 54203 (TRAV8-6, TRAJ21)
CAVREPDFNKFYF

SEQ ID NO: 108406 - protein, 15 aa, Homo sapiens
  CDR3 for beta chain variable domain of TCR clone 54203 (TRBV20-1, TRBJ1-1)
CSASRGVTGNTEAFF

SEQ ID NO: 108407 - protein, 15 aa, Homo sapiens
  CDR3 for alpha chain variable domain of TCR clone 54204 (TRAV3, TRAJ4)
CAVRDGSGGYNKLIF

SEQ ID NO: 108408 - protein, 16 aa, Homo sapiens
  CDR3 for beta chain variable domain of TCR clone 54204 (TRBV27, TRBJ2-2)
CASSSSGVSNTGELFF

SEQ ID NO: 108409 - protein, 13 aa, Homo sapiens
  CDR3 for alpha chain variable domain of TCR clone 54205 (TRAV13-1, TRAJ11)
CAAVLAGYSTLTF

SEQ ID NO: 108410 - protein, 17 aa, Homo sapiens
  CDR3 for beta chain variable domain of TCR clone 54205 (TRBV25-1, TRBJ2-7)
CASSDARVVLSSYEQYF

SEQ ID NO: 108411 - protein, 14 aa, Homo sapiens
  CDR3 for alpha chain variable domain of TCR clone 54206 (TRAV12-2, TRAJ17)
CAVLFKAAGNKLTF

SEQ ID NO: 108412 - protein, 15 aa, Homo sapiens
  CDR3 for beta chain variable domain of TCR clone 54206 (TRBV20-1, TRBJ2-7)
CSARDRVPGMDEQYF

SEQ ID NO: 108413 - protein, 15 aa, Homo sapiens
  CDR3 for alpha chain variable domain of TCR clone 54207 (TRAV12-3, TRAJ22)
CAMRTISGSARQLPF

SEQ ID NO: 108414 - protein, 16 aa, Homo sapiens
  CDR3 for beta chain variable domain of TCR clone 54207 (TRBV20-1, TRBJ2-2)
CSARRPGTGNTEELFF

SEQ ID NO: 108415 - protein, 17 aa, Homo sapiens
  CDR3 for alpha chain variable domain of TCR clone 54208 (TRAV38-2/DV8, TRAJ28)
CAFLTLYSGAGSYQPTF

SEQ ID NO: 108416 - protein, 14 aa, Homo sapiens
  CDR3 for beta chain variable domain of TCR clone 54208 (TRBV7-2, TRBJ2-5)
CASSLSGGGETQYF

SEQ ID NO: 108417 - protein, 14 aa, Homo sapiens
  CDR3 for alpha chain variable domain of TCR clone 54209 (TRAV17, TRAJ16)
CATADFSDGQKLLF

SEQ ID NO: 108418 - protein, 16 aa, Homo sapiens
  CDR3 for beta chain variable domain of TCR clone 54209 (TRBV7-9, TRBJ2-6)
CASSLKGPLRANVLTF

SEQ ID NO: 108419 - protein, 16 aa, Homo sapiens
  CDR3 for alpha chain variable domain of TCR clone 54210 (TRAV16, TRAJ4)
CALSRMFSGGYNKLIF

SEQ ID NO: 108420 - protein, 18 aa, Homo sapiens
  CDR3 for beta chain variable domain of TCR clone 54210 (TRBV20-1, TRBJ2-6)
CSAETTPTHGSGANVLTF

SEQ ID NO: 108421 - protein, 14 aa, Homo sapiens
  CDR3 for alpha chain variable domain of TCR clone 54211 (TRAV1-2, TRAJ16)
CAVNRFSDGQKLLF

SEQ ID NO: 108422 - protein, 15 aa, Homo sapiens
  CDR3 for beta chain variable domain of TCR clone 54211 (TRBV19, TRBJ1-5)
CASSIVWADNQTQHF

SEQ ID NO: 108423 - protein, 12 aa, Homo sapiens
  CDR3 for alpha chain variable domain of TCR clone 54212 (TRAV16, TRAJ9)
CALRAGGFKTIF

SEQ ID NO: 108424 - protein, 13 aa, Homo sapiens
  CDR3 for beta chain variable domain of TCR clone 54212 (TRBV4-3, TRBJ1-1)
CASSQVGGSMAFF

SEQ ID NO: 108425 - protein, 16 aa, Homo sapiens
  CDR3 for alpha chain variable domain of TCR clone 54213 (TRAV14/DV4, TRAJ54)
CAMREGRIQGAQKLVF

SEQ ID NO: 108426 - protein, 15 aa, Homo sapiens
  CDR3 for beta chain variable domain of TCR clone 54213 (TRBV4-1, TRBJ2-7)
CASSQNTGRLYEQYF

SEQ ID NO: 108427 - protein, 12 aa, Homo sapiens
  CDR3 for alpha chain variable domain of TCR clone 54214 (TRAV27, TRAJ9)
CAGESGGFNTIF

SEQ ID NO: 108428 - protein, 18 aa, Homo sapiens
  CDR3 for beta chain variable domain of TCR clone 54214 (TRBV10-2, TRBJ2-2)
CISAPAVHRQADAGELFF

SEQ ID NO: 108429 - protein, 12 aa, Homo sapiens
  CDR3 for alpha chain variable domain of TCR clone 54215 (TRAV2, TRAJ10)
CASPGGGNKLTF

SEQ ID NO: 108430 - protein, 14 aa, Homo sapiens
  CDR3 for beta chain variable domain of TCR clone 54215 (TRBV7-2, TRBJ2-2)
CASRGQGAAGELFF

SEQ ID NO: 108431 - protein, 15 aa, Homo sapiens
  CDR3 for alpha chain variable domain of TCR clone 54216 (TRAV26-1, TRAJ44)
CIVRIGTGTASKLTF

SEQ ID NO: 108432 - protein, 14 aa, Homo sapiens
  CDR3 for beta chain variable domain of TCR clone 54216 (TRBV19, TRBJ2-1)
CASPTFVLSGEQFF

SEQ ID NO: 108433 - protein, 12 aa, Homo sapiens
  CDR3 for alpha chain variable domain of TCR clone 54217 (TRAV21, TRAJ13)
PGPSRGYQKVTF

SEQ ID NO: 108434 - protein, 15 aa, Homo sapiens
  CDR3 for beta chain variable domain of TCR clone 54217 (TRBV7-9, TRBJ1-6)
CASSSPGRGNSPLHF

SEQ ID NO: 108435 - protein, 16 aa, Homo sapiens
  CDR3 for alpha chain variable domain of TCR clone 54218 (TRAV38-1, TRAJ32)
CAFTKGGGGATNKLIF

SEQ ID NO: 108436 - protein, 13 aa, Homo sapiens
  CDR3 for beta chain variable domain of TCR clone 54218 (TRBV20-1, TRBJ2-5)
CSAREAFQETQYF

SEQ ID NO: 108437 - protein, 15 aa, Homo sapiens
  CDR3 for alpha chain variable domain of TCR clone 54219 (TRAV16, TRAJ6)
CALNDASGGSYIPTF

SEQ ID NO: 108438 - protein, 15 aa, Homo sapiens
  CDR3 for beta chain variable domain of TCR clone 54219 (TRBV7-9, TRBJ1-5)
CASSQGHQPNQPQHF

SEQ ID NO: 108439 - protein, 19 aa, Homo sapiens
  CDR3 for alpha chain variable domain of TCR clone 54220 (TRAV2, TRAJ20)
ILQVREADAAVYRDCKLSF

SEQ ID NO: 108440 - protein, 12 aa, Homo sapiens
  CDR3 for beta chain variable domain of TCR clone 54220 (TRBV7-9, TRBJ2-7)
CASSIKREEQYF

SEQ ID NO: 108441 - protein, 15 aa, Homo sapiens
  CDR3 for alpha chain variable domain of TCR clone 54221 (TRAV2, TRAJ28)
CAVPYSGAGSYQLTF

SEQ ID NO: 108442 - protein, 17 aa, Homo sapiens
  CDR3 for beta chain variable domain of TCR clone 54221 (TRBV20-1, TRBJ2-4)
CSAKDWASGGRENIQYF

SEQ ID NO: 108443 - protein, 12 aa, Homo sapiens
  CDR3 for alpha chain variable domain of TCR clone 54222 (TRAV12-1, TRAJ40)
CVVSSGTYKYIF

SEQ ID NO: 108444 - protein, 13 aa, Homo sapiens
  CDR3 for beta chain variable domain of TCR clone 54222 (TRBV7-9, TRBJ1-2)
CASSLKQNYGYTF

SEQ ID NO: 108445 - protein, 14 aa, Homo sapiens
  CDR3 for alpha chain variable domain of TCR clone 54223 (TRAV12-1, TRAJ17)
CVVNYKAAGNKLTF

SEQ ID NO: 108446 - protein, 16 aa, Homo sapiens
  CDR3 for beta chain variable domain of TCR clone 54223 (TRBV12-4, TRBJ1-5)
CASSRPVGGPNQPQHF

SEQ ID NO: 108447 - protein, 14 aa, Homo sapiens
  CDR3 for alpha chain variable domain of TCR clone 54224 (TRAV17, TRAJ12)
CAILPMDSSYKLIF

SEQ ID NO: 108448 - protein, 14 aa, Homo sapiens
  CDR3 for beta chain variable domain of TCR clone 54224 (TRBV7-2, TRBJ2-7)
CASSLYPGRYEQYF

SEQ ID NO: 108449 - protein, 16 aa, Homo sapiens
  CDR3 for alpha chain variable domain of TCR clone 54225 (TRAV12-2, TRAJ32)
CAVNLGQGGATNKLIF

SEQ ID NO: 108450 - protein, 16 aa, Homo sapiens
  CDR3 for beta chain variable domain of TCR clone 54225 (TRBV6-4, TRBJ1-4)
CASSETGQDPNEKLFF

SEQ ID NO: 108451 - protein, 12 aa, Homo sapiens
  CDR3 for alpha chain variable domain of TCR clone 54226 (TRAV8-3, TRAJ26)
CAGDNYGQNFVF

SEQ ID NO: 108452 - protein, 15 aa, Homo sapiens
  CDR3 for beta chain variable domain of TCR clone 54226 (TRBV4-1, TRBJ2-2)
CASSEGQGITGELFF

SEQ ID NO: 108453 - protein, 11 aa, Homo sapiens
  CDR3 for alpha chain variable domain of TCR clone 54227 (TRAV2, TRAJ33)
CAVDSNYKLIW

SEQ ID NO: 108454 - protein, 15 aa, Homo sapiens
  CDR3 for beta chain variable domain of TCR clone 54227 (TRBV19, TRBJ1-2)
CASSVGQVLNYGYTF

SEQ ID NO: 108455 - protein, 11 aa, Homo sapiens
  CDR3 for alpha chain variable domain of TCR clone 54228 (TRAV2, TRAJ13)
CASGGYQKVTF

SEQ ID NO: 108456 - protein, 17 aa, Homo sapiens
  CDR3 for beta chain variable domain of TCR clone 54228 (TRBV7-3, TRBJ2-3)
CASSLMRRMRGADTQYF

SEQ ID NO: 108457 - protein, 16 aa, Homo sapiens
  CDR3 for alpha chain variable domain of TCR clone 54229 (TRAV30, TRAJ24)
CGTEIVDADSWGNSSL

SEQ ID NO: 108458 - protein, 19 aa, Homo sapiens
  CDR3 for beta chain variable domain of TCR clone 54229 (TRBV25-1, TRBJ2-2)
CAILVYRVDRGRKTGELFF

SEQ ID NO: 108459 - protein, 14 aa, Homo sapiens
  CDR3 for alpha chain variable domain of TCR clone 54230 (TRAV12-2, TRAJ13)
CAVKKTGGYQKVTF

SEQ ID NO: 108460 - protein, 14 aa, Homo sapiens
  CDR3 for beta chain variable domain of TCR clone 54230 (TRBV7-2, TRBJ2-7)
CASSLPPGQGPQYF

SEQ ID NO: 108461 - protein, 13 aa, Homo sapiens
  CDR3 for alpha chain variable domain of TCR clone 54231 (TRAV21, TRAJ20)
CAVGLRVDYKLSF

SEQ ID NO: 108462 - protein, 16 aa, Homo sapiens
  CDR3 for beta chain variable domain of TCR clone 54231 (TRBV5-5, TRBJ2-2)
CASSGRREGATGELFF

SEQ ID NO: 108463 - protein, 13 aa, Homo sapiens
  CDR3 for alpha chain variable domain of TCR clone 54232 (TRAV13-1, TRAJ5)
CAASDTGRRALTF

SEQ ID NO: 108464 - protein, 12 aa, Homo sapiens
  CDR3 for beta chain variable domain of TCR clone 54232 (TRBV28, TRBJ2-3)
CASGLYRDTQYF

SEQ ID NO: 108465 - protein, 12 aa, Homo sapiens
  CDR3 for alpha chain variable domain of TCR clone 54233 (TRAV12-3, TRAJ17)
CAMTLTGNKLTS

SEQ ID NO: 108466 - protein, 14 aa, Homo sapiens
  CDR3 for beta chain variable domain of TCR clone 54233 (TRBV20-1, TRBJ2-1)
CSAQIGGSANEQFF

SEQ ID NO: 108467 - protein, 18 aa, Homo sapiens
  CDR3 for alpha chain variable domain of TCR clone 54234 (TRAV21, TRAJ52)
RAVRPSPAGGTSYGKLTF

SEQ ID NO: 108468 - protein, 15 aa, Homo sapiens
  CDR3 for beta chain variable domain of TCR clone 54234 (TRBV19, TRBJ1-1)
CASTSGQIRNTEAFF

SEQ ID NO: 108469 - protein, 13 aa, Homo sapiens
  CDR3 for alpha chain variable domain of TCR clone 54235 (TRAV2, TRAJ16)
CAVEFGDGQKLLF

SEQ ID NO: 108470 - protein, 14 aa, Homo sapiens
  CDR3 for beta chain variable domain of TCR clone 54235 (TRBV6-3, TRBJ2-5)
CASSYSLREETQYF

SEQ ID NO: 108471 - protein, 14 aa, Homo sapiens
  CDR3 for alpha chain variable domain of TCR clone 54236 (TRAV12-1, TRAJ13)
CVVIDSGGYQKVTF

SEQ ID NO: 108472 - protein, 13 aa, Homo sapiens
  CDR3 for beta chain variable domain of TCR clone 54236 (TRBV29-1, TRBJ2-3)
SAALQGGADTQYF

SEQ ID NO: 108473 - protein, 12 aa, Homo sapiens
  CDR3 for alpha chain variable domain of TCR clone 54237 (TRAV3, TRAJ43)
CAVRDPNNDMRF

SEQ ID NO: 108474 - protein, 15 aa, Homo sapiens
  CDR3 for beta chain variable domain of TCR clone 54237 (TRBV27, TRBJ1-5)
CASSLGTGFEQPQHF

SEQ ID NO: 108475 - protein, 13 aa, Homo sapiens
  CDR3 for alpha chain variable domain of TCR clone 54238 (TRAV13-2, TRAJ48)
CAEMDFGNEKLTF

SEQ ID NO: 108476 - protein, 12 aa, Homo sapiens
  CDR3 for beta chain variable domain of TCR clone 54238 (TRBV19, TRBJ2-1)
CASSMQDTEQFF

SEQ ID NO: 108477 - protein, 11 aa, Homo sapiens
  CDR3 for alpha chain variable domain of TCR clone 54239 (TRAV12-3, TRAJ27)
CAMANAGKSTF

SEQ ID NO: 108478 - protein, 15 aa, Homo sapiens
  CDR3 for beta chain variable domain of TCR clone 54239 (TRBV7-2, TRBJ2-3)
CASSLRGGSTDTQYF

SEQ ID NO: 108479 - protein, 13 aa, Homo sapiens
  CDR3 for alpha chain variable domain of TCR clone 54240 (TRAV3, TRAJ27)
CAVRPLGAGRSTF

SEQ ID NO: 108480 - protein, 13 aa, Homo sapiens
  CDR3 for beta chain variable domain of TCR clone 54240 (TRBV7-9, TRBJ2-3)
CASGPGSTDTQYF

SEQ ID NO: 108481 - protein, 15 aa, Homo sapiens
  CDR3 for alpha chain variable domain of TCR clone 54241 (TRAV2, TRAJ22)
CAVPSRGGSARQLTF

SEQ ID NO: 108482 - protein, 12 aa, Homo sapiens
  CDR3 for beta chain variable domain of TCR clone 54241 (TRBV20-1, TRBJ2-1)
CSARLGTDEQFF

SEQ ID NO: 108483 - protein, 15 aa, Homo sapiens
  CDR3 for alpha chain variable domain of TCR clone 54242 (TRAV3, TRAJ20)
CAVRDIKLSDYKLSF

SEQ ID NO: 108484 - protein, 15 aa, Homo sapiens
  CDR3 for beta chain variable domain of TCR clone 54242 (TRBV7-9, TRBJ1-6)
YASSSPGRGNSPLHF

SEQ ID NO: 108485 - protein, 13 aa, Homo sapiens
  CDR3 for alpha chain variable domain of TCR clone 54243 (TRAV34, TRAJ33)
CGADMNSNYQLIW

SEQ ID NO: 108486 - protein, 14 aa, Homo sapiens
  CDR3 for beta chain variable domain of TCR clone 54243 (TRBV11-2, TRBJ2-5)
CASSRTGGIETQYF

SEQ ID NO: 108487 - protein, 12 aa, Homo sapiens
  CDR3 for alpha chain variable domain of TCR clone 54244 (TRAV35, TRAJ30)
CAGQLADDKIIF

SEQ ID NO: 108488 - protein, 17 aa, Homo sapiens
  CDR3 for beta chain variable domain of TCR clone 54244 (TRBV4-2, TRBJ2-5)
CASSPGRWRNFQETQHF

SEQ ID NO: 108489 - protein, 15 aa, Homo sapiens
  CDR3 for alpha chain variable domain of TCR clone 54245 (TRAV34, TRAJ38)
CGADSTPGNNRKLIW

SEQ ID NO: 108490 - protein, 16 aa, Homo sapiens
  CDR3 for beta chain variable domain of TCR clone 54245 (TRBV12-5, TRBJ2-5)
CASGPRTNGNQETQYF

SEQ ID NO: 108491 - protein, 12 aa, Homo sapiens
  CDR3 for alpha chain variable domain of TCR clone 54246 (TRAV8-4, TRAJ37)
CAVSGNTGKLIF

SEQ ID NO: 108492 - protein, 17 aa, Homo sapiens
  CDR3 for beta chain variable domain of TCR clone 54246 (TRBV7-2, TRBJ2-3)
CASSPQGRARVQDTQYL

SEQ ID NO: 108493 - protein, 13 aa, Homo sapiens
  CDR3 for alpha chain variable domain of TCR clone 54247 (TRAV2, TRAJ15)
CAVDSQAGTALTF

SEQ ID NO: 108494 - protein, 17 aa, Homo sapiens
  CDR3 for beta chain variable domain of TCR clone 54247 (TRBV20-1, TRBJ2-2)
CSASGSGQGGLTGELFF

SEQ ID NO: 108495 - protein, 16 aa, Homo sapiens
  CDR3 for alpha chain variable domain of TCR clone 54248 (TRAV12-3, TRAJ53)
CAMSPGSGGSNYKLTF

SEQ ID NO: 108496 - protein, 14 aa, Homo sapiens
  CDR3 for beta chain variable domain of TCR clone 54248 (TRBV5-4, TRBJ1-1)
CASSLDSRRDEAFF

SEQ ID NO: 108497 - protein, 18 aa, Homo sapiens
  CDR3 for alpha chain variable domain of TCR clone 54249 (TRAV12-3, TRAJ10)
SPVIQPPTSDGRRNKLTF

SEQ ID NO: 108498 - protein, 11 aa, Homo sapiens
  CDR3 for beta chain variable domain of TCR clone 54249 (TRBV19, TRBJ1-1)
CASSIGSEAFF

SEQ ID NO: 108499 - protein, 15 aa, Homo sapiens
  CDR3 for alpha chain variable domain of TCR clone 54250 (TRAV8-4, TRAJ7)
CAVSGGNYGNNRLAL

SEQ ID NO: 108500 - protein, 11 aa, Homo sapiens
  CDR3 for beta chain variable domain of TCR clone 54250 (TRBV20-1, TRBJ2-1)
CSLSSGSEQFF

SEQ ID NO: 108501 - protein, 14 aa, Homo sapiens
  CDR3 for alpha chain variable domain of TCR clone 54251 (TRAV12-1, TRAJ45)
CVVLSGGGADGPTF

SEQ ID NO: 108502 - protein, 12 aa, Homo sapiens
  CDR3 for beta chain variable domain of TCR clone 54251 (TRBV12-5, TRBJ2-5)
CASGQGVETQYF

SEQ ID NO: 108503 - protein, 13 aa, Homo sapiens
  CDR3 for alpha chain variable domain of TCR clone 54252 (TRAV21, TRAJ57)
CAVTQGGSEKMVF

SEQ ID NO: 108504 - protein, 16 aa, Homo sapiens
  CDR3 for beta chain variable domain of TCR clone 54252 (TRBV29-1, TRBJ2-7)
CSVEDAEDGTAYEKYF

SEQ ID NO: 108505 - protein, 15 aa, Homo sapiens
  CDR3 for alpha chain variable domain of TCR clone 54253 (TRAV41, TRAJ45)
CAASYSGGGADGLTL

SEQ ID NO: 108506 - protein, 14 aa, Homo sapiens
  CDR3 for beta chain variable domain of TCR clone 54253 (TRBV27, TRBJ2-2)
CASRPGVNTGELFF

SEQ ID NO: 108507 - protein, 15 aa, Homo sapiens
  CDR3 for alpha chain variable domain of TCR clone 54254 (TRAV17, TRAJ22)
CATVAPSGSARQLPF

SEQ ID NO: 108508 - protein, 16 aa, Homo sapiens
  CDR3 for beta chain variable domain of TCR clone 54254 (TRBV10-3, TRBJ2-7)
CAISADFADRPYEQYF

SEQ ID NO: 108509 - protein, 10 aa, Homo sapiens
  CDR3 for alpha chain variable domain of TCR clone 54255 (TRAV12-3, TRAJ49)
CAMNDDQFYF

SEQ ID NO: 108510 - protein, 15 aa, Homo sapiens
  CDR3 for beta chain variable domain of TCR clone 54255 (TRBV28, TRBJ2-1)
CASSIIAGGRSEQFF

SEQ ID NO: 108511 - protein, 14 aa, Homo sapiens
  CDR3 for alpha chain variable domain of TCR clone 54256 (TRAV38-1, TRAJ40)
CALRPTSGTFKYIF

SEQ ID NO: 108512 - protein, 14 aa, Homo sapiens
  CDR3 for beta chain variable domain of TCR clone 54256 (TRBV25-1, TRBJ1-1)
CASTHLGGNTEAFF

SEQ ID NO: 108513 - protein, 14 aa, Homo sapiens
  CDR3 for alpha chain variable domain of TCR clone 54257 (TRAV12-1, TRAJ26)
CVVKGSNYGQNFVF

SEQ ID NO: 108514 - protein, 13 aa, Homo sapiens
  CDR3 for beta chain variable domain of TCR clone 54257 (TRBV19, TRBJ1-2)
CASSVPGQDGYTF

SEQ ID NO: 108515 - protein, 14 aa, Homo sapiens
  CDR3 for alpha chain variable domain of TCR clone 54258 (TRAV8-4, TRAJ16)
CAVSPVGRWPEAAL

SEQ ID NO: 108516 - protein, 14 aa, Homo sapiens
  CDR3 for beta chain variable domain of TCR clone 54258 (TRBV23-1, TRBJ2-5)
CASSFLRSQETRYF

SEQ ID NO: 108517 - protein, 13 aa, Homo sapiens
  CDR3 for alpha chain variable domain of TCR clone 54259 (TRAV16, TRAJ22)
SAMLAGSARQLTF

SEQ ID NO: 108518 - protein, 18 aa, Homo sapiens
  CDR3 for beta chain variable domain of TCR clone 54259 (TRBV7-2, TRBJ2-3)
CASSLEASRGRKADTQYF

SEQ ID NO: 108519 - protein, 15 aa, Homo sapiens
  CDR3 for alpha chain variable domain of TCR clone 54260 (TRAV16, TRAJ4)
FALEDPSGGYNKLIF

SEQ ID NO: 108520 - protein, 13 aa, Homo sapiens
  CDR3 for beta chain variable domain of TCR clone 54260 (TRBV7-3, TRBJ2-7)
CASSQAGGYEQYF

SEQ ID NO: 108521 - protein, 15 aa, Homo sapiens
  CDR3 for alpha chain variable domain of TCR clone 54261 (TRAV38-2/DV8, TRAJ48)
CAYRSPESGNEKLTF

SEQ ID NO: 108522 - protein, 13 aa, Homo sapiens
  CDR3 for beta chain variable domain of TCR clone 54261 (TRBV4-2, TRBJ1-2)
CASSISASGGYTF

SEQ ID NO: 108523 - protein, 17 aa, Homo sapiens
  CDR3 for alpha chain variable domain of TCR clone 54262 (TRAV36/DV7, TRAJ52)
CAVAQRAGGTSYGKLTF

SEQ ID NO: 108524 - protein, 13 aa, Homo sapiens
  CDR3 for beta chain variable domain of TCR clone 54262 (TRBV12-4, TRBJ1-2)
CASSLRQGKGYTF

SEQ ID NO: 108525 - protein, 13 aa, Homo sapiens
  CDR3 for alpha chain variable domain of TCR clone 54263 (TRAV12-3, TRAJ7)
CAMTPYGNNRLAF

SEQ ID NO: 108526 - protein, 16 aa, Homo sapiens
  CDR3 for beta chain variable domain of TCR clone 54263 (TRBV20-1, TRBJ1-4)
CSARPYGGELNEKLLF

SEQ ID NO: 108527 - protein, 12 aa, Homo sapiens
  CDR3 for alpha chain variable domain of TCR clone 54264 (TRAV12-3, TRAJ17)
CAMTLTGNKLTF

SEQ ID NO: 108528 - protein, 15 aa, Homo sapiens
  CDR3 for beta chain variable domain of TCR clone 54264 (TRBV7-8, TRBJ2-1)
CASSLADSLYNEQFF

SEQ ID NO: 108529 - protein, 16 aa, Homo sapiens
  CDR3 for alpha chain variable domain of TCR clone 54265 (TRAV4, TRAJ22)
CLVGDIYSGSARQLTF

SEQ ID NO: 108530 - protein, 16 aa, Homo sapiens
  CDR3 for beta chain variable domain of TCR clone 54265 (TRBV7-9, TRBJ2-1)
CASSDVAGGSYNEQFF

SEQ ID NO: 108531 - protein, 15 aa, Homo sapiens
  CDR3 for alpha chain variable domain of TCR clone 54266 (TRAV13-1, TRAJ44)
CAASRVGGTASKLTF

SEQ ID NO: 108532 - protein, 14 aa, Homo sapiens
  CDR3 for beta chain variable domain of TCR clone 54266 (TRBV7-2, TRBJ2-5)
CASSPRGSSETQYF

SEQ ID NO: 108533 - protein, 11 aa, Homo sapiens
  CDR3 for alpha chain variable domain of TCR clone 54267 (TRAV2, TRAJ33)
CAVESNYQLIW

SEQ ID NO: 108534 - protein, 15 aa, Homo sapiens
  CDR3 for beta chain variable domain of TCR clone 54267 (TRBV19, TRBJ1-1)
CASTSVQIQNTEAFF

SEQ ID NO: 108535 - protein, 14 aa, Homo sapiens
  CDR3 for alpha chain variable domain of TCR clone 54268 (TRAV1-2, TRAJ16)
CAVNRFSDGQKLLF

SEQ ID NO: 108536 - protein, 20 aa, Homo sapiens
  CDR3 for beta chain variable domain of TCR clone 54268 (TRBV11-2, TRBJ2-2)
LRTRPCISVPAALEAGSCFF

SEQ ID NO: 108537 - protein, 12 aa, Homo sapiens
  CDR3 for alpha chain variable domain of TCR clone 54269 (TRAV12-3, TRAJ17)
CAMTLTGNKLTF

SEQ ID NO: 108538 - protein, 13 aa, Homo sapiens
  CDR3 for beta chain variable domain of TCR clone 54269 (TRBV27, TRBJ1-4)
CASSLMGDEKLFF

SEQ ID NO: 108539 - protein, 11 aa, Homo sapiens
  CDR3 for alpha chain variable domain of TCR clone 54270 (TRAV35, TRAJ34)
CWARNTDKLIF

SEQ ID NO: 108540 - protein, 15 aa, Homo sapiens
  CDR3 for beta chain variable domain of TCR clone 54270 (TRBV19, TRBJ1-5)
CASSIVWADNQPQHF

SEQ ID NO: 108541 - protein, 10 aa, Homo sapiens
  CDR3 for alpha chain variable domain of TCR clone 54271 (TRAV26-1, TRAJ40)
CIAGTYKYIF

SEQ ID NO: 108542 - protein, 15 aa, Homo sapiens
  CDR3 for beta chain variable domain of TCR clone 54271 (TRBV19, TRBJ2-1)
CASSSPGVPLDEQSF

SEQ ID NO: 108543 - protein, 13 aa, Homo sapiens
  CDR3 for alpha chain variable domain of TCR clone 54272 (TRAV2, TRAJ40)
CAVVTSGTYKYIF

SEQ ID NO: 108544 - protein, 16 aa, Homo sapiens
  CDR3 for beta chain variable domain of TCR clone 54272 (TRBV12-4, TRBJ2-7)
CASSLIGGTGTYEQYF

SEQ ID NO: 108545 - protein, 15 aa, Homo sapiens
  CDR3 for alpha chain variable domain of TCR clone 54273 (TRAV26-1, TRAJ15)
CIVRAANQAGTAMIF

SEQ ID NO: 108546 - protein, 15 aa, Homo sapiens
  CDR3 for beta chain variable domain of TCR clone 54273 (TRBV20-1, TRBJ1-1)
CSARSAATSNTEAFF

SEQ ID NO: 108547 - protein, 14 aa, Homo sapiens
  CDR3 for alpha chain variable domain of TCR clone 54274 (TRAV3, TRAJ27)
CAVRDDTNAGKSTF

SEQ ID NO: 108548 - protein, 16 aa, Homo sapiens
  CDR3 for beta chain variable domain of TCR clone 54274 (TRBV19, TRBJ2-1)
CASSKAGPSSYNEQFF

SEQ ID NO: 108549 - protein, 23 aa, Homo sapiens
  CDR3 for alpha chain variable domain of TCR clone 54275 (TRAV26-1, TRAJ38)
CIADNAGNNHIQNPDPAVYQLRD

SEQ ID NO: 108550 - protein, 17 aa, Homo sapiens
  CDR3 for beta chain variable domain of TCR clone 54275 (TRBV11-2, TRBJ2-6)
CASSQRDTFSGANVLTF

SEQ ID NO: 108551 - protein, 14 aa, Homo sapiens
  CDR3 for alpha chain variable domain of TCR clone 54276 (TRAV12-2, TRAJ3)
CAVSLYSSASKIIF

SEQ ID NO: 108552 - protein, 13 aa, Homo sapiens
  CDR3 for beta chain variable domain of TCR clone 54276 (TRBV4-1, TRBJ2-2)
CASSQENTGELFF

SEQ ID NO: 108553 - protein, 13 aa, Homo sapiens
  CDR3 for alpha chain variable domain of TCR clone 54277 (TRAV35, TRAJ44)
CAGLSGTASKLTF

SEQ ID NO: 108554 - protein, 15 aa, Homo sapiens
  CDR3 for beta chain variable domain of TCR clone 54277 (TRBV25-1, TRBJ1-4)
CASSPGDSTNEKLFF

SEQ ID NO: 108555 - protein, 13 aa, Homo sapiens
  CDR3 for alpha chain variable domain of TCR clone 54278 (TRAV26-1, TRAJ33)
CIVRVGSNYQLIW

SEQ ID NO: 108556 - protein, 15 aa, Homo sapiens
  CDR3 for beta chain variable domain of TCR clone 54278 (TRBV7-2, TRBJ1-5)
CASSFSAGINQPQHF

SEQ ID NO: 108557 - protein, 14 aa, Homo sapiens
  CDR3 for alpha chain variable domain of TCR clone 54279 (TRAV2, TRAJ3)
CAVDRYSSASKIIF

SEQ ID NO: 108558 - protein, 16 aa, Homo sapiens
  CDR3 for beta chain variable domain of TCR clone 54279 (TRBV20-1, TRBJ1-5)
CSAELPGQQTDQPQHF

SEQ ID NO: 108559 - protein, 13 aa, Homo sapiens
  CDR3 for alpha chain variable domain of TCR clone 54280 (TRAV1-2, TRAJ9)
CAALNTGGFKTIF

SEQ ID NO: 108560 - protein, 16 aa, Homo sapiens
  CDR3 for beta chain variable domain of TCR clone 54280 (TRBV12-4, TRBJ2-5)
CASSFFVRGRQETQYF

SEQ ID NO: 108561 - protein, 10 aa, Homo sapiens
  CDR3 for alpha chain variable domain of TCR clone 54281 (TRAV17, TRAJ36)
CATVAGNLFF

SEQ ID NO: 108562 - protein, 12 aa, Homo sapiens
  CDR3 for beta chain variable domain of TCR clone 54281 (TRBV11-2, TRBJ2-4)
RASSSASGSEYF

SEQ ID NO: 108563 - protein, 13 aa, Homo sapiens
  CDR3 for alpha chain variable domain of TCR clone 54282 (TRAV13-1, TRAJ11)
CAAVLAGYSTLTF

SEQ ID NO: 108564 - protein, 17 aa, Homo sapiens
  CDR3 for beta chain variable domain of TCR clone 54282 (TRBV25-1, TRBJ2-7)
CASSGARVVFSSYEQYF

SEQ ID NO: 108565 - protein, 14 aa, Homo sapiens
  CDR3 for alpha chain variable domain of TCR clone 54283 (TRAV8-1, TRAJ5)
CAVRTDTGRRALTF

SEQ ID NO: 108566 - protein, 17 aa, Homo sapiens
  CDR3 for beta chain variable domain of TCR clone 54283 (TRBV13, TRBJ2-3)
CASSLSRVAGGRNTQYF

SEQ ID NO: 108567 - protein, 14 aa, Homo sapiens
  CDR3 for alpha chain variable domain of TCR clone 54284 (TRAV8-3, TRAJ39)
YAVGANNAGNMLTF

SEQ ID NO: 108568 - protein, 15 aa, Homo sapiens
  CDR3 for beta chain variable domain of TCR clone 54284 (TRBV4-3, TRBJ1-1)
CASSQELGRGTEAFF

SEQ ID NO: 108569 - protein, 17 aa, Homo sapiens
  CDR3 for alpha chain variable domain of TCR clone 54285 (TRAV4, TRAJ18)
CLVGERSVGSTLGRRYF

SEQ ID NO: 108570 - protein, 16 aa, Homo sapiens
  CDR3 for beta chain variable domain of TCR clone 54285 (TRBV15, TRBJ1-4)
CATSRDSPPGREKLFF

SEQ ID NO: 108571 - protein, 12 aa, Homo sapiens
  CDR3 for alpha chain variable domain of TCR clone 54286 (TRAV12-3, TRAJ34)
CAMGYNTDKLIF

SEQ ID NO: 108572 - protein, 15 aa, Homo sapiens
  CDR3 for beta chain variable domain of TCR clone 54286 (TRBV28, TRBJ2-1)
CASSIIAGSRSEQFF

SEQ ID NO: 108573 - protein, 15 aa, Homo sapiens
  CDR3 for alpha chain variable domain of TCR clone 54287 (TRAV17, TRAJ57)
CATGPSQGGSEKLVF

SEQ ID NO: 108574 - protein, 16 aa, Homo sapiens
  CDR3 for beta chain variable domain of TCR clone 54287 (TRBV12-4, TRBJ1-5)
CASSRPIGGSNQPQHF

SEQ ID NO: 108575 - protein, 12 aa, Homo sapiens
  CDR3 for alpha chain variable domain of TCR clone 54288 (TRAV12-3, TRAJ17)
CAMTLTGNKLTF

SEQ ID NO: 108576 - protein, 11 aa, Homo sapiens
  CDR3 for beta chain variable domain of TCR clone 54288 (TRBV7-9, TRBJ2-3)
CASSPTDTQYF

SEQ ID NO: 108577 - protein, 16 aa, Homo sapiens
  CDR3 for alpha chain variable domain of TCR clone 54289 (TRAV3, TRAJ10)
CAVRDMSAGGGNKLTF

SEQ ID NO: 108578 - protein, 14 aa, Homo sapiens
  CDR3 for beta chain variable domain of TCR clone 54289 (TRBV19, TRBJ2-1)
CASPTFVLSGEQFF

SEQ ID NO: 108579 - protein, 11 aa, Homo sapiens
  CDR3 for alpha chain variable domain of TCR clone 54290 (TRAV1-1, TRAJ23)
CAVRQGGNLIF

SEQ ID NO: 108580 - protein, 14 aa, Homo sapiens
  CDR3 for beta chain variable domain of TCR clone 54290 (TRBV19, TRBJ2-1)
CASPTFVLSGEQFF

SEQ ID NO: 108581 - protein, 14 aa, Homo sapiens
  CDR3 for alpha chain variable domain of TCR clone 54291 (TRAV13-1, TRAJ10)
CAAKEPGGGNKLTF

SEQ ID NO: 108582 - protein, 14 aa, Homo sapiens
  CDR3 for beta chain variable domain of TCR clone 54291 (TRBV13, TRBJ2-5)
CASSLERVGETQYF

SEQ ID NO: 108583 - protein, 14 aa, Homo sapiens
  CDR3 for alpha chain variable domain of TCR clone 54292 (TRAV29/DV5, TRAJ45)
CAAGFRGGADGLTF

SEQ ID NO: 108584 - protein, 11 aa, Homo sapiens
  CDR3 for beta chain variable domain of TCR clone 54292 (TRBV11-2, TRBJ2-2)
CASSLPGELFF

SEQ ID NO: 108585 - protein, 14 aa, Homo sapiens
  CDR3 for alpha chain variable domain of TCR clone 54293 (TRAV12-1, TRAJ17)
CVVNYKAAGNKLTF

SEQ ID NO: 108586 - protein, 17 aa, Homo sapiens
  CDR3 for beta chain variable domain of TCR clone 54293 (TRBV20-1, TRBJ2-1)
CSASSSGLAGSYTEQFF

SEQ ID NO: 108587 - protein, 14 aa, Homo sapiens
  CDR3 for alpha chain variable domain of TCR clone 54294 (TRAV12-3, TRAJ10)
SHLPLTGGGNKLTF

SEQ ID NO: 108588 - protein, 12 aa, Homo sapiens
  CDR3 for beta chain variable domain of TCR clone 54294 (TRBV14, TRBJ2-5)
CASSHLKETQYF

SEQ ID NO: 108589 - protein, 16 aa, Homo sapiens
  CDR3 for alpha chain variable domain of TCR clone 54295 (TRAV1-1, TRAJ8)
CLLLLRGGTGFQKLVF

SEQ ID NO: 108590 - protein, 16 aa, Homo sapiens
  CDR3 for beta chain variable domain of TCR clone 54295 (TRBV12-5, TRBJ2-5)
CASGPRTSGNQETQYF

SEQ ID NO: 108591 - protein, 14 aa, Homo sapiens
  CDR3 for alpha chain variable domain of TCR clone 54296 (TRAV38-1, TRAJ45)
CAYCSGGGADGLTF

SEQ ID NO: 108592 - protein, 20 aa, Homo sapiens
  CDR3 for beta chain variable domain of TCR clone 54296 (TRBV28, TRBJ2-1)
CASTPIGRSPGLAGGNEQFF

SEQ ID NO: 108593 - protein, 15 aa, Homo sapiens
  CDR3 for alpha chain variable domain of TCR clone 54297 (TRAV13-1, TRAJ16)
WAARYQMARSCSLQG

SEQ ID NO: 108594 - protein, 13 aa, Homo sapiens
  CDR3 for beta chain variable domain of TCR clone 54297 (TRBV4-1, TRBJ2-1)
CASSQAGGDEQFF

SEQ ID NO: 108595 - protein, 13 aa, Homo sapiens
  CDR3 for alpha chain variable domain of TCR clone 54298 (TRAV8-3, TRAJ48)
CAVVPFGNEKLIF

SEQ ID NO: 108596 - protein, 15 aa, Homo sapiens
  CDR3 for beta chain variable domain of TCR clone 54298 (TRBV11-2, TRBJ2-1)
CASSSPSTRYNEQFF

SEQ ID NO: 108597 - protein, 19 aa, Homo sapiens
  CDR3 for alpha chain variable domain of TCR clone 54299 (TRAV1-2, TRAJ26)
CLLPLCCERPDNHGQNFVF

SEQ ID NO: 108598 - protein, 12 aa, Homo sapiens
  CDR3 for beta chain variable domain of TCR clone 54299 (TRBV20-1, TRBJ2-1)
CSAQYTYNEQFF

SEQ ID NO: 108599 - protein, 16 aa, Homo sapiens
  CDR3 for alpha chain variable domain of TCR clone 54300 (TRAV3, TRAJ37)
CAVRVRGSGNTGKLIF

SEQ ID NO: 108600 - protein, 11 aa, Homo sapiens
  CDR3 for beta chain variable domain of TCR clone 54300 (TRBV11-2, TRBJ2-2)
CDSSLPGELFF

SEQ ID NO: 108601 - protein, 12 aa, Homo sapiens
  CDR3 for alpha chain variable domain of TCR clone 54301 (TRAV13-1, TRAJ21)
CAAKEGFNKFYF

SEQ ID NO: 108602 - protein, 15 aa, Homo sapiens
  CDR3 for beta chain variable domain of TCR clone 54301 (TRBV7-2, TRBJ2-1)
CASSSGLAGGNEQFF

SEQ ID NO: 108603 - protein, 11 aa, Homo sapiens
  CDR3 for alpha chain variable domain of TCR clone 54302 (TRAV23/DV6, TRAJ58)
CAARLLRGETS

SEQ ID NO: 108604 - protein, 14 aa, Homo sapiens
  CDR3 for beta chain variable domain of TCR clone 54302 (TRBV4-1, TRBJ2-2)
CASSQAVNTGELFF

SEQ ID NO: 108605 - protein, 18 aa, Homo sapiens
  CDR3 for alpha chain variable domain of TCR clone 54303 (TRAV26-1, TRAJ52)
CIVRVEGAGGTSYGKMTF

SEQ ID NO: 108606 - protein, 13 aa, Homo sapiens
  CDR3 for beta chain variable domain of TCR clone 54303 (TRBV7-3, TRBJ1-2)
CASSLKRGYGYTF

SEQ ID NO: 108607 - protein, 16 aa, Homo sapiens
  CDR3 for alpha chain variable domain of TCR clone 54304 (TRAV30, TRAJ57)
CGTGWAPQGGPEKLVF

SEQ ID NO: 108608 - protein, 14 aa, Homo sapiens
  CDR3 for beta chain variable domain of TCR clone 54304 (TRBV18, TRBJ1-1)
CASSPGFQGVEAFF

SEQ ID NO: 108609 - protein, 11 aa, Homo sapiens
  CDR3 for alpha chain variable domain of TCR clone 54305 (TRAV21, TRAJ34)
CAVTNTDKLIF

SEQ ID NO: 108610 - protein, 16 aa, Homo sapiens
  CDR3 for beta chain variable domain of TCR clone 54305 (TRBV18, TRBJ1-1)
GASSPGVGGRGGEAFF

SEQ ID NO: 108611 - protein, 14 aa, Homo sapiens
  CDR3 for alpha chain variable domain of TCR clone 54306 (TRAV1-2, TRAJ8)
CAVREDTGFQKLVF

SEQ ID NO: 108612 - protein, 12 aa, Homo sapiens
  CDR3 for beta chain variable domain of TCR clone 54306 (TRBV11-2, TRBJ2-2)
CASSPPTGELFF

SEQ ID NO: 108613 - protein, 14 aa, Homo sapiens
  CDR3 for alpha chain variable domain of TCR clone 54307 (TRAV1-2, TRAJ16)
CAVNRFSDGQKLLF

SEQ ID NO: 108614 - protein, 16 aa, Homo sapiens
  CDR3 for beta chain variable domain of TCR clone 54307 (TRBV28, TRBJ2-7)
CASSSGTSGRGYEQYF

SEQ ID NO: 108615 - protein, 15 aa, Homo sapiens
  CDR3 for alpha chain variable domain of TCR clone 54308 (TRAV25, TRAJ53)
CPTSNSVGSNYKLTF

SEQ ID NO: 108616 - protein, 14 aa, Homo sapiens
  CDR3 for beta chain variable domain of TCR clone 54308 (TRBV11-2, TRBJ2-3)
CASSRLARTDTQYF

SEQ ID NO: 108617 - protein, 15 aa, Homo sapiens
  CDR3 for alpha chain variable domain of TCR clone 54309 (TRAV8-3, TRAJ41)
CAVGSNSNSGYALNF

SEQ ID NO: 108618 - protein, 17 aa, Homo sapiens
  CDR3 for beta chain variable domain of TCR clone 54309 (TRBV25-1, TRBJ2-1)
RASSAYGQGRGVYEQFF

SEQ ID NO: 108619 - protein, 17 aa, Homo sapiens
  CDR3 for alpha chain variable domain of TCR clone 54310 (TRAV12-2, TRAJ52)
CAVNPYAGGTSYGKLTF

SEQ ID NO: 108620 - protein, 14 aa, Homo sapiens
  CDR3 for beta chain variable domain of TCR clone 54310 (TRBV25-1, TRBJ1-1)
CASTHLGGNTEAFF

SEQ ID NO: 108621 - protein, 14 aa, Homo sapiens
  CDR3 for alpha chain variable domain of TCR clone 54311 (TRAV12-1, TRAJ6)
CVVARIRRKLHTYI

SEQ ID NO: 108622 - protein, 14 aa, Homo sapiens
  CDR3 for beta chain variable domain of TCR clone 54311 (TRBV7-6, TRBJ2-3)
CASSLGTVTDTQYF

SEQ ID NO: 108623 - protein, 16 aa, Homo sapiens
  CDR3 for alpha chain variable domain of TCR clone 54312 (TRAV30, TRAJ24)
CGTEIVDADSWGKFQF

SEQ ID NO: 108624 - protein, 18 aa, Homo sapiens
  CDR3 for beta chain variable domain of TCR clone 54312 (TRBV11-2, TRBJ2-3)
CASSLGGASRGAPNTQYF

SEQ ID NO: 108625 - protein, 15 aa, Homo sapiens
  CDR3 for alpha chain variable domain of TCR clone 54313 (TRAV21, TRAJ37)
CAVRPTLSNTGKLIF

SEQ ID NO: 108626 - protein, 16 aa, Homo sapiens
  CDR3 for beta chain variable domain of TCR clone 54313 (TRBV24-1, TRBJ2-3)
CATSDRRQDITDTQYF

SEQ ID NO: 108627 - protein, 23 aa, Homo sapiens
  CDR3 for alpha chain variable domain of TCR clone 54314 (TRAV30, TRAJ43)
CTLRPPSSVTQEPTSAALSDMRF

SEQ ID NO: 108628 - protein, 16 aa, Homo sapiens
  CDR3 for beta chain variable domain of TCR clone 54314 (TRBV13, TRBJ2-2)
CASSPRTGEHTGELFF

SEQ ID NO: 108629 - protein, 15 aa, Homo sapiens
  CDR3 for alpha chain variable domain of TCR clone 54315 (TRAV13-1, TRAJ44)
CAASRGGGTASKLTF

SEQ ID NO: 108630 - protein, 14 aa, Homo sapiens
  CDR3 for beta chain variable domain of TCR clone 54315 (TRBV7-2, TRBJ2-5)
CASSPRGSPETQYF

SEQ ID NO: 108631 - protein, 16 aa, Homo sapiens
  CDR3 for alpha chain variable domain of TCR clone 54316 (TRAV3, TRAJ37)
CAVRVRGSGNTGKLIF

SEQ ID NO: 108632 - protein, 11 aa, Homo sapiens
  CDR3 for beta chain variable domain of TCR clone 54316 (TRBV11-2, TRBJ2-2)
CASSSPGELFF

SEQ ID NO: 108633 - protein, 15 aa, Homo sapiens
  CDR3 for alpha chain variable domain of TCR clone 54317 (TRAV1-2, TRAJ39)
CAVEGVDNAGNMLTF

SEQ ID NO: 108634 - protein, 13 aa, Homo sapiens
  CDR3 for beta chain variable domain of TCR clone 54317 (TRBV27, TRBJ1-6)
CASRWAGYSPLHF

SEQ ID NO: 108635 - protein, 10 aa, Homo sapiens
  CDR3 for alpha chain variable domain of TCR clone 54318 (TRAV8-4, TRAJ43)
CAVSADDMRF

SEQ ID NO: 108636 - protein, 14 aa, Homo sapiens
  CDR3 for beta chain variable domain of TCR clone 54318 (TRBV12-5, TRBJ2-5)
CASGSRTHQETQYF

SEQ ID NO: 108637 - protein, 13 aa, Homo sapiens
  CDR3 for alpha chain variable domain of TCR clone 54319 (TRAV21, TRAJ27)
CAARPGNAGKSTF

SEQ ID NO: 108638 - protein, 14 aa, Homo sapiens
  CDR3 for beta chain variable domain of TCR clone 54319 (TRBV7-9, TRBJ2-5)
CASSLDTAQETQHF

SEQ ID NO: 108639 - protein, 12 aa, Homo sapiens
  CDR3 for alpha chain variable domain of TCR clone 54320 (TRAV2, TRAJ31)
CAVEEGNARLMF

SEQ ID NO: 108640 - protein, 18 aa, Homo sapiens
  CDR3 for beta chain variable domain of TCR clone 54320 (TRBV7-9, TRBJ2-3)
CASSLDLAGLATPDTQCF

SEQ ID NO: 108641 - protein, 16 aa, Homo sapiens
  CDR3 for alpha chain variable domain of TCR clone 54321 (TRAV27, TRAJ52)
CAGAPAGGTSYGTLTF

SEQ ID NO: 108642 - protein, 12 aa, Homo sapiens
  CDR3 for beta chain variable domain of TCR clone 54321 (TRBV27, TRBJ2-1)
CASRGFYNEQFF

SEQ ID NO: 108643 - protein, 11 aa, Homo sapiens
  CDR3 for alpha chain variable domain of TCR clone 54322 (TRAV21, TRAJ48)
CAVDGDEKLTF

SEQ ID NO: 108644 - protein, 16 aa, Homo sapiens
  CDR3 for beta chain variable domain of TCR clone 54322 (TRBV12-4, TRBJ1-5)
CASSSGPRGSNQPQHF

SEQ ID NO: 108645 - protein, 12 aa, Homo sapiens
  CDR3 for alpha chain variable domain of TCR clone 54323 (TRAV8-3, TRAJ27)
WAVGAEAGKSTF

SEQ ID NO: 108646 - protein, 14 aa, Homo sapiens
  CDR3 for beta chain variable domain of TCR clone 54323 (TRBV2, TRBJ2-1)
CASRLIVGHDEQFF

SEQ ID NO: 108647 - protein, 14 aa, Homo sapiens
  CDR3 for alpha chain variable domain of TCR clone 54324 (TRAV13-1, TRAJ35)
RAASKGGFGNVLHC

SEQ ID NO: 108648 - protein, 14 aa, Homo sapiens
  CDR3 for beta chain variable domain of TCR clone 54324 (TRBV7-8, TRBJ2-3)
CASSFPDGQDTQYF

SEQ ID NO: 108649 - protein, 14 aa, Homo sapiens
  CDR3 for alpha chain variable domain of TCR clone 54325 (TRAV12-2, TRAJ13)
CAVKKTGGYQKVTF

SEQ ID NO: 108650 - protein, 15 aa, Homo sapiens
  CDR3 for beta chain variable domain of TCR clone 54325 (TRBV7-9, TRBJ1-4)
CASSRTGGFNEKLFF

SEQ ID NO: 108651 - protein, 15 aa, Homo sapiens
  CDR3 for alpha chain variable domain of TCR clone 54326 (TRAV12-1, TRAJ37)
CVVNITGGNTGKLIF

SEQ ID NO: 108652 - protein, 12 aa, Homo sapiens
  CDR3 for beta chain variable domain of TCR clone 54326 (TRBV2, TRBJ2-7)
CASSRVGYEQYF

SEQ ID NO: 108653 - protein, 11 aa, Homo sapiens
  CDR3 for alpha chain variable domain of TCR clone 54327 (TRAV13-1, TRAJ39)
FASHAGNMLTF

SEQ ID NO: 108654 - protein, 14 aa, Homo sapiens
  CDR3 for beta chain variable domain of TCR clone 54327 (TRBV11-2, TRBJ1-5)
CASSLDRGRQPQHF

SEQ ID NO: 108655 - protein, 15 aa, Homo sapiens
  CDR3 for alpha chain variable domain of TCR clone 54328 (TRAV21, TRAJ45)
CAVSYSGGGADGLTF

SEQ ID NO: 108656 - protein, 13 aa, Homo sapiens
  CDR3 for beta chain variable domain of TCR clone 54328 (TRBV20-1, TRBJ2-5)
CSVATELQETQYF

SEQ ID NO: 108657 - protein, 14 aa, Homo sapiens
  CDR3 for alpha chain variable domain of TCR clone 54329 (TRAV16, TRAJ33)
CALSAMDSNYQLIW

SEQ ID NO: 108658 - protein, 14 aa, Homo sapiens
  CDR3 for beta chain variable domain of TCR clone 54329 (TRBV27, TRBJ2-2)
CASSLGDTTGELFF

SEQ ID NO: 108659 - protein, 15 aa, Homo sapiens
  CDR3 for alpha chain variable domain of TCR clone 54330 (TRAV8-3, TRAJ7)
CAVGSISYGNNRLAF

SEQ ID NO: 108660 - protein, 13 aa, Homo sapiens
  CDR3 for beta chain variable domain of TCR clone 54330 (TRBV4-2, TRBJ1-1)
CASSQAGNTEAFS

SEQ ID NO: 108661 - protein, 12 aa, Homo sapiens
  CDR3 for alpha chain variable domain of TCR clone 54331 (TRAV26-1, TRAJ13)
CIVSRGYQKVTF

SEQ ID NO: 108662 - protein, 16 aa, Homo sapiens
  CDR3 for beta chain variable domain of TCR clone 54331 (TRBV7-9, TRBJ1-2)
CASSLGFSSGEDGYTF

SEQ ID NO: 108663 - protein, 14 aa, Homo sapiens
  CDR3 for alpha chain variable domain of TCR clone 54332 (TRAV35, TRAJ24)
CAGPRRDSWGELQF

SEQ ID NO: 108664 - protein, 12 aa, Homo sapiens
  CDR3 for beta chain variable domain of TCR clone 54332 (TRBV12-4, TRBJ2-3)
CASSLGQDTQYF

SEQ ID NO: 108665 - protein, 18 aa, Homo sapiens
  CDR3 for alpha chain variable domain of TCR clone 54333 (TRAV21, TRAJ52)
CAVRPSPAGGTSYGKPTF

SEQ ID NO: 108666 - protein, 12 aa, Homo sapiens
  CDR3 for beta chain variable domain of TCR clone 54333 (TRBV11-2, TRBJ2-2)
CASSLGGGELFF

SEQ ID NO: 108667 - protein, 14 aa, Homo sapiens
  CDR3 for alpha chain variable domain of TCR clone 54334 (TRAV1-2, TRAJ16)
CAVNRFSDGQKLLF

SEQ ID NO: 108668 - protein, 14 aa, Homo sapiens
  CDR3 for beta chain variable domain of TCR clone 54334 (TRBV4-1, TRBJ2-2)
CASSQAVNTGELFL

SEQ ID NO: 108669 - protein, 12 aa, Homo sapiens
  CDR3 for alpha chain variable domain of TCR clone 54335 (TRAV36/DV7, TRAJ37)
CACYGNTGKLIF

SEQ ID NO: 108670 - protein, 16 aa, Homo sapiens
  CDR3 for beta chain variable domain of TCR clone 54335 (TRBV20-1, TRBJ1-4)
CSAPGQGLLTNEKLFF

SEQ ID NO: 108671 - protein, 13 aa, Homo sapiens
  CDR3 for alpha chain variable domain of TCR clone 54336 (TRAV8-3, TRAJ21)
CAVGAYKFNKFYF

SEQ ID NO: 108672 - protein, 16 aa, Homo sapiens
  CDR3 for beta chain variable domain of TCR clone 54336 (TRBV19, TRBJ2-1)
CASSMGGGSSYNEQFF

SEQ ID NO: 108673 - protein, 18 aa, Homo sapiens
  CDR3 for alpha chain variable domain of TCR clone 54337 (TRAV21, TRAJ52)
CAVRPSPAGGTSYGKLTF

SEQ ID NO: 108674 - protein, 12 aa, Homo sapiens
  CDR3 for beta chain variable domain of TCR clone 54337 (TRBV7-9, TRBJ1-4)
CASSTDREKLFF

SEQ ID NO: 108675 - protein, 14 aa, Homo sapiens
  CDR3 for alpha chain variable domain of TCR clone 54338 (TRAV12-2, TRAJ4)
CAVLIGGGYNKLIF

SEQ ID NO: 108676 - protein, 13 aa, Homo sapiens
  CDR3 for beta chain variable domain of TCR clone 54338 (TRBV9, TRBJ2-1)
CASSVGQGGEQFF

SEQ ID NO: 108677 - protein, 12 aa, Homo sapiens
  CDR3 for alpha chain variable domain of TCR clone 54339 (TRAV8-3, TRAJ26)
CAGDNYGQNFVS

SEQ ID NO: 108678 - protein, 13 aa, Homo sapiens
  CDR3 for beta chain variable domain of TCR clone 54339 (TRBV20-1, TRBJ2-5)
CSARGDYQETQYF

SEQ ID NO: 108679 - protein, 16 aa, Homo sapiens
  CDR3 for alpha chain variable domain of TCR clone 54340 (TRAV12-2, TRAJ50)
CAVGTATKTSYDKVIF

SEQ ID NO: 108680 - protein, 12 aa, Homo sapiens
  CDR3 for beta chain variable domain of TCR clone 54340 (TRBV12-4, TRBJ1-5)
CASSLGGQPQHF

SEQ ID NO: 108681 - protein, 12 aa, Homo sapiens
  CDR3 for alpha chain variable domain of TCR clone 54341 (TRAV17, TRAJ4)
CATDGGYNKLIF

SEQ ID NO: 108682 - protein, 13 aa, Homo sapiens
  CDR3 for beta chain variable domain of TCR clone 54341 (TRBV29-1, TRBJ2-2)
CSTAGVNTGELFF

SEQ ID NO: 108683 - protein, 11 aa, Homo sapiens
  CDR3 for alpha chain variable domain of TCR clone 54342 (TRAV35, TRAJ30)
CAPGGDDKIIL

SEQ ID NO: 108684 - protein, 14 aa, Homo sapiens
  CDR3 for beta chain variable domain of TCR clone 54342 (TRBV7-6, TRBJ2-1)
CASSLGGGADEQFF

SEQ ID NO: 108685 - protein, 12 aa, Homo sapiens
  CDR3 for alpha chain variable domain of TCR clone 54343 (TRAV1-1, TRAJ8)
CAGGTGFQKFVF

SEQ ID NO: 108686 - protein, 15 aa, Homo sapiens
  CDR3 for beta chain variable domain of TCR clone 54343 (TRBV7-9, TRBJ1-4)
CASSRTGGFNEKLFF

SEQ ID NO: 108687 - protein, 11 aa, Homo sapiens
  CDR3 for alpha chain variable domain of TCR clone 54344 (TRAV12-2, TRAJ49)
CAVTGGNQFYF

SEQ ID NO: 108688 - protein, 15 aa, Homo sapiens
  CDR3 for beta chain variable domain of TCR clone 54344 (TRBV7-8, TRBJ1-5)
CASSLERRGLEPRHF

SEQ ID NO: 108689 - protein, 18 aa, Homo sapiens
  CDR3 for alpha chain variable domain of TCR clone 54345 (TRAV21, TRAJ53)
CAVKGGENSGGSNYKLTL

SEQ ID NO: 108690 - protein, 14 aa, Homo sapiens
  CDR3 for beta chain variable domain of TCR clone 54345 (TRBV6-1, TRBJ1-5)
CASSAGAGSQPQHF

SEQ ID NO: 108691 - protein, 13 aa, Homo sapiens
  CDR3 for alpha chain variable domain of TCR clone 54346 (TRAV12-1, TRAJ40)
CVVPTSGTYKYIF

SEQ ID NO: 108692 - protein, 18 aa, Homo sapiens
  CDR3 for beta chain variable domain of TCR clone 54346 (TRBV7-7, TRBJ2-1)
CASSPRTSGMSSYNEQFF

SEQ ID NO: 108693 - protein, 12 aa, Homo sapiens
  CDR3 for alpha chain variable domain of TCR clone 54347 (TRAV8-1, TRAJ31)
CAVINNNARLMF

SEQ ID NO: 108694 - protein, 15 aa, Homo sapiens
  CDR3 for beta chain variable domain of TCR clone 54347 (TRBV20-1, TRBJ2-2)
CSARGGQGSTGELFF

SEQ ID NO: 108695 - protein, 12 aa, Homo sapiens
  CDR3 for alpha chain variable domain of TCR clone 54348 (TRAV12-3, TRAJ20)
CAMVGGDYKLSF

SEQ ID NO: 108696 - protein, 13 aa, Homo sapiens
  CDR3 for beta chain variable domain of TCR clone 54348 (TRBV23-1, TRBJ1-4)
CASKGKFNEKLFF

SEQ ID NO: 108697 - protein, 14 aa, Homo sapiens
  CDR3 for alpha chain variable domain of TCR clone 54349 (TRAV1-2, TRAJ16)
CAVNRFSDGQKLLF

SEQ ID NO: 108698 - protein, 15 aa, Homo sapiens
  CDR3 for beta chain variable domain of TCR clone 54349 (TRBV9, TRBJ1-2)
CASSVVGQANYGYTF

SEQ ID NO: 108699 - protein, 14 aa, Homo sapiens
  CDR3 for alpha chain variable domain of TCR clone 54350 (TRAV38-1, TRAJ40)
CALRPTSGTYKYIF

SEQ ID NO: 108700 - protein, 14 aa, Homo sapiens
  CDR3 for beta chain variable domain of TCR clone 54350 (TRBV3-1, TRBJ2-5)
CASSQGPDQETQYF

SEQ ID NO: 108701 - protein, 13 aa, Homo sapiens
  CDR3 for alpha chain variable domain of TCR clone 54351 (TRAV17, TRAJ5)
CAPMDTGRRALTF

SEQ ID NO: 108702 - protein, 14 aa, Homo sapiens
  CDR3 for beta chain variable domain of TCR clone 54351 (TRBV7-3, TRBJ2-1)
CASSLAGGANEQFF

SEQ ID NO: 108703 - protein, 16 aa, Homo sapiens
  CDR3 for alpha chain variable domain of TCR clone 54352 (TRAV3, TRAJ37)
CAVRPHGSGNTGKLIF

SEQ ID NO: 108704 - protein, 12 aa, Homo sapiens
  CDR3 for beta chain variable domain of TCR clone 54352 (TRBV11-2, TRBJ2-2)
CASSLPTGELFF

SEQ ID NO: 108705 - protein, 13 aa, Homo sapiens
  CDR3 for alpha chain variable domain of TCR clone 54353 (TRAV2, TRAJ40)
SAVVTSGTYRYIF

SEQ ID NO: 108706 - protein, 14 aa, Homo sapiens
  CDR3 for beta chain variable domain of TCR clone 54353 (TRBV19, TRBJ2-1)
CASPTFVLSGEQFF

SEQ ID NO: 108707 - protein, 20 aa, Homo sapiens
  CDR3 for alpha chain variable domain of TCR clone 54354 (TRAV12-2, TRAJ42)
SPVIQPPTSVKGGSQGNLIF

SEQ ID NO: 108708 - protein, 18 aa, Homo sapiens
  CDR3 for beta chain variable domain of TCR clone 54354 (TRBV11-2, TRBJ2-3)
CASSLGGASRGAPNTQYF

SEQ ID NO: 108709 - protein, 14 aa, Homo sapiens
  CDR3 for alpha chain variable domain of TCR clone 54355 (TRAV35, TRAJ40)
CAGSTTSGTYNYIF

SEQ ID NO: 108710 - protein, 13 aa, Homo sapiens
  CDR3 for beta chain variable domain of TCR clone 54355 (TRBV20-1, TRBJ1-6)
CSAPLGVGSPLHF

SEQ ID NO: 108711 - protein, 12 aa, Homo sapiens
  CDR3 for alpha chain variable domain of TCR clone 54356 (TRAV21, TRAJ33)
CAKMDSNYQLIW

SEQ ID NO: 108712 - protein, 16 aa, Homo sapiens
  CDR3 for beta chain variable domain of TCR clone 54356 (TRBV12-5, TRBJ2-5)
CASGPRTSGNQETQYF

SEQ ID NO: 108713 - protein, 14 aa, Homo sapiens
  CDR3 for alpha chain variable domain of TCR clone 54357 (TRAV34, TRAJ44)
CGADGTGTASKLTF

SEQ ID NO: 108714 - protein, 12 aa, Homo sapiens
  CDR3 for beta chain variable domain of TCR clone 54357 (TRBV11-2, TRBJ2-2)
CSSSLGGGELFF

SEQ ID NO: 108715 - protein, 12 aa, Homo sapiens
  CDR3 for alpha chain variable domain of TCR clone 54358 (TRAV1-2, TRAJ9)
CAGYTGGFKTIF

SEQ ID NO: 108716 - protein, 15 aa, Homo sapiens
  CDR3 for beta chain variable domain of TCR clone 54358 (TRBV11-2, TRBJ2-1)
CASSPAGQSLNEQFL

SEQ ID NO: 108717 - protein, 13 aa, Homo sapiens
  CDR3 for alpha chain variable domain of TCR clone 54359 (TRAV23/DV6, TRAJ5)
CAARAAGRRALTF

SEQ ID NO: 108718 - protein, 15 aa, Homo sapiens
  CDR3 for beta chain variable domain of TCR clone 54359 (TRBV7-9, TRBJ1-1)
CASSLLEQGGTEAFF

SEQ ID NO: 108719 - protein, 14 aa, Homo sapiens
  CDR3 for alpha chain variable domain of TCR clone 54360 (TRAV12-2, TRAJ9)
CAMSPNTGGFKTIF

SEQ ID NO: 108720 - protein, 12 aa, Homo sapiens
  CDR3 for beta chain variable domain of TCR clone 54360 (TRBV19, TRBJ1-5)
RASSIAQQPQHF

SEQ ID NO: 108721 - protein, 14 aa, Homo sapiens
  CDR3 for alpha chain variable domain of TCR clone 54361 (TRAV1-2, TRAJ16)
CAVSRFSDGQKLLF

SEQ ID NO: 108722 - protein, 14 aa, Homo sapiens
  CDR3 for beta chain variable domain of TCR clone 54361 (TRBV20-1, TRBJ1-5)
CSAPGTGVGQPQHF

SEQ ID NO: 108723 - protein, 13 aa, Homo sapiens
  CDR3 for alpha chain variable domain of TCR clone 54362 (TRAV8-3, TRAJ28)
CAVGAVGSYQLTF

SEQ ID NO: 108724 - protein, 14 aa, Homo sapiens
  CDR3 for beta chain variable domain of TCR clone 54362 (TRBV25-1, TRBJ1-1)
CASTHLGGNTEASF

SEQ ID NO: 108725 - protein, 16 aa, Homo sapiens
  CDR3 for alpha chain variable domain of TCR clone 54363 (TRAV12-3, TRAJ53)
CAMSPGSGGSNYKLTF

SEQ ID NO: 108726 - protein, 15 aa, Homo sapiens
  CDR3 for beta chain variable domain of TCR clone 54363 (TRBV13, TRBJ1-5)
CASSFGQGGVQPQHF

SEQ ID NO: 108727 - protein, 11 aa, Homo sapiens
  CDR3 for alpha chain variable domain of TCR clone 54364 (TRAV1-1, TRAJ23)
CAVRQGGKLIF

SEQ ID NO: 108728 - protein, 12 aa, Homo sapiens
  CDR3 for beta chain variable domain of TCR clone 54364 (TRBV11-2, TRBJ2-1)
CASSPGNNEQFF

SEQ ID NO: 108729 - protein, 11 aa, Homo sapiens
  CDR3 for alpha chain variable domain of TCR clone 54365 (TRAV21, TRAJ34)
CAHYNTDKLIF

SEQ ID NO: 108730 - protein, 16 aa, Homo sapiens
  CDR3 for beta chain variable domain of TCR clone 54365 (TRBV2, TRBJ2-2)
CASSAFGDANTGELFF

SEQ ID NO: 108731 - protein, 16 aa, Homo sapiens
  CDR3 for alpha chain variable domain of TCR clone 54366 (TRAV30, TRAJ24)
CGTEMVDADSWGKFQF

SEQ ID NO: 108732 - protein, 12 aa, Homo sapiens
  CDR3 for beta chain variable domain of TCR clone 54366 (TRBV11-2, TRBJ2-2)
CASSLPTGELFF

SEQ ID NO: 108733 - protein, 15 aa, Homo sapiens
  CDR3 for alpha chain variable domain of TCR clone 54367 (TRAV35, TRAJ40)
CAGQLDTSGTYKYIF

SEQ ID NO: 108734 - protein, 14 aa, Homo sapiens
  CDR3 for beta chain variable domain of TCR clone 54367 (TRBV7-3, TRBJ2-1)
CASSLAGGTNEQFF

SEQ ID NO: 108735 - protein, 12 aa, Homo sapiens
  CDR3 for alpha chain variable domain of TCR clone 54368 (TRAV16, TRAJ49)
CALNEGVNQFYF

SEQ ID NO: 108736 - protein, 14 aa, Homo sapiens
  CDR3 for beta chain variable domain of TCR clone 54368 (TRBV7-9, TRBJ2-1)
CASRPTGLRNEQFF

SEQ ID NO: 108737 - protein, 13 aa, Homo sapiens
  CDR3 for alpha chain variable domain of TCR clone 54369 (TRAV27, TRAJ41)
CEGEGNSGYALNF

SEQ ID NO: 108738 - protein, 14 aa, Homo sapiens
  CDR3 for beta chain variable domain of TCR clone 54369 (TRBV7-2, TRBJ1-1)
CASSFLTGTTEAFF

SEQ ID NO: 108739 - protein, 13 aa, Homo sapiens
  CDR3 for alpha chain variable domain of TCR clone 54370 (TRAV13-1, TRAJ39)
CAASIWAGDMPTF

SEQ ID NO: 108740 - protein, 15 aa, Homo sapiens
  CDR3 for beta chain variable domain of TCR clone 54370 (TRBV7-9, TRBJ1-1)
CASSLLEQGGTEAFF

SEQ ID NO: 108741 - protein, 17 aa, Homo sapiens
  CDR3 for alpha chain variable domain of TCR clone 54371 (TRAV12-2, TRAJ36)
CAVEDNLFFGTGTRLTV

SEQ ID NO: 108742 - protein, 15 aa, Homo sapiens
  CDR3 for beta chain variable domain of TCR clone 54371 (TRBV28, TRBJ2-2)
CASTVAGANTGELFF

SEQ ID NO: 108743 - protein, 12 aa, Homo sapiens
  CDR3 for alpha chain variable domain of TCR clone 54372 (TRAV27, TRAJ42)
RAGGGSQGNLIF

SEQ ID NO: 108744 - protein, 13 aa, Homo sapiens
  CDR3 for beta chain variable domain of TCR clone 54372 (TRBV19, TRBJ2-7)
CASSIRSSYEQYF

SEQ ID NO: 108745 - protein, 17 aa, Homo sapiens
  CDR3 for alpha chain variable domain of TCR clone 54373 (TRAV3, TRAJ6)
CAVRDGPRAGGSYIPTF

SEQ ID NO: 108746 - protein, 14 aa, Homo sapiens
  CDR3 for beta chain variable domain of TCR clone 54373 (TRBV11-2, TRBJ1-2)
CASSLGTANYGYTF

SEQ ID NO: 108747 - protein, 16 aa, Homo sapiens
  CDR3 for alpha chain variable domain of TCR clone 54374 (TRAV16, TRAJ21)
CACGWATTLTNFTLDL

SEQ ID NO: 108748 - protein, 15 aa, Homo sapiens
  CDR3 for beta chain variable domain of TCR clone 54374 (TRBV19, TRBJ2-1)
CASSIQATSYNEQFF

SEQ ID NO: 108749 - protein, 13 aa, Homo sapiens
  CDR3 for alpha chain variable domain of TCR clone 54375 (TRAV2, TRAJ40)
CAVVTSGTYKYIF

SEQ ID NO: 108750 - protein, 13 aa, Homo sapiens
  CDR3 for beta chain variable domain of TCR clone 54375 (TRBV7-9, TRBJ1-1)
CASSLAGVTEAFF

SEQ ID NO: 108751 - protein, 12 aa, Homo sapiens
  CDR3 for alpha chain variable domain of TCR clone 54376 (TRAV12-1, TRAJ16)
CVVTLMARSCSL

SEQ ID NO: 108752 - protein, 11 aa, Homo sapiens
  CDR3 for beta chain variable domain of TCR clone 54376 (TRBV29-1, TRBJ2-5)
CSEDRTGTQYF

SEQ ID NO: 108753 - protein, 14 aa, Homo sapiens
  CDR3 for alpha chain variable domain of TCR clone 54377 (TRAV8-3, TRAJ4)
CAVGASGGYNKLIF

SEQ ID NO: 108754 - protein, 13 aa, Homo sapiens
  CDR3 for beta chain variable domain of TCR clone 54377 (TRBV19, TRBJ1-3)
CASRLSLGNTIYF

SEQ ID NO: 108755 - protein, 15 aa, Homo sapiens
  CDR3 for alpha chain variable domain of TCR clone 54378 (TRAV12-2, TRAJ53)
CAVNGGGGSNYKLTF

SEQ ID NO: 108756 - protein, 17 aa, Homo sapiens
  CDR3 for beta chain variable domain of TCR clone 54378 (TRBV7-3, TRBJ2-3)
CVSSLMKRMRGADTQYF

SEQ ID NO: 108757 - protein, 12 aa, Homo sapiens
  CDR3 for alpha chain variable domain of TCR clone 54379 (TRAV1-1, TRAJ39)
CAVPVVGNMRTF

SEQ ID NO: 108758 - protein, 15 aa, Homo sapiens
  CDR3 for beta chain variable domain of TCR clone 54379 (TRBV19, TRBJ1-6)
CASSTQGAVGSPLHF

SEQ ID NO: 108759 - protein, 15 aa, Homo sapiens
  CDR3 for alpha chain variable domain of TCR clone 54380 (TRAV12-3, TRAJ6)
CAVSATTRGSYIPTF

SEQ ID NO: 108760 - protein, 12 aa, Homo sapiens
  CDR3 for beta chain variable domain of TCR clone 54380 (TRBV20-1, TRBJ1-5)
QCVPQGKSAQHF

SEQ ID NO: 108761 - protein, 13 aa, Homo sapiens
  CDR3 for alpha chain variable domain of TCR clone 54381 (TRAV8-3, TRAJ42)
CARYGGSQGNLIF

SEQ ID NO: 108762 - protein, 14 aa, Homo sapiens
  CDR3 for beta chain variable domain of TCR clone 54381 (TRBV20-1, TRBJ2-1)
CSALDRGTYNGQFF

SEQ ID NO: 108763 - protein, 15 aa, Homo sapiens
  CDR3 for alpha chain variable domain of TCR clone 54382 (TRAV21, TRAJ24)
CAARSSTDSWGNCSL

SEQ ID NO: 108764 - protein, 11 aa, Homo sapiens
  CDR3 for beta chain variable domain of TCR clone 54382 (TRBV11-2, TRBJ2-2)
CASSLPGELFF

SEQ ID NO: 108765 - protein, 12 aa, Homo sapiens
  CDR3 for alpha chain variable domain of TCR clone 54383 (TRAV3, TRAJ39)
FAVIEWSNMLTF

SEQ ID NO: 108766 - protein, 14 aa, Homo sapiens
  CDR3 for beta chain variable domain of TCR clone 54383 (TRBV7-8, TRBJ2-3)
CASSFPDGQDTQYF

SEQ ID NO: 108767 - protein, 12 aa, Homo sapiens
  CDR3 for alpha chain variable domain of TCR clone 54384 (TRAV12-3, TRAJ17)
CAMTFTGNKLTF

SEQ ID NO: 108768 - protein, 16 aa, Homo sapiens
  CDR3 for beta chain variable domain of TCR clone 54384 (TRBV19, TRBJ2-1)
CASSKAGPSSYNEQFF

SEQ ID NO: 108769 - protein, 19 aa, Homo sapiens
  CDR3 for alpha chain variable domain of TCR clone 54385 (TRAV3, TRAJ6)
CAVRARNPSRSGGSYIPTF

SEQ ID NO: 108770 - protein, 15 aa, Homo sapiens
  CDR3 for beta chain variable domain of TCR clone 54385 (TRBV18, TRBJ2-7)
CASSPTFMDSYEQYF

SEQ ID NO: 108771 - protein, 13 aa, Homo sapiens
  CDR3 for alpha chain variable domain of TCR clone 54386 (TRAV13-1, TRAJ39)
CAASKVMQATCSP

SEQ ID NO: 108772 - protein, 16 aa, Homo sapiens
  CDR3 for beta chain variable domain of TCR clone 54386 (TRBV20-1, TRBJ1-4)
CSAPGQGLLTNEKLFF

SEQ ID NO: 108773 - protein, 12 aa, Homo sapiens
  CDR3 for alpha chain variable domain of TCR clone 54387 (TRAV13-2, TRAJ8)
CAPWLGFQKLVF

SEQ ID NO: 108774 - protein, 13 aa, Homo sapiens
  CDR3 for beta chain variable domain of TCR clone 54387 (TRBV19, TRBJ1-5)
CASSMRGYQPQHF

SEQ ID NO: 108775 - protein, 13 aa, Homo sapiens
  CDR3 for alpha chain variable domain of TCR clone 54388 (TRAV2, TRAJ40)
CAVVTSGTYKYIF

SEQ ID NO: 108776 - protein, 14 aa, Homo sapiens
  CDR3 for beta chain variable domain of TCR clone 54388 (TRBV19, TRBJ2-1)
GASPTFVLSGEQFF

SEQ ID NO: 108777 - protein, 13 aa, Homo sapiens
  CDR3 for alpha chain variable domain of TCR clone 54389 (TRAV1-1, TRAJ9)
CAAKNTGGFKTSF

SEQ ID NO: 108778 - protein, 14 aa, Homo sapiens
  CDR3 for beta chain variable domain of TCR clone 54389 (TRBV20-1, TRBJ2-1)
CSAQIGGSANEQFF

SEQ ID NO: 108779 - protein, 18 aa, Homo sapiens
  CDR3 for alpha chain variable domain of TCR clone 54390 (TRAV21, TRAJ52)
CAVRPSPAGGTSYGKPTF

SEQ ID NO: 108780 - protein, 14 aa, Homo sapiens
  CDR3 for beta chain variable domain of TCR clone 54390 (TRBV4-1, TRBJ2-2)
CASSQAVNTGELFF

SEQ ID NO: 108781 - protein, 15 aa, Homo sapiens
  CDR3 for alpha chain variable domain of TCR clone 54391 (TRAV3, TRAJ4)
CAVRDGTGGYNKLIF

SEQ ID NO: 108782 - protein, 16 aa, Homo sapiens
  CDR3 for beta chain variable domain of TCR clone 54391 (TRBV27, TRBJ2-2)
CASSSSGVANTGELFF

SEQ ID NO: 108783 - protein, 17 aa, Homo sapiens
  CDR3 for alpha chain variable domain of TCR clone 54392 (TRAV3, TRAJ12)
CAVRDGGRMDSSYKLIF

SEQ ID NO: 108784 - protein, 14 aa, Homo sapiens
  CDR3 for beta chain variable domain of TCR clone 54392 (TRBV7-9, TRBJ1-2)
CASSRQGADYGYTF

SEQ ID NO: 108785 - protein, 10 aa, Homo sapiens
  CDR3 for alpha chain variable domain of TCR clone 54393 (TRAV27, TRAJ43)
CAGANNDMRF

SEQ ID NO: 108786 - protein, 17 aa, Homo sapiens
  CDR3 for beta chain variable domain of TCR clone 54393 (TRBV13, TRBJ2-3)
CASSLSRVAGGRNTQHF

SEQ ID NO: 108787 - protein, 15 aa, Homo sapiens
  CDR3 for alpha chain variable domain of TCR clone 54394 (TRAV8-3, TRAJ23)
CAVGDRYNQGGKLIF

SEQ ID NO: 108788 - protein, 16 aa, Homo sapiens
  CDR3 for beta chain variable domain of TCR clone 54394 (TRBV19, TRBJ2-1)
CASSKAGPSSYNEQSF

SEQ ID NO: 108789 - protein, 11 aa, Homo sapiens
  CDR3 for alpha chain variable domain of TCR clone 54395 (TRAV1-2, TRAJ20)
CAVANDYKLSF

SEQ ID NO: 108790 - protein, 18 aa, Homo sapiens
  CDR3 for beta chain variable domain of TCR clone 54395 (TRBV20-1, TRBJ2-6)
CSAETTPTHGSGANVLTF

SEQ ID NO: 108791 - protein, 18 aa, Homo sapiens
  CDR3 for alpha chain variable domain of TCR clone 54396 (TRAV12-3, TRAJ52)
CAMSRTNAGGTSSGKLTF

SEQ ID NO: 108792 - protein, 17 aa, Homo sapiens
  CDR3 for beta chain variable domain of TCR clone 54396 (TRBV7-3, TRBJ2-3)
CASSLMKRMRGADTQYF

SEQ ID NO: 108793 - protein, 14 aa, Homo sapiens
  CDR3 for alpha chain variable domain of TCR clone 54397 (TRAV23/DV6, TRAJ27)
CAASRETNAGKSTF

SEQ ID NO: 108794 - protein, 13 aa, Homo sapiens
  CDR3 for beta chain variable domain of TCR clone 54397 (TRBV20-1, TRBJ1-5)
CSASGRGNQPQHF

SEQ ID NO: 108795 - protein, 14 aa, Homo sapiens
  CDR3 for alpha chain variable domain of TCR clone 54398 (TRAV3, TRAJ21)
CAVESQANFNKFYF

SEQ ID NO: 108796 - protein, 12 aa, Homo sapiens
  CDR3 for beta chain variable domain of TCR clone 54398 (TRBV6-3, TRBJ2-7)
CASSLTPYEQHF

SEQ ID NO: 108797 - protein, 13 aa, Homo sapiens
  CDR3 for alpha chain variable domain of TCR clone 54399 (TRAV13-1, TRAJ39)
CSKYSNAGNMLTF

SEQ ID NO: 108798 - protein, 16 aa, Homo sapiens
  CDR3 for beta chain variable domain of TCR clone 54399 (TRBV20-1, TRBJ1-4)
CSDPGQGLLTNEKLFF

SEQ ID NO: 108799 - protein, 15 aa, Homo sapiens
  CDR3 for alpha chain variable domain of TCR clone 54400 (TRAV20, TRAJ21)
CAVEDTTSTNFTLDL

SEQ ID NO: 108800 - protein, 14 aa, Homo sapiens
  CDR3 for beta chain variable domain of TCR clone 54400 (TRBV3-1, TRBJ2-5)
CASSQGPDQETQYF

SEQ ID NO: 108801 - protein, 15 aa, Homo sapiens
  CDR3 for alpha chain variable domain of TCR clone 54401 (TRAV12-3, TRAJ6)
CAMSATSGGSYIPTF

SEQ ID NO: 108802 - protein, 18 aa, Homo sapiens
  CDR3 for beta chain variable domain of TCR clone 54401 (TRBV11-2, TRBJ2-3)
CASSLGGASRGAPNTQYF

SEQ ID NO: 108803 - protein, 14 aa, Homo sapiens
  CDR3 for alpha chain variable domain of TCR clone 54402 (TRAV17, TRAJ57)
CATDPQGGSETLVF

SEQ ID NO: 108804 - protein, 18 aa, Homo sapiens
  CDR3 for beta chain variable domain of TCR clone 54402 (TRBV6-6, TRBJ1-3)
CASSYSKWDSISGNTIYF

SEQ ID NO: 108805 - protein, 12 aa, Homo sapiens
  CDR3 for alpha chain variable domain of TCR clone 54403 (TRAV9-2, TRAJ26)
CALRGYGQNFVF

SEQ ID NO: 108806 - protein, 12 aa, Homo sapiens
  CDR3 for beta chain variable domain of TCR clone 54403 (TRBV11-2, TRBJ2-2)
CASSLGGGELFF

SEQ ID NO: 108807 - protein, 14 aa, Homo sapiens
  CDR3 for alpha chain variable domain of TCR clone 54404 (TRAV12-2, TRAJ3)
CAVKGYSSASKIVF

SEQ ID NO: 108808 - protein, 14 aa, Homo sapiens
  CDR3 for beta chain variable domain of TCR clone 54404 (TRBV6-3, TRBJ1-2)
CASSEGGGSYGYTF

SEQ ID NO: 108809 - protein, 15 aa, Homo sapiens
  CDR3 for alpha chain variable domain of TCR clone 54405 (TRAV12-2, TRAJ43)
CAFDMRFGAGTRLTV

SEQ ID NO: 108810 - protein, 14 aa, Homo sapiens
  CDR3 for beta chain variable domain of TCR clone 54405 (TRBV7-6, TRBJ2-3)
CASSLGTVTDTQYF

SEQ ID NO: 108811 - protein, 13 aa, Homo sapiens
  CDR3 for alpha chain variable domain of TCR clone 54406 (TRAV27, TRAJ16)
CAGAGSDGQKLLF

SEQ ID NO: 108812 - protein, 14 aa, Homo sapiens
  CDR3 for beta chain variable domain of TCR clone 54406 (TRBV11-2, TRBJ1-3)
CASSLAVPGNTIYF

SEQ ID NO: 108813 - protein, 14 aa, Homo sapiens
  CDR3 for alpha chain variable domain of TCR clone 54407 (TRAV12-2, TRAJ17)
CAVLFKAAGNKLTF

SEQ ID NO: 108814 - protein, 12 aa, Homo sapiens
  CDR3 for beta chain variable domain of TCR clone 54407 (TRBV14, TRBJ2-7)
CASSLNQRGQYF

SEQ ID NO: 108815 - protein, 14 aa, Homo sapiens
  CDR3 for alpha chain variable domain of TCR clone 54408 (TRAV26-1, TRAJ34)
CIVRESYNTDKLIF

SEQ ID NO: 108816 - protein, 13 aa, Homo sapiens
  CDR3 for beta chain variable domain of TCR clone 54408 (TRBV19, TRBJ2-1)
CATSRGVYNEQYF

SEQ ID NO: 108817 - protein, 14 aa, Homo sapiens
  CDR3 for alpha chain variable domain of TCR clone 54409 (TRAV8-4, TRAJ17)
CAVSDQAAGNKLTF

SEQ ID NO: 108818 - protein, 13 aa, Homo sapiens
  CDR3 for beta chain variable domain of TCR clone 54409 (TRBV2, TRBJ1-4)
CASSERAGEKLFF

SEQ ID NO: 108819 - protein, 15 aa, Homo sapiens
  CDR3 for alpha chain variable domain of TCR clone 54410 (TRAV26-1, TRAJ29)
SIVRVEGSGNIPLVF

SEQ ID NO: 108820 - protein, 15 aa, Homo sapiens
  CDR3 for beta chain variable domain of TCR clone 54410 (TRBV7-9, TRBJ1-5)
CASSQGHQPNQPQHF

SEQ ID NO: 108821 - protein, 15 aa, Homo sapiens
  CDR3 for alpha chain variable domain of TCR clone 54411 (TRAV12-1, TRAJ44)
CVVFVNTGTASKPTF

SEQ ID NO: 108822 - protein, 17 aa, Homo sapiens
  CDR3 for beta chain variable domain of TCR clone 54411 (TRBV7-8, TRBJ2-6)
CASSAGTGGAGANVLTF

SEQ ID NO: 108823 - protein, 16 aa, Homo sapiens
  CDR3 for alpha chain variable domain of TCR clone 54412 (TRAV12-2, TRAJ50)
CAVGTATNTSYDKVIF

SEQ ID NO: 108824 - protein, 12 aa, Homo sapiens
  CDR3 for beta chain variable domain of TCR clone 54412 (TRBV12-4, TRBJ1-5)
CASSLGRQPQHF

SEQ ID NO: 108825 - protein, 15 aa, Homo sapiens
  CDR3 for alpha chain variable domain of TCR clone 54413 (TRAV36/DV7, TRAJ53)
CAVEGSGGSNYKLTF

SEQ ID NO: 108826 - protein, 16 aa, Homo sapiens
  CDR3 for beta chain variable domain of TCR clone 54413 (TRBV27, TRBJ2-2)
CTSSLSGFWVTGELFF

SEQ ID NO: 108827 - protein, 18 aa, Homo sapiens
  CDR3 for alpha chain variable domain of TCR clone 54414 (TRAV21, TRAJ52)
CAVRPSPAGGTSYGKLTF

SEQ ID NO: 108828 - protein, 17 aa, Homo sapiens
  CDR3 for beta chain variable domain of TCR clone 54414 (TRBV20-1, TRBJ2-1)
CSAPPRLAGTRYNEQFF

SEQ ID NO: 108829 - protein, 18 aa, Homo sapiens
  CDR3 for alpha chain variable domain of TCR clone 54415 (TRAV13-1, TRAJ52)
CAAKNPNAGGTSYGKLTF

SEQ ID NO: 108830 - protein, 13 aa, Homo sapiens
  CDR3 for beta chain variable domain of TCR clone 54415 (TRBV5-5, TRBJ1-2)
CASSFWRGEDYTF

SEQ ID NO: 108831 - protein, 13 aa, Homo sapiens
  CDR3 for alpha chain variable domain of TCR clone 54416 (TRAV2, TRAJ10)
CAVETGGGNKLNF

SEQ ID NO: 108832 - protein, 14 aa, Homo sapiens
  CDR3 for beta chain variable domain of TCR clone 54416 (TRBV20-1, TRBJ2-3)
CSAGGRRGTDTQYF

SEQ ID NO: 108833 - protein, 15 aa, Homo sapiens
  CDR3 for alpha chain variable domain of TCR clone 54417 (TRAV3, TRAJ5)
CAVRDLDTGRRPLTF

SEQ ID NO: 108834 - protein, 13 aa, Homo sapiens
  CDR3 for beta chain variable domain of TCR clone 54417 (TRBV12-4, TRBJ2-7)
CASSPTETYEQYF

SEQ ID NO: 108835 - protein, 13 aa, Homo sapiens
  CDR3 for alpha chain variable domain of TCR clone 54418 (TRAV27, TRAJ8)
CAGGPTGFQKLVF

SEQ ID NO: 108836 - protein, 16 aa, Homo sapiens
  CDR3 for beta chain variable domain of TCR clone 54418 (TRBV5-4, TRBJ2-3)
CASQQPGAGGADTQYF

SEQ ID NO: 108837 - protein, 14 aa, Homo sapiens
  CDR3 for alpha chain variable domain of TCR clone 54419 (TRAV38-1, TRAJ45)
CAYYSGGGADGLTF

SEQ ID NO: 108838 - protein, 20 aa, Homo sapiens
  CDR3 for beta chain variable domain of TCR clone 54419 (TRBV28, TRBJ2-1)
CASTSIGRSPGLAGGNEQFF

SEQ ID NO: 108839 - protein, 16 aa, Homo sapiens
  CDR3 for alpha chain variable domain of TCR clone 54420 (TRAV38-2/DV8, TRAJ52)
CAYRRSGGTSYGKLTF

SEQ ID NO: 108840 - protein, 15 aa, Homo sapiens
  CDR3 for beta chain variable domain of TCR clone 54420 (TRBV28, TRBJ2-1)
CASSIIAGGRSEQFF

SEQ ID NO: 108841 - protein, 14 aa, Homo sapiens
  CDR3 for alpha chain variable domain of TCR clone 54421 (TRAV12-2, TRAJ6)
CASKRGGGSYIPTF

SEQ ID NO: 108842 - protein, 13 aa, Homo sapiens
  CDR3 for beta chain variable domain of TCR clone 54421 (TRBV2, TRBJ1-1)
CASSEGGNTEAFF

SEQ ID NO: 108843 - protein, 18 aa, Homo sapiens
  CDR3 for alpha chain variable domain of TCR clone 54422 (TRAV26-2, TRAJ54)
CILRGVEVGIQGAQKLVF

SEQ ID NO: 108844 - protein, 17 aa, Homo sapiens
  CDR3 for beta chain variable domain of TCR clone 54422 (TRBV20-1, TRBJ1-5)
CSASLSPGQGGNQPQHF

SEQ ID NO: 108845 - protein, 16 aa, Homo sapiens
  CDR3 for alpha chain variable domain of TCR clone 54423 (TRAV3, TRAJ37)
CAVRLHGSGNTGKLIF

SEQ ID NO: 108846 - protein, 16 aa, Homo sapiens
  CDR3 for beta chain variable domain of TCR clone 54423 (TRBV9, TRBJ1-2)
CASSVEEKVSPYGYTF

SEQ ID NO: 108847 - protein, 20 aa, Homo sapiens
  CDR3 for alpha chain variable domain of TCR clone 54424 (TRAV21, TRAJ4)
AASQPGGSATLAGGYNKLIF

SEQ ID NO: 108848 - protein, 19 aa, Homo sapiens
  CDR3 for beta chain variable domain of TCR clone 54424 (TRBV18, TRBJ1-3)
CASSPLSRTGMSSGNTIYF

SEQ ID NO: 108849 - protein, 12 aa, Homo sapiens
  CDR3 for alpha chain variable domain of TCR clone 54425 (TRAV23/DV6, TRAJ11)
CAASWGYSTLTF

SEQ ID NO: 108850 - protein, 15 aa, Homo sapiens
  CDR3 for beta chain variable domain of TCR clone 54425 (TRBV3-1, TRBJ2-2)
CASSQGSGTFGELFF

SEQ ID NO: 108851 - protein, 14 aa, Homo sapiens
  CDR3 for alpha chain variable domain of TCR clone 54426 (TRAV1-2, TRAJ8)
CAVREDTGFQKLVF

SEQ ID NO: 108852 - protein, 17 aa, Homo sapiens
  CDR3 for beta chain variable domain of TCR clone 54426 (TRBV5-4, TRBJ2-1)
CASSSAGGRGPYNEQFF

SEQ ID NO: 108853 - protein, 12 aa, Homo sapiens
  CDR3 for alpha chain variable domain of TCR clone 54427 (TRAV3, TRAJ26)
CAVREYGQNFVF

SEQ ID NO: 108854 - protein, 16 aa, Homo sapiens
  CDR3 for beta chain variable domain of TCR clone 54427 (TRBV11-2, TRBJ1-2)
CASSPSGREANYGYTF

SEQ ID NO: 108855 - protein, 12 aa, Homo sapiens
  CDR3 for alpha chain variable domain of TCR clone 54428 (TRAV12-3, TRAJ17)
CAMTLTGNKLTF

SEQ ID NO: 108856 - protein, 13 aa, Homo sapiens
  CDR3 for beta chain variable domain of TCR clone 54428 (TRBV11-2, TRBJ2-5)
CASSSTGEETQYF

SEQ ID NO: 108857 - protein, 15 aa, Homo sapiens
  CDR3 for alpha chain variable domain of TCR clone 54429 (TRAV17, TRAJ57)
CATGPSQGGSEKLVF

SEQ ID NO: 108858 - protein, 14 aa, Homo sapiens
  CDR3 for beta chain variable domain of TCR clone 54429 (TRBV12-5, TRBJ2-5)
CASVSRTHQETQYF

SEQ ID NO: 108859 - protein, 12 aa, Homo sapiens
  CDR3 for alpha chain variable domain of TCR clone 54430 (TRAV13-2, TRAJ23)
CAERHRGGKLIF

SEQ ID NO: 108860 - protein, 15 aa, Homo sapiens
  CDR3 for beta chain variable domain of TCR clone 54430 (TRBV6-3, TRBJ2-7)
CASSSPGTVSYEQYF

SEQ ID NO: 108861 - protein, 14 aa, Homo sapiens
  CDR3 for alpha chain variable domain of TCR clone 54431 (TRAV8-6, TRAJ53)
CAALVLGSNYKLTF

SEQ ID NO: 108862 - protein, 15 aa, Homo sapiens
  CDR3 for beta chain variable domain of TCR clone 54431 (TRBV5-1, TRBJ2-7)
CASSLDLTSSYEQYF

SEQ ID NO: 108863 - protein, 12 aa, Homo sapiens
  CDR3 for alpha chain variable domain of TCR clone 54432 (TRAV21, TRAJ11)
CAATSGYSTLTF

SEQ ID NO: 108864 - protein, 15 aa, Homo sapiens
  CDR3 for beta chain variable domain of TCR clone 54432 (TRBV28, TRBJ2-2)
CQQFRGGFEHRGLFF

SEQ ID NO: 108865 - protein, 15 aa, Homo sapiens
  CDR3 for alpha chain variable domain of TCR clone 54433 (TRAV12-2, TRAJ56)
CAVNPFTGANSKLPF

SEQ ID NO: 108866 - protein, 13 aa, Homo sapiens
  CDR3 for beta chain variable domain of TCR clone 54433 (TRBV20-1, TRBJ1-2)
CSARDRVYGGYTF

SEQ ID NO: 108867 - protein, 17 aa, Homo sapiens
  CDR3 for alpha chain variable domain of TCR clone 54434 (TRAV13-1, TRAJ28)
CAASPPYSGAGSYQLTF

SEQ ID NO: 108868 - protein, 14 aa, Homo sapiens
  CDR3 for beta chain variable domain of TCR clone 54434 (TRBV24-1, TRBJ1-1)
CATSIPRGDTEASF

SEQ ID NO: 108869 - protein, 10 aa, Homo sapiens
  CDR3 for alpha chain variable domain of TCR clone 54435 (TRAV5, TRAJ34)
CAEDTDKLIS

SEQ ID NO: 108870 - protein, 12 aa, Homo sapiens
  CDR3 for beta chain variable domain of TCR clone 54435 (TRBV11-2, TRBJ2-2)
CASSLGGGELFF

SEQ ID NO: 108871 - protein, 13 aa, Homo sapiens
  CDR3 for alpha chain variable domain of TCR clone 54436 (TRAV27, TRAJ57)
CRSAQGGSAKLVF

SEQ ID NO: 108872 - protein, 11 aa, Homo sapiens
  CDR3 for beta chain variable domain of TCR clone 54436 (TRBV11-2, TRBJ1-1)
CASSINTEAFF

SEQ ID NO: 108873 - protein, 11 aa, Homo sapiens
  CDR3 for alpha chain variable domain of TCR clone 54437 (TRAV2, TRAJ33)
CAVDSNYQLIW

SEQ ID NO: 108874 - protein, 12 aa, Homo sapiens
  CDR3 for beta chain variable domain of TCR clone 54437 (TRBV11-2, TRBJ2-2)
CASSLGGGELLF

SEQ ID NO: 108875 - protein, 17 aa, Homo sapiens
  CDR3 for alpha chain variable domain of TCR clone 54438 (TRAV23/DV6, TRAJ57)
YAASSTLSQGGSEKLVF

SEQ ID NO: 108876 - protein, 14 aa, Homo sapiens
  CDR3 for beta chain variable domain of TCR clone 54438 (TRBV25-1, TRBJ1-1)
CASTHLGGNTEAFF

SEQ ID NO: 108877 - protein, 16 aa, Homo sapiens
  CDR3 for alpha chain variable domain of TCR clone 54439 (TRAV12-1, TRAJ53)
CVVTNVAGGSNYKLTF

SEQ ID NO: 108878 - protein, 16 aa, Homo sapiens
  CDR3 for beta chain variable domain of TCR clone 54439 (TRBV6-6, TRBJ2-3)
CASSYSHAGSTDTQYF

SEQ ID NO: 108879 - protein, 16 aa, Homo sapiens
  CDR3 for alpha chain variable domain of TCR clone 54440 (TRAV16, TRAJ4)
CALSRMFSGGYNKLIF

SEQ ID NO: 108880 - protein, 16 aa, Homo sapiens
  CDR3 for beta chain variable domain of TCR clone 54440 (TRBV24-1, TRBJ2-3)
CATSDPGTGATETQYF

SEQ ID NO: 108881 - protein, 15 aa, Homo sapiens
  CDR3 for alpha chain variable domain of TCR clone 54441 (TRAV35, TRAJ23)
CAGQRGYNQGGKLIF

SEQ ID NO: 108882 - protein, 20 aa, Homo sapiens
  CDR3 for beta chain variable domain of TCR clone 54441 (TRBV7-8, TRBJ2-2)
CASSHLFPGPTIHITGELFF

SEQ ID NO: 108883 - protein, 13 aa, Homo sapiens
  CDR3 for alpha chain variable domain of TCR clone 54442 (TRAV13-1, TRAJ6)
HARGSGGSYIPTF

SEQ ID NO: 108884 - protein, 17 aa, Homo sapiens
  CDR3 for beta chain variable domain of TCR clone 54442 (TRBV7-8, TRBJ2-1)
CASSPPTGTLAYNEQFF

SEQ ID NO: 108885 - protein, 14 aa, Homo sapiens
  CDR3 for alpha chain variable domain of TCR clone 54443 (TRAV1-2, TRAJ16)
CAVNRFSDGQKLLF

SEQ ID NO: 108886 - protein, 15 aa, Homo sapiens
  CDR3 for beta chain variable domain of TCR clone 54443 (TRBV7-9, TRBJ1-6)
CGSSSPGRGNSPLHF

SEQ ID NO: 108887 - protein, 14 aa, Homo sapiens
  CDR3 for alpha chain variable domain of TCR clone 54444 (TRAV12-3, TRAJ9)
CAMSPNTGGFRTIF

SEQ ID NO: 108888 - protein, 13 aa, Homo sapiens
  CDR3 for beta chain variable domain of TCR clone 54444 (TRBV19, TRBJ1-2)
CASSVPGQDGYTF

SEQ ID NO: 108889 - protein, 19 aa, Homo sapiens
  CDR3 for alpha chain variable domain of TCR clone 54445 (TRAV26-1, TRAJ28)
CIVRVAHAYSGAGSYQLTF

SEQ ID NO: 108890 - protein, 13 aa, Homo sapiens
  CDR3 for beta chain variable domain of TCR clone 54445 (TRBV7-9, TRBJ1-2)
CASSLKQNYGYTF

SEQ ID NO: 108891 - protein, 14 aa, Homo sapiens
  CDR3 for alpha chain variable domain of TCR clone 54446 (TRAV12-3, TRAJ10)
SHLPLTGGGNKLTF

SEQ ID NO: 108892 - protein, 14 aa, Homo sapiens
  CDR3 for beta chain variable domain of TCR clone 54446 (TRBV28, TRBJ1-1)
CASSESGRGTEAFF

SEQ ID NO: 108893 - protein, 14 aa, Homo sapiens
  CDR3 for alpha chain variable domain of TCR clone 54447 (TRAV8-1, TRAJ5)
CAVRADTGRRALTF

SEQ ID NO: 108894 - protein, 14 aa, Homo sapiens
  CDR3 for beta chain variable domain of TCR clone 54447 (TRBV19, TRBJ2-1)
CASPTFVLSGEQFF

SEQ ID NO: 108895 - protein, 13 aa, Homo sapiens
  CDR3 for alpha chain variable domain of TCR clone 54448 (TRAV8-6, TRAJ9)
CAVWDTGGFKTIF

SEQ ID NO: 108896 - protein, 12 aa, Homo sapiens
  CDR3 for beta chain variable domain of TCR clone 54448 (TRBV12-5, TRBJ2-5)
CASGQGVETQYF

SEQ ID NO: 108897 - protein, 14 aa, Homo sapiens
  CDR3 for alpha chain variable domain of TCR clone 54449 (TRAV12-3, TRAJ10)
SHLPLTGGGNKLTF

SEQ ID NO: 108898 - protein, 16 aa, Homo sapiens
  CDR3 for beta chain variable domain of TCR clone 54449 (TRBV6-1, TRBJ2-2)
CASSFGQGANTGELFF

SEQ ID NO: 108899 - protein, 17 aa, Homo sapiens
  CDR3 for alpha chain variable domain of TCR clone 54450 (TRAV17, TRAJ52)
CATPPNAGGTSYGKLTF

SEQ ID NO: 108900 - protein, 12 aa, Homo sapiens
  CDR3 for beta chain variable domain of TCR clone 54450 (TRBV11-2, TRBJ2-1)
CASSPGNNEQFF

SEQ ID NO: 108901 - protein, 15 aa, Homo sapiens
  CDR3 for alpha chain variable domain of TCR clone 54451 (TRAV21, TRAJ53)
CATLNSGGSSYKLTF

SEQ ID NO: 108902 - protein, 16 aa, Homo sapiens
  CDR3 for beta chain variable domain of TCR clone 54451 (TRBV9, TRBJ2-1)
CASSVGGGGNYNEQFF

SEQ ID NO: 108903 - protein, 17 aa, Homo sapiens
  CDR3 for alpha chain variable domain of TCR clone 54452 (TRAV3, TRAJ6)
CAFRDGPRAGGSYIPTF

SEQ ID NO: 108904 - protein, 14 aa, Homo sapiens
  CDR3 for beta chain variable domain of TCR clone 54452 (TRBV7-2, TRBJ2-7)
CASSPKTSFYEQYF

SEQ ID NO: 108905 - protein, 13 aa, Homo sapiens
  CDR3 for alpha chain variable domain of TCR clone 54453 (TRAV29/DV5, TRAJ31)
CAASRNNNARLMF

SEQ ID NO: 108906 - protein, 16 aa, Homo sapiens
  CDR3 for beta chain variable domain of TCR clone 54453 (TRBV12-5, TRBJ2-5)
CASGPRTSGNQETQYF

SEQ ID NO: 108907 - protein, 13 aa, Homo sapiens
  CDR3 for alpha chain variable domain of TCR clone 54454 (TRAV27, TRAJ29)
CAGAHSGNTPLVF

SEQ ID NO: 108908 - protein, 12 aa, Homo sapiens
  CDR3 for beta chain variable domain of TCR clone 54454 (TRBV7-8, TRBJ2-7)
CASSLGDREQYF

SEQ ID NO: 108909 - protein, 16 aa, Homo sapiens
  CDR3 for alpha chain variable domain of TCR clone 54455 (TRAV38-1, TRAJ45)
CAFMKGSGGGADGLTS

SEQ ID NO: 108910 - protein, 15 aa, Homo sapiens
  CDR3 for beta chain variable domain of TCR clone 54455 (TRBV7-2, TRBJ2-3)
CASSSTGLETDTQYF

SEQ ID NO: 108911 - protein, 13 aa, Homo sapiens
  CDR3 for alpha chain variable domain of TCR clone 54456 (TRAV41, TRAJ54)
CAVRIQGAQKLVF

SEQ ID NO: 108912 - protein, 16 aa, Homo sapiens
  CDR3 for beta chain variable domain of TCR clone 54456 (TRBV24-1, TRBJ2-1)
CATSGVAGANYNEQFF

SEQ ID NO: 108913 - protein, 13 aa, Homo sapiens
  CDR3 for alpha chain variable domain of TCR clone 54457 (TRAV1-2, TRAJ9)
CAVLNTGGFKTIF

SEQ ID NO: 108914 - protein, 17 aa, Homo sapiens
  CDR3 for beta chain variable domain of TCR clone 54457 (TRBV13, TRBJ2-3)
CASSLSRVAGERNTQYF

SEQ ID NO: 108915 - protein, 11 aa, Homo sapiens
  CDR3 for alpha chain variable domain of TCR clone 54458 (TRAV13-1, TRAJ30)
CAASRDDKIIL

SEQ ID NO: 108916 - protein, 15 aa, Homo sapiens
  CDR3 for beta chain variable domain of TCR clone 54458 (TRBV18, TRBJ1-1)
CASSPSSWVNTEAFF

SEQ ID NO: 108917 - protein, 11 aa, Homo sapiens
  CDR3 for alpha chain variable domain of TCR clone 54459 (TRAV12-2, TRAJ39)
CAVNNMLTFGG

SEQ ID NO: 108918 - protein, 16 aa, Homo sapiens
  CDR3 for beta chain variable domain of TCR clone 54459 (TRBV5-3, TRBJ2-2)
RARSFGTGTNTGELFF

SEQ ID NO: 108919 - protein, 14 aa, Homo sapiens
  CDR3 for alpha chain variable domain of TCR clone 54460 (TRAV2, TRAJ9)
CAVEDRSGGFKTIF

SEQ ID NO: 108920 - protein, 13 aa, Homo sapiens
  CDR3 for beta chain variable domain of TCR clone 54460 (TRBV28, TRBJ2-2)
CASIRESTGELFF

SEQ ID NO: 108921 - protein, 13 aa, Homo sapiens
  CDR3 for alpha chain variable domain of TCR clone 54461 (TRAV13-1, TRAJ11)
CAAVLAGYSTLTF

SEQ ID NO: 108922 - protein, 13 aa, Homo sapiens
  CDR3 for beta chain variable domain of TCR clone 54461 (TRBV4-1, TRBJ2-2)
CASSQENTGELFF

SEQ ID NO: 108923 - protein, 12 aa, Homo sapiens
  CDR3 for alpha chain variable domain of TCR clone 54462 (TRAV5, TRAJ29)
CAESKRETHLLS

SEQ ID NO: 108924 - protein, 15 aa, Homo sapiens
  CDR3 for beta chain variable domain of TCR clone 54462 (TRBV10-1, TRBJ2-3)
CASSATSGGFDTQYF

SEQ ID NO: 108925 - protein, 11 aa, Homo sapiens
  CDR3 for alpha chain variable domain of TCR clone 54463 (TRAV1-2, TRAJ20)
CAVSNDYKLGF

SEQ ID NO: 108926 - protein, 16 aa, Homo sapiens
  CDR3 for beta chain variable domain of TCR clone 54463 (TRBV29-1, TRBJ2-6)
CSVEDITYSGANVLTF

SEQ ID NO: 108927 - protein, 17 aa, Homo sapiens
  CDR3 for alpha chain variable domain of TCR clone 54464 (TRAV12-3, TRAJ18)
CAMIRAGRGSTLGRLYF

SEQ ID NO: 108928 - protein, 14 aa, Homo sapiens
  CDR3 for beta chain variable domain of TCR clone 54464 (TRBV5-7, TRBJ1-6)
CASTPWPADSPLHF

SEQ ID NO: 108929 - protein, 14 aa, Homo sapiens
  CDR3 for alpha chain variable domain of TCR clone 54465 (TRAV12-1, TRAJ30)
CVVNIGNRDDKIIF

SEQ ID NO: 108930 - protein, 14 aa, Homo sapiens
  CDR3 for beta chain variable domain of TCR clone 54465 (TRBV7-9, TRBJ2-5)
CASSPRPSRETQYF

SEQ ID NO: 108931 - protein, 13 aa, Homo sapiens
  CDR3 for alpha chain variable domain of TCR clone 54466 (TRAV13-1, TRAJ6)
CAASKGGSYIPTF

SEQ ID NO: 108932 - protein, 12 aa, Homo sapiens
  CDR3 for beta chain variable domain of TCR clone 54466 (TRBV11-2, TRBJ2-2)
CASSLGGGELFF

SEQ ID NO: 108933 - protein, 13 aa, Homo sapiens
  CDR3 for alpha chain variable domain of TCR clone 54467 (TRAV8-3, TRAJ36)
CAVGATGANNLFF

SEQ ID NO: 108934 - protein, 15 aa, Homo sapiens
  CDR3 for beta chain variable domain of TCR clone 54467 (TRBV7-2, TRBJ1-2)
CVSSPRAGWNYGYTF

SEQ ID NO: 108935 - protein, 14 aa, Homo sapiens
  CDR3 for alpha chain variable domain of TCR clone 54468 (TRAV21, TRAJ38)
CAVMGAGNNRKRIW

SEQ ID NO: 108936 - protein, 13 aa, Homo sapiens
  CDR3 for beta chain variable domain of TCR clone 54468 (TRBV7-3, TRBJ2-5)
CASSIGFFETQYF

SEQ ID NO: 108937 - protein, 14 aa, Homo sapiens
  CDR3 for alpha chain variable domain of TCR clone 54469 (TRAV13-2, TRAJ17)
CAENSKAAGNKLTF

SEQ ID NO: 108938 - protein, 14 aa, Homo sapiens
  CDR3 for beta chain variable domain of TCR clone 54469 (TRBV7-6, TRBJ2-3)
CASSLGTVTDTQYF

SEQ ID NO: 108939 - protein, 12 aa, Homo sapiens
  CDR3 for alpha chain variable domain of TCR clone 54470 (TRAV13-1, TRAJ27)
CAAHTNAGESTF

SEQ ID NO: 108940 - protein, 14 aa, Homo sapiens
  CDR3 for beta chain variable domain of TCR clone 54470 (TRBV19, TRBJ2-2)
CASSGQGIAGELFF

SEQ ID NO: 108941 - protein, 12 aa, Homo sapiens
  CDR3 for alpha chain variable domain of TCR clone 54471 (TRAV21, TRAJ11)
CAATSGYSTLTF

SEQ ID NO: 108942 - protein, 13 aa, Homo sapiens
  CDR3 for beta chain variable domain of TCR clone 54471 (TRBV7-3, TRBJ2-5)
CASSFRGGETQYF

SEQ ID NO: 108943 - protein, 17 aa, Homo sapiens
  CDR3 for alpha chain variable domain of TCR clone 54472 (TRAV3, TRAJ28)
CAVREAYSGAGSYQLTF

SEQ ID NO: 108944 - protein, 15 aa, Homo sapiens
  CDR3 for beta chain variable domain of TCR clone 54472 (TRBV4-1, TRBJ2-5)
CASSQWDLYQETQYF

SEQ ID NO: 108945 - protein, 15 aa, Homo sapiens
  CDR3 for alpha chain variable domain of TCR clone 54473 (TRAV14/DV4, TRAJ33)
CAMREGRDSNYQLIW

SEQ ID NO: 108946 - protein, 16 aa, Homo sapiens
  CDR3 for beta chain variable domain of TCR clone 54473 (TRBV12-5, TRBJ2-5)
CASGPRTSRNQETQYF

SEQ ID NO: 108947 - protein, 12 aa, Homo sapiens
  CDR3 for alpha chain variable domain of TCR clone 54474 (TRAV12-1, TRAJ23)
CAVNIPGGKLIF

SEQ ID NO: 108948 - protein, 15 aa, Homo sapiens
  CDR3 for beta chain variable domain of TCR clone 54474 (TRBV7-2, TRBJ2-7)
CASSLVSSGSYEQYF

SEQ ID NO: 108949 - protein, 13 aa, Homo sapiens
  CDR3 for alpha chain variable domain of TCR clone 54475 (TRAV2, TRAJ24)
CAVTTDSGGKLQF

SEQ ID NO: 108950 - protein, 14 aa, Homo sapiens
  CDR3 for beta chain variable domain of TCR clone 54475 (TRBV13, TRBJ2-5)
CASSLGRGQETQYF

SEQ ID NO: 108951 - protein, 10 aa, Homo sapiens
  CDR3 for alpha chain variable domain of TCR clone 54476 (TRAV1-2, TRAJ18)
CAVRGEAQPW

SEQ ID NO: 108952 - protein, 15 aa, Homo sapiens
  CDR3 for beta chain variable domain of TCR clone 54476 (TRBV9, TRBJ1-6)
CASGVAGTGDSPLHF

SEQ ID NO: 108953 - protein, 18 aa, Homo sapiens
  CDR3 for alpha chain variable domain of TCR clone 54477 (TRAV26-1, TRAJ22)
CIVRVSFWFCKATDLLIL

SEQ ID NO: 108954 - protein, 13 aa, Homo sapiens
  CDR3 for beta chain variable domain of TCR clone 54477 (TRBV7-9, TRBJ1-2)
CASSLKQNYGYTF

SEQ ID NO: 108955 - protein, 16 aa, Homo sapiens
  CDR3 for alpha chain variable domain of TCR clone 54478 (TRAV30, TRAJ24)
CGTEIVDADSWGKFQF

SEQ ID NO: 108956 - protein, 14 aa, Homo sapiens
  CDR3 for beta chain variable domain of TCR clone 54478 (TRBV19, TRBJ2-7)
CASNFRGTFTGMYF

SEQ ID NO: 108957 - protein, 13 aa, Homo sapiens
  CDR3 for alpha chain variable domain of TCR clone 54479 (TRAV21, TRAJ27)
CAARPGNAGKSTF

SEQ ID NO: 108958 - protein, 13 aa, Homo sapiens
  CDR3 for beta chain variable domain of TCR clone 54479 (TRBV7-6, TRBJ1-2)
CASSLVADYGYTF

SEQ ID NO: 108959 - protein, 12 aa, Homo sapiens
  CDR3 for alpha chain variable domain of TCR clone 54480 (TRAV12-3, TRAJ17)
CAMTLTGNKLTF

SEQ ID NO: 108960 - protein, 11 aa, Homo sapiens
  CDR3 for beta chain variable domain of TCR clone 54480 (TRBV7-9, TRBJ2-5)
CASSLGETQYF

SEQ ID NO: 108961 - protein, 13 aa, Homo sapiens
  CDR3 for alpha chain variable domain of TCR clone 54481 (TRAV26-1, TRAJ34)
CIVRGHNTDKLIF

SEQ ID NO: 108962 - protein, 15 aa, Homo sapiens
  CDR3 for beta chain variable domain of TCR clone 54481 (TRBV4-1, TRBJ2-7)
CASSQEWAPSYEQYF

SEQ ID NO: 108963 - protein, 10 aa, Homo sapiens
  CDR3 for alpha chain variable domain of TCR clone 54482 (TRAV1-2, TRAJ23)
CAGQGGKLIF

SEQ ID NO: 108964 - protein, 16 aa, Homo sapiens
  CDR3 for beta chain variable domain of TCR clone 54482 (TRBV5-1, TRBJ1-3)
CASSPWAPSSGNTIYF

SEQ ID NO: 108965 - protein, 13 aa, Homo sapiens
  CDR3 for alpha chain variable domain of TCR clone 54483 (TRAV35, TRAJ42)
CAGFPGSQGNLIF

SEQ ID NO: 108966 - protein, 16 aa, Homo sapiens
  CDR3 for beta chain variable domain of TCR clone 54483 (TRBV28, TRBJ1-4)
CASSPPYRGRSEKLFF

SEQ ID NO: 108967 - protein, 15 aa, Homo sapiens
  CDR3 for alpha chain variable domain of TCR clone 54484 (TRAV14/DV4, TRAJ10)
CAMRELTGGGNRLTF

SEQ ID NO: 108968 - protein, 18 aa, Homo sapiens
  CDR3 for beta chain variable domain of TCR clone 54484 (TRBV7-9, TRBJ2-7)
CASSLTTSGSRTWYEQYL

SEQ ID NO: 108969 - protein, 14 aa, Homo sapiens
  CDR3 for alpha chain variable domain of TCR clone 54485 (TRAV12-2, TRAJ13)
CAVKKTGGYQKVTF

SEQ ID NO: 108970 - protein, 15 aa, Homo sapiens
  CDR3 for beta chain variable domain of TCR clone 54485 (TRBV28, TRBJ2-3)
CASSQELGGTDTQYF

SEQ ID NO: 108971 - protein, 13 aa, Homo sapiens
  CDR3 for alpha chain variable domain of TCR clone 54486 (TRAV8-3, TRAJ42)
CARYGGSQGNLIF

SEQ ID NO: 108972 - protein, 14 aa, Homo sapiens
  CDR3 for beta chain variable domain of TCR clone 54486 (TRBV20-1, TRBJ2-1)
CSALDRGTYNEQLL

SEQ ID NO: 108973 - protein, 11 aa, Homo sapiens
  CDR3 for alpha chain variable domain of TCR clone 54487 (TRAV16, TRAJ33)
CALHSNYQLIW

SEQ ID NO: 108974 - protein, 15 aa, Homo sapiens
  CDR3 for beta chain variable domain of TCR clone 54487 (TRBV4-1, TRBJ2-7)
CASSQQRQGFDEQYF

SEQ ID NO: 108975 - protein, 12 aa, Homo sapiens
  CDR3 for alpha chain variable domain of TCR clone 54488 (TRAV21, TRAJ13)
PGPSGGYQKVTF

SEQ ID NO: 108976 - protein, 13 aa, Homo sapiens
  CDR3 for beta chain variable domain of TCR clone 54488 (TRBV14, TRBJ1-1)
CASSQEAGTEAFF

SEQ ID NO: 108977 - protein, 14 aa, Homo sapiens
  CDR3 for alpha chain variable domain of TCR clone 54489 (TRAV8-4, TRAJ9)
CAVRINTGVFKTIF

SEQ ID NO: 108978 - protein, 15 aa, Homo sapiens
  CDR3 for beta chain variable domain of TCR clone 54489 (TRBV10-2, TRBJ2-6)
CASSEQGTGANVLTF

SEQ ID NO: 108979 - protein, 15 aa, Homo sapiens
  CDR3 for alpha chain variable domain of TCR clone 54490 (TRAV17, TRAJ45)
CATAYSGGGADGLTF

SEQ ID NO: 108980 - protein, 11 aa, Homo sapiens
  CDR3 for beta chain variable domain of TCR clone 54490 (TRBV7-8, TRBJ2-7)
CASSPSLEQYF

SEQ ID NO: 108981 - protein, 15 aa, Homo sapiens
  CDR3 for alpha chain variable domain of TCR clone 54491 (TRAV1-2, TRAJ30)
CAVRPHGNRDDKIIV

SEQ ID NO: 108982 - protein, 13 aa, Homo sapiens
  CDR3 for beta chain variable domain of TCR clone 54491 (TRBV4-1, TRBJ2-7)
CASSQGQAYEQYF

SEQ ID NO: 108983 - protein, 15 aa, Homo sapiens
  CDR3 for alpha chain variable domain of TCR clone 54492 (TRAV3, TRAJ5)
CAVRDRKTGRRALTF

SEQ ID NO: 108984 - protein, 15 aa, Homo sapiens
  CDR3 for beta chain variable domain of TCR clone 54492 (TRBV7-8, TRBJ2-1)
CACSLADSLYNEQFF

SEQ ID NO: 108985 - protein, 15 aa, Homo sapiens
  CDR3 for alpha chain variable domain of TCR clone 54493 (TRAV4, TRAJ39)
CPVGPNNNAGNMLTF

SEQ ID NO: 108986 - protein, 15 aa, Homo sapiens
  CDR3 for beta chain variable domain of TCR clone 54493 (TRBV5-1, TRBJ2-1)
CASSPPRAPYNEQFF

SEQ ID NO: 108987 - protein, 12 aa, Homo sapiens
  CDR3 for alpha chain variable domain of TCR clone 54494 (TRAV3, TRAJ20)
CAVRDHDYKLSF

SEQ ID NO: 108988 - protein, 15 aa, Homo sapiens
  CDR3 for beta chain variable domain of TCR clone 54494 (TRBV9, TRBJ1-6)
CASSVAGTGDSPPHF

SEQ ID NO: 108989 - protein, 11 aa, Homo sapiens
  CDR3 for alpha chain variable domain of TCR clone 54495 (TRAV2, TRAJ13)
CASGGYQKVTF

SEQ ID NO: 108990 - protein, 12 aa, Homo sapiens
  CDR3 for beta chain variable domain of TCR clone 54495 (TRBV5-1, TRBJ1-2)
CASSLAGVGYTF

SEQ ID NO: 108991 - protein, 14 aa, Homo sapiens
  CDR3 for alpha chain variable domain of TCR clone 54496 (TRAV16, TRAJ33)
CALSAMDSNYQLIW

SEQ ID NO: 108992 - protein, 11 aa, Homo sapiens
  CDR3 for beta chain variable domain of TCR clone 54496 (TRBV11-2, TRBJ2-2)
CASSLPGELFF

SEQ ID NO: 108993 - protein, 13 aa, Homo sapiens
  CDR3 for alpha chain variable domain of TCR clone 54497 (TRAV36/DV7, TRAJ49)
CAGDSNTGNQFYF

SEQ ID NO: 108994 - protein, 16 aa, Homo sapiens
  CDR3 for beta chain variable domain of TCR clone 54497 (TRBV5-1, TRBJ1-1)
CASSKTGTEVGTGAFF

SEQ ID NO: 108995 - protein, 14 aa, Homo sapiens
  CDR3 for alpha chain variable domain of TCR clone 54498 (TRAV1-2, TRAJ8)
CAVREDTGFQKLVF

SEQ ID NO: 108996 - protein, 15 aa, Homo sapiens
  CDR3 for beta chain variable domain of TCR clone 54498 (TRBV12-4, TRBJ2-5)
CASSPPTGRQETQYF

SEQ ID NO: 108997 - protein, 12 aa, Homo sapiens
  CDR3 for alpha chain variable domain of TCR clone 54499 (TRAV26-1, TRAJ26)
CIVFIYSQNFVF

SEQ ID NO: 108998 - protein, 13 aa, Homo sapiens
  CDR3 for beta chain variable domain of TCR clone 54499 (TRBV27, TRBJ1-1)
CASSLSIGAEAFF

SEQ ID NO: 108999 - protein, 15 aa, Homo sapiens
  CDR3 for alpha chain variable domain of TCR clone 54500 (TRAV3, TRAJ47)
CAVRDIGEFGNKLVF

SEQ ID NO: 109000 - protein, 14 aa, Homo sapiens
  CDR3 for beta chain variable domain of TCR clone 54500 (TRBV13, TRBJ2-5)
CASSLERVGETQYF

SEQ ID NO: 109001 - protein, 13 aa, Homo sapiens
  CDR3 for alpha chain variable domain of TCR clone 54501 (TRAV12-2, TRAJ39)
CAVNNNAGNMLTF

SEQ ID NO: 109002 - protein, 13 aa, Homo sapiens
  CDR3 for beta chain variable domain of TCR clone 54501 (TRBV2, TRBJ1-5)
CATAGPGNQPQHC

SEQ ID NO: 109003 - protein, 14 aa, Homo sapiens
  CDR3 for alpha chain variable domain of TCR clone 54502 (TRAV29/DV5, TRAJ44)
CAAFLVGTASKLTF

SEQ ID NO: 109004 - protein, 15 aa, Homo sapiens
  CDR3 for beta chain variable domain of TCR clone 54502 (TRBV7-3, TRBJ2-2)
CASSETGRGTGELFF

SEQ ID NO: 109005 - protein, 14 aa, Homo sapiens
  CDR3 for alpha chain variable domain of TCR clone 54503 (TRAV1-2, TRAJ16)
CAVNRFSDGPKLLF

SEQ ID NO: 109006 - protein, 14 aa, Homo sapiens
  CDR3 for beta chain variable domain of TCR clone 54503 (TRBV12-4, TRBJ1-1)
CASSLGTGGTEAFF

SEQ ID NO: 109007 - protein, 10 aa, Homo sapiens
  CDR3 for alpha chain variable domain of TCR clone 54504 (TRAV26-2, TRAJ49)
YILLGNQFYF

SEQ ID NO: 109008 - protein, 13 aa, Homo sapiens
  CDR3 for beta chain variable domain of TCR clone 54504 (TRBV20-1, TRBJ2-7)
CSADPGATYEQYF

SEQ ID NO: 109009 - protein, 12 aa, Homo sapiens
  CDR3 for alpha chain variable domain of TCR clone 54505 (TRAV1-1, TRAJ39)
CAVPEVGNMLTF

SEQ ID NO: 109010 - protein, 13 aa, Homo sapiens
  CDR3 for beta chain variable domain of TCR clone 54505 (TRBV7-9, TRBJ2-1)
CASSSSNFNEQFF

SEQ ID NO: 109011 - protein, 16 aa, Homo sapiens
  CDR3 for alpha chain variable domain of TCR clone 54506 (TRAV23/DV6, TRAJ9)
CAASIGGNTGGFKTIF

SEQ ID NO: 109012 - protein, 20 aa, Homo sapiens
  CDR3 for beta chain variable domain of TCR clone 54506 (TRBV28, TRBJ2-1)
CASTPIGRSPGLAGGNEQFF

SEQ ID NO: 109013 - protein, 13 aa, Homo sapiens
  CDR3 for alpha chain variable domain of TCR clone 54507 (TRAV38-1, TRAJ42)
CARWGGSQGNLIF

SEQ ID NO: 109014 - protein, 14 aa, Homo sapiens
  CDR3 for beta chain variable domain of TCR clone 54507 (TRBV19, TRBJ2-7)
CASSIFAGTYEQYF

SEQ ID NO: 109015 - protein, 14 aa, Homo sapiens
  CDR3 for alpha chain variable domain of TCR clone 54508 (TRAV1-2, TRAJ16)
CAVNRFSDGLKLLF

SEQ ID NO: 109016 - protein, 15 aa, Homo sapiens
  CDR3 for beta chain variable domain of TCR clone 54508 (TRBV9, TRBJ1-6)
CASSVAGTGDSPLHF

SEQ ID NO: 109017 - protein, 14 aa, Homo sapiens
  CDR3 for alpha chain variable domain of TCR clone 54509 (TRAV12-3, TRAJ13)
CAMENSGGYQKVTL

SEQ ID NO: 109018 - protein, 13 aa, Homo sapiens
  CDR3 for beta chain variable domain of TCR clone 54509 (TRBV29-1, TRBJ2-5)
CSARDRVEETQYF

SEQ ID NO: 109019 - protein, 14 aa, Homo sapiens
  CDR3 for alpha chain variable domain of TCR clone 54510 (TRAV13-2, TRAJ43)
CAEIPTYNNNDMRF

SEQ ID NO: 109020 - protein, 15 aa, Homo sapiens
  CDR3 for beta chain variable domain of TCR clone 54510 (TRBV7-9, TRBJ2-2)
CASGPLDTCPGELFF

SEQ ID NO: 109021 - protein, 12 aa, Homo sapiens
  CDR3 for alpha chain variable domain of TCR clone 54511 (TRAV13-1, TRAJ49)
CAAPNTGNQFYF

SEQ ID NO: 109022 - protein, 17 aa, Homo sapiens
  CDR3 for beta chain variable domain of TCR clone 54511 (TRBV25-1, TRBJ2-7)
CASSDARVVFSSCEQYF

SEQ ID NO: 109023 - protein, 12 aa, Homo sapiens
  CDR3 for alpha chain variable domain of TCR clone 54512 (TRAV12-3, TRAJ17)
CALTLTGNKLTF

SEQ ID NO: 109024 - protein, 15 aa, Homo sapiens
  CDR3 for beta chain variable domain of TCR clone 54512 (TRBV20-1, TRBJ2-7)
CSARYRVSGMDEQYF

SEQ ID NO: 109025 - protein, 15 aa, Homo sapiens
  CDR3 for alpha chain variable domain of TCR clone 54513 (TRAV8-3, TRAJ11)
CAVALLNSGYSTLTF

SEQ ID NO: 109026 - protein, 16 aa, Homo sapiens
  CDR3 for beta chain variable domain of TCR clone 54513 (TRBV7-9, TRBJ1-2)
CASSLGFSSGEDGYTF

SEQ ID NO: 109027 - protein, 13 aa, Homo sapiens
  CDR3 for alpha chain variable domain of TCR clone 54514 (TRAV6, TRAJ40)
CALVTSGTYKYIF

SEQ ID NO: 109028 - protein, 14 aa, Homo sapiens
  CDR3 for beta chain variable domain of TCR clone 54514 (TRBV11-2, TRBJ2-5)
CASRPLEGRETQYF

SEQ ID NO: 109029 - protein, 21 aa, Homo sapiens
  CDR3 for alpha chain variable domain of TCR clone 54515 (TRAV1-1, TRAJ6)
CLLLLRCERLERTGGSCIPTF

SEQ ID NO: 109030 - protein, 13 aa, Homo sapiens
  CDR3 for beta chain variable domain of TCR clone 54515 (TRBV10-2, TRBJ2-7)
CASGASGGYEQYF

SEQ ID NO: 109031 - protein, 11 aa, Homo sapiens
  CDR3 for alpha chain variable domain of TCR clone 54516 (TRAV2, TRAJ13)
CASGGYQKVTF

SEQ ID NO: 109032 - protein, 12 aa, Homo sapiens
  CDR3 for beta chain variable domain of TCR clone 54516 (TRBV28, TRBJ2-3)
CASSLYRDTQYF

SEQ ID NO: 109033 - protein, 13 aa, Homo sapiens
  CDR3 for alpha chain variable domain of TCR clone 54517 (TRAV27, TRAJ41)
CAGEGNSGYALNF

SEQ ID NO: 109034 - protein, 14 aa, Homo sapiens
  CDR3 for beta chain variable domain of TCR clone 54517 (TRBV7-2, TRBJ1-1)
CASSCLTGTTEAFF

SEQ ID NO: 109035 - protein, 14 aa, Homo sapiens
  CDR3 for alpha chain variable domain of TCR clone 54518 (TRAV3, TRAJ21)
CAVRDAYNFNKFYF

SEQ ID NO: 109036 - protein, 17 aa, Homo sapiens
  CDR3 for beta chain variable domain of TCR clone 54518 (TRBV20-1, TRBJ1-6)
CSARGGYTVSYNSPLHF

SEQ ID NO: 109037 - protein, 19 aa, Homo sapiens
  CDR3 for alpha chain variable domain of TCR clone 54519 (TRAV1-2, TRAJ26)
CLLPLCCERPDNYGQNFVF

SEQ ID NO: 109038 - protein, 12 aa, Homo sapiens
  CDR3 for beta chain variable domain of TCR clone 54519 (TRBV11-2, TRBJ2-1)
CASSPGNNEQFF

SEQ ID NO: 109039 - protein, 15 aa, Homo sapiens
  CDR3 for alpha chain variable domain of TCR clone 54520 (TRAV14/DV4, TRAJ26)
CAMREGQNYGQNFVF

SEQ ID NO: 109040 - protein, 14 aa, Homo sapiens
  CDR3 for beta chain variable domain of TCR clone 54520 (TRBV7-2, TRBJ1-1)
CASSFLTGTTEAFF

SEQ ID NO: 109041 - protein, 14 aa, Homo sapiens
  CDR3 for alpha chain variable domain of TCR clone 54521 (TRAV12-3, TRAJ56)
CAMSVTGANSKLTF

SEQ ID NO: 109042 - protein, 17 aa, Homo sapiens
  CDR3 for beta chain variable domain of TCR clone 54521 (TRBV13, TRBJ2-3)
CASSLSRVAGGRNTQYF

SEQ ID NO: 109043 - protein, 11 aa, Homo sapiens
  CDR3 for alpha chain variable domain of TCR clone 54522 (TRAV27, TRAJ47)
CRSNQGNKLGF
